United States Patent Application Publication US 2016/0319361 A1 - sequence listing, part 11

SEQ ID NO: 277936 - DNA, 30 bp, Artificial Sequence
  Synthetic oligonucleotide
gcgaaggaaatcactgactatgtgtttgat

SEQ ID NO: 277937 - DNA, 30 bp, Artificial Sequence
  Synthetic oligonucleotide
tgacggaccaactgggatatctgttttgat

SEQ ID NO: 277938 - DNA, 30 bp, Artificial Sequence
  Synthetic oligonucleotide
tggcctggaataggagacggtaaaaaatat

SEQ ID NO: 277939 - DNA, 30 bp, Artificial Sequence
  Synthetic oligonucleotide
gcgtcatcatgttctgtgtctataaaatat

SEQ ID NO: 277940 - DNA, 30 bp, Artificial Sequence
  Synthetic oligonucleotide
cgctttatagtaatcttatgagacaaatat

SEQ ID NO: 277941 - DNA, 30 bp, Artificial Sequence
  Synthetic oligonucleotide
tggtcctcacagcatcagggcccgaaatat

SEQ ID NO: 277942 - DNA, 30 bp, Artificial Sequence
  Synthetic oligonucleotide
atagatcggttactggggttggcgaaatat

SEQ ID NO: 277943 - DNA, 30 bp, Artificial Sequence
  Synthetic oligonucleotide
tgcaatctcaaaggtagtgaagggaaatat

SEQ ID NO: 277944 - DNA, 30 bp, Artificial Sequence
  Synthetic oligonucleotide
gagattcgagccatggttgtgctgaaatat

SEQ ID NO: 277945 - DNA, 30 bp, Artificial Sequence
  Synthetic oligonucleotide
ataaatatatagcacagctcaggtaaatat

SEQ ID NO: 277946 - DNA, 30 bp, Artificial Sequence
  Synthetic oligonucleotide
tgagtgcgcggatgcacgaaagttaaatat

SEQ ID NO: 277947 - DNA, 30 bp, Artificial Sequence
  Synthetic oligonucleotide
gacgatatgcgacacgcatcgggacaatat

SEQ ID NO: 277948 - DNA, 30 bp, Artificial Sequence
  Synthetic oligonucleotide
gatgcgtgataaaggttgtaatgacaatat

SEQ ID NO: 277949 - DNA, 30 bp, Artificial Sequence
  Synthetic oligonucleotide
gcattgtgataatacaatgttgcccaatat

SEQ ID NO: 277950 - DNA, 30 bp, Artificial Sequence
  Synthetic oligonucleotide
ccccagacggcgatctctccctggcaatat

SEQ ID NO: 277951 - DNA, 30 bp, Artificial Sequence
  Synthetic oligonucleotide
ataacgtcctgactggggatcgacgaatat

SEQ ID NO: 277952 - DNA, 30 bp, Artificial Sequence
  Synthetic oligonucleotide
tgcgaagcacttagatcgtgattcgaatat

SEQ ID NO: 277953 - DNA, 30 bp, Artificial Sequence
  Synthetic oligonucleotide
aagcagacgccgcgcctaatggaggaatat

SEQ ID NO: 277954 - DNA, 30 bp, Artificial Sequence
  Synthetic oligonucleotide
gcaaggctaggctttgatataagggaatat

SEQ ID NO: 277955 - DNA, 30 bp, Artificial Sequence
  Synthetic oligonucleotide
ccggagttgggtcggcagaacgtggaatat

SEQ ID NO: 277956 - DNA, 30 bp, Artificial Sequence
  Synthetic oligonucleotide
gacaattatgccctgacttaacttgaatat

SEQ ID NO: 277957 - DNA, 30 bp, Artificial Sequence
  Synthetic oligonucleotide
ctcggcgatgcgcagtgtgtgcttgaatat

SEQ ID NO: 277958 - DNA, 30 bp, Artificial Sequence
  Synthetic oligonucleotide
ggacaagttcccaaaggttgcgttgaatat

SEQ ID NO: 277959 - DNA, 30 bp, Artificial Sequence
  Synthetic oligonucleotide
agacggccaaaccgccacatgctataatat

SEQ ID NO: 277960 - DNA, 30 bp, Artificial Sequence
  Synthetic oligonucleotide
gcggttagacacgtcgcgccaacctaatat

SEQ ID NO: 277961 - DNA, 30 bp, Artificial Sequence
  Synthetic oligonucleotide
gcgatatgaaactcgtctcccaagtaatat

SEQ ID NO: 277962 - DNA, 30 bp, Artificial Sequence
  Synthetic oligonucleotide
cagggagccaatcgtgtattattgtaatat

SEQ ID NO: 277963 - DNA, 30 bp, Artificial Sequence
  Synthetic oligonucleotide
ctgacacactgggaccagtccggttaatat

SEQ ID NO: 277964 - DNA, 30 bp, Artificial Sequence
  Synthetic oligonucleotide
ccgtcgtgcgttcaaacctcgaaaacatat

SEQ ID NO: 277965 - DNA, 30 bp, Artificial Sequence
  Synthetic oligonucleotide
gtgggttggataagggtgagaccaacatat

SEQ ID NO: 277966 - DNA, 30 bp, Artificial Sequence
  Synthetic oligonucleotide
ctggaagaacttgtggttttgggaacatat

SEQ ID NO: 277967 - DNA, 30 bp, Artificial Sequence
  Synthetic oligonucleotide
ttggctcaaatctgggccgaactaacatat

SEQ ID NO: 277968 - DNA, 30 bp, Artificial Sequence
  Synthetic oligonucleotide
atggattaccgagccagtaacctaacatat

SEQ ID NO: 277969 - DNA, 30 bp, Artificial Sequence
  Synthetic oligonucleotide
aacctaacgatcggacgggcgatcacatat

SEQ ID NO: 277970 - DNA, 30 bp, Artificial Sequence
  Synthetic oligonucleotide
tccaaataggtccgtaatttacggacatat

SEQ ID NO: 277971 - DNA, 30 bp, Artificial Sequence
  Synthetic oligonucleotide
ccagcgttggacgactgacataatacatat

SEQ ID NO: 277972 - DNA, 30 bp, Artificial Sequence
  Synthetic oligonucleotide
agtagtgtgcgggtgctttcgtccccatat

SEQ ID NO: 277973 - DNA, 30 bp, Artificial Sequence
  Synthetic oligonucleotide
ttaaagtcataaggaggctatagtccatat

SEQ ID NO: 277974 - DNA, 30 bp, Artificial Sequence
  Synthetic oligonucleotide
ccggcaccggtagctagtttgtgagcatat

SEQ ID NO: 277975 - DNA, 30 bp, Artificial Sequence
  Synthetic oligonucleotide
aagtcaaaaggtcccacctattacgcatat

SEQ ID NO: 277976 - DNA, 30 bp, Artificial Sequence
  Synthetic oligonucleotide
gtaattatggttaataatgaagtggcatat

SEQ ID NO: 277977 - DNA, 30 bp, Artificial Sequence
  Synthetic oligonucleotide
tgtaaagcagttagcgcaattttggcatat

SEQ ID NO: 277978 - DNA, 30 bp, Artificial Sequence
  Synthetic oligonucleotide
gcattgctacgattgaattgtcctgcatat

SEQ ID NO: 277979 - DNA, 30 bp, Artificial Sequence
  Synthetic oligonucleotide
ggtcatgaagaagtcggcccaggtgcatat

SEQ ID NO: 277980 - DNA, 30 bp, Artificial Sequence
  Synthetic oligonucleotide
cggtcccgttgagtatccgtaccatcatat

SEQ ID NO: 277981 - DNA, 30 bp, Artificial Sequence
  Synthetic oligonucleotide
aatgtcacatagacaacatcaatatcatat

SEQ ID NO: 277982 - DNA, 30 bp, Artificial Sequence
  Synthetic oligonucleotide
acggggttgcagcaagcgaggtgctcatat

SEQ ID NO: 277983 - DNA, 30 bp, Artificial Sequence
  Synthetic oligonucleotide
cctggggcagattaaagggagctctcatat

SEQ ID NO: 277984 - DNA, 29 bp, Artificial Sequence
  Synthetic oligonucleotide
cgccgatggcctcggccttgttctcatat

SEQ ID NO: 277985 - DNA, 30 bp, Artificial Sequence
  Synthetic oligonucleotide
tacgctgtgaagacatagtaagagtcatat

SEQ ID NO: 277986 - DNA, 30 bp, Artificial Sequence
  Synthetic oligonucleotide
ggctcgtattcgtatagcgtggtgtcatat

SEQ ID NO: 277987 - DNA, 30 bp, Artificial Sequence
  Synthetic oligonucleotide
tcgtatgcacgggcttcgccatgaagatat

SEQ ID NO: 277988 - DNA, 30 bp, Artificial Sequence
  Synthetic oligonucleotide
aaaactgggtggtaggaggtgttcagatat

SEQ ID NO: 277989 - DNA, 30 bp, Artificial Sequence
  Synthetic oligonucleotide
tcatttttacagagtaggacttatagatat

SEQ ID NO: 277990 - DNA, 30 bp, Artificial Sequence
  Synthetic oligonucleotide
tttggagctagtgaagaccggagtagatat

SEQ ID NO: 277991 - DNA, 30 bp, Artificial Sequence
  Synthetic oligonucleotide
tgtggcttaaaaaaggacttaggtagatat

SEQ ID NO: 277992 - DNA, 30 bp, Artificial Sequence
  Synthetic oligonucleotide
ttggtttgtaatttagaacgaggccgatat

SEQ ID NO: 277993 - DNA, 30 bp, Artificial Sequence
  Synthetic oligonucleotide
gcccatagctggttcgattgtctgcgatat

SEQ ID NO: 277994 - DNA, 30 bp, Artificial Sequence
  Synthetic oligonucleotide
gtacatctcttggcattcatgtctcgatat

SEQ ID NO: 277995 - DNA, 30 bp, Artificial Sequence
  Synthetic oligonucleotide
taatacgagcgatgatcccagtcaggatat

SEQ ID NO: 277996 - DNA, 29 bp, Artificial Sequence
  Synthetic oligonucleotide
taactcggtacggtaatgttagaggatat

SEQ ID NO: 277997 - DNA, 30 bp, Artificial Sequence
  Synthetic oligonucleotide
gaaacagaatgtactgcaaccggaggatat

SEQ ID NO: 277998 - DNA, 30 bp, Artificial Sequence
  Synthetic oligonucleotide
gcgtggtaccatggggttatttacggatat

SEQ ID NO: 277999 - DNA, 30 bp, Artificial Sequence
  Synthetic oligonucleotide
tactgtggaactcatccgttaagcggatat

SEQ ID NO: 278000 - DNA, 30 bp, Artificial Sequence
  Synthetic oligonucleotide
ctacaacataccatccatctactcggatat

SEQ ID NO: 278001 - DNA, 30 bp, Artificial Sequence
  Synthetic oligonucleotide
tactcgggggtaaaaaacatgacatgatat

SEQ ID NO: 278002 - DNA, 30 bp, Artificial Sequence
  Synthetic oligonucleotide
gttcgctgcgagcaagttagaagctgatat

SEQ ID NO: 278003 - DNA, 29 bp, Artificial Sequence
  Synthetic oligonucleotide
gcagtcctagtccgctacgcttctgatat

SEQ ID NO: 278004 - DNA, 30 bp, Artificial Sequence
  Synthetic oligonucleotide
cgagcttaggacccccttacgacgtgatat

SEQ ID NO: 278005 - DNA, 30 bp, Artificial Sequence
  Synthetic oligonucleotide
tgactcccgagatattcataacgaatatat

SEQ ID NO: 278006 - DNA, 30 bp, Artificial Sequence
  Synthetic oligonucleotide
gaggcgcactggaatattccctagatatat

SEQ ID NO: 278007 - DNA, 30 bp, Artificial Sequence
  Synthetic oligonucleotide
gcatccatctatcgactggtagcgatatat

SEQ ID NO: 278008 - DNA, 30 bp, Artificial Sequence
  Synthetic oligonucleotide
aagtcgtccgtaaccaaagtaaggatatat

SEQ ID NO: 278009 - DNA, 30 bp, Artificial Sequence
  Synthetic oligonucleotide
gcgggatgacgcgactatgaatatatatat

SEQ ID NO: 278010 - DNA, 30 bp, Artificial Sequence
  Synthetic oligonucleotide
cactaaaataagtttacagaagaactatat

SEQ ID NO: 278011 - DNA, 30 bp, Artificial Sequence
  Synthetic oligonucleotide
cacgcatatggctcggaccgcgtactatat

SEQ ID NO: 278012 - DNA, 30 bp, Artificial Sequence
  Synthetic oligonucleotide
aacataggaagctgaggtcttacgctatat

SEQ ID NO: 278013 - DNA, 30 bp, Artificial Sequence
  Synthetic oligonucleotide
cctctcaccggggatggtttcaggctatat

SEQ ID NO: 278014 - DNA, 30 bp, Artificial Sequence
  Synthetic oligonucleotide
cgtatgctgttgagtggatatcgtctatat

SEQ ID NO: 278015 - DNA, 30 bp, Artificial Sequence
  Synthetic oligonucleotide
caaaatgcgggagaggaaatatgtctatat

SEQ ID NO: 278016 - DNA, 30 bp, Artificial Sequence
  Synthetic oligonucleotide
tggacgggataatcagggcagattctatat

SEQ ID NO: 278017 - DNA, 30 bp, Artificial Sequence
  Synthetic oligonucleotide
caacatcatgatgaagttctatcagtatat

SEQ ID NO: 278018 - DNA, 30 bp, Artificial Sequence
  Synthetic oligonucleotide
gtccatactggtaccagtacgtgagtatat

SEQ ID NO: 278019 - DNA, 30 bp, Artificial Sequence
  Synthetic oligonucleotide
caagttagacctcgatggctaatagtatat

SEQ ID NO: 278020 - DNA, 30 bp, Artificial Sequence
  Synthetic oligonucleotide
catgacggccacgcccctgagcccgtatat

SEQ ID NO: 278021 - DNA, 30 bp, Artificial Sequence
  Synthetic oligonucleotide
ctgcagtgtatagctttgtggagggtatat

SEQ ID NO: 278022 - DNA, 30 bp, Artificial Sequence
  Synthetic oligonucleotide
acagctgtaaaaccaggcctgtgggtatat

SEQ ID NO: 278023 - DNA, 30 bp, Artificial Sequence
  Synthetic oligonucleotide
atcgcaattcgagtctagtcgttggtatat

SEQ ID NO: 278024 - DNA, 30 bp, Artificial Sequence
  Synthetic oligonucleotide
gagagggcaatcaatcgatagaatgtatat

SEQ ID NO: 278025 - DNA, 30 bp, Artificial Sequence
  Synthetic oligonucleotide
cagactcatttaacgcggaaaactgtatat

SEQ ID NO: 278026 - DNA, 30 bp, Artificial Sequence
  Synthetic oligonucleotide
ctagaatattggttattttctcttgtatat

SEQ ID NO: 278027 - DNA, 30 bp, Artificial Sequence
  Synthetic oligonucleotide
agcgtgtgagctaagtaataaaaattatat

SEQ ID NO: 278028 - DNA, 30 bp, Artificial Sequence
  Synthetic oligonucleotide
gatcgaatgtatcaggaatctctattatat

SEQ ID NO: 278029 - DNA, 30 bp, Artificial Sequence
  Synthetic oligonucleotide
gctaacatttccatcggggtggacttatat

SEQ ID NO: 278030 - DNA, 30 bp, Artificial Sequence
  Synthetic oligonucleotide
gtcgtcgtatactcaatctgtgacttatat

SEQ ID NO: 278031 - DNA, 30 bp, Artificial Sequence
  Synthetic oligonucleotide
ttgtgggagactatgcatggttacttatat

SEQ ID NO: 278032 - DNA, 30 bp, Artificial Sequence
  Synthetic oligonucleotide
ctcagttatgcaacagggggcttgttatat

SEQ ID NO: 278033 - DNA, 30 bp, Artificial Sequence
  Synthetic oligonucleotide
acggcaaccgttctctttcacaatttatat

SEQ ID NO: 278034 - DNA, 30 bp, Artificial Sequence
  Synthetic oligonucleotide
gcgcaaggattgtgcacggggtgtttatat

SEQ ID NO: 278035 - DNA, 30 bp, Artificial Sequence
  Synthetic oligonucleotide
aggactaggcctagtgttgagattttatat

SEQ ID NO: 278036 - DNA, 30 bp, Artificial Sequence
  Synthetic oligonucleotide
gtaaaaagggaggtagtgagaccaaactat

SEQ ID NO: 278037 - DNA, 30 bp, Artificial Sequence
  Synthetic oligonucleotide
catgctatcgaggggcataatgacaactat

SEQ ID NO: 278038 - DNA, 30 bp, Artificial Sequence
  Synthetic oligonucleotide
atgagggatctccaaaggagaatcaactat

SEQ ID NO: 278039 - DNA, 30 bp, Artificial Sequence
  Synthetic oligonucleotide
gggtcacccgtacaacccagacgtaactat

SEQ ID NO: 278040 - DNA, 30 bp, Artificial Sequence
  Synthetic oligonucleotide
ggcatactctttcaagcgaggggtaactat

SEQ ID NO: 278041 - DNA, 30 bp, Artificial Sequence
  Synthetic oligonucleotide
tgacataaaaatgcaccaatgctccactat

SEQ ID NO: 278042 - DNA, 30 bp, Artificial Sequence
  Synthetic oligonucleotide
catggaattaagacgaactaattgcactat

SEQ ID NO: 278043 - DNA, 30 bp, Artificial Sequence
  Synthetic oligonucleotide
tgtagaaacgctcactctctgtatcactat

SEQ ID NO: 278044 - DNA, 30 bp, Artificial Sequence
  Synthetic oligonucleotide
gagccaatacggtcgttttctcctcactat

SEQ ID NO: 278045 - DNA, 30 bp, Artificial Sequence
  Synthetic oligonucleotide
gggtgcatgatataaagcgtttaagactat

SEQ ID NO: 278046 - DNA, 30 bp, Artificial Sequence
  Synthetic oligonucleotide
atcgaacttggtgtgacacagagagactat

SEQ ID NO: 278047 - DNA, 31 bp, Artificial Sequence
  Synthetic oligonucleotide
gctcaggtgttgaaacgttgaagacgactat

SEQ ID NO: 278048 - DNA, 30 bp, Artificial Sequence
  Synthetic oligonucleotide
tgttaggtttggtcacatagcgacgactat

SEQ ID NO: 278049 - DNA, 30 bp, Artificial Sequence
  Synthetic oligonucleotide
ggtatctggatgtttcgtcacaccgactat

SEQ ID NO: 278050 - DNA, 30 bp, Artificial Sequence
  Synthetic oligonucleotide
cccctgaaatccacaattatacatgactat

SEQ ID NO: 278051 - DNA, 30 bp, Artificial Sequence
  Synthetic oligonucleotide
cgcttcgaccctccgatgaaacgtgactat

SEQ ID NO: 278052 - DNA, 30 bp, Artificial Sequence
  Synthetic oligonucleotide
ctgaaggatcgaccattcggttgatactat

SEQ ID NO: 278053 - DNA, 30 bp, Artificial Sequence
  Synthetic oligonucleotide
aatgatccgcccagggggattacctactat

SEQ ID NO: 278054 - DNA, 30 bp, Artificial Sequence
  Synthetic oligonucleotide
accagataatatgctatcggatcctactat

SEQ ID NO: 278055 - DNA, 30 bp, Artificial Sequence
  Synthetic oligonucleotide
acattgtgatgcttttaaagcgtctactat

SEQ ID NO: 278056 - DNA, 30 bp, Artificial Sequence
  Synthetic oligonucleotide
tgaacgtgtacccccccatatctttactat

SEQ ID NO: 278057 - DNA, 30 bp, Artificial Sequence
  Synthetic oligonucleotide
ttggggaaggtctgtgggtagccaacctat

SEQ ID NO: 278058 - DNA, 30 bp, Artificial Sequence
  Synthetic oligonucleotide
tcccttacgtatagtccccgtttaacctat

SEQ ID NO: 278059 - DNA, 30 bp, Artificial Sequence
  Synthetic oligonucleotide
taggggcttggcgatgttgatgtgacctat

SEQ ID NO: 278060 - DNA, 30 bp, Artificial Sequence
  Synthetic oligonucleotide
ctttagacatcggcaaggcatcgaccctat

SEQ ID NO: 278061 - DNA, 30 bp, Artificial Sequence
  Synthetic oligonucleotide
aaaacaccaggtcagggacgtaccccctat

SEQ ID NO: 278062 - DNA, 30 bp, Artificial Sequence
  Synthetic oligonucleotide
ccgtgcccacccagcgcaggtaaagcctat

SEQ ID NO: 278063 - DNA, 30 bp, Artificial Sequence
  Synthetic oligonucleotide
tacactcagatgggatttgtagtagcctat

SEQ ID NO: 278064 - DNA, 30 bp, Artificial Sequence
  Synthetic oligonucleotide
ggtatgatattttgttgtggctaggcctat

SEQ ID NO: 278065 - DNA, 31 bp, Artificial Sequence
  Synthetic oligonucleotide
agcaatataagataggtccgaaagggcctat

SEQ ID NO: 278066 - DNA, 30 bp, Artificial Sequence
  Synthetic oligonucleotide
cgaattgatttccatcgcctttgggcctat

SEQ ID NO: 278067 - DNA, 31 bp, Artificial Sequence
  Synthetic oligonucleotide
ttatgcatttgttagatagattgtggcctat

SEQ ID NO: 278068 - DNA, 30 bp, Artificial Sequence
  Synthetic oligonucleotide
cctcccctcacggaattttgttgtgcctat

SEQ ID NO: 278069 - DNA, 30 bp, Artificial Sequence
  Synthetic oligonucleotide
tctgtgtgccgatgatcatatggatcctat

SEQ ID NO: 278070 - DNA, 30 bp, Artificial Sequence
  Synthetic oligonucleotide
aaaatcgtaagtcaagcacggacctcctat

SEQ ID NO: 278071 - DNA, 30 bp, Artificial Sequence
  Synthetic oligonucleotide
aatgccagaattcaatagtctaggtcctat

SEQ ID NO: 278072 - DNA, 30 bp, Artificial Sequence
  Synthetic oligonucleotide
ttgttgtgttctctttgtgtgttttcctat

SEQ ID NO: 278073 - DNA, 30 bp, Artificial Sequence
  Synthetic oligonucleotide
agtggtattgaagggcgatgcaaaagctat

SEQ ID NO: 278074 - DNA, 30 bp, Artificial Sequence
  Synthetic oligonucleotide
gggtcggggcggctcatactacaaagctat

SEQ ID NO: 278075 - DNA, 30 bp, Artificial Sequence
  Synthetic oligonucleotide
cgttaggaaccctggatttttcggagctat

SEQ ID NO: 278076 - DNA, 30 bp, Artificial Sequence
  Synthetic oligonucleotide
tacggagcacaagatatgcccgctagctat

SEQ ID NO: 278077 - DNA, 30 bp, Artificial Sequence
  Synthetic oligonucleotide
tatgttggcatcagagtcaacgaacgctat

SEQ ID NO: 278078 - DNA, 30 bp, Artificial Sequence
  Synthetic oligonucleotide
attgtgaagggtaaaggggcacgacgctat

SEQ ID NO: 278079 - DNA, 30 bp, Artificial Sequence
  Synthetic oligonucleotide
taaatgcggtcccggatgtatttacgctat

SEQ ID NO: 278080 - DNA, 30 bp, Artificial Sequence
  Synthetic oligonucleotide
ttgctgttcaatgcattcgctatgcgctat

SEQ ID NO: 278081 - DNA, 30 bp, Artificial Sequence
  Synthetic oligonucleotide
agtctcgctataatttcggctcatcgctat

SEQ ID NO: 278082 - DNA, 30 bp, Artificial Sequence
  Synthetic oligonucleotide
tattggtaagacgatatagtgtttcgctat

SEQ ID NO: 278083 - DNA, 30 bp, Artificial Sequence
  Synthetic oligonucleotide
ctaatgttttgaggaatgcagagaggctat

SEQ ID NO: 278084 - DNA, 30 bp, Artificial Sequence
  Synthetic oligonucleotide
caagatagataaacgttgctgtgaggctat

SEQ ID NO: 278085 - DNA, 30 bp, Artificial Sequence
  Synthetic oligonucleotide
gtatcttcactgcggatatcagacggctat

SEQ ID NO: 278086 - DNA, 30 bp, Artificial Sequence
  Synthetic oligonucleotide
gtggaaccgcggatctgttgggggggctat

SEQ ID NO: 278087 - DNA, 30 bp, Artificial Sequence
  Synthetic oligonucleotide
tcttatccaacagtaatcgataaatgctat

SEQ ID NO: 278088 - DNA, 30 bp, Artificial Sequence
  Synthetic oligonucleotide
aaaatggcttagtaccctgatagctgctat

SEQ ID NO: 278089 - DNA, 30 bp, Artificial Sequence
  Synthetic oligonucleotide
gtaatagcgcctacgtaccgatcttgctat

SEQ ID NO: 278090 - DNA, 30 bp, Artificial Sequence
  Synthetic oligonucleotide
tctcgtttgaatgtcaagtgatcttgctat

SEQ ID NO: 278091 - DNA, 30 bp, Artificial Sequence
  Synthetic oligonucleotide
cctttccgggaagaccgaacggtcatctat

SEQ ID NO: 278092 - DNA, 30 bp, Artificial Sequence
  Synthetic oligonucleotide
tgatggggccgaggcaggaatgatatctat

SEQ ID NO: 278093 - DNA, 30 bp, Artificial Sequence
  Synthetic oligonucleotide
acaccagcgacattcgtgactggtatctat

SEQ ID NO: 278094 - DNA, 30 bp, Artificial Sequence
  Synthetic oligonucleotide
tcctcgatgtgcaaaacagcgggagtctat

SEQ ID NO: 278095 - DNA, 30 bp, Artificial Sequence
  Synthetic oligonucleotide
ttccatatcgaatatggcgatggcgtctat

SEQ ID NO: 278096 - DNA, 30 bp, Artificial Sequence
  Synthetic oligonucleotide
tcttgacagcggagtcatccgtaggtctat

SEQ ID NO: 278097 - DNA, 30 bp, Artificial Sequence
  Synthetic oligonucleotide
ggcgtgggggctactacgtaggcggtctat

SEQ ID NO: 278098 - DNA, 30 bp, Artificial Sequence
  Synthetic oligonucleotide
tgcccaaaggtatatgcattaggggtctat

SEQ ID NO: 278099 - DNA, 30 bp, Artificial Sequence
  Synthetic oligonucleotide
tttgctgagctagtagatcatgatgtctat

SEQ ID NO: 278100 - DNA, 30 bp, Artificial Sequence
  Synthetic oligonucleotide
gcatgcagactggatagaagtggtgtctat

SEQ ID NO: 278101 - DNA, 30 bp, Artificial Sequence
  Synthetic oligonucleotide
ggtggtccgaccacagctctcgacttctat

SEQ ID NO: 278102 - DNA, 30 bp, Artificial Sequence
  Synthetic oligonucleotide
attgatcgatgtgtcggaagtgacttctat

SEQ ID NO: 278103 - DNA, 30 bp, Artificial Sequence
  Synthetic oligonucleotide
tgggcagtataactcgaacagtagttctat

SEQ ID NO: 278104 - DNA, 30 bp, Artificial Sequence
  Synthetic oligonucleotide
gtatagcacactcttaggagtcaaaagtat

SEQ ID NO: 278105 - DNA, 30 bp, Artificial Sequence
  Synthetic oligonucleotide
cgtaagcggtacggcctagtcaagaagtat

SEQ ID NO: 278106 - DNA, 30 bp, Artificial Sequence
  Synthetic oligonucleotide
tgtaggttgccaagtctataacggaagtat

SEQ ID NO: 278107 - DNA, 30 bp, Artificial Sequence
  Synthetic oligonucleotide
ctgcttgagtcatccgcagacgggaagtat

SEQ ID NO: 278108 - DNA, 30 bp, Artificial Sequence
  Synthetic oligonucleotide
tgtgggttaccacctacactaatgaagtat

SEQ ID NO: 278109 - DNA, 30 bp, Artificial Sequence
  Synthetic oligonucleotide
gcttcggaccatagtacgggcattaagtat

SEQ ID NO: 278110 - DNA, 30 bp, Artificial Sequence
  Synthetic oligonucleotide
gcgctaaattatgggccgttcattaagtat

SEQ ID NO: 278111 - DNA, 30 bp, Artificial Sequence
  Synthetic oligonucleotide
tctgatatacgcaatggcacgtcacagtat

SEQ ID NO: 278112 - DNA, 30 bp, Artificial Sequence
  Synthetic oligonucleotide
actagacggtttatctgtcggcgacagtat

SEQ ID NO: 278113 - DNA, 30 bp, Artificial Sequence
  Synthetic oligonucleotide
cttaagcgacgcctccgtatcagccagtat

SEQ ID NO: 278114 - DNA, 30 bp, Artificial Sequence
  Synthetic oligonucleotide
cacaacttacagggtgcgtcttcgcagtat

SEQ ID NO: 278115 - DNA, 30 bp, Artificial Sequence
  Synthetic oligonucleotide
agcgggttacaaatagcaacgtggcagtat

SEQ ID NO: 278116 - DNA, 30 bp, Artificial Sequence
  Synthetic oligonucleotide
taaacggggtaactgtaagatttgcagtat

SEQ ID NO: 278117 - DNA, 30 bp, Artificial Sequence
  Synthetic oligonucleotide
aactgaaggggaggtgcgggatctcagtat

SEQ ID NO: 278118 - DNA, 30 bp, Artificial Sequence
  Synthetic oligonucleotide
gcacaggacatgtaatctccacttcagtat

SEQ ID NO: 278119 - DNA, 30 bp, Artificial Sequence
  Synthetic oligonucleotide
caccacggcgggtgtacgggtgttcagtat

SEQ ID NO: 278120 - DNA, 30 bp, Artificial Sequence
  Synthetic oligonucleotide
cagcatgaatacgctccgcactcagagtat

SEQ ID NO: 278121 - DNA, 30 bp, Artificial Sequence
  Synthetic oligonucleotide
gcggcgtccttgcaaccgcgtaacgagtat

SEQ ID NO: 278122 - DNA, 30 bp, Artificial Sequence
  Synthetic oligonucleotide
cgcagtggctcacacgggcaccacgagtat

SEQ ID NO: 278123 - DNA, 30 bp, Artificial Sequence
  Synthetic oligonucleotide
cagcgtcgcgggtgcaaatgccacgagtat

SEQ ID NO: 278124 - DNA, 30 bp, Artificial Sequence
  Synthetic oligonucleotide
caattcaggaccgttaccccttccgagtat

SEQ ID NO: 278125 - DNA, 30 bp, Artificial Sequence
  Synthetic oligonucleotide
aagatggcatgttgaattgaggtcgagtat

SEQ ID NO: 278126 - DNA, 30 bp, Artificial Sequence
  Synthetic oligonucleotide
cgtttagagatgtggcagcttcaatagtat

SEQ ID NO: 278127 - DNA, 30 bp, Artificial Sequence
  Synthetic oligonucleotide
cagggcctccagtaaagtaccttatagtat

SEQ ID NO: 278128 - DNA, 30 bp, Artificial Sequence
  Synthetic oligonucleotide
gcgttttaaccatcgacgaagggctagtat

SEQ ID NO: 278129 - DNA, 30 bp, Artificial Sequence
  Synthetic oligonucleotide
taaacgcagggggaacattggaggtagtat

SEQ ID NO: 278130 - DNA, 30 bp, Artificial Sequence
  Synthetic oligonucleotide
atcgtcagtaccgatctgccgttgtagtat

SEQ ID NO: 278131 - DNA, 30 bp, Artificial Sequence
  Synthetic oligonucleotide
ccggtataactgagtgggcttgattagtat

SEQ ID NO: 278132 - DNA, 30 bp, Artificial Sequence
  Synthetic oligonucleotide
ggattgtggccgacagtgttatcttagtat

SEQ ID NO: 278133 - DNA, 30 bp, Artificial Sequence
  Synthetic oligonucleotide
agtcacgtaggagcgctacatgcaacgtat

SEQ ID NO: 278134 - DNA, 30 bp, Artificial Sequence
  Synthetic oligonucleotide
gatttacgtcggatcgtggctataacgtat

SEQ ID NO: 278135 - DNA, 30 bp, Artificial Sequence
  Synthetic oligonucleotide
ccttgacgtcctacatccgattacacgtat

SEQ ID NO: 278136 - DNA, 30 bp, Artificial Sequence
  Synthetic oligonucleotide
tgcggttcagtagtggcgtcgttcacgtat

SEQ ID NO: 278137 - DNA, 30 bp, Artificial Sequence
  Synthetic oligonucleotide
tgcacggtttctgtcggtcatgttacgtat

SEQ ID NO: 278138 - DNA, 30 bp, Artificial Sequence
  Synthetic oligonucleotide
aacctctgcaccaacaggatatgaccgtat

SEQ ID NO: 278139 - DNA, 30 bp, Artificial Sequence
  Synthetic oligonucleotide
ccatgcgatacgccgaacataagcccgtat

SEQ ID NO: 278140 - DNA, 30 bp, Artificial Sequence
  Synthetic oligonucleotide
attatgcaaaagggtggtataactccgtat

SEQ ID NO: 278141 - DNA, 30 bp, Artificial Sequence
  Synthetic oligonucleotide
ggtaggacgttaggctgctcgaccgcgtat

SEQ ID NO: 278142 - DNA, 30 bp, Artificial Sequence
  Synthetic oligonucleotide
tccttcacgggtaggcaagatctcgcgtat

SEQ ID NO: 278143 - DNA, 30 bp, Artificial Sequence
  Synthetic oligonucleotide
cagtgtaatgccttcataggaaaggcgtat

SEQ ID NO: 278144 - DNA, 30 bp, Artificial Sequence
  Synthetic oligonucleotide
gatattgactttaattaaggacactcgtat

SEQ ID NO: 278145 - DNA, 30 bp, Artificial Sequence
  Synthetic oligonucleotide
cataggcaccggcctaatatcaattcgtat

SEQ ID NO: 278146 - DNA, 30 bp, Artificial Sequence
  Synthetic oligonucleotide
agccctcaagtccttgagcttgcttcgtat

SEQ ID NO: 278147 - DNA, 30 bp, Artificial Sequence
  Synthetic oligonucleotide
ggagcataaatgtacaagatacgttcgtat

SEQ ID NO: 278148 - DNA, 30 bp, Artificial Sequence
  Synthetic oligonucleotide
atgggacagtatgctgcccggaacaggtat

SEQ ID NO: 278149 - DNA, 30 bp, Artificial Sequence
  Synthetic oligonucleotide
aaccgtattcctcgcgtgtgcgacaggtat

SEQ ID NO: 278150 - DNA, 30 bp, Artificial Sequence
  Synthetic oligonucleotide
ttgatccgttcgtgtatgggtgccaggtat

SEQ ID NO: 278151 - DNA, 30 bp, Artificial Sequence
  Synthetic oligonucleotide
agcatttccaggcaatcccggtccaggtat

SEQ ID NO: 278152 - DNA, 30 bp, Artificial Sequence
  Synthetic oligonucleotide
cgtacacttttcctcgtgcctttcaggtat

SEQ ID NO: 278153 - DNA, 30 bp, Artificial Sequence
  Synthetic oligonucleotide
ggggcgcgcttgctgtattaaccgaggtat

SEQ ID NO: 278154 - DNA, 30 bp, Artificial Sequence
  Synthetic oligonucleotide
accactcgtcagtccacaatacataggtat

SEQ ID NO: 278155 - DNA, 30 bp, Artificial Sequence
  Synthetic oligonucleotide
gccgacatgtgagattcttgatctaggtat

SEQ ID NO: 278156 - DNA, 30 bp, Artificial Sequence
  Synthetic oligonucleotide
cacgaatgtcatagagttcaaggacggtat

SEQ ID NO: 278157 - DNA, 30 bp, Artificial Sequence
  Synthetic oligonucleotide
gaaggtttagatgaattttccaaccggtat

SEQ ID NO: 278158 - DNA, 30 bp, Artificial Sequence
  Synthetic oligonucleotide
cttacccgcctggagtagagcacccggtat

SEQ ID NO: 278159 - DNA, 30 bp, Artificial Sequence
  Synthetic oligonucleotide
gaacgccgatcgtaccgttaaagtcggtat

SEQ ID NO: 278160 - DNA, 30 bp, Artificial Sequence
  Synthetic oligonucleotide
aactcggcccgcaccttcaagattcggtat

SEQ ID NO: 278161 - DNA, 30 bp, Artificial Sequence
  Synthetic oligonucleotide
aagcttaatgagatgttccaattagggtat

SEQ ID NO: 278162 - DNA, 30 bp, Artificial Sequence
  Synthetic oligonucleotide
gcatgtaccgattccaaactgttagggtat

SEQ ID NO: 278163 - DNA, 30 bp, Artificial Sequence
  Synthetic oligonucleotide
aacaccactccgtcttcctccgcggggtat

SEQ ID NO: 278164 - DNA, 30 bp, Artificial Sequence
  Synthetic oligonucleotide
cgagttcagagaggttatgttgatgggtat

SEQ ID NO: 278165 - DNA, 30 bp, Artificial Sequence
  Synthetic oligonucleotide
aaatcgagtcattcgatatttccatggtat

SEQ ID NO: 278166 - DNA, 30 bp, Artificial Sequence
  Synthetic oligonucleotide
tggcagagatcgtccaacaccgtatggtat

SEQ ID NO: 278167 - DNA, 30 bp, Artificial Sequence
  Synthetic oligonucleotide
caaaatataagcgtacggcgaatctggtat

SEQ ID NO: 278168 - DNA, 30 bp, Artificial Sequence
  Synthetic oligonucleotide
gcattagtcactccaaagagggtctggtat

SEQ ID NO: 278169 - DNA, 30 bp, Artificial Sequence
  Synthetic oligonucleotide
ttacgaacggagcggaggttgcaaatgtat

SEQ ID NO: 278170 - DNA, 30 bp, Artificial Sequence
  Synthetic oligonucleotide
aaaaggtctggaatgaccttcgacatgtat

SEQ ID NO: 278171 - DNA, 30 bp, Artificial Sequence
  Synthetic oligonucleotide
acatacgtgacggacgaggaccggatgtat

SEQ ID NO: 278172 - DNA, 30 bp, Artificial Sequence
  Synthetic oligonucleotide
ctccatgttagacatggtgtcatgatgtat

SEQ ID NO: 278173 - DNA, 30 bp, Artificial Sequence
  Synthetic oligonucleotide
cgtccgataatgttgcatgacctgatgtat

SEQ ID NO: 278174 - DNA, 30 bp, Artificial Sequence
  Synthetic oligonucleotide
gcgttatgaacctacagcatatgtatgtat

SEQ ID NO: 278175 - DNA, 30 bp, Artificial Sequence
  Synthetic oligonucleotide
attatagcaagatcaccgtcggaactgtat

SEQ ID NO: 278176 - DNA, 30 bp, Artificial Sequence
  Synthetic oligonucleotide
gaggggagttgatcaacccagtatctgtat

SEQ ID NO: 278177 - DNA, 31 bp, Artificial Sequence
  Synthetic oligonucleotide
ggccggttacacatgtctgggcggtctgtat

SEQ ID NO: 278178 - DNA, 30 bp, Artificial Sequence
  Synthetic oligonucleotide
cgctaggcacccggccgtcgaaacgtgtat

SEQ ID NO: 278179 - DNA, 30 bp, Artificial Sequence
  Synthetic oligonucleotide
ctggcacttgtggagcgctgatacgtgtat

SEQ ID NO: 278180 - DNA, 30 bp, Artificial Sequence
  Synthetic oligonucleotide
gaactaccaccgcgccgtgattcggtgtat

SEQ ID NO: 278181 - DNA, 30 bp, Artificial Sequence
  Synthetic oligonucleotide
gcccgaagctctacgaacgagttggtgtat

SEQ ID NO: 278182 - DNA, 30 bp, Artificial Sequence
  Synthetic oligonucleotide
tcgatccggctcaggtttcctggtgtgtat

SEQ ID NO: 278183 - DNA, 30 bp, Artificial Sequence
  Synthetic oligonucleotide
tcttatcttttgtgttttcctcttgtgtat

SEQ ID NO: 278184 - DNA, 30 bp, Artificial Sequence
  Synthetic oligonucleotide
agggtccgaggcggcgagccctcattgtat

SEQ ID NO: 278185 - DNA, 30 bp, Artificial Sequence
  Synthetic oligonucleotide
attccgttgacaatagtgtcaagattgtat

SEQ ID NO: 278186 - DNA, 30 bp, Artificial Sequence
  Synthetic oligonucleotide
gtgtgatatcacaagtgtactatcttgtat

SEQ ID NO: 278187 - DNA, 30 bp, Artificial Sequence
  Synthetic oligonucleotide
catgtaataactctctatcgcgtgttgtat

SEQ ID NO: 278188 - DNA, 30 bp, Artificial Sequence
  Synthetic oligonucleotide
cagtccctagaacaccagtggaatttgtat

SEQ ID NO: 278189 - DNA, 30 bp, Artificial Sequence
  Synthetic oligonucleotide
cgtgggtgcaaagtgggtgatgatttgtat

SEQ ID NO: 278190 - DNA, 30 bp, Artificial Sequence
  Synthetic oligonucleotide
ggcagtagggaccttctgcagactttgtat

SEQ ID NO: 278191 - DNA, 30 bp, Artificial Sequence
  Synthetic oligonucleotide
ccctgaataattcgccatgtctttttgtat

SEQ ID NO: 278192 - DNA, 30 bp, Artificial Sequence
  Synthetic oligonucleotide
ctaaagggccatcgctgttaccgaaattat

SEQ ID NO: 278193 - DNA, 30 bp, Artificial Sequence
  Synthetic oligonucleotide
agtttttaaataagtctgtgatgaaattat

SEQ ID NO: 278194 - DNA, 30 bp, Artificial Sequence
  Synthetic oligonucleotide
ggacctatttgtggaaagcgtgtaaattat

SEQ ID NO: 278195 - DNA, 30 bp, Artificial Sequence
  Synthetic oligonucleotide
tcttgaatagctgcacacgcccacaattat

SEQ ID NO: 278196 - DNA, 30 bp, Artificial Sequence
  Synthetic oligonucleotide
gcaagcctggaaatatgattcatcaattat

SEQ ID NO: 278197 - DNA, 30 bp, Artificial Sequence
  Synthetic oligonucleotide
cgtcgcacttcgcccgaaaagctcaattat

SEQ ID NO: 278198 - DNA, 30 bp, Artificial Sequence
  Synthetic oligonucleotide
tcaaggtgcgaccgggagaacctgaattat

SEQ ID NO: 278199 - DNA, 30 bp, Artificial Sequence
  Synthetic oligonucleotide
taaaactagacttttcccataggacattat

SEQ ID NO: 278200 - DNA, 30 bp, Artificial Sequence
  Synthetic oligonucleotide
cgtcggtgtatactgtggagccagcattat

SEQ ID NO: 278201 - DNA, 30 bp, Artificial Sequence
  Synthetic oligonucleotide
gctgacgacagagagatgttggcgcattat

SEQ ID NO: 278202 - DNA, 30 bp, Artificial Sequence
  Synthetic oligonucleotide
tccgatgccgtgacgtgtttatcgcattat

SEQ ID NO: 278203 - DNA, 30 bp, Artificial Sequence
  Synthetic oligonucleotide
tgagggggagacatttgctacgctcattat

SEQ ID NO: 278204 - DNA, 30 bp, Artificial Sequence
  Synthetic oligonucleotide
acgtattggagcggtcgtctaagtcattat

SEQ ID NO: 278205 - DNA, 30 bp, Artificial Sequence
  Synthetic oligonucleotide
gatattagaataggtgtatacgttcattat

SEQ ID NO: 278206 - DNA, 30 bp, Artificial Sequence
  Synthetic oligonucleotide
cttgagctaagttccttggtagccgattat

SEQ ID NO: 278207 - DNA, 30 bp, Artificial Sequence
  Synthetic oligonucleotide
taacagaaactccagaaaactctcgattat

SEQ ID NO: 278208 - DNA, 30 bp, Artificial Sequence
  Synthetic oligonucleotide
caaaatctgtctattaaccggcaggattat

SEQ ID NO: 278209 - DNA, 30 bp, Artificial Sequence
  Synthetic oligonucleotide
ccttggttaaccttttgttaagcggattat

SEQ ID NO: 278210 - DNA, 30 bp, Artificial Sequence
  Synthetic oligonucleotide
agtatatcatacacgggggaccgggattat

SEQ ID NO: 278211 - DNA, 30 bp, Artificial Sequence
  Synthetic oligonucleotide
gcaaagtcgcggtagcgttatcttgattat

SEQ ID NO: 278212 - DNA, 30 bp, Artificial Sequence
  Synthetic oligonucleotide
tagagcctatacgacctgacatgatattat

SEQ ID NO: 278213 - DNA, 30 bp, Artificial Sequence
  Synthetic oligonucleotide
gctggtcagggttgcggctcatgatattat

SEQ ID NO: 278214 - DNA, 30 bp, Artificial Sequence
  Synthetic oligonucleotide
agtgtacaactcatcccccgatactattat

SEQ ID NO: 278215 - DNA, 30 bp, Artificial Sequence
  Synthetic oligonucleotide
ggactacgtctagctgcaaagtactattat

SEQ ID NO: 278216 - DNA, 30 bp, Artificial Sequence
  Synthetic oligonucleotide
gcctggctgtaaaacgacgctacctattat

SEQ ID NO: 278217 - DNA, 30 bp, Artificial Sequence
  Synthetic oligonucleotide
cagtggtggcagtttgcctaatcttattat

SEQ ID NO: 278218 - DNA, 30 bp, Artificial Sequence
  Synthetic oligonucleotide
taggccgctcaagtcttcatgagttattat

SEQ ID NO: 278219 - DNA, 30 bp, Artificial Sequence
  Synthetic oligonucleotide
tgcacactaacacgggggtcgggttattat

SEQ ID NO: 278220 - DNA, 30 bp, Artificial Sequence
  Synthetic oligonucleotide
ctatgtatgtaagcaatgcaatgttattat

SEQ ID NO: 278221 - DNA, 30 bp, Artificial Sequence
  Synthetic oligonucleotide
gagcggtatcggtggttcagcttttattat

SEQ ID NO: 278222 - DNA, 30 bp, Artificial Sequence
  Synthetic oligonucleotide
atcaggagccgtaggcaaagccgcacttat

SEQ ID NO: 278223 - DNA, 30 bp, Artificial Sequence
  Synthetic oligonucleotide
acagtaaattccaatatcagcacgacttat

SEQ ID NO: 278224 - DNA, 30 bp, Artificial Sequence
  Synthetic oligonucleotide
agaaggttccgtaattcactagggacttat

SEQ ID NO: 278225 - DNA, 30 bp, Artificial Sequence
  Synthetic oligonucleotide
cctaggtgtctgcgaatagcctgtacttat

SEQ ID NO: 278226 - DNA, 30 bp, Artificial Sequence
  Synthetic oligonucleotide
ccggccgattgcttactttggaagccttat

SEQ ID NO: 278227 - DNA, 30 bp, Artificial Sequence
  Synthetic oligonucleotide
cggacaaggtacccaaacgtagggccttat

SEQ ID NO: 278228 - DNA, 30 bp, Artificial Sequence
  Synthetic oligonucleotide
ctgccgcattccaacaacgacaatccttat

SEQ ID NO: 278229 - DNA, 30 bp, Artificial Sequence
  Synthetic oligonucleotide
ggcttcgatacgcgaaataaatgagcttat

SEQ ID NO: 278230 - DNA, 30 bp, Artificial Sequence
  Synthetic oligonucleotide
tcctgtggctagtcacaaaatgtagcttat

SEQ ID NO: 278231 - DNA, 30 bp, Artificial Sequence
  Synthetic oligonucleotide
gtaatggtgagggaactggtcgctgcttat

SEQ ID NO: 278232 - DNA, 30 bp, Artificial Sequence
  Synthetic oligonucleotide
atggtaagagacagataggtacttgcttat

SEQ ID NO: 278233 - DNA, 30 bp, Artificial Sequence
  Synthetic oligonucleotide
gcatggatagtttaactccatcgatcttat

SEQ ID NO: 278234 - DNA, 30 bp, Artificial Sequence
  Synthetic oligonucleotide
taccaggcccgtcgccgaaaaaactcttat

SEQ ID NO: 278235 - DNA, 30 bp, Artificial Sequence
  Synthetic oligonucleotide
gttctaaagcatagctcgcgtctgtcttat

SEQ ID NO: 278236 - DNA, 30 bp, Artificial Sequence
  Synthetic oligonucleotide
ccgcatgtagctacccagatacattcttat

SEQ ID NO: 278237 - DNA, 30 bp, Artificial Sequence
  Synthetic oligonucleotide
taggcgctgctgacgtaagcgcgaagttat

SEQ ID NO: 278238 - DNA, 30 bp, Artificial Sequence
  Synthetic oligonucleotide
gtccgaaagtccgcggaccgtcgaagttat

SEQ ID NO: 278239 - DNA, 30 bp, Artificial Sequence
  Synthetic oligonucleotide
gtgaaagatgtgtatactcaaataagttat

SEQ ID NO: 278240 - DNA, 30 bp, Artificial Sequence
  Synthetic oligonucleotide
gccgcatagcctctgccatccaccagttat

SEQ ID NO: 278241 - DNA, 30 bp, Artificial Sequence
  Synthetic oligonucleotide
gtggtgttattacgtccaacgttcagttat

SEQ ID NO: 278242 - DNA, 30 bp, Artificial Sequence
  Synthetic oligonucleotide
taataatcactttgccttccaacgagttat

SEQ ID NO: 278243 - DNA, 30 bp, Artificial Sequence
  Synthetic oligonucleotide
gtccgagagggcgtttcacgcatgagttat

SEQ ID NO: 278244 - DNA, 30 bp, Artificial Sequence
  Synthetic oligonucleotide
ggaatacgtcattgcggttgcttgagttat

SEQ ID NO: 278245 - DNA, 30 bp, Artificial Sequence
  Synthetic oligonucleotide
accaggggcctggttggatgaagtagttat

SEQ ID NO: 278246 - DNA, 30 bp, Artificial Sequence
  Synthetic oligonucleotide
ctgcggggctgacctacatgagaacgttat

SEQ ID NO: 278247 - DNA, 30 bp, Artificial Sequence
  Synthetic oligonucleotide
aacattgcggggaccattaggtagcgttat

SEQ ID NO: 278248 - DNA, 30 bp, Artificial Sequence
  Synthetic oligonucleotide
tgcagtgcgggtgattgcgattcgcgttat

SEQ ID NO: 278249 - DNA, 30 bp, Artificial Sequence
  Synthetic oligonucleotide
ccaacagaaaccatcattcactgcggttat

SEQ ID NO: 278250 - DNA, 30 bp, Artificial Sequence
  Synthetic oligonucleotide
gttaaggatctgcgctaatactggggttat

SEQ ID NO: 278251 - DNA, 30 bp, Artificial Sequence
  Synthetic oligonucleotide
ggaataattgaatggactaaaatgggttat

SEQ ID NO: 278252 - DNA, 30 bp, Artificial Sequence
  Synthetic oligonucleotide
tatgaggcccctttcaggcgagtgggttat

SEQ ID NO: 278253 - DNA, 30 bp, Artificial Sequence
  Synthetic oligonucleotide
gagagaccttagagtgaggatggtggttat

SEQ ID NO: 278254 - DNA, 30 bp, Artificial Sequence
  Synthetic oligonucleotide
aaggaggagtagttatgtcaagtatgttat

SEQ ID NO: 278255 - DNA, 30 bp, Artificial Sequence
  Synthetic oligonucleotide
ggacggtcgaagggccgattgttctgttat

SEQ ID NO: 278256 - DNA, 30 bp, Artificial Sequence
  Synthetic oligonucleotide
cggaacgtctgtgataccaagacgtgttat

SEQ ID NO: 278257 - DNA, 30 bp, Artificial Sequence
  Synthetic oligonucleotide
cggatgattttataattttaagcgtgttat

SEQ ID NO: 278258 - DNA, 30 bp, Artificial Sequence
  Synthetic oligonucleotide
atgcgtggcctacaggcagtcacttgttat

SEQ ID NO: 278259 - DNA, 30 bp, Artificial Sequence
  Synthetic oligonucleotide
ccataagtcagcgtcgtccgtaccatttat

SEQ ID NO: 278260 - DNA, 30 bp, Artificial Sequence
  Synthetic oligonucleotide
tatgcgcataggatacttacgcccatttat

SEQ ID NO: 278261 - DNA, 30 bp, Artificial Sequence
  Synthetic oligonucleotide
gatgttgcagctagtggtgaaggcatttat

SEQ ID NO: 278262 - DNA, 30 bp, Artificial Sequence
  Synthetic oligonucleotide
tagaccaaggggttagtcaacgtcatttat

SEQ ID NO: 278263 - DNA, 29 bp, Artificial Sequence
  Synthetic oligonucleotide
tacgtttaccccaatgttctccgatttat

SEQ ID NO: 278264 - DNA, 30 bp, Artificial Sequence
  Synthetic oligonucleotide
tcgattgtctacgggcctggacctatttat

SEQ ID NO: 278265 - DNA, 30 bp, Artificial Sequence
  Synthetic oligonucleotide
gcaattaaggggaaaggcattcctatttat

SEQ ID NO: 278266 - DNA, 30 bp, Artificial Sequence
  Synthetic oligonucleotide
atgatgccgttggacaagtttgctatttat

SEQ ID NO: 278267 - DNA, 31 bp, Artificial Sequence
  Synthetic oligonucleotide
tagagggtatggttgctggccccgtatttat

SEQ ID NO: 278268 - DNA, 30 bp, Artificial Sequence
  Synthetic oligonucleotide
taaggcagaggctactgcggaagactttat

SEQ ID NO: 278269 - DNA, 30 bp, Artificial Sequence
  Synthetic oligonucleotide
gtcgtaacgactttgagggagcacctttat

SEQ ID NO: 278270 - DNA, 30 bp, Artificial Sequence
  Synthetic oligonucleotide
tataaaaacattgttcaaggtatgctttat

SEQ ID NO: 278271 - DNA, 30 bp, Artificial Sequence
  Synthetic oligonucleotide
ggatactgattcgcatcttggactctttat

SEQ ID NO: 278272 - DNA, 30 bp, Artificial Sequence
  Synthetic oligonucleotide
atgcctctgggtgatgggagggcggtttat

SEQ ID NO: 278273 - DNA, 30 bp, Artificial Sequence
  Synthetic oligonucleotide
gctagagtgctgaccgccgagtcggtttat

SEQ ID NO: 278274 - DNA, 30 bp, Artificial Sequence
  Synthetic oligonucleotide
aggttccttcctggaggtattagggtttat

SEQ ID NO: 278275 - DNA, 30 bp, Artificial Sequence
  Synthetic oligonucleotide
atcgctcacggacgacctaagcttgtttat

SEQ ID NO: 278276 - DNA, 30 bp, Artificial Sequence
  Synthetic oligonucleotide
gctgtgctgttcgaagagtatgttgtttat

SEQ ID NO: 278277 - DNA, 30 bp, Artificial Sequence
  Synthetic oligonucleotide
gagcgcatcgcggaattcaatttattttat

SEQ ID NO: 278278 - DNA, 30 bp, Artificial Sequence
  Synthetic oligonucleotide
agaatagtacgggacgatgatctcttttat

SEQ ID NO: 278279 - DNA, 30 bp, Artificial Sequence
  Synthetic oligonucleotide
gattgatgatgattgtcaaaggtcttttat

SEQ ID NO: 278280 - DNA, 30 bp, Artificial Sequence
  Synthetic oligonucleotide
atgcacaatgggctccctgagtagttttat

SEQ ID NO: 278281 - DNA, 30 bp, Artificial Sequence
  Synthetic oligonucleotide
tggagctggggaccattggtatggttttat

SEQ ID NO: 278282 - DNA, 30 bp, Artificial Sequence
  Synthetic oligonucleotide
agagtatgagacgagtccaagatgttttat

SEQ ID NO: 278283 - DNA, 30 bp, Artificial Sequence
  Synthetic oligonucleotide
tctgggtttcggtaggcacacgatttttat

SEQ ID NO: 278284 - DNA, 30 bp, Artificial Sequence
  Synthetic oligonucleotide
aaacccggagacaacggaacccctttttat

SEQ ID NO: 278285 - DNA, 30 bp, Artificial Sequence
  Synthetic oligonucleotide
atcgggaatgggtttgcggaaaaaaaaact

SEQ ID NO: 278286 - DNA, 30 bp, Artificial Sequence
  Synthetic oligonucleotide
aggggaacactaagttagcccaaaaaaact

SEQ ID NO: 278287 - DNA, 30 bp, Artificial Sequence
  Synthetic oligonucleotide
gggtttagccaaccgattaagccaaaaact

SEQ ID NO: 278288 - DNA, 30 bp, Artificial Sequence
  Synthetic oligonucleotide
aatgagtatcttcagtatgcgtcaaaaact

SEQ ID NO: 278289 - DNA, 30 bp, Artificial Sequence
  Synthetic oligonucleotide
cgtgaaaattggttcaaactacgcaaaact

SEQ ID NO: 278290 - DNA, 30 bp, Artificial Sequence
  Synthetic oligonucleotide
gacggcggtgtggcatactagctcaaaact

SEQ ID NO: 278291 - DNA, 30 bp, Artificial Sequence
  Synthetic oligonucleotide
cgatgagtcattactatatggtagaaaact

SEQ ID NO: 278292 - DNA, 30 bp, Artificial Sequence
  Synthetic oligonucleotide
acacttacgattcttgcaaaacggaaaact

SEQ ID NO: 278293 - DNA, 30 bp, Artificial Sequence
  Synthetic oligonucleotide
tggctcacacgcgaactttgattgaaaact

SEQ ID NO: 278294 - DNA, 30 bp, Artificial Sequence
  Synthetic oligonucleotide
tcgtcgttgaagttcatcgtattgaaaact

SEQ ID NO: 278295 - DNA, 30 bp, Artificial Sequence
  Synthetic oligonucleotide
tgaaatgcattaaatgttacgagacaaact

SEQ ID NO: 278296 - DNA, 30 bp, Artificial Sequence
  Synthetic oligonucleotide
aacggccaagtaggggcgtttgaccaaact

SEQ ID NO: 278297 - DNA, 30 bp, Artificial Sequence
  Synthetic oligonucleotide
ggctcaacgcctagtctaccgctccaaact

SEQ ID NO: 278298 - DNA, 30 bp, Artificial Sequence
  Synthetic oligonucleotide
aaatgataggacaagaacatgacgcaaact

SEQ ID NO: 278299 - DNA, 30 bp, Artificial Sequence
  Synthetic oligonucleotide
agggggagagcgttcacgtgcacagaaact

SEQ ID NO: 278300 - DNA, 30 bp, Artificial Sequence
  Synthetic oligonucleotide
gagatttcagcagcccaaacaaacgaaact

SEQ ID NO: 278301 - DNA, 30 bp, Artificial Sequence
  Synthetic oligonucleotide
tcccgccccacacggtacgtgtcataaact

SEQ ID NO: 278302 - DNA, 30 bp, Artificial Sequence
  Synthetic oligonucleotide
aaaatgcagtcttatcacatcagctaaact

SEQ ID NO: 278303 - DNA, 30 bp, Artificial Sequence
  Synthetic oligonucleotide
tcattgggcgtcgcggcgctcagctaaact

SEQ ID NO: 278304 - DNA, 30 bp, Artificial Sequence
  Synthetic oligonucleotide
ggaactaggaatacactaaggcgctaaact

SEQ ID NO: 278305 - DNA, 30 bp, Artificial Sequence
  Synthetic oligonucleotide
tctcaagaggcgcactgtgcctggtaaact

SEQ ID NO: 278306 - DNA, 30 bp, Artificial Sequence
  Synthetic oligonucleotide
agtctcagcccaggtatctaggtgacaact

SEQ ID NO: 278307 - DNA, 30 bp, Artificial Sequence
  Synthetic oligonucleotide
tctactgaattgctttggcggcatacaact

SEQ ID NO: 278308 - DNA, 30 bp, Artificial Sequence
  Synthetic oligonucleotide
acccatcccatgttttttgtccctacaact

SEQ ID NO: 278309 - DNA, 30 bp, Artificial Sequence
  Synthetic oligonucleotide
cgtgcatacgtttctctcttgcctacaact

SEQ ID NO: 278310 - DNA, 30 bp, Artificial Sequence
  Synthetic oligonucleotide
cccggaacttgggtgcctgggcgaccaact

SEQ ID NO: 278311 - DNA, 30 bp, Artificial Sequence
  Synthetic oligonucleotide
cccgacaaaagtgtcattctgaatccaact

SEQ ID NO: 278312 - DNA, 30 bp, Artificial Sequence
  Synthetic oligonucleotide
ttaactaagcgaccagcaacccatccaact

SEQ ID NO: 278313 - DNA, 30 bp, Artificial Sequence
  Synthetic oligonucleotide
ctcgcagatatccatcttaggagcgcaact

SEQ ID NO: 278314 - DNA, 30 bp, Artificial Sequence
  Synthetic oligonucleotide
gtcgcgtcgattagcattatgttcgcaact

SEQ ID NO: 278315 - DNA, 30 bp, Artificial Sequence
  Synthetic oligonucleotide
taataggtggtaacacggggccaggcaact

SEQ ID NO: 278316 - DNA, 30 bp, Artificial Sequence
  Synthetic oligonucleotide
gttccctaatattctgtcgtgcgtgcaact

SEQ ID NO: 278317 - DNA, 30 bp, Artificial Sequence
  Synthetic oligonucleotide
ttaggcgtctgttttggctccgactcaact

SEQ ID NO: 278318 - DNA, 30 bp, Artificial Sequence
  Synthetic oligonucleotide
cggcgataccgaaataaacgcctctcaact

SEQ ID NO: 278319 - DNA, 30 bp, Artificial Sequence
  Synthetic oligonucleotide
gcgaaatttacagtcattctggtctcaact

SEQ ID NO: 278320 - DNA, 30 bp, Artificial Sequence
  Synthetic oligonucleotide
acggctgaaaggttggtaggcaagtcaact

SEQ ID NO: 278321 - DNA, 30 bp, Artificial Sequence
  Synthetic oligonucleotide
gtgccatctgcgttcataaggcgttcaact

SEQ ID NO: 278322 - DNA, 30 bp, Artificial Sequence
  Synthetic oligonucleotide
tgggcggctttccagcccaaagtcagaact

SEQ ID NO: 278323 - DNA, 30 bp, Artificial Sequence
  Synthetic oligonucleotide
tgagggcgcgcctgacgtcatgcgagaact

SEQ ID NO: 278324 - DNA, 30 bp, Artificial Sequence
  Synthetic oligonucleotide
ggacgcaagtaaagcactggttctagaact

SEQ ID NO: 278325 - DNA, 30 bp, Artificial Sequence
  Synthetic oligonucleotide
tgagttcgagctacttgtaaagcacgaact

SEQ ID NO: 278326 - DNA, 30 bp, Artificial Sequence
  Synthetic oligonucleotide
tgcgaacttgggctcgggggaagccgaact

SEQ ID NO: 278327 - DNA, 30 bp, Artificial Sequence
  Synthetic oligonucleotide
tgatatgggttacaagttacaggccgaact

SEQ ID NO: 278328 - DNA, 30 bp, Artificial Sequence
  Synthetic oligonucleotide
tagactaagactcctctcatggtgcgaact

SEQ ID NO: 278329 - DNA, 30 bp, Artificial Sequence
  Synthetic oligonucleotide
gtcgcattaaataacataaaaattcgaact

SEQ ID NO: 278330 - DNA, 30 bp, Artificial Sequence
  Synthetic oligonucleotide
attcggttggatctcggtatgtttcgaact

SEQ ID NO: 278331 - DNA, 30 bp, Artificial Sequence
  Synthetic oligonucleotide
gtcgtacgggatgtgtagatggcaggaact

SEQ ID NO: 278332 - DNA, 30 bp, Artificial Sequence
  Synthetic oligonucleotide
cccagctacaatatggtggtcgtaggaact

SEQ ID NO: 278333 - DNA, 30 bp, Artificial Sequence
  Synthetic oligonucleotide
agaaccttgcaactttaggatatcggaact

SEQ ID NO: 278334 - DNA, 30 bp, Artificial Sequence
  Synthetic oligonucleotide
gcagggcgtgttggagtcggttagggaact

SEQ ID NO: 278335 - DNA, 30 bp, Artificial Sequence
  Synthetic oligonucleotide
gggcaacgcacatacgtctcttggggaact

SEQ ID NO: 278336 - DNA, 30 bp, Artificial Sequence
  Synthetic oligonucleotide
ttgtcactcggggaggctccccgtggaact

SEQ ID NO: 278337 - DNA, 30 bp, Artificial Sequence
  Synthetic oligonucleotide
ggttggaaggacttgattgtccaatgaact

SEQ ID NO: 278338 - DNA, 30 bp, Artificial Sequence
  Synthetic oligonucleotide
tacgcgttgaatctaataagatgatgaact

SEQ ID NO: 278339 - DNA, 30 bp, Artificial Sequence
  Synthetic oligonucleotide
ctaaaacaaaggggtttgtaaaactgaact

SEQ ID NO: 278340 - DNA, 30 bp, Artificial Sequence
  Synthetic oligonucleotide
cccggaatggcggtctaacgggactgaact

SEQ ID NO: 278341 - DNA, 30 bp, Artificial Sequence
  Synthetic oligonucleotide
agggaaatattagtggggcgattttgaact

SEQ ID NO: 278342 - DNA, 30 bp, Artificial Sequence
  Synthetic oligonucleotide
agtcatcggaatggttacttcacaataact

SEQ ID NO: 278343 - DNA, 30 bp, Artificial Sequence
  Synthetic oligonucleotide
ggtgaattatctcgcagaggcaggataact

SEQ ID NO: 278344 - DNA, 30 bp, Artificial Sequence
  Synthetic oligonucleotide
ctgtcgtaagtcatcggtcctgggataact

SEQ ID NO: 278345 - DNA, 30 bp, Artificial Sequence
  Synthetic oligonucleotide
ggtacgaatggctatgtcatgcctataact

SEQ ID NO: 278346 - DNA, 30 bp, Artificial Sequence
  Synthetic oligonucleotide
ctacagtactttatcgagtgcgaactaact

SEQ ID NO: 278347 - DNA, 30 bp, Artificial Sequence
  Synthetic oligonucleotide
acctcctaatggaacaagctgacactaact

SEQ ID NO: 278348 - DNA, 30 bp, Artificial Sequence
  Synthetic oligonucleotide
gaggtaactgatcgaatgggtctactaact

SEQ ID NO: 278349 - DNA, 30 bp, Artificial Sequence
  Synthetic oligonucleotide
caaatctcccaacaacagcaccccctaact

SEQ ID NO: 278350 - DNA, 30 bp, Artificial Sequence
  Synthetic oligonucleotide
acaagcttgacttagaagggggagctaact

SEQ ID NO: 278351 - DNA, 30 bp, Artificial Sequence
  Synthetic oligonucleotide
aagcatccctcaggagcgtttgggctaact

SEQ ID NO: 278352 - DNA, 30 bp, Artificial Sequence
  Synthetic oligonucleotide
atggaccgagcgtttaaaaacaaagtaact

SEQ ID NO: 278353 - DNA, 30 bp, Artificial Sequence
  Synthetic oligonucleotide
atgcgaggtactgccagcttaccagtaact

SEQ ID NO: 278354 - DNA, 30 bp, Artificial Sequence
  Synthetic oligonucleotide
ctatatatttattggtaagggtgagtaact

SEQ ID NO: 278355 - DNA, 30 bp, Artificial Sequence
  Synthetic oligonucleotide
gtcgacacgatcataagaaaccgggtaact

SEQ ID NO: 278356 - DNA, 30 bp, Artificial Sequence
  Synthetic oligonucleotide
ggtttcatcacggcttgcttcgctgtaact

SEQ ID NO: 278357 - DNA, 30 bp, Artificial Sequence
  Synthetic oligonucleotide
tatatggctgatcgtgttccccttgtaact

SEQ ID NO: 278358 - DNA, 30 bp, Artificial Sequence
  Synthetic oligonucleotide
agaaggacaagctgttgcttggttgtaact

SEQ ID NO: 278359 - DNA, 30 bp, Artificial Sequence
  Synthetic oligonucleotide
cccgcgcgattcgggatcacgccattaact

SEQ ID NO: 278360 - DNA, 30 bp, Artificial Sequence
  Synthetic oligonucleotide
gctgccagcttcttttggcatgccttaact

SEQ ID NO: 278361 - DNA, 31 bp, Artificial Sequence
  Synthetic oligonucleotide
gttggggtcctctgaggcgttacgcttaact

SEQ ID NO: 278362 - DNA, 30 bp, Artificial Sequence
  Synthetic oligonucleotide
cggagcataaaagactcataggggttaact

SEQ ID NO: 278363 - DNA, 30 bp, Artificial Sequence
  Synthetic oligonucleotide
gcatggggtgatagtagtatgacaaacact

SEQ ID NO: 278364 - DNA, 30 bp, Artificial Sequence
  Synthetic oligonucleotide
gacacacacgtaatcgatgctccaaacact

SEQ ID NO: 278365 - DNA, 30 bp, Artificial Sequence
  Synthetic oligonucleotide
cgccgtaaatgggcccggctccctaacact

SEQ ID NO: 278366 - DNA, 30 bp, Artificial Sequence
  Synthetic oligonucleotide
tcttaactctcgtctaggccatgtaacact

SEQ ID NO: 278367 - DNA, 30 bp, Artificial Sequence
  Synthetic oligonucleotide
atgtgtcccgaatagggcatgattaacact

SEQ ID NO: 278368 - DNA, 30 bp, Artificial Sequence
  Synthetic oligonucleotide
tattacctgagcaattctcgtaaccacact

SEQ ID NO: 278369 - DNA, 30 bp, Artificial Sequence
  Synthetic oligonucleotide
acagtaagcggaagaaatctgtcccacact

SEQ ID NO: 278370 - DNA, 30 bp, Artificial Sequence
  Synthetic oligonucleotide
atttcgatcccgtgacgaagattccacact

SEQ ID NO: 278371 - DNA, 30 bp, Artificial Sequence
  Synthetic oligonucleotide
ccttcgcacattaagattcattatcacact

SEQ ID NO: 278372 - DNA, 30 bp, Artificial Sequence
  Synthetic oligonucleotide
tctatcgcctaagtagtgtttagagacact

SEQ ID NO: 278373 - DNA, 30 bp, Artificial Sequence
  Synthetic oligonucleotide
gtagctgaacaagaaattatcggagacact

SEQ ID NO: 278374 - DNA, 30 bp, Artificial Sequence
  Synthetic oligonucleotide
cccacacatgagaggatctcattagacact

SEQ ID NO: 278375 - DNA, 30 bp, Artificial Sequence
  Synthetic oligonucleotide
aatacagaagacgccataatctccgacact

SEQ ID NO: 278376 - DNA, 30 bp, Artificial Sequence
  Synthetic oligonucleotide
gtagcaagcgtgggaatgcgtagcgacact

SEQ ID NO: 278377 - DNA, 30 bp, Artificial Sequence
  Synthetic oligonucleotide
ggttgcagcgtggcgtgggatgtcgacact

SEQ ID NO: 278378 - DNA, 30 bp, Artificial Sequence
  Synthetic oligonucleotide
tgtagcgtcgcggaccagaccgctgacact

SEQ ID NO: 278379 - DNA, 30 bp, Artificial Sequence
  Synthetic oligonucleotide
cgtcttcggcactccatcatacgtgacact

SEQ ID NO: 278380 - DNA, 30 bp, Artificial Sequence
  Synthetic oligonucleotide
aagaggttagctatggagtacttctacact

SEQ ID NO: 278381 - DNA, 30 bp, Artificial Sequence
  Synthetic oligonucleotide
tataccgatctcatacatagcggttacact

SEQ ID NO: 278382 - DNA, 30 bp, Artificial Sequence
  Synthetic oligonucleotide
aaatcggacttacttcgataagcaaccact

SEQ ID NO: 278383 - DNA, 30 bp, Artificial Sequence
  Synthetic oligonucleotide
cagctcagttgcaattcgatgcgaaccact

SEQ ID NO: 278384 - DNA, 30 bp, Artificial Sequence
  Synthetic oligonucleotide
acctggtgcgtccagaatgcattaaccact

SEQ ID NO: 278385 - DNA, 30 bp, Artificial Sequence
  Synthetic oligonucleotide
agaattcactgccattcgagaggcaccact

SEQ ID NO: 278386 - DNA, 30 bp, Artificial Sequence
  Synthetic oligonucleotide
cgcggcatgatatatgtgagaccgaccact

SEQ ID NO: 278387 - DNA, 30 bp, Artificial Sequence
  Synthetic oligonucleotide
gcgtgatcttgcagggggaaaactaccact

SEQ ID NO: 278388 - DNA, 30 bp, Artificial Sequence
  Synthetic oligonucleotide
attaagaagcaggaactccatattaccact

SEQ ID NO: 278389 - DNA, 30 bp, Artificial Sequence
  Synthetic oligonucleotide
gtatcccatccgtgaaaggtctaacccact

SEQ ID NO: 278390 - DNA, 30 bp, Artificial Sequence
  Synthetic oligonucleotide
tatcggacacagaacagcccgtgccccact

SEQ ID NO: 278391 - DNA, 30 bp, Artificial Sequence
  Synthetic oligonucleotide
caggtgatatgggtttcggtggggcccact

SEQ ID NO: 278392 - DNA, 30 bp, Artificial Sequence
  Synthetic oligonucleotide
ggtagcaaggtcgtggaactgtctcccact

SEQ ID NO: 278393 - DNA, 30 bp, Artificial Sequence
  Synthetic oligonucleotide
tccgaacgctccagcaaaacagtagccact

SEQ ID NO: 278394 - DNA, 30 bp, Artificial Sequence
  Synthetic oligonucleotide
tcatacagcactaggaagccattcgccact

SEQ ID NO: 278395 - DNA, 30 bp, Artificial Sequence
  Synthetic oligonucleotide
gctatacggtaattatagattttcgccact

SEQ ID NO: 278396 - DNA, 30 bp, Artificial Sequence
  Synthetic oligonucleotide
aaggaactagatagatttagctaggccact

SEQ ID NO: 278397 - DNA, 30 bp, Artificial Sequence
  Synthetic oligonucleotide
tctattctggatgctgcgctcgcggccact

SEQ ID NO: 278398 - DNA, 30 bp, Artificial Sequence
  Synthetic oligonucleotide
cccctgtaaactcctcgagcaaatgccact

SEQ ID NO: 278399 - DNA, 30 bp, Artificial Sequence
  Synthetic oligonucleotide
atagtagcgatcctctcatgtcttgccact

SEQ ID NO: 278400 - DNA, 30 bp, Artificial Sequence
  Synthetic oligonucleotide
agttaccggacgggcttggttgaatccact

SEQ ID NO: 278401 - DNA, 30 bp, Artificial Sequence
  Synthetic oligonucleotide
ttttcgccgatggtgcagttctaatccact

SEQ ID NO: 278402 - DNA, 30 bp, Artificial Sequence
  Synthetic oligonucleotide
ttgacaataaacttcgtttacaggtccact

SEQ ID NO: 278403 - DNA, 30 bp, Artificial Sequence
  Synthetic oligonucleotide
tcaacccagtcgttgcggttgctttccact

SEQ ID NO: 278404 - DNA, 30 bp, Artificial Sequence
  Synthetic oligonucleotide
ggagattaggagacggcgagacgaagcact

SEQ ID NO: 278405 - DNA, 30 bp, Artificial Sequence
  Synthetic oligonucleotide
ctgggaaagccgtttaggcgtggaagcact

SEQ ID NO: 278406 - DNA, 30 bp, Artificial Sequence
  Synthetic oligonucleotide
gttgtgcggcattaactcctcgccagcact

SEQ ID NO: 278407 - DNA, 30 bp, Artificial Sequence
  Synthetic oligonucleotide
tcacttaaaccttaggaatcattcagcact

SEQ ID NO: 278408 - DNA, 30 bp, Artificial Sequence
  Synthetic oligonucleotide
taatcacaggaacttcaaatttctagcact

SEQ ID NO: 278409 - DNA, 30 bp, Artificial Sequence
  Synthetic oligonucleotide
tgaccaggtgtaagcgtacctgcgcgcact

SEQ ID NO: 278410 - DNA, 30 bp, Artificial Sequence
  Synthetic oligonucleotide
ttaggatcgccacaatcgccttggcgcact

SEQ ID NO: 278411 - DNA, 30 bp, Artificial Sequence
  Synthetic oligonucleotide
tggacttaatagagaataaagaatcgcact

SEQ ID NO: 278412 - DNA, 30 bp, Artificial Sequence
  Synthetic oligonucleotide
ataaagcgactcaaggaggacggaggcact

SEQ ID NO: 278413 - DNA, 30 bp, Artificial Sequence
  Synthetic oligonucleotide
catagaagtgtgggatccgggagcggcact

SEQ ID NO: 278414 - DNA, 30 bp, Artificial Sequence
  Synthetic oligonucleotide
tagggaagatagtccccgtataagggcact

SEQ ID NO: 278415 - DNA, 30 bp, Artificial Sequence
  Synthetic oligonucleotide
ggaacggtaacgctgcccctgagatgcact

SEQ ID NO: 278416 - DNA, 30 bp, Artificial Sequence
  Synthetic oligonucleotide
ccctcaaacatgcggtaggttatatgcact

SEQ ID NO: 278417 - DNA, 30 bp, Artificial Sequence
  Synthetic oligonucleotide
aaaacgtcgttagtgtgttatcagtgcact

SEQ ID NO: 278418 - DNA, 30 bp, Artificial Sequence
  Synthetic oligonucleotide
gacaggctaatttaaagggctctcatcact

SEQ ID NO: 278419 - DNA, 30 bp, Artificial Sequence
  Synthetic oligonucleotide
gttggtttgatttgtccaacctgtatcact

SEQ ID NO: 278420 - DNA, 30 bp, Artificial Sequence
  Synthetic oligonucleotide
gacgcgttgccccttcctctgtgtatcact

SEQ ID NO: 278421 - DNA, 30 bp, Artificial Sequence
  Synthetic oligonucleotide
cgggcattgcaatgaaggggcaaactcact

SEQ ID NO: 278422 - DNA, 30 bp, Artificial Sequence
  Synthetic oligonucleotide
ccgaagagcttggcggtttaagaactcact

SEQ ID NO: 278423 - DNA, 30 bp, Artificial Sequence
  Synthetic oligonucleotide
tccgacgcttactctggtctatcactcact

SEQ ID NO: 278424 - DNA, 30 bp, Artificial Sequence
  Synthetic oligonucleotide
tctttcgacttacaagcggcaccgctcact

SEQ ID NO: 278425 - DNA, 30 bp, Artificial Sequence
  Synthetic oligonucleotide
agtactatgatgcacatcagccgagtcact

SEQ ID NO: 278426 - DNA, 30 bp, Artificial Sequence
  Synthetic oligonucleotide
cgctgcgttttaaagataggactcgtcact

SEQ ID NO: 278427 - DNA, 30 bp, Artificial Sequence
  Synthetic oligonucleotide
agtggcgctttgaccgagtgagatgtcact

SEQ ID NO: 278428 - DNA, 30 bp, Artificial Sequence
  Synthetic oligonucleotide
ttactgaggaacactagttccggtgtcact

SEQ ID NO: 278429 - DNA, 30 bp, Artificial Sequence
  Synthetic oligonucleotide
gggattttgtcacagtcgacaatgttcact

SEQ ID NO: 278430 - DNA, 30 bp, Artificial Sequence
  Synthetic oligonucleotide
tcaaatacggacctagctgtccatttcact

SEQ ID NO: 278431 - DNA, 30 bp, Artificial Sequence
  Synthetic oligonucleotide
ggcacgctgggcgctaatcttcgtttcact

SEQ ID NO: 278432 - DNA, 30 bp, Artificial Sequence
  Synthetic oligonucleotide
ggtcgacccttgttcagggtgctaaagact

SEQ ID NO: 278433 - DNA, 30 bp, Artificial Sequence
  Synthetic oligonucleotide
gcattcggcactacggctacgccgaagact

SEQ ID NO: 278434 - DNA, 30 bp, Artificial Sequence
  Synthetic oligonucleotide
gtctacgaggtcgacggtacggcgaagact

SEQ ID NO: 278435 - DNA, 30 bp, Artificial Sequence
  Synthetic oligonucleotide
agttgcgtgatgaggccaagggtgaagact

SEQ ID NO: 278436 - DNA, 30 bp, Artificial Sequence
  Synthetic oligonucleotide
tctcaccagccggccaccttttcgcagact

SEQ ID NO: 278437 - DNA, 30 bp, Artificial Sequence
  Synthetic oligonucleotide
tagtggctgtagttgtacggcactcagact

SEQ ID NO: 278438 - DNA, 30 bp, Artificial Sequence
  Synthetic oligonucleotide
ccgggtagggtttggagcgcgtcagagact

SEQ ID NO: 278439 - DNA, 30 bp, Artificial Sequence
  Synthetic oligonucleotide
tttggacatcttaagcctatcagagagact

SEQ ID NO: 278440 - DNA, 30 bp, Artificial Sequence
  Synthetic oligonucleotide
acttacacgcataaagataacgtagagact

SEQ ID NO: 278441 - DNA, 30 bp, Artificial Sequence
  Synthetic oligonucleotide
taaacagcttataaggggggcttcgagact

SEQ ID NO: 278442 - DNA, 30 bp, Artificial Sequence
  Synthetic oligonucleotide
aattagtcccgatcgcccgggtaggagact

SEQ ID NO: 278443 - DNA, 30 bp, Artificial Sequence
  Synthetic oligonucleotide
gtatgccgttgtgggaacagtacggagact

SEQ ID NO: 278444 - DNA, 30 bp, Artificial Sequence
  Synthetic oligonucleotide
acgtgtcgctccagacgcgatccggagact

SEQ ID NO: 278445 - DNA, 30 bp, Artificial Sequence
  Synthetic oligonucleotide
cttttggaaggacggaaaacaagggagact

SEQ ID NO: 278446 - DNA, 30 bp, Artificial Sequence
  Synthetic oligonucleotide
acatgtttaggtgcctcgattatggagact

SEQ ID NO: 278447 - DNA, 30 bp, Artificial Sequence
  Synthetic oligonucleotide
actagccttagagaaggaacagttgagact

SEQ ID NO: 278448 - DNA, 30 bp, Artificial Sequence
  Synthetic oligonucleotide
ggatgtttaagtccgcgaaggccatagact

SEQ ID NO: 278449 - DNA, 30 bp, Artificial Sequence
  Synthetic oligonucleotide
gcgggtccggatggacaaatcatatagact

SEQ ID NO: 278450 - DNA, 30 bp, Artificial Sequence
  Synthetic oligonucleotide
tgctcttaggatattaagttgtcaacgact

SEQ ID NO: 278451 - DNA, 30 bp, Artificial Sequence
  Synthetic oligonucleotide
ctataccaaatcttggagggccgcacgact

SEQ ID NO: 278452 - DNA, 30 bp, Artificial Sequence
  Synthetic oligonucleotide
ttagcccgattaacggggtaaaatccgact

SEQ ID NO: 278453 - DNA, 30 bp, Artificial Sequence
  Synthetic oligonucleotide
taacttggaattttgatgaactctccgact

SEQ ID NO: 278454 - DNA, 30 bp, Artificial Sequence
  Synthetic oligonucleotide
gacacattcttatacaagacatgtccgact

SEQ ID NO: 278455 - DNA, 30 bp, Artificial Sequence
  Synthetic oligonucleotide
aaacctgattaagcttcccagtttccgact

SEQ ID NO: 278456 - DNA, 30 bp, Artificial Sequence
  Synthetic oligonucleotide
ggagccgcgctatgagctataatagcgact

SEQ ID NO: 278457 - DNA, 30 bp, Artificial Sequence
  Synthetic oligonucleotide
cacatcaaagtattagcacacgtcgcgact

SEQ ID NO: 278458 - DNA, 30 bp, Artificial Sequence
  Synthetic oligonucleotide
gggtcacggtatgaggaatcgaaggcgact

SEQ ID NO: 278459 - DNA, 30 bp, Artificial Sequence
  Synthetic oligonucleotide
gattaccgtaatcgcacgactaaggcgact

SEQ ID NO: 278460 - DNA, 30 bp, Artificial Sequence
  Synthetic oligonucleotide
ccgggttaacaacgcttaccaactgcgact

SEQ ID NO: 278461 - DNA, 30 bp, Artificial Sequence
  Synthetic oligonucleotide
taaaaatggtgctggaataggactgcgact

SEQ ID NO: 278462 - DNA, 30 bp, Artificial Sequence
  Synthetic oligonucleotide
caacttaagggcacaattattgcatcgact

SEQ ID NO: 278463 - DNA, 30 bp, Artificial Sequence
  Synthetic oligonucleotide
tacaaaaaggatttgggtaaaacttcgact

SEQ ID NO: 278464 - DNA, 30 bp, Artificial Sequence
  Synthetic oligonucleotide
tcgtccgtgatttatttggtaggttcgact

SEQ ID NO: 278465 - DNA, 30 bp, Artificial Sequence
  Synthetic oligonucleotide
atgaccggtgttgttagttagtccaggact

SEQ ID NO: 278466 - DNA, 30 bp, Artificial Sequence
  Synthetic oligonucleotide
ctctaacggcggcaggttatactcaggact

SEQ ID NO: 278467 - DNA, 30 bp, Artificial Sequence
  Synthetic oligonucleotide
gaaccggttccttctgggtagctcaggact

SEQ ID NO: 278468 - DNA, 30 bp, Artificial Sequence
  Synthetic oligonucleotide
cttattagaacttcaatagtggcgaggact

SEQ ID NO: 278469 - DNA, 30 bp, Artificial Sequence
  Synthetic oligonucleotide
gtactactgggtgtgttccgaagtaggact

SEQ ID NO: 278470 - DNA, 30 bp, Artificial Sequence
  Synthetic oligonucleotide
atgtgctgtgacttgtacgccgaacggact

SEQ ID NO: 278471 - DNA, 30 bp, Artificial Sequence
  Synthetic oligonucleotide
aggaccgtggacagcgtttctccacggact

SEQ ID NO: 278472 - DNA, 30 bp, Artificial Sequence
  Synthetic oligonucleotide
cactacaacttgtgatcgacgtcacggact

SEQ ID NO: 278473 - DNA, 30 bp, Artificial Sequence
  Synthetic oligonucleotide
cacgggctctatccgtagctgtaagggact

SEQ ID NO: 278474 - DNA, 30 bp, Artificial Sequence
  Synthetic oligonucleotide
ggggagaattagaagtaggcatctgggact

SEQ ID NO: 278475 - DNA, 30 bp, Artificial Sequence
  Synthetic oligonucleotide
tcggatcaattgatgtaaacccactggact

SEQ ID NO: 278476 - DNA, 30 bp, Artificial Sequence
  Synthetic oligonucleotide
taggctatgtgcgccgcgcaggggtggact

SEQ ID NO: 278477 - DNA, 30 bp, Artificial Sequence
  Synthetic oligonucleotide
caacagctcacgaatgcccgatattggact

SEQ ID NO: 278478 - DNA, 30 bp, Artificial Sequence
  Synthetic oligonucleotide
tagcttggctataatatccagtcttggact

SEQ ID NO: 278479 - DNA, 30 bp, Artificial Sequence
  Synthetic oligonucleotide
agcgcgtagaatccgggtgaaagttggact

SEQ ID NO: 278480 - DNA, 30 bp, Artificial Sequence
  Synthetic oligonucleotide
agatccccgtttaacgacagaacaatgact

SEQ ID NO: 278481 - DNA, 30 bp, Artificial Sequence
  Synthetic oligonucleotide
gggcaagccgctcaacgagctgacatgact

SEQ ID NO: 278482 - DNA, 25 bp, Artificial Sequence
  Synthetic oligonucleotide
cggtaccgagaagtgatacatgact

SEQ ID NO: 278483 - DNA, 30 bp, Artificial Sequence
  Synthetic oligonucleotide
ccgatgagagcaattaaactagtcatgact

SEQ ID NO: 278484 - DNA, 30 bp, Artificial Sequence
  Synthetic oligonucleotide
tatctcgccggcgtccaactgacgctgact

SEQ ID NO: 278485 - DNA, 30 bp, Artificial Sequence
  Synthetic oligonucleotide
gcttgctcttagttctaactaccgctgact

SEQ ID NO: 278486 - DNA, 30 bp, Artificial Sequence
  Synthetic oligonucleotide
agcgatcccattagaaagcaagtgctgact

SEQ ID NO: 278487 - DNA, 30 bp, Artificial Sequence
  Synthetic oligonucleotide
cgggggtctaaaagctatactgatctgact

SEQ ID NO: 278488 - DNA, 30 bp, Artificial Sequence
  Synthetic oligonucleotide
ggagtcagtcaaaacggaagtcgtctgact

SEQ ID NO: 278489 - DNA, 30 bp, Artificial Sequence
  Synthetic oligonucleotide
atagatgatagggaactaatccttctgact

SEQ ID NO: 278490 - DNA, 30 bp, Artificial Sequence
  Synthetic oligonucleotide
ccaaaagacaccttaccaaatgttctgact

SEQ ID NO: 278491 - DNA, 30 bp, Artificial Sequence
  Synthetic oligonucleotide
tgaatccaggagaactgaaactttctgact

SEQ ID NO: 278492 - DNA, 30 bp, Artificial Sequence
  Synthetic oligonucleotide
ggttttcaggccctgtacatttgagtgact

SEQ ID NO: 278493 - DNA, 30 bp, Artificial Sequence
  Synthetic oligonucleotide
ggatgggcgcaataagaacacgtagtgact

SEQ ID NO: 278494 - DNA, 30 bp, Artificial Sequence
  Synthetic oligonucleotide
tcgggagtactgggaggaattttcgtgact

SEQ ID NO: 278495 - DNA, 30 bp, Artificial Sequence
  Synthetic oligonucleotide
ggacttcccttgagggataaactggtgact

SEQ ID NO: 278496 - DNA, 30 bp, Artificial Sequence
  Synthetic oligonucleotide
tgccccagcgggtttacgcgagctgtgact

SEQ ID NO: 278497 - DNA, 30 bp, Artificial Sequence
  Synthetic oligonucleotide
gtagttgggccacgtaaaagacgtgtgact

SEQ ID NO: 278498 - DNA, 30 bp, Artificial Sequence
  Synthetic oligonucleotide
atggagaagccttagtctggctgtgtgact

SEQ ID NO: 278499 - DNA, 30 bp, Artificial Sequence
  Synthetic oligonucleotide
ttgaagcagtcaattggacaacacttgact

SEQ ID NO: 278500 - DNA, 30 bp, Artificial Sequence
  Synthetic oligonucleotide
gcaaaagcggcgaggaaggctcggttgact

SEQ ID NO: 278501 - DNA, 30 bp, Artificial Sequence
  Synthetic oligonucleotide
agcgaatcgtctcatcggcggaatttgact

SEQ ID NO: 278502 - DNA, 30 bp, Artificial Sequence
  Synthetic oligonucleotide
gacgaaatgagcgaccctcaagttttgact

SEQ ID NO: 278503 - DNA, 30 bp, Artificial Sequence
  Synthetic oligonucleotide
gttctataagggccattcggcagaaatact

SEQ ID NO: 278504 - DNA, 30 bp, Artificial Sequence
  Synthetic oligonucleotide
gccatgaacccagcgtgcgtaataaatact

SEQ ID NO: 278505 - DNA, 30 bp, Artificial Sequence
  Synthetic oligonucleotide
aaaaccagtaggtgtagtcggcacaatact

SEQ ID NO: 278506 - DNA, 30 bp, Artificial Sequence
  Synthetic oligonucleotide
ggatctgcgtggtccgcgcgcaccaatact

SEQ ID NO: 278507 - DNA, 30 bp, Artificial Sequence
  Synthetic oligonucleotide
atatcatacaccagaatcgaaaagaatact

SEQ ID NO: 278508 - DNA, 30 bp, Artificial Sequence
  Synthetic oligonucleotide
aggcgcttttaatatacagctggccatact

SEQ ID NO: 278509 - DNA, 30 bp, Artificial Sequence
  Synthetic oligonucleotide
cactcgcggtacaagtcgcggcggcatact

SEQ ID NO: 278510 - DNA, 30 bp, Artificial Sequence
  Synthetic oligonucleotide
aaacggagaggatgtccgagtcggcatact

SEQ ID NO: 278511 - DNA, 30 bp, Artificial Sequence
  Synthetic oligonucleotide
gttccccgatggtagtacaaatctcatact

SEQ ID NO: 278512 - DNA, 30 bp, Artificial Sequence
  Synthetic oligonucleotide
ccttcttagttcgggtgcatcggtcatact

SEQ ID NO: 278513 - DNA, 30 bp, Artificial Sequence
  Synthetic oligonucleotide
gggccctaatcggtagaagatggagatact

SEQ ID NO: 278514 - DNA, 30 bp, Artificial Sequence
  Synthetic oligonucleotide
gaagggaatcgccatttgaactacgatact

SEQ ID NO: 278515 - DNA, 30 bp, Artificial Sequence
  Synthetic oligonucleotide
cgtgggtctgcctgggtggcaagggatact

SEQ ID NO: 278516 - DNA, 30 bp, Artificial Sequence
  Synthetic oligonucleotide
aattgttgtccgtacaagatgctggatact

SEQ ID NO: 278517 - DNA, 30 bp, Artificial Sequence
  Synthetic oligonucleotide
tcttcaagggaggagcagtctgtctatact

SEQ ID NO: 278518 - DNA, 30 bp, Artificial Sequence
  Synthetic oligonucleotide
taatacgaaagtaaaatcggcacgtatact

SEQ ID NO: 278519 - DNA, 30 bp, Artificial Sequence
  Synthetic oligonucleotide
ggtgcacactataaactgtggtgttatact

SEQ ID NO: 278520 - DNA, 30 bp, Artificial Sequence
  Synthetic oligonucleotide
atttcgaaatggcatctgtctgtaactact

SEQ ID NO: 278521 - DNA, 30 bp, Artificial Sequence
  Synthetic oligonucleotide
tcataagcggagcaaagactgttaactact

SEQ ID NO: 278522 - DNA, 30 bp, Artificial Sequence
  Synthetic oligonucleotide
ttagagaggtacgtctgcagacccactact

SEQ ID NO: 278523 - DNA, 30 bp, Artificial Sequence
  Synthetic oligonucleotide
ccaaagattagacagttccggggcactact

SEQ ID NO: 278524 - DNA, 30 bp, Artificial Sequence
  Synthetic oligonucleotide
atactcacccgagggcgcggattcactact

SEQ ID NO: 278525 - DNA, 30 bp, Artificial Sequence
  Synthetic oligonucleotide
gccgcgctatatataggtaggaggactact

SEQ ID NO: 278526 - DNA, 30 bp, Artificial Sequence
  Synthetic oligonucleotide
cacgcacgtgtaaagaatcgagatactact

SEQ ID NO: 278527 - DNA, 30 bp, Artificial Sequence
  Synthetic oligonucleotide
ccgtcgtattgcttaggattgcaccctact

SEQ ID NO: 278528 - DNA, 30 bp, Artificial Sequence
  Synthetic oligonucleotide
cttgtcaagtgggtgatgattgcgcctact

SEQ ID NO: 278529 - DNA, 30 bp, Artificial Sequence
  Synthetic oligonucleotide
aagactaggaagaagaaccttcggcctact

SEQ ID NO: 278530 - DNA, 30 bp, Artificial Sequence
  Synthetic oligonucleotide
gaacgtaaaacgcgatcaccgtgtcctact

SEQ ID NO: 278531 - DNA, 30 bp, Artificial Sequence
  Synthetic oligonucleotide
gtggcaaccatactctattggtgtcctact

SEQ ID NO: 278532 - DNA, 28 bp, Artificial Sequence
  Synthetic oligonucleotide
cgtccggtcacacttaacctcagctact

SEQ ID NO: 278533 - DNA, 30 bp, Artificial Sequence
  Synthetic oligonucleotide
agtctaggggatggaacgcaattcgctact

SEQ ID NO: 278534 - DNA, 30 bp, Artificial Sequence
  Synthetic oligonucleotide
gaagcagttgctgacgcaccacaggctact

SEQ ID NO: 278535 - DNA, 30 bp, Artificial Sequence
  Synthetic oligonucleotide
acatacaatcgtaagaatttgatggctact

SEQ ID NO: 278536 - DNA, 30 bp, Artificial Sequence
  Synthetic oligonucleotide
ggactgtgtaaagaggtgagatatgctact

SEQ ID NO: 278537 - DNA, 30 bp, Artificial Sequence
  Synthetic oligonucleotide
cccgtgctggggcacagcttttatgctact

SEQ ID NO: 278538 - DNA, 30 bp, Artificial Sequence
  Synthetic oligonucleotide
aagagtgacgaccacataaaaattgctact

SEQ ID NO: 278539 - DNA, 30 bp, Artificial Sequence
  Synthetic oligonucleotide
tagcaaaaataatatctcgaggcatctact

SEQ ID NO: 278540 - DNA, 30 bp, Artificial Sequence
  Synthetic oligonucleotide
gggtaggtgagtggattggaagtctctact

SEQ ID NO: 278541 - DNA, 30 bp, Artificial Sequence
  Synthetic oligonucleotide
aggctcaactagtgctacagcgagtctact

SEQ ID NO: 278542 - DNA, 30 bp, Artificial Sequence
  Synthetic oligonucleotide
ctaccatccggtaagtcgatcatgtctact

SEQ ID NO: 278543 - DNA, 30 bp, Artificial Sequence
  Synthetic oligonucleotide
aaaaaaaagagtcgctcggcgatgtctact

SEQ ID NO: 278544 - DNA, 30 bp, Artificial Sequence
  Synthetic oligonucleotide
aaatggtctaatcggcaattatcttctact

SEQ ID NO: 278545 - DNA, 30 bp, Artificial Sequence
  Synthetic oligonucleotide
atgtttgatgacacatagcgtatgagtact

SEQ ID NO: 278546 - DNA, 30 bp, Artificial Sequence
  Synthetic oligonucleotide
ataacggaaggttttaggaggctgagtact

SEQ ID NO: 278547 - DNA, 30 bp, Artificial Sequence
  Synthetic oligonucleotide
agtgatacttactaaatgttaaatagtact

SEQ ID NO: 278548 - DNA, 30 bp, Artificial Sequence
  Synthetic oligonucleotide
aacatgagaccgttccacagccatagtact

SEQ ID NO: 278549 - DNA, 30 bp, Artificial Sequence
  Synthetic oligonucleotide
tgctttcccgtcacttaaactggtagtact

SEQ ID NO: 278550 - DNA, 30 bp, Artificial Sequence
  Synthetic oligonucleotide
cgggtttgcgatagtatcttctgtagtact

SEQ ID NO: 278551 - DNA, 30 bp, Artificial Sequence
  Synthetic oligonucleotide
gtacatcggatagaaagtcgcagacgtact

SEQ ID NO: 278552 - DNA, 30 bp, Artificial Sequence
  Synthetic oligonucleotide
cacgtatctgttcgtagaacggatcgtact

SEQ ID NO: 278553 - DNA, 30 bp, Artificial Sequence
  Synthetic oligonucleotide
acgaacaagggttgtctaggaattcgtact

SEQ ID NO: 278554 - DNA, 30 bp, Artificial Sequence
  Synthetic oligonucleotide
ggaccgaggtattgaaagacccttcgtact

SEQ ID NO: 278555 - DNA, 30 bp, Artificial Sequence
  Synthetic oligonucleotide
aagcaatgtccggatgagaatacgggtact

SEQ ID NO: 278556 - DNA, 30 bp, Artificial Sequence
  Synthetic oligonucleotide
gccattgcgacagaggaaggctctggtact

SEQ ID NO: 278557 - DNA, 30 bp, Artificial Sequence
  Synthetic oligonucleotide
tcggcgcggggtaagctacataaatgtact

SEQ ID NO: 278558 - DNA, 30 bp, Artificial Sequence
  Synthetic oligonucleotide
aggcttgtagaataaccgccacgatgtact

SEQ ID NO: 278559 - DNA, 30 bp, Artificial Sequence
  Synthetic oligonucleotide
cgagctggttatacagaatattcctgtact

SEQ ID NO: 278560 - DNA, 30 bp, Artificial Sequence
  Synthetic oligonucleotide
cgggattgacgataacaagcacgctgtact

SEQ ID NO: 278561 - DNA, 30 bp, Artificial Sequence
  Synthetic oligonucleotide
gtctaataaaacagacacgtattctgtact

SEQ ID NO: 278562 - DNA, 30 bp, Artificial Sequence
  Synthetic oligonucleotide
tccgcacaacgcctctgtattgggtgtact

SEQ ID NO: 278563 - DNA, 30 bp, Artificial Sequence
  Synthetic oligonucleotide
tgaatttcacagacaatcgttgtgtgtact

SEQ ID NO: 278564 - DNA, 30 bp, Artificial Sequence
  Synthetic oligonucleotide
gacctaaaatgtcgtgatcacaattgtact

SEQ ID NO: 278565 - DNA, 30 bp, Artificial Sequence
  Synthetic oligonucleotide
atggggtaaagcattgaaatattaattact

SEQ ID NO: 278566 - DNA, 30 bp, Artificial Sequence
  Synthetic oligonucleotide
ggcagacggttcctagcatcgatcattact

SEQ ID NO: 278567 - DNA, 30 bp, Artificial Sequence
  Synthetic oligonucleotide
aatagaaccagggggaatcgctggattact

SEQ ID NO: 278568 - DNA, 30 bp, Artificial Sequence
  Synthetic oligonucleotide
tcaattcacgataggacttcacgtattact

SEQ ID NO: 278569 - DNA, 30 bp, Artificial Sequence
  Synthetic oligonucleotide
agtagtagatcagagcttggtaaacttact

SEQ ID NO: 278570 - DNA, 30 bp, Artificial Sequence
  Synthetic oligonucleotide
gtaaccgtcgtattcttctgcaaccttact

SEQ ID NO: 278571 - DNA, 30 bp, Artificial Sequence
  Synthetic oligonucleotide
cattaaaccttaccggtctagcaccttact

SEQ ID NO: 278572 - DNA, 30 bp, Artificial Sequence
  Synthetic oligonucleotide
gataatatgatacggcaccagtcgcttact

SEQ ID NO: 278573 - DNA, 30 bp, Artificial Sequence
  Synthetic oligonucleotide
gggcctaggcgtactcgggcttaagttact

SEQ ID NO: 278574 - DNA, 30 bp, Artificial Sequence
  Synthetic oligonucleotide
gtgtgcggtcagtctactgtagtggttact

SEQ ID NO: 278575 - DNA, 30 bp, Artificial Sequence
  Synthetic oligonucleotide
gatgcgtatggaaatccaaacctatttact

SEQ ID NO: 278576 - DNA, 30 bp, Artificial Sequence
  Synthetic oligonucleotide
aacttacatggtgacgatttagtatttact

SEQ ID NO: 278577 - DNA, 30 bp, Artificial Sequence
  Synthetic oligonucleotide
ggaactgacggagtcctggaagagtttact

SEQ ID NO: 278578 - DNA, 30 bp, Artificial Sequence
  Synthetic oligonucleotide
attcaggaggcttgccagcgatggtttact

SEQ ID NO: 278579 - DNA, 30 bp, Artificial Sequence
  Synthetic oligonucleotide
acgtctgatgccacttacttccattttact

SEQ ID NO: 278580 - DNA, 30 bp, Artificial Sequence
  Synthetic oligonucleotide
gaggatctcgcatatgattgctcttttact

SEQ ID NO: 278581 - DNA, 30 bp, Artificial Sequence
  Synthetic oligonucleotide
cagaaaaagtcgccaggtctttaaaaacct

SEQ ID NO: 278582 - DNA, 30 bp, Artificial Sequence
  Synthetic oligonucleotide
gagttggaactatttggcggtgtcaaacct

SEQ ID NO: 278583 - DNA, 30 bp, Artificial Sequence
  Synthetic oligonucleotide
gtgagggtgccaagggaaacagtgaaacct

SEQ ID NO: 278584 - DNA, 30 bp, Artificial Sequence
  Synthetic oligonucleotide
ccccgtaccgccataagaaccttgaaacct

SEQ ID NO: 278585 - DNA, 30 bp, Artificial Sequence
  Synthetic oligonucleotide
tcttggtaatcaaatgtccaaagtaaacct

SEQ ID NO: 278586 - DNA, 30 bp, Artificial Sequence
  Synthetic oligonucleotide
gtgcggtgaagggagaacaaggaacaacct

SEQ ID NO: 278587 - DNA, 30 bp, Artificial Sequence
  Synthetic oligonucleotide
gcccgagggcggggtcccgagacacaacct

SEQ ID NO: 278588 - DNA, 30 bp, Artificial Sequence
  Synthetic oligonucleotide
tcgggttttgttacatcgtgtccacaacct

SEQ ID NO: 278589 - DNA, 30 bp, Artificial Sequence
  Synthetic oligonucleotide
aaaataaggaagtttggcgtaggacaacct

SEQ ID NO: 278590 - DNA, 30 bp, Artificial Sequence
  Synthetic oligonucleotide
tagagaggttcggttctaatctggcaacct

SEQ ID NO: 278591 - DNA, 30 bp, Artificial Sequence
  Synthetic oligonucleotide
ggtcgccgtttcgatgtccgcctgcaacct

SEQ ID NO: 278592 - DNA, 30 bp, Artificial Sequence
  Synthetic oligonucleotide
aagtcgcactcaagactaagaggagaacct

SEQ ID NO: 278593 - DNA, 30 bp, Artificial Sequence
  Synthetic oligonucleotide
gaatggatttaaatgcgagcaaatgaacct

SEQ ID NO: 278594 - DNA, 30 bp, Artificial Sequence
  Synthetic oligonucleotide
gtggggggcaggccgtacgaactataacct

SEQ ID NO: 278595 - DNA, 30 bp, Artificial Sequence
  Synthetic oligonucleotide
aatcaggtcacggtatctcccaactaacct

SEQ ID NO: 278596 - DNA, 30 bp, Artificial Sequence
  Synthetic oligonucleotide
ttccgctggcatcgtgagggcggttaacct

SEQ ID NO: 278597 - DNA, 29 bp, Artificial Sequence
  Synthetic oligonucleotide
gtgatgactcactcggcccgatttaacct

SEQ ID NO: 278598 - DNA, 30 bp, Artificial Sequence
  Synthetic oligonucleotide
tcaaatagtgagagcaatatagacacacct

SEQ ID NO: 278599 - DNA, 30 bp, Artificial Sequence
  Synthetic oligonucleotide
tgaggttcggggcaactaaggaatacacct

SEQ ID NO: 278600 - DNA, 30 bp, Artificial Sequence
  Synthetic oligonucleotide
agtaaggtataccgaccaattaggccacct

SEQ ID NO: 278601 - DNA, 30 bp, Artificial Sequence
  Synthetic oligonucleotide
ttcagtacgtttaaatcacatcggccacct

SEQ ID NO: 278602 - DNA, 30 bp, Artificial Sequence
  Synthetic oligonucleotide
ataatacccagtaatttagtgctgccacct

SEQ ID NO: 278603 - DNA, 30 bp, Artificial Sequence
  Synthetic oligonucleotide
cacctatgttcacactttggtgatccacct

SEQ ID NO: 278604 - DNA, 30 bp, Artificial Sequence
  Synthetic oligonucleotide
caaggtgattgaccatgaggagcagcacct

SEQ ID NO: 278605 - DNA, 30 bp, Artificial Sequence
  Synthetic oligonucleotide
cactcgatcaaaaagcgattaagcgcacct

SEQ ID NO: 278606 - DNA, 30 bp, Artificial Sequence
  Synthetic oligonucleotide
gctccgacctcgggtagattgatcgcacct

SEQ ID NO: 278607 - DNA, 30 bp, Artificial Sequence
  Synthetic oligonucleotide
taggcacttatagtatcagcgacggcacct

SEQ ID NO: 278608 - DNA, 30 bp, Artificial Sequence
  Synthetic oligonucleotide
gagcagaagatatgaaatcttcgtgcacct

SEQ ID NO: 278609 - DNA, 30 bp, Artificial Sequence
  Synthetic oligonucleotide
tgagatggggcgacacagcgaaaatcacct

SEQ ID NO: 278610 - DNA, 30 bp, Artificial Sequence
  Synthetic oligonucleotide
aacacttgttcgagcctaattacgtcacct

SEQ ID NO: 278611 - DNA, 30 bp, Artificial Sequence
  Synthetic oligonucleotide
gagagggcggctaacttcgggtattcacct

SEQ ID NO: 278612 - DNA, 30 bp, Artificial Sequence
  Synthetic oligonucleotide
tgaagcagggcaactcaaggaatttcacct

SEQ ID NO: 278613 - DNA, 30 bp, Artificial Sequence
  Synthetic oligonucleotide
gcttggaggcccataacggtcaaaagacct

SEQ ID NO: 278614 - DNA, 30 bp, Artificial Sequence
  Synthetic oligonucleotide
gggtgatcacgatcactaattgtaagacct

SEQ ID NO: 278615 - DNA, 30 bp, Artificial Sequence
  Synthetic oligonucleotide
tagtcacagtaaccagctggggacagacct

SEQ ID NO: 278616 - DNA, 30 bp, Artificial Sequence
  Synthetic oligonucleotide
ggtttgatgcttatgcgatactaccgacct

SEQ ID NO: 278617 - DNA, 30 bp, Artificial Sequence
  Synthetic oligonucleotide
gagataagggtcaggcaacgtcagcgacct

SEQ ID NO: 278618 - DNA, 31 bp, Artificial Sequence
  Synthetic oligonucleotide
cagttagcgaaagaagacaactgggcgacct

SEQ ID NO: 278619 - DNA, 30 bp, Artificial Sequence
  Synthetic oligonucleotide
tgaattgttttccataccgactccggacct

SEQ ID NO: 278620 - DNA, 30 bp, Artificial Sequence
  Synthetic oligonucleotide
gctgcacagacggtaggtatgatcggacct

SEQ ID NO: 278621 - DNA, 29 bp, Artificial Sequence
  Synthetic oligonucleotide
gggcaggggtgggggatggttagggacct

SEQ ID NO: 278622 - DNA, 30 bp, Artificial Sequence
  Synthetic oligonucleotide
agcgggatgtttctacggttcagctgacct

SEQ ID NO: 278623 - DNA, 30 bp, Artificial Sequence
  Synthetic oligonucleotide
aagcttgcgccctaaccaatggattgacct

SEQ ID NO: 278624 - DNA, 30 bp, Artificial Sequence
  Synthetic oligonucleotide
gtttggggctaacgtcgaaaagcttgacct

SEQ ID NO: 278625 - DNA, 30 bp, Artificial Sequence
  Synthetic oligonucleotide
ttgggttcttcatcctaaagcgtaatacct

SEQ ID NO: 278626 - DNA, 30 bp, Artificial Sequence
  Synthetic oligonucleotide
ggaagcattcgctaaattagcgtaatacct

SEQ ID NO: 278627 - DNA, 30 bp, Artificial Sequence
  Synthetic oligonucleotide
acatggttgtcatcggataggagcatacct

SEQ ID NO: 278628 - DNA, 30 bp, Artificial Sequence
  Synthetic oligonucleotide
ctttggatgacttgtcgcgtgaagatacct

SEQ ID NO: 278629 - DNA, 30 bp, Artificial Sequence
  Synthetic oligonucleotide
aagattcaaagggttgcccgttttatacct

SEQ ID NO: 278630 - DNA, 30 bp, Artificial Sequence
  Synthetic oligonucleotide
tacaccttaaccgaagatattcacctacct

SEQ ID NO: 278631 - DNA, 30 bp, Artificial Sequence
  Synthetic oligonucleotide
cgttaacaccccgtctgaattgccctacct

SEQ ID NO: 278632 - DNA, 30 bp, Artificial Sequence
  Synthetic oligonucleotide
ggctgccgatcgtttaggtcgtatctacct

SEQ ID NO: 278633 - DNA, 30 bp, Artificial Sequence
  Synthetic oligonucleotide
tggtcgcggcgttcacgacacccagtacct

SEQ ID NO: 278634 - DNA, 30 bp, Artificial Sequence
  Synthetic oligonucleotide
caccttgagggaattgggatgtaggtacct

SEQ ID NO: 278635 - DNA, 30 bp, Artificial Sequence
  Synthetic oligonucleotide
ttagagcggtcacagacagtcgaattacct

SEQ ID NO: 278636 - DNA, 30 bp, Artificial Sequence
  Synthetic oligonucleotide
cgtctcaatctgaagggtttgaggttacct

SEQ ID NO: 278637 - DNA, 30 bp, Artificial Sequence
  Synthetic oligonucleotide
gcggtactgaactgtctatacgatttacct

SEQ ID NO: 278638 - DNA, 30 bp, Artificial Sequence
  Synthetic oligonucleotide
gaggcacatggaatgtgatcattcaaccct

SEQ ID NO: 278639 - DNA, 30 bp, Artificial Sequence
  Synthetic oligonucleotide
gtggaaggggttcacacttaccgacaccct

SEQ ID NO: 278640 - DNA, 30 bp, Artificial Sequence
  Synthetic oligonucleotide
aatagagggtagagttgtgtacttgaccct

SEQ ID NO: 278641 - DNA, 30 bp, Artificial Sequence
  Synthetic oligonucleotide
gccacaggttctactgactgcgttgaccct

SEQ ID NO: 278642 - DNA, 30 bp, Artificial Sequence
  Synthetic oligonucleotide
cgttgaacatgaccgttgctagtataccct

SEQ ID NO: 278643 - DNA, 30 bp, Artificial Sequence
  Synthetic oligonucleotide
gtaaggacgaatctgtcaaaaatctaccct

SEQ ID NO: 278644 - DNA, 30 bp, Artificial Sequence
  Synthetic oligonucleotide
gctacaagtcccggtatcacatggtaccct

SEQ ID NO: 278645 - DNA, 30 bp, Artificial Sequence
  Synthetic oligonucleotide
atacgaccagttacgcgataggtgtaccct

SEQ ID NO: 278646 - DNA, 30 bp, Artificial Sequence
  Synthetic oligonucleotide
acgtcgggccatagctgtatgctttaccct

SEQ ID NO: 278647 - DNA, 30 bp, Artificial Sequence
  Synthetic oligonucleotide
agatagttcattcacatggaagagacccct

SEQ ID NO: 278648 - DNA, 30 bp, Artificial Sequence
  Synthetic oligonucleotide
gaaaggatagaattagctcattagacccct

SEQ ID NO: 278649 - DNA, 30 bp, Artificial Sequence
  Synthetic oligonucleotide
cgcctgggccgagggcggtacgggacccct

SEQ ID NO: 278650 - DNA, 30 bp, Artificial Sequence
  Synthetic oligonucleotide
tgcttcgtctgtgtatgacgtgcaccccct

SEQ ID NO: 278651 - DNA, 30 bp, Artificial Sequence
  Synthetic oligonucleotide
agtggcgttgatattcgtccatccccccct

SEQ ID NO: 278652 - DNA, 30 bp, Artificial Sequence
  Synthetic oligonucleotide
ccatatcaagcgaagacttttagcccccct

SEQ ID NO: 278653 - DNA, 30 bp, Artificial Sequence
  Synthetic oligonucleotide
ctcccacgactagtgagcattgggccccct

SEQ ID NO: 278654 - DNA, 30 bp, Artificial Sequence
  Synthetic oligonucleotide
ccagttcgactaagaagctaatgtccccct

SEQ ID NO: 278655 - DNA, 30 bp, Artificial Sequence
  Synthetic oligonucleotide
gcggctatatcgtctcactaaaaagcccct

SEQ ID NO: 278656 - DNA, 30 bp, Artificial Sequence
  Synthetic oligonucleotide
agctgatctcttggtgcccgggacgcccct

SEQ ID NO: 278657 - DNA, 30 bp, Artificial Sequence
  Synthetic oligonucleotide
atcatcccattttaagtccagcgcgcccct

SEQ ID NO: 278658 - DNA, 30 bp, Artificial Sequence
  Synthetic oligonucleotide
aaacaggcttgtaatcccacactggcccct

SEQ ID NO: 278659 - DNA, 30 bp, Artificial Sequence
  Synthetic oligonucleotide
gggcggcagggtaatcacttcgcatcccct

SEQ ID NO: 278660 - DNA, 30 bp, Artificial Sequence
  Synthetic oligonucleotide
ttatagcgtgggtctatgtctggctcccct

SEQ ID NO: 278661 - DNA, 30 bp, Artificial Sequence
  Synthetic oligonucleotide
ggtcggcccgactggcggtaaacttcccct

SEQ ID NO: 278662 - DNA, 30 bp, Artificial Sequence
  Synthetic oligonucleotide
tttgataaacgcgacgcaaactgttcccct

SEQ ID NO: 278663 - DNA, 30 bp, Artificial Sequence
  Synthetic oligonucleotide
agcaccattgaagaacaaattctttcccct

SEQ ID NO: 278664 - DNA, 30 bp, Artificial Sequence
  Synthetic oligonucleotide
tatgctgggacccctgacgggggaagccct

SEQ ID NO: 278665 - DNA, 30 bp, Artificial Sequence
  Synthetic oligonucleotide
ggctgtattagcgctgtttcattcagccct

SEQ ID NO: 278666 - DNA, 30 bp, Artificial Sequence
  Synthetic oligonucleotide
gatgttcatggacgtggcgaccggagccct

SEQ ID NO: 278667 - DNA, 30 bp, Artificial Sequence
  Synthetic oligonucleotide
tgagcaaacgggcgcagaatcaatagccct

SEQ ID NO: 278668 - DNA, 30 bp, Artificial Sequence
  Synthetic oligonucleotide
gtctgccaggcatttcaggtcgctagccct

SEQ ID NO: 278669 - DNA, 30 bp, Artificial Sequence
  Synthetic oligonucleotide
tcgatgtgcaaaacaggtattagacgccct

SEQ ID NO: 278670 - DNA, 30 bp, Artificial Sequence
  Synthetic oligonucleotide
aaatgatatataccaaaggcgaatcgccct

SEQ ID NO: 278671 - DNA, 30 bp, Artificial Sequence
  Synthetic oligonucleotide
acggcactggagtcggattacgttcgccct

SEQ ID NO: 278672 - DNA, 30 bp, Artificial Sequence
  Synthetic oligonucleotide
gggttgtcttacgtcatactgaaaggccct

SEQ ID NO: 278673 - DNA, 30 bp, Artificial Sequence
  Synthetic oligonucleotide
tgcatccagttcaaggattatccgggccct

SEQ ID NO: 278674 - DNA, 30 bp, Artificial Sequence
  Synthetic oligonucleotide
atcgccggactgacaccaccctggggccct

SEQ ID NO: 278675 - DNA, 30 bp, Artificial Sequence
  Synthetic oligonucleotide
gtcgggtggtgacagagcgataatggccct

SEQ ID NO: 278676 - DNA, 30 bp, Artificial Sequence
  Synthetic oligonucleotide
cgcgtggttagaggatcgaaggatggccct

SEQ ID NO: 278677 - DNA, 30 bp, Artificial Sequence
  Synthetic oligonucleotide
cctaaagaccgactcggctttatatgccct

SEQ ID NO: 278678 - DNA, 30 bp, Artificial Sequence
  Synthetic oligonucleotide
cccctctcgctttctattccgttgtgccct

SEQ ID NO: 278679 - DNA, 30 bp, Artificial Sequence
  Synthetic oligonucleotide
ctactcggagccaaaggatataaaatccct

SEQ ID NO: 278680 - DNA, 30 bp, Artificial Sequence
  Synthetic oligonucleotide
cgctcacgaaacccgccggcttcaatccct

SEQ ID NO: 278681 - DNA, 30 bp, Artificial Sequence
  Synthetic oligonucleotide
taagcagccggacgtgatcgaattatccct

SEQ ID NO: 278682 - DNA, 30 bp, Artificial Sequence
  Synthetic oligonucleotide
agtctcatgttctgtggaacgtgactccct

SEQ ID NO: 278683 - DNA, 30 bp, Artificial Sequence
  Synthetic oligonucleotide
tttataccgacacggacatgctcgctccct

SEQ ID NO: 278684 - DNA, 30 bp, Artificial Sequence
  Synthetic oligonucleotide
acgacgcttatcacgtacgttcatctccct

SEQ ID NO: 278685 - DNA, 30 bp, Artificial Sequence
  Synthetic oligonucleotide
ttgggggtatatctggagaagggtctccct

SEQ ID NO: 278686 - DNA, 30 bp, Artificial Sequence
  Synthetic oligonucleotide
ccgcgtacaagagcaggtccgcttctccct

SEQ ID NO: 278687 - DNA, 30 bp, Artificial Sequence
  Synthetic oligonucleotide
gtttagaaagaatcgcttcaaaccgtccct

SEQ ID NO: 278688 - DNA, 30 bp, Artificial Sequence
  Synthetic oligonucleotide
caagggtttccaatccggacggccgtccct

SEQ ID NO: 278689 - DNA, 30 bp, Artificial Sequence
  Synthetic oligonucleotide
ttgattaagacgtgattaagatccgtccct

SEQ ID NO: 278690 - DNA, 30 bp, Artificial Sequence
  Synthetic oligonucleotide
gaaatagagtattgacatgcctgcgtccct

SEQ ID NO: 278691 - DNA, 30 bp, Artificial Sequence
  Synthetic oligonucleotide
ccttctataggtcgattagattcggtccct

SEQ ID NO: 278692 - DNA, 30 bp, Artificial Sequence
  Synthetic oligonucleotide
acgaaacttaagcggctcgctaaattccct

SEQ ID NO: 278693 - DNA, 30 bp, Artificial Sequence
  Synthetic oligonucleotide
aatggcggcatgtctacgacattattccct

SEQ ID NO: 278694 - DNA, 30 bp, Artificial Sequence
  Synthetic oligonucleotide
tgggggcaaggttggcactaggtcttccct

SEQ ID NO: 278695 - DNA, 30 bp, Artificial Sequence
  Synthetic oligonucleotide
cacaaggttaatatcagactacaaaagcct

SEQ ID NO: 278696 - DNA, 30 bp, Artificial Sequence
  Synthetic oligonucleotide
aaaatgaagaaggccgtaccatgcaagcct

SEQ ID NO: 278697 - DNA, 30 bp, Artificial Sequence
  Synthetic oligonucleotide
ggcgggattataagtccaggtctgaagcct

SEQ ID NO: 278698 - DNA, 30 bp, Artificial Sequence
  Synthetic oligonucleotide
aagtaaaatggccacatcacggtgaagcct

SEQ ID NO: 278699 - DNA, 30 bp, Artificial Sequence
  Synthetic oligonucleotide
caaaagtctttctactaatccattcagcct

SEQ ID NO: 278700 - DNA, 30 bp, Artificial Sequence
  Synthetic oligonucleotide
gcccatctagacgtcacgttcggagagcct

SEQ ID NO: 278701 - DNA, 30 bp, Artificial Sequence
  Synthetic oligonucleotide
aacccgatatggggccggaaaagcgagcct

SEQ ID NO: 278702 - DNA, 30 bp, Artificial Sequence
  Synthetic oligonucleotide
gaaccaataataataatgcaaaatgagcct

SEQ ID NO: 278703 - DNA, 30 bp, Artificial Sequence
  Synthetic oligonucleotide
catagaagccggttagaacagtctgagcct

SEQ ID NO: 278704 - DNA, 30 bp, Artificial Sequence
  Synthetic oligonucleotide
gtgatcagtgcaatatataattctgagcct

SEQ ID NO: 278705 - DNA, 30 bp, Artificial Sequence
  Synthetic oligonucleotide
ctaagtatgacgccttagaatgcatagcct

SEQ ID NO: 278706 - DNA, 30 bp, Artificial Sequence
  Synthetic oligonucleotide
cactggactcttcatactaatgcatagcct

SEQ ID NO: 278707 - DNA, 30 bp, Artificial Sequence
  Synthetic oligonucleotide
acccctgcccacagtatgcctcgctagcct

SEQ ID NO: 278708 - DNA, 30 bp, Artificial Sequence
  Synthetic oligonucleotide
cacttactcgccaaacccaccaggtagcct

SEQ ID NO: 278709 - DNA, 30 bp, Artificial Sequence
  Synthetic oligonucleotide
cggtcgatggtaggttagctcgcttagcct

SEQ ID NO: 278710 - DNA, 30 bp, Artificial Sequence
  Synthetic oligonucleotide
aacggtatagtctagcccacgtcttagcct

SEQ ID NO: 278711 - DNA, 30 bp, Artificial Sequence
  Synthetic oligonucleotide
tgggtgtatcccagcggacttgagacgcct

SEQ ID NO: 278712 - DNA, 30 bp, Artificial Sequence
  Synthetic oligonucleotide
tgtgattacgggtagtaagctccgacgcct

SEQ ID NO: 278713 - DNA, 30 bp, Artificial Sequence
  Synthetic oligonucleotide
acgacgctaacgagtcggaaacggacgcct

SEQ ID NO: 278714 - DNA, 30 bp, Artificial Sequence
  Synthetic oligonucleotide
catggggcggcaacggacctattgacgcct

SEQ ID NO: 278715 - DNA, 30 bp, Artificial Sequence
  Synthetic oligonucleotide
ggtactgcaccttttctcggagcaccgcct

SEQ ID NO: 278716 - DNA, 30 bp, Artificial Sequence
  Synthetic oligonucleotide
ttgcagtgaatgggctggagacggccgcct

SEQ ID NO: 278717 - DNA, 30 bp, Artificial Sequence
  Synthetic oligonucleotide
ggcgaccggtcgtgactggaagggccgcct

SEQ ID NO: 278718 - DNA, 30 bp, Artificial Sequence
  Synthetic oligonucleotide
atgactgtccggaggagcgcagcagcgcct

SEQ ID NO: 278719 - DNA, 30 bp, Artificial Sequence
  Synthetic oligonucleotide
tatagagggtcatctgcatcaggagcgcct

SEQ ID NO: 278720 - DNA, 30 bp, Artificial Sequence
  Synthetic oligonucleotide
aaacacagaattatagtcatattcgcgcct

SEQ ID NO: 278721 - DNA, 30 bp, Artificial Sequence
  Synthetic oligonucleotide
ggacactaagaaacgttgttttaggcgcct

SEQ ID NO: 278722 - DNA, 30 bp, Artificial Sequence
  Synthetic oligonucleotide
gtacgggaatcatggggtctcccggcgcct

SEQ ID NO: 278723 - DNA, 30 bp, Artificial Sequence
  Synthetic oligonucleotide
aataagtagctaacgtcttagtgatcgcct

SEQ ID NO: 278724 - DNA, 30 bp, Artificial Sequence
  Synthetic oligonucleotide
caccgaggggcagtagaataggcctcgcct

SEQ ID NO: 278725 - DNA, 30 bp, Artificial Sequence
  Synthetic oligonucleotide
aggttcatgtgtaatcactggtcttcgcct

SEQ ID NO: 278726 - DNA, 31 bp, Artificial Sequence
  Synthetic oligonucleotide
tcatgcggaaggttacgtattcatttcgcct

SEQ ID NO: 278727 - DNA, 30 bp, Artificial Sequence
  Synthetic oligonucleotide
tcgcgcggaacacggctatccataaggcct

SEQ ID NO: 278728 - DNA, 30 bp, Artificial Sequence
  Synthetic oligonucleotide
atgcctaattcaattgacagggtaaggcct

SEQ ID NO: 278729 - DNA, 30 bp, Artificial Sequence
  Synthetic oligonucleotide
accaagactggggttatgaattacaggcct

SEQ ID NO: 278730 - DNA, 30 bp, Artificial Sequence
  Synthetic oligonucleotide
gtttgagagccaaggaaccgtaggaggcct

SEQ ID NO: 278731 - DNA, 31 bp, Artificial Sequence
  Synthetic oligonucleotide
attcggtaacgccgaactggaaattaggcct

SEQ ID NO: 278732 - DNA, 30 bp, Artificial Sequence
  Synthetic oligonucleotide
cgcaaagaagtacgatgaatcgtacggcct

SEQ ID NO: 278733 - DNA, 30 bp, Artificial Sequence
  Synthetic oligonucleotide
acctcaaatgcgggtcacagccaccggcct

SEQ ID NO: 278734 - DNA, 30 bp, Artificial Sequence
  Synthetic oligonucleotide
cactaggttagcccatacattacccggcct

SEQ ID NO: 278735 - DNA, 30 bp, Artificial Sequence
  Synthetic oligonucleotide
gggagtgtagtttgctagtaggctcggcct

SEQ ID NO: 278736 - DNA, 30 bp, Artificial Sequence
  Synthetic oligonucleotide
acgtgctcatattaggcaatccacgggcct

SEQ ID NO: 278737 - DNA, 30 bp, Artificial Sequence
  Synthetic oligonucleotide
gcctactacagggggtcccagtccgggcct

SEQ ID NO: 278738 - DNA, 30 bp, Artificial Sequence
  Synthetic oligonucleotide
acatgcatcaaaatcgcttagtgcgggcct

SEQ ID NO: 278739 - DNA, 30 bp, Artificial Sequence
  Synthetic oligonucleotide
aagagcagttgggcacaacgcacggggcct

SEQ ID NO: 278740 - DNA, 30 bp, Artificial Sequence
  Synthetic oligonucleotide
cgccaaaggagttgaatgaaatgatggcct

SEQ ID NO: 278741 - DNA, 30 bp, Artificial Sequence
  Synthetic oligonucleotide
gtgaatgaccttcagggcctgtgatggcct

SEQ ID NO: 278742 - DNA, 30 bp, Artificial Sequence
  Synthetic oligonucleotide
cctcggcgtgagaccgggcgcctatggcct

SEQ ID NO: 278743 - DNA, 30 bp, Artificial Sequence
  Synthetic oligonucleotide
agatacgctattgagcggaagacttggcct

SEQ ID NO: 278744 - DNA, 30 bp, Artificial Sequence
  Synthetic oligonucleotide
ctgacagctgaaagagaattgacaatgcct

SEQ ID NO: 278745 - DNA, 30 bp, Artificial Sequence
  Synthetic oligonucleotide
ccgtggtaggagaaactaatatagatgcct

SEQ ID NO: 278746 - DNA, 30 bp, Artificial Sequence
  Synthetic oligonucleotide
aatgacccccgtgttctgcaccacctgcct

SEQ ID NO: 278747 - DNA, 30 bp, Artificial Sequence
  Synthetic oligonucleotide
tgctatcgcttcatgagaattgggctgcct

SEQ ID NO: 278748 - DNA, 31 bp, Artificial Sequence
  Synthetic oligonucleotide
tggcgggtctcgtgtcccggctttgctgcct

SEQ ID NO: 278749 - DNA, 30 bp, Artificial Sequence
  Synthetic oligonucleotide
tgcgcaatcttgattactcgttatctgcct

SEQ ID NO: 278750 - DNA, 30 bp, Artificial Sequence
  Synthetic oligonucleotide
gttcggtgaggaataacttggccggtgcct

SEQ ID NO: 278751 - DNA, 30 bp, Artificial Sequence
  Synthetic oligonucleotide
aggtgccacatgatcaaacaagcggtgcct

SEQ ID NO: 278752 - DNA, 30 bp, Artificial Sequence
  Synthetic oligonucleotide
aaacggtaaagattctcgttctctttgcct

SEQ ID NO: 278753 - DNA, 30 bp, Artificial Sequence
  Synthetic oligonucleotide
gaatggaaacacagtttcagtcccaatcct

SEQ ID NO: 278754 - DNA, 30 bp, Artificial Sequence
  Synthetic oligonucleotide
agcacgaatgacaggcctcacctcaatcct

SEQ ID NO: 278755 - DNA, 30 bp, Artificial Sequence
  Synthetic oligonucleotide
ggcgtttgcatagtaaatatacggaatcct

SEQ ID NO: 278756 - DNA, 30 bp, Artificial Sequence
  Synthetic oligonucleotide
ggaggatcttggctgttacatctacatcct

SEQ ID NO: 278757 - DNA, 30 bp, Artificial Sequence
  Synthetic oligonucleotide
tatatacgttgaattcacagtgtccatcct

SEQ ID NO: 278758 - DNA, 30 bp, Artificial Sequence
  Synthetic oligonucleotide
ggaggggcaacgggcgggagcgggcatcct

SEQ ID NO: 278759 - DNA, 30 bp, Artificial Sequence
  Synthetic oligonucleotide
cgacgcttgtgattggggctgattgatcct

SEQ ID NO: 278760 - DNA, 30 bp, Artificial Sequence
  Synthetic oligonucleotide
aaggcgctctacggtcagtacacatatcct

SEQ ID NO: 278761 - DNA, 30 bp, Artificial Sequence
  Synthetic oligonucleotide
agaaactaacgccgacaatggagctatcct

SEQ ID NO: 278762 - DNA, 30 bp, Artificial Sequence
  Synthetic oligonucleotide
aagtagacaagctaaggtaccagttatcct

SEQ ID NO: 278763 - DNA, 30 bp, Artificial Sequence
  Synthetic oligonucleotide
tggtgaacgtcaggtattccccgaactcct

SEQ ID NO: 278764 - DNA, 30 bp, Artificial Sequence
  Synthetic oligonucleotide
taggggttataccaattgctaggcactcct

SEQ ID NO: 278765 - DNA, 30 bp, Artificial Sequence
  Synthetic oligonucleotide
tcgaaaataatcagaattgttactactcct

SEQ ID NO: 278766 - DNA, 30 bp, Artificial Sequence
  Synthetic oligonucleotide
taaatccagcacaatggtgtgcgacctcct

SEQ ID NO: 278767 - DNA, 30 bp, Artificial Sequence
  Synthetic oligonucleotide
cgctagaaattgaggctgcagaacgctcct

SEQ ID NO: 278768 - DNA, 30 bp, Artificial Sequence
  Synthetic oligonucleotide
cgccagccccatctccgattatttgctcct

SEQ ID NO: 278769 - DNA, 30 bp, Artificial Sequence
  Synthetic oligonucleotide
agctctgaccaaaagaataaaaaatctcct

SEQ ID NO: 278770 - DNA, 30 bp, Artificial Sequence
  Synthetic oligonucleotide
aaagacagcagattgtttcgctaatctcct

SEQ ID NO: 278771 - DNA, 30 bp, Artificial Sequence
  Synthetic oligonucleotide
taagtggaccatcgcttggagtcgtctcct

SEQ ID NO: 278772 - DNA, 30 bp, Artificial Sequence
  Synthetic oligonucleotide
cccgtagaacgcgatgtcaccctaagtcct

SEQ ID NO: 278773 - DNA, 30 bp, Artificial Sequence
  Synthetic oligonucleotide
agaaggttcacgatggcatgtctaagtcct

SEQ ID NO: 278774 - DNA, 30 bp, Artificial Sequence
  Synthetic oligonucleotide
gtagtacaccccgaagcatgcaacagtcct

SEQ ID NO: 278775 - DNA, 30 bp, Artificial Sequence
  Synthetic oligonucleotide
ttctagtccggggaaaacaaaacgagtcct

SEQ ID NO: 278776 - DNA, 30 bp, Artificial Sequence
  Synthetic oligonucleotide
aaagtattattatatcgtcatacgagtcct

SEQ ID NO: 278777 - DNA, 30 bp, Artificial Sequence
  Synthetic oligonucleotide
cttttgtagttatcggggactgatagtcct

SEQ ID NO: 278778 - DNA, 30 bp, Artificial Sequence
  Synthetic oligonucleotide
ggactataatgaccataatagactagtcct

SEQ ID NO: 278779 - DNA, 30 bp, Artificial Sequence
  Synthetic oligonucleotide
gctccgtttgatctaaggtctcgacgtcct

SEQ ID NO: 278780 - DNA, 30 bp, Artificial Sequence
  Synthetic oligonucleotide
gtacacaccatttggtgtttggtacgtcct

SEQ ID NO: 278781 - DNA, 30 bp, Artificial Sequence
  Synthetic oligonucleotide
caatatggtagtcagaatcagcaccgtcct

SEQ ID NO: 278782 - DNA, 30 bp, Artificial Sequence
  Synthetic oligonucleotide
tctctgttatcttgcaaaacggcgcgtcct

SEQ ID NO: 278783 - DNA, 30 bp, Artificial Sequence
  Synthetic oligonucleotide
tctgtttccgctaagtatgttgatcgtcct

SEQ ID NO: 278784 - DNA, 30 bp, Artificial Sequence
  Synthetic oligonucleotide
gaaaccgcgtccgaacgatctttaggtcct

SEQ ID NO: 278785 - DNA, 30 bp, Artificial Sequence
  Synthetic oligonucleotide
ttgtggatgcatggtagatgcgacggtcct

SEQ ID NO: 278786 - DNA, 30 bp, Artificial Sequence
  Synthetic oligonucleotide
gggtaggaattttttcggcgttctggtcct

SEQ ID NO: 278787 - DNA, 30 bp, Artificial Sequence
  Synthetic oligonucleotide
ttctacatgtgattgtttctcttttgtcct

SEQ ID NO: 278788 - DNA, 30 bp, Artificial Sequence
  Synthetic oligonucleotide
aacgagttcactcgtaaaactcgaattcct

SEQ ID NO: 278789 - DNA, 30 bp, Artificial Sequence
  Synthetic oligonucleotide
caggcgcccttagaatatatctgtattcct

SEQ ID NO: 278790 - DNA, 30 bp, Artificial Sequence
  Synthetic oligonucleotide
ttcccagcatgctaaatacgctgccttcct

SEQ ID NO: 278791 - DNA, 30 bp, Artificial Sequence
  Synthetic oligonucleotide
taattagtttcagattgctaccttgttcct

SEQ ID NO: 278792 - DNA, 30 bp, Artificial Sequence
  Synthetic oligonucleotide
tttctgtagtctgtacaacgttttgttcct

SEQ ID NO: 278793 - DNA, 30 bp, Artificial Sequence
  Synthetic oligonucleotide
taaaggctactcgggataaggctatttcct

SEQ ID NO: 278794 - DNA, 30 bp, Artificial Sequence
  Synthetic oligonucleotide
tcgggattgcgcaataagaaagactttcct

SEQ ID NO: 278795 - DNA, 30 bp, Artificial Sequence
  Synthetic oligonucleotide
tacacgatatttcttaggcatgcttttcct

SEQ ID NO: 278796 - DNA, 30 bp, Artificial Sequence
  Synthetic oligonucleotide
atactatccaagtacggaccattaaaagct

SEQ ID NO: 278797 - DNA, 30 bp, Artificial Sequence
  Synthetic oligonucleotide
caatgttatcgacaatcaaactacaaagct

SEQ ID NO: 278798 - DNA, 30 bp, Artificial Sequence
  Synthetic oligonucleotide
acccggctccaaggtactagaggcaaagct

SEQ ID NO: 278799 - DNA, 30 bp, Artificial Sequence
  Synthetic oligonucleotide
gggtttaaaaggtctgcagacggacaagct

SEQ ID NO: 278800 - DNA, 30 bp, Artificial Sequence
  Synthetic oligonucleotide
gaggacattgtcgggaagtagggacaagct

SEQ ID NO: 278801 - DNA, 30 bp, Artificial Sequence
  Synthetic oligonucleotide
gatggctatctcaagctagcaaatcaagct

SEQ ID NO: 278802 - DNA, 30 bp, Artificial Sequence
  Synthetic oligonucleotide
ctgaccccgtcagcatgctgacacgaagct

SEQ ID NO: 278803 - DNA, 30 bp, Artificial Sequence
  Synthetic oligonucleotide
taacccgtaggccaaagactagacgaagct

SEQ ID NO: 278804 - DNA, 30 bp, Artificial Sequence
  Synthetic oligonucleotide
tccgtccttcaaaaggtcacggtggaagct

SEQ ID NO: 278805 - DNA, 30 bp, Artificial Sequence
  Synthetic oligonucleotide
caaacactgaatgttatcttgcatgaagct

SEQ ID NO: 278806 - DNA, 30 bp, Artificial Sequence
  Synthetic oligonucleotide
gtcgggtatcggggccgttaaatataagct

SEQ ID NO: 278807 - DNA, 31 bp, Artificial Sequence
  Synthetic oligonucleotide
cgattctggcttttctaacgcgttataagct

SEQ ID NO: 278808 - DNA, 30 bp, Artificial Sequence
  Synthetic oligonucleotide
gtcaggtagccaagttgtgctcagtaagct

SEQ ID NO: 278809 - DNA, 30 bp, Artificial Sequence
  Synthetic oligonucleotide
aagctgtgcgtcgctcagcaacggtaagct

SEQ ID NO: 278810 - DNA, 30 bp, Artificial Sequence
  Synthetic oligonucleotide
ggaactggcagttgaaagtctccaacagct

SEQ ID NO: 278811 - DNA, 30 bp, Artificial Sequence
  Synthetic oligonucleotide
aaagtctatgctagcggtggtccaacagct

SEQ ID NO: 278812 - DNA, 30 bp, Artificial Sequence
  Synthetic oligonucleotide
gatagttagatctctggacatcgaccagct

SEQ ID NO: 278813 - DNA, 30 bp, Artificial Sequence
  Synthetic oligonucleotide
gccatacgtagccggttcgaaataccagct

SEQ ID NO: 278814 - DNA, 30 bp, Artificial Sequence
  Synthetic oligonucleotide
aatctaaccatgacataagagaacccagct

SEQ ID NO: 278815 - DNA, 30 bp, Artificial Sequence
  Synthetic oligonucleotide
cataggaccagctgcgcgtcgcacccagct

SEQ ID NO: 278816 - DNA, 30 bp, Artificial Sequence
  Synthetic oligonucleotide
gcaagattaatacaaacgattccgccagct

SEQ ID NO: 278817 - DNA, 30 bp, Artificial Sequence
  Synthetic oligonucleotide
atgaaaatcaatccaatgcgtgaagcagct

SEQ ID NO: 278818 - DNA, 30 bp, Artificial Sequence
  Synthetic oligonucleotide
atatcccgcagcattgcaatagtcgcagct

SEQ ID NO: 278819 - DNA, 30 bp, Artificial Sequence
  Synthetic oligonucleotide
atattgggcaccgtctaacattgtgcagct

SEQ ID NO: 278820 - DNA, 30 bp, Artificial Sequence
  Synthetic oligonucleotide
tggctcaaaatgctaacagaaggctcagct

SEQ ID NO: 278821 - DNA, 30 bp, Artificial Sequence
  Synthetic oligonucleotide
ttgctcgacccaagtatcggtatctcagct

SEQ ID NO: 278822 - DNA, 30 bp, Artificial Sequence
  Synthetic oligonucleotide
ctttaggtggatagggggtgtcacagagct

SEQ ID NO: 278823 - DNA, 30 bp, Artificial Sequence
  Synthetic oligonucleotide
caatggtgtcgtacagtcgtttgcagagct

SEQ ID NO: 278824 - DNA, 30 bp, Artificial Sequence
  Synthetic oligonucleotide
gtaaggaaactgtctgcttccagtagagct

SEQ ID NO: 278825 - DNA, 30 bp, Artificial Sequence
  Synthetic oligonucleotide
ggatctttcgtcggccagtagtgtagagct

SEQ ID NO: 278826 - DNA, 30 bp, Artificial Sequence
  Synthetic oligonucleotide
cgccgtcttgaatgaagcatctcacgagct

SEQ ID NO: 278827 - DNA, 30 bp, Artificial Sequence
  Synthetic oligonucleotide
tgacaagattactggacgatagaccgagct

SEQ ID NO: 278828 - DNA, 30 bp, Artificial Sequence
  Synthetic oligonucleotide
gggtcgttcccagatcatgacccgcgagct

SEQ ID NO: 278829 - DNA, 30 bp, Artificial Sequence
  Synthetic oligonucleotide
ctcacgagctggataaaatttcggcgagct

SEQ ID NO: 278830 - DNA, 30 bp, Artificial Sequence
  Synthetic oligonucleotide
ctctgtcgtaaagaatcgaggtgtcgagct

SEQ ID NO: 278831 - DNA, 30 bp, Artificial Sequence
  Synthetic oligonucleotide
aataatatccagtagagacagttaggagct

SEQ ID NO: 278832 - DNA, 30 bp, Artificial Sequence
  Synthetic oligonucleotide
tacgagcatcggcacagcacaaccggagct

SEQ ID NO: 278833 - DNA, 30 bp, Artificial Sequence
  Synthetic oligonucleotide
gtccgtgcaggaactacatcggtcggagct

SEQ ID NO: 278834 - DNA, 30 bp, Artificial Sequence
  Synthetic oligonucleotide
tagactccttattcaaagcgttcatgagct

SEQ ID NO: 278835 - DNA, 30 bp, Artificial Sequence
  Synthetic oligonucleotide
tacacattactgttcagtgagacgtgagct

SEQ ID NO: 278836 - DNA, 30 bp, Artificial Sequence
  Synthetic oligonucleotide
tttggtttgtgcatacgaacctcttgagct

SEQ ID NO: 278837 - DNA, 30 bp, Artificial Sequence
  Synthetic oligonucleotide
cactaagttggtagattccttaaaatagct

SEQ ID NO: 278838 - DNA, 30 bp, Artificial Sequence
  Synthetic oligonucleotide
ttacccgcttgtcgtgaaagcgagatagct

SEQ ID NO: 278839 - DNA, 30 bp, Artificial Sequence
  Synthetic oligonucleotide
ccagctcctagtgtaatgaatgagatagct

SEQ ID NO: 278840 - DNA, 30 bp, Artificial Sequence
  Synthetic oligonucleotide
acccactgttagacctggcaaaggatagct

SEQ ID NO: 278841 - DNA, 30 bp, Artificial Sequence
  Synthetic oligonucleotide
gagagaaattaggaccggtctaggatagct

SEQ ID NO: 278842 - DNA, 31 bp, Artificial Sequence
  Synthetic oligonucleotide
gcgggaaccgaatggtgctaaacggatagct

SEQ ID NO: 278843 - DNA, 30 bp, Artificial Sequence
  Synthetic oligonucleotide
gctatgcaagaagtagctctacgtatagct

SEQ ID NO: 278844 - DNA, 30 bp, Artificial Sequence
  Synthetic oligonucleotide
cgcaggtaggcggaacgcgacattatagct

SEQ ID NO: 278845 - DNA, 30 bp, Artificial Sequence
  Synthetic oligonucleotide
ctggggtaggttacctatgatacgctagct

SEQ ID NO: 278846 - DNA, 30 bp, Artificial Sequence
  Synthetic oligonucleotide
ggatagttgccggggtaagtccaagtagct

SEQ ID NO: 278847 - DNA, 30 bp, Artificial Sequence
  Synthetic oligonucleotide
cagccaacagcatcacattgcaacgtagct

SEQ ID NO: 278848 - DNA, 30 bp, Artificial Sequence
  Synthetic oligonucleotide
ccagtacgcccattgcgagcccccgtagct

SEQ ID NO: 278849 - DNA, 30 bp, Artificial Sequence
  Synthetic oligonucleotide
gacggagtatcggaagacgcacgggtagct

SEQ ID NO: 278850 - DNA, 30 bp, Artificial Sequence
  Synthetic oligonucleotide
ggcattggccccaagtcaataggggtagct

SEQ ID NO: 278851 - DNA, 30 bp, Artificial Sequence
  Synthetic oligonucleotide
ggatgaacgccttggttcacatgtgtagct

SEQ ID NO: 278852 - DNA, 30 bp, Artificial Sequence
  Synthetic oligonucleotide
atcataccaccgcggatcacggacttagct

SEQ ID NO: 278853 - DNA, 30 bp, Artificial Sequence
  Synthetic oligonucleotide
ccatagtcttctcgccttttgcctttagct

SEQ ID NO: 278854 - DNA, 30 bp, Artificial Sequence
  Synthetic oligonucleotide
caactcacgtttagtggaccataaaacgct

SEQ ID NO: 278855 - DNA, 30 bp, Artificial Sequence
  Synthetic oligonucleotide
ccacatgataagcgtagccgtttgaacgct

SEQ ID NO: 278856 - DNA, 30 bp, Artificial Sequence
  Synthetic oligonucleotide
atcctactgtaagactacgtcagtaacgct

SEQ ID NO: 278857 - DNA, 30 bp, Artificial Sequence
  Synthetic oligonucleotide
atgaagagttgttatcgtaagcttaacgct

SEQ ID NO: 278858 - DNA, 30 bp, Artificial Sequence
  Synthetic oligonucleotide
tagaaccaacggatcataggtagacacgct

SEQ ID NO: 278859 - DNA, 30 bp, Artificial Sequence
  Synthetic oligonucleotide
ctggcgtacgtggcgttaaaagaccacgct

SEQ ID NO: 278860 - DNA, 30 bp, Artificial Sequence
  Synthetic oligonucleotide
tatcgccgcaaaatcgcccacagccacgct

SEQ ID NO: 278861 - DNA, 30 bp, Artificial Sequence
  Synthetic oligonucleotide
tatcgatcgtaacaacaactcagccacgct

SEQ ID NO: 278862 - DNA, 30 bp, Artificial Sequence
  Synthetic oligonucleotide
ccatgtattgcaatcgtccaaacgcacgct

SEQ ID NO: 278863 - DNA, 30 bp, Artificial Sequence
  Synthetic oligonucleotide
aagccagggtttcatccctaggcgcacgct

SEQ ID NO: 278864 - DNA, 30 bp, Artificial Sequence
  Synthetic oligonucleotide
ttaggaccaaagggcttttgaaaagacgct

SEQ ID NO: 278865 - DNA, 30 bp, Artificial Sequence
  Synthetic oligonucleotide
ccgggcgtgaaggattttgaataagacgct

SEQ ID NO: 278866 - DNA, 30 bp, Artificial Sequence
  Synthetic oligonucleotide
ttagggacatgtaatcatcacaacgacgct

SEQ ID NO: 278867 - DNA, 30 bp, Artificial Sequence
  Synthetic oligonucleotide
atcgtacaagcatttacagcggcatacgct

SEQ ID NO: 278868 - DNA, 30 bp, Artificial Sequence
  Synthetic oligonucleotide
caccggcacgaggtttaagatggatacgct

SEQ ID NO: 278869 - DNA, 30 bp, Artificial Sequence
  Synthetic oligonucleotide
agattcggcaaatgaattcctctatacgct

SEQ ID NO: 278870 - DNA, 30 bp, Artificial Sequence
  Synthetic oligonucleotide
cgggcgctctcattaaagcttcactacgct

SEQ ID NO: 278871 - DNA, 30 bp, Artificial Sequence
  Synthetic oligonucleotide
gctagggacaaccctgctgcgacctacgct

SEQ ID NO: 278872 - DNA, 30 bp, Artificial Sequence
  Synthetic oligonucleotide
gctgttgcaggcctatggctgatttacgct

SEQ ID NO: 278873 - DNA, 30 bp, Artificial Sequence
  Synthetic oligonucleotide
ctaagaaacatatcctcagatgtttacgct

SEQ ID NO: 278874 - DNA, 30 bp, Artificial Sequence
  Synthetic oligonucleotide
gagtcgccaggcgacggagcatgaaccgct

SEQ ID NO: 278875 - DNA, 30 bp, Artificial Sequence
  Synthetic oligonucleotide
ttcttctacattagaagctgcgtcaccgct

SEQ ID NO: 278876 - DNA, 30 bp, Artificial Sequence
  Synthetic oligonucleotide
tccgataatcgcaattgcggcaagaccgct

SEQ ID NO: 278877 - DNA, 30 bp, Artificial Sequence
  Synthetic oligonucleotide
ggccctcatggaaagtgcccgaaacccgct

SEQ ID NO: 278878 - DNA, 30 bp, Artificial Sequence
  Synthetic oligonucleotide
tagtagcctaacagggcataattacccgct

SEQ ID NO: 278879 - DNA, 30 bp, Artificial Sequence
  Synthetic oligonucleotide
cttatgaaacgtccttctgtgctccccgct

SEQ ID NO: 278880 - DNA, 30 bp, Artificial Sequence
  Synthetic oligonucleotide
ctcatgtacacgcaccaatacaagcccgct

SEQ ID NO: 278881 - DNA, 30 bp, Artificial Sequence
  Synthetic oligonucleotide
caaactatatatcggtaataattgcccgct

SEQ ID NO: 278882 - DNA, 30 bp, Artificial Sequence
  Synthetic oligonucleotide
ttgtagctcaactgtagggagtcagccgct

SEQ ID NO: 278883 - DNA, 30 bp, Artificial Sequence
  Synthetic oligonucleotide
ttaagacacgcggccaggattggagccgct

SEQ ID NO: 278884 - DNA, 30 bp, Artificial Sequence
  Synthetic oligonucleotide
ttgaatatgagcgggcgaaatgtcgccgct

SEQ ID NO: 278885 - DNA, 30 bp, Artificial Sequence
  Synthetic oligonucleotide
tggggtggccgcgatccagtgagggccgct

SEQ ID NO: 278886 - DNA, 30 bp, Artificial Sequence
  Synthetic oligonucleotide
gtttattcactagaacgtcttggtgccgct

SEQ ID NO: 278887 - DNA, 30 bp, Artificial Sequence
  Synthetic oligonucleotide
aaagtgtctgaagggtcaacagaatccgct

SEQ ID NO: 278888 - DNA, 30 bp, Artificial Sequence
  Synthetic oligonucleotide
ttgaggctacgttcaaagttcccctccgct

SEQ ID NO: 278889 - DNA, 30 bp, Artificial Sequence
  Synthetic oligonucleotide
catagcacggtcactggccagcattccgct

SEQ ID NO: 278890 - DNA, 30 bp, Artificial Sequence
  Synthetic oligonucleotide
ggttcatggcaaatctatattgcttccgct

SEQ ID NO: 278891 - DNA, 30 bp, Artificial Sequence
  Synthetic oligonucleotide
tgagagttgcctccttctatacgttccgct

SEQ ID NO: 278892 - DNA, 30 bp, Artificial Sequence
  Synthetic oligonucleotide
ccgtataagtgaaacagtgcctaaagcgct

SEQ ID NO: 278893 - DNA, 30 bp, Artificial Sequence
  Synthetic oligonucleotide
gatctccaaagtccgtttcatagaagcgct

SEQ ID NO: 278894 - DNA, 30 bp, Artificial Sequence
  Synthetic oligonucleotide
tcttataaaaaaatgggtcgtgacagcgct

SEQ ID NO: 278895 - DNA, 30 bp, Artificial Sequence
  Synthetic oligonucleotide
ctcgtgccaagaaattctgagagcagcgct

SEQ ID NO: 278896 - DNA, 30 bp, Artificial Sequence
  Synthetic oligonucleotide
gcctgcgatactctacccaggccgagcgct

SEQ ID NO: 278897 - DNA, 30 bp, Artificial Sequence
  Synthetic oligonucleotide
ttggtctacgggcggccggaagtgagcgct

SEQ ID NO: 278898 - DNA, 30 bp, Artificial Sequence
  Synthetic oligonucleotide
cggacttgggaaacgttttcagtgagcgct

SEQ ID NO: 278899 - DNA, 30 bp, Artificial Sequence
  Synthetic oligonucleotide
gagatggggcgaatgtcagggggtagcgct

SEQ ID NO: 278900 - DNA, 30 bp, Artificial Sequence
  Synthetic oligonucleotide
acttcagttgatgacgtacaactacgcgct

SEQ ID NO: 278901 - DNA, 30 bp, Artificial Sequence
  Synthetic oligonucleotide
tccatcggcattccctacggggtacgcgct

SEQ ID NO: 278902 - DNA, 30 bp, Artificial Sequence
  Synthetic oligonucleotide
ttctacaagaagacagatgccactcgcgct

SEQ ID NO: 278903 - DNA, 30 bp, Artificial Sequence
  Synthetic oligonucleotide
ggcccgcttaaccataccgggggtcgcgct

SEQ ID NO: 278904 - DNA, 30 bp, Artificial Sequence
  Synthetic oligonucleotide
gagcgtgtcaatacatatttagatggcgct

SEQ ID NO: 278905 - DNA, 30 bp, Artificial Sequence
  Synthetic oligonucleotide
agagccagcttatgccaagaaagatgcgct

SEQ ID NO: 278906 - DNA, 30 bp, Artificial Sequence
  Synthetic oligonucleotide
aaagtgccatggcggacgtcgcagtgcgct

SEQ ID NO: 278907 - DNA, 30 bp, Artificial Sequence
  Synthetic oligonucleotide
gctggtgtgggtagtatttaaccttgcgct

SEQ ID NO: 278908 - DNA, 30 bp, Artificial Sequence
  Synthetic oligonucleotide
catctgttgtgtagacttagaacaatcgct

SEQ ID NO: 278909 - DNA, 30 bp, Artificial Sequence
  Synthetic oligonucleotide
cgtgtatttgtatcccaagtacgaatcgct

SEQ ID NO: 278910 - DNA, 30 bp, Artificial Sequence
  Synthetic oligonucleotide
tagtgattgtatgtctgggatgtcatcgct

SEQ ID NO: 278911 - DNA, 30 bp, Artificial Sequence
  Synthetic oligonucleotide
aacaatcatggtgagtgaaacttcatcgct

SEQ ID NO: 278912 - DNA, 30 bp, Artificial Sequence
  Synthetic oligonucleotide
gaacaacgagaagattacttatatatcgct

SEQ ID NO: 278913 - DNA, 30 bp, Artificial Sequence
  Synthetic oligonucleotide
atgatgcgggaatcaaagtgcactatcgct

SEQ ID NO: 278914 - DNA, 29 bp, Artificial Sequence
  Synthetic oligonucleotide
tcgtacagctataagagcgatttatcgct

SEQ ID NO: 278915 - DNA, 30 bp, Artificial Sequence
  Synthetic oligonucleotide
tccacttaccatgatagggcggggctcgct

SEQ ID NO: 278916 - DNA, 30 bp, Artificial Sequence
  Synthetic oligonucleotide
ggaagcaacactgaattcaagatgctcgct

SEQ ID NO: 278917 - DNA, 30 bp, Artificial Sequence
  Synthetic oligonucleotide
aaccgatatgaccaggtggacatcgtcgct

SEQ ID NO: 278918 - DNA, 30 bp, Artificial Sequence
  Synthetic oligonucleotide
ttccgtgcggagccattgagcttggtcgct

SEQ ID NO: 278919 - DNA, 30 bp, Artificial Sequence
  Synthetic oligonucleotide
ccggatcatggacgtaacgaacctgtcgct

SEQ ID NO: 278920 - DNA, 30 bp, Artificial Sequence
  Synthetic oligonucleotide
gcaagaaacctaattggtgaagaattcgct

SEQ ID NO: 278921 - DNA, 30 bp, Artificial Sequence
  Synthetic oligonucleotide
acatgacagggtgccaccagggaattcgct

SEQ ID NO: 278922 - DNA, 30 bp, Artificial Sequence
  Synthetic oligonucleotide
tgtactcccgaagaccagaacgcattcgct

SEQ ID NO: 278923 - DNA, 30 bp, Artificial Sequence
  Synthetic oligonucleotide
gttgcgtggcacacccggctatcgttcgct

SEQ ID NO: 278924 - DNA, 30 bp, Artificial Sequence
  Synthetic oligonucleotide
aatgaatggtccaggggacacaatttcgct

SEQ ID NO: 278925 - DNA, 30 bp, Artificial Sequence
  Synthetic oligonucleotide
gctgctaaatctcggattccgaagaaggct

SEQ ID NO: 278926 - DNA, 30 bp, Artificial Sequence
  Synthetic oligonucleotide
cgccgactaaagtttacaatgaagaaggct

SEQ ID NO: 278927 - DNA, 30 bp, Artificial Sequence
  Synthetic oligonucleotide
tttgtcgacgatcaaagaagcgaacaggct

SEQ ID NO: 278928 - DNA, 30 bp, Artificial Sequence
  Synthetic oligonucleotide
tcacgaacatccgtcggtggccgacaggct

SEQ ID NO: 278929 - DNA, 30 bp, Artificial Sequence
  Synthetic oligonucleotide
ttgttggaggattatatcgttctccaggct

SEQ ID NO: 278930 - DNA, 30 bp, Artificial Sequence
  Synthetic oligonucleotide
tcagtgtgatcaggtttattcatgcaggct

SEQ ID NO: 278931 - DNA, 30 bp, Artificial Sequence
  Synthetic oligonucleotide
gagtcagttgcatttactgactgagaggct

SEQ ID NO: 278932 - DNA, 30 bp, Artificial Sequence
  Synthetic oligonucleotide
gcggttccgacaggatggagggcggaggct

SEQ ID NO: 278933 - DNA, 30 bp, Artificial Sequence
  Synthetic oligonucleotide
ataccacaagtggcctggtggtgggaggct

SEQ ID NO: 278934 - DNA, 30 bp, Artificial Sequence
  Synthetic oligonucleotide
cagtacttagctactgtttcaattgaggct

SEQ ID NO: 278935 - DNA, 30 bp, Artificial Sequence
  Synthetic oligonucleotide
tatccgtgtggcctacttcttgttgaggct

SEQ ID NO: 278936 - DNA, 30 bp, Artificial Sequence
  Synthetic oligonucleotide
ccactagttccagtgcgtgactttgaggct

SEQ ID NO: 278937 - DNA, 30 bp, Artificial Sequence
  Synthetic oligonucleotide
gtactgcgtctcgtgtcgcagtcataggct

SEQ ID NO: 278938 - DNA, 30 bp, Artificial Sequence
  Synthetic oligonucleotide
aaagggtgttgcggaattttcttttaggct

SEQ ID NO: 278939 - DNA, 30 bp, Artificial Sequence
  Synthetic oligonucleotide
aagaggagctctccgtaaagcaatacggct

SEQ ID NO: 278940 - DNA, 30 bp, Artificial Sequence
  Synthetic oligonucleotide
tctatttcgaattatacatataaaccggct

SEQ ID NO: 278941 - DNA, 30 bp, Artificial Sequence
  Synthetic oligonucleotide
gtccggacatgtagcataacgttcccggct

SEQ ID NO: 278942 - DNA, 30 bp, Artificial Sequence
  Synthetic oligonucleotide
caagagtgccaagcttttggcctgccggct

SEQ ID NO: 278943 - DNA, 30 bp, Artificial Sequence
  Synthetic oligonucleotide
acaaggtagtcgcgttgtcagcatccggct

SEQ ID NO: 278944 - DNA, 30 bp, Artificial Sequence
  Synthetic oligonucleotide
accgttatttcaggaaacttcagtccggct

SEQ ID NO: 278945 - DNA, 30 bp, Artificial Sequence
  Synthetic oligonucleotide
tcttactcaaatatagataatacagcggct

SEQ ID NO: 278946 - DNA, 30 bp, Artificial Sequence
  Synthetic oligonucleotide
cggagtgttagtaagagatgaccagcggct

SEQ ID NO: 278947 - DNA, 30 bp, Artificial Sequence
  Synthetic oligonucleotide
gcattgcggtagcttacacagatagcggct

SEQ ID NO: 278948 - DNA, 30 bp, Artificial Sequence
  Synthetic oligonucleotide
ttaaactgatacgtaggtggatccgcggct

SEQ ID NO: 278949 - DNA, 30 bp, Artificial Sequence
  Synthetic oligonucleotide
tatacgttctgttgtctgattagcgcggct

SEQ ID NO: 278950 - DNA, 30 bp, Artificial Sequence
  Synthetic oligonucleotide
gggcatgtagggggacttcttatcgcggct

SEQ ID NO: 278951 - DNA, 30 bp, Artificial Sequence
  Synthetic oligonucleotide
tcgcgcggcttctaaagttctttggcggct

SEQ ID NO: 278952 - DNA, 30 bp, Artificial Sequence
  Synthetic oligonucleotide
cgctatctttctggcaatttacagtcggct

SEQ ID NO: 278953 - DNA, 30 bp, Artificial Sequence
  Synthetic oligonucleotide
gcattggcgaaaaccatggtggcaagggct

SEQ ID NO: 278954 - DNA, 30 bp, Artificial Sequence
  Synthetic oligonucleotide
gactgagtacgtacgcattgatgaagggct

SEQ ID NO: 278955 - DNA, 30 bp, Artificial Sequence
  Synthetic oligonucleotide
ctgccgagggcttagtgtcaggtaagggct

SEQ ID NO: 278956 - DNA, 30 bp, Artificial Sequence
  Synthetic oligonucleotide
gtaccatcacctatattggcaagcagggct

SEQ ID NO: 278957 - DNA, 30 bp, Artificial Sequence
  Synthetic oligonucleotide
aaaagttgctccatgcgagtaagcagggct

SEQ ID NO: 278958 - DNA, 30 bp, Artificial Sequence
  Synthetic oligonucleotide
cgggcactcaaaggggttactgagagggct

SEQ ID NO: 278959 - DNA, 30 bp, Artificial Sequence
  Synthetic oligonucleotide
acgcaaatatatcatgaacgcgggagggct

SEQ ID NO: 278960 - DNA, 30 bp, Artificial Sequence
  Synthetic oligonucleotide
taccaccttaaatcacgtcgaagtagggct

SEQ ID NO: 278961 - DNA, 30 bp, Artificial Sequence
  Synthetic oligonucleotide
cccattgggagacccctacccaaacgggct

SEQ ID NO: 278962 - DNA, 30 bp, Artificial Sequence
  Synthetic oligonucleotide
atacagacaaatcggacaattcaacgggct

SEQ ID NO: 278963 - DNA, 30 bp, Artificial Sequence
  Synthetic oligonucleotide
gcatagaaaaggagggctaagagccgggct

SEQ ID NO: 278964 - DNA, 30 bp, Artificial Sequence
  Synthetic oligonucleotide
cctagacgctatcgtttagacggccgggct

SEQ ID NO: 278965 - DNA, 30 bp, Artificial Sequence
  Synthetic oligonucleotide
ccatataatacgcggggaggcactcgggct

SEQ ID NO: 278966 - DNA, 30 bp, Artificial Sequence
  Synthetic oligonucleotide
ggttgagctattctgacgtacaaaggggct

SEQ ID NO: 278967 - DNA, 30 bp, Artificial Sequence
  Synthetic oligonucleotide
ttcacggagttggcgttcacgtcaggggct

SEQ ID NO: 278968 - DNA, 30 bp, Artificial Sequence
  Synthetic oligonucleotide
agctggagaacctccactcaggccggggct

SEQ ID NO: 278969 - DNA, 30 bp, Artificial Sequence
  Synthetic oligonucleotide
cgagcaattcgggacgatgcatccggggct

SEQ ID NO: 278970 - DNA, 30 bp, Artificial Sequence
  Synthetic oligonucleotide
agcaagagcagcacgctcacccagggggct

SEQ ID NO: 278971 - DNA, 30 bp, Artificial Sequence
  Synthetic oligonucleotide
caatcgggataagacttctcgacgggggct

SEQ ID NO: 278972 - DNA, 30 bp, Artificial Sequence
  Synthetic oligonucleotide
agcagtttagaatatcgaaatgggggggct

SEQ ID NO: 278973 - DNA, 30 bp, Artificial Sequence
  Synthetic oligonucleotide
tgattgcttgggggccttaattactgggct

SEQ ID NO: 278974 - DNA, 30 bp, Artificial Sequence
  Synthetic oligonucleotide
cgggaagagcatcatcatcaccattgggct

SEQ ID NO: 278975 - DNA, 30 bp, Artificial Sequence
  Synthetic oligonucleotide
gttaagctcgagggggaccagtattgggct

SEQ ID NO: 278976 - DNA, 30 bp, Artificial Sequence
  Synthetic oligonucleotide
ttgttgatgatcaaacgcccgaggatggct

SEQ ID NO: 278977 - DNA, 30 bp, Artificial Sequence
  Synthetic oligonucleotide
gttgggggaccaacaacagttcatatggct

SEQ ID NO: 278978 - DNA, 30 bp, Artificial Sequence
  Synthetic oligonucleotide
tcgttatcaagagccgggacatcactggct

SEQ ID NO: 278979 - DNA, 30 bp, Artificial Sequence
  Synthetic oligonucleotide
aacatgcgcgcagggaggcagagagtggct

SEQ ID NO: 278980 - DNA, 30 bp, Artificial Sequence
  Synthetic oligonucleotide
tcaaatggacctgtgtataatccattggct

SEQ ID NO: 278981 - DNA, 30 bp, Artificial Sequence
  Synthetic oligonucleotide
atctgagacaaggtgctacgctgattggct

SEQ ID NO: 278982 - DNA, 30 bp, Artificial Sequence
  Synthetic oligonucleotide
gtatcacgcactcaatcgcagtttttggct

SEQ ID NO: 278983 - DNA, 30 bp, Artificial Sequence
  Synthetic oligonucleotide
taacccacgtaggagctcctcgcaaatgct

SEQ ID NO: 278984 - DNA, 30 bp, Artificial Sequence
  Synthetic oligonucleotide
tatacacaagagactaaagcaagaaatgct

SEQ ID NO: 278985 - DNA, 30 bp, Artificial Sequence
  Synthetic oligonucleotide
gtcagggtggtgcacccctctcggaatgct

SEQ ID NO: 278986 - DNA, 30 bp, Artificial Sequence
  Synthetic oligonucleotide
acaggcgtggtgaccaccgtgaataatgct

SEQ ID NO: 278987 - DNA, 30 bp, Artificial Sequence
  Synthetic oligonucleotide
gcaggaaacaagctctcgaagattaatgct

SEQ ID NO: 278988 - DNA, 30 bp, Artificial Sequence
  Synthetic oligonucleotide
cgggcggtaggtaaggacgttattaatgct

SEQ ID NO: 278989 - DNA, 30 bp, Artificial Sequence
  Synthetic oligonucleotide
gaatatgacgcgcttcggtatacacatgct

SEQ ID NO: 278990 - DNA, 30 bp, Artificial Sequence
  Synthetic oligonucleotide
atacaagatccttcctcgtacctacatgct

SEQ ID NO: 278991 - DNA, 30 bp, Artificial Sequence
  Synthetic oligonucleotide
ttaggtcctagaatacagacatcccatgct

SEQ ID NO: 278992 - DNA, 30 bp, Artificial Sequence
  Synthetic oligonucleotide
taagatgggaattggctttttaggcatgct

SEQ ID NO: 278993 - DNA, 30 bp, Artificial Sequence
  Synthetic oligonucleotide
aaatgttaacgaagggttagatggcatgct

SEQ ID NO: 278994 - DNA, 30 bp, Artificial Sequence
  Synthetic oligonucleotide
taattatgagcaataacagtgatgcatgct

SEQ ID NO: 278995 - DNA, 30 bp, Artificial Sequence
  Synthetic oligonucleotide
acaggcaccccaaaccgtactgtgcatgct

SEQ ID NO: 278996 - DNA, 30 bp, Artificial Sequence
  Synthetic oligonucleotide
ggaccagtcttgcctccgcttcatcatgct

SEQ ID NO: 278997 - DNA, 30 bp, Artificial Sequence
  Synthetic oligonucleotide
accagtcagagctctgggtcttgtcatgct

SEQ ID NO: 278998 - DNA, 30 bp, Artificial Sequence
  Synthetic oligonucleotide
ggaactcgatgagtcccgtgaattcatgct

SEQ ID NO: 278999 - DNA, 30 bp, Artificial Sequence
  Synthetic oligonucleotide
accattctgacaagcacagagcttcatgct

SEQ ID NO: 279000 - DNA, 30 bp, Artificial Sequence
  Synthetic oligonucleotide
ggggatgacaacattatgagataagatgct

SEQ ID NO: 279001 - DNA, 30 bp, Artificial Sequence
  Synthetic oligonucleotide
acgagatccagtgctagctggtccgatgct

SEQ ID NO: 279002 - DNA, 30 bp, Artificial Sequence
  Synthetic oligonucleotide
agggcccccatgcgattctgagtcgatgct

SEQ ID NO: 279003 - DNA, 30 bp, Artificial Sequence
  Synthetic oligonucleotide
attcggttgtggactcataagagggatgct

SEQ ID NO: 279004 - DNA, 30 bp, Artificial Sequence
  Synthetic oligonucleotide
gggcaaataggcctaggatacggggatgct

SEQ ID NO: 279005 - DNA, 30 bp, Artificial Sequence
  Synthetic oligonucleotide
agtcagaatgccgtacaccgcgatgatgct

SEQ ID NO: 279006 - DNA, 30 bp, Artificial Sequence
  Synthetic oligonucleotide
gggacacctatggaatacctatgtgatgct

SEQ ID NO: 279007 - DNA, 30 bp, Artificial Sequence
  Synthetic oligonucleotide
tgcttaatgggcatcactgtccttgatgct

SEQ ID NO: 279008 - DNA, 30 bp, Artificial Sequence
  Synthetic oligonucleotide
actacatttctgttgtcttcacgatatgct

SEQ ID NO: 279009 - DNA, 30 bp, Artificial Sequence
  Synthetic oligonucleotide
gaataatggtgtactagacaggcgtatgct

SEQ ID NO: 279010 - DNA, 30 bp, Artificial Sequence
  Synthetic oligonucleotide
ataggggatcggagtagtgttatgtatgct

SEQ ID NO: 279011 - DNA, 30 bp, Artificial Sequence
  Synthetic oligonucleotide
gtgacctatgagagagatataaattatgct

SEQ ID NO: 279012 - DNA, 30 bp, Artificial Sequence
  Synthetic oligonucleotide
cgggttcacgagattagaagcagttatgct

SEQ ID NO: 279013 - DNA, 30 bp, Artificial Sequence
  Synthetic oligonucleotide
atgctggtaatagaatacggacgaactgct

SEQ ID NO: 279014 - DNA, 30 bp, Artificial Sequence
  Synthetic oligonucleotide
catcaaatgcttggagcgactcccactgct

SEQ ID NO: 279015 - DNA, 30 bp, Artificial Sequence
  Synthetic oligonucleotide
tatgtgaatgctaataaattgggcactgct

SEQ ID NO: 279016 - DNA, 30 bp, Artificial Sequence
  Synthetic oligonucleotide
atagaccagcacgatagggtctcgactgct

SEQ ID NO: 279017 - DNA, 30 bp, Artificial Sequence
  Synthetic oligonucleotide
gcagaaaccaatctgggagtctatactgct

SEQ ID NO: 279018 - DNA, 30 bp, Artificial Sequence
  Synthetic oligonucleotide
gtctagcaggtggatcctaagactactgct

SEQ ID NO: 279019 - DNA, 30 bp, Artificial Sequence
  Synthetic oligonucleotide
gggtgccgatagtcccaaccagttactgct

SEQ ID NO: 279020 - DNA, 30 bp, Artificial Sequence
  Synthetic oligonucleotide
gatgttaaaaaaatgtcgttttgacctgct

SEQ ID NO: 279021 - DNA, 31 bp, Artificial Sequence
  Synthetic oligonucleotide
ctaaatatcttcggagagctttgcccctgct

SEQ ID NO: 279022 - DNA, 30 bp, Artificial Sequence
  Synthetic oligonucleotide
acccaggccgtagagtaaatttgccctgct

SEQ ID NO: 279023 - DNA, 30 bp, Artificial Sequence
  Synthetic oligonucleotide
atgagatttttgtcaaggaattagcctgct

SEQ ID NO: 279024 - DNA, 30 bp, Artificial Sequence
  Synthetic oligonucleotide
catagcccttgtttgaaatgtgttcctgct

SEQ ID NO: 279025 - DNA, 30 bp, Artificial Sequence
  Synthetic oligonucleotide
ttactcgtgtatgtagtcaacaaagctgct

SEQ ID NO: 279026 - DNA, 30 bp, Artificial Sequence
  Synthetic oligonucleotide
gagttggtgcaacccggaacagaagctgct

SEQ ID NO: 279027 - DNA, 30 bp, Artificial Sequence
  Synthetic oligonucleotide
actttagtaggttaacggcactaggctgct

SEQ ID NO: 279028 - DNA, 30 bp, Artificial Sequence
  Synthetic oligonucleotide
gcaggaatggcgtaatcacctccggctgct

SEQ ID NO: 279029 - DNA, 30 bp, Artificial Sequence
  Synthetic oligonucleotide
cacggagacctttaggtctatcatgctgct

SEQ ID NO: 279030 - DNA, 30 bp, Artificial Sequence
  Synthetic oligonucleotide
tcaatagcacccattatgcctgcatctgct

SEQ ID NO: 279031 - DNA, 30 bp, Artificial Sequence
  Synthetic oligonucleotide
ggccacgatattaggtggtaccactctgct

SEQ ID NO: 279032 - DNA, 30 bp, Artificial Sequence
  Synthetic oligonucleotide
ggctgggctggaaacccgattagaagtgct

SEQ ID NO: 279033 - DNA, 30 bp, Artificial Sequence
  Synthetic oligonucleotide
tcagcgcaggcttggcgagaattaagtgct

SEQ ID NO: 279034 - DNA, 30 bp, Artificial Sequence
  Synthetic oligonucleotide
atcgcccgttcagacattaacaagagtgct

SEQ ID NO: 279035 - DNA, 30 bp, Artificial Sequence
  Synthetic oligonucleotide
taagtatgaaaagttagacgggcgagtgct

SEQ ID NO: 279036 - DNA, 30 bp, Artificial Sequence
  Synthetic oligonucleotide
attcgcaaggtatagcaaagagttagtgct

SEQ ID NO: 279037 - DNA, 30 bp, Artificial Sequence
  Synthetic oligonucleotide
ccaacccgcgcgccggtagaactgcgtgct

SEQ ID NO: 279038 - DNA, 30 bp, Artificial Sequence
  Synthetic oligonucleotide
tactcgtaaagtcgaagcgccccaggtgct

SEQ ID NO: 279039 - DNA, 30 bp, Artificial Sequence
  Synthetic oligonucleotide
catcgcgatgtcggtgacagatcaggtgct

SEQ ID NO: 279040 - DNA, 30 bp, Artificial Sequence
  Synthetic oligonucleotide
gtacattaagcactcaggaacgccggtgct

SEQ ID NO: 279041 - DNA, 30 bp, Artificial Sequence
  Synthetic oligonucleotide
gagaagcgttgggtcgcgtgtatcggtgct

SEQ ID NO: 279042 - DNA, 30 bp, Artificial Sequence
  Synthetic oligonucleotide
ggggtcccaccctaccggttgaagggtgct

SEQ ID NO: 279043 - DNA, 30 bp, Artificial Sequence
  Synthetic oligonucleotide
acattgatgggccctttcgtaccgggtgct

SEQ ID NO: 279044 - DNA, 30 bp, Artificial Sequence
  Synthetic oligonucleotide
gaaggaacctccacaaaagggttgggtgct

SEQ ID NO: 279045 - DNA, 30 bp, Artificial Sequence
  Synthetic oligonucleotide
caatatcctgtggcgttcttcggatgtgct

SEQ ID NO: 279046 - DNA, 30 bp, Artificial Sequence
  Synthetic oligonucleotide
gtgcatcataagcgcgctcgagtatgtgct

SEQ ID NO: 279047 - DNA, 30 bp, Artificial Sequence
  Synthetic oligonucleotide
aaaagtgttacccccctaagggcctgtgct

SEQ ID NO: 279048 - DNA, 30 bp, Artificial Sequence
  Synthetic oligonucleotide
gggctcacaaacgtttgataggtttgtgct

SEQ ID NO: 279049 - DNA, 30 bp, Artificial Sequence
  Synthetic oligonucleotide
cgattaactgacgccatcgtctccattgct

SEQ ID NO: 279050 - DNA, 30 bp, Artificial Sequence
  Synthetic oligonucleotide
tatagaagcgattgaggaagtaagattgct

SEQ ID NO: 279051 - DNA, 30 bp, Artificial Sequence
  Synthetic oligonucleotide
agcgcgtgttgttagtcgacagtccttgct

SEQ ID NO: 279052 - DNA, 30 bp, Artificial Sequence
  Synthetic oligonucleotide
ttaagaccggacgagcctgtcgttcttgct

SEQ ID NO: 279053 - DNA, 30 bp, Artificial Sequence
  Synthetic oligonucleotide
agacgacataggtcttatcggtgtgttgct

SEQ ID NO: 279054 - DNA, 30 bp, Artificial Sequence
  Synthetic oligonucleotide
cgctataggttctcggtatcgcttgttgct

SEQ ID NO: 279055 - DNA, 30 bp, Artificial Sequence
  Synthetic oligonucleotide
ctttccccagcagcggcaccggactttgct

SEQ ID NO: 279056 - DNA, 30 bp, Artificial Sequence
  Synthetic oligonucleotide
ggctcgatcgtctcctgcaaatactttgct

SEQ ID NO: 279057 - DNA, 30 bp, Artificial Sequence
  Synthetic oligonucleotide
gctgcgatgagcttgtaagcagcctttgct

SEQ ID NO: 279058 - DNA, 30 bp, Artificial Sequence
  Synthetic oligonucleotide
atctaatggctggtaatgagcctctttgct

SEQ ID NO: 279059 - DNA, 30 bp, Artificial Sequence
  Synthetic oligonucleotide
atggaggattataccttgcggaagtttgct

SEQ ID NO: 279060 - DNA, 30 bp, Artificial Sequence
  Synthetic oligonucleotide
gtccaggaataaccaggtagtgaaaaatct

SEQ ID NO: 279061 - DNA, 30 bp, Artificial Sequence
  Synthetic oligonucleotide
gacgcagtggtacccgagggtcacaaatct

SEQ ID NO: 279062 - DNA, 30 bp, Artificial Sequence
  Synthetic oligonucleotide
taaggactcgttggtcactccaggaaatct

SEQ ID NO: 279063 - DNA, 30 bp, Artificial Sequence
  Synthetic oligonucleotide
cccttagatcgttaatagaggtttaaatct

SEQ ID NO: 279064 - DNA, 30 bp, Artificial Sequence
  Synthetic oligonucleotide
agcatcagtactgctgatggaaaccaatct

SEQ ID NO: 279065 - DNA, 30 bp, Artificial Sequence
  Synthetic oligonucleotide
gcatcgaggacttaaagcggatcgcaatct

SEQ ID NO: 279066 - DNA, 30 bp, Artificial Sequence
  Synthetic oligonucleotide
aaagttgacgtttgttcctaaatgcaatct

SEQ ID NO: 279067 - DNA, 30 bp, Artificial Sequence
  Synthetic oligonucleotide
tgaagtcattggacgcaaccgaatcaatct

SEQ ID NO: 279068 - DNA, 30 bp, Artificial Sequence
  Synthetic oligonucleotide
atgagttagacaaaggtaacatatcaatct

SEQ ID NO: 279069 - DNA, 30 bp, Artificial Sequence
  Synthetic oligonucleotide
ataacagtcggttacagcaggacagaatct

SEQ ID NO: 279070 - DNA, 29 bp, Artificial Sequence
  Synthetic oligonucleotide
agtcaagagttatagattaactagaatct

SEQ ID NO: 279071 - DNA, 30 bp, Artificial Sequence
  Synthetic oligonucleotide
tgccaggattaatgccgtaaggtagaatct

SEQ ID NO: 279072 - DNA, 30 bp, Artificial Sequence
  Synthetic oligonucleotide
ccggccgagaccgtcggacaagtcgaatct

SEQ ID NO: 279073 - DNA, 30 bp, Artificial Sequence
  Synthetic oligonucleotide
gtcagcacaggtccagagagttgggaatct

SEQ ID NO: 279074 - DNA, 30 bp, Artificial Sequence
  Synthetic oligonucleotide
tcagctggcagcagctgtacccttgaatct

SEQ ID NO: 279075 - DNA, 30 bp, Artificial Sequence
  Synthetic oligonucleotide
atgactaaggtagaaggcccggcctaatct

SEQ ID NO: 279076 - DNA, 30 bp, Artificial Sequence
  Synthetic oligonucleotide
gtggtaagatatatcataatatgctaatct

SEQ ID NO: 279077 - DNA, 30 bp, Artificial Sequence
  Synthetic oligonucleotide
agtccattcttcgggtgacacctgtaatct

SEQ ID NO: 279078 - DNA, 30 bp, Artificial Sequence
  Synthetic oligonucleotide
atgccagtaccgccgtcccgtttgtaatct

SEQ ID NO: 279079 - DNA, 30 bp, Artificial Sequence
  Synthetic oligonucleotide
tacgacgacaaggaaaaacggcgttaatct

SEQ ID NO: 279080 - DNA, 30 bp, Artificial Sequence
  Synthetic oligonucleotide
atagacgataggagacttactgatacatct

SEQ ID NO: 279081 - DNA, 30 bp, Artificial Sequence
  Synthetic oligonucleotide
tggaaagcggaaccctgccgacttacatct

SEQ ID NO: 279082 - DNA, 30 bp, Artificial Sequence
  Synthetic oligonucleotide
agagtccggctatatgattgtgctccatct

SEQ ID NO: 279083 - DNA, 30 bp, Artificial Sequence
  Synthetic oligonucleotide
atacggacctcccagggcgtttgtccatct

SEQ ID NO: 279084 - DNA, 30 bp, Artificial Sequence
  Synthetic oligonucleotide
gcgccagcatttgaactcaatagggcatct

SEQ ID NO: 279085 - DNA, 30 bp, Artificial Sequence
  Synthetic oligonucleotide
gctgtactctgtcttctttatagatcatct

SEQ ID NO: 279086 - DNA, 30 bp, Artificial Sequence
  Synthetic oligonucleotide
ggatttcctaactctcatacatgatcatct

SEQ ID NO: 279087 - DNA, 30 bp, Artificial Sequence
  Synthetic oligonucleotide
ttgccaatgcaaggctatgaccactcatct

SEQ ID NO: 279088 - DNA, 30 bp, Artificial Sequence
  Synthetic oligonucleotide
tcatctgtggaacagccaaaggcgtcatct

SEQ ID NO: 279089 - DNA, 30 bp, Artificial Sequence
  Synthetic oligonucleotide
ccataatctgcatatggtacttggtcatct

SEQ ID NO: 279090 - DNA, 30 bp, Artificial Sequence
  Synthetic oligonucleotide
aagcgatacctagattagccctaaagatct

SEQ ID NO: 279091 - DNA, 30 bp, Artificial Sequence
  Synthetic oligonucleotide
tttacgtattagtggctccaccagagatct

SEQ ID NO: 279092 - DNA, 31 bp, Artificial Sequence
  Synthetic oligonucleotide
atgtgaggtgcatcgcacactaggtagatct

SEQ ID NO: 279093 - DNA, 29 bp, Artificial Sequence
  Synthetic oligonucleotide
tcacgccgatttttagacagggtagatct

SEQ ID NO: 279094 - DNA, 30 bp, Artificial Sequence
  Synthetic oligonucleotide
tggtataaaacgatagtgttgtgtagatct

SEQ ID NO: 279095 - DNA, 30 bp, Artificial Sequence
  Synthetic oligonucleotide
gcggttttcatgcctcctgcgtgacgatct

SEQ ID NO: 279096 - DNA, 30 bp, Artificial Sequence
  Synthetic oligonucleotide
ctcaatgatatcgataagcaatcccgatct

SEQ ID NO: 279097 - DNA, 30 bp, Artificial Sequence
  Synthetic oligonucleotide
tggtacctagattataacgcacagcgatct

SEQ ID NO: 279098 - DNA, 30 bp, Artificial Sequence
  Synthetic oligonucleotide
atcaaaatcctccgtagcgtaccgcgatct

SEQ ID NO: 279099 - DNA, 30 bp, Artificial Sequence
  Synthetic oligonucleotide
tttccggtcgattgaacctttgcgcgatct

SEQ ID NO: 279100 - DNA, 30 bp, Artificial Sequence
  Synthetic oligonucleotide
tttacaaaggacagttaaatccggcgatct

SEQ ID NO: 279101 - DNA, 30 bp, Artificial Sequence
  Synthetic oligonucleotide
aaccaaagcaatccccggagatggcgatct

SEQ ID NO: 279102 - DNA, 30 bp, Artificial Sequence
  Synthetic oligonucleotide
aaatgacttgagctttcgttctctcgatct

SEQ ID NO: 279103 - DNA, 30 bp, Artificial Sequence
  Synthetic oligonucleotide
ccataacagtgattgaatgcgtacggatct

SEQ ID NO: 279104 - DNA, 30 bp, Artificial Sequence
  Synthetic oligonucleotide
agaggatatacaaaggccgtccccggatct

SEQ ID NO: 279105 - DNA, 30 bp, Artificial Sequence
  Synthetic oligonucleotide
catattctgatgtcatggatcacgggatct

SEQ ID NO: 279106 - DNA, 31 bp, Artificial Sequence
  Synthetic oligonucleotide
cactcgacgttcacaaggaatcatgggatct

SEQ ID NO: 279107 - DNA, 30 bp, Artificial Sequence
  Synthetic oligonucleotide
cttagtcggtactagaggtatactggatct

SEQ ID NO: 279108 - DNA, 31 bp, Artificial Sequence
  Synthetic oligonucleotide
ctgaaaccgcaatcccattcacggtggatct

SEQ ID NO: 279109 - DNA, 30 bp, Artificial Sequence
  Synthetic oligonucleotide
gcgaatattttgctatcgcaatgtggatct

SEQ ID NO: 279110 - DNA, 30 bp, Artificial Sequence
  Synthetic oligonucleotide
atgtttgccgaccctatcgcttttggatct

SEQ ID NO: 279111 - DNA, 30 bp, Artificial Sequence
  Synthetic oligonucleotide
gacctgtcaaaagacggaagtctatgatct

SEQ ID NO: 279112 - DNA, 30 bp, Artificial Sequence
  Synthetic oligonucleotide
ggccgttgattgattggataaaggtgatct

SEQ ID NO: 279113 - DNA, 30 bp, Artificial Sequence
  Synthetic oligonucleotide
atgggatcgcaagatcacgatgattgatct

SEQ ID NO: 279114 - DNA, 30 bp, Artificial Sequence
  Synthetic oligonucleotide
catagtacttaaggaggctgtgtttgatct

SEQ ID NO: 279115 - DNA, 30 bp, Artificial Sequence
  Synthetic oligonucleotide
gctgcccaccatctagtggtttaaatatct

SEQ ID NO: 279116 - DNA, 30 bp, Artificial Sequence
  Synthetic oligonucleotide
tcctccaccgcggtgggtttatacatatct

SEQ ID NO: 279117 - DNA, 30 bp, Artificial Sequence
  Synthetic oligonucleotide
cgaaattctaacgataaattctacatatct

SEQ ID NO: 279118 - DNA, 30 bp, Artificial Sequence
  Synthetic oligonucleotide
gaaggggtgatggggcaactatcgatatct

SEQ ID NO: 279119 - DNA, 30 bp, Artificial Sequence
  Synthetic oligonucleotide
aacgcgcgggcatttctgcagttgatatct

SEQ ID NO: 279120 - DNA, 30 bp, Artificial Sequence
  Synthetic oligonucleotide
aagagattactaattttgagttctatatct

SEQ ID NO: 279121 - DNA, 30 bp, Artificial Sequence
  Synthetic oligonucleotide
aagtatcacgcgtagaccacaagtatatct

SEQ ID NO: 279122 - DNA, 30 bp, Artificial Sequence
  Synthetic oligonucleotide
taaacatattacccagatccgagcctatct

SEQ ID NO: 279123 - DNA, 30 bp, Artificial Sequence
  Synthetic oligonucleotide
gcaagcaactcacctttgttactcctatct

SEQ ID NO: 279124 - DNA, 30 bp, Artificial Sequence
  Synthetic oligonucleotide
gatcggatccttctaatgtagaagctatct

SEQ ID NO: 279125 - DNA, 30 bp, Artificial Sequence
  Synthetic oligonucleotide
cttgcctatttcagggtgtgtaatctatct

SEQ ID NO: 279126 - DNA, 30 bp, Artificial Sequence
  Synthetic oligonucleotide
aagctaaccgggagagactccgtagtatct

SEQ ID NO: 279127 - DNA, 30 bp, Artificial Sequence
  Synthetic oligonucleotide
tctgattctggacaggcgggttatgtatct

SEQ ID NO: 279128 - DNA, 30 bp, Artificial Sequence
  Synthetic oligonucleotide
gacactgcgatggtgccaacaattgtatct

SEQ ID NO: 279129 - DNA, 30 bp, Artificial Sequence
  Synthetic oligonucleotide
gtgaatcctttgactggaccccaattatct

SEQ ID NO: 279130 - DNA, 30 bp, Artificial Sequence
  Synthetic oligonucleotide
agtatatcggtagagttcggaatattatct

SEQ ID NO: 279131 - DNA, 30 bp, Artificial Sequence
  Synthetic oligonucleotide
atgacataaaccgtgtagagagggttatct

SEQ ID NO: 279132 - DNA, 30 bp, Artificial Sequence
  Synthetic oligonucleotide
aggtacgaggcacgacctaaacttttatct

SEQ ID NO: 279133 - DNA, 30 bp, Artificial Sequence
  Synthetic oligonucleotide
tgcaagtcatgtttgacaacttaaaactct

SEQ ID NO: 279134 - DNA, 30 bp, Artificial Sequence
  Synthetic oligonucleotide
ccaggaatgcccacagaaggctccaactct

SEQ ID NO: 279135 - DNA, 30 bp, Artificial Sequence
  Synthetic oligonucleotide
agacacgcaaaacatctaaataggaactct

SEQ ID NO: 279136 - DNA, 30 bp, Artificial Sequence
  Synthetic oligonucleotide
actttaacataaacattgggccgtaactct

SEQ ID NO: 279137 - DNA, 30 bp, Artificial Sequence
  Synthetic oligonucleotide
atacgtacgctatcgtgcgtaggtaactct

SEQ ID NO: 279138 - DNA, 30 bp, Artificial Sequence
  Synthetic oligonucleotide
gcgggccgctcgacatatgcggtacactct

SEQ ID NO: 279139 - DNA, 30 bp, Artificial Sequence
  Synthetic oligonucleotide
gagcgaacctgccatggtcattcgcactct

SEQ ID NO: 279140 - DNA, 30 bp, Artificial Sequence
  Synthetic oligonucleotide
ttcgaaagatcggtaatcatatggcactct

SEQ ID NO: 279141 - DNA, 30 bp, Artificial Sequence
  Synthetic oligonucleotide
gtagctaccctactcgtctaatatcactct

SEQ ID NO: 279142 - DNA, 35 bp, Artificial Sequence
  Synthetic oligonucleotide
tgatctgttgtgttttcctattgctgcgtcactct

SEQ ID NO: 279143 - DNA, 30 bp, Artificial Sequence
  Synthetic oligonucleotide
tgaccatggatagatcggttacttcactct

SEQ ID NO: 279144 - DNA, 30 bp, Artificial Sequence
  Synthetic oligonucleotide
agcaaagggaggtatctaagtacagactct

SEQ ID NO: 279145 - DNA, 30 bp, Artificial Sequence
  Synthetic oligonucleotide
aagtctaggtgtgtgacgggactcgactct

SEQ ID NO: 279146 - DNA, 30 bp, Artificial Sequence
  Synthetic oligonucleotide
gataaaggttaagcaacgtatccggactct

SEQ ID NO: 279147 - DNA, 30 bp, Artificial Sequence
  Synthetic oligonucleotide
tagcatatgcacttatcttcgtcctactct

SEQ ID NO: 279148 - DNA, 30 bp, Artificial Sequence
  Synthetic oligonucleotide
attgaagggggaaaaaaaaactgctactct

SEQ ID NO: 279149 - DNA, 30 bp, Artificial Sequence
  Synthetic oligonucleotide
aaggtggtcttggcgagttagatctactct

SEQ ID NO: 279150 - DNA, 30 bp, Artificial Sequence
  Synthetic oligonucleotide
cgttgaggggataattctcctccttactct

SEQ ID NO: 279151 - DNA, 30 bp, Artificial Sequence
  Synthetic oligonucleotide
gaccggagtgaagcacatatggcttactct

SEQ ID NO: 279152 - DNA, 30 bp, Artificial Sequence
  Synthetic oligonucleotide
ccacaagagatggacagtcatgcttactct

SEQ ID NO: 279153 - DNA, 30 bp, Artificial Sequence
  Synthetic oligonucleotide
taaccatgatatgatcatttcgcaacctct

SEQ ID NO: 279154 - DNA, 30 bp, Artificial Sequence
  Synthetic oligonucleotide
agatggccactttttagaatgataacctct

SEQ ID NO: 279155 - DNA, 30 bp, Artificial Sequence
  Synthetic oligonucleotide
acggaggagcgtagagtcttactaacctct

SEQ ID NO: 279156 - DNA, 30 bp, Artificial Sequence
  Synthetic oligonucleotide
ggcttatccgggctacgaatattcacctct

SEQ ID NO: 279157 - DNA, 30 bp, Artificial Sequence
  Synthetic oligonucleotide
attcgtccgggaattcattacccgacctct

SEQ ID NO: 279158 - DNA, 30 bp, Artificial Sequence
  Synthetic oligonucleotide
cgagcgtcggtaactaaaagggcgacctct

SEQ ID NO: 279159 - DNA, 30 bp, Artificial Sequence
  Synthetic oligonucleotide
actgtcggtagctcatggatcacaccctct

SEQ ID NO: 279160 - DNA, 30 bp, Artificial Sequence
  Synthetic oligonucleotide
ctgtattcgggtgtagccaggttaccctct

SEQ ID NO: 279161 - DNA, 30 bp, Artificial Sequence
  Synthetic oligonucleotide
cgacgcgggtagcagatccttccgccctct

SEQ ID NO: 279162 - DNA, 30 bp, Artificial Sequence
  Synthetic oligonucleotide
gtacaaggacacgattgatcatcagcctct

SEQ ID NO: 279163 - DNA, 30 bp, Artificial Sequence
  Synthetic oligonucleotide
acgagatgtcactcaagcaataaggcctct

SEQ ID NO: 279164 - DNA, 30 bp, Artificial Sequence
  Synthetic oligonucleotide
tatcaaggcgcgcgagggagtcatgcctct

SEQ ID NO: 279165 - DNA, 30 bp, Artificial Sequence
  Synthetic oligonucleotide
ttatagcttgctcacgtaagttgttcctct

SEQ ID NO: 279166 - DNA, 30 bp, Artificial Sequence
  Synthetic oligonucleotide
tgaccgctagcctcaccaagcaaaagctct

SEQ ID NO: 279167 - DNA, 30 bp, Artificial Sequence
  Synthetic oligonucleotide
gtcaactgagaagttcggattgtgagctct

SEQ ID NO: 279168 - DNA, 30 bp, Artificial Sequence
  Synthetic oligonucleotide
cggatctattcattaagatccggacgctct

SEQ ID NO: 279169 - DNA, 30 bp, Artificial Sequence
  Synthetic oligonucleotide
gacaggagggtcttaataccgggacgctct

SEQ ID NO: 279170 - DNA, 30 bp, Artificial Sequence
  Synthetic oligonucleotide
tctggcgcagacgtcttcactacgcgctct

SEQ ID NO: 279171 - DNA, 30 bp, Artificial Sequence
  Synthetic oligonucleotide
tggtacgagataagtggtgttccgcgctct

SEQ ID NO: 279172 - DNA, 30 bp, Artificial Sequence
  Synthetic oligonucleotide
ttctgacgggaccgatgttcaatgcgctct

SEQ ID NO: 279173 - DNA, 30 bp, Artificial Sequence
  Synthetic oligonucleotide
aaggggtggataaatgcggcagaaggctct

SEQ ID NO: 279174 - DNA, 30 bp, Artificial Sequence
  Synthetic oligonucleotide
cgggagtatagtgttgtgccagcgggctct

SEQ ID NO: 279175 - DNA, 31 bp, Artificial Sequence
  Synthetic oligonucleotide
gtgttataggagttaacttgggagtggctct

SEQ ID NO: 279176 - DNA, 30 bp, Artificial Sequence
  Synthetic oligonucleotide
tcgagtctagaccttcacacctactgctct

SEQ ID NO: 279177 - DNA, 30 bp, Artificial Sequence
  Synthetic oligonucleotide
aagggatagatgatccatacattctgctct

SEQ ID NO: 279178 - DNA, 30 bp, Artificial Sequence
  Synthetic oligonucleotide
gacgacaatgtgtcaagggcaacgtgctct

SEQ ID NO: 279179 - DNA, 30 bp, Artificial Sequence
  Synthetic oligonucleotide
tagctcagacgttcaaaataggtgtgctct

SEQ ID NO: 279180 - DNA, 30 bp, Artificial Sequence
  Synthetic oligonucleotide
gcaaagcgcgatgacttcaggcgttgctct

SEQ ID NO: 279181 - DNA, 30 bp, Artificial Sequence
  Synthetic oligonucleotide
atgaaaaattaccagggcatgcgaatctct

SEQ ID NO: 279182 - DNA, 30 bp, Artificial Sequence
  Synthetic oligonucleotide
gtccaacccgatatcagaaaaggaatctct

SEQ ID NO: 279183 - DNA, 30 bp, Artificial Sequence
  Synthetic oligonucleotide
ccctatatttggaatccaatttgcatctct

SEQ ID NO: 279184 - DNA, 30 bp, Artificial Sequence
  Synthetic oligonucleotide
tgcgaggatttaatttgacaaaatatctct

SEQ ID NO: 279185 - DNA, 30 bp, Artificial Sequence
  Synthetic oligonucleotide
gtcaatacatgacatgtgcggtcactctct

SEQ ID NO: 279186 - DNA, 30 bp, Artificial Sequence
  Synthetic oligonucleotide
gtttacacgtatacggatggaagcctctct

SEQ ID NO: 279187 - DNA, 30 bp, Artificial Sequence
  Synthetic oligonucleotide
gactctcgaacggcaacatgtcggctctct

SEQ ID NO: 279188 - DNA, 30 bp, Artificial Sequence
  Synthetic oligonucleotide
cattgactaaggtgtgtgtgaagtctctct

SEQ ID NO: 279189 - DNA, 30 bp, Artificial Sequence
  Synthetic oligonucleotide
gttatgggcctcgcgtaaaccttagtctct

SEQ ID NO: 279190 - DNA, 30 bp, Artificial Sequence
  Synthetic oligonucleotide
ataaagcgtgctgtagccttcgtggtctct

SEQ ID NO: 279191 - DNA, 30 bp, Artificial Sequence
  Synthetic oligonucleotide
gtaggctcgatttcgatgtctattgtctct

SEQ ID NO: 279192 - DNA, 30 bp, Artificial Sequence
  Synthetic oligonucleotide
gccattacggctgcgtggctatccttctct

SEQ ID NO: 279193 - DNA, 30 bp, Artificial Sequence
  Synthetic oligonucleotide
cgaaggatctgactggttccaacgttctct

SEQ ID NO: 279194 - DNA, 30 bp, Artificial Sequence
  Synthetic oligonucleotide
agagagtccagaccacgctcatggttctct

SEQ ID NO: 279195 - DNA, 30 bp, Artificial Sequence
  Synthetic oligonucleotide
atgcgagatccgcatggtaccgatttctct

SEQ ID NO: 279196 - DNA, 30 bp, Artificial Sequence
  Synthetic oligonucleotide
cgtacatagtgagagcctgcgagtttctct

SEQ ID NO: 279197 - DNA, 30 bp, Artificial Sequence
  Synthetic oligonucleotide
gggaatcttttgtgatcaagcatcaagtct

SEQ ID NO: 279198 - DNA, 30 bp, Artificial Sequence
  Synthetic oligonucleotide
ggatgcattgctggtatgattaggaagtct

SEQ ID NO: 279199 - DNA, 30 bp, Artificial Sequence
  Synthetic oligonucleotide
tggacctcgtgcgacgacaaagtccagtct

SEQ ID NO: 279200 - DNA, 30 bp, Artificial Sequence
  Synthetic oligonucleotide
gcggcgagcaccagcccttaagtccagtct

SEQ ID NO: 279201 - DNA, 30 bp, Artificial Sequence
  Synthetic oligonucleotide
gttactggatatgaatggtgcgtgcagtct

SEQ ID NO: 279202 - DNA, 30 bp, Artificial Sequence
  Synthetic oligonucleotide
cacgtatatctccccgtagatggagagtct

SEQ ID NO: 279203 - DNA, 30 bp, Artificial Sequence
  Synthetic oligonucleotide
caagtcgcaatctgtggcgccgacgagtct

SEQ ID NO: 279204 - DNA, 30 bp, Artificial Sequence
  Synthetic oligonucleotide
cgcgctgtatagcagttaggcagggagtct

SEQ ID NO: 279205 - DNA, 30 bp, Artificial Sequence
  Synthetic oligonucleotide
gattacgtcgttgccatatccctggagtct

SEQ ID NO: 279206 - DNA, 30 bp, Artificial Sequence
  Synthetic oligonucleotide
gtgactgcccacaactatagttgtgagtct

SEQ ID NO: 279207 - DNA, 30 bp, Artificial Sequence
  Synthetic oligonucleotide
actcacttcattctatacgtgcacacgtct

SEQ ID NO: 279208 - DNA, 30 bp, Artificial Sequence
  Synthetic oligonucleotide
cgctagtatgacggtattaccctgacgtct

SEQ ID NO: 279209 - DNA, 30 bp, Artificial Sequence
  Synthetic oligonucleotide
tcaaaagaggggtgcttcgtgcagccgtct

SEQ ID NO: 279210 - DNA, 30 bp, Artificial Sequence
  Synthetic oligonucleotide
catcgctgttcttacccgtacgagccgtct

SEQ ID NO: 279211 - DNA, 30 bp, Artificial Sequence
  Synthetic oligonucleotide
gcgttaaggtcaacggatgatgagccgtct

SEQ ID NO: 279212 - DNA, 30 bp, Artificial Sequence
  Synthetic oligonucleotide
cgactctaatatcgcgtaagggatccgtct

SEQ ID NO: 279213 - DNA, 30 bp, Artificial Sequence
  Synthetic oligonucleotide
tagaaatatctaaggacataaggtccgtct

SEQ ID NO: 279214 - DNA, 30 bp, Artificial Sequence
  Synthetic oligonucleotide
aaaagcgtcggtaaacaatgttacgcgtct

SEQ ID NO: 279215 - DNA, 30 bp, Artificial Sequence
  Synthetic oligonucleotide
tccatatgaagagattcattacgcgcgtct

SEQ ID NO: 279216 - DNA, 30 bp, Artificial Sequence
  Synthetic oligonucleotide
tactccttagtagatgagcgatgcgcgtct

SEQ ID NO: 279217 - DNA, 30 bp, Artificial Sequence
  Synthetic oligonucleotide
gcaatagccttcaacgaagaggtcgcgtct

SEQ ID NO: 279218 - DNA, 30 bp, Artificial Sequence
  Synthetic oligonucleotide
atggtagaatgcaccccttgacaatcgtct

SEQ ID NO: 279219 - DNA, 30 bp, Artificial Sequence
  Synthetic oligonucleotide
gaatcccaggagctattggcggaatcgtct

SEQ ID NO: 279220 - DNA, 30 bp, Artificial Sequence
  Synthetic oligonucleotide
ctagtggtaaacgtcaagacgtaatcgtct

SEQ ID NO: 279221 - DNA, 30 bp, Artificial Sequence
  Synthetic oligonucleotide
aaggtttgaaagtaattagtgccatcgtct

SEQ ID NO: 279222 - DNA, 30 bp, Artificial Sequence
  Synthetic oligonucleotide
ttggctacgggtcattatttcgagtcgtct

SEQ ID NO: 279223 - DNA, 30 bp, Artificial Sequence
  Synthetic oligonucleotide
acgttgttatttcatacaacacattcgtct

SEQ ID NO: 279224 - DNA, 30 bp, Artificial Sequence
  Synthetic oligonucleotide
cagcgcgcgtggcttgtacaccattcgtct

SEQ ID NO: 279225 - DNA, 30 bp, Artificial Sequence
  Synthetic oligonucleotide
gccacccaatataagtttacggaaaggtct

SEQ ID NO: 279226 - DNA, 30 bp, Artificial Sequence
  Synthetic oligonucleotide
aaagattataaagggccaaaccgaaggtct

SEQ ID NO: 279227 - DNA, 30 bp, Artificial Sequence
  Synthetic oligonucleotide
tccggtggtaaccgttgtagatacaggtct

SEQ ID NO: 279228 - DNA, 30 bp, Artificial Sequence
  Synthetic oligonucleotide
tgcactgattcgctgatggcgatcaggtct

SEQ ID NO: 279229 - DNA, 30 bp, Artificial Sequence
  Synthetic oligonucleotide
gcgtattaacaagagatatctttcaggtct

SEQ ID NO: 279230 - DNA, 30 bp, Artificial Sequence
  Synthetic oligonucleotide
gagtcaaggatagacgtacaaacgaggtct

SEQ ID NO: 279231 - DNA, 30 bp, Artificial Sequence
  Synthetic oligonucleotide
gcgcgccggtatacacgacatgcgaggtct

SEQ ID NO: 279232 - DNA, 30 bp, Artificial Sequence
  Synthetic oligonucleotide
ttggttaaactttgcaaccagcataggtct

SEQ ID NO: 279233 - DNA, 30 bp, Artificial Sequence
  Synthetic oligonucleotide
tagaggagctattctgtagattgacggtct

SEQ ID NO: 279234 - DNA, 30 bp, Artificial Sequence
  Synthetic oligonucleotide
ccaaccaccttctcttaggggtgccggtct

SEQ ID NO: 279235 - DNA, 30 bp, Artificial Sequence
  Synthetic oligonucleotide
caggtgaaatccgcgagcccttagcggtct

SEQ ID NO: 279236 - DNA, 30 bp, Artificial Sequence
  Synthetic oligonucleotide
cacatattgaagatgtatccgagtcggtct

SEQ ID NO: 279237 - DNA, 30 bp, Artificial Sequence
  Synthetic oligonucleotide
tccgttgttatgggatggaagtttcggtct

SEQ ID NO: 279238 - DNA, 30 bp, Artificial Sequence
  Synthetic oligonucleotide
atgattaaaggatcatcaagacaagggtct

SEQ ID NO: 279239 - DNA, 30 bp, Artificial Sequence
  Synthetic oligonucleotide
gctcgtgaatgttagttaagagcagggtct

SEQ ID NO: 279240 - DNA, 30 bp, Artificial Sequence
  Synthetic oligonucleotide
aactgggaatgggaatatcttatagggtct

SEQ ID NO: 279241 - DNA, 30 bp, Artificial Sequence
  Synthetic oligonucleotide
attgagagtacgaaacgtgcctacgggtct

SEQ ID NO: 279242 - DNA, 30 bp, Artificial Sequence
  Synthetic oligonucleotide
cgtaggcatggattgacagaatttgggtct

SEQ ID NO: 279243 - DNA, 30 bp, Artificial Sequence
  Synthetic oligonucleotide
aaactgtaccgaaacattaggtttgggtct

SEQ ID NO: 279244 - DNA, 30 bp, Artificial Sequence
  Synthetic oligonucleotide
gtcaccatggcaatgaagaccggatggtct

SEQ ID NO: 279245 - DNA, 30 bp, Artificial Sequence
  Synthetic oligonucleotide
ttagcattgtcagtcttagatggatggtct

SEQ ID NO: 279246 - DNA, 30 bp, Artificial Sequence
  Synthetic oligonucleotide
cgtgatgcatacaccccggacgcgtggtct

SEQ ID NO: 279247 - DNA, 30 bp, Artificial Sequence
  Synthetic oligonucleotide
tttagtcagatgtcaaagtacgcgtggtct

SEQ ID NO: 279248 - DNA, 30 bp, Artificial Sequence
  Synthetic oligonucleotide
ggtagacctgacaccggggatgtgtggtct

SEQ ID NO: 279249 - DNA, 30 bp, Artificial Sequence
  Synthetic oligonucleotide
gcatacgtagttccggcacctctaatgtct

SEQ ID NO: 279250 - DNA, 30 bp, Artificial Sequence
  Synthetic oligonucleotide
ggatacgcttttgtgtgcgcgaccatgtct

SEQ ID NO: 279251 - DNA, 30 bp, Artificial Sequence
  Synthetic oligonucleotide
gtaagctacttgtactaaagaactatgtct

SEQ ID NO: 279252 - DNA, 30 bp, Artificial Sequence
  Synthetic oligonucleotide
tatgggaacatacagcggccatctatgtct

SEQ ID NO: 279253 - DNA, 30 bp, Artificial Sequence
  Synthetic oligonucleotide
actcaccctactcaagtatgttatctgtct

SEQ ID NO: 279254 - DNA, 30 bp, Artificial Sequence
  Synthetic oligonucleotide
tgggatatgctcaccttcgggtgtctgtct

SEQ ID NO: 279255 - DNA, 30 bp, Artificial Sequence
  Synthetic oligonucleotide
atgtatacatgactaaccttcattctgtct

SEQ ID NO: 279256 - DNA, 30 bp, Artificial Sequence
  Synthetic oligonucleotide
taaggtcttgtagcagcggttaaagtgtct

SEQ ID NO: 279257 - DNA, 30 bp, Artificial Sequence
  Synthetic oligonucleotide
cactgtggcatggcagactggcaagtgtct

SEQ ID NO: 279258 - DNA, 30 bp, Artificial Sequence
  Synthetic oligonucleotide
aagtcaggacgttagacttcagtcgtgtct

SEQ ID NO: 279259 - DNA, 30 bp, Artificial Sequence
  Synthetic oligonucleotide
caagccagtggggatttggaggctgtgtct

SEQ ID NO: 279260 - DNA, 30 bp, Artificial Sequence
  Synthetic oligonucleotide
catactatgtgctgtatcagtccattgtct

SEQ ID NO: 279261 - DNA, 30 bp, Artificial Sequence
  Synthetic oligonucleotide
ggtagatgggtatcttcgtttatattgtct

SEQ ID NO: 279262 - DNA, 30 bp, Artificial Sequence
  Synthetic oligonucleotide
tagaggatagctgtgtgtcaggaaaattct

SEQ ID NO: 279263 - DNA, 30 bp, Artificial Sequence
  Synthetic oligonucleotide
gggttttaaatcataatcgtgaacaattct

SEQ ID NO: 279264 - DNA, 30 bp, Artificial Sequence
  Synthetic oligonucleotide
gcggcataggtgtgggatgtacagaattct

SEQ ID NO: 279265 - DNA, 30 bp, Artificial Sequence
  Synthetic oligonucleotide
ggtcaagtttggtctacccataataattct

SEQ ID NO: 279266 - DNA, 30 bp, Artificial Sequence
  Synthetic oligonucleotide
tgttaaacccaaatatgtgtcagtaattct

SEQ ID NO: 279267 - DNA, 30 bp, Artificial Sequence
  Synthetic oligonucleotide
aaccaatccggtttgagcagtgttaattct

SEQ ID NO: 279268 - DNA, 30 bp, Artificial Sequence
  Synthetic oligonucleotide
aatatcccagggaacgaaagattacattct

SEQ ID NO: 279269 - DNA, 30 bp, Artificial Sequence
  Synthetic oligonucleotide
actgattcataaacctagaatcaccattct

SEQ ID NO: 279270 - DNA, 30 bp, Artificial Sequence
  Synthetic oligonucleotide
gtccgcacgagcaataaacctatccattct

SEQ ID NO: 279271 - DNA, 30 bp, Artificial Sequence
  Synthetic oligonucleotide
tggagggtactcttgctcgcgcctcattct

SEQ ID NO: 279272 - DNA, 30 bp, Artificial Sequence
  Synthetic oligonucleotide
tcttagacgacgtaactacgaagtcattct

SEQ ID NO: 279273 - DNA, 30 bp, Artificial Sequence
  Synthetic oligonucleotide
caaagaggagatggtaagtttccagattct

SEQ ID NO: 279274 - DNA, 30 bp, Artificial Sequence
  Synthetic oligonucleotide
caaacactaaactcacgtaatatcgattct

SEQ ID NO: 279275 - DNA, 30 bp, Artificial Sequence
  Synthetic oligonucleotide
acgacctatgagctgagggtgccggattct

SEQ ID NO: 279276 - DNA, 30 bp, Artificial Sequence
  Synthetic oligonucleotide
ttgtccgatgtgaccgtttgtgatgattct

SEQ ID NO: 279277 - DNA, 30 bp, Artificial Sequence
  Synthetic oligonucleotide
tcagctcagtatctagcgtggcttgattct

SEQ ID NO: 279278 - DNA, 30 bp, Artificial Sequence
  Synthetic oligonucleotide
aggcaagattaactagtctaggaatattct

SEQ ID NO: 279279 - DNA, 30 bp, Artificial Sequence
  Synthetic oligonucleotide
tggaataactgtcatctaagacgatattct

SEQ ID NO: 279280 - DNA, 30 bp, Artificial Sequence
  Synthetic oligonucleotide
ccgtgaatcagcaacaatataggatattct

SEQ ID NO: 279281 - DNA, 30 bp, Artificial Sequence
  Synthetic oligonucleotide
cccatagtcacagtactcggggttacttct

SEQ ID NO: 279282 - DNA, 30 bp, Artificial Sequence
  Synthetic oligonucleotide
tctacaacaggttgccatcgaggtccttct

SEQ ID NO: 279283 - DNA, 30 bp, Artificial Sequence
  Synthetic oligonucleotide
atcgtggcggcatcattttgttttccttct

SEQ ID NO: 279284 - DNA, 30 bp, Artificial Sequence
  Synthetic oligonucleotide
tgagccgctaggcagtaaacaaaagcttct

SEQ ID NO: 279285 - DNA, 30 bp, Artificial Sequence
  Synthetic oligonucleotide
cgaggcctgcatccgagtatattagcttct

SEQ ID NO: 279286 - DNA, 30 bp, Artificial Sequence
  Synthetic oligonucleotide
ttgctaatgacaaattgagtattagcttct

SEQ ID NO: 279287 - DNA, 30 bp, Artificial Sequence
  Synthetic oligonucleotide
acgcaccgaggagcataacggtcggcttct

SEQ ID NO: 279288 - DNA, 30 bp, Artificial Sequence
  Synthetic oligonucleotide
gcaacggcgacggaattgtggcgggcttct

SEQ ID NO: 279289 - DNA, 30 bp, Artificial Sequence
  Synthetic oligonucleotide
ttgtaacggtactactggtagactgcttct

SEQ ID NO: 279290 - DNA, 30 bp, Artificial Sequence
  Synthetic oligonucleotide
atattaatctgaacaccacatccctcttct

SEQ ID NO: 279291 - DNA, 30 bp, Artificial Sequence
  Synthetic oligonucleotide
acagagtaaacgatgcgcgcactctcttct

SEQ ID NO: 279292 - DNA, 30 bp, Artificial Sequence
  Synthetic oligonucleotide
aagggctgagatcattttaaccccagttct

SEQ ID NO: 279293 - DNA, 30 bp, Artificial Sequence
  Synthetic oligonucleotide
acgatgggcgccgcatgtgtcctcagttct

SEQ ID NO: 279294 - DNA, 30 bp, Artificial Sequence
  Synthetic oligonucleotide
cagagctgtcctctttcacctgggagttct

SEQ ID NO: 279295 - DNA, 30 bp, Artificial Sequence
  Synthetic oligonucleotide
gttcctcagtcattctgtacaccacgttct

SEQ ID NO: 279296 - DNA, 30 bp, Artificial Sequence
  Synthetic oligonucleotide
ttagggtaaatagcatacgcgaaccgttct

SEQ ID NO: 279297 - DNA, 30 bp, Artificial Sequence
  Synthetic oligonucleotide
gttgaagaaccttcgagtaagttccgttct

SEQ ID NO: 279298 - DNA, 30 bp, Artificial Sequence
  Synthetic oligonucleotide
tccaccaaggatgcactacagaggcgttct

SEQ ID NO: 279299 - DNA, 30 bp, Artificial Sequence
  Synthetic oligonucleotide
aaaagagctttgctagacgttgatcgttct

SEQ ID NO: 279300 - DNA, 30 bp, Artificial Sequence
  Synthetic oligonucleotide
aatgcgaccggaccataaggtggaggttct

SEQ ID NO: 279301 - DNA, 30 bp, Artificial Sequence
  Synthetic oligonucleotide
acattattgcggataatagtaataggttct

SEQ ID NO: 279302 - DNA, 30 bp, Artificial Sequence
  Synthetic oligonucleotide
tcgtggcgacggcggaggcgctagggttct

SEQ ID NO: 279303 - DNA, 30 bp, Artificial Sequence
  Synthetic oligonucleotide
ttagagcaataacgatctcacacgggttct

SEQ ID NO: 279304 - DNA, 30 bp, Artificial Sequence
  Synthetic oligonucleotide
tatagcggttcaggcgcatagcggggttct

SEQ ID NO: 279305 - DNA, 30 bp, Artificial Sequence
  Synthetic oligonucleotide
tgaccagccatactcaagtttcggggttct

SEQ ID NO: 279306 - DNA, 30 bp, Artificial Sequence
  Synthetic oligonucleotide
ccggttcctcagcggatcggaagtggttct

SEQ ID NO: 279307 - DNA, 30 bp, Artificial Sequence
  Synthetic oligonucleotide
atgtccttgaaataattactgaagtgttct

SEQ ID NO: 279308 - DNA, 30 bp, Artificial Sequence
  Synthetic oligonucleotide
ccaatgaggagggactcaaatctgtgttct

SEQ ID NO: 279309 - DNA, 31 bp, Artificial Sequence
  Synthetic oligonucleotide
ccgtaggagtattgtaaaatttgtttgttct

SEQ ID NO: 279310 - DNA, 30 bp, Artificial Sequence
  Synthetic oligonucleotide
aggagcgcctaggtcatacatacaatttct

SEQ ID NO: 279311 - DNA, 30 bp, Artificial Sequence
  Synthetic oligonucleotide
tcgtcatgaaactgggactattcaatttct

SEQ ID NO: 279312 - DNA, 30 bp, Artificial Sequence
  Synthetic oligonucleotide
aagcgcgcccgatgcgatcgccagatttct

SEQ ID NO: 279313 - DNA, 30 bp, Artificial Sequence
  Synthetic oligonucleotide
aggtatgcggtcgtttagtttaggatttct

SEQ ID NO: 279314 - DNA, 30 bp, Artificial Sequence
  Synthetic oligonucleotide
gttggagcgggggtggcagtggtgatttct

SEQ ID NO: 279315 - DNA, 30 bp, Artificial Sequence
  Synthetic oligonucleotide
tgtcatacagttgtccagcgaggtatttct

SEQ ID NO: 279316 - DNA, 30 bp, Artificial Sequence
  Synthetic oligonucleotide
acgatccggaacgtattctcatgtatttct

SEQ ID NO: 279317 - DNA, 30 bp, Artificial Sequence
  Synthetic oligonucleotide
agggccgaagactggtctcgagaactttct

SEQ ID NO: 279318 - DNA, 30 bp, Artificial Sequence
  Synthetic oligonucleotide
cgagcggcggttctgtcaagtccactttct

SEQ ID NO: 279319 - DNA, 30 bp, Artificial Sequence
  Synthetic oligonucleotide
cttctaagtcagagcgctggtcgactttct

SEQ ID NO: 279320 - DNA, 30 bp, Artificial Sequence
  Synthetic oligonucleotide
gtgatgtgtgagggcctataaaccctttct

SEQ ID NO: 279321 - DNA, 30 bp, Artificial Sequence
  Synthetic oligonucleotide
cgctgaatgctcagcttcggttgcctttct

SEQ ID NO: 279322 - DNA, 30 bp, Artificial Sequence
  Synthetic oligonucleotide
atagtttaaatgaaatgatttagtctttct

SEQ ID NO: 279323 - DNA, 30 bp, Artificial Sequence
  Synthetic oligonucleotide
tcgtcgcgtccataaaacgttacagtttct

SEQ ID NO: 279324 - DNA, 30 bp, Artificial Sequence
  Synthetic oligonucleotide
atagaacatattgaaggctttcacgtttct

SEQ ID NO: 279325 - DNA, 30 bp, Artificial Sequence
  Synthetic oligonucleotide
agatcggactcacagtggagatccgtttct

SEQ ID NO: 279326 - DNA, 30 bp, Artificial Sequence
  Synthetic oligonucleotide
ttctcacataggtctccgctgtccgtttct

SEQ ID NO: 279327 - DNA, 30 bp, Artificial Sequence
  Synthetic oligonucleotide
acacactgtttcatcttacaatgggtttct

SEQ ID NO: 279328 - DNA, 30 bp, Artificial Sequence
  Synthetic oligonucleotide
ggtttccccgtgctcgtgccaaatgtttct

SEQ ID NO: 279329 - DNA, 30 bp, Artificial Sequence
  Synthetic oligonucleotide
gaccgccacaactcatgtatgaaaaaaagt

SEQ ID NO: 279330 - DNA, 30 bp, Artificial Sequence
  Synthetic oligonucleotide
tttgggaagcgcgtcagacctaaaaaaagt

SEQ ID NO: 279331 - DNA, 30 bp, Artificial Sequence
  Synthetic oligonucleotide
tgatgcccaagccagtgggtcccaaaaagt

SEQ ID NO: 279332 - DNA, 30 bp, Artificial Sequence
  Synthetic oligonucleotide
aacacgctctaagctctagacggaaaaagt

SEQ ID NO: 279333 - DNA, 30 bp, Artificial Sequence
  Synthetic oligonucleotide
gcatgcatggtctcacgctaatgaaaaagt

SEQ ID NO: 279334 - DNA, 30 bp, Artificial Sequence
  Synthetic oligonucleotide
aaaccggtcaatcagtaagtatacaaaagt

SEQ ID NO: 279335 - DNA, 30 bp, Artificial Sequence
  Synthetic oligonucleotide
tggggtcggggcggatgacacaagaaaagt

SEQ ID NO: 279336 - DNA, 30 bp, Artificial Sequence
  Synthetic oligonucleotide
ttcgccgtctcgatcaagtagatgaaaagt

SEQ ID NO: 279337 - DNA, 30 bp, Artificial Sequence
  Synthetic oligonucleotide
aatcggaccatgaactagaccttgaaaagt

SEQ ID NO: 279338 - DNA, 30 bp, Artificial Sequence
  Synthetic oligonucleotide
tggcaagattctgtataaatgttgaaaagt

SEQ ID NO: 279339 - DNA, 30 bp, Artificial Sequence
  Synthetic oligonucleotide
aatcactggacttattcatagcttaaaagt

SEQ ID NO: 279340 - DNA, 30 bp, Artificial Sequence
  Synthetic oligonucleotide
atagaatcatgtcccaacctgcttaaaagt

SEQ ID NO: 279341 - DNA, 30 bp, Artificial Sequence
  Synthetic oligonucleotide
ttaagggggggtagacctttctgacaaagt

SEQ ID NO: 279342 - DNA, 30 bp, Artificial Sequence
  Synthetic oligonucleotide
gagagctaaaagttcgcggtgcaagaaagt

SEQ ID NO: 279343 - DNA, 30 bp, Artificial Sequence
  Synthetic oligonucleotide
gaaagctcaacacattaattgttcgaaagt

SEQ ID NO: 279344 - DNA, 30 bp, Artificial Sequence
  Synthetic oligonucleotide
tgctcgtctgagcgatgacaacaggaaagt

SEQ ID NO: 279345 - DNA, 30 bp, Artificial Sequence
  Synthetic oligonucleotide
gtaattgcggctagtgtggtttaggaaagt

SEQ ID NO: 279346 - DNA, 30 bp, Artificial Sequence
  Synthetic oligonucleotide
gcacgttttcaaggggtcgagggggaaagt

SEQ ID NO: 279347 - DNA, 30 bp, Artificial Sequence
  Synthetic oligonucleotide
aaggcactataaagaggtcagcattaaagt

SEQ ID NO: 279348 - DNA, 30 bp, Artificial Sequence
  Synthetic oligonucleotide
ttcataagggccaaaattaagctttaaagt

SEQ ID NO: 279349 - DNA, 30 bp, Artificial Sequence
  Synthetic oligonucleotide
tcggcctcgagactcttaagcggaacaagt

SEQ ID NO: 279350 - DNA, 30 bp, Artificial Sequence
  Synthetic oligonucleotide
aagtactagagttctagctcctgcacaagt

SEQ ID NO: 279351 - DNA, 30 bp, Artificial Sequence
  Synthetic oligonucleotide
ctccacgggcacgcaatgcggctcacaagt

SEQ ID NO: 279352 - DNA, 30 bp, Artificial Sequence
  Synthetic oligonucleotide
catccgcgactagctcctactaggacaagt

SEQ ID NO: 279353 - DNA, 30 bp, Artificial Sequence
  Synthetic oligonucleotide
cgaattaatgctagtgctttacggacaagt

SEQ ID NO: 279354 - DNA, 30 bp, Artificial Sequence
  Synthetic oligonucleotide
actgaagactacgggtctggtaatacaagt

SEQ ID NO: 279355 - DNA, 30 bp, Artificial Sequence
  Synthetic oligonucleotide
actctcaacgaaatcgaggtttctacaagt

SEQ ID NO: 279356 - DNA, 30 bp, Artificial Sequence
  Synthetic oligonucleotide
cccggggtaaaaccgcctccgaatccaagt

SEQ ID NO: 279357 - DNA, 30 bp, Artificial Sequence
  Synthetic oligonucleotide
gattgttcgctttatccgtatcgtccaagt

SEQ ID NO: 279358 - DNA, 30 bp, Artificial Sequence
  Synthetic oligonucleotide
aaatagtgtctgttagaaaaggttccaagt

SEQ ID NO: 279359 - DNA, 30 bp, Artificial Sequence
  Synthetic oligonucleotide
actagagggcttgcgctccctcaagcaagt

SEQ ID NO: 279360 - DNA, 30 bp, Artificial Sequence
  Synthetic oligonucleotide
aactacggcctgagcgcacctgacgcaagt

SEQ ID NO: 279361 - DNA, 30 bp, Artificial Sequence
  Synthetic oligonucleotide
acgggattcggattccctcctatcgcaagt

SEQ ID NO: 279362 - DNA, 30 bp, Artificial Sequence
  Synthetic oligonucleotide
taagagcgagcttatttccgtcgggcaagt

SEQ ID NO: 279363 - DNA, 30 bp, Artificial Sequence
  Synthetic oligonucleotide
acggagacttggattttattatctgcaagt

SEQ ID NO: 279364 - DNA, 30 bp, Artificial Sequence
  Synthetic oligonucleotide
gaatcctggaaaggcggaacgagtgcaagt

SEQ ID NO: 279365 - DNA, 30 bp, Artificial Sequence
  Synthetic oligonucleotide
tatcacggatcttgtaatcgtaaatcaagt

SEQ ID NO: 279366 - DNA, 30 bp, Artificial Sequence
  Synthetic oligonucleotide
gggcttcaggccgttggctagccgtcaagt

SEQ ID NO: 279367 - DNA, 30 bp, Artificial Sequence
  Synthetic oligonucleotide
tcgcatgtaaagtcactctcatcgtcaagt

SEQ ID NO: 279368 - DNA, 30 bp, Artificial Sequence
  Synthetic oligonucleotide
tgagcgacggaatctctgcctctgtcaagt

SEQ ID NO: 279369 - DNA, 30 bp, Artificial Sequence
  Synthetic oligonucleotide
agagttgtaactctgggacctggaagaagt

SEQ ID NO: 279370 - DNA, 30 bp, Artificial Sequence
  Synthetic oligonucleotide
ccgacgagctcccaaagtagacacagaagt

SEQ ID NO: 279371 - DNA, 31 bp, Artificial Sequence
  Synthetic oligonucleotide
gggcaatattcccccagcaccgtacagaagt

SEQ ID NO: 279372 - DNA, 30 bp, Artificial Sequence
  Synthetic oligonucleotide
tgtctgctaaacagtcgtgacatcagaagt

SEQ ID NO: 279373 - DNA, 30 bp, Artificial Sequence
  Synthetic oligonucleotide
atggtagagctgcaattacgcttcagaagt

SEQ ID NO: 279374 - DNA, 30 bp, Artificial Sequence
  Synthetic oligonucleotide
cagtagcgcacgtattagctgttgagaagt

SEQ ID NO: 279375 - DNA, 30 bp, Artificial Sequence
  Synthetic oligonucleotide
tacgtctagaagataaacaggtatagaagt

SEQ ID NO: 279376 - DNA, 30 bp, Artificial Sequence
  Synthetic oligonucleotide
gatccttaggtgcaacagtatcttagaagt

SEQ ID NO: 279377 - DNA, 30 bp, Artificial Sequence
  Synthetic oligonucleotide
cagaagcagttcgtcagacgagcacgaagt

SEQ ID NO: 279378 - DNA, 30 bp, Artificial Sequence
  Synthetic oligonucleotide
gcatgcctcaactggattcgagcacgaagt

SEQ ID NO: 279379 - DNA, 30 bp, Artificial Sequence
  Synthetic oligonucleotide
cgaaacattaacatcgtgttggtacgaagt

SEQ ID NO: 279380 - DNA, 30 bp, Artificial Sequence
  Synthetic oligonucleotide
caacataggcagtatgcagaagtgcgaagt

SEQ ID NO: 279381 - DNA, 30 bp, Artificial Sequence
  Synthetic oligonucleotide
ggtacgttcggtatcccacaagatcgaagt

SEQ ID NO: 279382 - DNA, 30 bp, Artificial Sequence
  Synthetic oligonucleotide
aagcgttcgggtacgaaccatgcaggaagt

SEQ ID NO: 279383 - DNA, 30 bp, Artificial Sequence
  Synthetic oligonucleotide
tgctgaataaagtgttacgtatcaggaagt

SEQ ID NO: 279384 - DNA, 30 bp, Artificial Sequence
  Synthetic oligonucleotide
agacttgcggacgaagttaacggaggaagt

SEQ ID NO: 279385 - DNA, 30 bp, Artificial Sequence
  Synthetic oligonucleotide
ggaccggctaatattttggaagccggaagt

SEQ ID NO: 279386 - DNA, 30 bp, Artificial Sequence
  Synthetic oligonucleotide
ggtctagcccgttcttcgagaagcggaagt

SEQ ID NO: 279387 - DNA, 30 bp, Artificial Sequence
  Synthetic oligonucleotide
ctccaacattgtaaacgtcgatgcggaagt

SEQ ID NO: 279388 - DNA, 30 bp, Artificial Sequence
  Synthetic oligonucleotide
ggcgtccgatggaggagtctatagggaagt

SEQ ID NO: 279389 - DNA, 30 bp, Artificial Sequence
  Synthetic oligonucleotide
gatgcttcgtcgtaggattgatggggaagt

SEQ ID NO: 279390 - DNA, 30 bp, Artificial Sequence
  Synthetic oligonucleotide
ctataaacgcataagagtgttctgggaagt

SEQ ID NO: 279391 - DNA, 30 bp, Artificial Sequence
  Synthetic oligonucleotide
aaacacgcctggtaggggttggatggaagt

SEQ ID NO: 279392 - DNA, 30 bp, Artificial Sequence
  Synthetic oligonucleotide
aatggactatggggcacgtattgtggaagt

SEQ ID NO: 279393 - DNA, 30 bp, Artificial Sequence
  Synthetic oligonucleotide
acgagcgcattatatccaccaatatgaagt

SEQ ID NO: 279394 - DNA, 30 bp, Artificial Sequence
  Synthetic oligonucleotide
ataaccgttcacaaatggtgaatatgaagt

SEQ ID NO: 279395 - DNA, 30 bp, Artificial Sequence
  Synthetic oligonucleotide
tcataggatgtgcaaagtgatttatgaagt

SEQ ID NO: 279396 - DNA, 30 bp, Artificial Sequence
  Synthetic oligonucleotide
gcattggtccattgctgcaagtactgaagt

SEQ ID NO: 279397 - DNA, 30 bp, Artificial Sequence
  Synthetic oligonucleotide
tctctggtagcaataaagatcccctgaagt

SEQ ID NO: 279398 - DNA, 30 bp, Artificial Sequence
  Synthetic oligonucleotide
gcaagtagtatcaagccaatgagctgaagt

SEQ ID NO: 279399 - DNA, 30 bp, Artificial Sequence
  Synthetic oligonucleotide
tagcttgatggcatgaaaaacgtctgaagt

SEQ ID NO: 279400 - DNA, 30 bp, Artificial Sequence
  Synthetic oligonucleotide
gggtccccaggattaggtgtattctgaagt

SEQ ID NO: 279401 - DNA, 30 bp, Artificial Sequence
  Synthetic oligonucleotide
caatatcatgaccgccggagtgattgaagt

SEQ ID NO: 279402 - DNA, 30 bp, Artificial Sequence
  Synthetic oligonucleotide
accgcaaaatcatctcggggctgaataagt

SEQ ID NO: 279403 - DNA, 30 bp, Artificial Sequence
  Synthetic oligonucleotide
tggaattggtatatacactgtaacataagt

SEQ ID NO: 279404 - DNA, 30 bp, Artificial Sequence
  Synthetic oligonucleotide
aggacgtatcatacccgagaaaagataagt

SEQ ID NO: 279405 - DNA, 30 bp, Artificial Sequence
  Synthetic oligonucleotide
ttgttgtaatcaagatttcgagttataagt

SEQ ID NO: 279406 - DNA, 30 bp, Artificial Sequence
  Synthetic oligonucleotide
tacaattgtggatagcaactctttataagt

SEQ ID NO: 279407 - DNA, 30 bp, Artificial Sequence
  Synthetic oligonucleotide
aaacttgaataactccatcacgccctaagt

SEQ ID NO: 279408 - DNA, 30 bp, Artificial Sequence
  Synthetic oligonucleotide
gcggcaaaatccatagttcaatcgctaagt

SEQ ID NO: 279409 - DNA, 30 bp, Artificial Sequence
  Synthetic oligonucleotide
gtaagggggcgtagataccaaaggctaagt

SEQ ID NO: 279410 - DNA, 30 bp, Artificial Sequence
  Synthetic oligonucleotide
atcctatcaccttatattggaaggctaagt

SEQ ID NO: 279411 - DNA, 30 bp, Artificial Sequence
  Synthetic oligonucleotide
taaatacacccagtgaacactcacgtaagt

SEQ ID NO: 279412 - DNA, 30 bp, Artificial Sequence
  Synthetic oligonucleotide
ttacaaagtacagggcctcaggccgtaagt

SEQ ID NO: 279413 - DNA, 30 bp, Artificial Sequence
  Synthetic oligonucleotide
gggccacacggatttgttgcgatcgtaagt

SEQ ID NO: 279414 - DNA, 30 bp, Artificial Sequence
  Synthetic oligonucleotide
cgatctgatagtaaatctgtggtcgtaagt

SEQ ID NO: 279415 - DNA, 30 bp, Artificial Sequence
  Synthetic oligonucleotide
cccagggtccagttctaataggatgtaagt

SEQ ID NO: 279416 - DNA, 30 bp, Artificial Sequence
  Synthetic oligonucleotide
tgttcgctggaccgttcaaatactgtaagt

SEQ ID NO: 279417 - DNA, 30 bp, Artificial Sequence
  Synthetic oligonucleotide
gagaaagcggttgtgtgtgaacctgtaagt

SEQ ID NO: 279418 - DNA, 30 bp, Artificial Sequence
  Synthetic oligonucleotide
gggagaacccgacattttctggttgtaagt

SEQ ID NO: 279419 - DNA, 30 bp, Artificial Sequence
  Synthetic oligonucleotide
tccccggtatttgcgggttagaaattaagt

SEQ ID NO: 279420 - DNA, 30 bp, Artificial Sequence
  Synthetic oligonucleotide
gttgcataacttacacgattggcattaagt

SEQ ID NO: 279421 - DNA, 30 bp, Artificial Sequence
  Synthetic oligonucleotide
aggtgactgtggtgtggtaggtagttaagt

SEQ ID NO: 279422 - DNA, 29 bp, Artificial Sequence
  Synthetic oligonucleotide
gacagtcgagtatgaacttgaatttaagt

SEQ ID NO: 279423 - DNA, 30 bp, Artificial Sequence
  Synthetic oligonucleotide
taggaacggctccaccaaggcactttaagt

SEQ ID NO: 279424 - DNA, 30 bp, Artificial Sequence
  Synthetic oligonucleotide
tgtcgactgtcacgcccgcgtgttttaagt

SEQ ID NO: 279425 - DNA, 30 bp, Artificial Sequence
  Synthetic oligonucleotide
tatcatgttagctttgttcgaacgaacagt

SEQ ID NO: 279426 - DNA, 30 bp, Artificial Sequence
  Synthetic oligonucleotide
cataccggggtgaggttctgacggaacagt

SEQ ID NO: 279427 - DNA, 30 bp, Artificial Sequence
  Synthetic oligonucleotide
tgcctcgctcgtggttcatcgtggaacagt

SEQ ID NO: 279428 - DNA, 30 bp, Artificial Sequence
  Synthetic oligonucleotide
ggaaggccccttagattatcactgaacagt

SEQ ID NO: 279429 - DNA, 30 bp, Artificial Sequence
  Synthetic oligonucleotide
tggcaaaacgagtgttgggataatcacagt

SEQ ID NO: 279430 - DNA, 30 bp, Artificial Sequence
  Synthetic oligonucleotide
gctacgcctgtcttcgagctgcctcacagt

SEQ ID NO: 279431 - DNA, 30 bp, Artificial Sequence
  Synthetic oligonucleotide
atgagacctcttttcgcgtcggctcacagt

SEQ ID NO: 279432 - DNA, 30 bp, Artificial Sequence
  Synthetic oligonucleotide
tcccaaataagggtaaatttaccagacagt

SEQ ID NO: 279433 - DNA, 30 bp, Artificial Sequence
  Synthetic oligonucleotide
aaataggccttgctaaggcatatcgacagt

SEQ ID NO: 279434 - DNA, 30 bp, Artificial Sequence
  Synthetic oligonucleotide
gtcccaagccaatgcgcgccctaggacagt

SEQ ID NO: 279435 - DNA, 30 bp, Artificial Sequence
  Synthetic oligonucleotide
agttcccatgatagttagcgggttgacagt

SEQ ID NO: 279436 - DNA, 30 bp, Artificial Sequence
  Synthetic oligonucleotide
ctgaataagtttgtcatttagggatacagt

SEQ ID NO: 279437 - DNA, 30 bp, Artificial Sequence
  Synthetic oligonucleotide
agagcggagctttatgtcttgcgctacagt

SEQ ID NO: 279438 - DNA, 30 bp, Artificial Sequence
  Synthetic oligonucleotide
ctgacgcgactagggttaagaaggtacagt

SEQ ID NO: 279439 - DNA, 30 bp, Artificial Sequence
  Synthetic oligonucleotide
cgggggggccggcgcttgagcaattacagt

SEQ ID NO: 279440 - DNA, 30 bp, Artificial Sequence
  Synthetic oligonucleotide
aaatccacaatgtggactggataaaccagt

SEQ ID NO: 279441 - DNA, 30 bp, Artificial Sequence
  Synthetic oligonucleotide
tatgtcagcgctacgactatgtacaccagt

SEQ ID NO: 279442 - DNA, 30 bp, Artificial Sequence
  Synthetic oligonucleotide
cataactggaaatatgtgttgggcaccagt

SEQ ID NO: 279443 - DNA, 29 bp, Artificial Sequence
  Synthetic oligonucleotide
ggcgagtatcacttcgatgacagaccagt

SEQ ID NO: 279444 - DNA, 30 bp, Artificial Sequence
  Synthetic oligonucleotide
gtggcatctgcatgtcgctaaatgaccagt

SEQ ID NO: 279445 - DNA, 30 bp, Artificial Sequence
  Synthetic oligonucleotide
tcgcaccaataaacgggacaatttaccagt

SEQ ID NO: 279446 - DNA, 30 bp, Artificial Sequence
  Synthetic oligonucleotide
gggattaacgttatgagatcacaacccagt

SEQ ID NO: 279447 - DNA, 30 bp, Artificial Sequence
  Synthetic oligonucleotide
gcggagcttattctacatttcttacccagt

SEQ ID NO: 279448 - DNA, 30 bp, Artificial Sequence
  Synthetic oligonucleotide
cggagcactacgaaattaaaagcgcccagt

SEQ ID NO: 279449 - DNA, 30 bp, Artificial Sequence
  Synthetic oligonucleotide
tggtcacagttttaaccccgccctcccagt

SEQ ID NO: 279450 - DNA, 30 bp, Artificial Sequence
  Synthetic oligonucleotide
cgaagtcactatcccctgaaaattcccagt

SEQ ID NO: 279451 - DNA, 30 bp, Artificial Sequence
  Synthetic oligonucleotide
cttcctttaggtgcgatggaagtagccagt

SEQ ID NO: 279452 - DNA, 30 bp, Artificial Sequence
  Synthetic oligonucleotide
acacttttacggcatggactccacgccagt

SEQ ID NO: 279453 - DNA, 30 bp, Artificial Sequence
  Synthetic oligonucleotide
gttcggatgggtaccgattcagtcgccagt

SEQ ID NO: 279454 - DNA, 30 bp, Artificial Sequence
  Synthetic oligonucleotide
cgctatattgcaacgtaatctgcggccagt

SEQ ID NO: 279455 - DNA, 30 bp, Artificial Sequence
  Synthetic oligonucleotide
gtcccctcacagccacaatcgggggccagt

SEQ ID NO: 279456 - DNA, 30 bp, Artificial Sequence
  Synthetic oligonucleotide
ggatatatggagccatgcaaagtggccagt

SEQ ID NO: 279457 - DNA, 30 bp, Artificial Sequence
  Synthetic oligonucleotide
gtcaaaaggaggatataactgttatccagt

SEQ ID NO: 279458 - DNA, 30 bp, Artificial Sequence
  Synthetic oligonucleotide
ccgtcagaggataatcaaagttcctccagt

SEQ ID NO: 279459 - DNA, 30 bp, Artificial Sequence
  Synthetic oligonucleotide
gacctgtatggaattgcctttgggtccagt

SEQ ID NO: 279460 - DNA, 30 bp, Artificial Sequence
  Synthetic oligonucleotide
tcgattaaaggagggatagacgaacgcagt

SEQ ID NO: 279461 - DNA, 30 bp, Artificial Sequence
  Synthetic oligonucleotide
agtatagcttgcaacataaagtagcgcagt

SEQ ID NO: 279462 - DNA, 30 bp, Artificial Sequence
  Synthetic oligonucleotide
gggcctgggacagctcacataaggcgcagt

SEQ ID NO: 279463 - DNA, 30 bp, Artificial Sequence
  Synthetic oligonucleotide
ctgtataatcgtgtcgtagaggatcgcagt

SEQ ID NO: 279464 - DNA, 30 bp, Artificial Sequence
  Synthetic oligonucleotide
caccgcaatcaacacgcctgatctcgcagt

SEQ ID NO: 279465 - DNA, 30 bp, Artificial Sequence
  Synthetic oligonucleotide
tataagcgattctatatcaggtaaggcagt

SEQ ID NO: 279466 - DNA, 30 bp, Artificial Sequence
  Synthetic oligonucleotide
cagatcgaatgagcttacagattaggcagt

SEQ ID NO: 279467 - DNA, 30 bp, Artificial Sequence
  Synthetic oligonucleotide
ctgtgccggtggcgttcggataagggcagt

SEQ ID NO: 279468 - DNA, 30 bp, Artificial Sequence
  Synthetic oligonucleotide
gcacgttgtaagtataagtaaggtggcagt

SEQ ID NO: 279469 - DNA, 30 bp, Artificial Sequence
  Synthetic oligonucleotide
cctgcttgcgatgggtggaggaactgcagt

SEQ ID NO: 279470 - DNA, 30 bp, Artificial Sequence
  Synthetic oligonucleotide
ccggcgcgaacgggcgatccaagctgcagt

SEQ ID NO: 279471 - DNA, 30 bp, Artificial Sequence
  Synthetic oligonucleotide
aagcataacgtctgtggttgctcttgcagt

SEQ ID NO: 279472 - DNA, 30 bp, Artificial Sequence
  Synthetic oligonucleotide
acgggcacaatgcaccggtttcgttgcagt

SEQ ID NO: 279473 - DNA, 30 bp, Artificial Sequence
  Synthetic oligonucleotide
ataagtactcacttgctatctggaatcagt

SEQ ID NO: 279474 - DNA, 30 bp, Artificial Sequence
  Synthetic oligonucleotide
cattagctgaaaagcgaaaaattaatcagt

SEQ ID NO: 279475 - DNA, 30 bp, Artificial Sequence
  Synthetic oligonucleotide
ccaacaagtattatctacgtacccatcagt

SEQ ID NO: 279476 - DNA, 30 bp, Artificial Sequence
  Synthetic oligonucleotide
gttgtaaatctagcccacaaccgcatcagt

SEQ ID NO: 279477 - DNA, 30 bp, Artificial Sequence
  Synthetic oligonucleotide
atccatgacgggttgctattttgcatcagt

SEQ ID NO: 279478 - DNA, 30 bp, Artificial Sequence
  Synthetic oligonucleotide
aaagagcggcgttgatgtgccttcatcagt

SEQ ID NO: 279479 - DNA, 30 bp, Artificial Sequence
  Synthetic oligonucleotide
ggagcggctcccctgctaaagagtatcagt

SEQ ID NO: 279480 - DNA, 30 bp, Artificial Sequence
  Synthetic oligonucleotide
acgctgactggaattcattccggtatcagt

SEQ ID NO: 279481 - DNA, 30 bp, Artificial Sequence
  Synthetic oligonucleotide
caatcattgccgtcgttttctgttatcagt

SEQ ID NO: 279482 - DNA, 30 bp, Artificial Sequence
  Synthetic oligonucleotide
ccgtcacagcagggaccatggtcactcagt

SEQ ID NO: 279483 - DNA, 30 bp, Artificial Sequence
  Synthetic oligonucleotide
tggacagcagccacaacgttgtgcctcagt

SEQ ID NO: 279484 - DNA, 30 bp, Artificial Sequence
  Synthetic oligonucleotide
gttacgtagtgatctatcgctaatctcagt

SEQ ID NO: 279485 - DNA, 30 bp, Artificial Sequence
  Synthetic oligonucleotide
gggggatactcatgatcgcatattctcagt

SEQ ID NO: 279486 - DNA, 30 bp, Artificial Sequence
  Synthetic oligonucleotide
gtcattagtttgggactacgaggggtcagt

SEQ ID NO: 279487 - DNA, 30 bp, Artificial Sequence
  Synthetic oligonucleotide
aagagcgggagctaggaacatttggtcagt

SEQ ID NO: 279488 - DNA, 30 bp, Artificial Sequence
  Synthetic oligonucleotide
atgagggttatccacgatttaggattcagt

SEQ ID NO: 279489 - DNA, 30 bp, Artificial Sequence
  Synthetic oligonucleotide
gatgacgagtatatggaccttatattcagt

SEQ ID NO: 279490 - DNA, 30 bp, Artificial Sequence
  Synthetic oligonucleotide
agcaaagatacctacttaagatggttcagt

SEQ ID NO: 279491 - DNA, 30 bp, Artificial Sequence
  Synthetic oligonucleotide
ctgtattagcttcggccgagcatgttcagt

SEQ ID NO: 279492 - DNA, 30 bp, Artificial Sequence
  Synthetic oligonucleotide
tctaccgtatagggacttcgaaatttcagt

SEQ ID NO: 279493 - DNA, 30 bp, Artificial Sequence
  Synthetic oligonucleotide
atacaggttatgtagaggctatgtttcagt

SEQ ID NO: 279494 - DNA, 30 bp, Artificial Sequence
  Synthetic oligonucleotide
atgaagttacaggcatccgtaacaaagagt

SEQ ID NO: 279495 - DNA, 30 bp, Artificial Sequence
  Synthetic oligonucleotide
ggtacctgtacctataacgtaataaagagt

SEQ ID NO: 279496 - DNA, 30 bp, Artificial Sequence
  Synthetic oligonucleotide
aagaggacatgctagctttcttacaagagt

SEQ ID NO: 279497 - DNA, 30 bp, Artificial Sequence
  Synthetic oligonucleotide
acaaagggtctttagatgcgtacgaagagt

SEQ ID NO: 279498 - DNA, 30 bp, Artificial Sequence
  Synthetic oligonucleotide
taagacatcgggacggctagtacccagagt

SEQ ID NO: 279499 - DNA, 30 bp, Artificial Sequence
  Synthetic oligonucleotide
ttaaccaattgtacgagaagaggccagagt

SEQ ID NO: 279500 - DNA, 30 bp, Artificial Sequence
  Synthetic oligonucleotide
gataagtcactctaagatgagtcgcagagt

SEQ ID NO: 279501 - DNA, 30 bp, Artificial Sequence
  Synthetic oligonucleotide
ttgcctcgtgaggttaaaaccatgcagagt

SEQ ID NO: 279502 - DNA, 30 bp, Artificial Sequence
  Synthetic oligonucleotide
tgacaggcggagggatcttactctcagagt

SEQ ID NO: 279503 - DNA, 30 bp, Artificial Sequence
  Synthetic oligonucleotide
atcttagtgtagggaagtatcagtcagagt

SEQ ID NO: 279504 - DNA, 30 bp, Artificial Sequence
  Synthetic oligonucleotide
gtggagtgtagattttcgtctggtcagagt

SEQ ID NO: 279505 - DNA, 30 bp, Artificial Sequence
  Synthetic oligonucleotide
ttgaatgggtcactctcgaacagagagagt

SEQ ID NO: 279506 - DNA, 30 bp, Artificial Sequence
  Synthetic oligonucleotide
ggaactaaacgatcctgttaccgctagagt

SEQ ID NO: 279507 - DNA, 30 bp, Artificial Sequence
  Synthetic oligonucleotide
ctgggctttagcaccgtgcatcgctagagt

SEQ ID NO: 279508 - DNA, 30 bp, Artificial Sequence
  Synthetic oligonucleotide
gaaagactccagcgtaagtctctctagagt

SEQ ID NO: 279509 - DNA, 30 bp, Artificial Sequence
  Synthetic oligonucleotide
attgcactagagtcgctcttccgcacgagt

SEQ ID NO: 279510 - DNA, 30 bp, Artificial Sequence
  Synthetic oligonucleotide
cagagttcacgacacagctctcctacgagt

SEQ ID NO: 279511 - DNA, 30 bp, Artificial Sequence
  Synthetic oligonucleotide
taactactctacatggcattagaaccgagt

SEQ ID NO: 279512 - DNA, 30 bp, Artificial Sequence
  Synthetic oligonucleotide
tagttcacctatagtgtaggcagaccgagt

SEQ ID NO: 279513 - DNA, 30 bp, Artificial Sequence
  Synthetic oligonucleotide
ctcccacggggaagtgggatgtcgccgagt

SEQ ID NO: 279514 - DNA, 30 bp, Artificial Sequence
  Synthetic oligonucleotide
acggtagaacgcagagtcggtgtgccgagt

SEQ ID NO: 279515 - DNA, 30 bp, Artificial Sequence
  Synthetic oligonucleotide
ttcttagtaaagatggtgccttcggcgagt

SEQ ID NO: 279516 - DNA, 30 bp, Artificial Sequence
  Synthetic oligonucleotide
atagctatggccacaagcctggtggcgagt

SEQ ID NO: 279517 - DNA, 30 bp, Artificial Sequence
  Synthetic oligonucleotide
tatttacaatagaggactccgaatgcgagt

SEQ ID NO: 279518 - DNA, 30 bp, Artificial Sequence
  Synthetic oligonucleotide
atacgattacgtaggcaaatcgctgcgagt

SEQ ID NO: 279519 - DNA, 30 bp, Artificial Sequence
  Synthetic oligonucleotide
cctaggactattaggtcgtcactatcgagt

SEQ ID NO: 279520 - DNA, 30 bp, Artificial Sequence
  Synthetic oligonucleotide
tatcgataagactcctttgtagagtcgagt

SEQ ID NO: 279521 - DNA, 30 bp, Artificial Sequence
  Synthetic oligonucleotide
cgtctgccatttgacgcgggtatgtcgagt

SEQ ID NO: 279522 - DNA, 30 bp, Artificial Sequence
  Synthetic oligonucleotide
ggtttaggtcttttgttcccggaaaggagt

SEQ ID NO: 279523 - DNA, 30 bp, Artificial Sequence
  Synthetic oligonucleotide
gtctaatcgatagatagcctcggaaggagt

SEQ ID NO: 279524 - DNA, 30 bp, Artificial Sequence
  Synthetic oligonucleotide
gtttcgtgacagagggggccacgcaggagt

SEQ ID NO: 279525 - DNA, 30 bp, Artificial Sequence
  Synthetic oligonucleotide
cgggtgctaattttttgggtccataggagt

SEQ ID NO: 279526 - DNA, 30 bp, Artificial Sequence
  Synthetic oligonucleotide
agacccgatcatgtgacgggaactaggagt

SEQ ID NO: 279527 - DNA, 30 bp, Artificial Sequence
  Synthetic oligonucleotide
ggacctaaactggttttatcacgtaggagt

SEQ ID NO: 279528 - DNA, 30 bp, Artificial Sequence
  Synthetic oligonucleotide
gccgctcggaatcccgtctatcaccggagt

SEQ ID NO: 279529 - DNA, 30 bp, Artificial Sequence
  Synthetic oligonucleotide
tacggaggggagctcagctccgcccggagt

SEQ ID NO: 279530 - DNA, 30 bp, Artificial Sequence
  Synthetic oligonucleotide
ttctaggtagtcgccgccaggggccggagt

SEQ ID NO: 279531 - DNA, 30 bp, Artificial Sequence
  Synthetic oligonucleotide
tccgcgaccaacgacgcgtggtgccggagt

SEQ ID NO: 279532 - DNA, 30 bp, Artificial Sequence
  Synthetic oligonucleotide
tgatttggtgatgcaccctggaacgggagt

SEQ ID NO: 279533 - DNA, 30 bp, Artificial Sequence
  Synthetic oligonucleotide
gtacttgggacgggggttacagtcgggagt

SEQ ID NO: 279534 - DNA, 30 bp, Artificial Sequence
  Synthetic oligonucleotide
cggtcctgtatctaaggaaaattcgggagt

SEQ ID NO: 279535 - DNA, 30 bp, Artificial Sequence
  Synthetic oligonucleotide
ggaattagctacagaactaggcaggggagt

SEQ ID NO: 279536 - DNA, 30 bp, Artificial Sequence
  Synthetic oligonucleotide
gtgcaaagcaagacggagagatcggggagt

SEQ ID NO: 279537 - DNA, 30 bp, Artificial Sequence
  Synthetic oligonucleotide
gtatcccgtcgagacactgtatcggggagt

SEQ ID NO: 279538 - DNA, 30 bp, Artificial Sequence
  Synthetic oligonucleotide
ctgggggtctgagtattccgcatggggagt

SEQ ID NO: 279539 - DNA, 30 bp, Artificial Sequence
  Synthetic oligonucleotide
tatcatatttcgaacgaagatgtggggagt

SEQ ID NO: 279540 - DNA, 30 bp, Artificial Sequence
  Synthetic oligonucleotide
acttgtgccgtgccgggacgattggggagt

SEQ ID NO: 279541 - DNA, 30 bp, Artificial Sequence
  Synthetic oligonucleotide
aatccacaagggtatacgatacgtgggagt

SEQ ID NO: 279542 - DNA, 30 bp, Artificial Sequence
  Synthetic oligonucleotide
gtctggccctgtgtaaattggtcatggagt

SEQ ID NO: 279543 - DNA, 30 bp, Artificial Sequence
  Synthetic oligonucleotide
caagcattagcttctacattatgatggagt

SEQ ID NO: 279544 - DNA, 30 bp, Artificial Sequence
  Synthetic oligonucleotide
cgggtatcggaaagacgcgctaactggagt

SEQ ID NO: 279545 - DNA, 30 bp, Artificial Sequence
  Synthetic oligonucleotide
caacttggattcgagttgccggacatgagt

SEQ ID NO: 279546 - DNA, 30 bp, Artificial Sequence
  Synthetic oligonucleotide
gtctgcattgctggttatatatacatgagt

SEQ ID NO: 279547 - DNA, 30 bp, Artificial Sequence
  Synthetic oligonucleotide
tcctaaggcccaaagagtatagtcatgagt

SEQ ID NO: 279548 - DNA, 30 bp, Artificial Sequence
  Synthetic oligonucleotide
gaggcttactactatgagtgtgagatgagt

SEQ ID NO: 279549 - DNA, 30 bp, Artificial Sequence
  Synthetic oligonucleotide
gtcgggcaagttatcagggtttgtatgagt

SEQ ID NO: 279550 - DNA, 30 bp, Artificial Sequence
  Synthetic oligonucleotide
gaatacattggtagtctgataaaactgagt

SEQ ID NO: 279551 - DNA, 30 bp, Artificial Sequence
  Synthetic oligonucleotide
ccgtgttccaatgtgccgattggactgagt

SEQ ID NO: 279552 - DNA, 30 bp, Artificial Sequence
  Synthetic oligonucleotide
taagtttggaagtccgattttcatctgagt

SEQ ID NO: 279553 - DNA, 30 bp, Artificial Sequence
  Synthetic oligonucleotide
aatagaatcaacgttttaacagatctgagt

SEQ ID NO: 279554 - DNA, 30 bp, Artificial Sequence
  Synthetic oligonucleotide
gacagggcccgatggcaactaagagtgagt

SEQ ID NO: 279555 - DNA, 30 bp, Artificial Sequence
  Synthetic oligonucleotide
aagggtactcaggtttagtgaaacgtgagt

SEQ ID NO: 279556 - DNA, 30 bp, Artificial Sequence
  Synthetic oligonucleotide
tgtaggtctccataataggaacccgtgagt

SEQ ID NO: 279557 - DNA, 30 bp, Artificial Sequence
  Synthetic oligonucleotide
agtattctaaacagcaagtccggcgtgagt

SEQ ID NO: 279558 - DNA, 30 bp, Artificial Sequence
  Synthetic oligonucleotide
tttcaatgtatcgactggaaccgggtgagt

SEQ ID NO: 279559 - DNA, 30 bp, Artificial Sequence
  Synthetic oligonucleotide
atcgcgatgtttaatcggtagtctgtgagt

SEQ ID NO: 279560 - DNA, 30 bp, Artificial Sequence
  Synthetic oligonucleotide
gcgcggtttaagtctcgggactgtgtgagt

SEQ ID NO: 279561 - DNA, 31 bp, Artificial Sequence
  Synthetic oligonucleotide
ctctggtcggcactagttttgaacattgagt

SEQ ID NO: 279562 - DNA, 30 bp, Artificial Sequence
  Synthetic oligonucleotide
gccgaacatgtacatagctatggcttgagt

SEQ ID NO: 279563 - DNA, 30 bp, Artificial Sequence
  Synthetic oligonucleotide
atcagcgcaactgttcgacagacgttgagt

SEQ ID NO: 279564 - DNA, 30 bp, Artificial Sequence
  Synthetic oligonucleotide
gattgtccactgtgatctggcccgttgagt

SEQ ID NO: 279565 - DNA, 30 bp, Artificial Sequence
  Synthetic oligonucleotide
cgatcggttcaatgaggtatctcgttgagt

SEQ ID NO: 279566 - DNA, 30 bp, Artificial Sequence
  Synthetic oligonucleotide
gtgccagggaatttctgcatcatgttgagt

SEQ ID NO: 279567 - DNA, 30 bp, Artificial Sequence
  Synthetic oligonucleotide
ataagctaaactaattatcttctgttgagt

SEQ ID NO: 279568 - DNA, 30 bp, Artificial Sequence
  Synthetic oligonucleotide
gcaagcgccatcaactaaattcgtttgagt

SEQ ID NO: 279569 - DNA, 30 bp, Artificial Sequence
  Synthetic oligonucleotide
tggcttgattgttagacagttacaaatagt

SEQ ID NO: 279570 - DNA, 30 bp, Artificial Sequence
  Synthetic oligonucleotide
aatcgggtgcgaatccttgtctcaaatagt

SEQ ID NO: 279571 - DNA, 30 bp, Artificial Sequence
  Synthetic oligonucleotide
taacaggcagcgccaacatcatataatagt

SEQ ID NO: 279572 - DNA, 30 bp, Artificial Sequence
  Synthetic oligonucleotide
caacagcgtgagcacctttcttaccatagt

SEQ ID NO: 279573 - DNA, 30 bp, Artificial Sequence
  Synthetic oligonucleotide
attacgagggatcacggactgggccatagt

SEQ ID NO: 279574 - DNA, 30 bp, Artificial Sequence
  Synthetic oligonucleotide
gatgccatcttgatggtaggaccgcatagt

SEQ ID NO: 279575 - DNA, 30 bp, Artificial Sequence
  Synthetic oligonucleotide
cagcgttacaaatctgtgaaactgcatagt

SEQ ID NO: 279576 - DNA, 30 bp, Artificial Sequence
  Synthetic oligonucleotide
gaacagcaagcgcaggtcaggttgcatagt

SEQ ID NO: 279577 - DNA, 30 bp, Artificial Sequence
  Synthetic oligonucleotide
taagaggttacacacctcgaagctcatagt

SEQ ID NO: 279578 - DNA, 30 bp, Artificial Sequence
  Synthetic oligonucleotide
actgacgtatcttgataccttaaagatagt

SEQ ID NO: 279579 - DNA, 30 bp, Artificial Sequence
  Synthetic oligonucleotide
cccctcgtagtcacgtgaacataagatagt

SEQ ID NO: 279580 - DNA, 30 bp, Artificial Sequence
  Synthetic oligonucleotide
atggatagttagggtaaggttccagatagt

SEQ ID NO: 279581 - DNA, 30 bp, Artificial Sequence
  Synthetic oligonucleotide
caagccgtgaatcaactttagagagatagt

SEQ ID NO: 279582 - DNA, 30 bp, Artificial Sequence
  Synthetic oligonucleotide
atggacgccgaataacgaagatgcgatagt

SEQ ID NO: 279583 - DNA, 30 bp, Artificial Sequence
  Synthetic oligonucleotide
agcaattctagtatctgcaccgaggatagt

SEQ ID NO: 279584 - DNA, 30 bp, Artificial Sequence
  Synthetic oligonucleotide
ccgttctcggtccacccgggatgggatagt

SEQ ID NO: 279585 - DNA, 30 bp, Artificial Sequence
  Synthetic oligonucleotide
ttaatgatcgcggatcaaaaggtggatagt

SEQ ID NO: 279586 - DNA, 30 bp, Artificial Sequence
  Synthetic oligonucleotide
taagcaggacaattctatagattggatagt

SEQ ID NO: 279587 - DNA, 30 bp, Artificial Sequence
  Synthetic oligonucleotide
acgaatggactctcatatggctaatatagt

SEQ ID NO: 279588 - DNA, 30 bp, Artificial Sequence
  Synthetic oligonucleotide
ggcacactgacgtcggtgacttcatatagt

SEQ ID NO: 279589 - DNA, 30 bp, Artificial Sequence
  Synthetic oligonucleotide
ggcgggggttgcaagactgtcggctatagt

SEQ ID NO: 279590 - DNA, 30 bp, Artificial Sequence
  Synthetic oligonucleotide
cgcagcatcctcatctcacatcagtatagt

SEQ ID NO: 279591 - DNA, 30 bp, Artificial Sequence
  Synthetic oligonucleotide
gaaaatagactcttaagaaattattatagt

SEQ ID NO: 279592 - DNA, 30 bp, Artificial Sequence
  Synthetic oligonucleotide
tgcttcgggtgcgagactctcaacactagt

SEQ ID NO: 279593 - DNA, 30 bp, Artificial Sequence
  Synthetic oligonucleotide
gcgagttcagcggtatatagctatactagt

SEQ ID NO: 279594 - DNA, 30 bp, Artificial Sequence
  Synthetic oligonucleotide
gagcgaaaattagcatcctggctacctagt

SEQ ID NO: 279595 - DNA, 30 bp, Artificial Sequence
  Synthetic oligonucleotide
gggccctgtcaaatcgattctgaccctagt

SEQ ID NO: 279596 - DNA, 30 bp, Artificial Sequence
  Synthetic oligonucleotide
tcgcaactttagcatcgagattagcctagt

SEQ ID NO: 279597 - DNA, 30 bp, Artificial Sequence
  Synthetic oligonucleotide
cgtactcacccgattaaaatttttcctagt

SEQ ID NO: 279598 - DNA, 30 bp, Artificial Sequence
  Synthetic oligonucleotide
tagacaaagccatacgcgaagttcgctagt

SEQ ID NO: 279599 - DNA, 31 bp, Artificial Sequence
  Synthetic oligonucleotide
aacacgtatcgttaattccacgttcgctagt

SEQ ID NO: 279600 - DNA, 30 bp, Artificial Sequence
  Synthetic oligonucleotide
aggcatactgtggtccgaaaacagtctagt

SEQ ID NO: 279601 - DNA, 30 bp, Artificial Sequence
  Synthetic oligonucleotide
cttaatgttgagcccattgcggtgtctagt

SEQ ID NO: 279602 - DNA, 30 bp, Artificial Sequence
  Synthetic oligonucleotide
gaaggccgagagtgcatgcgtttttctagt

SEQ ID NO: 279603 - DNA, 30 bp, Artificial Sequence
  Synthetic oligonucleotide
attaccgaggcgaccggaatagaaagtagt

SEQ ID NO: 279604 - DNA, 30 bp, Artificial Sequence
  Synthetic oligonucleotide
tatgttaatatatagggtagtcgaagtagt

SEQ ID NO: 279605 - DNA, 30 bp, Artificial Sequence
  Synthetic oligonucleotide
atccattctggtccgggggctggaagtagt

SEQ ID NO: 279606 - DNA, 30 bp, Artificial Sequence
  Synthetic oligonucleotide
gcagctgtacccatcacagggcagagtagt

SEQ ID NO: 279607 - DNA, 30 bp, Artificial Sequence
  Synthetic oligonucleotide
tgagtggtgccatctagaacaccgagtagt

SEQ ID NO: 279608 - DNA, 30 bp, Artificial Sequence
  Synthetic oligonucleotide
tcaactcaaaaactattctcagatagtagt

SEQ ID NO: 279609 - DNA, 30 bp, Artificial Sequence
  Synthetic oligonucleotide
atagtttcacatcgataagagcttagtagt

SEQ ID NO: 279610 - DNA, 30 bp, Artificial Sequence
  Synthetic oligonucleotide
gtacttgaccaataggttactgcccgtagt

SEQ ID NO: 279611 - DNA, 30 bp, Artificial Sequence
  Synthetic oligonucleotide
ggacctgtgtaacacaaaaagaggcgtagt

SEQ ID NO: 279612 - DNA, 30 bp, Artificial Sequence
  Synthetic oligonucleotide
agttgtcgagaggtctatagcgggcgtagt

SEQ ID NO: 279613 - DNA, 30 bp, Artificial Sequence
  Synthetic oligonucleotide
caaccacagtattgcagaaaacgaggtagt

SEQ ID NO: 279614 - DNA, 30 bp, Artificial Sequence
  Synthetic oligonucleotide
tgttcatgccttaattatgttataggtagt

SEQ ID NO: 279615 - DNA, 30 bp, Artificial Sequence
  Synthetic oligonucleotide
ttaaactctgcgtataatgggaagggtagt

SEQ ID NO: 279616 - DNA, 30 bp, Artificial Sequence
  Synthetic oligonucleotide
atatttgggtcatggcgtaaggagggtagt

SEQ ID NO: 279617 - DNA, 30 bp, Artificial Sequence
  Synthetic oligonucleotide
cgcggccaaggggtcagtccgtcgggtagt

SEQ ID NO: 279618 - DNA, 30 bp, Artificial Sequence
  Synthetic oligonucleotide
ttatgaaagtgcaagactgcgagtggtagt

SEQ ID NO: 279619 - DNA, 30 bp, Artificial Sequence
  Synthetic oligonucleotide
atctagtaggagagtgaaccggaatgtagt

SEQ ID NO: 279620 - DNA, 30 bp, Artificial Sequence
  Synthetic oligonucleotide
ctgctaaccaccgtatttgcgcattgtagt

SEQ ID NO: 279621 - DNA, 30 bp, Artificial Sequence
  Synthetic oligonucleotide
aaccgcgcacctcctaccgatggaattagt

SEQ ID NO: 279622 - DNA, 30 bp, Artificial Sequence
  Synthetic oligonucleotide
tcctgtgaatccttttctgtcttaattagt

SEQ ID NO: 279623 - DNA, 30 bp, Artificial Sequence
  Synthetic oligonucleotide
tactaaggtagttgattttagagcattagt

SEQ ID NO: 279624 - DNA, 30 bp, Artificial Sequence
  Synthetic oligonucleotide
gtaattcgttcggtggggagtggtattagt

SEQ ID NO: 279625 - DNA, 30 bp, Artificial Sequence
  Synthetic oligonucleotide
tgggccctatggggacactaaattattagt

SEQ ID NO: 279626 - DNA, 30 bp, Artificial Sequence
  Synthetic oligonucleotide
taggccatagattccgggggcccacttagt

SEQ ID NO: 279627 - DNA, 30 bp, Artificial Sequence
  Synthetic oligonucleotide
atctgtcctgtaggcttctgtacgcttagt

SEQ ID NO: 279628 - DNA, 30 bp, Artificial Sequence
  Synthetic oligonucleotide
ttatatgggtagcactctcgaaggcttagt

SEQ ID NO: 279629 - DNA, 30 bp, Artificial Sequence
  Synthetic oligonucleotide
agaggcgttatgaaacaacactgtcttagt

SEQ ID NO: 279630 - DNA, 27 bp, Artificial Sequence
  Synthetic oligonucleotide
caggaataacttgctatcagagttagt

SEQ ID NO: 279631 - DNA, 30 bp, Artificial Sequence
  Synthetic oligonucleotide
gggtcaaggttggggggccgctttgttagt

SEQ ID NO: 279632 - DNA, 30 bp, Artificial Sequence
  Synthetic oligonucleotide
gcaacgaatagaaaattcccggaatttagt

SEQ ID NO: 279633 - DNA, 30 bp, Artificial Sequence
  Synthetic oligonucleotide
agtataacattagggcatttctgatttagt

SEQ ID NO: 279634 - DNA, 30 bp, Artificial Sequence
  Synthetic oligonucleotide
agctaagtctatcaatcgttcaactttagt

SEQ ID NO: 279635 - DNA, 30 bp, Artificial Sequence
  Synthetic oligonucleotide
gcagacgtcaatgctcaaactaactttagt

SEQ ID NO: 279636 - DNA, 30 bp, Artificial Sequence
  Synthetic oligonucleotide
gctaggaagtcagaatacgacgactttagt

SEQ ID NO: 279637 - DNA, 30 bp, Artificial Sequence
  Synthetic oligonucleotide
gagggggggaagcttctgtgaggctttagt

SEQ ID NO: 279638 - DNA, 30 bp, Artificial Sequence
  Synthetic oligonucleotide
accttctgcgaatatgggtacgtctttagt

SEQ ID NO: 279639 - DNA, 30 bp, Artificial Sequence
  Synthetic oligonucleotide
agcttatgacagctagctgcaaagtttagt

SEQ ID NO: 279640 - DNA, 30 bp, Artificial Sequence
  Synthetic oligonucleotide
cgcgcacgaggccctcgctcatagtttagt

SEQ ID NO: 279641 - DNA, 30 bp, Artificial Sequence
  Synthetic oligonucleotide
cacaccgtcgacgtaaagcattagtttagt

SEQ ID NO: 279642 - DNA, 30 bp, Artificial Sequence
  Synthetic oligonucleotide
gcacaaggctcgcgcgcaatgaattttagt

SEQ ID NO: 279643 - DNA, 30 bp, Artificial Sequence
  Synthetic oligonucleotide
atcaaatgtgggtctgtaaatagttttagt

SEQ ID NO: 279644 - DNA, 30 bp, Artificial Sequence
  Synthetic oligonucleotide
acaaccagcgcttgctaagttgtttttagt

SEQ ID NO: 279645 - DNA, 30 bp, Artificial Sequence
  Synthetic oligonucleotide
tgccgcggttcgtagtatcggggaaaacgt

SEQ ID NO: 279646 - DNA, 30 bp, Artificial Sequence
  Synthetic oligonucleotide
gcgagtcactcgatgcgactggacaaacgt

SEQ ID NO: 279647 - DNA, 30 bp, Artificial Sequence
  Synthetic oligonucleotide
aagccgtatctggcagcgagttccaaacgt

SEQ ID NO: 279648 - DNA, 30 bp, Artificial Sequence
  Synthetic oligonucleotide
atctcaaggaactggcgacgccagaaacgt

SEQ ID NO: 279649 - DNA, 30 bp, Artificial Sequence
  Synthetic oligonucleotide
ttcgaacaagcttccccagctgcgaaacgt

SEQ ID NO: 279650 - DNA, 30 bp, Artificial Sequence
  Synthetic oligonucleotide
cagccggttcggtcaactacttataaacgt

SEQ ID NO: 279651 - DNA, 30 bp, Artificial Sequence
  Synthetic oligonucleotide
tgactagtctttcaacctcggcgacaacgt

SEQ ID NO: 279652 - DNA, 30 bp, Artificial Sequence
  Synthetic oligonucleotide
aagcatgacgtcactatgggaccccaacgt

SEQ ID NO: 279653 - DNA, 30 bp, Artificial Sequence
  Synthetic oligonucleotide
agagagaggttcagttctccgatgcaacgt

SEQ ID NO: 279654 - DNA, 30 bp, Artificial Sequence
  Synthetic oligonucleotide
tatagccgactgaggatcatacaagaacgt

SEQ ID NO: 279655 - DNA, 30 bp, Artificial Sequence
  Synthetic oligonucleotide
agtacggtaactatggtgataatcgaacgt

SEQ ID NO: 279656 - DNA, 30 bp, Artificial Sequence
  Synthetic oligonucleotide
gtcttcgaaaacatccataaatcggaacgt

SEQ ID NO: 279657 - DNA, 30 bp, Artificial Sequence
  Synthetic oligonucleotide
tcaaggccaccgtcgtccttcgatgaacgt

SEQ ID NO: 279658 - DNA, 30 bp, Artificial Sequence
  Synthetic oligonucleotide
gggctaggggtatgtttgcctgatgaacgt

SEQ ID NO: 279659 - DNA, 30 bp, Artificial Sequence
  Synthetic oligonucleotide
gagggggtcactctgatgaactctgaacgt

SEQ ID NO: 279660 - DNA, 30 bp, Artificial Sequence
  Synthetic oligonucleotide
ttctagtcggtcgataacaactttgaacgt

SEQ ID NO: 279661 - DNA, 30 bp, Artificial Sequence
  Synthetic oligonucleotide
ggactaccataataggtgcggcaataacgt

SEQ ID NO: 279662 - DNA, 30 bp, Artificial Sequence
  Synthetic oligonucleotide
gattaaacaggtgttaacgcaggataacgt

SEQ ID NO: 279663 - DNA, 30 bp, Artificial Sequence
  Synthetic oligonucleotide
aaggtacgggccccaccactagactaacgt

SEQ ID NO: 279664 - DNA, 30 bp, Artificial Sequence
  Synthetic oligonucleotide
ccacccagatcatgggacctggggtaacgt

SEQ ID NO: 279665 - DNA, 30 bp, Artificial Sequence
  Synthetic oligonucleotide
atagtctttgcctgtgtgatatggtaacgt

SEQ ID NO: 279666 - DNA, 30 bp, Artificial Sequence
  Synthetic oligonucleotide
tgtcttgggccaagtatctgttgttaacgt

SEQ ID NO: 279667 - DNA, 30 bp, Artificial Sequence
  Synthetic oligonucleotide
tgaccttctgtctctcgccttgtttaacgt

SEQ ID NO: 279668 - DNA, 30 bp, Artificial Sequence
  Synthetic oligonucleotide
gcactcggtgggtttcgcacttgaacacgt

SEQ ID NO: 279669 - DNA, 30 bp, Artificial Sequence
  Synthetic oligonucleotide
atcaagcttccgagatcatctttaacacgt

SEQ ID NO: 279670 - DNA, 30 bp, Artificial Sequence
  Synthetic oligonucleotide
ggggttagtagaaaaggctgccccacacgt

SEQ ID NO: 279671 - DNA, 30 bp, Artificial Sequence
  Synthetic oligonucleotide
ttctccgcaggctgatttccggtcacacgt

SEQ ID NO: 279672 - DNA, 30 bp, Artificial Sequence
  Synthetic oligonucleotide
tagagatacataatgtctaatgacccacgt

SEQ ID NO: 279673 - DNA, 30 bp, Artificial Sequence
  Synthetic oligonucleotide
taatcaagataggacagaaagacgccacgt

SEQ ID NO: 279674 - DNA, 30 bp, Artificial Sequence
  Synthetic oligonucleotide
agtgacatacacgaggctcataaagcacgt

SEQ ID NO: 279675 - DNA, 30 bp, Artificial Sequence
  Synthetic oligonucleotide
tgcagacacgtaccatcaacgtgagcacgt

SEQ ID NO: 279676 - DNA, 30 bp, Artificial Sequence
  Synthetic oligonucleotide
aagcagggttctaatcgatcaaccgcacgt

SEQ ID NO: 279677 - DNA, 30 bp, Artificial Sequence
  Synthetic oligonucleotide
agtgtgtttacactagccgtcggcgcacgt

SEQ ID NO: 279678 - DNA, 30 bp, Artificial Sequence
  Synthetic oligonucleotide
atcatatcttataaactgacaatcgcacgt

SEQ ID NO: 279679 - DNA, 30 bp, Artificial Sequence
  Synthetic oligonucleotide
aacacgcgctgataaccatccgtcgcacgt

SEQ ID NO: 279680 - DNA, 30 bp, Artificial Sequence
  Synthetic oligonucleotide
caaggacggaagaaattccttactgcacgt

SEQ ID NO: 279681 - DNA, 30 bp, Artificial Sequence
  Synthetic oligonucleotide
gggtgccacacacctcgttcggactcacgt

SEQ ID NO: 279682 - DNA, 30 bp, Artificial Sequence
  Synthetic oligonucleotide
tagcgagaatttcaagtcggcgagtcacgt

SEQ ID NO: 279683 - DNA, 30 bp, Artificial Sequence
  Synthetic oligonucleotide
acttcttgaacttgtatccgtccgtcacgt

SEQ ID NO: 279684 - DNA, 30 bp, Artificial Sequence
  Synthetic oligonucleotide
gggcactcgtttgcggggctggcgtcacgt

SEQ ID NO: 279685 - DNA, 30 bp, Artificial Sequence
  Synthetic oligonucleotide
tcagttggcgagatgttagtgctgtcacgt

SEQ ID NO: 279686 - DNA, 30 bp, Artificial Sequence
  Synthetic oligonucleotide
aggatcaagaaatcggaaacaatttcacgt

SEQ ID NO: 279687 - DNA, 30 bp, Artificial Sequence
  Synthetic oligonucleotide
ccggtaggccacagaggctgcttaagacgt

SEQ ID NO: 279688 - DNA, 30 bp, Artificial Sequence
  Synthetic oligonucleotide
aaggacccgtttatcgttgagttcagacgt

SEQ ID NO: 279689 - DNA, 30 bp, Artificial Sequence
  Synthetic oligonucleotide
tttataggcagccgaggatccgggagacgt

SEQ ID NO: 279690 - DNA, 30 bp, Artificial Sequence
  Synthetic oligonucleotide
aaaagagatgtcgcggaatggatgagacgt

SEQ ID NO: 279691 - DNA, 30 bp, Artificial Sequence
  Synthetic oligonucleotide
caggctcacagtgactgccctattagacgt

SEQ ID NO: 279692 - DNA, 30 bp, Artificial Sequence
  Synthetic oligonucleotide
taccatgcctaacctactgaagcgcgacgt

SEQ ID NO: 279693 - DNA, 30 bp, Artificial Sequence
  Synthetic oligonucleotide
tgcagcattggaatgcggttccctcgacgt

SEQ ID NO: 279694 - DNA, 30 bp, Artificial Sequence
  Synthetic oligonucleotide
aagccatgttacacggtaaaaaacggacgt

SEQ ID NO: 279695 - DNA, 30 bp, Artificial Sequence
  Synthetic oligonucleotide
cggaacaaacggagacgggccgggggacgt

SEQ ID NO: 279696 - DNA, 30 bp, Artificial Sequence
  Synthetic oligonucleotide
cacttaacatacaaatatctcgaatgacgt

SEQ ID NO: 279697 - DNA, 30 bp, Artificial Sequence
  Synthetic oligonucleotide
ggcaaagccgtttccctgtatttctgacgt

SEQ ID NO: 279698 - DNA, 30 bp, Artificial Sequence
  Synthetic oligonucleotide
tctaccgagtgcctctaacgactgtgacgt

SEQ ID NO: 279699 - DNA, 30 bp, Artificial Sequence
  Synthetic oligonucleotide
ctgacattcagctggcagttagattgacgt

SEQ ID NO: 279700 - DNA, 30 bp, Artificial Sequence
  Synthetic oligonucleotide
ggattaagctgataccttgtcccttgacgt

SEQ ID NO: 279701 - DNA, 30 bp, Artificial Sequence
  Synthetic oligonucleotide
gagatgtcgctcccatgaaaggtcatacgt

SEQ ID NO: 279702 - DNA, 30 bp, Artificial Sequence
  Synthetic oligonucleotide
cctgtactaatacatattcggcagatacgt

SEQ ID NO: 279703 - DNA, 30 bp, Artificial Sequence
  Synthetic oligonucleotide
gaaattacgaaccgtgcctctcccctacgt

SEQ ID NO: 279704 - DNA, 30 bp, Artificial Sequence
  Synthetic oligonucleotide
gcatgggcgtcataagggcttatcctacgt

SEQ ID NO: 279705 - DNA, 30 bp, Artificial Sequence
  Synthetic oligonucleotide
gtgggtggggaccggtttacgaccgtacgt

SEQ ID NO: 279706 - DNA, 30 bp, Artificial Sequence
  Synthetic oligonucleotide
tagttataaaagggcttgctcacggtacgt

SEQ ID NO: 279707 - DNA, 30 bp, Artificial Sequence
  Synthetic oligonucleotide
tcgcataatccgattcgtctaattgtacgt

SEQ ID NO: 279708 - DNA, 30 bp, Artificial Sequence
  Synthetic oligonucleotide
agcggccgcccctcatggattaccttacgt

SEQ ID NO: 279709 - DNA, 30 bp, Artificial Sequence
  Synthetic oligonucleotide
cgggccccgtgaatagtcgtatggttacgt

SEQ ID NO: 279710 - DNA, 30 bp, Artificial Sequence
  Synthetic oligonucleotide
aggtgcgtcgccaacgggatttggttacgt

SEQ ID NO: 279711 - DNA, 30 bp, Artificial Sequence
  Synthetic oligonucleotide
gctagtggcgcactcaccagtgtgttacgt

SEQ ID NO: 279712 - DNA, 30 bp, Artificial Sequence
  Synthetic oligonucleotide
aaagtccggccgtagctggatacaaaccgt

SEQ ID NO: 279713 - DNA, 30 bp, Artificial Sequence
  Synthetic oligonucleotide
ctattttacagggttttcgtgcgcaaccgt

SEQ ID NO: 279714 - DNA, 30 bp, Artificial Sequence
  Synthetic oligonucleotide
agaaagaaggacgtggtaaaactgaaccgt

SEQ ID NO: 279715 - DNA, 30 bp, Artificial Sequence
  Synthetic oligonucleotide
ggagttagtcatacggccacggcacaccgt

SEQ ID NO: 279716 - DNA, 30 bp, Artificial Sequence
  Synthetic oligonucleotide
cccaacatacgtccggaacaattccaccgt

SEQ ID NO: 279717 - DNA, 30 bp, Artificial Sequence
  Synthetic oligonucleotide
tgttatatctttgtagttcgggaggaccgt

SEQ ID NO: 279718 - DNA, 30 bp, Artificial Sequence
  Synthetic oligonucleotide
gcagactgaagtcaccattacgctgaccgt

SEQ ID NO: 279719 - DNA, 30 bp, Artificial Sequence
  Synthetic oligonucleotide
actgggtccgggactaacaattcgtaccgt

SEQ ID NO: 279720 - DNA, 30 bp, Artificial Sequence
  Synthetic oligonucleotide
ttaagcgttgaacagtcgttggtaacccgt

SEQ ID NO: 279721 - DNA, 30 bp, Artificial Sequence
  Synthetic oligonucleotide
agaccgcacaaggctagacagcgcacccgt

SEQ ID NO: 279722 - DNA, 30 bp, Artificial Sequence
  Synthetic oligonucleotide
tagtggtttgcttaaaaggacgctacccgt

SEQ ID NO: 279723 - DNA, 30 bp, Artificial Sequence
  Synthetic oligonucleotide
tcgcccgtttgttaaggtttaaaaccccgt

SEQ ID NO: 279724 - DNA, 30 bp, Artificial Sequence
  Synthetic oligonucleotide
aagtctttaaattacaaaatctacccccgt

SEQ ID NO: 279725 - DNA, 30 bp, Artificial Sequence
  Synthetic oligonucleotide
gtaaattaaagatcttacgcgtccccccgt

SEQ ID NO: 279726 - DNA, 30 bp, Artificial Sequence
  Synthetic oligonucleotide
caagcgcgggttctctacggagaagcccgt

SEQ ID NO: 279727 - DNA, 30 bp, Artificial Sequence
  Synthetic oligonucleotide
ggtatttctgtttcccaagtgtaagcccgt

SEQ ID NO: 279728 - DNA, 30 bp, Artificial Sequence
  Synthetic oligonucleotide
tcctaatcagttgtaatgtctcacgcccgt

SEQ ID NO: 279729 - DNA, 30 bp, Artificial Sequence
  Synthetic oligonucleotide
gttccggtaacaagcgccaagagcgcccgt

SEQ ID NO: 279730 - DNA, 30 bp, Artificial Sequence
  Synthetic oligonucleotide
cacactgccaatgaatcgtatctggcccgt

SEQ ID NO: 279731 - DNA, 30 bp, Artificial Sequence
  Synthetic oligonucleotide
tataaggtctggtataaggtgacctcccgt

SEQ ID NO: 279732 - DNA, 30 bp, Artificial Sequence
  Synthetic oligonucleotide
atgtgaacaatgtgtggtgtcttctcccgt

SEQ ID NO: 279733 - DNA, 30 bp, Artificial Sequence
  Synthetic oligonucleotide
ttcggtcagatctccttagtgcgttcccgt

SEQ ID NO: 279734 - DNA, 30 bp, Artificial Sequence
  Synthetic oligonucleotide
ttgcctggtatctagaccgcaaaaagccgt

SEQ ID NO: 279735 - DNA, 30 bp, Artificial Sequence
  Synthetic oligonucleotide
acatagcgctaacacacctcacgaagccgt

SEQ ID NO: 279736 - DNA, 30 bp, Artificial Sequence
  Synthetic oligonucleotide
gtttgcgtggcaagccgcgtgggcagccgt

SEQ ID NO: 279737 - DNA, 30 bp, Artificial Sequence
  Synthetic oligonucleotide
cagtgtttggtatatggtttgtatagccgt

SEQ ID NO: 279738 - DNA, 30 bp, Artificial Sequence
  Synthetic oligonucleotide
gtggtaactgatcgtgaatgcgctagccgt

SEQ ID NO: 279739 - DNA, 30 bp, Artificial Sequence
  Synthetic oligonucleotide
cctccaacgaccgcgtctacacgtagccgt

SEQ ID NO: 279740 - DNA, 30 bp, Artificial Sequence
  Synthetic oligonucleotide
cgcatctgattggggtaaatgccacgccgt

SEQ ID NO: 279741 - DNA, 30 bp, Artificial Sequence
  Synthetic oligonucleotide
ggggaatgtcttttttcgggtcaccgccgt

SEQ ID NO: 279742 - DNA, 30 bp, Artificial Sequence
  Synthetic oligonucleotide
cataccttagagagtacaggtttccgccgt

SEQ ID NO: 279743 - DNA, 30 bp, Artificial Sequence
  Synthetic oligonucleotide
cgcgtgacgaggctctagtatcagcgccgt

SEQ ID NO: 279744 - DNA, 30 bp, Artificial Sequence
  Synthetic oligonucleotide
agcgcacgtgggagcttaggaacgcgccgt

SEQ ID NO: 279745 - DNA, 30 bp, Artificial Sequence
  Synthetic oligonucleotide
tatgctgtcgcccttagcgctgcaggccgt

SEQ ID NO: 279746 - DNA, 30 bp, Artificial Sequence
  Synthetic oligonucleotide
tgtttaacattagcaagatacatcggccgt

SEQ ID NO: 279747 - DNA, 30 bp, Artificial Sequence
  Synthetic oligonucleotide
tcagatatctccgacacgcacctcggccgt

SEQ ID NO: 279748 - DNA, 30 bp, Artificial Sequence
  Synthetic oligonucleotide
ctgggggtgaacgtgtgccatgcgggccgt

SEQ ID NO: 279749 - DNA, 30 bp, Artificial Sequence
  Synthetic oligonucleotide
caatatctcgtataaaccctatatggccgt

SEQ ID NO: 279750 - DNA, 30 bp, Artificial Sequence
  Synthetic oligonucleotide
cattcaagtaggcccatctatggtggccgt

SEQ ID NO: 279751 - DNA, 30 bp, Artificial Sequence
  Synthetic oligonucleotide
aaaaggaaacaatgtccgtattgcatccgt

SEQ ID NO: 279752 - DNA, 30 bp, Artificial Sequence
  Synthetic oligonucleotide
ataattgggctgaatggtaatattatccgt

SEQ ID NO: 279753 - DNA, 30 bp, Artificial Sequence
  Synthetic oligonucleotide
atggagaagtctacgagacagtcactccgt

SEQ ID NO: 279754 - DNA, 30 bp, Artificial Sequence
  Synthetic oligonucleotide
actcgattgatgatatggtcgcaagtccgt

SEQ ID NO: 279755 - DNA, 30 bp, Artificial Sequence
  Synthetic oligonucleotide
ccaggaatggtgccgccaattaaggtccgt

SEQ ID NO: 279756 - DNA, 30 bp, Artificial Sequence
  Synthetic oligonucleotide
acggctgtgtttcaatttgctcgggtccgt

SEQ ID NO: 279757 - DNA, 30 bp, Artificial Sequence
  Synthetic oligonucleotide
tagagtacgaacgatgtctacgtattccgt

SEQ ID NO: 279758 - DNA, 30 bp, Artificial Sequence
  Synthetic oligonucleotide
ctaatccgttgtctcgtgagtaccttccgt

SEQ ID NO: 279759 - DNA, 30 bp, Artificial Sequence
  Synthetic oligonucleotide
ataggtatggatcggacagtatacaagcgt

SEQ ID NO: 279760 - DNA, 30 bp, Artificial Sequence
  Synthetic oligonucleotide
caaggagacttatgataactccataagcgt

SEQ ID NO: 279761 - DNA, 30 bp, Artificial Sequence
  Synthetic oligonucleotide
gggagcctatcgtctcaattatctaagcgt

SEQ ID NO: 279762 - DNA, 30 bp, Artificial Sequence
  Synthetic oligonucleotide
caggtcgtgtggtacgttacgcttaagcgt

SEQ ID NO: 279763 - DNA, 30 bp, Artificial Sequence
  Synthetic oligonucleotide
taggagaaaccccgtcccacaatagagcgt

SEQ ID NO: 279764 - DNA, 30 bp, Artificial Sequence
  Synthetic oligonucleotide
gtctgctcaaggaggcctaacaacgagcgt

SEQ ID NO: 279765 - DNA, 30 bp, Artificial Sequence
  Synthetic oligonucleotide
gaagcaagttactaggatgttagcgagcgt

SEQ ID NO: 279766 - DNA, 30 bp, Artificial Sequence
  Synthetic oligonucleotide
tcccatcccaacctcggattctgcgagcgt

SEQ ID NO: 279767 - DNA, 30 bp, Artificial Sequence
  Synthetic oligonucleotide
aagtaggcgttggattatttgtgggagcgt

SEQ ID NO: 279768 - DNA, 30 bp, Artificial Sequence
  Synthetic oligonucleotide
ctgaacgtcgtattgggagggcttgagcgt

SEQ ID NO: 279769 - DNA, 30 bp, Artificial Sequence
  Synthetic oligonucleotide
gttatggcagttaattagctgaaatagcgt

SEQ ID NO: 279770 - DNA, 30 bp, Artificial Sequence
  Synthetic oligonucleotide
ataatgatcagtgtgttgtagcaatagcgt

SEQ ID NO: 279771 - DNA, 30 bp, Artificial Sequence
  Synthetic oligonucleotide
ggcgtcttgacgatactattggtgtagcgt

SEQ ID NO: 279772 - DNA, 30 bp, Artificial Sequence
  Synthetic oligonucleotide
atggtctcaaacccgtgcgcttattagcgt

SEQ ID NO: 279773 - DNA, 30 bp, Artificial Sequence
  Synthetic oligonucleotide
ggtgacgattctaccgtcgatagttagcgt

SEQ ID NO: 279774 - DNA, 30 bp, Artificial Sequence
  Synthetic oligonucleotide
atggcggcgttatagagacgtcatacgcgt

SEQ ID NO: 279775 - DNA, 30 bp, Artificial Sequence
  Synthetic oligonucleotide
ctgcagtcttattagggttcggacccgcgt

SEQ ID NO: 279776 - DNA, 30 bp, Artificial Sequence
  Synthetic oligonucleotide
ccacgtaggggctaacccggttacccgcgt

SEQ ID NO: 279777 - DNA, 30 bp, Artificial Sequence
  Synthetic oligonucleotide
gcgtagcttccctgcttttcccccccgcgt

SEQ ID NO: 279778 - DNA, 30 bp, Artificial Sequence
  Synthetic oligonucleotide
tccaccttcgcgcaaggatagcgcccgcgt

SEQ ID NO: 279779 - DNA, 30 bp, Artificial Sequence
  Synthetic oligonucleotide
gtgcgaaactactaggggggcagtccgcgt

SEQ ID NO: 279780 - DNA, 30 bp, Artificial Sequence
  Synthetic oligonucleotide
gacacagtcgtttccacagtccgtccgcgt

SEQ ID NO: 279781 - DNA, 30 bp, Artificial Sequence
  Synthetic oligonucleotide
taagcaagccatgatattgaagaagcgcgt

SEQ ID NO: 279782 - DNA, 30 bp, Artificial Sequence
  Synthetic oligonucleotide
aaatcctccagggagggcggttcagcgcgt

SEQ ID NO: 279783 - DNA, 30 bp, Artificial Sequence
  Synthetic oligonucleotide
gtcccttatggattatgcactgaggcgcgt

SEQ ID NO: 279784 - DNA, 30 bp, Artificial Sequence
  Synthetic oligonucleotide
acctaacccaatacgttaatctaggcgcgt

SEQ ID NO: 279785 - DNA, 30 bp, Artificial Sequence
  Synthetic oligonucleotide
aagataatgtgaacgggcgcaacggcgcgt

SEQ ID NO: 279786 - DNA, 30 bp, Artificial Sequence
  Synthetic oligonucleotide
cttatacgttcgaagagggggtgggcgcgt

SEQ ID NO: 279787 - DNA, 30 bp, Artificial Sequence
  Synthetic oligonucleotide
atattaccatgaacaagaaattgtgcgcgt

SEQ ID NO: 279788 - DNA, 30 bp, Artificial Sequence
  Synthetic oligonucleotide
accattagagcttagcgtctcgcatcgcgt

SEQ ID NO: 279789 - DNA, 30 bp, Artificial Sequence
  Synthetic oligonucleotide
gtcacttcagcagtgcaaaaatcatcgcgt

SEQ ID NO: 279790 - DNA, 30 bp, Artificial Sequence
  Synthetic oligonucleotide
actcgactaaactacatcacttcatcgcgt

SEQ ID NO: 279791 - DNA, 30 bp, Artificial Sequence
  Synthetic oligonucleotide
ggctcttaattttcgtggatctcctcgcgt

SEQ ID NO: 279792 - DNA, 30 bp, Artificial Sequence
  Synthetic oligonucleotide
ctcgagacaattagccagctaaagtcgcgt

SEQ ID NO: 279793 - DNA, 30 bp, Artificial Sequence
  Synthetic oligonucleotide
tttaaggcttaccggacttccggttcgcgt

SEQ ID NO: 279794 - DNA, 30 bp, Artificial Sequence
  Synthetic oligonucleotide
ggtgtctcgaatgcttacatgatttcgcgt

SEQ ID NO: 279795 - DNA, 30 bp, Artificial Sequence
  Synthetic oligonucleotide
cgtatagccaatcgaagtcaaccaaggcgt

SEQ ID NO: 279796 - DNA, 30 bp, Artificial Sequence
  Synthetic oligonucleotide
aaggcttaatggatagtacccttaaggcgt

SEQ ID NO: 279797 - DNA, 30 bp, Artificial Sequence
  Synthetic oligonucleotide
tgaaaggcggtgctaagcaaacacaggcgt

SEQ ID NO: 279798 - DNA, 30 bp, Artificial Sequence
  Synthetic oligonucleotide
caaaacatggatctaccagagtccaggcgt

SEQ ID NO: 279799 - DNA, 30 bp, Artificial Sequence
  Synthetic oligonucleotide
taatactgtactaaatttgctagcaggcgt

SEQ ID NO: 279800 - DNA, 30 bp, Artificial Sequence
  Synthetic oligonucleotide
gcggtccaaatgtcaatctcgatcaggcgt

SEQ ID NO: 279801 - DNA, 30 bp, Artificial Sequence
  Synthetic oligonucleotide
cacgaatcaccgtaactttgagataggcgt

SEQ ID NO: 279802 - DNA, 30 bp, Artificial Sequence
  Synthetic oligonucleotide
accactctagccattgagtgcaagcggcgt

SEQ ID NO: 279803 - DNA, 30 bp, Artificial Sequence
  Synthetic oligonucleotide
ttattagacagcagtagtaagcgtcggcgt

SEQ ID NO: 279804 - DNA, 30 bp, Artificial Sequence
  Synthetic oligonucleotide
cgaaatttaaagtggtataaaattcggcgt

SEQ ID NO: 279805 - DNA, 30 bp, Artificial Sequence
  Synthetic oligonucleotide
ccgcagtgtaaggacgtacacttcgggcgt

SEQ ID NO: 279806 - DNA, 30 bp, Artificial Sequence
  Synthetic oligonucleotide
ggctagagttcgagtcagggcccggggcgt

SEQ ID NO: 279807 - DNA, 30 bp, Artificial Sequence
  Synthetic oligonucleotide
tgtgggtcgattgatataatctgggggcgt

SEQ ID NO: 279808 - DNA, 30 bp, Artificial Sequence
  Synthetic oligonucleotide
ctctgttaggcatatgttagcgtggggcgt

SEQ ID NO: 279809 - DNA, 30 bp, Artificial Sequence
  Synthetic oligonucleotide
ctcgcttggaaacgaactcgccatgggcgt

SEQ ID NO: 279810 - DNA, 30 bp, Artificial Sequence
  Synthetic oligonucleotide
actctggccttgatatcgtcatatgggcgt

SEQ ID NO: 279811 - DNA, 31 bp, Artificial Sequence
  Synthetic oligonucleotide
ttttgagactaagattataatggctgggcgt

SEQ ID NO: 279812 - DNA, 30 bp, Artificial Sequence
  Synthetic oligonucleotide
atcgtcttgttagtacacagtcgatggcgt

SEQ ID NO: 279813 - DNA, 30 bp, Artificial Sequence
  Synthetic oligonucleotide
gtctgccacaacgtatataattgttggcgt

SEQ ID NO: 279814 - DNA, 30 bp, Artificial Sequence
  Synthetic oligonucleotide
aaacgccaagtataattcattctttggcgt

SEQ ID NO: 279815 - DNA, 30 bp, Artificial Sequence
  Synthetic oligonucleotide
gctctaggcggcgtaagtgtattaatgcgt

SEQ ID NO: 279816 - DNA, 30 bp, Artificial Sequence
  Synthetic oligonucleotide
ctattcaggcttgtgcaatgtggcatgcgt

SEQ ID NO: 279817 - DNA, 29 bp, Artificial Sequence
  Synthetic oligonucleotide
gcgctggaatgcgcctaaactgtatgcgt

SEQ ID NO: 279818 - DNA, 30 bp, Artificial Sequence
  Synthetic oligonucleotide
cgtgggaatgtaaggaataaccaactgcgt

SEQ ID NO: 279819 - DNA, 30 bp, Artificial Sequence
  Synthetic oligonucleotide
acgggaccgttcattcttaactcactgcgt

SEQ ID NO: 279820 - DNA, 30 bp, Artificial Sequence
  Synthetic oligonucleotide
gatgttacttaacgaccaaggaccctgcgt

SEQ ID NO: 279821 - DNA, 30 bp, Artificial Sequence
  Synthetic oligonucleotide
gccctgtagcactatggtctacccctgcgt

SEQ ID NO: 279822 - DNA, 30 bp, Artificial Sequence
  Synthetic oligonucleotide
aagatttggcgcgtcgcccgttggctgcgt

SEQ ID NO: 279823 - DNA, 30 bp, Artificial Sequence
  Synthetic oligonucleotide
gcattgttatattcgttcttgggtctgcgt

SEQ ID NO: 279824 - DNA, 30 bp, Artificial Sequence
  Synthetic oligonucleotide
ggcaacgcgagctgcgataccattctgcgt

SEQ ID NO: 279825 - DNA, 30 bp, Artificial Sequence
  Synthetic oligonucleotide
tatcgtcgcaaatggcagtggtaagtgcgt

SEQ ID NO: 279826 - DNA, 30 bp, Artificial Sequence
  Synthetic oligonucleotide
tgttcgttaattcgggacatggacgtgcgt

SEQ ID NO: 279827 - DNA, 30 bp, Artificial Sequence
  Synthetic oligonucleotide
tgttcacattcatcggtgaaaggcgtgcgt

SEQ ID NO: 279828 - DNA, 30 bp, Artificial Sequence
  Synthetic oligonucleotide
aatgggatatgcccagaggttcgtgtgcgt

SEQ ID NO: 279829 - DNA, 30 bp, Artificial Sequence
  Synthetic oligonucleotide
atgaactccaaggataactgatgtgtgcgt

SEQ ID NO: 279830 - DNA, 30 bp, Artificial Sequence
  Synthetic oligonucleotide
caccctacggagggtttagatgaattgcgt

SEQ ID NO: 279831 - DNA, 30 bp, Artificial Sequence
  Synthetic oligonucleotide
tgaaaggtctgatggatgctttacttgcgt

SEQ ID NO: 279832 - DNA, 30 bp, Artificial Sequence
  Synthetic oligonucleotide
ggtcacgaattccaatcgcaccttttgcgt

SEQ ID NO: 279833 - DNA, 30 bp, Artificial Sequence
  Synthetic oligonucleotide
ccgggatccattcacggacacacaaatcgt

SEQ ID NO: 279834 - DNA, 30 bp, Artificial Sequence
  Synthetic oligonucleotide
actgggctgctatagattccgcacaatcgt

SEQ ID NO: 279835 - DNA, 30 bp, Artificial Sequence
  Synthetic oligonucleotide
actagcggacgggtttttgctaccaatcgt

SEQ ID NO: 279836 - DNA, 30 bp, Artificial Sequence
  Synthetic oligonucleotide
gggagtaggttctgtctatccagcaatcgt

SEQ ID NO: 279837 - DNA, 30 bp, Artificial Sequence
  Synthetic oligonucleotide
ggactaggtcctacatacatttggaatcgt

SEQ ID NO: 279838 - DNA, 30 bp, Artificial Sequence
  Synthetic oligonucleotide
aggtatgcactgatctagaattttaatcgt

SEQ ID NO: 279839 - DNA, 30 bp, Artificial Sequence
  Synthetic oligonucleotide
tagaactttgctagacaaaggttccatcgt

SEQ ID NO: 279840 - DNA, 30 bp, Artificial Sequence
  Synthetic oligonucleotide
aaatgatcgtcaatctgtgtcaaagatcgt

SEQ ID NO: 279841 - DNA, 30 bp, Artificial Sequence
  Synthetic oligonucleotide
aaggcgctcagccacgggtgacgagatcgt

SEQ ID NO: 279842 - DNA, 30 bp, Artificial Sequence
  Synthetic oligonucleotide
gactactccgttaggaaatatatagatcgt

SEQ ID NO: 279843 - DNA, 30 bp, Artificial Sequence
  Synthetic oligonucleotide
tatagaatggtgatttccctcgttgatcgt

SEQ ID NO: 279844 - DNA, 30 bp, Artificial Sequence
  Synthetic oligonucleotide
tgcttaggaactctaaggctaaagtatcgt

SEQ ID NO: 279845 - DNA, 30 bp, Artificial Sequence
  Synthetic oligonucleotide
ccttttagaacatcgcatgtggggtatcgt

SEQ ID NO: 279846 - DNA, 30 bp, Artificial Sequence
  Synthetic oligonucleotide
cccttcgtccacttatgatcgttttatcgt

SEQ ID NO: 279847 - DNA, 30 bp, Artificial Sequence
  Synthetic oligonucleotide
aggcaggtcagatatccttgactaactcgt

SEQ ID NO: 279848 - DNA, 30 bp, Artificial Sequence
  Synthetic oligonucleotide
acattactttacgttaacatcgacactcgt

SEQ ID NO: 279849 - DNA, 30 bp, Artificial Sequence
  Synthetic oligonucleotide
tggacagttccgtgagactacgcacctcgt

SEQ ID NO: 279850 - DNA, 30 bp, Artificial Sequence
  Synthetic oligonucleotide
gtgggttagccttaataacccgcacctcgt

SEQ ID NO: 279851 - DNA, 30 bp, Artificial Sequence
  Synthetic oligonucleotide
ttacagattttgtttagataagttcctcgt

SEQ ID NO: 279852 - DNA, 30 bp, Artificial Sequence
  Synthetic oligonucleotide
tgcgtaggcagcggacaatgttttcctcgt

SEQ ID NO: 279853 - DNA, 30 bp, Artificial Sequence
  Synthetic oligonucleotide
gccccggctccaaaatgaggcgtagctcgt

SEQ ID NO: 279854 - DNA, 30 bp, Artificial Sequence
  Synthetic oligonucleotide
aaccaggaccgccgaggagacacggctcgt

SEQ ID NO: 279855 - DNA, 30 bp, Artificial Sequence
  Synthetic oligonucleotide
gactcgcctggtcacgcaaattatgctcgt

SEQ ID NO: 279856 - DNA, 30 bp, Artificial Sequence
  Synthetic oligonucleotide
aggcttcgatcgaatctgtacagtgctcgt

SEQ ID NO: 279857 - DNA, 30 bp, Artificial Sequence
  Synthetic oligonucleotide
gataggagggagcacctgaacggatctcgt

SEQ ID NO: 279858 - DNA, 30 bp, Artificial Sequence
  Synthetic oligonucleotide
ctgggagagtgagtttaggcctcctctcgt

SEQ ID NO: 279859 - DNA, 30 bp, Artificial Sequence
  Synthetic oligonucleotide
gcagttggagctgagattgagtagtctcgt

SEQ ID NO: 279860 - DNA, 30 bp, Artificial Sequence
  Synthetic oligonucleotide
cacaataaggagaggaatgttccgtctcgt

SEQ ID NO: 279861 - DNA, 30 bp, Artificial Sequence
  Synthetic oligonucleotide
agatgtatcataggtactgacgattctcgt

SEQ ID NO: 279862 - DNA, 30 bp, Artificial Sequence
  Synthetic oligonucleotide
aactgcgtctagaaagactgatattctcgt

SEQ ID NO: 279863 - DNA, 30 bp, Artificial Sequence
  Synthetic oligonucleotide
gtcgccttatcattttcgtcccaaagtcgt

SEQ ID NO: 279864 - DNA, 30 bp, Artificial Sequence
  Synthetic oligonucleotide
gtggcatttaatagtacctcgtaaagtcgt

SEQ ID NO: 279865 - DNA, 31 bp, Artificial Sequence
  Synthetic oligonucleotide
gtaaaacattgtgaattggtctcgacgtcgt

SEQ ID NO: 279866 - DNA, 30 bp, Artificial Sequence
  Synthetic oligonucleotide
tagggatggctgcttagtcgggtacgtcgt

SEQ ID NO: 279867 - DNA, 30 bp, Artificial Sequence
  Synthetic oligonucleotide
gcgaaacaacctgagctaatctaccgtcgt

SEQ ID NO: 279868 - DNA, 30 bp, Artificial Sequence
  Synthetic oligonucleotide
catgtgccgtgcaatcccttgacccgtcgt

SEQ ID NO: 279869 - DNA, 30 bp, Artificial Sequence
  Synthetic oligonucleotide
tcggggggccaaagcgatgcttagcgtcgt

SEQ ID NO: 279870 - DNA, 30 bp, Artificial Sequence
  Synthetic oligonucleotide
tccagtttaccgttagctgaaacgcgtcgt

SEQ ID NO: 279871 - DNA, 30 bp, Artificial Sequence
  Synthetic oligonucleotide
cttcattgaccacaacatgcccaaggtcgt

SEQ ID NO: 279872 - DNA, 30 bp, Artificial Sequence
  Synthetic oligonucleotide
agagatgatgcgactagcgctaacggtcgt

SEQ ID NO: 279873 - DNA, 30 bp, Artificial Sequence
  Synthetic oligonucleotide
aaaatgcatctggtccctgcctggggtcgt

SEQ ID NO: 279874 - DNA, 30 bp, Artificial Sequence
  Synthetic oligonucleotide
ataatatcaaatggttctgtgatatgtcgt

SEQ ID NO: 279875 - DNA, 30 bp, Artificial Sequence
  Synthetic oligonucleotide
agacgctcacaggcaatgtccgcctgtcgt

SEQ ID NO: 279876 - DNA, 30 bp, Artificial Sequence
  Synthetic oligonucleotide
tcaagtaacctgaatggtgcaccttgtcgt

SEQ ID NO: 279877 - DNA, 30 bp, Artificial Sequence
  Synthetic oligonucleotide
gggatacatattcactggtcgtgttgtcgt

SEQ ID NO: 279878 - DNA, 30 bp, Artificial Sequence
  Synthetic oligonucleotide
gaaactggccgacagccatataacattcgt

SEQ ID NO: 279879 - DNA, 30 bp, Artificial Sequence
  Synthetic oligonucleotide
ggtacgagcgattatttagcactcattcgt

SEQ ID NO: 279880 - DNA, 30 bp, Artificial Sequence
  Synthetic oligonucleotide
catgcacaacactgtggaagcctcattcgt

SEQ ID NO: 279881 - DNA, 30 bp, Artificial Sequence
  Synthetic oligonucleotide
gattatcatacactggaacatgtgattcgt

SEQ ID NO: 279882 - DNA, 30 bp, Artificial Sequence
  Synthetic oligonucleotide
tgcgatgtctgatcatccgtgagacttcgt

SEQ ID NO: 279883 - DNA, 30 bp, Artificial Sequence
  Synthetic oligonucleotide
tcttaggcgaagtacacagaactacttcgt

SEQ ID NO: 279884 - DNA, 30 bp, Artificial Sequence
  Synthetic oligonucleotide
cttgctcgttctcttaacccatagcttcgt

SEQ ID NO: 279885 - DNA, 30 bp, Artificial Sequence
  Synthetic oligonucleotide
gatagaatgaagacaaatacttggcttcgt

SEQ ID NO: 279886 - DNA, 30 bp, Artificial Sequence
  Synthetic oligonucleotide
gtcgtagatccttatgtgttcgctcttcgt

SEQ ID NO: 279887 - DNA, 30 bp, Artificial Sequence
  Synthetic oligonucleotide
gcctagaagtcctattaactcagtcttcgt

SEQ ID NO: 279888 - DNA, 30 bp, Artificial Sequence
  Synthetic oligonucleotide
taggcaggtggaaaaggtctgacggttcgt

SEQ ID NO: 279889 - DNA, 30 bp, Artificial Sequence
  Synthetic oligonucleotide
tcgattgtgtgcttgtcgcccggggttcgt

SEQ ID NO: 279890 - DNA, 30 bp, Artificial Sequence
  Synthetic oligonucleotide
tgagagccgttgttgccggggtgatttcgt

SEQ ID NO: 279891 - DNA, 30 bp, Artificial Sequence
  Synthetic oligonucleotide
gatagttaagcccgaagaccgatctttcgt

SEQ ID NO: 279892 - DNA, 30 bp, Artificial Sequence
  Synthetic oligonucleotide
tcgatagggctgaaagaagacgtgtttcgt

SEQ ID NO: 279893 - DNA, 30 bp, Artificial Sequence
  Synthetic oligonucleotide
gtagagctttcgacgatccaggattttcgt

SEQ ID NO: 279894 - DNA, 30 bp, Artificial Sequence
  Synthetic oligonucleotide
cagagatatttggctccacttgattttcgt

SEQ ID NO: 279895 - DNA, 30 bp, Artificial Sequence
  Synthetic oligonucleotide
gatctctctgtaaatatctagtattttcgt

SEQ ID NO: 279896 - DNA, 30 bp, Artificial Sequence
  Synthetic oligonucleotide
caaacaattgagagatacagcttttttcgt

SEQ ID NO: 279897 - DNA, 30 bp, Artificial Sequence
  Synthetic oligonucleotide
tagctagaaaagattaatgtcaaaaaaggt

SEQ ID NO: 279898 - DNA, 30 bp, Artificial Sequence
  Synthetic oligonucleotide
tcaaattacaaggtccctactgaaaaaggt

SEQ ID NO: 279899 - DNA, 30 bp, Artificial Sequence
  Synthetic oligonucleotide
gggctaacgcgatatgatttggtaaaaggt

SEQ ID NO: 279900 - DNA, 30 bp, Artificial Sequence
  Synthetic oligonucleotide
ttatgcgtttacaacttggtcgccaaaggt

SEQ ID NO: 279901 - DNA, 30 bp, Artificial Sequence
  Synthetic oligonucleotide
agcttagtcgggaaaggccaatgcaaaggt

SEQ ID NO: 279902 - DNA, 30 bp, Artificial Sequence
  Synthetic oligonucleotide
gcgatctgcgttgaaaaaggggctaaaggt

SEQ ID NO: 279903 - DNA, 30 bp, Artificial Sequence
  Synthetic oligonucleotide
gaagggatttcaatacaatttcgtaaaggt

SEQ ID NO: 279904 - DNA, 30 bp, Artificial Sequence
  Synthetic oligonucleotide
aagtctcctgccaaaatgcatattaaaggt

SEQ ID NO: 279905 - DNA, 30 bp, Artificial Sequence
  Synthetic oligonucleotide
cccgggcctccgttacaagttgttaaaggt

SEQ ID NO: 279906 - DNA, 30 bp, Artificial Sequence
  Synthetic oligonucleotide
tatctcttgcaggaaagttaacaacaaggt

SEQ ID NO: 279907 - DNA, 30 bp, Artificial Sequence
  Synthetic oligonucleotide
cacgcgatactaaggtcgccaaaccaaggt

SEQ ID NO: 279908 - DNA, 30 bp, Artificial Sequence
  Synthetic oligonucleotide
gaccttacacctagcgaggtggaccaaggt

SEQ ID NO: 279909 - DNA, 30 bp, Artificial Sequence
  Synthetic oligonucleotide
tgctgtaaacaacgcccgaaggggcaaggt

SEQ ID NO: 279910 - DNA, 30 bp, Artificial Sequence
  Synthetic oligonucleotide
ccattaacagtgagacataacttgcaaggt

SEQ ID NO: 279911 - DNA, 30 bp, Artificial Sequence
  Synthetic oligonucleotide
gccgcgagggataccaacggttctcaaggt

SEQ ID NO: 279912 - DNA, 30 bp, Artificial Sequence
  Synthetic oligonucleotide
cctaatctaaaggtcgcaggaacagaaggt

SEQ ID NO: 279913 - DNA, 30 bp, Artificial Sequence
  Synthetic oligonucleotide
aatacaactagaaatgctggggcagaaggt

SEQ ID NO: 279914 - DNA, 30 bp, Artificial Sequence
  Synthetic oligonucleotide
gtccagtgtacccaaaggacacgagaaggt

SEQ ID NO: 279915 - DNA, 30 bp, Artificial Sequence
  Synthetic oligonucleotide
taaaaaagcgatgttctcgatttggaaggt

SEQ ID NO: 279916 - DNA, 30 bp, Artificial Sequence
  Synthetic oligonucleotide
tctgtgaaggagagtgaaagctcataaggt

SEQ ID NO: 279917 - DNA, 30 bp, Artificial Sequence
  Synthetic oligonucleotide
tgccaaactgaccatcttgatttataaggt

SEQ ID NO: 279918 - DNA, 30 bp, Artificial Sequence
  Synthetic oligonucleotide
acgcgggacactgaggaaatagcctaaggt

SEQ ID NO: 279919 - DNA, 30 bp, Artificial Sequence
  Synthetic oligonucleotide
atggcgtccgcttgtgtcagcctctaaggt

SEQ ID NO: 279920 - DNA, 30 bp, Artificial Sequence
  Synthetic oligonucleotide
gcggttagacctatgctaagcgcgtaaggt

SEQ ID NO: 279921 - DNA, 30 bp, Artificial Sequence
  Synthetic oligonucleotide
actaggttagactctgaacactcgtaaggt

SEQ ID NO: 279922 - DNA, 30 bp, Artificial Sequence
  Synthetic oligonucleotide
tttccaaacaattattcaaacgggtaaggt

SEQ ID NO: 279923 - DNA, 31 bp, Artificial Sequence
  Synthetic oligonucleotide
tacccggggtggtcggggatgaccttaaggt

SEQ ID NO: 279924 - DNA, 30 bp, Artificial Sequence
  Synthetic oligonucleotide
tgtggccgtcgttgcccccagtctacaggt

SEQ ID NO: 279925 - DNA, 30 bp, Artificial Sequence
  Synthetic oligonucleotide
ttacggattcatgaacaggcaagtacaggt

SEQ ID NO: 279926 - DNA, 30 bp, Artificial Sequence
  Synthetic oligonucleotide
taggggtttggtccacggccgggcccaggt

SEQ ID NO: 279927 - DNA, 30 bp, Artificial Sequence
  Synthetic oligonucleotide
tcaaatgcatcgcataattccctcccaggt

SEQ ID NO: 279928 - DNA, 30 bp, Artificial Sequence
  Synthetic oligonucleotide
gactagttaagatcacttcatatgccaggt

SEQ ID NO: 279929 - DNA, 30 bp, Artificial Sequence
  Synthetic oligonucleotide
gccgggctcagcgcaagagccacagcaggt

SEQ ID NO: 279930 - DNA, 30 bp, Artificial Sequence
  Synthetic oligonucleotide
aataggagtcaaggaactacgtaggcaggt

SEQ ID NO: 279931 - DNA, 30 bp, Artificial Sequence
  Synthetic oligonucleotide
aagagaaaataatcacagcctattgcaggt

SEQ ID NO: 279932 - DNA, 30 bp, Artificial Sequence
  Synthetic oligonucleotide
ctgtaccacaggcgaccttatgaatcaggt

SEQ ID NO: 279933 - DNA, 30 bp, Artificial Sequence
  Synthetic oligonucleotide
tccatgccatctacaaggagcgcatcaggt

SEQ ID NO: 279934 - DNA, 30 bp, Artificial Sequence
  Synthetic oligonucleotide
acgggccaccgagatccatggctatcaggt

SEQ ID NO: 279935 - DNA, 30 bp, Artificial Sequence
  Synthetic oligonucleotide
acaagccaaggggctcggacccactcaggt

SEQ ID NO: 279936 - DNA, 30 bp, Artificial Sequence
  Synthetic oligonucleotide
cgtttagaatgttatagcttgggctcaggt

SEQ ID NO: 279937 - DNA, 30 bp, Artificial Sequence
  Synthetic oligonucleotide
acggacgtcaacgtgcacgacgtgtcaggt

SEQ ID NO: 279938 - DNA, 30 bp, Artificial Sequence
  Synthetic oligonucleotide
ggccatcggcatatgggaatccaaagaggt

SEQ ID NO: 279939 - DNA, 30 bp, Artificial Sequence
  Synthetic oligonucleotide
cgtctcggtatccgaggctcatcaagaggt

SEQ ID NO: 279940 - DNA, 30 bp, Artificial Sequence
  Synthetic oligonucleotide
aggccccagcgctcctgtctacgaagaggt

SEQ ID NO: 279941 - DNA, 30 bp, Artificial Sequence
  Synthetic oligonucleotide
gaaaatccgcagccgcaacgtgacagaggt

SEQ ID NO: 279942 - DNA, 30 bp, Artificial Sequence
  Synthetic oligonucleotide
cttaatagtctatcatttatctgcagaggt

SEQ ID NO: 279943 - DNA, 30 bp, Artificial Sequence
  Synthetic oligonucleotide
gtttgaccaatgccatcagcacagagaggt

SEQ ID NO: 279944 - DNA, 30 bp, Artificial Sequence
  Synthetic oligonucleotide
tccgacacaggatctacgtgcaggagaggt

SEQ ID NO: 279945 - DNA, 30 bp, Artificial Sequence
  Synthetic oligonucleotide
ttcactttcgccagtcagtgtgggagaggt

SEQ ID NO: 279946 - DNA, 30 bp, Artificial Sequence
  Synthetic oligonucleotide
ctggtcggcgggcgtaaaggctatagaggt

SEQ ID NO: 279947 - DNA, 30 bp, Artificial Sequence
  Synthetic oligonucleotide
caatgctgttgaagccacccgcctagaggt

SEQ ID NO: 279948 - DNA, 30 bp, Artificial Sequence
  Synthetic oligonucleotide
gttagaagggctcgggttaccaaccgaggt

SEQ ID NO: 279949 - DNA, 30 bp, Artificial Sequence
  Synthetic oligonucleotide
tatgggtggaccggtcctccaaagcgaggt

SEQ ID NO: 279950 - DNA, 30 bp, Artificial Sequence
  Synthetic oligonucleotide
tcagtctataccccgtgcaggatgcgaggt

SEQ ID NO: 279951 - DNA, 30 bp, Artificial Sequence
  Synthetic oligonucleotide
ttgttatcaaaaacaattaggagtcgaggt

SEQ ID NO: 279952 - DNA, 30 bp, Artificial Sequence
  Synthetic oligonucleotide
tcgggcggaagtaatttgactgttcgaggt

SEQ ID NO: 279953 - DNA, 30 bp, Artificial Sequence
  Synthetic oligonucleotide
tatgcatatacgttgcgaaagttaggaggt

SEQ ID NO: 279954 - DNA, 30 bp, Artificial Sequence
  Synthetic oligonucleotide
tagagacctacgcggtggcgaaccggaggt

SEQ ID NO: 279955 - DNA, 30 bp, Artificial Sequence
  Synthetic oligonucleotide
gatgcaagtcccaaccaaatgttcggaggt

SEQ ID NO: 279956 - DNA, 30 bp, Artificial Sequence
  Synthetic oligonucleotide
tgaagatgccccgtcgggtttctgggaggt

SEQ ID NO: 279957 - DNA, 30 bp, Artificial Sequence
  Synthetic oligonucleotide
ggagcgactggataaaagaggagtggaggt

SEQ ID NO: 279958 - DNA, 30 bp, Artificial Sequence
  Synthetic oligonucleotide
accgaaaataaaaattgttatagatgaggt

SEQ ID NO: 279959 - DNA, 30 bp, Artificial Sequence
  Synthetic oligonucleotide
gcagcctgggaaagtcatccgctctgaggt

SEQ ID NO: 279960 - DNA, 30 bp, Artificial Sequence
  Synthetic oligonucleotide
gggggcggtctccccgacaacccgtgaggt

SEQ ID NO: 279961 - DNA, 30 bp, Artificial Sequence
  Synthetic oligonucleotide
ggctgttaaccgttctgtgtgtggtgaggt

SEQ ID NO: 279962 - DNA, 30 bp, Artificial Sequence
  Synthetic oligonucleotide
acgagtgtttacctaatcatttgttgaggt

SEQ ID NO: 279963 - DNA, 30 bp, Artificial Sequence
  Synthetic oligonucleotide
gcagccacgtccaaggatataataataggt

SEQ ID NO: 279964 - DNA, 30 bp, Artificial Sequence
  Synthetic oligonucleotide
acaagtatgtgaggtttgaagagcataggt

SEQ ID NO: 279965 - DNA, 30 bp, Artificial Sequence
  Synthetic oligonucleotide
gcgacaaactggcatcagtgtcagataggt

SEQ ID NO: 279966 - DNA, 30 bp, Artificial Sequence
  Synthetic oligonucleotide
gttcccggcaagggtcatgtgtcgataggt

SEQ ID NO: 279967 - DNA, 30 bp, Artificial Sequence
  Synthetic oligonucleotide
ttcctgagagggccccattaaaatataggt

SEQ ID NO: 279968 - DNA, 30 bp, Artificial Sequence
  Synthetic oligonucleotide
cccttaagtacttcacgtggtagtataggt

SEQ ID NO: 279969 - DNA, 30 bp, Artificial Sequence
  Synthetic oligonucleotide
catcaggattcgcccaccgtgattataggt

SEQ ID NO: 279970 - DNA, 30 bp, Artificial Sequence
  Synthetic oligonucleotide
ggtcgttggctggtgcgtttctttataggt

SEQ ID NO: 279971 - DNA, 30 bp, Artificial Sequence
  Synthetic oligonucleotide
tccaccgctggataatggcaatgcctaggt

SEQ ID NO: 279972 - DNA, 30 bp, Artificial Sequence
  Synthetic oligonucleotide
gaaggctgcccctgtgatagccgagtaggt

SEQ ID NO: 279973 - DNA, 30 bp, Artificial Sequence
  Synthetic oligonucleotide
aagagaaggcccaacctatcccaattaggt

SEQ ID NO: 279974 - DNA, 30 bp, Artificial Sequence
  Synthetic oligonucleotide
tcatagaattcgggctgtttagcattaggt

SEQ ID NO: 279975 - DNA, 30 bp, Artificial Sequence
  Synthetic oligonucleotide
tacgatcaattgtaagatgagatattaggt

SEQ ID NO: 279976 - DNA, 30 bp, Artificial Sequence
  Synthetic oligonucleotide
acatgttcggcggcgtagataatcttaggt

SEQ ID NO: 279977 - DNA, 30 bp, Artificial Sequence
  Synthetic oligonucleotide
aacttggacgagagcttaaatctcttaggt

SEQ ID NO: 279978 - DNA, 30 bp, Artificial Sequence
  Synthetic oligonucleotide
taaggactggaatctcgcaagagtttaggt

SEQ ID NO: 279979 - DNA, 30 bp, Artificial Sequence
  Synthetic oligonucleotide
ccggtttggactcaaacccgatcgaacggt

SEQ ID NO: 279980 - DNA, 30 bp, Artificial Sequence
  Synthetic oligonucleotide
tcctacggagtactgaacaggatgaacggt

SEQ ID NO: 279981 - DNA, 30 bp, Artificial Sequence
  Synthetic oligonucleotide
atcagtggttggggttgcacaccacacggt

SEQ ID NO: 279982 - DNA, 30 bp, Artificial Sequence
  Synthetic oligonucleotide
agggagcaggcactactcattcaccacggt

SEQ ID NO: 279983 - DNA, 30 bp, Artificial Sequence
  Synthetic oligonucleotide
actgtcggcacaaataaaaggtaccacggt

SEQ ID NO: 279984 - DNA, 30 bp, Artificial Sequence
  Synthetic oligonucleotide
tgttagtaccgtaataagaagtttcacggt

SEQ ID NO: 279985 - DNA, 30 bp, Artificial Sequence
  Synthetic oligonucleotide
gatcaacacatcatcgattgttacgacggt

SEQ ID NO: 279986 - DNA, 30 bp, Artificial Sequence
  Synthetic oligonucleotide
gtgctacgatgggaaaatacgggggacggt

SEQ ID NO: 279987 - DNA, 30 bp, Artificial Sequence
  Synthetic oligonucleotide
tgaggcccccgtaaagccgaagatgacggt

SEQ ID NO: 279988 - DNA, 30 bp, Artificial Sequence
  Synthetic oligonucleotide
tgcgggggttaagataaaacctatgacggt

SEQ ID NO: 279989 - DNA, 30 bp, Artificial Sequence
  Synthetic oligonucleotide
ttcttgtacgggaaacttcgacgtgacggt

SEQ ID NO: 279990 - DNA, 30 bp, Artificial Sequence
  Synthetic oligonucleotide
ctgctgagggggggacatgcagtatacggt

SEQ ID NO: 279991 - DNA, 30 bp, Artificial Sequence
  Synthetic oligonucleotide
cgaattaagatgatctagaatttatacggt

SEQ ID NO: 279992 - DNA, 30 bp, Artificial Sequence
  Synthetic oligonucleotide
ggagaggtagctgtgaagagggtctacggt

SEQ ID NO: 279993 - DNA, 30 bp, Artificial Sequence
  Synthetic oligonucleotide
attactcgtctattagcacaacggtacggt

SEQ ID NO: 279994 - DNA, 30 bp, Artificial Sequence
  Synthetic oligonucleotide
tccggatagctcgcacgttgaatttacggt

SEQ ID NO: 279995 - DNA, 30 bp, Artificial Sequence
  Synthetic oligonucleotide
ccctggagcggttcggagaatgaaaccggt

SEQ ID NO: 279996 - DNA, 30 bp, Artificial Sequence
  Synthetic oligonucleotide
caagaaacatggcagttctgtgcgaccggt

SEQ ID NO: 279997 - DNA, 30 bp, Artificial Sequence
  Synthetic oligonucleotide
gctttcgaggggaagcgtcgttggaccggt

SEQ ID NO: 279998 - DNA, 30 bp, Artificial Sequence
  Synthetic oligonucleotide
aacccgggggactgcactacggagcccggt

SEQ ID NO: 279999 - DNA, 30 bp, Artificial Sequence
  Synthetic oligonucleotide
ggccgcgggcgaacgtaagataatcccggt

SEQ ID NO: 280000 - DNA, 30 bp, Artificial Sequence
  Synthetic oligonucleotide
tgctatgtaacaatagccagccatcccggt

SEQ ID NO: 280001 - DNA, 30 bp, Artificial Sequence
  Synthetic oligonucleotide
tgtctccctaagtagacagggagtcccggt

SEQ ID NO: 280002 - DNA, 30 bp, Artificial Sequence
  Synthetic oligonucleotide
gcaacaaggcagcgtgttggaattcccggt

SEQ ID NO: 280003 - DNA, 30 bp, Artificial Sequence
  Synthetic oligonucleotide
ccaagataccgaggaataaaaatagccggt

SEQ ID NO: 280004 - DNA, 30 bp, Artificial Sequence
  Synthetic oligonucleotide
ttacggcataatggaccgctgttagccggt

SEQ ID NO: 280005 - DNA, 30 bp, Artificial Sequence
  Synthetic oligonucleotide
tgttaatagggggcgatggggacggccggt

SEQ ID NO: 280006 - DNA, 30 bp, Artificial Sequence
  Synthetic oligonucleotide
tcctttaagcttatactaggttctgccggt

SEQ ID NO: 280007 - DNA, 30 bp, Artificial Sequence
  Synthetic oligonucleotide
ggtacataccaggttggcgctggtgccggt

SEQ ID NO: 280008 - DNA, 30 bp, Artificial Sequence
  Synthetic oligonucleotide
agatgaacgcatgctagctgagaaagcggt

SEQ ID NO: 280009 - DNA, 30 bp, Artificial Sequence
  Synthetic oligonucleotide
ttgattagagacaattgggattagagcggt

SEQ ID NO: 280010 - DNA, 30 bp, Artificial Sequence
  Synthetic oligonucleotide
agtcggtggatgtgtggtccgagccgcggt

SEQ ID NO: 280011 - DNA, 30 bp, Artificial Sequence
  Synthetic oligonucleotide
aatcatcggaggtgaggtgcgaagcgcggt

SEQ ID NO: 280012 - DNA, 30 bp, Artificial Sequence
  Synthetic oligonucleotide
gcaatttgtacagagtctcaccggcgcggt

SEQ ID NO: 280013 - DNA, 30 bp, Artificial Sequence
  Synthetic oligonucleotide
agggcgtgagttcctccagttcggcgcggt

SEQ ID NO: 280014 - DNA, 30 bp, Artificial Sequence
  Synthetic oligonucleotide
aaggatgtgcgggtctgatttgtaggcggt

SEQ ID NO: 280015 - DNA, 30 bp, Artificial Sequence
  Synthetic oligonucleotide
ataggtgcccgaggccgttaatccggcggt

SEQ ID NO: 280016 - DNA, 30 bp, Artificial Sequence
  Synthetic oligonucleotide
tacgcgtcatgagtcttgctactcggcggt

SEQ ID NO: 280017 - DNA, 30 bp, Artificial Sequence
  Synthetic oligonucleotide
acaatacccataactacagctaagggcggt

SEQ ID NO: 280018 - DNA, 30 bp, Artificial Sequence
  Synthetic oligonucleotide
aggcccgctccggagccgatttcgggcggt

SEQ ID NO: 280019 - DNA, 30 bp, Artificial Sequence
  Synthetic oligonucleotide
cagggtatcggatgactaatattgggcggt

SEQ ID NO: 280020 - DNA, 30 bp, Artificial Sequence
  Synthetic oligonucleotide
gatcgggatcgactcattgactgtggcggt

SEQ ID NO: 280021 - DNA, 30 bp, Artificial Sequence
  Synthetic oligonucleotide
gctatttccgattctgctgggtaatgcggt

SEQ ID NO: 280022 - DNA, 30 bp, Artificial Sequence
  Synthetic oligonucleotide
tatagacaggagctccaactactatgcggt

SEQ ID NO: 280023 - DNA, 30 bp, Artificial Sequence
  Synthetic oligonucleotide
ccctaatggacttcgttccaagcctgcggt

SEQ ID NO: 280024 - DNA, 30 bp, Artificial Sequence
  Synthetic oligonucleotide
atgcaccagtgtcacactcatatgtgcggt

SEQ ID NO: 280025 - DNA, 30 bp, Artificial Sequence
  Synthetic oligonucleotide
gtagtccacacattatcacgagcttgcggt

SEQ ID NO: 280026 - DNA, 30 bp, Artificial Sequence
  Synthetic oligonucleotide
ccccggaccgaggtttgtcatcccatcggt

SEQ ID NO: 280027 - DNA, 30 bp, Artificial Sequence
  Synthetic oligonucleotide
gcacggattgagctctacatgtgcatcggt

SEQ ID NO: 280028 - DNA, 30 bp, Artificial Sequence
  Synthetic oligonucleotide
tgaaagattgaacccaggaatatcatcggt

SEQ ID NO: 280029 - DNA, 31 bp, Artificial Sequence
  Synthetic oligonucleotide
catcggtaagattggatagggcgggatcggt

SEQ ID NO: 280030 - DNA, 30 bp, Artificial Sequence
  Synthetic oligonucleotide
ctctccagagcactagtccgtgtgatcggt

SEQ ID NO: 280031 - DNA, 30 bp, Artificial Sequence
  Synthetic oligonucleotide
cagcacatggctacatctccagtactcggt

SEQ ID NO: 280032 - DNA, 30 bp, Artificial Sequence
  Synthetic oligonucleotide
ctcctcaacatactagcgcaaaggctcggt

SEQ ID NO: 280033 - DNA, 30 bp, Artificial Sequence
  Synthetic oligonucleotide
tctcttatgaaattcaggaataggctcggt

SEQ ID NO: 280034 - DNA, 30 bp, Artificial Sequence
  Synthetic oligonucleotide
gccgcgaatgtttattccggggggctcggt

SEQ ID NO: 280035 - DNA, 30 bp, Artificial Sequence
  Synthetic oligonucleotide
tgggcattcgaacccacttacactctcggt

SEQ ID NO: 280036 - DNA, 30 bp, Artificial Sequence
  Synthetic oligonucleotide
agttaggtgcactgttacggacgagtcggt

SEQ ID NO: 280037 - DNA, 30 bp, Artificial Sequence
  Synthetic oligonucleotide
caacgactatagggtgcaaccggcgtcggt

SEQ ID NO: 280038 - DNA, 30 bp, Artificial Sequence
  Synthetic oligonucleotide
atactcataaagaaaatatatagggtcggt

SEQ ID NO: 280039 - DNA, 30 bp, Artificial Sequence
  Synthetic oligonucleotide
aaggccacaacgtcgagagggtttgtcggt

SEQ ID NO: 280040 - DNA, 30 bp, Artificial Sequence
  Synthetic oligonucleotide
atcaccgcggactcgccccaaccattcggt

SEQ ID NO: 280041 - DNA, 30 bp, Artificial Sequence
  Synthetic oligonucleotide
gcaggggtgcatggaaccgtaggcttcggt

SEQ ID NO: 280042 - DNA, 30 bp, Artificial Sequence
  Synthetic oligonucleotide
acaccaacaagctaagtggatctcttcggt

SEQ ID NO: 280043 - DNA, 30 bp, Artificial Sequence
  Synthetic oligonucleotide
aatcaataggtaagaagtattaatttcggt

SEQ ID NO: 280044 - DNA, 30 bp, Artificial Sequence
  Synthetic oligonucleotide
caccacagcaccaaccaataagttttcggt

SEQ ID NO: 280045 - DNA, 30 bp, Artificial Sequence
  Synthetic oligonucleotide
cctcgttactttcatctgggcgaaaagggt

SEQ ID NO: 280046 - DNA, 30 bp, Artificial Sequence
  Synthetic oligonucleotide
aactgattaaactaggggctaataaagggt

SEQ ID NO: 280047 - DNA, 30 bp, Artificial Sequence
  Synthetic oligonucleotide
gtgcacggcctaagcccctttctaaagggt

SEQ ID NO: 280048 - DNA, 30 bp, Artificial Sequence
  Synthetic oligonucleotide
cttatgcatgattggcttgcggtaaagggt

SEQ ID NO: 280049 - DNA, 30 bp, Artificial Sequence
  Synthetic oligonucleotide
taatcttgcagctttctaatggtaaagggt

SEQ ID NO: 280050 - DNA, 30 bp, Artificial Sequence
  Synthetic oligonucleotide
gatgactagcctggcagagtccggaagggt

SEQ ID NO: 280051 - DNA, 30 bp, Artificial Sequence
  Synthetic oligonucleotide
gcagtctggttaaaccgggagccacagggt

SEQ ID NO: 280052 - DNA, 30 bp, Artificial Sequence
  Synthetic oligonucleotide
cgtatttatagataagaaattttacagggt

SEQ ID NO: 280053 - DNA, 30 bp, Artificial Sequence
  Synthetic oligonucleotide
agaacgcgtcgcgttatatttctccagggt

SEQ ID NO: 280054 - DNA, 30 bp, Artificial Sequence
  Synthetic oligonucleotide
ggtgatgtgtctctcggcataccgcagggt

SEQ ID NO: 280055 - DNA, 30 bp, Artificial Sequence
  Synthetic oligonucleotide
gggccacagagctgcccggtcaggcagggt

SEQ ID NO: 280056 - DNA, 30 bp, Artificial Sequence
  Synthetic oligonucleotide
tgcgagtattaacccgatagccacgagggt

SEQ ID NO: 280057 - DNA, 30 bp, Artificial Sequence
  Synthetic oligonucleotide
tctgccgggtgaaactattcaatcgagggt

SEQ ID NO: 280058 - DNA, 30 bp, Artificial Sequence
  Synthetic oligonucleotide
attaagtatcgtaattgccgtgtcgagggt

SEQ ID NO: 280059 - DNA, 30 bp, Artificial Sequence
  Synthetic oligonucleotide
actcggctaccacggtgctccggtgagggt

SEQ ID NO: 280060 - DNA, 30 bp, Artificial Sequence
  Synthetic oligonucleotide
gccgcgtggcggaaatgccattgtgagggt

SEQ ID NO: 280061 - DNA, 30 bp, Artificial Sequence
  Synthetic oligonucleotide
acctggtacaggtgcggcttacttgagggt

SEQ ID NO: 280062 - DNA, 30 bp, Artificial Sequence
  Synthetic oligonucleotide
ggcagtgagccataaaataaaagatagggt

SEQ ID NO: 280063 - DNA, 30 bp, Artificial Sequence
  Synthetic oligonucleotide
tctgttaacgacgtaagagaactatagggt

SEQ ID NO: 280064 - DNA, 30 bp, Artificial Sequence
  Synthetic oligonucleotide
aagcttactaaaggcgtgggcttatagggt

SEQ ID NO: 280065 - DNA, 30 bp, Artificial Sequence
  Synthetic oligonucleotide
tgtcatattacaaaaagcctcaactagggt

SEQ ID NO: 280066 - DNA, 30 bp, Artificial Sequence
  Synthetic oligonucleotide
tgccgacacggcaatgtgctatactagggt

SEQ ID NO: 280067 - DNA, 30 bp, Artificial Sequence
  Synthetic oligonucleotide
ttaagtagttagtctcgaaccctctagggt

SEQ ID NO: 280068 - DNA, 30 bp, Artificial Sequence
  Synthetic oligonucleotide
ctagagcgctgtcgtatgcctgagtagggt

SEQ ID NO: 280069 - DNA, 30 bp, Artificial Sequence
  Synthetic oligonucleotide
tgccgtcgatccactaaaggatcgtagggt

SEQ ID NO: 280070 - DNA, 30 bp, Artificial Sequence
  Synthetic oligonucleotide
atcccaaaggcttggatagtacattagggt

SEQ ID NO: 280071 - DNA, 30 bp, Artificial Sequence
  Synthetic oligonucleotide
tagacacctcatacgccgtcaaaaacgggt

SEQ ID NO: 280072 - DNA, 30 bp, Artificial Sequence
  Synthetic oligonucleotide
gaggtgcaagtgtattggactccaacgggt

SEQ ID NO: 280073 - DNA, 30 bp, Artificial Sequence
  Synthetic oligonucleotide
ctggttagataaatggacttacgaacgggt

SEQ ID NO: 280074 - DNA, 30 bp, Artificial Sequence
  Synthetic oligonucleotide
gatcatatacatgcttccatgctaacgggt

SEQ ID NO: 280075 - DNA, 30 bp, Artificial Sequence
  Synthetic oligonucleotide
gatacaagaaccttggcttatcacacgggt

SEQ ID NO: 280076 - DNA, 30 bp, Artificial Sequence
  Synthetic oligonucleotide
gcttccgtaattagtgccttagtcacgggt

SEQ ID NO: 280077 - DNA, 30 bp, Artificial Sequence
  Synthetic oligonucleotide
agtagtagggttgaatgtttcgagacgggt

SEQ ID NO: 280078 - DNA, 30 bp, Artificial Sequence
  Synthetic oligonucleotide
ttggccagtcgtccctaggggcacccgggt

SEQ ID NO: 280079 - DNA, 30 bp, Artificial Sequence
  Synthetic oligonucleotide
tacggtagtacagattactttcctccgggt

SEQ ID NO: 280080 - DNA, 30 bp, Artificial Sequence
  Synthetic oligonucleotide
tattcttgccctgagtccgtggcagcgggt

SEQ ID NO: 280081 - DNA, 30 bp, Artificial Sequence
  Synthetic oligonucleotide
agtcgttagatacagtttaagtgagcgggt

SEQ ID NO: 280082 - DNA, 30 bp, Artificial Sequence
  Synthetic oligonucleotide
ccagttaaaactgcctagaaagtagcgggt

SEQ ID NO: 280083 - DNA, 30 bp, Artificial Sequence
  Synthetic oligonucleotide
gtactgccgcccgacaacacctccgcgggt

SEQ ID NO: 280084 - DNA, 30 bp, Artificial Sequence
  Synthetic oligonucleotide
gcaagggggtcctcttcggacttcgcgggt

SEQ ID NO: 280085 - DNA, 30 bp, Artificial Sequence
  Synthetic oligonucleotide
actcgctcttgcgaatcgggcaaggcgggt

SEQ ID NO: 280086 - DNA, 30 bp, Artificial Sequence
  Synthetic oligonucleotide
taggcggttgctaatgccgggggggcgggt

SEQ ID NO: 280087 - DNA, 30 bp, Artificial Sequence
  Synthetic oligonucleotide
cttttgcatggatcactttaaattgcgggt

SEQ ID NO: 280088 - DNA, 30 bp, Artificial Sequence
  Synthetic oligonucleotide
ttcggctaaatacaatgtgaggactcgggt

SEQ ID NO: 280089 - DNA, 30 bp, Artificial Sequence
  Synthetic oligonucleotide
ggaaagtaatcgagcatagcaacctcgggt

SEQ ID NO: 280090 - DNA, 30 bp, Artificial Sequence
  Synthetic oligonucleotide
ggatgtcatgaaaggaaagtgttctcgggt

SEQ ID NO: 280091 - DNA, 30 bp, Artificial Sequence
  Synthetic oligonucleotide
taaacgtaggtagttgccatcacgtcgggt

SEQ ID NO: 280092 - DNA, 30 bp, Artificial Sequence
  Synthetic oligonucleotide
ggagttgctatatgagattaaagttcgggt

SEQ ID NO: 280093 - DNA, 30 bp, Artificial Sequence
  Synthetic oligonucleotide
gctcccgatctgaccacgccaagttcgggt

SEQ ID NO: 280094 - DNA, 30 bp, Artificial Sequence
  Synthetic oligonucleotide
tattcgaaccccgtaacataaaaaaggggt

SEQ ID NO: 280095 - DNA, 30 bp, Artificial Sequence
  Synthetic oligonucleotide
gacccaggcgctaagaaactgagaaggggt

SEQ ID NO: 280096 - DNA, 30 bp, Artificial Sequence
  Synthetic oligonucleotide
taataaatgtgggacccgagttgaaggggt

SEQ ID NO: 280097 - DNA, 30 bp, Artificial Sequence
  Synthetic oligonucleotide
gtttgtacctgaagcgaccaatgcaggggt

SEQ ID NO: 280098 - DNA, 30 bp, Artificial Sequence
  Synthetic oligonucleotide
gatggtagagataatgcgtcatgcaggggt

SEQ ID NO: 280099 - DNA, 30 bp, Artificial Sequence
  Synthetic oligonucleotide
tctttgtgacggtgatcgtaatagaggggt

SEQ ID NO: 280100 - DNA, 30 bp, Artificial Sequence
  Synthetic oligonucleotide
ctcagagattcgtaattcaataataggggt

SEQ ID NO: 280101 - DNA, 30 bp, Artificial Sequence
  Synthetic oligonucleotide
atgattgttcgagtacggtatggtaggggt

SEQ ID NO: 280102 - DNA, 30 bp, Artificial Sequence
  Synthetic oligonucleotide
gcaatgcaccggcgctagagtacccggggt

SEQ ID NO: 280103 - DNA, 30 bp, Artificial Sequence
  Synthetic oligonucleotide
ataataacaagaaaattcgggagccggggt

SEQ ID NO: 280104 - DNA, 30 bp, Artificial Sequence
  Synthetic oligonucleotide
aacagtggcaatagttggctcactcggggt

SEQ ID NO: 280105 - DNA, 30 bp, Artificial Sequence
  Synthetic oligonucleotide
attcgtggttcgttattgatttttcggggt

SEQ ID NO: 280106 - DNA, 30 bp, Artificial Sequence
  Synthetic oligonucleotide
gcggggaccggtaggactgtgcacgggggt

SEQ ID NO: 280107 - DNA, 30 bp, Artificial Sequence
  Synthetic oligonucleotide
ggacccaggaaggctggcgcagacgggggt

SEQ ID NO: 280108 - DNA, 30 bp, Artificial Sequence
  Synthetic oligonucleotide
gggcattatgagaccgacccatgcgggggt

SEQ ID NO: 280109 - DNA, 27 bp, Artificial Sequence
  Synthetic oligonucleotide
acattcgcacgtgatatctgcgggggt

SEQ ID NO: 280110 - DNA, 30 bp, Artificial Sequence
  Synthetic oligonucleotide
actttccagatgatgctcaatgaggggggt

SEQ ID NO: 280111 - DNA, 30 bp, Artificial Sequence
  Synthetic oligonucleotide
aataggctcactatccttgcggcggggggt

SEQ ID NO: 280112 - DNA, 30 bp, Artificial Sequence
  Synthetic oligonucleotide
gttcggcggggcattggggagatggggggt

SEQ ID NO: 280113 - DNA, 30 bp, Artificial Sequence
  Synthetic oligonucleotide
gggcatttaggcgtaatggtgtatgggggt

SEQ ID NO: 280114 - DNA, 30 bp, Artificial Sequence
  Synthetic oligonucleotide
tgaggttatctctcctgtccgagtgggggt

SEQ ID NO: 280115 - DNA, 30 bp, Artificial Sequence
  Synthetic oligonucleotide
tctagatgtggttacgtgctcgttgggggt

SEQ ID NO: 280116 - DNA, 30 bp, Artificial Sequence
  Synthetic oligonucleotide
catgcccaagcaggggaacttcaatggggt

SEQ ID NO: 280117 - DNA, 30 bp, Artificial Sequence
  Synthetic oligonucleotide
aatggctgaattgccagtcaagcatggggt

SEQ ID NO: 280118 - DNA, 30 bp, Artificial Sequence
  Synthetic oligonucleotide
ggtagattgaaaagaaacccgagatggggt

SEQ ID NO: 280119 - DNA, 30 bp, Artificial Sequence
  Synthetic oligonucleotide
ggaaagaggaaagatgccgtgcgatggggt

SEQ ID NO: 280120 - DNA, 30 bp, Artificial Sequence
  Synthetic oligonucleotide
actgaggaggcatgcgtagggctatggggt

SEQ ID NO: 280121 - DNA, 30 bp, Artificial Sequence
  Synthetic oligonucleotide
gttgtttcaaaattgagcgttgactggggt

SEQ ID NO: 280122 - DNA, 30 bp, Artificial Sequence
  Synthetic oligonucleotide
ccacattgggtcaataaagacaagtggggt

SEQ ID NO: 280123 - DNA, 30 bp, Artificial Sequence
  Synthetic oligonucleotide
gtgtgaaagggattacaatcccaaatgggt

SEQ ID NO: 280124 - DNA, 30 bp, Artificial Sequence
  Synthetic oligonucleotide
gatcaatcggtcatagggtgtttcatgggt

SEQ ID NO: 280125 - DNA, 30 bp, Artificial Sequence
  Synthetic oligonucleotide
agatgctcacaaggtgtactcaagatgggt

SEQ ID NO: 280126 - DNA, 30 bp, Artificial Sequence
  Synthetic oligonucleotide
tacgcccggagcgaggtttagaggatgggt

SEQ ID NO: 280127 - DNA, 30 bp, Artificial Sequence
  Synthetic oligonucleotide
gtagcccggcataccaaatagcttatgggt

SEQ ID NO: 280128 - DNA, 30 bp, Artificial Sequence
  Synthetic oligonucleotide
aggttaaacacttcaacacgttaactgggt

SEQ ID NO: 280129 - DNA, 30 bp, Artificial Sequence
  Synthetic oligonucleotide
gcctattagaaaagcagagacgcactgggt

SEQ ID NO: 280130 - DNA, 30 bp, Artificial Sequence
  Synthetic oligonucleotide
cgacttccggcactgaacggttgcctgggt

SEQ ID NO: 280131 - DNA, 30 bp, Artificial Sequence
  Synthetic oligonucleotide
gtgacaaccttgggaaattgtgtgctgggt

SEQ ID NO: 280132 - DNA, 30 bp, Artificial Sequence
  Synthetic oligonucleotide
atagggcggtacctgtagtgttcagtgggt

SEQ ID NO: 280133 - DNA, 30 bp, Artificial Sequence
  Synthetic oligonucleotide
tgctattacccattttttggccacgtgggt

SEQ ID NO: 280134 - DNA, 30 bp, Artificial Sequence
  Synthetic oligonucleotide
actgctccaaatttagtattaatcgtgggt

SEQ ID NO: 280135 - DNA, 30 bp, Artificial Sequence
  Synthetic oligonucleotide
tggaacagccctatagtaccatcggtgggt

SEQ ID NO: 280136 - DNA, 30 bp, Artificial Sequence
  Synthetic oligonucleotide
tgggggaatcgacgctgtagacgggtgggt

SEQ ID NO: 280137 - DNA, 30 bp, Artificial Sequence
  Synthetic oligonucleotide
gtcacgcatcgaaggaatcttcctgtgggt

SEQ ID NO: 280138 - DNA, 30 bp, Artificial Sequence
  Synthetic oligonucleotide
gccccagatcttggcggaagcggtgtgggt

SEQ ID NO: 280139 - DNA, 30 bp, Artificial Sequence
  Synthetic oligonucleotide
ttacacggggaatagtagccgatattgggt

SEQ ID NO: 280140 - DNA, 30 bp, Artificial Sequence
  Synthetic oligonucleotide
gcgttcaaagtagcgcgaaagcccttgggt

SEQ ID NO: 280141 - DNA, 30 bp, Artificial Sequence
  Synthetic oligonucleotide
gggtcagagtccaggccttactccttgggt

SEQ ID NO: 280142 - DNA, 30 bp, Artificial Sequence
  Synthetic oligonucleotide
ctacaaggcatccgggcgttgcggttgggt

SEQ ID NO: 280143 - DNA, 30 bp, Artificial Sequence
  Synthetic oligonucleotide
aattacaacggagtaaagaggcatttgggt

SEQ ID NO: 280144 - DNA, 30 bp, Artificial Sequence
  Synthetic oligonucleotide
agcgaaacccgattccagtcggatttgggt

SEQ ID NO: 280145 - DNA, 30 bp, Artificial Sequence
  Synthetic oligonucleotide
cgttttatcatgggctaagagcttttgggt

SEQ ID NO: 280146 - DNA, 30 bp, Artificial Sequence
  Synthetic oligonucleotide
gcgaggattttaattcgggcaagaaatggt

SEQ ID NO: 280147 - DNA, 30 bp, Artificial Sequence
  Synthetic oligonucleotide
acatctctcctttagtactaagacaatggt

SEQ ID NO: 280148 - DNA, 30 bp, Artificial Sequence
  Synthetic oligonucleotide
cacgttgtgcaaggcatagtatacaatggt

SEQ ID NO: 280149 - DNA, 30 bp, Artificial Sequence
  Synthetic oligonucleotide
atccggcgaagttcggggtgggagaatggt

SEQ ID NO: 280150 - DNA, 30 bp, Artificial Sequence
  Synthetic oligonucleotide
gcttgcgctaatagggatttgctgaatggt

SEQ ID NO: 280151 - DNA, 30 bp, Artificial Sequence
  Synthetic oligonucleotide
gccataatcctcctccgtcatgataatggt

SEQ ID NO: 280152 - DNA, 30 bp, Artificial Sequence
  Synthetic oligonucleotide
ctcaaggccttgctccgttggggtaatggt

SEQ ID NO: 280153 - DNA, 30 bp, Artificial Sequence
  Synthetic oligonucleotide
ctcaccgggactatagagcgccaacatggt

SEQ ID NO: 280154 - DNA, 30 bp, Artificial Sequence
  Synthetic oligonucleotide
aagtttagggcggttggccaagcacatggt

SEQ ID NO: 280155 - DNA, 30 bp, Artificial Sequence
  Synthetic oligonucleotide
atgagacgggatgagttctgatgacatggt

SEQ ID NO: 280156 - DNA, 30 bp, Artificial Sequence
  Synthetic oligonucleotide
acttaatccagcgcactttcctgacatggt

SEQ ID NO: 280157 - DNA, 30 bp, Artificial Sequence
  Synthetic oligonucleotide
acttgaacggttagtacacataaccatggt

SEQ ID NO: 280158 - DNA, 30 bp, Artificial Sequence
  Synthetic oligonucleotide
tgcttaccaacgatgtttccgctgcatggt

SEQ ID NO: 280159 - DNA, 30 bp, Artificial Sequence
  Synthetic oligonucleotide
gatccccgagggattggttggggtcatggt

SEQ ID NO: 280160 - DNA, 30 bp, Artificial Sequence
  Synthetic oligonucleotide
cgtgaaattccgaaccggtcttaagatggt

SEQ ID NO: 280161 - DNA, 30 bp, Artificial Sequence
  Synthetic oligonucleotide
aggcgataagtaagcttctcctgagatggt

SEQ ID NO: 280162 - DNA, 30 bp, Artificial Sequence
  Synthetic oligonucleotide
tccatgcgatgttgattgaaagtagatggt

SEQ ID NO: 280163 - DNA, 30 bp, Artificial Sequence
  Synthetic oligonucleotide
ttatgtatataatagatcagcttagatggt

SEQ ID NO: 280164 - DNA, 30 bp, Artificial Sequence
  Synthetic oligonucleotide
tcatccagatattggtcacacgtcgatggt

SEQ ID NO: 280165 - DNA, 30 bp, Artificial Sequence
  Synthetic oligonucleotide
gtcatacgaattgatactcgtcttgatggt

SEQ ID NO: 280166 - DNA, 30 bp, Artificial Sequence
  Synthetic oligonucleotide
agtaaaagcacggggtgctaacaatatggt

SEQ ID NO: 280167 - DNA, 30 bp, Artificial Sequence
  Synthetic oligonucleotide
tgagaagttgtaggtcgttagacatatggt

SEQ ID NO: 280168 - DNA, 30 bp, Artificial Sequence
  Synthetic oligonucleotide
tcctggcctttgatcggttcagtatatggt

SEQ ID NO: 280169 - DNA, 30 bp, Artificial Sequence
  Synthetic oligonucleotide
ggtggtcgtgatgagccagccaactatggt

SEQ ID NO: 280170 - DNA, 30 bp, Artificial Sequence
  Synthetic oligonucleotide
ccagaccttaagtgcataggtcactatggt

SEQ ID NO: 280171 - DNA, 30 bp, Artificial Sequence
  Synthetic oligonucleotide
cggcttgcgcactaagacgttctctatggt

SEQ ID NO: 280172 - DNA, 30 bp, Artificial Sequence
  Synthetic oligonucleotide
ccaagctatgacctgctaaccgtctatggt

SEQ ID NO: 280173 - DNA, 30 bp, Artificial Sequence
  Synthetic oligonucleotide
cgaaccacaggtgtagtcactccgtatggt

SEQ ID NO: 280174 - DNA, 30 bp, Artificial Sequence
  Synthetic oligonucleotide
ctaataagaacgtcaatttttacttatggt

SEQ ID NO: 280175 - DNA, 30 bp, Artificial Sequence
  Synthetic oligonucleotide
gagggagcgtgatacaatgtgccttatggt

SEQ ID NO: 280176 - DNA, 30 bp, Artificial Sequence
  Synthetic oligonucleotide
cacaatcccccaccaccacgacgttatggt

SEQ ID NO: 280177 - DNA, 30 bp, Artificial Sequence
  Synthetic oligonucleotide
tatagggcaattctcccgacattcactggt

SEQ ID NO: 280178 - DNA, 30 bp, Artificial Sequence
  Synthetic oligonucleotide
gctataaggactgcgggactgcagactggt

SEQ ID NO: 280179 - DNA, 30 bp, Artificial Sequence
  Synthetic oligonucleotide
gactccgaaggttaaatctgctagactggt

SEQ ID NO: 280180 - DNA, 30 bp, Artificial Sequence
  Synthetic oligonucleotide
gccgcgattacaggcatcccgaggactggt

SEQ ID NO: 280181 - DNA, 30 bp, Artificial Sequence
  Synthetic oligonucleotide
cggttagatcgacaagcgcccgctactggt

SEQ ID NO: 280182 - DNA, 30 bp, Artificial Sequence
  Synthetic oligonucleotide
aagtcattccaacgataagagggtactggt

SEQ ID NO: 280183 - DNA, 30 bp, Artificial Sequence
  Synthetic oligonucleotide
tgtagcaaactaccgtacggaacacctggt

SEQ ID NO: 280184 - DNA, 31 bp, Artificial Sequence
  Synthetic oligonucleotide
acacgcgcgtaatccgtgtgatggacctggt

SEQ ID NO: 280185 - DNA, 30 bp, Artificial Sequence
  Synthetic oligonucleotide
tataggtctcatacacgactgaaagctggt

SEQ ID NO: 280186 - DNA, 30 bp, Artificial Sequence
  Synthetic oligonucleotide
gtaagaccggtctgaggcaatatcgctggt

SEQ ID NO: 280187 - DNA, 30 bp, Artificial Sequence
  Synthetic oligonucleotide
ctgaggcactattgccgtacaatggctggt

SEQ ID NO: 280188 - DNA, 30 bp, Artificial Sequence
  Synthetic oligonucleotide
gtttgaaagctcataggctagtttgctggt

SEQ ID NO: 280189 - DNA, 30 bp, Artificial Sequence
  Synthetic oligonucleotide
catgggtgataaaccctaagttcatctggt

SEQ ID NO: 280190 - DNA, 30 bp, Artificial Sequence
  Synthetic oligonucleotide
tacatacgcactttggacatattatctggt

SEQ ID NO: 280191 - DNA, 30 bp, Artificial Sequence
  Synthetic oligonucleotide
aagggctgtatagacagagcacgttctggt

SEQ ID NO: 280192 - DNA, 30 bp, Artificial Sequence
  Synthetic oligonucleotide
tcaaaaggccgcgcgtcttgtggaagtggt

SEQ ID NO: 280193 - DNA, 30 bp, Artificial Sequence
  Synthetic oligonucleotide
tcctaaaatttagttagttttctaagtggt

SEQ ID NO: 280194 - DNA, 30 bp, Artificial Sequence
  Synthetic oligonucleotide
agcgacgcgtcactagtactggtaagtggt

SEQ ID NO: 280195 - DNA, 30 bp, Artificial Sequence
  Synthetic oligonucleotide
attgcgaggtcggacttagcatccagtggt

SEQ ID NO: 280196 - DNA, 30 bp, Artificial Sequence
  Synthetic oligonucleotide
atgtttgtaaaaccaatgatgaagagtggt

SEQ ID NO: 280197 - DNA, 30 bp, Artificial Sequence
  Synthetic oligonucleotide
tatcttcgtgtcaggtgctatgggagtggt

SEQ ID NO: 280198 - DNA, 30 bp, Artificial Sequence
  Synthetic oligonucleotide
gagttcctcatggccgatgtgaatagtggt

SEQ ID NO: 280199 - DNA, 30 bp, Artificial Sequence
  Synthetic oligonucleotide
atatcgctcaccattccatggacacgtggt

SEQ ID NO: 280200 - DNA, 30 bp, Artificial Sequence
  Synthetic oligonucleotide
caagtagacacatttgggcccgcgcgtggt

SEQ ID NO: 280201 - DNA, 30 bp, Artificial Sequence
  Synthetic oligonucleotide
ggggtcgtcatcagtaataagtgaggtggt

SEQ ID NO: 280202 - DNA, 30 bp, Artificial Sequence
  Synthetic oligonucleotide
tctatgtggtcttaggactaggccggtggt

SEQ ID NO: 280203 - DNA, 30 bp, Artificial Sequence
  Synthetic oligonucleotide
acgataagtgctaagcttattcgcggtggt

SEQ ID NO: 280204 - DNA, 30 bp, Artificial Sequence
  Synthetic oligonucleotide
gctgggcccgaaaagattgtatcgggtggt

SEQ ID NO: 280205 - DNA, 30 bp, Artificial Sequence
  Synthetic oligonucleotide
ctgacaggatgaggttgacgtaggggtggt

SEQ ID NO: 280206 - DNA, 30 bp, Artificial Sequence
  Synthetic oligonucleotide
acccatccagtcaatcggggtatgggtggt

SEQ ID NO: 280207 - DNA, 30 bp, Artificial Sequence
  Synthetic oligonucleotide
tgttgggaggcgaacgcacgaagtggtggt

SEQ ID NO: 280208 - DNA, 30 bp, Artificial Sequence
  Synthetic oligonucleotide
ggttccggaaacttcccgcgatttggtggt

SEQ ID NO: 280209 - DNA, 30 bp, Artificial Sequence
  Synthetic oligonucleotide
gcatctttcgtttggtttcgtacgtgtggt

SEQ ID NO: 280210 - DNA, 30 bp, Artificial Sequence
  Synthetic oligonucleotide
gcattcgagggttgaatggagttgtgtggt

SEQ ID NO: 280211 - DNA, 30 bp, Artificial Sequence
  Synthetic oligonucleotide
aacgccgtcgtgggaccgtctcgttgtggt

SEQ ID NO: 280212 - DNA, 30 bp, Artificial Sequence
  Synthetic oligonucleotide
atgctattcgtaacgggggataatattggt

SEQ ID NO: 280213 - DNA, 30 bp, Artificial Sequence
  Synthetic oligonucleotide
atcgagtggtagtcgcactcccatattggt

SEQ ID NO: 280214 - DNA, 30 bp, Artificial Sequence
  Synthetic oligonucleotide
acaaacacgttagccatgtggagccttggt

SEQ ID NO: 280215 - DNA, 30 bp, Artificial Sequence
  Synthetic oligonucleotide
gtgagatatgagagaaacatcctgcttggt

SEQ ID NO: 280216 - DNA, 30 bp, Artificial Sequence
  Synthetic oligonucleotide
tgcctcgacttgaaatatatccatcttggt

SEQ ID NO: 280217 - DNA, 30 bp, Artificial Sequence
  Synthetic oligonucleotide
ccacacgagattatatcgcgttatcttggt

SEQ ID NO: 280218 - DNA, 30 bp, Artificial Sequence
  Synthetic oligonucleotide
ggctggacgacagagatgttagcagttggt

SEQ ID NO: 280219 - DNA, 30 bp, Artificial Sequence
  Synthetic oligonucleotide
ggacagtccgtggccaaggggtcagttggt

SEQ ID NO: 280220 - DNA, 30 bp, Artificial Sequence
  Synthetic oligonucleotide
gataccctacagagttagatgcgggttggt

SEQ ID NO: 280221 - DNA, 30 bp, Artificial Sequence
  Synthetic oligonucleotide
gagaccgatggataatacaaaatggttggt

SEQ ID NO: 280222 - DNA, 30 bp, Artificial Sequence
  Synthetic oligonucleotide
agatatatttgtcttagcgaacatgttggt

SEQ ID NO: 280223 - DNA, 30 bp, Artificial Sequence
  Synthetic oligonucleotide
tgtatgctacatgctaaagggacatttggt

SEQ ID NO: 280224 - DNA, 30 bp, Artificial Sequence
  Synthetic oligonucleotide
gcaagtgggagataatattttatctttggt

SEQ ID NO: 280225 - DNA, 30 bp, Artificial Sequence
  Synthetic oligonucleotide
gtaggctaggtcatgtttacgaagtttggt

SEQ ID NO: 280226 - DNA, 30 bp, Artificial Sequence
  Synthetic oligonucleotide
ggccgaaaacgtactcttgcaacgtttggt

SEQ ID NO: 280227 - DNA, 30 bp, Artificial Sequence
  Synthetic oligonucleotide
acggtcaagtaaaccccacttgcgtttggt

SEQ ID NO: 280228 - DNA, 30 bp, Artificial Sequence
  Synthetic oligonucleotide
gcgcagtcccctaatgagcagtggtttggt

SEQ ID NO: 280229 - DNA, 30 bp, Artificial Sequence
  Synthetic oligonucleotide
caaactgacggcacttgagatccttttggt

SEQ ID NO: 280230 - DNA, 30 bp, Artificial Sequence
  Synthetic oligonucleotide
gagcttgacagcatcttctactcaaaatgt

SEQ ID NO: 280231 - DNA, 30 bp, Artificial Sequence
  Synthetic oligonucleotide
gtattaggctgccgaagtatcagaaaatgt

SEQ ID NO: 280232 - DNA, 30 bp, Artificial Sequence
  Synthetic oligonucleotide
ggcgaggttccgtgattgaagcacaaatgt

SEQ ID NO: 280233 - DNA, 30 bp, Artificial Sequence
  Synthetic oligonucleotide
accgtgagcaggacttattttgacaaatgt

SEQ ID NO: 280234 - DNA, 30 bp, Artificial Sequence
  Synthetic oligonucleotide
caaaagttgtataaattatgatccaaatgt

SEQ ID NO: 280235 - DNA, 30 bp, Artificial Sequence
  Synthetic oligonucleotide
gtgtcactgaagactagggttggcaaatgt

SEQ ID NO: 280236 - DNA, 30 bp, Artificial Sequence
  Synthetic oligonucleotide
ctaaatatactcgtctttgtaaagaaatgt

SEQ ID NO: 280237 - DNA, 30 bp, Artificial Sequence
  Synthetic oligonucleotide
gaggccaatgtcttacgttctatacaatgt

SEQ ID NO: 280238 - DNA, 30 bp, Artificial Sequence
  Synthetic oligonucleotide
gcaggtagtgatgtcatgaattaccaatgt

SEQ ID NO: 280239 - DNA, 30 bp, Artificial Sequence
  Synthetic oligonucleotide
ggtttaggagtcagttccaggcgccaatgt

SEQ ID NO: 280240 - DNA, 30 bp, Artificial Sequence
  Synthetic oligonucleotide
gccgcttcagggtatgggcgttgccaatgt

SEQ ID NO: 280241 - DNA, 30 bp, Artificial Sequence
  Synthetic oligonucleotide
ttggtttagagcaccaattgagagcaatgt

SEQ ID NO: 280242 - DNA, 30 bp, Artificial Sequence
  Synthetic oligonucleotide
ccacttgaaatgactaatttcgagcaatgt

SEQ ID NO: 280243 - DNA, 30 bp, Artificial Sequence
  Synthetic oligonucleotide
caatgaacgccaaaaatgcaatcgcaatgt

SEQ ID NO: 280244 - DNA, 30 bp, Artificial Sequence
  Synthetic oligonucleotide
ccagttttcagaggacctcaagggcaatgt

SEQ ID NO: 280245 - DNA, 30 bp, Artificial Sequence
  Synthetic oligonucleotide
gttctataactgaatatttcgttgcaatgt

SEQ ID NO: 280246 - DNA, 30 bp, Artificial Sequence
  Synthetic oligonucleotide
gaaattagtccaaccaggacgcgagaatgt

SEQ ID NO: 280247 - DNA, 30 bp, Artificial Sequence
  Synthetic oligonucleotide
gttgcatccggtagatttgggaaggaatgt

SEQ ID NO: 280248 - DNA, 30 bp, Artificial Sequence
  Synthetic oligonucleotide
gtataacgggggaaggacttccgtgaatgt

SEQ ID NO: 280249 - DNA, 30 bp, Artificial Sequence
  Synthetic oligonucleotide
ggctccctatccaccacgatatttgaatgt

SEQ ID NO: 280250 - DNA, 30 bp, Artificial Sequence
  Synthetic oligonucleotide
aaacgggctctgtcgggcgactcctaatgt

SEQ ID NO: 280251 - DNA, 30 bp, Artificial Sequence
  Synthetic oligonucleotide
tcttgtcctacatatccgtggcgctaatgt

SEQ ID NO: 280252 - DNA, 30 bp, Artificial Sequence
  Synthetic oligonucleotide
cactaacttttcttatatctgatctaatgt

SEQ ID NO: 280253 - DNA, 30 bp, Artificial Sequence
  Synthetic oligonucleotide
ccacgcgattggacctcgaaaccaacatgt

SEQ ID NO: 280254 - DNA, 30 bp, Artificial Sequence
  Synthetic oligonucleotide
gcctaagaagggccccccttcctaacatgt

SEQ ID NO: 280255 - DNA, 30 bp, Artificial Sequence
  Synthetic oligonucleotide
acgaagttttcctcgcgtagggccacatgt

SEQ ID NO: 280256 - DNA, 27 bp, Artificial Sequence
  Synthetic oligonucleotide
gaagagccgcaaggcacacgcacatgt

SEQ ID NO: 280257 - DNA, 30 bp, Artificial Sequence
  Synthetic oligonucleotide
cctgaccgagcttaacaaaggggcacatgt

SEQ ID NO: 280258 - DNA, 30 bp, Artificial Sequence
  Synthetic oligonucleotide
agtacataggggtcaacgcgtcctacatgt

SEQ ID NO: 280259 - DNA, 30 bp, Artificial Sequence
  Synthetic oligonucleotide
agatcctgtcacggctcacggccaccatgt

SEQ ID NO: 280260 - DNA, 30 bp, Artificial Sequence
  Synthetic oligonucleotide
gtcaccaaaaagcacgcccctcgaccatgt

SEQ ID NO: 280261 - DNA, 30 bp, Artificial Sequence
  Synthetic oligonucleotide
tatgagcgcgtagttaagactgtaccatgt

SEQ ID NO: 280262 - DNA, 30 bp, Artificial Sequence
  Synthetic oligonucleotide
ttatgatggcgtagcttttgcaggccatgt

SEQ ID NO: 280263 - DNA, 30 bp, Artificial Sequence
  Synthetic oligonucleotide
tatgtcagactcattttcgtcgggccatgt

SEQ ID NO: 280264 - DNA, 30 bp, Artificial Sequence
  Synthetic oligonucleotide
tcagtgagacagtgaccaccgttcgcatgt

SEQ ID NO: 280265 - DNA, 30 bp, Artificial Sequence
  Synthetic oligonucleotide
cggccgacattgtgggcgggatgggcatgt

SEQ ID NO: 280266 - DNA, 30 bp, Artificial Sequence
  Synthetic oligonucleotide
cccttgaccgagttacgacccaaatcatgt

SEQ ID NO: 280267 - DNA, 30 bp, Artificial Sequence
  Synthetic oligonucleotide
ctccacggaccggctcgacaagcatcatgt

SEQ ID NO: 280268 - DNA, 30 bp, Artificial Sequence
  Synthetic oligonucleotide
gcacgctatttagtcgagatatcatcatgt

SEQ ID NO: 280269 - DNA, 30 bp, Artificial Sequence
  Synthetic oligonucleotide
agatgacctactacatgtgtctgctcatgt

SEQ ID NO: 280270 - DNA, 30 bp, Artificial Sequence
  Synthetic oligonucleotide
ctgtgctggcgagcggatgctatctcatgt

SEQ ID NO: 280271 - DNA, 30 bp, Artificial Sequence
  Synthetic oligonucleotide
gggaagaggaataccaattatgtttcatgt

SEQ ID NO: 280272 - DNA, 30 bp, Artificial Sequence
  Synthetic oligonucleotide
tgggagtgattgcctcgcccagccagatgt

SEQ ID NO: 280273 - DNA, 30 bp, Artificial Sequence
  Synthetic oligonucleotide
tatctgcgcgaggctgattagcggagatgt

SEQ ID NO: 280274 - DNA, 30 bp, Artificial Sequence
  Synthetic oligonucleotide
tactcataggggtacctaaatgtccgatgt

SEQ ID NO: 280275 - DNA, 30 bp, Artificial Sequence
  Synthetic oligonucleotide
gccctatcgcatcgcgaattggagcgatgt

SEQ ID NO: 280276 - DNA, 30 bp, Artificial Sequence
  Synthetic oligonucleotide
ctacgacttctaatgcgaatgcatcgatgt

SEQ ID NO: 280277 - DNA, 30 bp, Artificial Sequence
  Synthetic oligonucleotide
atttgcgcatgttgcgagatgctaggatgt

SEQ ID NO: 280278 - DNA, 30 bp, Artificial Sequence
  Synthetic oligonucleotide
tttcctaggaaataccaagcgcacggatgt

SEQ ID NO: 280279 - DNA, 30 bp, Artificial Sequence
  Synthetic oligonucleotide
tgaagggtagcgcagaggaatgtcggatgt

SEQ ID NO: 280280 - DNA, 30 bp, Artificial Sequence
  Synthetic oligonucleotide
cccccaggctggggtagtcgagagggatgt

SEQ ID NO: 280281 - DNA, 30 bp, Artificial Sequence
  Synthetic oligonucleotide
taccgaagcgttaaacagcgtatgggatgt

SEQ ID NO: 280282 - DNA, 30 bp, Artificial Sequence
  Synthetic oligonucleotide
ttagacaatttgttgaagacacgtggatgt

SEQ ID NO: 280283 - DNA, 30 bp, Artificial Sequence
  Synthetic oligonucleotide
gcggtacgcggatcataaatcgttggatgt

SEQ ID NO: 280284 - DNA, 30 bp, Artificial Sequence
  Synthetic oligonucleotide
ggtttgggtggatcatgacgaaattgatgt

SEQ ID NO: 280285 - DNA, 30 bp, Artificial Sequence
  Synthetic oligonucleotide
gccttcaaagtgatcgtagacatttgatgt

SEQ ID NO: 280286 - DNA, 30 bp, Artificial Sequence
  Synthetic oligonucleotide
ggtgaccggcaattttcatttatttgatgt

SEQ ID NO: 280287 - DNA, 30 bp, Artificial Sequence
  Synthetic oligonucleotide
ttaaacccgaacactccctgcccaatatgt

SEQ ID NO: 280288 - DNA, 30 bp, Artificial Sequence
  Synthetic oligonucleotide
gcgttttaagcgcgcagggaaagaatatgt

SEQ ID NO: 280289 - DNA, 30 bp, Artificial Sequence
  Synthetic oligonucleotide
ggaaaacgcttaataatattacgaatatgt

SEQ ID NO: 280290 - DNA, 30 bp, Artificial Sequence
  Synthetic oligonucleotide
accgctaggcggcacaagtgggtcatatgt

SEQ ID NO: 280291 - DNA, 30 bp, Artificial Sequence
  Synthetic oligonucleotide
tgggggtcaattggtctgtcggagatatgt

SEQ ID NO: 280292 - DNA, 30 bp, Artificial Sequence
  Synthetic oligonucleotide
atcgtcgaacgtgttagtagcttgatatgt

SEQ ID NO: 280293 - DNA, 30 bp, Artificial Sequence
  Synthetic oligonucleotide
taacctgaacagtgggggaaaattatatgt

SEQ ID NO: 280294 - DNA, 30 bp, Artificial Sequence
  Synthetic oligonucleotide
gacaacacctttaggtatgcaacagtatgt

SEQ ID NO: 280295 - DNA, 30 bp, Artificial Sequence
  Synthetic oligonucleotide
cctgtaaagcactgcaccaagcccgtatgt

SEQ ID NO: 280296 - DNA, 30 bp, Artificial Sequence
  Synthetic oligonucleotide
ctactagtgccaagtacgggcagcgtatgt

SEQ ID NO: 280297 - DNA, 29 bp, Artificial Sequence
  Synthetic oligonucleotide
gatgctgtatggccagctcgaaggtatgt

SEQ ID NO: 280298 - DNA, 30 bp, Artificial Sequence
  Synthetic oligonucleotide
cattgaccctacaaagttcagggtgtatgt

SEQ ID NO: 280299 - DNA, 30 bp, Artificial Sequence
  Synthetic oligonucleotide
aatactcttaaatgctcgtacaaattatgt

SEQ ID NO: 280300 - DNA, 30 bp, Artificial Sequence
  Synthetic oligonucleotide
cacgaaattaagacctgagggtccttatgt

SEQ ID NO: 280301 - DNA, 30 bp, Artificial Sequence
  Synthetic oligonucleotide
aaactccagtcttggtatttagcgttatgt

SEQ ID NO: 280302 - DNA, 30 bp, Artificial Sequence
  Synthetic oligonucleotide
agggggcagccaccctttagcgcgttatgt

SEQ ID NO: 280303 - DNA, 30 bp, Artificial Sequence
  Synthetic oligonucleotide
taagcggcacagtgagcacatgttttatgt

SEQ ID NO: 280304 - DNA, 30 bp, Artificial Sequence
  Synthetic oligonucleotide
tcaagagcaacaacgaagttttaaaactgt

SEQ ID NO: 280305 - DNA, 30 bp, Artificial Sequence
  Synthetic oligonucleotide
ttcacgtcggcccgcaatcaattaaactgt

SEQ ID NO: 280306 - DNA, 30 bp, Artificial Sequence
  Synthetic oligonucleotide
ttgtgcgagaaatcgaaatcaaccaactgt

SEQ ID NO: 280307 - DNA, 30 bp, Artificial Sequence
  Synthetic oligonucleotide
cgccctgccaacggcatcttgacgaactgt

SEQ ID NO: 280308 - DNA, 30 bp, Artificial Sequence
  Synthetic oligonucleotide
cgcctcactccaatagtctgtccgaactgt

SEQ ID NO: 280309 - DNA, 30 bp, Artificial Sequence
  Synthetic oligonucleotide
tccaaagacgtgtaggcctggcgtaactgt

SEQ ID NO: 280310 - DNA, 30 bp, Artificial Sequence
  Synthetic oligonucleotide
ttcgcagtctttgcccacaacgcacactgt

SEQ ID NO: 280311 - DNA, 30 bp, Artificial Sequence
  Synthetic oligonucleotide
gaggggccttagctatcccagttacactgt

SEQ ID NO: 280312 - DNA, 30 bp, Artificial Sequence
  Synthetic oligonucleotide
aacaacttattggtccggcacacccactgt

SEQ ID NO: 280313 - DNA, 30 bp, Artificial Sequence
  Synthetic oligonucleotide
tgcctaacgcttcgccgggattctcactgt

SEQ ID NO: 280314 - DNA, 30 bp, Artificial Sequence
  Synthetic oligonucleotide
atcctctgaatgcagggggttagtcactgt

SEQ ID NO: 280315 - DNA, 30 bp, Artificial Sequence
  Synthetic oligonucleotide
agattggctttcgtgattctcaaggactgt

SEQ ID NO: 280316 - DNA, 30 bp, Artificial Sequence
  Synthetic oligonucleotide
ggtagaacgagcaattcccgatgggactgt

SEQ ID NO: 280317 - DNA, 30 bp, Artificial Sequence
  Synthetic oligonucleotide
aaattcgtggctcaaattcgggtatactgt

SEQ ID NO: 280318 - DNA, 30 bp, Artificial Sequence
  Synthetic oligonucleotide
gtatcttgccatctaccaaatgtgtactgt

SEQ ID NO: 280319 - DNA, 30 bp, Artificial Sequence
  Synthetic oligonucleotide
gctcagaagcaaaacctagcctgttactgt

SEQ ID NO: 280320 - DNA, 30 bp, Artificial Sequence
  Synthetic oligonucleotide
ggtctaccacataaaacatcaacaacctgt

SEQ ID NO: 280321 - DNA, 30 bp, Artificial Sequence
  Synthetic oligonucleotide
caaagttagcgcacggcaacgataacctgt

SEQ ID NO: 280322 - DNA, 30 bp, Artificial Sequence
  Synthetic oligonucleotide
actagtaagaacatgttgggaaacacctgt

SEQ ID NO: 280323 - DNA, 30 bp, Artificial Sequence
  Synthetic oligonucleotide
ttacggtagggtctcaaaggctatacctgt

SEQ ID NO: 280324 - DNA, 30 bp, Artificial Sequence
  Synthetic oligonucleotide
ttagaaggccacttcctagaaactacctgt

SEQ ID NO: 280325 - DNA, 30 bp, Artificial Sequence
  Synthetic oligonucleotide
acgagtcatcaggtcacatccctaccctgt

SEQ ID NO: 280326 - DNA, 30 bp, Artificial Sequence
  Synthetic oligonucleotide
cgacactgacacccagagtggttcccctgt

SEQ ID NO: 280327 - DNA, 30 bp, Artificial Sequence
  Synthetic oligonucleotide
agactagaacctcatggtcgttcgccctgt

SEQ ID NO: 280328 - DNA, 30 bp, Artificial Sequence
  Synthetic oligonucleotide
cgctagttacagaaggaatacaggccctgt

SEQ ID NO: 280329 - DNA, 30 bp, Artificial Sequence
  Synthetic oligonucleotide
taaaaagtatggtcgagccgcctcgcctgt

SEQ ID NO: 280330 - DNA, 30 bp, Artificial Sequence
  Synthetic oligonucleotide
gcgcttgcataaaccgatgctcgggcctgt

SEQ ID NO: 280331 - DNA, 30 bp, Artificial Sequence
  Synthetic oligonucleotide
agactgatcgtagtcctgaagtgggcctgt

SEQ ID NO: 280332 - DNA, 30 bp, Artificial Sequence
  Synthetic oligonucleotide
tttgcaaaacaatagagagcgtgtgcctgt

SEQ ID NO: 280333 - DNA, 30 bp, Artificial Sequence
  Synthetic oligonucleotide
gcgctggcgaatgggctataagcatcctgt

SEQ ID NO: 280334 - DNA, 30 bp, Artificial Sequence
  Synthetic oligonucleotide
cgtgagatgaataagacgggtcactcctgt

SEQ ID NO: 280335 - DNA, 30 bp, Artificial Sequence
  Synthetic oligonucleotide
acaagtgtaaagtgtaagggactctcctgt

SEQ ID NO: 280336 - DNA, 31 bp, Artificial Sequence
  Synthetic oligonucleotide
ggccttaacaggtcagcaatagaagtcctgt

SEQ ID NO: 280337 - DNA, 30 bp, Artificial Sequence
  Synthetic oligonucleotide
atagaaggtccacgggcaaccaattcctgt

SEQ ID NO: 280338 - DNA, 30 bp, Artificial Sequence
  Synthetic oligonucleotide
aaatggcagtcttttcctgaagtaagctgt

SEQ ID NO: 280339 - DNA, 30 bp, Artificial Sequence
  Synthetic oligonucleotide
acgaccaacagtggattgttgcacagctgt

SEQ ID NO: 280340 - DNA, 30 bp, Artificial Sequence
  Synthetic oligonucleotide
ccggctccatgcaggtgaaagagcagctgt

SEQ ID NO: 280341 - DNA, 30 bp, Artificial Sequence
  Synthetic oligonucleotide
cggaagcatatccagggctgtcggagctgt

SEQ ID NO: 280342 - DNA, 30 bp, Artificial Sequence
  Synthetic oligonucleotide
tcgcagccaaataacatatcgctgagctgt

SEQ ID NO: 280343 - DNA, 30 bp, Artificial Sequence
  Synthetic oligonucleotide
gtgatatcctaaggaagggtgaaacgctgt

SEQ ID NO: 280344 - DNA, 30 bp, Artificial Sequence
  Synthetic oligonucleotide
gcaagacattctccaattaacaggcgctgt

SEQ ID NO: 280345 - DNA, 30 bp, Artificial Sequence
  Synthetic oligonucleotide
ggtgccaatgttgctgataactctcgctgt

SEQ ID NO: 280346 - DNA, 30 bp, Artificial Sequence
  Synthetic oligonucleotide
gactggccccatggcctgatgtaaggctgt

SEQ ID NO: 280347 - DNA, 30 bp, Artificial Sequence
  Synthetic oligonucleotide
ttgaggtcaaaacttggaagagcgggctgt

SEQ ID NO: 280348 - DNA, 30 bp, Artificial Sequence
  Synthetic oligonucleotide
aaatttaatatgtaagggagtcggggctgt

SEQ ID NO: 280349 - DNA, 30 bp, Artificial Sequence
  Synthetic oligonucleotide
actatgtggtggggtctaccaaatggctgt

SEQ ID NO: 280350 - DNA, 30 bp, Artificial Sequence
  Synthetic oligonucleotide
aagtgaggtcgttgacgacggtgtggctgt

SEQ ID NO: 280351 - DNA, 30 bp, Artificial Sequence
  Synthetic oligonucleotide
tcaatccctctgccaagggccccatgctgt

SEQ ID NO: 280352 - DNA, 30 bp, Artificial Sequence
  Synthetic oligonucleotide
tcatgaactcgctgggactgcttctgctgt

SEQ ID NO: 280353 - DNA, 30 bp, Artificial Sequence
  Synthetic oligonucleotide
ttaatactaggtagctattgcgagtgctgt

SEQ ID NO: 280354 - DNA, 30 bp, Artificial Sequence
  Synthetic oligonucleotide
aacaagtcacgcgataagcggatgtgctgt

SEQ ID NO: 280355 - DNA, 30 bp, Artificial Sequence
  Synthetic oligonucleotide
gctaccacagaagagcagcgatcaatctgt

SEQ ID NO: 280356 - DNA, 30 bp, Artificial Sequence
  Synthetic oligonucleotide
gcatgtctacaactatgaggcttaatctgt

SEQ ID NO: 280357 - DNA, 30 bp, Artificial Sequence
  Synthetic oligonucleotide
ccgtccttatctcatggtggaccgatctgt

SEQ ID NO: 280358 - DNA, 30 bp, Artificial Sequence
  Synthetic oligonucleotide
aagctccaagaagtcgcttcgtacctctgt

SEQ ID NO: 280359 - DNA, 30 bp, Artificial Sequence
  Synthetic oligonucleotide
gaggaatcataacggaaattttggctctgt

SEQ ID NO: 280360 - DNA, 30 bp, Artificial Sequence
  Synthetic oligonucleotide
gggaacagagaccgatggcacaacgtctgt

SEQ ID NO: 280361 - DNA, 30 bp, Artificial Sequence
  Synthetic oligonucleotide
tgaggactcagtgggtttaaaaaggtctgt

SEQ ID NO: 280362 - DNA, 30 bp, Artificial Sequence
  Synthetic oligonucleotide
tgacggtgtaggggatcccgtcgattctgt

SEQ ID NO: 280363 - DNA, 30 bp, Artificial Sequence
  Synthetic oligonucleotide
cacaaccgactttcagcccgcgacttctgt

SEQ ID NO: 280364 - DNA, 30 bp, Artificial Sequence
  Synthetic oligonucleotide
aacagcgcacgtgatgttcatgacttctgt

SEQ ID NO: 280365 - DNA, 30 bp, Artificial Sequence
  Synthetic oligonucleotide
tcaagcagaagctcacatataaccttctgt

SEQ ID NO: 280366 - DNA, 30 bp, Artificial Sequence
  Synthetic oligonucleotide
accaaaagcaatacatgccggagcaagtgt

SEQ ID NO: 280367 - DNA, 30 bp, Artificial Sequence
  Synthetic oligonucleotide
gggatacggccactttctcaaatcaagtgt

SEQ ID NO: 280368 - DNA, 30 bp, Artificial Sequence
  Synthetic oligonucleotide
ttgtcaggtgagctgcctttaggacagtgt

SEQ ID NO: 280369 - DNA, 30 bp, Artificial Sequence
  Synthetic oligonucleotide
gggctaggagtcgactcaggagcccagtgt

SEQ ID NO: 280370 - DNA, 30 bp, Artificial Sequence
  Synthetic oligonucleotide
gtttgggagtatagttagactgggcagtgt

SEQ ID NO: 280371 - DNA, 30 bp, Artificial Sequence
  Synthetic oligonucleotide
agtacatagagtcgatccctaaatcagtgt

SEQ ID NO: 280372 - DNA, 30 bp, Artificial Sequence
  Synthetic oligonucleotide
tattggtatgaatcgtcactagaagagtgt

SEQ ID NO: 280373 - DNA, 30 bp, Artificial Sequence
  Synthetic oligonucleotide
gaaaaggtgtaaaacacaacgaacgagtgt

SEQ ID NO: 280374 - DNA, 30 bp, Artificial Sequence
  Synthetic oligonucleotide
attgtaatgactagtataattttcgagtgt

SEQ ID NO: 280375 - DNA, 30 bp, Artificial Sequence
  Synthetic oligonucleotide
tggacacgttgagtatatcccaatgagtgt

SEQ ID NO: 280376 - DNA, 30 bp, Artificial Sequence
  Synthetic oligonucleotide
gtactgattctacagcgcgccagtgagtgt

SEQ ID NO: 280377 - DNA, 30 bp, Artificial Sequence
  Synthetic oligonucleotide
atgtcacagtactgcatgtactgtgagtgt

SEQ ID NO: 280378 - DNA, 30 bp, Artificial Sequence
  Synthetic oligonucleotide
ctgttagaaatcgttttaaagtttgagtgt

SEQ ID NO: 280379 - DNA, 30 bp, Artificial Sequence
  Synthetic oligonucleotide
aaataaatagtgtaatgtgaatggtagtgt

SEQ ID NO: 280380 - DNA, 30 bp, Artificial Sequence
  Synthetic oligonucleotide
gacatggagataaaggaggggtcttagtgt

SEQ ID NO: 280381 - DNA, 30 bp, Artificial Sequence
  Synthetic oligonucleotide
gtagccggcccgacactgtccaaaacgtgt

SEQ ID NO: 280382 - DNA, 30 bp, Artificial Sequence
  Synthetic oligonucleotide
tttcgggcgtggcggatcctgcgaacgtgt

SEQ ID NO: 280383 - DNA, 30 bp, Artificial Sequence
  Synthetic oligonucleotide
tcgtggaagttggcaaagtccgacacgtgt

SEQ ID NO: 280384 - DNA, 30 bp, Artificial Sequence
  Synthetic oligonucleotide
acctcgacgcatatgaccggaaccacgtgt

SEQ ID NO: 280385 - DNA, 30 bp, Artificial Sequence
  Synthetic oligonucleotide
agcgggttgtatgctgggatggggacgtgt

SEQ ID NO: 280386 - DNA, 30 bp, Artificial Sequence
  Synthetic oligonucleotide
aaggtatgtgaatattttgctcatacgtgt

SEQ ID NO: 280387 - DNA, 30 bp, Artificial Sequence
  Synthetic oligonucleotide
caagcagtgatgcattgaagccctacgtgt

SEQ ID NO: 280388 - DNA, 30 bp, Artificial Sequence
  Synthetic oligonucleotide
tatgatgctgactgggcagtagaaccgtgt

SEQ ID NO: 280389 - DNA, 30 bp, Artificial Sequence
  Synthetic oligonucleotide
ggagcctctgcacgctaaggataaccgtgt

SEQ ID NO: 280390 - DNA, 30 bp, Artificial Sequence
  Synthetic oligonucleotide
atcacgtagggaataatcatcgcaccgtgt

SEQ ID NO: 280391 - DNA, 30 bp, Artificial Sequence
  Synthetic oligonucleotide
gcacgcgtgggcctggggaaagtcccgtgt

SEQ ID NO: 280392 - DNA, 30 bp, Artificial Sequence
  Synthetic oligonucleotide
cacgctacgccacatccgccagatccgtgt

SEQ ID NO: 280393 - DNA, 30 bp, Artificial Sequence
  Synthetic oligonucleotide
tgtctagctgaaatgcggcaaactccgtgt

SEQ ID NO: 280394 - DNA, 30 bp, Artificial Sequence
  Synthetic oligonucleotide
acccggcatacgaagatcatacgtgcgtgt

SEQ ID NO: 280395 - DNA, 30 bp, Artificial Sequence
  Synthetic oligonucleotide
tagtccttttggagttcaccatgtgcgtgt

SEQ ID NO: 280396 - DNA, 30 bp, Artificial Sequence
  Synthetic oligonucleotide
cgaacgatcagtcgggctcacctatcgtgt

SEQ ID NO: 280397 - DNA, 30 bp, Artificial Sequence
  Synthetic oligonucleotide
caggtagactataaataactactctcgtgt

SEQ ID NO: 280398 - DNA, 30 bp, Artificial Sequence
  Synthetic oligonucleotide
ttagtgatggtacatgtctctctctcgtgt

SEQ ID NO: 280399 - DNA, 30 bp, Artificial Sequence
  Synthetic oligonucleotide
gcccgatcaaactacgtcccgccgtcgtgt

SEQ ID NO: 280400 - DNA, 30 bp, Artificial Sequence
  Synthetic oligonucleotide
ttctggagaatctacatgtttctgtcgtgt

SEQ ID NO: 280401 - DNA, 30 bp, Artificial Sequence
  Synthetic oligonucleotide
gctgacacggggtacgccaccttaaggtgt

SEQ ID NO: 280402 - DNA, 30 bp, Artificial Sequence
  Synthetic oligonucleotide
tgcttccctggaaggtgtgctatcaggtgt

SEQ ID NO: 280403 - DNA, 30 bp, Artificial Sequence
  Synthetic oligonucleotide
attaatagctgtagaaaaagtgtgaggtgt

SEQ ID NO: 280404 - DNA, 30 bp, Artificial Sequence
  Synthetic oligonucleotide
tggaaatgttataagaaagttggtaggtgt

SEQ ID NO: 280405 - DNA, 30 bp, Artificial Sequence
  Synthetic oligonucleotide
tattccaacgtgggcgcgacatgtaggtgt

SEQ ID NO: 280406 - DNA, 30 bp, Artificial Sequence
  Synthetic oligonucleotide
cgttggggtcctattcaggcgcgacggtgt

SEQ ID NO: 280407 - DNA, 30 bp, Artificial Sequence
  Synthetic oligonucleotide
ggggaatggtgtttctagcctcgccggtgt

SEQ ID NO: 280408 - DNA, 30 bp, Artificial Sequence
  Synthetic oligonucleotide
gtcatccggtgccgttgcaatttccggtgt

SEQ ID NO: 280409 - DNA, 30 bp, Artificial Sequence
  Synthetic oligonucleotide
agtaatacgtgctgatttctgttgcggtgt

SEQ ID NO: 280410 - DNA, 30 bp, Artificial Sequence
  Synthetic oligonucleotide
agcaagaagccggaattgaacgtagggtgt

SEQ ID NO: 280411 - DNA, 30 bp, Artificial Sequence
  Synthetic oligonucleotide
atttcttcgagcacggggtacgccgggtgt

SEQ ID NO: 280412 - DNA, 30 bp, Artificial Sequence
  Synthetic oligonucleotide
gctggtactcaagactcggttatcgggtgt

SEQ ID NO: 280413 - DNA, 30 bp, Artificial Sequence
  Synthetic oligonucleotide
gagcaagtggtcactctgtaaacggggtgt

SEQ ID NO: 280414 - DNA, 30 bp, Artificial Sequence
  Synthetic oligonucleotide
taggctaatgttggtggaccagcggggtgt

SEQ ID NO: 280415 - DNA, 30 bp, Artificial Sequence
  Synthetic oligonucleotide
gtattgcaatagaaaacagaaactgggtgt

SEQ ID NO: 280416 - DNA, 30 bp, Artificial Sequence
  Synthetic oligonucleotide
tgggcccggattgtacgggtctcgtggtgt

SEQ ID NO: 280417 - DNA, 31 bp, Artificial Sequence
  Synthetic oligonucleotide
caacagtcctcacgtgctcttaggaatgtgt

SEQ ID NO: 280418 - DNA, 30 bp, Artificial Sequence
  Synthetic oligonucleotide
atcctaactcgcgacgcgtttagcatgtgt

SEQ ID NO: 280419 - DNA, 30 bp, Artificial Sequence
  Synthetic oligonucleotide
taagaatggcaacatgcaataaggatgtgt

SEQ ID NO: 280420 - DNA, 30 bp, Artificial Sequence
  Synthetic oligonucleotide
gcgggtggcggaatgaggggggggatgtgt

SEQ ID NO: 280421 - DNA, 30 bp, Artificial Sequence
  Synthetic oligonucleotide
ggggagctcgagtgagacggtggtatgtgt

SEQ ID NO: 280422 - DNA, 30 bp, Artificial Sequence
  Synthetic oligonucleotide
taggccatgttaccggatcacattatgtgt

SEQ ID NO: 280423 - DNA, 30 bp, Artificial Sequence
  Synthetic oligonucleotide
caaaaaatacgcaacatttaagagctgtgt

SEQ ID NO: 280424 - DNA, 30 bp, Artificial Sequence
  Synthetic oligonucleotide
gttatcggcctaatatgaggtcatctgtgt

SEQ ID NO: 280425 - DNA, 30 bp, Artificial Sequence
  Synthetic oligonucleotide
gttgcggatcggagcgtactcgatctgtgt

SEQ ID NO: 280426 - DNA, 30 bp, Artificial Sequence
  Synthetic oligonucleotide
acggcgcgtgcgatggacctgcacgtgtgt

SEQ ID NO: 280427 - DNA, 30 bp, Artificial Sequence
  Synthetic oligonucleotide
ccgtttcgcctcccccacggagctgtgtgt

SEQ ID NO: 280428 - DNA, 30 bp, Artificial Sequence
  Synthetic oligonucleotide
gcatcgtagagatatataacgattgtgtgt

SEQ ID NO: 280429 - DNA, 30 bp, Artificial Sequence
  Synthetic oligonucleotide
ggcccctctgtaatcggaagggacttgtgt

SEQ ID NO: 280430 - DNA, 30 bp, Artificial Sequence
  Synthetic oligonucleotide
aagctattagcgattagccatgccttgtgt

SEQ ID NO: 280431 - DNA, 30 bp, Artificial Sequence
  Synthetic oligonucleotide
agagatcgctgttagtagttgtccttgtgt

SEQ ID NO: 280432 - DNA, 30 bp, Artificial Sequence
  Synthetic oligonucleotide
tcatgtttcccgcctaatgcggtcttgtgt

SEQ ID NO: 280433 - DNA, 30 bp, Artificial Sequence
  Synthetic oligonucleotide
ctgtttatgaagagtcgtagggggttgtgt

SEQ ID NO: 280434 - DNA, 30 bp, Artificial Sequence
  Synthetic oligonucleotide
gtattgcctaggttaaagcataatttgtgt

SEQ ID NO: 280435 - DNA, 30 bp, Artificial Sequence
  Synthetic oligonucleotide
ctcaagattgggacccctactggtttgtgt

SEQ ID NO: 280436 - DNA, 30 bp, Artificial Sequence
  Synthetic oligonucleotide
gatgcataatccacgaacgaggcaaattgt

SEQ ID NO: 280437 - DNA, 30 bp, Artificial Sequence
  Synthetic oligonucleotide
acagggattgacgtgatatggagaaattgt

SEQ ID NO: 280438 - DNA, 30 bp, Artificial Sequence
  Synthetic oligonucleotide
gcatgacaaaatgtgcgacacataaattgt

SEQ ID NO: 280439 - DNA, 30 bp, Artificial Sequence
  Synthetic oligonucleotide
actcttgtgtaaatcgggccgccgaattgt

SEQ ID NO: 280440 - DNA, 30 bp, Artificial Sequence
  Synthetic oligonucleotide
aatgcgtatgccattccgagcctgaattgt

SEQ ID NO: 280441 - DNA, 30 bp, Artificial Sequence
  Synthetic oligonucleotide
cgtttaaagaaatcaaacgtgtaacattgt

SEQ ID NO: 280442 - DNA, 30 bp, Artificial Sequence
  Synthetic oligonucleotide
ctatctgccatatggactaatgcccattgt

SEQ ID NO: 280443 - DNA, 31 bp, Artificial Sequence
  Synthetic oligonucleotide
caagccgtaaattgcctttggcaagcattgt

SEQ ID NO: 280444 - DNA, 30 bp, Artificial Sequence
  Synthetic oligonucleotide
gaaataaggcccccgtcccgagagcattgt

SEQ ID NO: 280445 - DNA, 30 bp, Artificial Sequence
  Synthetic oligonucleotide
accgcatggatcccaggggtccctcattgt

SEQ ID NO: 280446 - DNA, 30 bp, Artificial Sequence
  Synthetic oligonucleotide
catttaacggatggcttgagacgtcattgt

SEQ ID NO: 280447 - DNA, 30 bp, Artificial Sequence
  Synthetic oligonucleotide
tccgcaatggtgttcgtaagcctagattgt

SEQ ID NO: 280448 - DNA, 30 bp, Artificial Sequence
  Synthetic oligonucleotide
cagtcttgctcaggcataaaataggattgt

SEQ ID NO: 280449 - DNA, 30 bp, Artificial Sequence
  Synthetic oligonucleotide
agtacacaaggcgcatttaaaagggattgt

SEQ ID NO: 280450 - DNA, 30 bp, Artificial Sequence
  Synthetic oligonucleotide
gtacggagcatctcggggtgccaatattgt

SEQ ID NO: 280451 - DNA, 30 bp, Artificial Sequence
  Synthetic oligonucleotide
caccacctttgttttcctagcgtatattgt

SEQ ID NO: 280452 - DNA, 30 bp, Artificial Sequence
  Synthetic oligonucleotide
acacacccccaagatgtcctatggtattgt

SEQ ID NO: 280453 - DNA, 30 bp, Artificial Sequence
  Synthetic oligonucleotide
attcatcaagtaaagttcgtgtattattgt

SEQ ID NO: 280454 - DNA, 30 bp, Artificial Sequence
  Synthetic oligonucleotide
ctggattctggcgattttccttcttattgt

SEQ ID NO: 280455 - DNA, 30 bp, Artificial Sequence
  Synthetic oligonucleotide
actgcgtatgcctagggatcaggttattgt

SEQ ID NO: 280456 - DNA, 30 bp, Artificial Sequence
  Synthetic oligonucleotide
cgttgacctcagaaaggtagcaaaacttgt

SEQ ID NO: 280457 - DNA, 30 bp, Artificial Sequence
  Synthetic oligonucleotide
agaggtttaaaacgagggggaaccacttgt

SEQ ID NO: 280458 - DNA, 30 bp, Artificial Sequence
  Synthetic oligonucleotide
gagacgggaactacatacaaactcacttgt

SEQ ID NO: 280459 - DNA, 30 bp, Artificial Sequence
  Synthetic oligonucleotide
agctaaccctgccgaaggttaaagacttgt

SEQ ID NO: 280460 - DNA, 30 bp, Artificial Sequence
  Synthetic oligonucleotide
gcatgcaacgtcgttgccgtctctacttgt

SEQ ID NO: 280461 - DNA, 30 bp, Artificial Sequence
  Synthetic oligonucleotide
tagtgttttcatgagcacttgagtacttgt

SEQ ID NO: 280462 - DNA, 30 bp, Artificial Sequence
  Synthetic oligonucleotide
gcgaagaacatctcatagatcagaccttgt

SEQ ID NO: 280463 - DNA, 30 bp, Artificial Sequence
  Synthetic oligonucleotide
ggccttgtgtaccagggatgtggaccttgt

SEQ ID NO: 280464 - DNA, 30 bp, Artificial Sequence
  Synthetic oligonucleotide
gacatgcttcgttaccatgacagcccttgt

SEQ ID NO: 280465 - DNA, 30 bp, Artificial Sequence
  Synthetic oligonucleotide
tcacagggagtgggtgtctggctcccttgt

SEQ ID NO: 280466 - DNA, 30 bp, Artificial Sequence
  Synthetic oligonucleotide
gggtctgtgcgcactttcaagacgccttgt

SEQ ID NO: 280467 - DNA, 30 bp, Artificial Sequence
  Synthetic oligonucleotide
ttcagttggccatctcactagagcgcttgt

SEQ ID NO: 280468 - DNA, 30 bp, Artificial Sequence
  Synthetic oligonucleotide
ccgcatgtcgctgcaattgtgactgcttgt

SEQ ID NO: 280469 - DNA, 30 bp, Artificial Sequence
  Synthetic oligonucleotide
tctttcccaacagaacgcgttagatcttgt

SEQ ID NO: 280470 - DNA, 30 bp, Artificial Sequence
  Synthetic oligonucleotide
tacgaattggggctcgggcatcggtcttgt

SEQ ID NO: 280471 - DNA, 30 bp, Artificial Sequence
  Synthetic oligonucleotide
gattaggggacccgcgtcacagcttcttgt

SEQ ID NO: 280472 - DNA, 30 bp, Artificial Sequence
  Synthetic oligonucleotide
cgagcacattatcgcccgaagagaagttgt

SEQ ID NO: 280473 - DNA, 30 bp, Artificial Sequence
  Synthetic oligonucleotide
tcagggttacgtaactgtggccacagttgt

SEQ ID NO: 280474 - DNA, 30 bp, Artificial Sequence
  Synthetic oligonucleotide
atagcgcacacatccaaatcatagagttgt

SEQ ID NO: 280475 - DNA, 30 bp, Artificial Sequence
  Synthetic oligonucleotide
gatcattactgttgcggaggtcatagttgt

SEQ ID NO: 280476 - DNA, 30 bp, Artificial Sequence
  Synthetic oligonucleotide
gtgacatagtcagtttgaattcgtagttgt

SEQ ID NO: 280477 - DNA, 30 bp, Artificial Sequence
  Synthetic oligonucleotide
tatgtccgtatggcagggtaggaccgttgt

SEQ ID NO: 280478 - DNA, 30 bp, Artificial Sequence
  Synthetic oligonucleotide
gggacaggtcttagacaaaatagccgttgt

SEQ ID NO: 280479 - DNA, 30 bp, Artificial Sequence
  Synthetic oligonucleotide
ggatctaggatacgagcactcttccgttgt

SEQ ID NO: 280480 - DNA, 30 bp, Artificial Sequence
  Synthetic oligonucleotide
agagcatagaaattctcgagtgtcggttgt

SEQ ID NO: 280481 - DNA, 30 bp, Artificial Sequence
  Synthetic oligonucleotide
catccaaatttatcagtgatatcgggttgt

SEQ ID NO: 280482 - DNA, 30 bp, Artificial Sequence
  Synthetic oligonucleotide
tctgtaccttggaagatgtagatatgttgt

SEQ ID NO: 280483 - DNA, 30 bp, Artificial Sequence
  Synthetic oligonucleotide
gagggccatttatctctaaaggcctgttgt

SEQ ID NO: 280484 - DNA, 30 bp, Artificial Sequence
  Synthetic oligonucleotide
atgtccatgtatgatttcgacttgtgttgt

SEQ ID NO: 280485 - DNA, 30 bp, Artificial Sequence
  Synthetic oligonucleotide
atcctcaacccacatgacgcccgttgttgt

SEQ ID NO: 280486 - DNA, 30 bp, Artificial Sequence
  Synthetic oligonucleotide
ttctccaagcatgtcgggacggtttgttgt

SEQ ID NO: 280487 - DNA, 30 bp, Artificial Sequence
  Synthetic oligonucleotide
cgacagactcgtaccgagaacaacatttgt

SEQ ID NO: 280488 - DNA, 30 bp, Artificial Sequence
  Synthetic oligonucleotide
tcccagctctctaaacagggaacactttgt

SEQ ID NO: 280489 - DNA, 30 bp, Artificial Sequence
  Synthetic oligonucleotide
tggcgatgcgcaactgacacagtactttgt

SEQ ID NO: 280490 - DNA, 30 bp, Artificial Sequence
  Synthetic oligonucleotide
gtctcagaacgagaaataggactcctttgt

SEQ ID NO: 280491 - DNA, 30 bp, Artificial Sequence
  Synthetic oligonucleotide
ggtggcattgttagcaactctcgagtttgt

SEQ ID NO: 280492 - DNA, 30 bp, Artificial Sequence
  Synthetic oligonucleotide
tcatgacaggtccaaactacactagtttgt

SEQ ID NO: 280493 - DNA, 30 bp, Artificial Sequence
  Synthetic oligonucleotide
ggttaaatatgcgggtaaatgcttgtttgt

SEQ ID NO: 280494 - DNA, 30 bp, Artificial Sequence
  Synthetic oligonucleotide
tatggatgaaacactggtccaattttttgt

SEQ ID NO: 280495 - DNA, 30 bp, Artificial Sequence
  Synthetic oligonucleotide
tttaggcgtaatagtaatgatgttttttgt

SEQ ID NO: 280496 - DNA, 30 bp, Artificial Sequence
  Synthetic oligonucleotide
tgataaatgtgtcatggaattcaaaaaatt

SEQ ID NO: 280497 - DNA, 30 bp, Artificial Sequence
  Synthetic oligonucleotide
aaggcgacatcggatggaatagaaaaaatt

SEQ ID NO: 280498 - DNA, 30 bp, Artificial Sequence
  Synthetic oligonucleotide
cttgtaacacgggcggacccttaaaaaatt

SEQ ID NO: 280499 - DNA, 30 bp, Artificial Sequence
  Synthetic oligonucleotide
gtcgctacaatataaaggtctaacaaaatt

SEQ ID NO: 280500 - DNA, 30 bp, Artificial Sequence
  Synthetic oligonucleotide
aatgctgcgacatcacacacggacaaaatt

SEQ ID NO: 280501 - DNA, 30 bp, Artificial Sequence
  Synthetic oligonucleotide
gccacagtaggggccgtcacgtacaaaatt

SEQ ID NO: 280502 - DNA, 30 bp, Artificial Sequence
  Synthetic oligonucleotide
agcggtgcacacttatctccgggcaaaatt

SEQ ID NO: 280503 - DNA, 30 bp, Artificial Sequence
  Synthetic oligonucleotide
tatgcgagcctgagcataaagatcaaaatt

SEQ ID NO: 280504 - DNA, 30 bp, Artificial Sequence
  Synthetic oligonucleotide
cactatacaccgcttgggtgttagaaaatt

SEQ ID NO: 280505 - DNA, 30 bp, Artificial Sequence
  Synthetic oligonucleotide
ctacagaattgaaaacacttatcgaaaatt

SEQ ID NO: 280506 - DNA, 30 bp, Artificial Sequence
  Synthetic oligonucleotide
tacatggcttcgtccaagttattgaaaatt

SEQ ID NO: 280507 - DNA, 30 bp, Artificial Sequence
  Synthetic oligonucleotide
agattgtaaattctaggtacgaataaaatt

SEQ ID NO: 280508 - DNA, 30 bp, Artificial Sequence
  Synthetic oligonucleotide
agcgttggtcggtattcgggtccacaaatt

SEQ ID NO: 280509 - DNA, 30 bp, Artificial Sequence
  Synthetic oligonucleotide
ctatgttgtgtgtctgtatgtagacaaatt

SEQ ID NO: 280510 - DNA, 30 bp, Artificial Sequence
  Synthetic oligonucleotide
tctgattatgtcatcacctttagacaaatt

SEQ ID NO: 280511 - DNA, 30 bp, Artificial Sequence
  Synthetic oligonucleotide
gagaaaacctggaaggttagaacgcaaatt

SEQ ID NO: 280512 - DNA, 30 bp, Artificial Sequence
  Synthetic oligonucleotide
ggtgcggtctaaattggcaaggtgcaaatt

SEQ ID NO: 280513 - DNA, 30 bp, Artificial Sequence
  Synthetic oligonucleotide
ctctccgcgatcgggctagtatgtcaaatt

SEQ ID NO: 280514 - DNA, 30 bp, Artificial Sequence
  Synthetic oligonucleotide
acagacatattagtagccgggcaagaaatt

SEQ ID NO: 280515 - DNA, 30 bp, Artificial Sequence
  Synthetic oligonucleotide
cggtcggtaggataatttctttaagaaatt

SEQ ID NO: 280516 - DNA, 30 bp, Artificial Sequence
  Synthetic oligonucleotide
acagaacacacgaccgtaccattagaaatt

SEQ ID NO: 280517 - DNA, 30 bp, Artificial Sequence
  Synthetic oligonucleotide
ggtcaggtagtcgtaacgatatgcgaaatt

SEQ ID NO: 280518 - DNA, 30 bp, Artificial Sequence
  Synthetic oligonucleotide
taacatcgtgccactacgcgtttcgaaatt

SEQ ID NO: 280519 - DNA, 30 bp, Artificial Sequence
  Synthetic oligonucleotide
tgacgtataatctctcgaagggaggaaatt

SEQ ID NO: 280520 - DNA, 30 bp, Artificial Sequence
  Synthetic oligonucleotide
tcccaataggaattataacaccgggaaatt

SEQ ID NO: 280521 - DNA, 30 bp, Artificial Sequence
  Synthetic oligonucleotide
tagagatgtttaaacctagaacagtaaatt

SEQ ID NO: 280522 - DNA, 30 bp, Artificial Sequence
  Synthetic oligonucleotide
tcagtactccataagaccctagtgtaaatt

SEQ ID NO: 280523 - DNA, 30 bp, Artificial Sequence
  Synthetic oligonucleotide
gactgatcgtcggtcacttagaattaaatt

SEQ ID NO: 280524 - DNA, 30 bp, Artificial Sequence
  Synthetic oligonucleotide
ggaacggtactctggtgaaaagattaaatt

SEQ ID NO: 280525 - DNA, 30 bp, Artificial Sequence
  Synthetic oligonucleotide
acttgactgaccgtcggatccgcttaaatt

SEQ ID NO: 280526 - DNA, 30 bp, Artificial Sequence
  Synthetic oligonucleotide
tggcatctgatgtgaaatggagaaacaatt

SEQ ID NO: 280527 - DNA, 30 bp, Artificial Sequence
  Synthetic oligonucleotide
tgtatgagtagtaccagctcactaacaatt

SEQ ID NO: 280528 - DNA, 30 bp, Artificial Sequence
  Synthetic oligonucleotide
cgcgatcccagtgtatgcataacgacaatt

SEQ ID NO: 280529 - DNA, 30 bp, Artificial Sequence
  Synthetic oligonucleotide
aacgccaaccttcttggtcttttgacaatt

SEQ ID NO: 280530 - DNA, 30 bp, Artificial Sequence
  Synthetic oligonucleotide
gtaaacacctactgggcttcctatacaatt

SEQ ID NO: 280531 - DNA, 30 bp, Artificial Sequence
  Synthetic oligonucleotide
aggacatattaattagcctcgataccaatt

SEQ ID NO: 280532 - DNA, 30 bp, Artificial Sequence
  Synthetic oligonucleotide
ggcaccggtgtcggggctgtacccccaatt

SEQ ID NO: 280533 - DNA, 30 bp, Artificial Sequence
  Synthetic oligonucleotide
ctgtaggcgataatgaattcaacgccaatt

SEQ ID NO: 280534 - DNA, 30 bp, Artificial Sequence
  Synthetic oligonucleotide
gacacactactaggcttttagcccgcaatt

SEQ ID NO: 280535 - DNA, 30 bp, Artificial Sequence
  Synthetic oligonucleotide
caggtctgagatcactgtgaatccgcaatt

SEQ ID NO: 280536 - DNA, 30 bp, Artificial Sequence
  Synthetic oligonucleotide
ctagctagcatgaaccggtgaacggcaatt

SEQ ID NO: 280537 - DNA, 30 bp, Artificial Sequence
  Synthetic oligonucleotide
caagtgtctattggtgcgtatttggcaatt

SEQ ID NO: 280538 - DNA, 30 bp, Artificial Sequence
  Synthetic oligonucleotide
gaagtatccgtgacgagacctcgtgcaatt

SEQ ID NO: 280539 - DNA, 30 bp, Artificial Sequence
  Synthetic oligonucleotide
ctataggaaatgatggcaagaattgcaatt

SEQ ID NO: 280540 - DNA, 30 bp, Artificial Sequence
  Synthetic oligonucleotide
actctgtaaatagggctgtgcacatcaatt

SEQ ID NO: 280541 - DNA, 30 bp, Artificial Sequence
  Synthetic oligonucleotide
tgaagacgttcatactaacagggatcaatt

SEQ ID NO: 280542 - DNA, 30 bp, Artificial Sequence
  Synthetic oligonucleotide
aagggcttcctggacttctagtactcaatt

SEQ ID NO: 280543 - DNA, 30 bp, Artificial Sequence
  Synthetic oligonucleotide
ctggggttcataaagagaatgtactcaatt

SEQ ID NO: 280544 - DNA, 30 bp, Artificial Sequence
  Synthetic oligonucleotide
gacaacagtaccgagttacggccgtcaatt

SEQ ID NO: 280545 - DNA, 30 bp, Artificial Sequence
  Synthetic oligonucleotide
tgaagaaaaggtgggttccttcggtcaatt

SEQ ID NO: 280546 - DNA, 30 bp, Artificial Sequence
  Synthetic oligonucleotide
ggtaagaaacaccgcacatttcggtcaatt

SEQ ID NO: 280547 - DNA, 30 bp, Artificial Sequence
  Synthetic oligonucleotide
accaaccagagttgcattgtaggttcaatt

SEQ ID NO: 280548 - DNA, 30 bp, Artificial Sequence
  Synthetic oligonucleotide
tgtggaacgtcggcaaggcgtcaaagaatt

SEQ ID NO: 280549 - DNA, 30 bp, Artificial Sequence
  Synthetic oligonucleotide
ccaaaccacctgccagccgacttcagaatt

SEQ ID NO: 280550 - DNA, 30 bp, Artificial Sequence
  Synthetic oligonucleotide
ttcttgttgcaaagagtgcttgagagaatt

SEQ ID NO: 280551 - DNA, 30 bp, Artificial Sequence
  Synthetic oligonucleotide
cgttgctggacgtagttcgccgggagaatt

SEQ ID NO: 280552 - DNA, 30 bp, Artificial Sequence
  Synthetic oligonucleotide
gaatagctaccggacttgatagatagaatt

SEQ ID NO: 280553 - DNA, 30 bp, Artificial Sequence
  Synthetic oligonucleotide
aagtcgctcgaacctgccgaacttagaatt

SEQ ID NO: 280554 - DNA, 30 bp, Artificial Sequence
  Synthetic oligonucleotide
taggatgcgtcttctgggtaactacgaatt

SEQ ID NO: 280555 - DNA, 30 bp, Artificial Sequence
  Synthetic oligonucleotide
tgcagaggtgcctgatgagtgggccgaatt

SEQ ID NO: 280556 - DNA, 30 bp, Artificial Sequence
  Synthetic oligonucleotide
gcgaaacattaacgccgtccgacgcgaatt

SEQ ID NO: 280557 - DNA, 30 bp, Artificial Sequence
  Synthetic oligonucleotide
gatagttactaggcagataacgtgcgaatt

SEQ ID NO: 280558 - DNA, 30 bp, Artificial Sequence
  Synthetic oligonucleotide
gacttaacaataagacagcgagctcgaatt

SEQ ID NO: 280559 - DNA, 30 bp, Artificial Sequence
  Synthetic oligonucleotide
tgcctgacaactaaactgatcagaggaatt

SEQ ID NO: 280560 - DNA, 30 bp, Artificial Sequence
  Synthetic oligonucleotide
acagtgcgggcactcggccgggacggaatt

SEQ ID NO: 280561 - DNA, 30 bp, Artificial Sequence
  Synthetic oligonucleotide
aggaattagatatgagatttctacggaatt

SEQ ID NO: 280562 - DNA, 30 bp, Artificial Sequence
  Synthetic oligonucleotide
agcgatcggttacttcgttactgcggaatt

SEQ ID NO: 280563 - DNA, 30 bp, Artificial Sequence
  Synthetic oligonucleotide
aggacaagaaatagggtccactcgggaatt

SEQ ID NO: 280564 - DNA, 30 bp, Artificial Sequence
  Synthetic oligonucleotide
gtggcatcggggtcggatttgaggggaatt

SEQ ID NO: 280565 - DNA, 30 bp, Artificial Sequence
  Synthetic oligonucleotide
tagtggcttgtgcatacgggtaggggaatt

SEQ ID NO: 280566 - DNA, 30 bp, Artificial Sequence
  Synthetic oligonucleotide
ttcaactgtcaatggtgggcggatggaatt

SEQ ID NO: 280567 - DNA, 30 bp, Artificial Sequence
  Synthetic oligonucleotide
tttgcaattatacgctcggggactggaatt

SEQ ID NO: 280568 - DNA, 30 bp, Artificial Sequence
  Synthetic oligonucleotide
cgacgtctttccggcgtaatccattgaatt

SEQ ID NO: 280569 - DNA, 30 bp, Artificial Sequence
  Synthetic oligonucleotide
gaattaaccttcgctgaaactgattgaatt

SEQ ID NO: 280570 - DNA, 30 bp, Artificial Sequence
  Synthetic oligonucleotide
ccgtacatattgaccagcatcgcttgaatt

SEQ ID NO: 280571 - DNA, 30 bp, Artificial Sequence
  Synthetic oligonucleotide
cacatctgcgatcatgttttagcaataatt

SEQ ID NO: 280572 - DNA, 30 bp, Artificial Sequence
  Synthetic oligonucleotide
aagacctattggaggggctgtcacataatt

SEQ ID NO: 280573 - DNA, 30 bp, Artificial Sequence
  Synthetic oligonucleotide
cgggtgacccgtccgtgaggcctcataatt

SEQ ID NO: 280574 - DNA, 30 bp, Artificial Sequence
  Synthetic oligonucleotide
gaggataggttctcaactgttgagataatt

SEQ ID NO: 280575 - DNA, 30 bp, Artificial Sequence
  Synthetic oligonucleotide
ttgcctatatgagttttcttcgcgataatt

SEQ ID NO: 280576 - DNA, 30 bp, Artificial Sequence
  Synthetic oligonucleotide
gtcgtaggagtgaagacgaataggataatt

SEQ ID NO: 280577 - DNA, 30 bp, Artificial Sequence
  Synthetic oligonucleotide
ataagaagtgcagcttccataaatataatt

SEQ ID NO: 280578 - DNA, 30 bp, Artificial Sequence
  Synthetic oligonucleotide
tgatccggtttccccactctcaatataatt

SEQ ID NO: 280579 - DNA, 30 bp, Artificial Sequence
  Synthetic oligonucleotide
gcaacttaacaggcctagtacatactaatt

SEQ ID NO: 280580 - DNA, 30 bp, Artificial Sequence
  Synthetic oligonucleotide
acgggaaatagagtcagcaaattactaatt

SEQ ID NO: 280581 - DNA, 30 bp, Artificial Sequence
  Synthetic oligonucleotide
tcgcgccactgagttagttaacgtctaatt

SEQ ID NO: 280582 - DNA, 30 bp, Artificial Sequence
  Synthetic oligonucleotide
gataagtgtacacggaaactggttctaatt

SEQ ID NO: 280583 - DNA, 30 bp, Artificial Sequence
  Synthetic oligonucleotide
tctacataccgtatatctagaaacgtaatt

SEQ ID NO: 280584 - DNA, 30 bp, Artificial Sequence
  Synthetic oligonucleotide
acggatgatgtaactaaaactggtgtaatt

SEQ ID NO: 280585 - DNA, 30 bp, Artificial Sequence
  Synthetic oligonucleotide
ttgtctagtcgtgccggggaaattgtaatt

SEQ ID NO: 280586 - DNA, 30 bp, Artificial Sequence
  Synthetic oligonucleotide
agtcccgaagatagaaaaggtcaattaatt

SEQ ID NO: 280587 - DNA, 30 bp, Artificial Sequence
  Synthetic oligonucleotide
gctctccagtgaacaccagggacattaatt

SEQ ID NO: 280588 - DNA, 30 bp, Artificial Sequence
  Synthetic oligonucleotide
taatatggagagatctctgtaagattaatt

SEQ ID NO: 280589 - DNA, 29 bp, Artificial Sequence
  Synthetic oligonucleotide
tagaatacacatagcgtttgctcttaatt

SEQ ID NO: 280590 - DNA, 30 bp, Artificial Sequence
  Synthetic oligonucleotide
gttcacttagaaaagagtgccctgttaatt

SEQ ID NO: 280591 - DNA, 30 bp, Artificial Sequence
  Synthetic oligonucleotide
tcattttcgttaggtcttcgcgtgttaatt

SEQ ID NO: 280592 - DNA, 30 bp, Artificial Sequence
  Synthetic oligonucleotide
tggatattggtcattccgagcttgttaatt

SEQ ID NO: 280593 - DNA, 30 bp, Artificial Sequence
  Synthetic oligonucleotide
gtgctaatggatgacgaattttaaaacatt

SEQ ID NO: 280594 - DNA, 30 bp, Artificial Sequence
  Synthetic oligonucleotide
aacgcgttgagactcagacaactcaacatt

SEQ ID NO: 280595 - DNA, 30 bp, Artificial Sequence
  Synthetic oligonucleotide
taattagaaactgacacgtgacctaacatt

SEQ ID NO: 280596 - DNA, 30 bp, Artificial Sequence
  Synthetic oligonucleotide
gcggtttgaaccaaaggaaatacacacatt

SEQ ID NO: 280597 - DNA, 30 bp, Artificial Sequence
  Synthetic oligonucleotide
atggagtgctgcacactcacccgacacatt

SEQ ID NO: 280598 - DNA, 30 bp, Artificial Sequence
  Synthetic oligonucleotide
catacggcaaaggtaggttggttacacatt

SEQ ID NO: 280599 - DNA, 29 bp, Artificial Sequence
  Synthetic oligonucleotide
tgtggccgaaaccccgaagcgaccacatt

SEQ ID NO: 280600 - DNA, 30 bp, Artificial Sequence
  Synthetic oligonucleotide
tctaagactgatgcaggacaactgcacatt

SEQ ID NO: 280601 - DNA, 30 bp, Artificial Sequence
  Synthetic oligonucleotide
tcgcgctttttaagccggagtactcacatt

SEQ ID NO: 280602 - DNA, 30 bp, Artificial Sequence
  Synthetic oligonucleotide
cctcgctgtacatacgcctaacccgacatt

SEQ ID NO: 280603 - DNA, 30 bp, Artificial Sequence
  Synthetic oligonucleotide
atatttagagaatgtagtttgtccgacatt

SEQ ID NO: 280604 - DNA, 30 bp, Artificial Sequence
  Synthetic oligonucleotide
ccgaatacttacgtggattagctcgacatt

SEQ ID NO: 280605 - DNA, 30 bp, Artificial Sequence
  Synthetic oligonucleotide
ttatccgctcctctggcacatcatgacatt

SEQ ID NO: 280606 - DNA, 30 bp, Artificial Sequence
  Synthetic oligonucleotide
gagataggcttatggctacgtaactacatt

SEQ ID NO: 280607 - DNA, 30 bp, Artificial Sequence
  Synthetic oligonucleotide
gtctcagctcgacatatacctgcttacatt

SEQ ID NO: 280608 - DNA, 30 bp, Artificial Sequence
  Synthetic oligonucleotide
caggaggtctccgaactgacgcgttacatt

SEQ ID NO: 280609 - DNA, 30 bp, Artificial Sequence
  Synthetic oligonucleotide
atgactgtccaatgagaagtaccaaccatt

SEQ ID NO: 280610 - DNA, 30 bp, Artificial Sequence
  Synthetic oligonucleotide
tatcgcgggactcaatgtacgtcaaccatt

SEQ ID NO: 280611 - DNA, 30 bp, Artificial Sequence
  Synthetic oligonucleotide
gatgggcgcgcacgatatagcgggaccatt

SEQ ID NO: 280612 - DNA, 30 bp, Artificial Sequence
  Synthetic oligonucleotide
aaatgccaggcagcaagacggagtaccatt

SEQ ID NO: 280613 - DNA, 30 bp, Artificial Sequence
  Synthetic oligonucleotide
actgcggtctggatttcgtcaggtaccatt

SEQ ID NO: 280614 - DNA, 30 bp, Artificial Sequence
  Synthetic oligonucleotide
tcgaacatgtcgtgttcgaaaatacccatt

SEQ ID NO: 280615 - DNA, 30 bp, Artificial Sequence
  Synthetic oligonucleotide
cgtgaccggcgcccacccgccagccccatt

SEQ ID NO: 280616 - DNA, 30 bp, Artificial Sequence
  Synthetic oligonucleotide
agagtaaatacttgagggtacttccccatt

SEQ ID NO: 280617 - DNA, 30 bp, Artificial Sequence
  Synthetic oligonucleotide
tattgtgggccggtgcaggtgaggcccatt

SEQ ID NO: 280618 - DNA, 30 bp, Artificial Sequence
  Synthetic oligonucleotide
ccatggctctaaggtccgaaggaagccatt

SEQ ID NO: 280619 - DNA, 30 bp, Artificial Sequence
  Synthetic oligonucleotide
ccgtagccccgaaataaattcgcagccatt

SEQ ID NO: 280620 - DNA, 30 bp, Artificial Sequence
  Synthetic oligonucleotide
gattatatgagaaatacgcaggtggccatt

SEQ ID NO: 280621 - DNA, 30 bp, Artificial Sequence
  Synthetic oligonucleotide
ttcgtctcaaattatggatcggtggccatt

SEQ ID NO: 280622 - DNA, 30 bp, Artificial Sequence
  Synthetic oligonucleotide
atttcatgcgacttggtaagtatgtccatt

SEQ ID NO: 280623 - DNA, 30 bp, Artificial Sequence
  Synthetic oligonucleotide
tacgtttgtcaatttagctggtagagcatt

SEQ ID NO: 280624 - DNA, 30 bp, Artificial Sequence
  Synthetic oligonucleotide
aaatgcgcggtaagtgctcaacatagcatt

SEQ ID NO: 280625 - DNA, 30 bp, Artificial Sequence
  Synthetic oligonucleotide
gtgggcactgtgtcaaaatcgtttagcatt

SEQ ID NO: 280626 - DNA, 30 bp, Artificial Sequence
  Synthetic oligonucleotide
aaccggtcattgtccgtatgagaacgcatt

SEQ ID NO: 280627 - DNA, 30 bp, Artificial Sequence
  Synthetic oligonucleotide
cggcgtttcgccagtctataaacccgcatt

SEQ ID NO: 280628 - DNA, 30 bp, Artificial Sequence
  Synthetic oligonucleotide
ggatatgtatgatctacgagattccgcatt

SEQ ID NO: 280629 - DNA, 31 bp, Artificial Sequence
  Synthetic oligonucleotide
tagatgctggaaggtttagcgactgcgcatt

SEQ ID NO: 280630 - DNA, 30 bp, Artificial Sequence
  Synthetic oligonucleotide
cacaagttctagagcacggattaaggcatt

SEQ ID NO: 280631 - DNA, 30 bp, Artificial Sequence
  Synthetic oligonucleotide
cagtaagaaagtataatgacctcgggcatt

SEQ ID NO: 280632 - DNA, 30 bp, Artificial Sequence
  Synthetic oligonucleotide
tgaaaatctgccgtgcgtggccatggcatt

SEQ ID NO: 280633 - DNA, 30 bp, Artificial Sequence
  Synthetic oligonucleotide
tggatgtatttgtggacatcggcatgcatt

SEQ ID NO: 280634 - DNA, 30 bp, Artificial Sequence
  Synthetic oligonucleotide
ggttcaacacagaggcaggctttatgcatt

SEQ ID NO: 280635 - DNA, 30 bp, Artificial Sequence
  Synthetic oligonucleotide
agaatgaaggttgagctacgtagctgcatt

SEQ ID NO: 280636 - DNA, 30 bp, Artificial Sequence
  Synthetic oligonucleotide
tgccatcgaacgtgaaagtaagtctgcatt

SEQ ID NO: 280637 - DNA, 30 bp, Artificial Sequence
  Synthetic oligonucleotide
ctcatacatatccaatgcaatcagtgcatt

SEQ ID NO: 280638 - DNA, 30 bp, Artificial Sequence
  Synthetic oligonucleotide
gccatgtattagatacaagcgaacatcatt

SEQ ID NO: 280639 - DNA, 30 bp, Artificial Sequence
  Synthetic oligonucleotide
acagttgagcctgagacatgtcccatcatt

SEQ ID NO: 280640 - DNA, 30 bp, Artificial Sequence
  Synthetic oligonucleotide
gatgactaacagtggcggtaatggatcatt

SEQ ID NO: 280641 - DNA, 30 bp, Artificial Sequence
  Synthetic oligonucleotide
taaaaccggcagatcactgatatgatcatt

SEQ ID NO: 280642 - DNA, 30 bp, Artificial Sequence
  Synthetic oligonucleotide
gcaatgtttcatagccaatctcttatcatt

SEQ ID NO: 280643 - DNA, 30 bp, Artificial Sequence
  Synthetic oligonucleotide
ttggcgctgtgatcaggcctggggctcatt

SEQ ID NO: 280644 - DNA, 30 bp, Artificial Sequence
  Synthetic oligonucleotide
ctgagacaagcgcctgtcagaaaagtcatt

SEQ ID NO: 280645 - DNA, 30 bp, Artificial Sequence
  Synthetic oligonucleotide
ggtagcgtaaaaatttacaacgcggtcatt

SEQ ID NO: 280646 - DNA, 30 bp, Artificial Sequence
  Synthetic oligonucleotide
ggatgttgttggtatactacgttggtcatt

SEQ ID NO: 280647 - DNA, 30 bp, Artificial Sequence
  Synthetic oligonucleotide
aatacgaatttgaaatgctaagatgtcatt

SEQ ID NO: 280648 - DNA, 30 bp, Artificial Sequence
  Synthetic oligonucleotide
cgacccccacagtcgcggttccgcttcatt

SEQ ID NO: 280649 - DNA, 30 bp, Artificial Sequence
  Synthetic oligonucleotide
gtgggaaacaggactgtcaccgggttcatt

SEQ ID NO: 280650 - DNA, 30 bp, Artificial Sequence
  Synthetic oligonucleotide
tcggacggccatcgcgatttcaatttcatt

SEQ ID NO: 280651 - DNA, 30 bp, Artificial Sequence
  Synthetic oligonucleotide
gtcacggcgggtgaggcaaatagcaagatt

SEQ ID NO: 280652 - DNA, 30 bp, Artificial Sequence
  Synthetic oligonucleotide
gtaactcgcctagcatgctcgtgtaagatt

SEQ ID NO: 280653 - DNA, 30 bp, Artificial Sequence
  Synthetic oligonucleotide
gagcggtgtgaatttgtaaggtaccagatt

SEQ ID NO: 280654 - DNA, 30 bp, Artificial Sequence
  Synthetic oligonucleotide
aagcgccaaagtctttgcaggtcccagatt

SEQ ID NO: 280655 - DNA, 30 bp, Artificial Sequence
  Synthetic oligonucleotide
gtcatttagaccgtgtgatcatatcagatt

SEQ ID NO: 280656 - DNA, 30 bp, Artificial Sequence
  Synthetic oligonucleotide
cacgcattgaaaaaccgctcacaagagatt

SEQ ID NO: 280657 - DNA, 30 bp, Artificial Sequence
  Synthetic oligonucleotide
cccgtcaccatgtattggcttccagagatt

SEQ ID NO: 280658 - DNA, 30 bp, Artificial Sequence
  Synthetic oligonucleotide
cattacaggtgagtaccctgggcagagatt

SEQ ID NO: 280659 - DNA, 30 bp, Artificial Sequence
  Synthetic oligonucleotide
tcggcactaaaaatgtggcgatcagagatt

SEQ ID NO: 280660 - DNA, 30 bp, Artificial Sequence
  Synthetic oligonucleotide
tggcagtaccacgcgacgccatgagagatt

SEQ ID NO: 280661 - DNA, 29 bp, Artificial Sequence
  Synthetic oligonucleotide
caggtctatttaacgattttaacgagatt

SEQ ID NO: 280662 - DNA, 30 bp, Artificial Sequence
  Synthetic oligonucleotide
aactagaaaagcaatccggtcagcgagatt

SEQ ID NO: 280663 - DNA, 30 bp, Artificial Sequence
  Synthetic oligonucleotide
tgcaatcaccgagctccctccatggagatt

SEQ ID NO: 280664 - DNA, 30 bp, Artificial Sequence
  Synthetic oligonucleotide
ggcgggcggtttcttgatgatttggagatt

SEQ ID NO: 280665 - DNA, 30 bp, Artificial Sequence
  Synthetic oligonucleotide
actcgatgtagcttattacttagtgagatt

SEQ ID NO: 280666 - DNA, 30 bp, Artificial Sequence
  Synthetic oligonucleotide
aagagtgacttggcacagccagcatagatt

SEQ ID NO: 280667 - DNA, 30 bp, Artificial Sequence
  Synthetic oligonucleotide
gctgcgccgtttgtgagtttttgctagatt

SEQ ID NO: 280668 - DNA, 30 bp, Artificial Sequence
  Synthetic oligonucleotide
gatacctctaccgaggtgggaaggtagatt

SEQ ID NO: 280669 - DNA, 30 bp, Artificial Sequence
  Synthetic oligonucleotide
gacaaggagaccgcgcagtcctggtagatt

SEQ ID NO: 280670 - DNA, 30 bp, Artificial Sequence
  Synthetic oligonucleotide
ataatggaaagggatggggttgtgtagatt

SEQ ID NO: 280671 - DNA, 30 bp, Artificial Sequence
  Synthetic oligonucleotide
tgggggtgcattgtttttcaacaaacgatt

SEQ ID NO: 280672 - DNA, 30 bp, Artificial Sequence
  Synthetic oligonucleotide
ggacgcacgagtgtatagaggtgaacgatt

SEQ ID NO: 280673 - DNA, 30 bp, Artificial Sequence
  Synthetic oligonucleotide
gtaagaaagtatggcgcccgggtaacgatt

SEQ ID NO: 280674 - DNA, 30 bp, Artificial Sequence
  Synthetic oligonucleotide
aggaggagttcgtaatgcactcagacgatt

SEQ ID NO: 280675 - DNA, 30 bp, Artificial Sequence
  Synthetic oligonucleotide
gcaagtgccttctagaaaaaggtgacgatt

SEQ ID NO: 280676 - DNA, 30 bp, Artificial Sequence
  Synthetic oligonucleotide
atggtacaaatcgaacccggatatacgatt

SEQ ID NO: 280677 - DNA, 30 bp, Artificial Sequence
  Synthetic oligonucleotide
tgtttccgcgaccatgagagccttacgatt

SEQ ID NO: 280678 - DNA, 30 bp, Artificial Sequence
  Synthetic oligonucleotide
aattgacgaaagtaggccagtgatccgatt

SEQ ID NO: 280679 - DNA, 30 bp, Artificial Sequence
  Synthetic oligonucleotide
taatctagacgtatgtatacataagcgatt

SEQ ID NO: 280680 - DNA, 30 bp, Artificial Sequence
  Synthetic oligonucleotide
gccttggaaattgacttatattgagcgatt

SEQ ID NO: 280681 - DNA, 30 bp, Artificial Sequence
  Synthetic oligonucleotide
aaatcaccaattcagacttggatggcgatt

SEQ ID NO: 280682 - DNA, 30 bp, Artificial Sequence
  Synthetic oligonucleotide
taagaccattacatatgaggcaatgcgatt

SEQ ID NO: 280683 - DNA, 30 bp, Artificial Sequence
  Synthetic oligonucleotide
aaatagatgcccactgaggtccgatcgatt

SEQ ID NO: 280684 - DNA, 30 bp, Artificial Sequence
  Synthetic oligonucleotide
ttggcagcttcacaagtgcactgatcgatt

SEQ ID NO: 280685 - DNA, 30 bp, Artificial Sequence
  Synthetic oligonucleotide
gcttcacgtattcattgcggactatcgatt

SEQ ID NO: 280686 - DNA, 30 bp, Artificial Sequence
  Synthetic oligonucleotide
gaatcgtgggccgtttagtggaactcgatt

SEQ ID NO: 280687 - DNA, 30 bp, Artificial Sequence
  Synthetic oligonucleotide
aagggcaaccggattaggaaggcaaggatt

SEQ ID NO: 280688 - DNA, 30 bp, Artificial Sequence
  Synthetic oligonucleotide
aaacgaggcagtcaacgttaagccaggatt

SEQ ID NO: 280689 - DNA, 30 bp, Artificial Sequence
  Synthetic oligonucleotide
tggaactagctgagtaatcggacgaggatt

SEQ ID NO: 280690 - DNA, 30 bp, Artificial Sequence
  Synthetic oligonucleotide
tgatgtgacgatccacgacatcctaggatt

SEQ ID NO: 280691 - DNA, 30 bp, Artificial Sequence
  Synthetic oligonucleotide
ggagcatccagtaggtgtcgtcgtaggatt

SEQ ID NO: 280692 - DNA, 30 bp, Artificial Sequence
  Synthetic oligonucleotide
ggtatgtcaggacgccggtaccgacggatt

SEQ ID NO: 280693 - DNA, 30 bp, Artificial Sequence
  Synthetic oligonucleotide
gttcgggccatggcgcaactcggacggatt

SEQ ID NO: 280694 - DNA, 30 bp, Artificial Sequence
  Synthetic oligonucleotide
ccagtgactgattcggaaggaacccggatt

SEQ ID NO: 280695 - DNA, 30 bp, Artificial Sequence
  Synthetic oligonucleotide
tatcgagctggacaccttgatacccggatt

SEQ ID NO: 280696 - DNA, 30 bp, Artificial Sequence
  Synthetic oligonucleotide
aagttcaagggagtttagatcatccggatt

SEQ ID NO: 280697 - DNA, 30 bp, Artificial Sequence
  Synthetic oligonucleotide
ggtcttcgggggctatcacgatagcggatt

SEQ ID NO: 280698 - DNA, 30 bp, Artificial Sequence
  Synthetic oligonucleotide
ttattaagatcgtcaacaggggtgcggatt

SEQ ID NO: 280699 - DNA, 30 bp, Artificial Sequence
  Synthetic oligonucleotide
gcatttctatcatggggcgcgggtcggatt

SEQ ID NO: 280700 - DNA, 30 bp, Artificial Sequence
  Synthetic oligonucleotide
aaccctcaccagttatgtaagtgtcggatt

SEQ ID NO: 280701 - DNA, 30 bp, Artificial Sequence
  Synthetic oligonucleotide
tcgcatcattacgccagtacctaagggatt

SEQ ID NO: 280702 - DNA, 30 bp, Artificial Sequence
  Synthetic oligonucleotide
ataatcatcctgtccttgtgtcacgggatt

SEQ ID NO: 280703 - DNA, 30 bp, Artificial Sequence
  Synthetic oligonucleotide
aggcccttgattgtgggtagtaatgggatt

SEQ ID NO: 280704 - DNA, 30 bp, Artificial Sequence
  Synthetic oligonucleotide
tttataggggccataacaacagatgggatt

SEQ ID NO: 280705 - DNA, 30 bp, Artificial Sequence
  Synthetic oligonucleotide
gcacaacgacaccgaactttgacatggatt

SEQ ID NO: 280706 - DNA, 30 bp, Artificial Sequence
  Synthetic oligonucleotide
acacaatgttgccccgctccgtgatggatt

SEQ ID NO: 280707 - DNA, 30 bp, Artificial Sequence
  Synthetic oligonucleotide
gattcgctgatggaatgggtcagaatgatt

SEQ ID NO: 280708 - DNA, 30 bp, Artificial Sequence
  Synthetic oligonucleotide
cgttggaaagtgacaacattgaagatgatt

SEQ ID NO: 280709 - DNA, 30 bp, Artificial Sequence
  Synthetic oligonucleotide
aaaccgttgggcggagtagtgctgatgatt

SEQ ID NO: 280710 - DNA, 30 bp, Artificial Sequence
  Synthetic oligonucleotide
catcaattaggattgtcctcccccctgatt

SEQ ID NO: 280711 - DNA, 30 bp, Artificial Sequence
  Synthetic oligonucleotide
tagagcttttaggttcttgcccttctgatt

SEQ ID NO: 280712 - DNA, 30 bp, Artificial Sequence
  Synthetic oligonucleotide
gggtcagatggtacaagcgatcttctgatt

SEQ ID NO: 280713 - DNA, 30 bp, Artificial Sequence
  Synthetic oligonucleotide
acagaacgttactgttatctacaagtgatt

SEQ ID NO: 280714 - DNA, 30 bp, Artificial Sequence
  Synthetic oligonucleotide
atgataagtcaatatagatcataagtgatt

SEQ ID NO: 280715 - DNA, 30 bp, Artificial Sequence
  Synthetic oligonucleotide
caccccgtgtaaaaggataaaagagtgatt

SEQ ID NO: 280716 - DNA, 30 bp, Artificial Sequence
  Synthetic oligonucleotide
ctggttgtcgtttagtcgtgcatcgtgatt

SEQ ID NO: 280717 - DNA, 30 bp, Artificial Sequence
  Synthetic oligonucleotide
ataaggtctcactatagataaacggtgatt

SEQ ID NO: 280718 - DNA, 30 bp, Artificial Sequence
  Synthetic oligonucleotide
aataggcgcacagttaattggggtgtgatt

SEQ ID NO: 280719 - DNA, 30 bp, Artificial Sequence
  Synthetic oligonucleotide
gcattgaggaatggaatggtaaccttgatt

SEQ ID NO: 280720 - DNA, 30 bp, Artificial Sequence
  Synthetic oligonucleotide
gaacaatcacgtccgaatgtattcttgatt

SEQ ID NO: 280721 - DNA, 30 bp, Artificial Sequence
  Synthetic oligonucleotide
gtagatcagcctacccttgggaggttgatt

SEQ ID NO: 280722 - DNA, 30 bp, Artificial Sequence
  Synthetic oligonucleotide
tacgttcctagtcaaatcggaattttgatt

SEQ ID NO: 280723 - DNA, 30 bp, Artificial Sequence
  Synthetic oligonucleotide
atggatagggcaaggaatatgtcaaatatt

SEQ ID NO: 280724 - DNA, 30 bp, Artificial Sequence
  Synthetic oligonucleotide
tctccgtgtgaatattggaacggcaatatt

SEQ ID NO: 280725 - DNA, 30 bp, Artificial Sequence
  Synthetic oligonucleotide
atagatcaaaggtgctttattggcaatatt

SEQ ID NO: 280726 - DNA, 30 bp, Artificial Sequence
  Synthetic oligonucleotide
ccctcaatagcagactggttggcgaatatt

SEQ ID NO: 280727 - DNA, 30 bp, Artificial Sequence
  Synthetic oligonucleotide
gcaactgcaactccgatttccaggaatatt

SEQ ID NO: 280728 - DNA, 30 bp, Artificial Sequence
  Synthetic oligonucleotide
ttaacggcagagctacaccgagggaatatt

SEQ ID NO: 280729 - DNA, 30 bp, Artificial Sequence
  Synthetic oligonucleotide
taacatctagcaccacaatcggctaatatt

SEQ ID NO: 280730 - DNA, 30 bp, Artificial Sequence
  Synthetic oligonucleotide
tacaagtaggttactgcgctacgacatatt

SEQ ID NO: 280731 - DNA, 30 bp, Artificial Sequence
  Synthetic oligonucleotide
agatcgctgtaactagaagaccagcatatt

SEQ ID NO: 280732 - DNA, 30 bp, Artificial Sequence
  Synthetic oligonucleotide
ttaggaaagtactaaaaggtgtcgcatatt

SEQ ID NO: 280733 - DNA, 30 bp, Artificial Sequence
  Synthetic oligonucleotide
atcgttgctggtgatggggcggatcatatt

SEQ ID NO: 280734 - DNA, 30 bp, Artificial Sequence
  Synthetic oligonucleotide
ggacgggtgggtcgcactctggatcatatt

SEQ ID NO: 280735 - DNA, 30 bp, Artificial Sequence
  Synthetic oligonucleotide
gttcgttagcacataggataactagatatt

SEQ ID NO: 280736 - DNA, 30 bp, Artificial Sequence
  Synthetic oligonucleotide
caatggtaggggcgttcagtcccggatatt

SEQ ID NO: 280737 - DNA, 30 bp, Artificial Sequence
  Synthetic oligonucleotide
gatgcgttataggatcgatctgcggatatt

SEQ ID NO: 280738 - DNA, 30 bp, Artificial Sequence
  Synthetic oligonucleotide
tcggtttaatctaaaccaacaaatgatatt

SEQ ID NO: 280739 - DNA, 30 bp, Artificial Sequence
  Synthetic oligonucleotide
tgcccttcataaaagcatgacgatgatatt

SEQ ID NO: 280740 - DNA, 30 bp, Artificial Sequence
  Synthetic oligonucleotide
agaggatttgaaaggatagactctgatatt

SEQ ID NO: 280741 - DNA, 30 bp, Artificial Sequence
  Synthetic oligonucleotide
agctatcgggtaggtgttgtaagtgatatt

SEQ ID NO: 280742 - DNA, 30 bp, Artificial Sequence
  Synthetic oligonucleotide
cttggggacgggcaagtcccagcatatatt

SEQ ID NO: 280743 - DNA, 30 bp, Artificial Sequence
  Synthetic oligonucleotide
tcgtatcacggacgtatgtcacgatatatt

SEQ ID NO: 280744 - DNA, 30 bp, Artificial Sequence
  Synthetic oligonucleotide
tcctcacgtgggtatgacgcaaactatatt

SEQ ID NO: 280745 - DNA, 30 bp, Artificial Sequence
  Synthetic oligonucleotide
gatacaagcactcctagtgaagtgtatatt

SEQ ID NO: 280746 - DNA, 30 bp, Artificial Sequence
  Synthetic oligonucleotide
ggattagcagaagtaagttattaaactatt

SEQ ID NO: 280747 - DNA, 30 bp, Artificial Sequence
  Synthetic oligonucleotide
gcgacggcgccgttaacacgcgcaactatt

SEQ ID NO: 280748 - DNA, 30 bp, Artificial Sequence
  Synthetic oligonucleotide
cagcgttgatgaataccgaccgacactatt

SEQ ID NO: 280749 - DNA, 30 bp, Artificial Sequence
  Synthetic oligonucleotide
actatgggatggcattaccgcgacactatt

SEQ ID NO: 280750 - DNA, 30 bp, Artificial Sequence
  Synthetic oligonucleotide
acgggtttatcggtatcgatccccactatt

SEQ ID NO: 280751 - DNA, 30 bp, Artificial Sequence
  Synthetic oligonucleotide
tatctccttcaccgcgggaagcccactatt

SEQ ID NO: 280752 - DNA, 30 bp, Artificial Sequence
  Synthetic oligonucleotide
gtcgttgggtggtacaaggtatatactatt

SEQ ID NO: 280753 - DNA, 30 bp, Artificial Sequence
  Synthetic oligonucleotide
atgaatacgcccccggtattgatacctatt

SEQ ID NO: 280754 - DNA, 30 bp, Artificial Sequence
  Synthetic oligonucleotide
cgtaggaccctgggcctagcacagcctatt

SEQ ID NO: 280755 - DNA, 30 bp, Artificial Sequence
  Synthetic oligonucleotide
atcgaccttgatgtacagagctagcctatt

SEQ ID NO: 280756 - DNA, 30 bp, Artificial Sequence
  Synthetic oligonucleotide
ggatcctagatcgctgggtctgcgcctatt

SEQ ID NO: 280757 - DNA, 28 bp, Artificial Sequence
  Synthetic oligonucleotide
tgcagtgtcgagtaaacacggtcctatt

SEQ ID NO: 280758 - DNA, 30 bp, Artificial Sequence
  Synthetic oligonucleotide
ggtgaaggcatactaggtcagattcctatt

SEQ ID NO: 280759 - DNA, 30 bp, Artificial Sequence
  Synthetic oligonucleotide
cgagcggataaccactttaagcaagctatt

SEQ ID NO: 280760 - DNA, 30 bp, Artificial Sequence
  Synthetic oligonucleotide
agtctattccctgggttggaaaaggctatt

SEQ ID NO: 280761 - DNA, 30 bp, Artificial Sequence
  Synthetic oligonucleotide
agcaattagctccaagaaacggaggctatt

SEQ ID NO: 280762 - DNA, 30 bp, Artificial Sequence
  Synthetic oligonucleotide
gattgggcggaacatgtacgttgatctatt

SEQ ID NO: 280763 - DNA, 30 bp, Artificial Sequence
  Synthetic oligonucleotide
tagtgaggatcatgtcacaccaagtctatt

SEQ ID NO: 280764 - DNA, 30 bp, Artificial Sequence
  Synthetic oligonucleotide
tcggggcctccattaataaccacgtctatt

SEQ ID NO: 280765 - DNA, 30 bp, Artificial Sequence
  Synthetic oligonucleotide
atctgcgccaatcgcctatcgcattctatt

SEQ ID NO: 280766 - DNA, 30 bp, Artificial Sequence
  Synthetic oligonucleotide
gtcatctgaacctgttgtccaccttctatt

SEQ ID NO: 280767 - DNA, 30 bp, Artificial Sequence
  Synthetic oligonucleotide
ggttcggatggtaatgggtctgcttctatt

SEQ ID NO: 280768 - DNA, 30 bp, Artificial Sequence
  Synthetic oligonucleotide
ccgtaactacgtaggtgaatttccagtatt

SEQ ID NO: 280769 - DNA, 30 bp, Artificial Sequence
  Synthetic oligonucleotide
cacgtggatttccaggagttagagagtatt

SEQ ID NO: 280770 - DNA, 30 bp, Artificial Sequence
  Synthetic oligonucleotide
tttaaaaggacacaatgtgccgcgagtatt

SEQ ID NO: 280771 - DNA, 30 bp, Artificial Sequence
  Synthetic oligonucleotide
gagatattgagtaatgttcgtcatagtatt

SEQ ID NO: 280772 - DNA, 30 bp, Artificial Sequence
  Synthetic oligonucleotide
cattcgggcaaggctcaacagaggcgtatt

SEQ ID NO: 280773 - DNA, 30 bp, Artificial Sequence
  Synthetic oligonucleotide
gcatagggtaggctgcaagatctgcgtatt

SEQ ID NO: 280774 - DNA, 30 bp, Artificial Sequence
  Synthetic oligonucleotide
cgcccgaaacgttaataggtcaaaggtatt

SEQ ID NO: 280775 - DNA, 30 bp, Artificial Sequence
  Synthetic oligonucleotide
tcgatattgtgaatccgaaaacaaggtatt

SEQ ID NO: 280776 - DNA, 30 bp, Artificial Sequence
  Synthetic oligonucleotide
cgtccctaagatcagtcaatagagggtatt

SEQ ID NO: 280777 - DNA, 30 bp, Artificial Sequence
  Synthetic oligonucleotide
caggtactttatggatgtttctgatgtatt

SEQ ID NO: 280778 - DNA, 30 bp, Artificial Sequence
  Synthetic oligonucleotide
tcggtaactgactaaagataggcctgtatt

SEQ ID NO: 280779 - DNA, 30 bp, Artificial Sequence
  Synthetic oligonucleotide
ggtgtgttttgcgggagtctgcgctgtatt

SEQ ID NO: 280780 - DNA, 30 bp, Artificial Sequence
  Synthetic oligonucleotide
cgtactcaaggagcaacaacggtctgtatt

SEQ ID NO: 280781 - DNA, 30 bp, Artificial Sequence
  Synthetic oligonucleotide
actataaggtaaactcggcggttctgtatt

SEQ ID NO: 280782 - DNA, 30 bp, Artificial Sequence
  Synthetic oligonucleotide
aaggtattcgtctggtaatgtacgtgtatt

SEQ ID NO: 280783 - DNA, 30 bp, Artificial Sequence
  Synthetic oligonucleotide
ttatggtaccctccaaagcgactttgtatt

SEQ ID NO: 280784 - DNA, 30 bp, Artificial Sequence
  Synthetic oligonucleotide
cgccttataatggtataatgactttgtatt

SEQ ID NO: 280785 - DNA, 30 bp, Artificial Sequence
  Synthetic oligonucleotide
aaacatccagaagcagcgaacttaattatt

SEQ ID NO: 280786 - DNA, 30 bp, Artificial Sequence
  Synthetic oligonucleotide
agcatggacttgatattttcaattattatt

SEQ ID NO: 280787 - DNA, 30 bp, Artificial Sequence
  Synthetic oligonucleotide
ttcggccgagtggtttcgtcacagcttatt

SEQ ID NO: 280788 - DNA, 30 bp, Artificial Sequence
  Synthetic oligonucleotide
gccgacaaaggtgacaggactcagcttatt

SEQ ID NO: 280789 - DNA, 30 bp, Artificial Sequence
  Synthetic oligonucleotide
cgcggggataagccatagtagcctcttatt

SEQ ID NO: 280790 - DNA, 30 bp, Artificial Sequence
  Synthetic oligonucleotide
ccgttggaatcataccggagcgaagttatt

SEQ ID NO: 280791 - DNA, 30 bp, Artificial Sequence
  Synthetic oligonucleotide
cggctatcgaacgagacgcctaacgttatt

SEQ ID NO: 280792 - DNA, 30 bp, Artificial Sequence
  Synthetic oligonucleotide
ttagattataataagtacgaacccgttatt

SEQ ID NO: 280793 - DNA, 30 bp, Artificial Sequence
  Synthetic oligonucleotide
cagatgttcgccaccacgcatggtgttatt

SEQ ID NO: 280794 - DNA, 30 bp, Artificial Sequence
  Synthetic oligonucleotide
tcgttctataacaacccggccccatttatt

SEQ ID NO: 280795 - DNA, 30 bp, Artificial Sequence
  Synthetic oligonucleotide
ctcgcttatggctaaattgcttggtttatt

SEQ ID NO: 280796 - DNA, 30 bp, Artificial Sequence
  Synthetic oligonucleotide
cgtgccgcaagcgctaatatacattttatt

SEQ ID NO: 280797 - DNA, 30 bp, Artificial Sequence
  Synthetic oligonucleotide
cgatcgggaaagaggcctaacctttttatt

SEQ ID NO: 280798 - DNA, 30 bp, Artificial Sequence
  Synthetic oligonucleotide
ccatgacacttatcagttgtgggaaaactt

SEQ ID NO: 280799 - DNA, 30 bp, Artificial Sequence
  Synthetic oligonucleotide
aggttattctgtagaagcactgacaaactt

SEQ ID NO: 280800 - DNA, 30 bp, Artificial Sequence
  Synthetic oligonucleotide
ttctcaaggaatccgaagcctgacaaactt

SEQ ID NO: 280801 - DNA, 30 bp, Artificial Sequence
  Synthetic oligonucleotide
agcttacactatgaaatatccgttaaactt

SEQ ID NO: 280802 - DNA, 30 bp, Artificial Sequence
  Synthetic oligonucleotide
atacatcaaaagtaatgagctacacaactt

SEQ ID NO: 280803 - DNA, 30 bp, Artificial Sequence
  Synthetic oligonucleotide
tgcgggttgcctcataaagtggcacaactt

SEQ ID NO: 280804 - DNA, 30 bp, Artificial Sequence
  Synthetic oligonucleotide
aaagccggttcacctgggagtacagaactt

SEQ ID NO: 280805 - DNA, 30 bp, Artificial Sequence
  Synthetic oligonucleotide
ggatgatcaacgcacaaggcccgagaactt

SEQ ID NO: 280806 - DNA, 30 bp, Artificial Sequence
  Synthetic oligonucleotide
tcaagggtctataggatcatgagcgaactt

SEQ ID NO: 280807 - DNA, 30 bp, Artificial Sequence
  Synthetic oligonucleotide
tgtaaggctcctgaaggctggggcgaactt

SEQ ID NO: 280808 - DNA, 30 bp, Artificial Sequence
  Synthetic oligonucleotide
tcaaagtgagttatcatgataggggaactt

SEQ ID NO: 280809 - DNA, 30 bp, Artificial Sequence
  Synthetic oligonucleotide
tttccgctaaggaccactccactggaactt

SEQ ID NO: 280810 - DNA, 30 bp, Artificial Sequence
  Synthetic oligonucleotide
actaaacgatgggcgtggttccgataactt

SEQ ID NO: 280811 - DNA, 30 bp, Artificial Sequence
  Synthetic oligonucleotide
cacggcgtgggacttaaattttgataactt

SEQ ID NO: 280812 - DNA, 30 bp, Artificial Sequence
  Synthetic oligonucleotide
cacggtgtggcgcgcgttcgtgactaactt

SEQ ID NO: 280813 - DNA, 30 bp, Artificial Sequence
  Synthetic oligonucleotide
ctaggcaatgcacacgacggctgctaactt

SEQ ID NO: 280814 - DNA, 31 bp, Artificial Sequence
  Synthetic oligonucleotide
ccgagtactgacatgactcgacttttaactt

SEQ ID NO: 280815 - DNA, 30 bp, Artificial Sequence
  Synthetic oligonucleotide
gcagtgagatggtggaaggcgataacactt

SEQ ID NO: 280816 - DNA, 30 bp, Artificial Sequence
  Synthetic oligonucleotide
ctgatttctttgtcccatgaaagcacactt

SEQ ID NO: 280817 - DNA, 30 bp, Artificial Sequence
  Synthetic oligonucleotide
tgtcagtttgcgtggcgtgaattgacactt

SEQ ID NO: 280818 - DNA, 30 bp, Artificial Sequence
  Synthetic oligonucleotide
tggggtctcttagcaacgacggccccactt

SEQ ID NO: 280819 - DNA, 30 bp, Artificial Sequence
  Synthetic oligonucleotide
tagttcatgcccacaacttaagctccactt

SEQ ID NO: 280820 - DNA, 30 bp, Artificial Sequence
  Synthetic oligonucleotide
cattaggtttgactttagcttaaagcactt

SEQ ID NO: 280821 - DNA, 30 bp, Artificial Sequence
  Synthetic oligonucleotide
aaataagacgttggctcgatacaagcactt

SEQ ID NO: 280822 - DNA, 30 bp, Artificial Sequence
  Synthetic oligonucleotide
aagcacaattgtgcttcgcgttgcgcactt

SEQ ID NO: 280823 - DNA, 30 bp, Artificial Sequence
  Synthetic oligonucleotide
gaaatgacgtgaaaacgaaaactcgcactt

SEQ ID NO: 280824 - DNA, 30 bp, Artificial Sequence
  Synthetic oligonucleotide
atcgtcccgaaaccatcatctcgggcactt

SEQ ID NO: 280825 - DNA, 30 bp, Artificial Sequence
  Synthetic oligonucleotide
gatctttgtaactcgccaacgatggcactt

SEQ ID NO: 280826 - DNA, 30 bp, Artificial Sequence
  Synthetic oligonucleotide
tgccggagaattgggccgatccatgcactt

SEQ ID NO: 280827 - DNA, 30 bp, Artificial Sequence
  Synthetic oligonucleotide
acttgcttggactctcctttgcatgcactt

SEQ ID NO: 280828 - DNA, 30 bp, Artificial Sequence
  Synthetic oligonucleotide
gtgtgagtcgggttggtaagctcctcactt

SEQ ID NO: 280829 - DNA, 30 bp, Artificial Sequence
  Synthetic oligonucleotide
cagtatgccttaggttgtctcaaaagactt

SEQ ID NO: 280830 - DNA, 30 bp, Artificial Sequence
  Synthetic oligonucleotide
aggatgagcatagccaatcggcaaagactt

SEQ ID NO: 280831 - DNA, 30 bp, Artificial Sequence
  Synthetic oligonucleotide
aagtgaaatgcagagagttatgagagactt

SEQ ID NO: 280832 - DNA, 30 bp, Artificial Sequence
  Synthetic oligonucleotide
aggcccgctcaatcctaaccaacgagactt

SEQ ID NO: 280833 - DNA, 30 bp, Artificial Sequence
  Synthetic oligonucleotide
ggtcgaagccttcaactagaggatagactt

SEQ ID NO: 280834 - DNA, 30 bp, Artificial Sequence
  Synthetic oligonucleotide
ttcctatcccgagcctcgaccgttagactt

SEQ ID NO: 280835 - DNA, 30 bp, Artificial Sequence
  Synthetic oligonucleotide
ggtagacgggtcatctaaatcgaacgactt

SEQ ID NO: 280836 - DNA, 30 bp, Artificial Sequence
  Synthetic oligonucleotide
agtgctttcattcaagcaccagcccgactt

SEQ ID NO: 280837 - DNA, 30 bp, Artificial Sequence
  Synthetic oligonucleotide
gatccaggttcccagtagtcatcccgactt

SEQ ID NO: 280838 - DNA, 30 bp, Artificial Sequence
  Synthetic oligonucleotide
cacaaaagactcgggatgcgaagccgactt

SEQ ID NO: 280839 - DNA, 30 bp, Artificial Sequence
  Synthetic oligonucleotide
gtggctgggtccactcgattagcgcgactt

SEQ ID NO: 280840 - DNA, 30 bp, Artificial Sequence
  Synthetic oligonucleotide
ggccattatttgagcgatctaaggcgactt

SEQ ID NO: 280841 - DNA, 30 bp, Artificial Sequence
  Synthetic oligonucleotide
ttgacacacgcacaaacgtcagatcgactt

SEQ ID NO: 280842 - DNA, 30 bp, Artificial Sequence
  Synthetic oligonucleotide
cgcctgcatctgtagtcgcgggcaggactt

SEQ ID NO: 280843 - DNA, 30 bp, Artificial Sequence
  Synthetic oligonucleotide
tcagtcaccaaagaatgtgctgcaggactt

SEQ ID NO: 280844 - DNA, 30 bp, Artificial Sequence
  Synthetic oligonucleotide
catctgtccgctaaaattatgcgaggactt

SEQ ID NO: 280845 - DNA, 30 bp, Artificial Sequence
  Synthetic oligonucleotide
ctacttgtcctcaggggatcagccggactt

SEQ ID NO: 280846 - DNA, 30 bp, Artificial Sequence
  Synthetic oligonucleotide
ttggactcaccggctcgatccgagggactt

SEQ ID NO: 280847 - DNA, 30 bp, Artificial Sequence
  Synthetic oligonucleotide
gcggaacgaagttgtttggtaggtggactt

SEQ ID NO: 280848 - DNA, 30 bp, Artificial Sequence
  Synthetic oligonucleotide
acgaaccatatgtacaagtaactatgactt

SEQ ID NO: 280849 - DNA, 30 bp, Artificial Sequence
  Synthetic oligonucleotide
ggggaacttcgttccggtacactatgactt

SEQ ID NO: 280850 - DNA, 30 bp, Artificial Sequence
  Synthetic oligonucleotide
gatcttttaacaagagtgtaggagtgactt

SEQ ID NO: 280851 - DNA, 30 bp, Artificial Sequence
  Synthetic oligonucleotide
ctaccatcatctcacctatctcattgactt

SEQ ID NO: 280852 - DNA, 30 bp, Artificial Sequence
  Synthetic oligonucleotide
tatgatgcgcgtctcgatgcacctatactt

SEQ ID NO: 280853 - DNA, 30 bp, Artificial Sequence
  Synthetic oligonucleotide
atcaaagcaagcgtgtcccaccttatactt

SEQ ID NO: 280854 - DNA, 30 bp, Artificial Sequence
  Synthetic oligonucleotide
atggacttctgtatcgagagatagctactt

SEQ ID NO: 280855 - DNA, 30 bp, Artificial Sequence
  Synthetic oligonucleotide
caacaccccactttagtagcgactctactt

SEQ ID NO: 280856 - DNA, 30 bp, Artificial Sequence
  Synthetic oligonucleotide
gatcggaatcgagtcaaactagctctactt

SEQ ID NO: 280857 - DNA, 30 bp, Artificial Sequence
  Synthetic oligonucleotide
tggcgttatgtctctttctctattctactt

SEQ ID NO: 280858 - DNA, 30 bp, Artificial Sequence
  Synthetic oligonucleotide
tggagctaccaaccagagttgggggtactt

SEQ ID NO: 280859 - DNA, 30 bp, Artificial Sequence
  Synthetic oligonucleotide
gtagtgcgaagccgaactcaacttgtactt

SEQ ID NO: 280860 - DNA, 30 bp, Artificial Sequence
  Synthetic oligonucleotide
gtggcgcccgcttgcaggaggaaattactt

SEQ ID NO: 280861 - DNA, 30 bp, Artificial Sequence
  Synthetic oligonucleotide
agcacggaggaggactcaccaacattactt

SEQ ID NO: 280862 - DNA, 30 bp, Artificial Sequence
  Synthetic oligonucleotide
ggggctatatggttacggctgcccttactt

SEQ ID NO: 280863 - DNA, 30 bp, Artificial Sequence
  Synthetic oligonucleotide
atgagctgcgagactcttaagtcgttactt

SEQ ID NO: 280864 - DNA, 30 bp, Artificial Sequence
  Synthetic oligonucleotide
agcaaacattgaaggccccgcacaaacctt

SEQ ID NO: 280865 - DNA, 30 bp, Artificial Sequence
  Synthetic oligonucleotide
gctcaacatcgggaaaacccgggaaacctt

SEQ ID NO: 280866 - DNA, 30 bp, Artificial Sequence
  Synthetic oligonucleotide
gaatgtagagggtgagagttattaaacctt

SEQ ID NO: 280867 - DNA, 30 bp, Artificial Sequence
  Synthetic oligonucleotide
cgtatatcattagcccgtatgttaaacctt

SEQ ID NO: 280868 - DNA, 30 bp, Artificial Sequence
  Synthetic oligonucleotide
ctgtgaagacggcgagcaaccatcaacctt

SEQ ID NO: 280869 - DNA, 30 bp, Artificial Sequence
  Synthetic oligonucleotide
accgcgtatccaataagtccagcgaacctt

SEQ ID NO: 280870 - DNA, 30 bp, Artificial Sequence
  Synthetic oligonucleotide
gtggtgctcccgactggacggcggaacctt

SEQ ID NO: 280871 - DNA, 30 bp, Artificial Sequence
  Synthetic oligonucleotide
ggacctaggaccgtggttgagcctaacctt

SEQ ID NO: 280872 - DNA, 30 bp, Artificial Sequence
  Synthetic oligonucleotide
ataatggggattgcggcctgaggtaacctt

SEQ ID NO: 280873 - DNA, 30 bp, Artificial Sequence
  Synthetic oligonucleotide
tgataaacaataatacatctttgtaacctt

SEQ ID NO: 280874 - DNA, 30 bp, Artificial Sequence
  Synthetic oligonucleotide
gtgtcctccggaactaggaaggttaacctt

SEQ ID NO: 280875 - DNA, 30 bp, Artificial Sequence
  Synthetic oligonucleotide
cttggaggtctaccatcaaggcgtcacctt

SEQ ID NO: 280876 - DNA, 30 bp, Artificial Sequence
  Synthetic oligonucleotide
atctcctgtctcgttactcgaggtcacctt

SEQ ID NO: 280877 - DNA, 30 bp, Artificial Sequence
  Synthetic oligonucleotide
cgtctgcaatattgtctaagagaggacctt

SEQ ID NO: 280878 - DNA, 30 bp, Artificial Sequence
  Synthetic oligonucleotide
agggtctggcgaagaatgattagtgacctt

SEQ ID NO: 280879 - DNA, 30 bp, Artificial Sequence
  Synthetic oligonucleotide
atatggctagagataagacggggatacctt

SEQ ID NO: 280880 - DNA, 30 bp, Artificial Sequence
  Synthetic oligonucleotide
aaatatcaggataaatcgagcgtatacctt

SEQ ID NO: 280881 - DNA, 30 bp, Artificial Sequence
  Synthetic oligonucleotide
cagtgtgggagctaaatgtggctctacctt

SEQ ID NO: 280882 - DNA, 30 bp, Artificial Sequence
  Synthetic oligonucleotide
catgtttacgggtgtaccggcaaaaccctt

SEQ ID NO: 280883 - DNA, 30 bp, Artificial Sequence
  Synthetic oligonucleotide
gtagctcgttagttcctagtctgtaccctt

SEQ ID NO: 280884 - DNA, 30 bp, Artificial Sequence
  Synthetic oligonucleotide
acaggctgtcaaatcctacaggaacccctt

SEQ ID NO: 280885 - DNA, 30 bp, Artificial Sequence
  Synthetic oligonucleotide
gcagtaagaggcaagagtgaagagcccctt

SEQ ID NO: 280886 - DNA, 30 bp, Artificial Sequence
  Synthetic oligonucleotide
gtgtgtagcggattgctgtgggagcccctt

SEQ ID NO: 280887 - DNA, 30 bp, Artificial Sequence
  Synthetic oligonucleotide
ggagatggacactgtgtgagtatgcccctt

SEQ ID NO: 280888 - DNA, 30 bp, Artificial Sequence
  Synthetic oligonucleotide
tgccgatcaggcaaacgcaacgtagccctt

SEQ ID NO: 280889 - DNA, 30 bp, Artificial Sequence
  Synthetic oligonucleotide
cagtttcgaacagtagtaagatccgccctt

SEQ ID NO: 280890 - DNA, 30 bp, Artificial Sequence
  Synthetic oligonucleotide
acttagaggggcctctagcgataggccctt

SEQ ID NO: 280891 - DNA, 30 bp, Artificial Sequence
  Synthetic oligonucleotide
acattgcagttttgtgcggtttaggccctt

SEQ ID NO: 280892 - DNA, 30 bp, Artificial Sequence
  Synthetic oligonucleotide
atatatgaaactgctgacgagggggccctt

SEQ ID NO: 280893 - DNA, 30 bp, Artificial Sequence
  Synthetic oligonucleotide
gggccaacgtagcgtctttcgactgccctt

SEQ ID NO: 280894 - DNA, 30 bp, Artificial Sequence
  Synthetic oligonucleotide
acatgttagaaggaattcggataatccctt

SEQ ID NO: 280895 - DNA, 30 bp, Artificial Sequence
  Synthetic oligonucleotide
gtaagtagtggtcagtcaaaaagatccctt

SEQ ID NO: 280896 - DNA, 30 bp, Artificial Sequence
  Synthetic oligonucleotide
acctgtgttctattggaacacgtatccctt

SEQ ID NO: 280897 - DNA, 30 bp, Artificial Sequence
  Synthetic oligonucleotide
caggtatctcggttcgtaataaaacgcctt

SEQ ID NO: 280898 - DNA, 30 bp, Artificial Sequence
  Synthetic oligonucleotide
aacggtacaacccatctagtagggcgcctt

SEQ ID NO: 280899 - DNA, 30 bp, Artificial Sequence
  Synthetic oligonucleotide
gcgaagccatgagatcgttttccgggcctt

SEQ ID NO: 280900 - DNA, 30 bp, Artificial Sequence
  Synthetic oligonucleotide
caacaatatgtgaagacgggctttggcctt

SEQ ID NO: 280901 - DNA, 30 bp, Artificial Sequence
  Synthetic oligonucleotide
cggaagcaacagagtaggttcacgtgcctt

SEQ ID NO: 280902 - DNA, 31 bp, Artificial Sequence
  Synthetic oligonucleotide
tttaggtgtcactcgagtcacgatgtgcctt

SEQ ID NO: 280903 - DNA, 30 bp, Artificial Sequence
  Synthetic oligonucleotide
gtgagaagtggaggggaaattatgtgcctt

SEQ ID NO: 280904 - DNA, 30 bp, Artificial Sequence
  Synthetic oligonucleotide
attaagtgatcagtacaccaggattgcctt

SEQ ID NO: 280905 - DNA, 30 bp, Artificial Sequence
  Synthetic oligonucleotide
aggtacgtgcaagtcttgatggacatcctt

SEQ ID NO: 280906 - DNA, 30 bp, Artificial Sequence
  Synthetic oligonucleotide
ccggtgtcaggccatttcaaaaagatcctt

SEQ ID NO: 280907 - DNA, 30 bp, Artificial Sequence
  Synthetic oligonucleotide
cttagcagttgatgtacagttgagatcctt

SEQ ID NO: 280908 - DNA, 30 bp, Artificial Sequence
  Synthetic oligonucleotide
ctaagtcctggtgtttcaaggtagatcctt

SEQ ID NO: 280909 - DNA, 30 bp, Artificial Sequence
  Synthetic oligonucleotide
taaccgatcctcacacggatgtggctcctt

SEQ ID NO: 280910 - DNA, 30 bp, Artificial Sequence
  Synthetic oligonucleotide
tagctccagaggggtactgacaatctcctt

SEQ ID NO: 280911 - DNA, 30 bp, Artificial Sequence
  Synthetic oligonucleotide
ccaaacgaacgttggtcacctactctcctt

SEQ ID NO: 280912 - DNA, 30 bp, Artificial Sequence
  Synthetic oligonucleotide
tgataaaactagggaaacttaatagtcctt

SEQ ID NO: 280913 - DNA, 30 bp, Artificial Sequence
  Synthetic oligonucleotide
aagaccaaaacaagggtgccatttgtcctt

SEQ ID NO: 280914 - DNA, 30 bp, Artificial Sequence
  Synthetic oligonucleotide
aagtgtggagtttaaaaagggctattcctt

SEQ ID NO: 280915 - DNA, 30 bp, Artificial Sequence
  Synthetic oligonucleotide
catcaggaatgttcagactctaccttcctt

SEQ ID NO: 280916 - DNA, 30 bp, Artificial Sequence
  Synthetic oligonucleotide
tacgggaagggtgacctgggacttttcctt

SEQ ID NO: 280917 - DNA, 30 bp, Artificial Sequence
  Synthetic oligonucleotide
ggtcaacaaagacaaacttacatcaagctt

SEQ ID NO: 280918 - DNA, 30 bp, Artificial Sequence
  Synthetic oligonucleotide
tgtggagaggacaatggaagggagaagctt

SEQ ID NO: 280919 - DNA, 30 bp, Artificial Sequence
  Synthetic oligonucleotide
atgccagtacagtctccgcaacgtaagctt

SEQ ID NO: 280920 - DNA, 30 bp, Artificial Sequence
  Synthetic oligonucleotide
actcgtaaaaagaagacgcgttaacagctt

SEQ ID NO: 280921 - DNA, 30 bp, Artificial Sequence
  Synthetic oligonucleotide
ggattgtataaggctggctcctgacagctt

SEQ ID NO: 280922 - DNA, 30 bp, Artificial Sequence
  Synthetic oligonucleotide
gctgatgaatacaaggctatactacagctt

SEQ ID NO: 280923 - DNA, 30 bp, Artificial Sequence
  Synthetic oligonucleotide
ttaactgtaacggtagatgctctccagctt

SEQ ID NO: 280924 - DNA, 31 bp, Artificial Sequence
  Synthetic oligonucleotide
tcgggcagctccacgtagcagtattcagctt

SEQ ID NO: 280925 - DNA, 30 bp, Artificial Sequence
  Synthetic oligonucleotide
atttgcggtgacaggttgccggtagagctt

SEQ ID NO: 280926 - DNA, 30 bp, Artificial Sequence
  Synthetic oligonucleotide
tagcggagagttcgaaagcctgacgagctt

SEQ ID NO: 280927 - DNA, 30 bp, Artificial Sequence
  Synthetic oligonucleotide
ggtggaaggcgcctaggtatcggtgagctt

SEQ ID NO: 280928 - DNA, 30 bp, Artificial Sequence
  Synthetic oligonucleotide
ggaaaatcaacctattgacaagaatagctt

SEQ ID NO: 280929 - DNA, 30 bp, Artificial Sequence
  Synthetic oligonucleotide
ttaccttgatacaaaaaagccgcgtagctt

SEQ ID NO: 280930 - DNA, 30 bp, Artificial Sequence
  Synthetic oligonucleotide
ataatcatgcaaacaggcaactcaacgctt

SEQ ID NO: 280931 - DNA, 30 bp, Artificial Sequence
  Synthetic oligonucleotide
caaaggggagcctatggttctcccacgctt

SEQ ID NO: 280932 - DNA, 30 bp, Artificial Sequence
  Synthetic oligonucleotide
cactatatggacacgcgatcgacgacgctt

SEQ ID NO: 280933 - DNA, 30 bp, Artificial Sequence
  Synthetic oligonucleotide
accagtccgttgacccacaaggcgacgctt

SEQ ID NO: 280934 - DNA, 30 bp, Artificial Sequence
  Synthetic oligonucleotide
aaagtgaacttgagggataaaaaaccgctt

SEQ ID NO: 280935 - DNA, 30 bp, Artificial Sequence
  Synthetic oligonucleotide
agagtagatagcaaccgttctccaccgctt

SEQ ID NO: 280936 - DNA, 30 bp, Artificial Sequence
  Synthetic oligonucleotide
tctgagatagctggcatcgggtatccgctt

SEQ ID NO: 280937 - DNA, 30 bp, Artificial Sequence
  Synthetic oligonucleotide
catttcttgctagcgaagattaaagcgctt

SEQ ID NO: 280938 - DNA, 30 bp, Artificial Sequence
  Synthetic oligonucleotide
tattacgtctacgaggctaggtcagcgctt

SEQ ID NO: 280939 - DNA, 30 bp, Artificial Sequence
  Synthetic oligonucleotide
tgagatacttatgttgagccctccgcgctt

SEQ ID NO: 280940 - DNA, 30 bp, Artificial Sequence
  Synthetic oligonucleotide
gaggacattggtgcccctttgtgcgcgctt

SEQ ID NO: 280941 - DNA, 30 bp, Artificial Sequence
  Synthetic oligonucleotide
ttcaactttagtaaaccgaggtaggcgctt

SEQ ID NO: 280942 - DNA, 30 bp, Artificial Sequence
  Synthetic oligonucleotide
gaagctttaggcggcgacgggtatgcgctt

SEQ ID NO: 280943 - DNA, 30 bp, Artificial Sequence
  Synthetic oligonucleotide
caaggtctgaggactccggccgtctcgctt

SEQ ID NO: 280944 - DNA, 30 bp, Artificial Sequence
  Synthetic oligonucleotide
cttcaaagcacaagcacaaacttctcgctt

SEQ ID NO: 280945 - DNA, 30 bp, Artificial Sequence
  Synthetic oligonucleotide
catgaagaccggcgtggggaatattcgctt

SEQ ID NO: 280946 - DNA, 30 bp, Artificial Sequence
  Synthetic oligonucleotide
gttgcgtactgctcttgggtttgttcgctt

SEQ ID NO: 280947 - DNA, 30 bp, Artificial Sequence
  Synthetic oligonucleotide
aagagctgcacattaggattcatttcgctt

SEQ ID NO: 280948 - DNA, 30 bp, Artificial Sequence
  Synthetic oligonucleotide
gcgtcaagtaagacgggaagataaaggctt

SEQ ID NO: 280949 - DNA, 30 bp, Artificial Sequence
  Synthetic oligonucleotide
aatgcatcgttcacgacgcccatcaggctt

SEQ ID NO: 280950 - DNA, 30 bp, Artificial Sequence
  Synthetic oligonucleotide
ggcacgactcctagcaggctaacgaggctt

SEQ ID NO: 280951 - DNA, 30 bp, Artificial Sequence
  Synthetic oligonucleotide
gtcaatccaggatgctaacctacgcggctt

SEQ ID NO: 280952 - DNA, 30 bp, Artificial Sequence
  Synthetic oligonucleotide
ccctgctagaaacgtacaaggactcggctt

SEQ ID NO: 280953 - DNA, 30 bp, Artificial Sequence
  Synthetic oligonucleotide
tcgtggtcctttttctatatgcgagggctt

SEQ ID NO: 280954 - DNA, 30 bp, Artificial Sequence
  Synthetic oligonucleotide
ccttcagagttatgaaggacattagggctt

SEQ ID NO: 280955 - DNA, 30 bp, Artificial Sequence
  Synthetic oligonucleotide
taggccagtactttcgaacagagcgggctt

SEQ ID NO: 280956 - DNA, 30 bp, Artificial Sequence
  Synthetic oligonucleotide
aagataactagatggtatttaacggggctt

SEQ ID NO: 280957 - DNA, 30 bp, Artificial Sequence
  Synthetic oligonucleotide
atgtaacctttccactactcaactgggctt

SEQ ID NO: 280958 - DNA, 30 bp, Artificial Sequence
  Synthetic oligonucleotide
ttaacggcagtcagtgtaagtgttgggctt

SEQ ID NO: 280959 - DNA, 29 bp, Artificial Sequence
  Synthetic oligonucleotide
gcagaagtataaattcatagcaatggctt

SEQ ID NO: 280960 - DNA, 30 bp, Artificial Sequence
  Synthetic oligonucleotide
ctagaggtaacctttgacctgacatggctt

SEQ ID NO: 280961 - DNA, 30 bp, Artificial Sequence
  Synthetic oligonucleotide
aggtctcaagcataacatcagtcctggctt

SEQ ID NO: 280962 - DNA, 30 bp, Artificial Sequence
  Synthetic oligonucleotide
gcctatttcacacctaaaatattgtggctt

SEQ ID NO: 280963 - DNA, 30 bp, Artificial Sequence
  Synthetic oligonucleotide
ttaggggtatgatgggcgaggagttggctt

SEQ ID NO: 280964 - DNA, 30 bp, Artificial Sequence
  Synthetic oligonucleotide
cactaacacggcaatcgcgtcgcaatgctt

SEQ ID NO: 280965 - DNA, 30 bp, Artificial Sequence
  Synthetic oligonucleotide
aaaacacacatagggaagacaaggatgctt

SEQ ID NO: 280966 - DNA, 30 bp, Artificial Sequence
  Synthetic oligonucleotide
tcactgcaggggcaacacggtaaactgctt

SEQ ID NO: 280967 - DNA, 30 bp, Artificial Sequence
  Synthetic oligonucleotide
acggatttcaagacccagtttaacctgctt

SEQ ID NO: 280968 - DNA, 30 bp, Artificial Sequence
  Synthetic oligonucleotide
taactatgttagatagatccaggcctgctt

SEQ ID NO: 280969 - DNA, 30 bp, Artificial Sequence
  Synthetic oligonucleotide
actgctaaccaggtcacaacgatcctgctt

SEQ ID NO: 280970 - DNA, 30 bp, Artificial Sequence
  Synthetic oligonucleotide
tgttagacacctcgaaagccagctctgctt

SEQ ID NO: 280971 - DNA, 30 bp, Artificial Sequence
  Synthetic oligonucleotide
aaagggtaaattgtctgattataagtgctt

SEQ ID NO: 280972 - DNA, 30 bp, Artificial Sequence
  Synthetic oligonucleotide
ggtccaaaatagtactccaagtccgtgctt

SEQ ID NO: 280973 - DNA, 30 bp, Artificial Sequence
  Synthetic oligonucleotide
tagtgcataggggatgaaagcgaggtgctt

SEQ ID NO: 280974 - DNA, 30 bp, Artificial Sequence
  Synthetic oligonucleotide
ctttatgatacggatttaggagttgtgctt

SEQ ID NO: 280975 - DNA, 30 bp, Artificial Sequence
  Synthetic oligonucleotide
ggtgagcgagggtagttaaccgggttgctt

SEQ ID NO: 280976 - DNA, 30 bp, Artificial Sequence
  Synthetic oligonucleotide
tcgctagcggggtacagcgacgatttgctt

SEQ ID NO: 280977 - DNA, 30 bp, Artificial Sequence
  Synthetic oligonucleotide
ctgggcaacatcgatgatgtcgatttgctt

SEQ ID NO: 280978 - DNA, 30 bp, Artificial Sequence
  Synthetic oligonucleotide
cgcttccactcccgatttgatgaaaatctt

SEQ ID NO: 280979 - DNA, 30 bp, Artificial Sequence
  Synthetic oligonucleotide
gtattttcgactaggttatttggcaatctt

SEQ ID NO: 280980 - DNA, 30 bp, Artificial Sequence
  Synthetic oligonucleotide
atcagggtcacggggagagaaaggaatctt

SEQ ID NO: 280981 - DNA, 30 bp, Artificial Sequence
  Synthetic oligonucleotide
acgccctcaacagagcaacaccaacatctt

SEQ ID NO: 280982 - DNA, 30 bp, Artificial Sequence
  Synthetic oligonucleotide
ggcgttgaggttccccggtacagacatctt

SEQ ID NO: 280983 - DNA, 30 bp, Artificial Sequence
  Synthetic oligonucleotide
ggattgcgatctgatgctgcacgacatctt

SEQ ID NO: 280984 - DNA, 30 bp, Artificial Sequence
  Synthetic oligonucleotide
acgcgcgttggggttatagcctcccatctt

SEQ ID NO: 280985 - DNA, 31 bp, Artificial Sequence
  Synthetic oligonucleotide
cgaactgcggatcgctttattactccatctt

SEQ ID NO: 280986 - DNA, 30 bp, Artificial Sequence
  Synthetic oligonucleotide
gaaaaggggggcaggctagggactcatctt

SEQ ID NO: 280987 - DNA, 30 bp, Artificial Sequence
  Synthetic oligonucleotide
gcgatgacacgtaataataagggtcatctt

SEQ ID NO: 280988 - DNA, 30 bp, Artificial Sequence
  Synthetic oligonucleotide
aataggagctagggcggttaaagagatctt

SEQ ID NO: 280989 - DNA, 30 bp, Artificial Sequence
  Synthetic oligonucleotide
caggagatcacaacgcaagcctgggatctt

SEQ ID NO: 280990 - DNA, 30 bp, Artificial Sequence
  Synthetic oligonucleotide
gtatacagtgcgggataatgggcatatctt

SEQ ID NO: 280991 - DNA, 30 bp, Artificial Sequence
  Synthetic oligonucleotide
ggtttatttaccttccagaggctctatctt

SEQ ID NO: 280992 - DNA, 30 bp, Artificial Sequence
  Synthetic oligonucleotide
ttaacttgaattgcaaattctagttatctt

SEQ ID NO: 280993 - DNA, 30 bp, Artificial Sequence
  Synthetic oligonucleotide
aaacaccaaaccttaccattatccactctt

SEQ ID NO: 280994 - DNA, 30 bp, Artificial Sequence
  Synthetic oligonucleotide
ctaggcgcgcttcggacaacgtgcactctt

SEQ ID NO: 280995 - DNA, 30 bp, Artificial Sequence
  Synthetic oligonucleotide
acgtttggaagattcctatgatatcctctt

SEQ ID NO: 280996 - DNA, 30 bp, Artificial Sequence
  Synthetic oligonucleotide
tcaagattgctgtatgtatggaaagctctt

SEQ ID NO: 280997 - DNA, 30 bp, Artificial Sequence
  Synthetic oligonucleotide
ctgatcggggttccttgagataaagctctt

SEQ ID NO: 280998 - DNA, 30 bp, Artificial Sequence
  Synthetic oligonucleotide
cttcgggggctgtagtgtacgcccgctctt

SEQ ID NO: 280999 - DNA, 30 bp, Artificial Sequence
  Synthetic oligonucleotide
aactaggtctaattaagccagacggctctt

SEQ ID NO: 281000 - DNA, 30 bp, Artificial Sequence
  Synthetic oligonucleotide
ttaccgcaactaggttgaatcccggctctt

SEQ ID NO: 281001 - DNA, 30 bp, Artificial Sequence
  Synthetic oligonucleotide
ttactgagagagtgcacatcgaatgctctt

SEQ ID NO: 281002 - DNA, 30 bp, Artificial Sequence
  Synthetic oligonucleotide
atcggttaaggagggaagtgaactgctctt

SEQ ID NO: 281003 - DNA, 27 bp, Artificial Sequence
  Synthetic oligonucleotide
gtcttcaatatgctctacaagtctctt

SEQ ID NO: 281004 - DNA, 30 bp, Artificial Sequence
  Synthetic oligonucleotide
cgtgtgaacactacttgagggtagtctctt

SEQ ID NO: 281005 - DNA, 30 bp, Artificial Sequence
  Synthetic oligonucleotide
gacaagtattggggagtcaacgaaagtctt

SEQ ID NO: 281006 - DNA, 30 bp, Artificial Sequence
  Synthetic oligonucleotide
gaaggtaagcacatgtacccttacagtctt

SEQ ID NO: 281007 - DNA, 30 bp, Artificial Sequence
  Synthetic oligonucleotide
agggagcatgacaaggcgacttctagtctt

SEQ ID NO: 281008 - DNA, 30 bp, Artificial Sequence
  Synthetic oligonucleotide
aggggtagcacgaaactctggagtagtctt

SEQ ID NO: 281009 - DNA, 30 bp, Artificial Sequence
  Synthetic oligonucleotide
tggcacacgtggaccatttatccccgtctt

SEQ ID NO: 281010 - DNA, 30 bp, Artificial Sequence
  Synthetic oligonucleotide
ctacacgacgaactttcattaagccgtctt

SEQ ID NO: 281011 - DNA, 30 bp, Artificial Sequence
  Synthetic oligonucleotide
ttgaacagtcggtggctcacgcgtcgtctt

SEQ ID NO: 281012 - DNA, 30 bp, Artificial Sequence
  Synthetic oligonucleotide
cgcgtttaaagtgatgagtttataggtctt

SEQ ID NO: 281013 - DNA, 30 bp, Artificial Sequence
  Synthetic oligonucleotide
aacgttagtcggtatggtcagcgcggtctt

SEQ ID NO: 281014 - DNA, 30 bp, Artificial Sequence
  Synthetic oligonucleotide
ccggctcagcaccagattacgtcgggtctt

SEQ ID NO: 281015 - DNA, 30 bp, Artificial Sequence
  Synthetic oligonucleotide
gagtcatgcttacattaccgaaggggtctt

SEQ ID NO: 281016 - DNA, 30 bp, Artificial Sequence
  Synthetic oligonucleotide
gtaagaagatcccgccttctactgggtctt

SEQ ID NO: 281017 - DNA, 30 bp, Artificial Sequence
  Synthetic oligonucleotide
agctaaagctacacgtgaggagtgggtctt

SEQ ID NO: 281018 - DNA, 30 bp, Artificial Sequence
  Synthetic oligonucleotide
gtcaagatcagacttgtactcgatggtctt

SEQ ID NO: 281019 - DNA, 30 bp, Artificial Sequence
  Synthetic oligonucleotide
cggagtgtaactagtgagtgtattggtctt

SEQ ID NO: 281020 - DNA, 30 bp, Artificial Sequence
  Synthetic oligonucleotide
gaatgccttacgatagcatcatcatgtctt

SEQ ID NO: 281021 - DNA, 30 bp, Artificial Sequence
  Synthetic oligonucleotide
ttattccaaggaaagctctggttatgtctt

SEQ ID NO: 281022 - DNA, 30 bp, Artificial Sequence
  Synthetic oligonucleotide
ttaagaaacctcaaagctactgtctgtctt

SEQ ID NO: 281023 - DNA, 30 bp, Artificial Sequence
  Synthetic oligonucleotide
ttacgctccgtgtgtgtagtgtagtgtctt

SEQ ID NO: 281024 - DNA, 30 bp, Artificial Sequence
  Synthetic oligonucleotide
tatcgcagagagttgcctcaagattgtctt

SEQ ID NO: 281025 - DNA, 30 bp, Artificial Sequence
  Synthetic oligonucleotide
ctgcggttgcggagccggggctaaattctt

SEQ ID NO: 281026 - DNA, 30 bp, Artificial Sequence
  Synthetic oligonucleotide
aagcgttttggtagtgtgtactccattctt

SEQ ID NO: 281027 - DNA, 30 bp, Artificial Sequence
  Synthetic oligonucleotide
agcataagaatcacagagtgattgattctt

SEQ ID NO: 281028 - DNA, 30 bp, Artificial Sequence
  Synthetic oligonucleotide
taacggtgcagatggtttaaagatattctt

SEQ ID NO: 281029 - DNA, 30 bp, Artificial Sequence
  Synthetic oligonucleotide
taagtgtaagacacgttttcctttattctt

SEQ ID NO: 281030 - DNA, 30 bp, Artificial Sequence
  Synthetic oligonucleotide
gggcaggttcgatttcgttgaatacttctt

SEQ ID NO: 281031 - DNA, 30 bp, Artificial Sequence
  Synthetic oligonucleotide
tagccatcaatagtgcttagtccagttctt

SEQ ID NO: 281032 - DNA, 30 bp, Artificial Sequence
  Synthetic oligonucleotide
tattagctagaatcaaccagcgcggttctt

SEQ ID NO: 281033 - DNA, 30 bp, Artificial Sequence
  Synthetic oligonucleotide
atccaagtcgactaggcccagcgggttctt

SEQ ID NO: 281034 - DNA, 30 bp, Artificial Sequence
  Synthetic oligonucleotide
gcgtcctaccggaccaagcccatggttctt

SEQ ID NO: 281035 - DNA, 30 bp, Artificial Sequence
  Synthetic oligonucleotide
cacttggtacacgaggatgttttggttctt

SEQ ID NO: 281036 - DNA, 30 bp, Artificial Sequence
  Synthetic oligonucleotide
tgctccgttatacatgatgttgtatttctt

SEQ ID NO: 281037 - DNA, 30 bp, Artificial Sequence
  Synthetic oligonucleotide
tgcgttccacctgacgctgttcggtttctt

SEQ ID NO: 281038 - DNA, 30 bp, Artificial Sequence
  Synthetic oligonucleotide
aggtatcagaacatatatcgtttttttctt

SEQ ID NO: 281039 - DNA, 30 bp, Artificial Sequence
  Synthetic oligonucleotide
catctgctaaacgtgatttaaaaaaaagtt

SEQ ID NO: 281040 - DNA, 30 bp, Artificial Sequence
  Synthetic oligonucleotide
tcgtgacgcgttcgaacaccgaaaaaagtt

SEQ ID NO: 281041 - DNA, 30 bp, Artificial Sequence
  Synthetic oligonucleotide
cattatggggatgttgtgcttttaaaagtt

SEQ ID NO: 281042 - DNA, 30 bp, Artificial Sequence
  Synthetic oligonucleotide
gcgattcagtcagggccccaaaacaaagtt

SEQ ID NO: 281043 - DNA, 30 bp, Artificial Sequence
  Synthetic oligonucleotide
ttcgaaaaccggaaagttgtcagtaaagtt

SEQ ID NO: 281044 - DNA, 30 bp, Artificial Sequence
  Synthetic oligonucleotide
ttgaaatgccaggaaaaacttcgtaaagtt

SEQ ID NO: 281045 - DNA, 30 bp, Artificial Sequence
  Synthetic oligonucleotide
cccgcgtcgcgtgggtgttcaggtaaagtt

SEQ ID NO: 281046 - DNA, 30 bp, Artificial Sequence
  Synthetic oligonucleotide
taggggcccctcacgaggacctttaaagtt

SEQ ID NO: 281047 - DNA, 30 bp, Artificial Sequence
  Synthetic oligonucleotide
acgagttaagtggtcaatgggagacaagtt

SEQ ID NO: 281048 - DNA, 30 bp, Artificial Sequence
  Synthetic oligonucleotide
cgaattgccgatattggtgagttgcaagtt

SEQ ID NO: 281049 - DNA, 30 bp, Artificial Sequence
  Synthetic oligonucleotide
atacgccgttcagtcggatcccatcaagtt

SEQ ID NO: 281050 - DNA, 30 bp, Artificial Sequence
  Synthetic oligonucleotide
ggcatggactggctaagtagacgtcaagtt

SEQ ID NO: 281051 - DNA, 30 bp, Artificial Sequence
  Synthetic oligonucleotide
aaggtaatccgctaactaaggtgtcaagtt

SEQ ID NO: 281052 - DNA, 30 bp, Artificial Sequence
  Synthetic oligonucleotide
gttccccgataaacctactaaattcaagtt

SEQ ID NO: 281053 - DNA, 30 bp, Artificial Sequence
  Synthetic oligonucleotide
aaatgcgataattacttgatcttcgaagtt

SEQ ID NO: 281054 - DNA, 30 bp, Artificial Sequence
  Synthetic oligonucleotide
ctctacacctacgtggagatcgtggaagtt

SEQ ID NO: 281055 - DNA, 30 bp, Artificial Sequence
  Synthetic oligonucleotide
cccactcttagggccgtaggacatgaagtt

SEQ ID NO: 281056 - DNA, 30 bp, Artificial Sequence
  Synthetic oligonucleotide
gaacccaataccttgagtagaaactaagtt

SEQ ID NO: 281057 - DNA, 30 bp, Artificial Sequence
  Synthetic oligonucleotide
tgcccgcgaacctctcctgacgtctaagtt

SEQ ID NO: 281058 - DNA, 30 bp, Artificial Sequence
  Synthetic oligonucleotide
gtcgacatcgcaaattaagaatagtaagtt

SEQ ID NO: 281059 - DNA, 30 bp, Artificial Sequence
  Synthetic oligonucleotide
agcaaacgtaccagcactcataggtaagtt

SEQ ID NO: 281060 - DNA, 30 bp, Artificial Sequence
  Synthetic oligonucleotide
gaagtcgaaggagtcaaagatctgtaagtt

SEQ ID NO: 281061 - DNA, 30 bp, Artificial Sequence
  Synthetic oligonucleotide
gacggtggtagcaaatgggtacattaagtt

SEQ ID NO: 281062 - DNA, 30 bp, Artificial Sequence
  Synthetic oligonucleotide
gtcaggtcgtttggcgaggtcaccacagtt

SEQ ID NO: 281063 - DNA, 30 bp, Artificial Sequence
  Synthetic oligonucleotide
gtttaggaatgtgcttatgataggacagtt

SEQ ID NO: 281064 - DNA, 30 bp, Artificial Sequence
  Synthetic oligonucleotide
cagtgagaatattcagctgtccggacagtt

SEQ ID NO: 281065 - DNA, 30 bp, Artificial Sequence
  Synthetic oligonucleotide
cggggagtgtcccttcagaacgatacagtt

SEQ ID NO: 281066 - DNA, 30 bp, Artificial Sequence
  Synthetic oligonucleotide
agggctgaggcagaattaactggtacagtt

SEQ ID NO: 281067 - DNA, 30 bp, Artificial Sequence
  Synthetic oligonucleotide
caggtacctatggaccactacattacagtt

SEQ ID NO: 281068 - DNA, 30 bp, Artificial Sequence
  Synthetic oligonucleotide
ggagtaacggaaagccgtttatttacagtt

SEQ ID NO: 281069 - DNA, 30 bp, Artificial Sequence
  Synthetic oligonucleotide
cgccccttcgtgccgagactgtaaccagtt

SEQ ID NO: 281070 - DNA, 30 bp, Artificial Sequence
  Synthetic oligonucleotide
gctctagaagcgcaggtttgatacccagtt

SEQ ID NO: 281071 - DNA, 30 bp, Artificial Sequence
  Synthetic oligonucleotide
tatggcgcttgtcgacattccaccccagtt

SEQ ID NO: 281072 - DNA, 30 bp, Artificial Sequence
  Synthetic oligonucleotide
ggtgtataataaagcttaaaccagccagtt

SEQ ID NO: 281073 - DNA, 30 bp, Artificial Sequence
  Synthetic oligonucleotide
cagccgtctattcataatctatatccagtt

SEQ ID NO: 281074 - DNA, 30 bp, Artificial Sequence
  Synthetic oligonucleotide
gcacgccattgttcatctcaatgagcagtt

SEQ ID NO: 281075 - DNA, 30 bp, Artificial Sequence
  Synthetic oligonucleotide
tagatctccgatcgtatggatgtagcagtt

SEQ ID NO: 281076 - DNA, 30 bp, Artificial Sequence
  Synthetic oligonucleotide
gggagctagccgatgtcatgcaaggcagtt

SEQ ID NO: 281077 - DNA, 30 bp, Artificial Sequence
  Synthetic oligonucleotide
cggtgcatccactcgttcgagcctgcagtt

SEQ ID NO: 281078 - DNA, 30 bp, Artificial Sequence
  Synthetic oligonucleotide
taatgtgatagaaacaaggattgtgcagtt

SEQ ID NO: 281079 - DNA, 30 bp, Artificial Sequence
  Synthetic oligonucleotide
caacccataattcgctcggttaactcagtt

SEQ ID NO: 281080 - DNA, 30 bp, Artificial Sequence
  Synthetic oligonucleotide
cgtttaaagttaagcttaagactctcagtt

SEQ ID NO: 281081 - DNA, 30 bp, Artificial Sequence
  Synthetic oligonucleotide
gccacatgagacattcgtcgtggttcagtt

SEQ ID NO: 281082 - DNA, 30 bp, Artificial Sequence
  Synthetic oligonucleotide
atgtcacaagactatattgctccgagagtt

SEQ ID NO: 281083 - DNA, 30 bp, Artificial Sequence
  Synthetic oligonucleotide
tgctaaaaggctgagcgacccgtgagagtt

SEQ ID NO: 281084 - DNA, 30 bp, Artificial Sequence
  Synthetic oligonucleotide
cgcgtacttctgctttcgatgactagagtt

SEQ ID NO: 281085 - DNA, 30 bp, Artificial Sequence
  Synthetic oligonucleotide
ccaactatggacgcggactattgacgagtt

SEQ ID NO: 281086 - DNA, 30 bp, Artificial Sequence
  Synthetic oligonucleotide
tttgcgtccacgtttttaattgtacgagtt

SEQ ID NO: 281087 - DNA, 30 bp, Artificial Sequence
  Synthetic oligonucleotide
caaggtgtagggagaaccttcggccgagtt

SEQ ID NO: 281088 - DNA, 30 bp, Artificial Sequence
  Synthetic oligonucleotide
aaatgaaaatagaggaccgcatagcgagtt

SEQ ID NO: 281089 - DNA, 30 bp, Artificial Sequence
  Synthetic oligonucleotide
acggaggctccgtgccctacggctcgagtt

SEQ ID NO: 281090 - DNA, 30 bp, Artificial Sequence
  Synthetic oligonucleotide
tctacagacactaggttgtggtgtcgagtt

SEQ ID NO: 281091 - DNA, 30 bp, Artificial Sequence
  Synthetic oligonucleotide
tccataacgttaacttaccggacaggagtt

SEQ ID NO: 281092 - DNA, 30 bp, Artificial Sequence
  Synthetic oligonucleotide
gtctacaactcgtcttgaaaaccaggagtt

SEQ ID NO: 281093 - DNA, 30 bp, Artificial Sequence
  Synthetic oligonucleotide
gtacaccggagtctttcaaagcatggagtt

SEQ ID NO: 281094 - DNA, 30 bp, Artificial Sequence
  Synthetic oligonucleotide
atagtcgccgttatgcgataacttggagtt

SEQ ID NO: 281095 - DNA, 30 bp, Artificial Sequence
  Synthetic oligonucleotide
cgaacgcgcttagacttactgcttggagtt

SEQ ID NO: 281096 - DNA, 30 bp, Artificial Sequence
  Synthetic oligonucleotide
ggagtggacaatcttgcgagggttggagtt

SEQ ID NO: 281097 - DNA, 30 bp, Artificial Sequence
  Synthetic oligonucleotide
cttaccaacgtgtggttatggccatgagtt

SEQ ID NO: 281098 - DNA, 30 bp, Artificial Sequence
  Synthetic oligonucleotide
ttgttacgtttgatgatctctttctgagtt

SEQ ID NO: 281099 - DNA, 30 bp, Artificial Sequence
  Synthetic oligonucleotide
gaagagcgctttgacaaccgacagtgagtt

SEQ ID NO: 281100 - DNA, 30 bp, Artificial Sequence
  Synthetic oligonucleotide
acgggtcgcggatggtacagcaggtgagtt

SEQ ID NO: 281101 - DNA, 30 bp, Artificial Sequence
  Synthetic oligonucleotide
tccctacacgctcttatgctcctgtgagtt

SEQ ID NO: 281102 - DNA, 30 bp, Artificial Sequence
  Synthetic oligonucleotide
ccggaggcaaaatagcggtgtaattgagtt

SEQ ID NO: 281103 - DNA, 30 bp, Artificial Sequence
  Synthetic oligonucleotide
caagttgtacataacgacgagtgttgagtt

SEQ ID NO: 281104 - DNA, 30 bp, Artificial Sequence
  Synthetic oligonucleotide
taaatcggctagcctctgggttgaatagtt

SEQ ID NO: 281105 - DNA, 30 bp, Artificial Sequence
  Synthetic oligonucleotide
cgtgggctcttgttcaggtcagtaatagtt

SEQ ID NO: 281106 - DNA, 30 bp, Artificial Sequence
  Synthetic oligonucleotide
tcaaacgcacaaatactcgactggatagtt

SEQ ID NO: 281107 - DNA, 30 bp, Artificial Sequence
  Synthetic oligonucleotide
tacgctcaaattggggctgtggatatagtt

SEQ ID NO: 281108 - DNA, 30 bp, Artificial Sequence
  Synthetic oligonucleotide
gcgttacacgcacgctatcaagctatagtt

SEQ ID NO: 281109 - DNA, 30 bp, Artificial Sequence
  Synthetic oligonucleotide
gactcgtgtagtcaacggctatgtatagtt

SEQ ID NO: 281110 - DNA, 30 bp, Artificial Sequence
  Synthetic oligonucleotide
ctctccccgcagtggggggcaaacctagtt

SEQ ID NO: 281111 - DNA, 30 bp, Artificial Sequence
  Synthetic oligonucleotide
ccattacaattcatgccctcaaagctagtt

SEQ ID NO: 281112 - DNA, 30 bp, Artificial Sequence
  Synthetic oligonucleotide
tgatcccggttgctgttcttaagtctagtt

SEQ ID NO: 281113 - DNA, 30 bp, Artificial Sequence
  Synthetic oligonucleotide
aacgtagaaacgatgtggttcggtctagtt

SEQ ID NO: 281114 - DNA, 30 bp, Artificial Sequence
  Synthetic oligonucleotide
ataagatcagtatcgagaattaatgtagtt

SEQ ID NO: 281115 - DNA, 30 bp, Artificial Sequence
  Synthetic oligonucleotide
gccggaggggggatgacatggcatgtagtt

SEQ ID NO: 281116 - DNA, 30 bp, Artificial Sequence
  Synthetic oligonucleotide
taattcaattcattgatgaaatgtgtagtt

SEQ ID NO: 281117 - DNA, 30 bp, Artificial Sequence
  Synthetic oligonucleotide
ggagaccctaaggcttggacgggattagtt

SEQ ID NO: 281118 - DNA, 30 bp, Artificial Sequence
  Synthetic oligonucleotide
ttgaattggctcatagccctagtcttagtt

SEQ ID NO: 281119 - DNA, 30 bp, Artificial Sequence
  Synthetic oligonucleotide
cgattcgtcagtcattctctattcttagtt

SEQ ID NO: 281120 - DNA, 31 bp, Artificial Sequence
  Synthetic oligonucleotide
ccactgcttcaaactgttacggatgttagtt

SEQ ID NO: 281121 - DNA, 30 bp, Artificial Sequence
  Synthetic oligonucleotide
tctatgtgaataacctcttgataaaacgtt

SEQ ID NO: 281122 - DNA, 30 bp, Artificial Sequence
  Synthetic oligonucleotide
atctccgtgagggtcgaggtccgaaacgtt

SEQ ID NO: 281123 - DNA, 30 bp, Artificial Sequence
  Synthetic oligonucleotide
tgtagacgagtcaattaaagtttaaacgtt

SEQ ID NO: 281124 - DNA, 30 bp, Artificial Sequence
  Synthetic oligonucleotide
taaatgtgcaataaagtcgcgggcaacgtt

SEQ ID NO: 281125 - DNA, 30 bp, Artificial Sequence
  Synthetic oligonucleotide
attagtaccaaggcgtttgaggggaacgtt

SEQ ID NO: 281126 - DNA, 30 bp, Artificial Sequence
  Synthetic oligonucleotide
gggcacggtataaaacactcgtggaacgtt

SEQ ID NO: 281127 - DNA, 30 bp, Artificial Sequence
  Synthetic oligonucleotide
ggggtcggagcacactggccagaacacgtt

SEQ ID NO: 281128 - DNA, 30 bp, Artificial Sequence
  Synthetic oligonucleotide
gtatattgacttccgtatggtgaacacgtt

SEQ ID NO: 281129 - DNA, 30 bp, Artificial Sequence
  Synthetic oligonucleotide
gtcgatgacaatgaagctgatggccacgtt

SEQ ID NO: 281130 - DNA, 30 bp, Artificial Sequence
  Synthetic oligonucleotide
agtatccgcggatgcatagttatccacgtt

SEQ ID NO: 281131 - DNA, 30 bp, Artificial Sequence
  Synthetic oligonucleotide
aggcagtgtgcttattagtgctcgcacgtt

SEQ ID NO: 281132 - DNA, 30 bp, Artificial Sequence
  Synthetic oligonucleotide
atcaggcggaaatggattacgcgtcacgtt

SEQ ID NO: 281133 - DNA, 30 bp, Artificial Sequence
  Synthetic oligonucleotide
tcttgctgagagctgcaatttcaagacgtt

SEQ ID NO: 281134 - DNA, 30 bp, Artificial Sequence
  Synthetic oligonucleotide
ttagacaaatgattagtacgatgagacgtt

SEQ ID NO: 281135 - DNA, 30 bp, Artificial Sequence
  Synthetic oligonucleotide
ttagagcccgtggcgctgccctaggacgtt

SEQ ID NO: 281136 - DNA, 30 bp, Artificial Sequence
  Synthetic oligonucleotide
aaagtcattacgatctacccacgggacgtt

SEQ ID NO: 281137 - DNA, 30 bp, Artificial Sequence
  Synthetic oligonucleotide
agttagtgcacctgttaacatattgacgtt

SEQ ID NO: 281138 - DNA, 30 bp, Artificial Sequence
  Synthetic oligonucleotide
aggtaaaagcgcgccttaattgaatacgtt

SEQ ID NO: 281139 - DNA, 30 bp, Artificial Sequence
  Synthetic oligonucleotide
ccatggaccggaggccagaagatgtacgtt

SEQ ID NO: 281140 - DNA, 30 bp, Artificial Sequence
  Synthetic oligonucleotide
catactaaggcgggcaaggttaattacgtt

SEQ ID NO: 281141 - DNA, 30 bp, Artificial Sequence
  Synthetic oligonucleotide
tctctaacggctgtccgcttcgtttacgtt

SEQ ID NO: 281142 - DNA, 30 bp, Artificial Sequence
  Synthetic oligonucleotide
aggataagaagacgacagataaaaaccgtt

SEQ ID NO: 281143 - DNA, 30 bp, Artificial Sequence
  Synthetic oligonucleotide
atccagtaggttccccgagcacaaaccgtt

SEQ ID NO: 281144 - DNA, 30 bp, Artificial Sequence
  Synthetic oligonucleotide
aatgataattggcacgtccgcgcaaccgtt

SEQ ID NO: 281145 - DNA, 30 bp, Artificial Sequence
  Synthetic oligonucleotide
gaggtgttcggaatgtagcgtgtaaccgtt

SEQ ID NO: 281146 - DNA, 30 bp, Artificial Sequence
  Synthetic oligonucleotide
tgtcacagaggctgtgacggagctaccgtt

SEQ ID NO: 281147 - DNA, 30 bp, Artificial Sequence
  Synthetic oligonucleotide
tgttcactgtgtgtataattcgaccccgtt

SEQ ID NO: 281148 - DNA, 30 bp, Artificial Sequence
  Synthetic oligonucleotide
ggaaacgttcgggggagagtccatcccgtt

SEQ ID NO: 281149 - DNA, 30 bp, Artificial Sequence
  Synthetic oligonucleotide
gccaggaggctggttgggtagcatcccgtt

SEQ ID NO: 281150 - DNA, 30 bp, Artificial Sequence
  Synthetic oligonucleotide
ccggggttgattaggatgggggatcccgtt

SEQ ID NO: 281151 - DNA, 30 bp, Artificial Sequence
  Synthetic oligonucleotide
tgcataagcttcctgaaaaagttagccgtt

SEQ ID NO: 281152 - DNA, 30 bp, Artificial Sequence
  Synthetic oligonucleotide
agaagccggtgcatacaaaaacccgccgtt

SEQ ID NO: 281153 - DNA, 30 bp, Artificial Sequence
  Synthetic oligonucleotide
tagcaggattctttcgtaggattggccgtt

SEQ ID NO: 281154 - DNA, 30 bp, Artificial Sequence
  Synthetic oligonucleotide
ggaatcggccctcaggcattggctgccgtt

SEQ ID NO: 281155 - DNA, 30 bp, Artificial Sequence
  Synthetic oligonucleotide
ccctggagcgacagaacccccggtgccgtt

SEQ ID NO: 281156 - DNA, 30 bp, Artificial Sequence
  Synthetic oligonucleotide
tcgtcagccctgttttgcaggtgtgccgtt

SEQ ID NO: 281157 - DNA, 30 bp, Artificial Sequence
  Synthetic oligonucleotide
tgggtacttagactcacaagattatccgtt

SEQ ID NO: 281158 - DNA, 30 bp, Artificial Sequence
  Synthetic oligonucleotide
agcaatgatgactgcatgttgacaagcgtt

SEQ ID NO: 281159 - DNA, 30 bp, Artificial Sequence
  Synthetic oligonucleotide
gggcctgagaaaactttgtcagcaagcgtt

SEQ ID NO: 281160 - DNA, 30 bp, Artificial Sequence
  Synthetic oligonucleotide
tgttcgaaagtaagctatagtagaagcgtt

SEQ ID NO: 281161 - DNA, 30 bp, Artificial Sequence
  Synthetic oligonucleotide
catcaaatgcgccggagatagaccagcgtt

SEQ ID NO: 281162 - DNA, 30 bp, Artificial Sequence
  Synthetic oligonucleotide
gttagataatgaaccaggtggaccagcgtt

SEQ ID NO: 281163 - DNA, 30 bp, Artificial Sequence
  Synthetic oligonucleotide
agagctagcctcgttggcatctggagcgtt

SEQ ID NO: 281164 - DNA, 30 bp, Artificial Sequence
  Synthetic oligonucleotide
taaggtgttaagggtgtccgttgccgcgtt

SEQ ID NO: 281165 - DNA, 30 bp, Artificial Sequence
  Synthetic oligonucleotide
ctttgccctaacatttgcgaacggcgcgtt

SEQ ID NO: 281166 - DNA, 30 bp, Artificial Sequence
  Synthetic oligonucleotide
agagaccgaattatcaccgcctggcgcgtt

SEQ ID NO: 281167 - DNA, 30 bp, Artificial Sequence
  Synthetic oligonucleotide
tcgcgctgccggacactatgacgaggcgtt

SEQ ID NO: 281168 - DNA, 30 bp, Artificial Sequence
  Synthetic oligonucleotide
acgtccggtggttcacatcatcggggcgtt

SEQ ID NO: 281169 - DNA, 30 bp, Artificial Sequence
  Synthetic oligonucleotide
aaaagggcgtgagcacttgaagggggcgtt

SEQ ID NO: 281170 - DNA, 30 bp, Artificial Sequence
  Synthetic oligonucleotide
ccgattctcgttcccgaacgaatgggcgtt

SEQ ID NO: 281171 - DNA, 30 bp, Artificial Sequence
  Synthetic oligonucleotide
tagttattcctaattaaagtctttggcgtt

SEQ ID NO: 281172 - DNA, 30 bp, Artificial Sequence
  Synthetic oligonucleotide
aggagttactttaggcaagcatcatgcgtt

SEQ ID NO: 281173 - DNA, 30 bp, Artificial Sequence
  Synthetic oligonucleotide
agactgggaagcaacggatcactatgcgtt

SEQ ID NO: 281174 - DNA, 30 bp, Artificial Sequence
  Synthetic oligonucleotide
aacgccggcgaagaaaagtattactgcgtt

SEQ ID NO: 281175 - DNA, 30 bp, Artificial Sequence
  Synthetic oligonucleotide
taagagttttagtctgacccgctctgcgtt

SEQ ID NO: 281176 - DNA, 30 bp, Artificial Sequence
  Synthetic oligonucleotide
cattcaaaattaattcgccagtattgcgtt

SEQ ID NO: 281177 - DNA, 30 bp, Artificial Sequence
  Synthetic oligonucleotide
agcaacccgggcccagagtgccggatcgtt

SEQ ID NO: 281178 - DNA, 30 bp, Artificial Sequence
  Synthetic oligonucleotide
aaaaacagccgtttgtctccacgtatcgtt

SEQ ID NO: 281179 - DNA, 30 bp, Artificial Sequence
  Synthetic oligonucleotide
cggaaacgttctaatctgatatccctcgtt

SEQ ID NO: 281180 - DNA, 30 bp, Artificial Sequence
  Synthetic oligonucleotide
gcagtttggcggtctgtcggggcggtcgtt

SEQ ID NO: 281181 - DNA, 30 bp, Artificial Sequence
  Synthetic oligonucleotide
attgtagtgatggcagagtctttggtcgtt

SEQ ID NO: 281182 - DNA, 30 bp, Artificial Sequence
  Synthetic oligonucleotide
gtgagctgtttactaatcgaaaaattcgtt

SEQ ID NO: 281183 - DNA, 30 bp, Artificial Sequence
  Synthetic oligonucleotide
ctacatgacatctacggttctgaattcgtt

SEQ ID NO: 281184 - DNA, 30 bp, Artificial Sequence
  Synthetic oligonucleotide
tatgaaatccaggatgagacttaattcgtt

SEQ ID NO: 281185 - DNA, 30 bp, Artificial Sequence
  Synthetic oligonucleotide
ggatcctgttttttctgatgactattcgtt

SEQ ID NO: 281186 - DNA, 30 bp, Artificial Sequence
  Synthetic oligonucleotide
gaggataacgtgcacccgttccacttcgtt

SEQ ID NO: 281187 - DNA, 30 bp, Artificial Sequence
  Synthetic oligonucleotide
attgtaaaactttggagccagaggttcgtt

SEQ ID NO: 281188 - DNA, 30 bp, Artificial Sequence
  Synthetic oligonucleotide
gtcctgtacgtaacgtggaaagggttcgtt

SEQ ID NO: 281189 - DNA, 30 bp, Artificial Sequence
  Synthetic oligonucleotide
gacaaaagaaacagttatcccctgttcgtt

SEQ ID NO: 281190 - DNA, 31 bp, Artificial Sequence
  Synthetic oligonucleotide
acagtcggtgatcacctcttggaaaaaggtt

SEQ ID NO: 281191 - DNA, 30 bp, Artificial Sequence
  Synthetic oligonucleotide
atcgcaaggtatttagatcgtggaaaggtt

SEQ ID NO: 281192 - DNA, 30 bp, Artificial Sequence
  Synthetic oligonucleotide
tgctatattcccttggagatggacaaggtt

SEQ ID NO: 281193 - DNA, 30 bp, Artificial Sequence
  Synthetic oligonucleotide
ttacgttcactgatactttacggcaaggtt

SEQ ID NO: 281194 - DNA, 30 bp, Artificial Sequence
  Synthetic oligonucleotide
tctgggataccaccctgattgtataaggtt

SEQ ID NO: 281195 - DNA, 30 bp, Artificial Sequence
  Synthetic oligonucleotide
tggtccgggtaggtttcgggacaccaggtt

SEQ ID NO: 281196 - DNA, 30 bp, Artificial Sequence
  Synthetic oligonucleotide
tagtgtaattccgcggttgggcagcaggtt

SEQ ID NO: 281197 - DNA, 30 bp, Artificial Sequence
  Synthetic oligonucleotide
caggtccctcatgggcaacccgggcaggtt

SEQ ID NO: 281198 - DNA, 30 bp, Artificial Sequence
  Synthetic oligonucleotide
aagagacacacaacggagctccgtcaggtt

SEQ ID NO: 281199 - DNA, 30 bp, Artificial Sequence
  Synthetic oligonucleotide
agtgctacaatcgagaagatatgtcaggtt

SEQ ID NO: 281200 - DNA, 30 bp, Artificial Sequence
  Synthetic oligonucleotide
acgagggccagaaacctcagttttcaggtt

SEQ ID NO: 281201 - DNA, 30 bp, Artificial Sequence
  Synthetic oligonucleotide
gtggcaaggacggaaacagtacgagaggtt

SEQ ID NO: 281202 - DNA, 30 bp, Artificial Sequence
  Synthetic oligonucleotide
ccatatttcattttctttcacggagaggtt

SEQ ID NO: 281203 - DNA, 30 bp, Artificial Sequence
  Synthetic oligonucleotide
ttaacagaaggatttggattgatagaggtt

SEQ ID NO: 281204 - DNA, 30 bp, Artificial Sequence
  Synthetic oligonucleotide
ggtggttaggtgtatcttgccgtagaggtt

SEQ ID NO: 281205 - DNA, 30 bp, Artificial Sequence
  Synthetic oligonucleotide
ggcgacttgcgggcgcacatcaacgaggtt

SEQ ID NO: 281206 - DNA, 30 bp, Artificial Sequence
  Synthetic oligonucleotide
tgggcttctcaccctctggcattggaggtt

SEQ ID NO: 281207 - DNA, 30 bp, Artificial Sequence
  Synthetic oligonucleotide
ggcacttctcataggtgtggattggaggtt

SEQ ID NO: 281208 - DNA, 30 bp, Artificial Sequence
  Synthetic oligonucleotide
agtacgtcacgaggcttagccgatgaggtt

SEQ ID NO: 281209 - DNA, 30 bp, Artificial Sequence
  Synthetic oligonucleotide
agacgagtattcgacttggggtgtgaggtt

SEQ ID NO: 281210 - DNA, 30 bp, Artificial Sequence
  Synthetic oligonucleotide
taagtgtaggtaaacgaggcgccaacggtt

SEQ ID NO: 281211 - DNA, 30 bp, Artificial Sequence
  Synthetic oligonucleotide
tactgactttcatataagggtggaacggtt

SEQ ID NO: 281212 - DNA, 30 bp, Artificial Sequence
  Synthetic oligonucleotide
ttagcctggctccgttaccaacagacggtt

SEQ ID NO: 281213 - DNA, 30 bp, Artificial Sequence
  Synthetic oligonucleotide
ctggtgcgaagatccggtttaacgacggtt

SEQ ID NO: 281214 - DNA, 30 bp, Artificial Sequence
  Synthetic oligonucleotide
gggtatgaacggcatcagtttccgacggtt

SEQ ID NO: 281215 - DNA, 30 bp, Artificial Sequence
  Synthetic oligonucleotide
acagggaaaagatgcacagtttcgacggtt

SEQ ID NO: 281216 - DNA, 30 bp, Artificial Sequence
  Synthetic oligonucleotide
agagggacgcgaaaaatggattctacggtt

SEQ ID NO: 281217 - DNA, 30 bp, Artificial Sequence
  Synthetic oligonucleotide
aggatggccagctgctctctgcacccggtt

SEQ ID NO: 281218 - DNA, 30 bp, Artificial Sequence
  Synthetic oligonucleotide
aggcctgctgctgtgtgatcagagccggtt

SEQ ID NO: 281219 - DNA, 30 bp, Artificial Sequence
  Synthetic oligonucleotide
agtcggcgtgtataaagtctgtaagcggtt

SEQ ID NO: 281220 - DNA, 30 bp, Artificial Sequence
  Synthetic oligonucleotide
gtttggatatgctcttgatagtcagcggtt

SEQ ID NO: 281221 - DNA, 30 bp, Artificial Sequence
  Synthetic oligonucleotide
tacacaaacaggccttagtatggcgcggtt

SEQ ID NO: 281222 - DNA, 30 bp, Artificial Sequence
  Synthetic oligonucleotide
ctcggcgaatacggtcgttaatatgcggtt

SEQ ID NO: 281223 - DNA, 30 bp, Artificial Sequence
  Synthetic oligonucleotide
atatgctacatccgaacaccgtgatcggtt

SEQ ID NO: 281224 - DNA, 30 bp, Artificial Sequence
  Synthetic oligonucleotide
tcctatccagatcggacttgtttctcggtt

SEQ ID NO: 281225 - DNA, 30 bp, Artificial Sequence
  Synthetic oligonucleotide
cagcgaaaatgcctcacttatcgttcggtt

SEQ ID NO: 281226 - DNA, 30 bp, Artificial Sequence
  Synthetic oligonucleotide
gccgcagggtccccagggtcagcaagggtt

SEQ ID NO: 281227 - DNA, 29 bp, Artificial Sequence
  Synthetic oligonucleotide
aggggagtgcttcattagcgacgagggtt

SEQ ID NO: 281228 - DNA, 30 bp, Artificial Sequence
  Synthetic oligonucleotide
tgagggcaatcctttgaggacgatagggtt

SEQ ID NO: 281229 - DNA, 30 bp, Artificial Sequence
  Synthetic oligonucleotide
cttgtgcaatacgtgagagcacgtagggtt

SEQ ID NO: 281230 - DNA, 30 bp, Artificial Sequence
  Synthetic oligonucleotide
ctcctttcactgttaattccacaccgggtt

SEQ ID NO: 281231 - DNA, 30 bp, Artificial Sequence
  Synthetic oligonucleotide
ctgggcgagattcagacttagatgcgggtt

SEQ ID NO: 281232 - DNA, 30 bp, Artificial Sequence
  Synthetic oligonucleotide
gacgagaacgtcagtggtctgtctcgggtt

SEQ ID NO: 281233 - DNA, 30 bp, Artificial Sequence
  Synthetic oligonucleotide
tcgtcgcctgtgacttgtcacagtcgggtt

SEQ ID NO: 281234 - DNA, 30 bp, Artificial Sequence
  Synthetic oligonucleotide
gaccgtagataaagatcattttacggggtt

SEQ ID NO: 281235 - DNA, 30 bp, Artificial Sequence
  Synthetic oligonucleotide
actgaagatgtacgaaacgtttgcggggtt

SEQ ID NO: 281236 - DNA, 30 bp, Artificial Sequence
  Synthetic oligonucleotide
cccggatatcgtcaaacgcgacagggggtt

SEQ ID NO: 281237 - DNA, 30 bp, Artificial Sequence
  Synthetic oligonucleotide
cactcagtggcaggataaaaacggggggtt

SEQ ID NO: 281238 - DNA, 30 bp, Artificial Sequence
  Synthetic oligonucleotide
actttgggcacagggtaaaagcctggggtt

SEQ ID NO: 281239 - DNA, 30 bp, Artificial Sequence
  Synthetic oligonucleotide
ttcaaatagtaggcgtctggtggtggggtt

SEQ ID NO: 281240 - DNA, 30 bp, Artificial Sequence
  Synthetic oligonucleotide
gctggaggagatggtttagtctcatgggtt

SEQ ID NO: 281241 - DNA, 30 bp, Artificial Sequence
  Synthetic oligonucleotide
tcagtcagatgtgcctcgctttgatgggtt

SEQ ID NO: 281242 - DNA, 30 bp, Artificial Sequence
  Synthetic oligonucleotide
tcgcgcatcgtctaggatcctatatgggtt

SEQ ID NO: 281243 - DNA, 30 bp, Artificial Sequence
  Synthetic oligonucleotide
gggattcgtagacttaccacgctatgggtt

SEQ ID NO: 281244 - DNA, 31 bp, Artificial Sequence
  Synthetic oligonucleotide
aagaggttcgtagaaggaagacttatgggtt

SEQ ID NO: 281245 - DNA, 30 bp, Artificial Sequence
  Synthetic oligonucleotide
aatggaaaatgtttcaagccgacctgggtt

SEQ ID NO: 281246 - DNA, 30 bp, Artificial Sequence
  Synthetic oligonucleotide
aaggtggccgtcattggaatctagtgggtt

SEQ ID NO: 281247 - DNA, 30 bp, Artificial Sequence
  Synthetic oligonucleotide
ccaccgaagtctctcgaggagatgtgggtt

SEQ ID NO: 281248 - DNA, 30 bp, Artificial Sequence
  Synthetic oligonucleotide
ctcaagatgaggcgactttgatattgggtt

SEQ ID NO: 281249 - DNA, 30 bp, Artificial Sequence
  Synthetic oligonucleotide
ctggactgcttgtgtagcgcggtcatggtt

SEQ ID NO: 281250 - DNA, 30 bp, Artificial Sequence
  Synthetic oligonucleotide
actagagataaggggtttgctctactggtt

SEQ ID NO: 281251 - DNA, 30 bp, Artificial Sequence
  Synthetic oligonucleotide
gataggggggcggtgcagcgtctcctggtt

SEQ ID NO: 281252 - DNA, 30 bp, Artificial Sequence
  Synthetic oligonucleotide
agatgagattcgtggaagcttctcctggtt

SEQ ID NO: 281253 - DNA, 30 bp, Artificial Sequence
  Synthetic oligonucleotide
gaggagtatgctctgcatcttacgctggtt

SEQ ID NO: 281254 - DNA, 30 bp, Artificial Sequence
  Synthetic oligonucleotide
attgaagtctagacttcgctgcggctggtt

SEQ ID NO: 281255 - DNA, 30 bp, Artificial Sequence
  Synthetic oligonucleotide
tagaggttacgaggctggcgtgtgctggtt

SEQ ID NO: 281256 - DNA, 30 bp, Artificial Sequence
  Synthetic oligonucleotide
gttacgggagtagtgctttacggtctggtt

SEQ ID NO: 281257 - DNA, 30 bp, Artificial Sequence
  Synthetic oligonucleotide
agagttttgtacggattataaacagtggtt

SEQ ID NO: 281258 - DNA, 30 bp, Artificial Sequence
  Synthetic oligonucleotide
gctgttggggtggagatctcaatagtggtt

SEQ ID NO: 281259 - DNA, 30 bp, Artificial Sequence
  Synthetic oligonucleotide
gcatgccaactgaatgacgcggacgtggtt

SEQ ID NO: 281260 - DNA, 30 bp, Artificial Sequence
  Synthetic oligonucleotide
gggacttgctggactatgattgatgtggtt

SEQ ID NO: 281261 - DNA, 30 bp, Artificial Sequence
  Synthetic oligonucleotide
aatagggaatcggctagactcgaattggtt

SEQ ID NO: 281262 - DNA, 30 bp, Artificial Sequence
  Synthetic oligonucleotide
atggtgtataccggcggttataccttggtt

SEQ ID NO: 281263 - DNA, 30 bp, Artificial Sequence
  Synthetic oligonucleotide
gatgaaccgtagtcggccccggccttggtt

SEQ ID NO: 281264 - DNA, 30 bp, Artificial Sequence
  Synthetic oligonucleotide
gactaggacagaaataacgtgtcgttggtt

SEQ ID NO: 281265 - DNA, 30 bp, Artificial Sequence
  Synthetic oligonucleotide
tcgtacggtggtgagtggagggatttggtt

SEQ ID NO: 281266 - DNA, 30 bp, Artificial Sequence
  Synthetic oligonucleotide
ggatgctgttggtacataagtaaaaatgtt

SEQ ID NO: 281267 - DNA, 30 bp, Artificial Sequence
  Synthetic oligonucleotide
agataacacccctgtttaacgtaaaatgtt

SEQ ID NO: 281268 - DNA, 30 bp, Artificial Sequence
  Synthetic oligonucleotide
acgttcggacgaacgtcgtcgcgaaatgtt

SEQ ID NO: 281269 - DNA, 30 bp, Artificial Sequence
  Synthetic oligonucleotide
gagatagtgtggttcagtaacgcgaatgtt

SEQ ID NO: 281270 - DNA, 30 bp, Artificial Sequence
  Synthetic oligonucleotide
cttcccgtatctcatcctgagcataatgtt

SEQ ID NO: 281271 - DNA, 30 bp, Artificial Sequence
  Synthetic oligonucleotide
acggacacgtgtcctccaacggaacatgtt

SEQ ID NO: 281272 - DNA, 30 bp, Artificial Sequence
  Synthetic oligonucleotide
aaggtcgtctaaacacctggacagcatgtt

SEQ ID NO: 281273 - DNA, 30 bp, Artificial Sequence
  Synthetic oligonucleotide
catatccatcagcgaaatgtcgctcatgtt

SEQ ID NO: 281274 - DNA, 30 bp, Artificial Sequence
  Synthetic oligonucleotide
acacagaatcatgcagggaggcttcatgtt

SEQ ID NO: 281275 - DNA, 30 bp, Artificial Sequence
  Synthetic oligonucleotide
cagattatagcgccaaatacaccagatgtt

SEQ ID NO: 281276 - DNA, 30 bp, Artificial Sequence
  Synthetic oligonucleotide
ccaaaataaccaacataccttgccgatgtt

SEQ ID NO: 281277 - DNA, 30 bp, Artificial Sequence
  Synthetic oligonucleotide
gggtgttcacaccatacgcgtatcgatgtt

SEQ ID NO: 281278 - DNA, 30 bp, Artificial Sequence
  Synthetic oligonucleotide
gtgattcgaaaaacctctgtaccggatgtt

SEQ ID NO: 281279 - DNA, 30 bp, Artificial Sequence
  Synthetic oligonucleotide
gaggaataatctgtccgcgcacgggatgtt

SEQ ID NO: 281280 - DNA, 30 bp, Artificial Sequence
  Synthetic oligonucleotide
caaatggcaggtattagcgctaatgatgtt

SEQ ID NO: 281281 - DNA, 30 bp, Artificial Sequence
  Synthetic oligonucleotide
attacatgacagccccggcgataatatgtt

SEQ ID NO: 281282 - DNA, 30 bp, Artificial Sequence
  Synthetic oligonucleotide
ttgcgatctgactatctgtctcagtatgtt

SEQ ID NO: 281283 - DNA, 30 bp, Artificial Sequence
  Synthetic oligonucleotide
tcttaattttaatacagttccgtttatgtt

SEQ ID NO: 281284 - DNA, 30 bp, Artificial Sequence
  Synthetic oligonucleotide
aggctggcaaataggtgcagggaaactgtt

SEQ ID NO: 281285 - DNA, 30 bp, Artificial Sequence
  Synthetic oligonucleotide
tataggccagaaaggctgcgtctcactgtt

SEQ ID NO: 281286 - DNA, 30 bp, Artificial Sequence
  Synthetic oligonucleotide
cctggacgggatagcctagggtagactgtt

SEQ ID NO: 281287 - DNA, 30 bp, Artificial Sequence
  Synthetic oligonucleotide
gaaacccggcatgtacactccaggactgtt

SEQ ID NO: 281288 - DNA, 30 bp, Artificial Sequence
  Synthetic oligonucleotide
caccctaaatcatccataagttttactgtt

SEQ ID NO: 281289 - DNA, 30 bp, Artificial Sequence
  Synthetic oligonucleotide
atggcaaacgatagtgaggggccacctgtt

SEQ ID NO: 281290 - DNA, 30 bp, Artificial Sequence
  Synthetic oligonucleotide
gcgggaaggtattctaatctagagcctgtt

SEQ ID NO: 281291 - DNA, 30 bp, Artificial Sequence
  Synthetic oligonucleotide
acgttgggagacagaggtactttgcctgtt

SEQ ID NO: 281292 - DNA, 30 bp, Artificial Sequence
  Synthetic oligonucleotide
aatggtacgcgcctcagcgaccgtcctgtt

SEQ ID NO: 281293 - DNA, 30 bp, Artificial Sequence
  Synthetic oligonucleotide
cgtgtgcattcaggggaattagcagctgtt

SEQ ID NO: 281294 - DNA, 30 bp, Artificial Sequence
  Synthetic oligonucleotide
ttctctgcgtaagccaactagcaggctgtt

SEQ ID NO: 281295 - DNA, 30 bp, Artificial Sequence
  Synthetic oligonucleotide
ataacgtcgaaaaacggcttagtggctgtt

SEQ ID NO: 281296 - DNA, 30 bp, Artificial Sequence
  Synthetic oligonucleotide
agggtttcaaaactgtgggtggttgctgtt

SEQ ID NO: 281297 - DNA, 30 bp, Artificial Sequence
  Synthetic oligonucleotide
aaagtgggatgtagcgccacggcctctgtt

SEQ ID NO: 281298 - DNA, 30 bp, Artificial Sequence
  Synthetic oligonucleotide
gtagcgtcacaattcatagaccgttctgtt

SEQ ID NO: 281299 - DNA, 30 bp, Artificial Sequence
  Synthetic oligonucleotide
aacaggcgaaagagacgttcctcaagtgtt

SEQ ID NO: 281300 - DNA, 30 bp, Artificial Sequence
  Synthetic oligonucleotide
gaggacataaatggaaatatgctaagtgtt

SEQ ID NO: 281301 - DNA, 30 bp, Artificial Sequence
  Synthetic oligonucleotide
agtgctttggatgtgcctcgtttaagtgtt

SEQ ID NO: 281302 - DNA, 30 bp, Artificial Sequence
  Synthetic oligonucleotide
ctgtgattggaacgctccttcatgagtgtt

SEQ ID NO: 281303 - DNA, 30 bp, Artificial Sequence
  Synthetic oligonucleotide
tgagggtaagggcggggctatagtagtgtt

SEQ ID NO: 281304 - DNA, 30 bp, Artificial Sequence
  Synthetic oligonucleotide
taagatcggcaagcatttatgattagtgtt

SEQ ID NO: 281305 - DNA, 30 bp, Artificial Sequence
  Synthetic oligonucleotide
atgacttcgttttttggattcgaacgtgtt

SEQ ID NO: 281306 - DNA, 30 bp, Artificial Sequence
  Synthetic oligonucleotide
aggtatgttgataatggaaattaccgtgtt

SEQ ID NO: 281307 - DNA, 30 bp, Artificial Sequence
  Synthetic oligonucleotide
ttccatcggcatccataacgggaaggtgtt

SEQ ID NO: 281308 - DNA, 30 bp, Artificial Sequence
  Synthetic oligonucleotide
ggccctcatggcgagttatgggaaggtgtt

SEQ ID NO: 281309 - DNA, 30 bp, Artificial Sequence
  Synthetic oligonucleotide
cttcttcgggccgctagtggagcaggtgtt

SEQ ID NO: 281310 - DNA, 30 bp, Artificial Sequence
  Synthetic oligonucleotide
tgttgctgataaaaaggagacataggtgtt

SEQ ID NO: 281311 - DNA, 30 bp, Artificial Sequence
  Synthetic oligonucleotide
ccgtctgggcccaatggcatgggcggtgtt

SEQ ID NO: 281312 - DNA, 30 bp, Artificial Sequence
  Synthetic oligonucleotide
agggatgtaagcgctttcactactggtgtt

SEQ ID NO: 281313 - DNA, 30 bp, Artificial Sequence
  Synthetic oligonucleotide
tcgccacagttcactcgctgaatctgtgtt

SEQ ID NO: 281314 - DNA, 30 bp, Artificial Sequence
  Synthetic oligonucleotide
ggcgcggggatcactccttccgcgtgtgtt

SEQ ID NO: 281315 - DNA, 30 bp, Artificial Sequence
  Synthetic oligonucleotide
ggtgtgtgcgacatgtgaacgcggtgtgtt

SEQ ID NO: 281316 - DNA, 30 bp, Artificial Sequence
  Synthetic oligonucleotide
tgtggtaccgagcgtaaataatagattgtt

SEQ ID NO: 281317 - DNA, 30 bp, Artificial Sequence
  Synthetic oligonucleotide
ggttggcccaccaataaccacgggattgtt

SEQ ID NO: 281318 - DNA, 30 bp, Artificial Sequence
  Synthetic oligonucleotide
gctggtctctaatgcactgataagcttgtt

SEQ ID NO: 281319 - DNA, 30 bp, Artificial Sequence
  Synthetic oligonucleotide
gtgtaggggcagaccgtacgaaggcttgtt

SEQ ID NO: 281320 - DNA, 30 bp, Artificial Sequence
  Synthetic oligonucleotide
ctcaggagagtcaccgagagatctcttgtt

SEQ ID NO: 281321 - DNA, 30 bp, Artificial Sequence
  Synthetic oligonucleotide
gagcggcaaggaacactataatgtcttgtt

SEQ ID NO: 281322 - DNA, 30 bp, Artificial Sequence
  Synthetic oligonucleotide
aaggtacttgggtaatcctcgattcttgtt

SEQ ID NO: 281323 - DNA, 30 bp, Artificial Sequence
  Synthetic oligonucleotide
ctgttggggcggtacgagggcttatttgtt

SEQ ID NO: 281324 - DNA, 30 bp, Artificial Sequence
  Synthetic oligonucleotide
tcctggttttgccagacattggggtttgtt

SEQ ID NO: 281325 - DNA, 30 bp, Artificial Sequence
  Synthetic oligonucleotide
gtgagtacatgactagtatagatgtttgtt

SEQ ID NO: 281326 - DNA, 30 bp, Artificial Sequence
  Synthetic oligonucleotide
agagggattttggattgtattatgtttgtt

SEQ ID NO: 281327 - DNA, 30 bp, Artificial Sequence
  Synthetic oligonucleotide
cgtcttgtaatgagtgtaaggaggaaattt

SEQ ID NO: 281328 - DNA, 29 bp, Artificial Sequence
  Synthetic oligonucleotide
cacttggtcgttgggcacatgctaaattt

SEQ ID NO: 281329 - DNA, 30 bp, Artificial Sequence
  Synthetic oligonucleotide
gtcggcgttctgaatttagctagtaaattt

SEQ ID NO: 281330 - DNA, 30 bp, Artificial Sequence
  Synthetic oligonucleotide
tcgtaaattcacctactgcagtgtaaattt

SEQ ID NO: 281331 - DNA, 30 bp, Artificial Sequence
  Synthetic oligonucleotide
ttatgggtaggcaggactacaattaaattt

SEQ ID NO: 281332 - DNA, 30 bp, Artificial Sequence
  Synthetic oligonucleotide
taacggtcggggccttttgccaaacaattt

SEQ ID NO: 281333 - DNA, 30 bp, Artificial Sequence
  Synthetic oligonucleotide
ggaatcgagcgacgcattcaatgccaattt

SEQ ID NO: 281334 - DNA, 30 bp, Artificial Sequence
  Synthetic oligonucleotide
agagataatcaccagtgtatccagcaattt

SEQ ID NO: 281335 - DNA, 30 bp, Artificial Sequence
  Synthetic oligonucleotide
gatgggctatgagcagagatcgcgcaattt

SEQ ID NO: 281336 - DNA, 30 bp, Artificial Sequence
  Synthetic oligonucleotide
tcactatgaatttctcctacttcgcaattt

SEQ ID NO: 281337 - DNA, 30 bp, Artificial Sequence
  Synthetic oligonucleotide
tcagcctcgcagatttatcgagtgcaattt

SEQ ID NO: 281338 - DNA, 30 bp, Artificial Sequence
  Synthetic oligonucleotide
agggtcccttgggccgggaatagtcaattt

SEQ ID NO: 281339 - DNA, 30 bp, Artificial Sequence
  Synthetic oligonucleotide
gccgcccaatcccggtggaggtgtcaattt

SEQ ID NO: 281340 - DNA, 30 bp, Artificial Sequence
  Synthetic oligonucleotide
tagtaattgaggtgaaccggagaagaattt

SEQ ID NO: 281341 - DNA, 30 bp, Artificial Sequence
  Synthetic oligonucleotide
cggtaattttgtttgcgactacccgaattt

SEQ ID NO: 281342 - DNA, 30 bp, Artificial Sequence
  Synthetic oligonucleotide
ataataaccgggtgtcaacggcgggaattt

SEQ ID NO: 281343 - DNA, 30 bp, Artificial Sequence
  Synthetic oligonucleotide
aggccatagggtatctcctcctttgaattt

SEQ ID NO: 281344 - DNA, 30 bp, Artificial Sequence
  Synthetic oligonucleotide
catgagaggcacatcgcaatggcataattt

SEQ ID NO: 281345 - DNA, 30 bp, Artificial Sequence
  Synthetic oligonucleotide
cttctagcaagcgcgagggaacgataattt

SEQ ID NO: 281346 - DNA, 30 bp, Artificial Sequence
  Synthetic oligonucleotide
atcgaatccaagtagacctcgagctaattt

SEQ ID NO: 281347 - DNA, 30 bp, Artificial Sequence
  Synthetic oligonucleotide
agtgcgcgagaaaatctacgtgggtaattt

SEQ ID NO: 281348 - DNA, 30 bp, Artificial Sequence
  Synthetic oligonucleotide
tagaggagcgtgcattttatactgtaattt

SEQ ID NO: 281349 - DNA, 30 bp, Artificial Sequence
  Synthetic oligonucleotide
gttcgaatctgggatgcaaggctgtaattt

SEQ ID NO: 281350 - DNA, 30 bp, Artificial Sequence
  Synthetic oligonucleotide
ggccttcattttgattgtgaactttaattt

SEQ ID NO: 281351 - DNA, 30 bp, Artificial Sequence
  Synthetic oligonucleotide
gggggattcttaacagatggcgagacattt

SEQ ID NO: 281352 - DNA, 30 bp, Artificial Sequence
  Synthetic oligonucleotide
tatacggctgagtgtctacgcgggacattt

SEQ ID NO: 281353 - DNA, 30 bp, Artificial Sequence
  Synthetic oligonucleotide
ggcaacatcaacgggcagtaaatgacattt

SEQ ID NO: 281354 - DNA, 30 bp, Artificial Sequence
  Synthetic oligonucleotide
catatggaccgggaagcttacaccccattt

SEQ ID NO: 281355 - DNA, 30 bp, Artificial Sequence
  Synthetic oligonucleotide
atgtcagttaaacgcgtataccgcccattt

SEQ ID NO: 281356 - DNA, 30 bp, Artificial Sequence
  Synthetic oligonucleotide
actggacacaggcatatcataaatccattt

SEQ ID NO: 281357 - DNA, 30 bp, Artificial Sequence
  Synthetic oligonucleotide
agtttcctcacagtaaggagccgtccattt

SEQ ID NO: 281358 - DNA, 30 bp, Artificial Sequence
  Synthetic oligonucleotide
gaggtctctgaatagctggttatagcattt

SEQ ID NO: 281359 - DNA, 30 bp, Artificial Sequence
  Synthetic oligonucleotide
cgagaggcggtcttgaaaaagaacgcattt

SEQ ID NO: 281360 - DNA, 30 bp, Artificial Sequence
  Synthetic oligonucleotide
atttaagattgatggaaatggtacgcattt

SEQ ID NO: 281361 - DNA, 30 bp, Artificial Sequence
  Synthetic oligonucleotide
cgaagtgttcttagcggttgaaccgcattt

SEQ ID NO: 281362 - DNA, 30 bp, Artificial Sequence
  Synthetic oligonucleotide
aatccagctttggcaggagtagtcgcattt

SEQ ID NO: 281363 - DNA, 30 bp, Artificial Sequence
  Synthetic oligonucleotide
tgacctgaaggcatcggtggattcgcattt

SEQ ID NO: 281364 - DNA, 30 bp, Artificial Sequence
  Synthetic oligonucleotide
agctacatcaggtcaccggagccatcattt

SEQ ID NO: 281365 - DNA, 30 bp, Artificial Sequence
  Synthetic oligonucleotide
gttagtaagtacaaaggtaaagcttcattt

SEQ ID NO: 281366 - DNA, 30 bp, Artificial Sequence
  Synthetic oligonucleotide
cgagtgcagtatgtccatgcccaaagattt

SEQ ID NO: 281367 - DNA, 30 bp, Artificial Sequence
  Synthetic oligonucleotide
cgccccagcttgtcaaagcggaagagattt

SEQ ID NO: 281368 - DNA, 30 bp, Artificial Sequence
  Synthetic oligonucleotide
aagcctgggatcccaatactgaatagattt

SEQ ID NO: 281369 - DNA, 30 bp, Artificial Sequence
  Synthetic oligonucleotide
ttaggggtagcgctccacagcagacgattt

SEQ ID NO: 281370 - DNA, 30 bp, Artificial Sequence
  Synthetic oligonucleotide
cccaacttgtcttgtggctatatacgattt

SEQ ID NO: 281371 - DNA, 30 bp, Artificial Sequence
  Synthetic oligonucleotide
ggtaccggcagcagagtgccataccgattt

SEQ ID NO: 281372 - DNA, 30 bp, Artificial Sequence
  Synthetic oligonucleotide
gcagtttcagacttcggtggtaggcgattt

SEQ ID NO: 281373 - DNA, 30 bp, Artificial Sequence
  Synthetic oligonucleotide
gggcggcagcacattttcatccgaggattt

SEQ ID NO: 281374 - DNA, 30 bp, Artificial Sequence
  Synthetic oligonucleotide
cgggagattacatcgtatgctgtaggattt

SEQ ID NO: 281375 - DNA, 30 bp, Artificial Sequence
  Synthetic oligonucleotide
tatacaataccacagccgacaaacggattt

SEQ ID NO: 281376 - DNA, 30 bp, Artificial Sequence
  Synthetic oligonucleotide
ttctacaggttgggtagagtgcgcggattt

SEQ ID NO: 281377 - DNA, 30 bp, Artificial Sequence
  Synthetic oligonucleotide
attcgttacagctagatcaaatgcggattt

SEQ ID NO: 281378 - DNA, 30 bp, Artificial Sequence
  Synthetic oligonucleotide
ccaacccttaattgaactcccactggattt

SEQ ID NO: 281379 - DNA, 30 bp, Artificial Sequence
  Synthetic oligonucleotide
gaaacggaggagggcgaactctttggattt

SEQ ID NO: 281380 - DNA, 30 bp, Artificial Sequence
  Synthetic oligonucleotide
accggtaatatttcaatattcacatgattt

SEQ ID NO: 281381 - DNA, 30 bp, Artificial Sequence
  Synthetic oligonucleotide
tagcggccgcagtggtagcacgactgattt

SEQ ID NO: 281382 - DNA, 30 bp, Artificial Sequence
  Synthetic oligonucleotide
ggcttctgtaacgtgaccacaaaaatattt

SEQ ID NO: 281383 - DNA, 30 bp, Artificial Sequence
  Synthetic oligonucleotide
cacgttcccgtacaaaagcaaaagatattt

SEQ ID NO: 281384 - DNA, 29 bp, Artificial Sequence
  Synthetic oligonucleotide
tgtctgaacacataggatagcctatattt

SEQ ID NO: 281385 - DNA, 30 bp, Artificial Sequence
  Synthetic oligonucleotide
cgaattcgttggtaggtgcaaagtatattt

SEQ ID NO: 281386 - DNA, 30 bp, Artificial Sequence
  Synthetic oligonucleotide
agatacggttctaattacctcgaactattt

SEQ ID NO: 281387 - DNA, 30 bp, Artificial Sequence
  Synthetic oligonucleotide
acaaagatccaggcgagagccgacctattt

SEQ ID NO: 281388 - DNA, 30 bp, Artificial Sequence
  Synthetic oligonucleotide
actcgtgcaagttgggtgaaatgcctattt

SEQ ID NO: 281389 - DNA, 30 bp, Artificial Sequence
  Synthetic oligonucleotide
atggctaaatccgtctgtggtcggctattt

SEQ ID NO: 281390 - DNA, 30 bp, Artificial Sequence
  Synthetic oligonucleotide
tcacattatgaccaagaacttgctctattt

SEQ ID NO: 281391 - DNA, 30 bp, Artificial Sequence
  Synthetic oligonucleotide
aagtgcagaaacgcccaccgtccagtattt

SEQ ID NO: 281392 - DNA, 30 bp, Artificial Sequence
  Synthetic oligonucleotide
ggaaaagcgtacgaaaggaattgattattt

SEQ ID NO: 281393 - DNA, 30 bp, Artificial Sequence
  Synthetic oligonucleotide
attacaccggaagctagcggcgtattattt

SEQ ID NO: 281394 - DNA, 30 bp, Artificial Sequence
  Synthetic oligonucleotide
caatgtcaaggtatgtccgtgttcttattt

SEQ ID NO: 281395 - DNA, 30 bp, Artificial Sequence
  Synthetic oligonucleotide
gtacatatcaagaaagcagagtctttattt

SEQ ID NO: 281396 - DNA, 30 bp, Artificial Sequence
  Synthetic oligonucleotide
aatctcgggaaggttcaatgagggaacttt

SEQ ID NO: 281397 - DNA, 30 bp, Artificial Sequence
  Synthetic oligonucleotide
gcctacgtatttattatcccaatgaacttt

SEQ ID NO: 281398 - DNA, 30 bp, Artificial Sequence
  Synthetic oligonucleotide
agcctaagtgcgtgggctgatatgaacttt

SEQ ID NO: 281399 - DNA, 30 bp, Artificial Sequence
  Synthetic oligonucleotide
caagagagtacgcaattctagtctaacttt

SEQ ID NO: 281400 - DNA, 30 bp, Artificial Sequence
  Synthetic oligonucleotide
ggaaacagtcggttgaatgcattacacttt

SEQ ID NO: 281401 - DNA, 30 bp, Artificial Sequence
  Synthetic oligonucleotide
ttacgagcggcatcttgttctaagcacttt

SEQ ID NO: 281402 - DNA, 30 bp, Artificial Sequence
  Synthetic oligonucleotide
ggtatggtcgattaactagaaggtcacttt

SEQ ID NO: 281403 - DNA, 30 bp, Artificial Sequence
  Synthetic oligonucleotide
cggctatgggcgagggtagaactagacttt

SEQ ID NO: 281404 - DNA, 30 bp, Artificial Sequence
  Synthetic oligonucleotide
aacgagatgtttgtcactatgctagacttt

SEQ ID NO: 281405 - DNA, 30 bp, Artificial Sequence
  Synthetic oligonucleotide
cacttcgttgggattgatcgagtagacttt

SEQ ID NO: 281406 - DNA, 30 bp, Artificial Sequence
  Synthetic oligonucleotide
ctacagggatgcctgaattcaaacgacttt

SEQ ID NO: 281407 - DNA, 30 bp, Artificial Sequence
  Synthetic oligonucleotide
agaaaactatgacacagaagcggcgacttt

SEQ ID NO: 281408 - DNA, 30 bp, Artificial Sequence
  Synthetic oligonucleotide
tgttccgcccgctgtgagatcagggacttt

SEQ ID NO: 281409 - DNA, 30 bp, Artificial Sequence
  Synthetic oligonucleotide
ccatgtaaacgagcagtattgcaatacttt

SEQ ID NO: 281410 - DNA, 30 bp, Artificial Sequence
  Synthetic oligonucleotide
aagacaagcaaatgagtacaatactacttt

SEQ ID NO: 281411 - DNA, 30 bp, Artificial Sequence
  Synthetic oligonucleotide
ggcattgttgggataagtggggtctacttt

SEQ ID NO: 281412 - DNA, 30 bp, Artificial Sequence
  Synthetic oligonucleotide
ctgagggtcagttacgcctcatagtacttt

SEQ ID NO: 281413 - DNA, 30 bp, Artificial Sequence
  Synthetic oligonucleotide
gggctcttagcccatcagcattagtacttt

SEQ ID NO: 281414 - DNA, 30 bp, Artificial Sequence
  Synthetic oligonucleotide
agtaaccataataatcaagtaccttacttt

SEQ ID NO: 281415 - DNA, 30 bp, Artificial Sequence
  Synthetic oligonucleotide
tgagggcggctctcggaagtctccaccttt

SEQ ID NO: 281416 - DNA, 30 bp, Artificial Sequence
  Synthetic oligonucleotide
ggggctacacgactgtacaggccgaccttt

SEQ ID NO: 281417 - DNA, 30 bp, Artificial Sequence
  Synthetic oligonucleotide
gaccctgcagctccatggaacaggaccttt

SEQ ID NO: 281418 - DNA, 30 bp, Artificial Sequence
  Synthetic oligonucleotide
gtcaggcgtcttcctcgaccacgacccttt

SEQ ID NO: 281419 - DNA, 30 bp, Artificial Sequence
  Synthetic oligonucleotide
gtgccggtccgcgccaggttacagcccttt

SEQ ID NO: 281420 - DNA, 30 bp, Artificial Sequence
  Synthetic oligonucleotide
tatcgagcatacggcactcgatttgccttt

SEQ ID NO: 281421 - DNA, 30 bp, Artificial Sequence
  Synthetic oligonucleotide
tcctctggttctcctggaaaaggctccttt

SEQ ID NO: 281422 - DNA, 30 bp, Artificial Sequence
  Synthetic oligonucleotide
aggctctttccatgggtggatgtctccttt

SEQ ID NO: 281423 - DNA, 30 bp, Artificial Sequence
  Synthetic oligonucleotide
gctgcggattaattcacgttgcagtccttt

SEQ ID NO: 281424 - DNA, 30 bp, Artificial Sequence
  Synthetic oligonucleotide
ccaaagtatgcgttttatgctaggtccttt

SEQ ID NO: 281425 - DNA, 30 bp, Artificial Sequence
  Synthetic oligonucleotide
agggatgtgaagtggctgagtgtgtccttt

SEQ ID NO: 281426 - DNA, 30 bp, Artificial Sequence
  Synthetic oligonucleotide
ggcaaaaaaatcagcgcgtgcttgtccttt

SEQ ID NO: 281427 - DNA, 30 bp, Artificial Sequence
  Synthetic oligonucleotide
ttccaggaggctggtgggattaccagcttt

SEQ ID NO: 281428 - DNA, 30 bp, Artificial Sequence
  Synthetic oligonucleotide
gggcaatgcgttcggaagccactcagcttt

SEQ ID NO: 281429 - DNA, 30 bp, Artificial Sequence
  Synthetic oligonucleotide
atgcccaagtcctagaggtgatagagcttt

SEQ ID NO: 281430 - DNA, 30 bp, Artificial Sequence
  Synthetic oligonucleotide
aggtaatccacaatcagtccctttagcttt

SEQ ID NO: 281431 - DNA, 30 bp, Artificial Sequence
  Synthetic oligonucleotide
gtaccaaaggtcaagcgtgtctcccgcttt

SEQ ID NO: 281432 - DNA, 30 bp, Artificial Sequence
  Synthetic oligonucleotide
gccatctggattcatcaacgattccgcttt

SEQ ID NO: 281433 - DNA, 30 bp, Artificial Sequence
  Synthetic oligonucleotide
acgctgattgccaccgcgaggagtcgcttt

SEQ ID NO: 281434 - DNA, 30 bp, Artificial Sequence
  Synthetic oligonucleotide
ctaaggtaagtagatgagtgttttcgcttt

SEQ ID NO: 281435 - DNA, 30 bp, Artificial Sequence
  Synthetic oligonucleotide
aggctagtttcgtcaagccttaagggcttt

SEQ ID NO: 281436 - DNA, 30 bp, Artificial Sequence
  Synthetic oligonucleotide
aagagcttagaagaggaccatcagggcttt

SEQ ID NO: 281437 - DNA, 30 bp, Artificial Sequence
  Synthetic oligonucleotide
tggaatgccaggattagcaataggggcttt

SEQ ID NO: 281438 - DNA, 30 bp, Artificial Sequence
  Synthetic oligonucleotide
tcatataagaatggcttgactgggggcttt

SEQ ID NO: 281439 - DNA, 30 bp, Artificial Sequence
  Synthetic oligonucleotide
gttcacagaatatcgccactggttggcttt

SEQ ID NO: 281440 - DNA, 30 bp, Artificial Sequence
  Synthetic oligonucleotide
cgatgggtagagtcacagctgtaatgcttt

SEQ ID NO: 281441 - DNA, 30 bp, Artificial Sequence
  Synthetic oligonucleotide
atcctcaggcgtttatgactacactgcttt

SEQ ID NO: 281442 - DNA, 30 bp, Artificial Sequence
  Synthetic oligonucleotide
cacgggtctcggaaaaaagttaagatcttt

SEQ ID NO: 281443 - DNA, 30 bp, Artificial Sequence
  Synthetic oligonucleotide
aggagacaatgttcgaagggttcgatcttt

SEQ ID NO: 281444 - DNA, 30 bp, Artificial Sequence
  Synthetic oligonucleotide
aaggatattacctgtacttcatctatcttt

SEQ ID NO: 281445 - DNA, 30 bp, Artificial Sequence
  Synthetic oligonucleotide
tcacttgccaatttggaccgataactcttt

SEQ ID NO: 281446 - DNA, 30 bp, Artificial Sequence
  Synthetic oligonucleotide
cctctgtaaccaagtctattaatactcttt

SEQ ID NO: 281447 - DNA, 30 bp, Artificial Sequence
  Synthetic oligonucleotide
tctcaattctgcttttcttttgccctcttt

SEQ ID NO: 281448 - DNA, 30 bp, Artificial Sequence
  Synthetic oligonucleotide
ctcctggcaactgcgatggtggcagtcttt

SEQ ID NO: 281449 - DNA, 30 bp, Artificial Sequence
  Synthetic oligonucleotide
gcgagtacatggcattccaagggtgtcttt

SEQ ID NO: 281450 - DNA, 30 bp, Artificial Sequence
  Synthetic oligonucleotide
ccgtcgaattttcatagcccgtggttcttt

SEQ ID NO: 281451 - DNA, 30 bp, Artificial Sequence
  Synthetic oligonucleotide
ccgggcccaccagtcccgctcatgttcttt

SEQ ID NO: 281452 - DNA, 30 bp, Artificial Sequence
  Synthetic oligonucleotide
tcggaccacacgctttgctgccatttcttt

SEQ ID NO: 281453 - DNA, 32 bp, Artificial Sequence
  Synthetic oligonucleotide
tttgttgtgtaggtttactcatatatttcttt

SEQ ID NO: 281454 - DNA, 30 bp, Artificial Sequence
  Synthetic oligonucleotide
tgtgaatacaatcatcattcacttttcttt

SEQ ID NO: 281455 - DNA, 30 bp, Artificial Sequence
  Synthetic oligonucleotide
agcttggactaaggtctatcataaaagttt

SEQ ID NO: 281456 - DNA, 30 bp, Artificial Sequence
  Synthetic oligonucleotide
gaggctgccaggagcttcagtcgcaagttt

SEQ ID NO: 281457 - DNA, 30 bp, Artificial Sequence
  Synthetic oligonucleotide
ctacgtaatcgtggggactgagagaagttt

SEQ ID NO: 281458 - DNA, 30 bp, Artificial Sequence
  Synthetic oligonucleotide
gctcgcattaacctaataagaaggaagttt

SEQ ID NO: 281459 - DNA, 30 bp, Artificial Sequence
  Synthetic oligonucleotide
gcgcgtactaataatgtctcgtataagttt

SEQ ID NO: 281460 - DNA, 30 bp, Artificial Sequence
  Synthetic oligonucleotide
cacgtgccacatttcgacaacatacagttt

SEQ ID NO: 281461 - DNA, 30 bp, Artificial Sequence
  Synthetic oligonucleotide
ttgcttcaacgaaaactgcggacccagttt

SEQ ID NO: 281462 - DNA, 30 bp, Artificial Sequence
  Synthetic oligonucleotide
cctccctaaacgccataaaaagcccagttt

SEQ ID NO: 281463 - DNA, 30 bp, Artificial Sequence
  Synthetic oligonucleotide
taccaaagcgtattattactctgtcagttt

SEQ ID NO: 281464 - DNA, 30 bp, Artificial Sequence
  Synthetic oligonucleotide
caaaaggaggcgtgtaaacaaaaagagttt

SEQ ID NO: 281465 - DNA, 30 bp, Artificial Sequence
  Synthetic oligonucleotide
atcagatggatcgtgggttccgacgagttt

SEQ ID NO: 281466 - DNA, 30 bp, Artificial Sequence
  Synthetic oligonucleotide
tagtacataaggaaccagtaaacggagttt

SEQ ID NO: 281467 - DNA, 30 bp, Artificial Sequence
  Synthetic oligonucleotide
aggttatgcctgtgtcgtgaccaatagttt

SEQ ID NO: 281468 - DNA, 30 bp, Artificial Sequence
  Synthetic oligonucleotide
atcgactaacacttcaggcattaatagttt

SEQ ID NO: 281469 - DNA, 30 bp, Artificial Sequence
  Synthetic oligonucleotide
tgaacaccatacggtccgaaagtctagttt

SEQ ID NO: 281470 - DNA, 31 bp, Artificial Sequence
  Synthetic oligonucleotide
caggctcggcaatttctacgtgcggtagttt

SEQ ID NO: 281471 - DNA, 30 bp, Artificial Sequence
  Synthetic oligonucleotide
tggtacggtgtcaagaacctttggtagttt

SEQ ID NO: 281472 - DNA, 30 bp, Artificial Sequence
  Synthetic oligonucleotide
gtaatcacaatgcttaatgacatgtagttt

SEQ ID NO: 281473 - DNA, 30 bp, Artificial Sequence
  Synthetic oligonucleotide
aagccgaggagtcagaagcctacaacgttt

SEQ ID NO: 281474 - DNA, 30 bp, Artificial Sequence
  Synthetic oligonucleotide
atttggacacattgagagtgactaacgttt

SEQ ID NO: 281475 - DNA, 30 bp, Artificial Sequence
  Synthetic oligonucleotide
gtaccactgagggtaatagtcctaacgttt

SEQ ID NO: 281476 - DNA, 30 bp, Artificial Sequence
  Synthetic oligonucleotide
tcgttgggacccaagatgctaaagacgttt

SEQ ID NO: 281477 - DNA, 30 bp, Artificial Sequence
  Synthetic oligonucleotide
agtaatcggagaacctcggacacgacgttt

SEQ ID NO: 281478 - DNA, 30 bp, Artificial Sequence
  Synthetic oligonucleotide
atgtgaggctattagaacatcgggacgttt

SEQ ID NO: 281479 - DNA, 30 bp, Artificial Sequence
  Synthetic oligonucleotide
tcaatccccgtgtagttgcttaaaccgttt

SEQ ID NO: 281480 - DNA, 30 bp, Artificial Sequence
  Synthetic oligonucleotide
cggcggactatgttggcatatcacccgttt

SEQ ID NO: 281481 - DNA, 30 bp, Artificial Sequence
  Synthetic oligonucleotide
aaggacacctgttagtctgcctacccgttt

SEQ ID NO: 281482 - DNA, 30 bp, Artificial Sequence
  Synthetic oligonucleotide
gagccgcccaggtctagatccggcccgttt

SEQ ID NO: 281483 - DNA, 30 bp, Artificial Sequence
  Synthetic oligonucleotide
acgcccaaactactgtgtttatagccgttt

SEQ ID NO: 281484 - DNA, 30 bp, Artificial Sequence
  Synthetic oligonucleotide
tcggataacggacagagcgaaggtccgttt

SEQ ID NO: 281485 - DNA, 30 bp, Artificial Sequence
  Synthetic oligonucleotide
ctaggatccagcagctgaatgggtccgttt

SEQ ID NO: 281486 - DNA, 30 bp, Artificial Sequence
  Synthetic oligonucleotide
tcgattctacgggggtctaagtttccgttt

SEQ ID NO: 281487 - DNA, 30 bp, Artificial Sequence
  Synthetic oligonucleotide
aaccgtaggcgacatggaggcccagcgttt

SEQ ID NO: 281488 - DNA, 30 bp, Artificial Sequence
  Synthetic oligonucleotide
atgcgtgatatcgattatttaagagcgttt

SEQ ID NO: 281489 - DNA, 30 bp, Artificial Sequence
  Synthetic oligonucleotide
tcgaaaaaagttgtacgtgtttgagcgttt

SEQ ID NO: 281490 - DNA, 30 bp, Artificial Sequence
  Synthetic oligonucleotide
aaccggctagatgctatcccgatagcgttt

SEQ ID NO: 281491 - DNA, 30 bp, Artificial Sequence
  Synthetic oligonucleotide
cgaaggtacgcaccccctagtaccgcgttt

SEQ ID NO: 281492 - DNA, 30 bp, Artificial Sequence
  Synthetic oligonucleotide
gacaatcccttcggcgatacaccggcgttt

SEQ ID NO: 281493 - DNA, 30 bp, Artificial Sequence
  Synthetic oligonucleotide
aatcggcttagtgattcacgaattgcgttt

SEQ ID NO: 281494 - DNA, 30 bp, Artificial Sequence
  Synthetic oligonucleotide
cacttgagtgggtaacgccacgaatcgttt

SEQ ID NO: 281495 - DNA, 30 bp, Artificial Sequence
  Synthetic oligonucleotide
aagaacgcgcgggctcgttacccatcgttt

SEQ ID NO: 281496 - DNA, 30 bp, Artificial Sequence
  Synthetic oligonucleotide
tattgtacaggagggagcggcatatcgttt

SEQ ID NO: 281497 - DNA, 30 bp, Artificial Sequence
  Synthetic oligonucleotide
ggtacaaagactcctcagcaacgctcgttt

SEQ ID NO: 281498 - DNA, 30 bp, Artificial Sequence
  Synthetic oligonucleotide
catgttgtgattagacaccgaccgtcgttt

SEQ ID NO: 281499 - DNA, 30 bp, Artificial Sequence
  Synthetic oligonucleotide
tcacacgtcgagggcgcgccgtcgtcgttt

SEQ ID NO: 281500 - DNA, 30 bp, Artificial Sequence
  Synthetic oligonucleotide
cgccggcttggattcatctaggcttcgttt

SEQ ID NO: 281501 - DNA, 30 bp, Artificial Sequence
  Synthetic oligonucleotide
cgaaggagcataacgaaattaaaaaggttt

SEQ ID NO: 281502 - DNA, 30 bp, Artificial Sequence
  Synthetic oligonucleotide
ggaaagttagccagtgagggacaaaggttt

SEQ ID NO: 281503 - DNA, 30 bp, Artificial Sequence
  Synthetic oligonucleotide
caccggtgagttcacggactcccaaggttt

SEQ ID NO: 281504 - DNA, 30 bp, Artificial Sequence
  Synthetic oligonucleotide
taagaagaatcaatatttatcggaaggttt

SEQ ID NO: 281505 - DNA, 30 bp, Artificial Sequence
  Synthetic oligonucleotide
ccttaataggcaggagtcaggtacaggttt

SEQ ID NO: 281506 - DNA, 30 bp, Artificial Sequence
  Synthetic oligonucleotide
gaggagaatacagttgcacagcccaggttt

SEQ ID NO: 281507 - DNA, 30 bp, Artificial Sequence
  Synthetic oligonucleotide
ctccaaaagaacagcgcaagtcgcaggttt

SEQ ID NO: 281508 - DNA, 30 bp, Artificial Sequence
  Synthetic oligonucleotide
taacgtagttcggcttttgaacacgggttt

SEQ ID NO: 281509 - DNA, 30 bp, Artificial Sequence
  Synthetic oligonucleotide
agagggcgggacgcgagatcgcacgggttt

SEQ ID NO: 281510 - DNA, 30 bp, Artificial Sequence
  Synthetic oligonucleotide
ataaatatcgatgccccaccggacgggttt

SEQ ID NO: 281511 - DNA, 30 bp, Artificial Sequence
  Synthetic oligonucleotide
cataattgaccattacccgaaagcgggttt

SEQ ID NO: 281512 - DNA, 30 bp, Artificial Sequence
  Synthetic oligonucleotide
gaggccagcaggaaatgtaagtatgggttt

SEQ ID NO: 281513 - DNA, 30 bp, Artificial Sequence
  Synthetic oligonucleotide
aaaggttgttgtggaacacaagttgggttt

SEQ ID NO: 281514 - DNA, 30 bp, Artificial Sequence
  Synthetic oligonucleotide
gcggagtggttttggtacgttccatggttt

SEQ ID NO: 281515 - DNA, 30 bp, Artificial Sequence
  Synthetic oligonucleotide
tctaaccaaggcgaccgttggtcatggttt

SEQ ID NO: 281516 - DNA, 30 bp, Artificial Sequence
  Synthetic oligonucleotide
ggtctgcagaatcgcgtgatttcctggttt

SEQ ID NO: 281517 - DNA, 30 bp, Artificial Sequence
  Synthetic oligonucleotide
gttggtcccatcctttaacagcagtggttt

SEQ ID NO: 281518 - DNA, 30 bp, Artificial Sequence
  Synthetic oligonucleotide
tcgcaaggtattattggcgagaattggttt

SEQ ID NO: 281519 - DNA, 30 bp, Artificial Sequence
  Synthetic oligonucleotide
tcggcgatgaactgacattagtcgatgttt

SEQ ID NO: 281520 - DNA, 30 bp, Artificial Sequence
  Synthetic oligonucleotide
aacgctcgagtgctaagatacaggatgttt

SEQ ID NO: 281521 - DNA, 30 bp, Artificial Sequence
  Synthetic oligonucleotide
gcgaatagtgttaatactttgaggatgttt

SEQ ID NO: 281522 - DNA, 30 bp, Artificial Sequence
  Synthetic oligonucleotide
ggagagcatacctcatcggggttgatgttt

SEQ ID NO: 281523 - DNA, 31 bp, Artificial Sequence
  Synthetic oligonucleotide
tcatactaatatatcggtcaaccatatgttt

SEQ ID NO: 281524 - DNA, 30 bp, Artificial Sequence
  Synthetic oligonucleotide
ttgggggcacgcttagattggtcactgttt

SEQ ID NO: 281525 - DNA, 30 bp, Artificial Sequence
  Synthetic oligonucleotide
agactcttgggggaagatgttgtcctgttt

SEQ ID NO: 281526 - DNA, 30 bp, Artificial Sequence
  Synthetic oligonucleotide
cgaaagtgtttggctagcatccatctgttt

SEQ ID NO: 281527 - DNA, 30 bp, Artificial Sequence
  Synthetic oligonucleotide
aatacctatctgggctctatcgcagtgttt

SEQ ID NO: 281528 - DNA, 30 bp, Artificial Sequence
  Synthetic oligonucleotide
gtaaagagagaacgacgacggtcagtgttt

SEQ ID NO: 281529 - DNA, 30 bp, Artificial Sequence
  Synthetic oligonucleotide
accgagtctggcccgtccggtaaggtgttt

SEQ ID NO: 281530 - DNA, 30 bp, Artificial Sequence
  Synthetic oligonucleotide
cccacaataacgtggcagaatcaggtgttt

SEQ ID NO: 281531 - DNA, 30 bp, Artificial Sequence
  Synthetic oligonucleotide
cggcggggcgggttggcatcaggggtgttt

SEQ ID NO: 281532 - DNA, 30 bp, Artificial Sequence
  Synthetic oligonucleotide
tcaatagtaacttgtgcttcagtggtgttt

SEQ ID NO: 281533 - DNA, 30 bp, Artificial Sequence
  Synthetic oligonucleotide
gtacggtcagtcaggctcatgttggtgttt

SEQ ID NO: 281534 - DNA, 30 bp, Artificial Sequence
  Synthetic oligonucleotide
agaacacggggatacctatagtcattgttt

SEQ ID NO: 281535 - DNA, 30 bp, Artificial Sequence
  Synthetic oligonucleotide
tcttggggtgaagccgggaagcacttgttt

SEQ ID NO: 281536 - DNA, 31 bp, Artificial Sequence
  Synthetic oligonucleotide
attgtctagcttaattttagtctacttgttt

SEQ ID NO: 281537 - DNA, 30 bp, Artificial Sequence
  Synthetic oligonucleotide
ctcaggggtactatttgggtcgcgttgttt

SEQ ID NO: 281538 - DNA, 30 bp, Artificial Sequence
  Synthetic oligonucleotide
ggcgccagccacacttcctagcggttgttt

SEQ ID NO: 281539 - DNA, 30 bp, Artificial Sequence
  Synthetic oligonucleotide
ctgctcttatacagtgggtataatttgttt

SEQ ID NO: 281540 - DNA, 30 bp, Artificial Sequence
  Synthetic oligonucleotide
cgctgattaattaataggacgggtttgttt

SEQ ID NO: 281541 - DNA, 30 bp, Artificial Sequence
  Synthetic oligonucleotide
aggaaggccaagtcgacagcgaaaaatttt

SEQ ID NO: 281542 - DNA, 30 bp, Artificial Sequence
  Synthetic oligonucleotide
tccgctgtgaactctagatcgaaaaatttt

SEQ ID NO: 281543 - DNA, 40 bp, Artificial Sequence
  Synthetic oligonucleotide
accgataccggcgaatttgacagtgttcgatccaaatttt

SEQ ID NO: 281544 - DNA, 30 bp, Artificial Sequence
  Synthetic oligonucleotide
ggagtcagcagcacaacaatttgaaatttt

SEQ ID NO: 281545 - DNA, 30 bp, Artificial Sequence
  Synthetic oligonucleotide
gagaccgctaggcccgagaagataaatttt

SEQ ID NO: 281546 - DNA, 30 bp, Artificial Sequence
  Synthetic oligonucleotide
catagtatgtcttataggttggtaaatttt

SEQ ID NO: 281547 - DNA, 30 bp, Artificial Sequence
  Synthetic oligonucleotide
ggcatctttatgatgacttgacgcaatttt

SEQ ID NO: 281548 - DNA, 30 bp, Artificial Sequence
  Synthetic oligonucleotide
tacactgatcacttaggaccccaccatttt

SEQ ID NO: 281549 - DNA, 30 bp, Artificial Sequence
  Synthetic oligonucleotide
aatcaacaagcaagtcgtaacgatcatttt

SEQ ID NO: 281550 - DNA, 30 bp, Artificial Sequence
  Synthetic oligonucleotide
gttgggcttatcatttcggtggctcatttt

SEQ ID NO: 281551 - DNA, 30 bp, Artificial Sequence
  Synthetic oligonucleotide
aatttaggggtagagaagtatagtcatttt

SEQ ID NO: 281552 - DNA, 30 bp, Artificial Sequence
  Synthetic oligonucleotide
aggttctagatgaccaccatacccgatttt

SEQ ID NO: 281553 - DNA, 30 bp, Artificial Sequence
  Synthetic oligonucleotide
cacgaccccagtacgtccagggccgatttt

SEQ ID NO: 281554 - DNA, 30 bp, Artificial Sequence
  Synthetic oligonucleotide
ataaccacggcacagtaatcgggcgatttt

SEQ ID NO: 281555 - DNA, 30 bp, Artificial Sequence
  Synthetic oligonucleotide
gctaagtgtggaactgggtattaggatttt

SEQ ID NO: 281556 - DNA, 30 bp, Artificial Sequence
  Synthetic oligonucleotide
atgccggcaaatggggatgtgaatgatttt

SEQ ID NO: 281557 - DNA, 30 bp, Artificial Sequence
  Synthetic oligonucleotide
acacacgcgcagattagagcctttgatttt

SEQ ID NO: 281558 - DNA, 30 bp, Artificial Sequence
  Synthetic oligonucleotide
ctgggtgcggtaatgtgaatgatgtatttt

SEQ ID NO: 281559 - DNA, 30 bp, Artificial Sequence
  Synthetic oligonucleotide
aggatctagcggacttttactttgtatttt

SEQ ID NO: 281560 - DNA, 30 bp, Artificial Sequence
  Synthetic oligonucleotide
ctagtaaccggaatccggtgtccaactttt

SEQ ID NO: 281561 - DNA, 30 bp, Artificial Sequence
  Synthetic oligonucleotide
acggcgaacacggcgttgattcacactttt

SEQ ID NO: 281562 - DNA, 30 bp, Artificial Sequence
  Synthetic oligonucleotide
caaggtggtaggtttgtcgtgatcactttt

SEQ ID NO: 281563 - DNA, 30 bp, Artificial Sequence
  Synthetic oligonucleotide
gatggtgctatcggatagtagcagactttt

SEQ ID NO: 281564 - DNA, 30 bp, Artificial Sequence
  Synthetic oligonucleotide
cacaaaccacccctacggaaatcccctttt

SEQ ID NO: 281565 - DNA, 30 bp, Artificial Sequence
  Synthetic oligonucleotide
cgtcgggtgatttccaaggcaagccctttt

SEQ ID NO: 281566 - DNA, 30 bp, Artificial Sequence
  Synthetic oligonucleotide
tgagccgcttaggacatactttagcctttt

SEQ ID NO: 281567 - DNA, 30 bp, Artificial Sequence
  Synthetic oligonucleotide
tcaccatcaactatataaaattcagctttt

SEQ ID NO: 281568 - DNA, 30 bp, Artificial Sequence
  Synthetic oligonucleotide
aaggtgtttcgatggctatctatagctttt

SEQ ID NO: 281569 - DNA, 30 bp, Artificial Sequence
  Synthetic oligonucleotide
ttactaggcaaggaacgacatttagctttt

SEQ ID NO: 281570 - DNA, 30 bp, Artificial Sequence
  Synthetic oligonucleotide
agggaaggccttaaacaatcaaacgctttt

SEQ ID NO: 281571 - DNA, 30 bp, Artificial Sequence
  Synthetic oligonucleotide
gtggaaatagtttaggatagttacgctttt

SEQ ID NO: 281572 - DNA, 30 bp, Artificial Sequence
  Synthetic oligonucleotide
attgcgggactctctagggtgttggctttt

SEQ ID NO: 281573 - DNA, 30 bp, Artificial Sequence
  Synthetic oligonucleotide
cagcgttacccttcctccttatgttctttt

SEQ ID NO: 281574 - DNA, 30 bp, Artificial Sequence
  Synthetic oligonucleotide
ggatgtccattggtatggaaaacaagtttt

SEQ ID NO: 281575 - DNA, 31 bp, Artificial Sequence
  Synthetic oligonucleotide
aaagattgaggccgatgctctgaagagtttt

SEQ ID NO: 281576 - DNA, 30 bp, Artificial Sequence
  Synthetic oligonucleotide
taagaactaagtaaggacatgtggagtttt

SEQ ID NO: 281577 - DNA, 30 bp, Artificial Sequence
  Synthetic oligonucleotide
agatcggttattattcaagtcctgagtttt

SEQ ID NO: 281578 - DNA, 30 bp, Artificial Sequence
  Synthetic oligonucleotide
gattgatgtttttactatgcccgacgtttt

SEQ ID NO: 281579 - DNA, 30 bp, Artificial Sequence
  Synthetic oligonucleotide
gagctagtctaagcacggcataaccgtttt

SEQ ID NO: 281580 - DNA, 30 bp, Artificial Sequence
  Synthetic oligonucleotide
cctcacagttaagagaccgatcggcgtttt

SEQ ID NO: 281581 - DNA, 27 bp, Artificial Sequence
  Synthetic oligonucleotide
ccgatgagcgttcggaggcttcgtttt

SEQ ID NO: 281582 - DNA, 30 bp, Artificial Sequence
  Synthetic oligonucleotide
tctgttggaccagcaagcgtgcagggtttt

SEQ ID NO: 281583 - DNA, 30 bp, Artificial Sequence
  Synthetic oligonucleotide
agttgcagttcatctctacgagagggtttt

SEQ ID NO: 281584 - DNA, 30 bp, Artificial Sequence
  Synthetic oligonucleotide
ctgaagtgacagttaggaggtgctggtttt

SEQ ID NO: 281585 - DNA, 30 bp, Artificial Sequence
  Synthetic oligonucleotide
tgtccgcgtggattgcgcacaaactgtttt

SEQ ID NO: 281586 - DNA, 35 bp, Artificial Sequence
  Synthetic oligonucleotide
gcggagcgtatcaattagttcgttttgcctgtttt

SEQ ID NO: 281587 - DNA, 30 bp, Artificial Sequence
  Synthetic oligonucleotide
agttgcttgtataccatacgcctgtgtttt

SEQ ID NO: 281588 - DNA, 30 bp, Artificial Sequence
  Synthetic oligonucleotide
gaggccagggccgatagaacgagaattttt

SEQ ID NO: 281589 - DNA, 31 bp, Artificial Sequence
  Synthetic oligonucleotide
acataaattactggcaatagtatgcattttt

SEQ ID NO: 281590 - DNA, 30 bp, Artificial Sequence
  Synthetic oligonucleotide
acgagatttcctcggaatcagagtattttt

SEQ ID NO: 281591 - DNA, 31 bp, Artificial Sequence
  Synthetic oligonucleotide
acctaatcagtacgcctttgagatacttttt

SEQ ID NO: 281592 - DNA, 30 bp, Artificial Sequence
  Synthetic oligonucleotide
gtacacatttaacgggtactccgccttttt

SEQ ID NO: 281593 - DNA, 30 bp, Artificial Sequence
  Synthetic oligonucleotide
ggcggtgcccacgtgtcatcataagttttt

SEQ ID NO: 281594 - DNA, 30 bp, Artificial Sequence
  Synthetic oligonucleotide
ttgaaggggtgttttgttacgaacgttttt

SEQ ID NO: 281595 - DNA, 30 bp, Artificial Sequence
  Synthetic oligonucleotide
ggatatcggagagatatttcgaccgttttt

SEQ ID NO: 281596 - DNA, 30 bp, Artificial Sequence
  Synthetic oligonucleotide
ttctatgggcgtactttcaataccgttttt

SEQ ID NO: 281597 - DNA, 30 bp, Artificial Sequence
  Synthetic oligonucleotide
ggacgacagagtctctaatccaaggttttt

SEQ ID NO: 281598 - DNA, 30 bp, Artificial Sequence
  Synthetic oligonucleotide
gtaatggagtcatattgcaagtgggttttt

SEQ ID NO: 281599 - DNA, 30 bp, Artificial Sequence
  Synthetic oligonucleotide
gaatcgggaaggttgacacaactgtttttt

SEQ ID NO: 281600 - DNA, 30 bp, Artificial Sequence
  Synthetic oligonucleotide
cagtcataagtcagccggacccaaaaaaaa

SEQ ID NO: 281601 - DNA, 30 bp, Artificial Sequence
  Synthetic oligonucleotide
cgctgtgcgtgtccaagtagagcaaaaaaa

SEQ ID NO: 281602 - DNA, 30 bp, Artificial Sequence
  Synthetic oligonucleotide
aagacaaatctatgagcttctctaaaaaaa

SEQ ID NO: 281603 - DNA, 30 bp, Artificial Sequence
  Synthetic oligonucleotide
caccttggcagcgatcagttggtaaaaaaa

SEQ ID NO: 281604 - DNA, 30 bp, Artificial Sequence
  Synthetic oligonucleotide
agaaaagtgttgagaccgattcccaaaaaa

SEQ ID NO: 281605 - DNA, 30 bp, Artificial Sequence
  Synthetic oligonucleotide
gacctaccttcattcgagcctcgcaaaaaa

SEQ ID NO: 281606 - DNA, 30 bp, Artificial Sequence
  Synthetic oligonucleotide
ttattcgtccaaatcgtagcctgcaaaaaa

SEQ ID NO: 281607 - DNA, 30 bp, Artificial Sequence
  Synthetic oligonucleotide
ggcttgactggtgtgtcttcagtcaaaaaa

SEQ ID NO: 281608 - DNA, 30 bp, Artificial Sequence
  Synthetic oligonucleotide
ttgtccggagaacgagagaacccgaaaaaa

SEQ ID NO: 281609 - DNA, 30 bp, Artificial Sequence
  Synthetic oligonucleotide
gaaagatagttagcccagatacggaaaaaa

SEQ ID NO: 281610 - DNA, 30 bp, Artificial Sequence
  Synthetic oligonucleotide
agctgaaatacccccagttaggtgaaaaaa

SEQ ID NO: 281611 - DNA, 30 bp, Artificial Sequence
  Synthetic oligonucleotide
gcggatctaacggagcgggacgataaaaaa

SEQ ID NO: 281612 - DNA, 30 bp, Artificial Sequence
  Synthetic oligonucleotide
aatctacgacacgcgtacgaatttaaaaaa

SEQ ID NO: 281613 - DNA, 30 bp, Artificial Sequence
  Synthetic oligonucleotide
aaggtaaacagcgtttactggtaacaaaaa

SEQ ID NO: 281614 - DNA, 31 bp, Artificial Sequence
  Synthetic oligonucleotide
ttaatacacggatagtcatacttaacaaaaa

SEQ ID NO: 281615 - DNA, 30 bp, Artificial Sequence
  Synthetic oligonucleotide
attcgtctcctgcaaataagaccacaaaaa

SEQ ID NO: 281616 - DNA, 30 bp, Artificial Sequence
  Synthetic oligonucleotide
cctaggggttgaaagcctcgagcacaaaaa

SEQ ID NO: 281617 - DNA, 30 bp, Artificial Sequence
  Synthetic oligonucleotide
tttaggcaggtggtgtaaagttcacaaaaa

SEQ ID NO: 281618 - DNA, 30 bp, Artificial Sequence
  Synthetic oligonucleotide
gtaacccactcaaaagaacacagacaaaaa

SEQ ID NO: 281619 - DNA, 30 bp, Artificial Sequence
  Synthetic oligonucleotide
cgcgagtcagccgtaggatttcgacaaaaa

SEQ ID NO: 281620 - DNA, 30 bp, Artificial Sequence
  Synthetic oligonucleotide
ggttttaagctgtctagtcatgaccaaaaa

SEQ ID NO: 281621 - DNA, 31 bp, Artificial Sequence
  Synthetic oligonucleotide
ggcggtagtactcacccagcccctccaaaaa

SEQ ID NO: 281622 - DNA, 30 bp, Artificial Sequence
  Synthetic oligonucleotide
tccagtatacagtggcggagtgagcaaaaa

SEQ ID NO: 281623 - DNA, 30 bp, Artificial Sequence
  Synthetic oligonucleotide
tcgggcacctagataagggcatagcaaaaa

SEQ ID NO: 281624 - DNA, 30 bp, Artificial Sequence
  Synthetic oligonucleotide
tcatcgctgacgtgatagcgatatcaaaaa

SEQ ID NO: 281625 - DNA, 30 bp, Artificial Sequence
  Synthetic oligonucleotide
gttcaccgcgactcgttcgagagtcaaaaa

SEQ ID NO: 281626 - DNA, 30 bp, Artificial Sequence
  Synthetic oligonucleotide
gtagaagtagtgtcttcggcacaagaaaaa

SEQ ID NO: 281627 - DNA, 30 bp, Artificial Sequence
  Synthetic oligonucleotide
tagtaaattcggcgaactaggccagaaaaa

SEQ ID NO: 281628 - DNA, 30 bp, Artificial Sequence
  Synthetic oligonucleotide
gacgaggagttttcttgaaaagcagaaaaa

SEQ ID NO: 281629 - DNA, 30 bp, Artificial Sequence
  Synthetic oligonucleotide
ccatcgaagtctcgccggggcctcgaaaaa

SEQ ID NO: 281630 - DNA, 30 bp, Artificial Sequence
  Synthetic oligonucleotide
tcggctgccagcagccgcgggaaggaaaaa

SEQ ID NO: 281631 - DNA, 30 bp, Artificial Sequence
  Synthetic oligonucleotide
tagaatgtcaaatatggagaggcggaaaaa

SEQ ID NO: 281632 - DNA, 30 bp, Artificial Sequence
  Synthetic oligonucleotide
ggattgctattcagcaattttggggaaaaa

SEQ ID NO: 281633 - DNA, 30 bp, Artificial Sequence
  Synthetic oligonucleotide
taattgtactggtcctaggaggctgaaaaa

SEQ ID NO: 281634 - DNA, 30 bp, Artificial Sequence
  Synthetic oligonucleotide
aggccggcaaagtttggtttatgtgaaaaa

SEQ ID NO: 281635 - DNA, 30 bp, Artificial Sequence
  Synthetic oligonucleotide
tcacacgcccctagtaaatgacttgaaaaa

SEQ ID NO: 281636 - DNA, 30 bp, Artificial Sequence
  Synthetic oligonucleotide
aactagtattcaagatcattcgttgaaaaa

SEQ ID NO: 281637 - DNA, 30 bp, Artificial Sequence
  Synthetic oligonucleotide
aagtgcgcaactttcaaggtaaaataaaaa

SEQ ID NO: 281638 - DNA, 30 bp, Artificial Sequence
  Synthetic oligonucleotide
agatgaagcagctagaccgggtcataaaaa

SEQ ID NO: 281639 - DNA, 30 bp, Artificial Sequence
  Synthetic oligonucleotide
ggaatgtggggcccctccttgtgataaaaa

SEQ ID NO: 281640 - DNA, 30 bp, Artificial Sequence
  Synthetic oligonucleotide
accgcaagctacagtcagacgttataaaaa

SEQ ID NO: 281641 - DNA, 30 bp, Artificial Sequence
  Synthetic oligonucleotide
cgtcagctaggaggatcaactcgctaaaaa

SEQ ID NO: 281642 - DNA, 30 bp, Artificial Sequence
  Synthetic oligonucleotide
gttccgaaggccgattgttggcagtaaaaa

SEQ ID NO: 281643 - DNA, 30 bp, Artificial Sequence
  Synthetic oligonucleotide
ttccctaaaaaagcaatccgggcgtaaaaa

SEQ ID NO: 281644 - DNA, 30 bp, Artificial Sequence
  Synthetic oligonucleotide
ctgcaatcaaacatcagtattgattaaaaa

SEQ ID NO: 281645 - DNA, 30 bp, Artificial Sequence
  Synthetic oligonucleotide
ttagtctagtggcgtacagcggcttaaaaa

SEQ ID NO: 281646 - DNA, 30 bp, Artificial Sequence
  Synthetic oligonucleotide
cagctggacacacttggatcaagttaaaaa

SEQ ID NO: 281647 - DNA, 30 bp, Artificial Sequence
  Synthetic oligonucleotide
gaatcggagtgataagtgtgaggttaaaaa

SEQ ID NO: 281648 - DNA, 30 bp, Artificial Sequence
  Synthetic oligonucleotide
aaacaaattgagccgtcgggctgttaaaaa

SEQ ID NO: 281649 - DNA, 30 bp, Artificial Sequence
  Synthetic oligonucleotide
agaaggagcagggactgtaccaatacaaaa

SEQ ID NO: 281650 - DNA, 30 bp, Artificial Sequence
  Synthetic oligonucleotide
agtcccagacccgtcctaaaatgtacaaaa

SEQ ID NO: 281651 - DNA, 30 bp, Artificial Sequence
  Synthetic oligonucleotide
cctgtcgtacggtccatgggacttacaaaa

SEQ ID NO: 281652 - DNA, 30 bp, Artificial Sequence
  Synthetic oligonucleotide
cagttaagtgtagacggtcgcggaccaaaa

SEQ ID NO: 281653 - DNA, 30 bp, Artificial Sequence
  Synthetic oligonucleotide
gactccgggttttcaaaccagaacccaaaa

SEQ ID NO: 281654 - DNA, 30 bp, Artificial Sequence
  Synthetic oligonucleotide
gtccgcttaagctaggaagggaagccaaaa

SEQ ID NO: 281655 - DNA, 26 bp, Artificial Sequence
  Synthetic oligonucleotide
tacgacacaagtcctggcccgcaaaa

SEQ ID NO: 281656 - DNA, 30 bp, Artificial Sequence
  Synthetic oligonucleotide
aattcctagcaaggcatccagagcgcaaaa

SEQ ID NO: 281657 - DNA, 30 bp, Artificial Sequence
  Synthetic oligonucleotide
ttcaagagagcaatatatggataggcaaaa

SEQ ID NO: 281658 - DNA, 30 bp, Artificial Sequence
  Synthetic oligonucleotide
acaggcaggtgtactgttcggggggcaaaa

SEQ ID NO: 281659 - DNA, 30 bp, Artificial Sequence
  Synthetic oligonucleotide
gtaaagatagtaggcgacacggatgcaaaa

SEQ ID NO: 281660 - DNA, 30 bp, Artificial Sequence
  Synthetic oligonucleotide
ggaatcggcgtagcaatgctggctgcaaaa

SEQ ID NO: 281661 - DNA, 30 bp, Artificial Sequence
  Synthetic oligonucleotide
acttggtacctatgtcagggacgtgcaaaa

SEQ ID NO: 281662 - DNA, 30 bp, Artificial Sequence
  Synthetic oligonucleotide
gtcttaggctgcagagccgcccaatcaaaa

SEQ ID NO: 281663 - DNA, 30 bp, Artificial Sequence
  Synthetic oligonucleotide
acatgaggaataaatcctcttacctcaaaa

SEQ ID NO: 281664 - DNA, 30 bp, Artificial Sequence
  Synthetic oligonucleotide
aatggaggtaacccttacatgcagtcaaaa

SEQ ID NO: 281665 - DNA, 30 bp, Artificial Sequence
  Synthetic oligonucleotide
ccatgatctgcgggtagcctcgcgtcaaaa

SEQ ID NO: 281666 - DNA, 30 bp, Artificial Sequence
  Synthetic oligonucleotide
agggacacgtacatcaactgggattcaaaa

SEQ ID NO: 281667 - DNA, 30 bp, Artificial Sequence
  Synthetic oligonucleotide
tgagggtgggttcactgtgaaagttcaaaa

SEQ ID NO: 281668 - DNA, 30 bp, Artificial Sequence
  Synthetic oligonucleotide
aactggactcggatcacataaagttcaaaa

SEQ ID NO: 281669 - DNA, 30 bp, Artificial Sequence
  Synthetic oligonucleotide
gcagatcgcactagttgggtaaacagaaaa

SEQ ID NO: 281670 - DNA, 30 bp, Artificial Sequence
  Synthetic oligonucleotide
actatgactgatgtcgccgtccacagaaaa

SEQ ID NO: 281671 - DNA, 30 bp, Artificial Sequence
  Synthetic oligonucleotide
ggccattttataacctcgaagggcagaaaa

SEQ ID NO: 281672 - DNA, 30 bp, Artificial Sequence
  Synthetic oligonucleotide
gtaagagattcctatcctgttccgagaaaa

SEQ ID NO: 281673 - DNA, 30 bp, Artificial Sequence
  Synthetic oligonucleotide
ataaattgtgggagcgagccagggagaaaa

SEQ ID NO: 281674 - DNA, 30 bp, Artificial Sequence
  Synthetic oligonucleotide
ccgttgacaaggttcttcccattgagaaaa

SEQ ID NO: 281675 - DNA, 30 bp, Artificial Sequence
  Synthetic oligonucleotide
gaggagtaatcgaaccgtatttgtagaaaa

SEQ ID NO: 281676 - DNA, 30 bp, Artificial Sequence
  Synthetic oligonucleotide
gcggcttggaagtgttgaattattagaaaa

SEQ ID NO: 281677 - DNA, 30 bp, Artificial Sequence
  Synthetic oligonucleotide
tgcgggaagcgacagtacgcgcaacgaaaa

SEQ ID NO: 281678 - DNA, 30 bp, Artificial Sequence
  Synthetic oligonucleotide
taaagccggtcactctttcgcgcacgaaaa

SEQ ID NO: 281679 - DNA, 30 bp, Artificial Sequence
  Synthetic oligonucleotide
agcaatgcttggcgcgtttattctcgaaaa

SEQ ID NO: 281680 - DNA, 30 bp, Artificial Sequence
  Synthetic oligonucleotide
gacaggtctgcgtgctcccctacaggaaaa

SEQ ID NO: 281681 - DNA, 30 bp, Artificial Sequence
  Synthetic oligonucleotide
ggttaaataattaaaaaagaccgaggaaaa

SEQ ID NO: 281682 - DNA, 30 bp, Artificial Sequence
  Synthetic oligonucleotide
ttaaatgcacaaggaagttataacggaaaa

SEQ ID NO: 281683 - DNA, 30 bp, Artificial Sequence
  Synthetic oligonucleotide
tttgaagatggttcgttgtagatgggaaaa

SEQ ID NO: 281684 - DNA, 30 bp, Artificial Sequence
  Synthetic oligonucleotide
ggaggatgccacccgggtcgctatggaaaa

SEQ ID NO: 281685 - DNA, 30 bp, Artificial Sequence
  Synthetic oligonucleotide
cgaattttcgtaattcagactcctggaaaa

SEQ ID NO: 281686 - DNA, 30 bp, Artificial Sequence
  Synthetic oligonucleotide
taatacgcaggacccgaattcgctggaaaa

SEQ ID NO: 281687 - DNA, 30 bp, Artificial Sequence
  Synthetic oligonucleotide
aagatacaattcaacgcggttgttggaaaa

SEQ ID NO: 281688 - DNA, 30 bp, Artificial Sequence
  Synthetic oligonucleotide
gcaggaaggtacacttgcgcccaatgaaaa

SEQ ID NO: 281689 - DNA, 30 bp, Artificial Sequence
  Synthetic oligonucleotide
taaaagcagcccctagatggaggatgaaaa

SEQ ID NO: 281690 - DNA, 30 bp, Artificial Sequence
  Synthetic oligonucleotide
cccctgaattgaggagcggtgcgctgaaaa

SEQ ID NO: 281691 - DNA, 30 bp, Artificial Sequence
  Synthetic oligonucleotide
taattccaccgagcgatcgcttgctgaaaa

SEQ ID NO: 281692 - DNA, 30 bp, Artificial Sequence
  Synthetic oligonucleotide
ttggactcggattctaaatcgtagtgaaaa

SEQ ID NO: 281693 - DNA, 30 bp, Artificial Sequence
  Synthetic oligonucleotide
ggactagttcaaccgttgcgaatgtgaaaa

SEQ ID NO: 281694 - DNA, 30 bp, Artificial Sequence
  Synthetic oligonucleotide
caacatgaccgttctggtaatttgtgaaaa

SEQ ID NO: 281695 - DNA, 30 bp, Artificial Sequence
  Synthetic oligonucleotide
aatatatgcgcagcggggcgtccttgaaaa

SEQ ID NO: 281696 - DNA, 30 bp, Artificial Sequence
  Synthetic oligonucleotide
acttcaaagtaaggaacataacgttgaaaa

SEQ ID NO: 281697 - DNA, 30 bp, Artificial Sequence
  Synthetic oligonucleotide
gcggttttccgtgtgctaccgagaataaaa

SEQ ID NO: 281698 - DNA, 30 bp, Artificial Sequence
  Synthetic oligonucleotide
atatttgctcgcctatagaagtgaataaaa

SEQ ID NO: 281699 - DNA, 30 bp, Artificial Sequence
  Synthetic oligonucleotide
gttccgaagcagcagcggatcagcataaaa

SEQ ID NO: 281700 - DNA, 30 bp, Artificial Sequence
  Synthetic oligonucleotide
gcacacttgcttggatcggggagcataaaa

SEQ ID NO: 281701 - DNA, 30 bp, Artificial Sequence
  Synthetic oligonucleotide
caggatctacgactggccgaacgcataaaa

SEQ ID NO: 281702 - DNA, 30 bp, Artificial Sequence
  Synthetic oligonucleotide
cgccaggctagaacggcttctatcataaaa

SEQ ID NO: 281703 - DNA, 30 bp, Artificial Sequence
  Synthetic oligonucleotide
tacctgtgtctccatgggaagccgataaaa

SEQ ID NO: 281704 - DNA, 30 bp, Artificial Sequence
  Synthetic oligonucleotide
aacaggtcacagggcttctgagccctaaaa

SEQ ID NO: 281705 - DNA, 30 bp, Artificial Sequence
  Synthetic oligonucleotide
attggctgcaggctcagataaaagctaaaa

SEQ ID NO: 281706 - DNA, 30 bp, Artificial Sequence
  Synthetic oligonucleotide
ccgaaagaacgggctttgactaagctaaaa

SEQ ID NO: 281707 - DNA, 30 bp, Artificial Sequence
  Synthetic oligonucleotide
tcgcgaaggttaggcgtaccgcagctaaaa

SEQ ID NO: 281708 - DNA, 30 bp, Artificial Sequence
  Synthetic oligonucleotide
gaatagacattgctcaaacctgagctaaaa

SEQ ID NO: 281709 - DNA, 30 bp, Artificial Sequence
  Synthetic oligonucleotide
catgaagaacttcctttatgagatctaaaa

SEQ ID NO: 281710 - DNA, 30 bp, Artificial Sequence
  Synthetic oligonucleotide
atacaggacagatacaagttaaaagtaaaa

SEQ ID NO: 281711 - DNA, 30 bp, Artificial Sequence
  Synthetic oligonucleotide
atggtagtgctgagtgtgtgcggagtaaaa

SEQ ID NO: 281712 - DNA, 30 bp, Artificial Sequence
  Synthetic oligonucleotide
gagttgtcgtctaggcatatcgacgtaaaa

SEQ ID NO: 281713 - DNA, 30 bp, Artificial Sequence
  Synthetic oligonucleotide
gtgtatcccgtttgtaaacaaaccgtaaaa

SEQ ID NO: 281714 - DNA, 30 bp, Artificial Sequence
  Synthetic oligonucleotide
tgactagaagacattccaccgcgcgtaaaa

SEQ ID NO: 281715 - DNA, 30 bp, Artificial Sequence
  Synthetic oligonucleotide
cgtcgcgtctgataagcgtcgcgcgtaaaa

SEQ ID NO: 281716 - DNA, 30 bp, Artificial Sequence
  Synthetic oligonucleotide
aacttataagtacggagaaggacggtaaaa

SEQ ID NO: 281717 - DNA, 30 bp, Artificial Sequence
  Synthetic oligonucleotide
cacatgccacctacagctaccgcggtaaaa

SEQ ID NO: 281718 - DNA, 30 bp, Artificial Sequence
  Synthetic oligonucleotide
gtgtctatacagttcgttccctgggtaaaa

SEQ ID NO: 281719 - DNA, 30 bp, Artificial Sequence
  Synthetic oligonucleotide
tcggcttgctgccactaattgaatgtaaaa

SEQ ID NO: 281720 - DNA, 30 bp, Artificial Sequence
  Synthetic oligonucleotide
gaggtctatgagatcgactagcatgtaaaa

SEQ ID NO: 281721 - DNA, 30 bp, Artificial Sequence
  Synthetic oligonucleotide
agaagagtagctttttctgtatatgtaaaa

SEQ ID NO: 281722 - DNA, 30 bp, Artificial Sequence
  Synthetic oligonucleotide
tactattgctaattacgaatgggtgtaaaa

SEQ ID NO: 281723 - DNA, 30 bp, Artificial Sequence
  Synthetic oligonucleotide
atgtccagtacactgagctcacaattaaaa

SEQ ID NO: 281724 - DNA, 30 bp, Artificial Sequence
  Synthetic oligonucleotide
ccttgtactttcaccgttgtcgaattaaaa

SEQ ID NO: 281725 - DNA, 30 bp, Artificial Sequence
  Synthetic oligonucleotide
tatgtgatagccatcaaattggtcttaaaa

SEQ ID NO: 281726 - DNA, 30 bp, Artificial Sequence
  Synthetic oligonucleotide
aaaggctaacctgttatttaatcgttaaaa

SEQ ID NO: 281727 - DNA, 30 bp, Artificial Sequence
  Synthetic oligonucleotide
caatggaaaaattgtgccacagctttaaaa

SEQ ID NO: 281728 - DNA, 30 bp, Artificial Sequence
  Synthetic oligonucleotide
taaagagaggcgtcatggctggctttaaaa

SEQ ID NO: 281729 - DNA, 30 bp, Artificial Sequence
  Synthetic oligonucleotide
tgaatctatgaagaggtaatgattttaaaa

SEQ ID NO: 281730 - DNA, 30 bp, Artificial Sequence
  Synthetic oligonucleotide
gaacaatgtacgaaaaggtcctttttaaaa

SEQ ID NO: 281731 - DNA, 30 bp, Artificial Sequence
  Synthetic oligonucleotide
acgtcaatcaatagtcaacggtcaaacaaa

SEQ ID NO: 281732 - DNA, 30 bp, Artificial Sequence
  Synthetic oligonucleotide
tgtgtgggtagtcgttacccaaacaacaaa

SEQ ID NO: 281733 - DNA, 30 bp, Artificial Sequence
  Synthetic oligonucleotide
gtgttgtgagttacaggaatctacaacaaa

SEQ ID NO: 281734 - DNA, 30 bp, Artificial Sequence
  Synthetic oligonucleotide
aagcttcctattgagaaacgtacgaacaaa

SEQ ID NO: 281735 - DNA, 30 bp, Artificial Sequence
  Synthetic oligonucleotide
gcgttatgtagggtgggaggtgcgaacaaa

SEQ ID NO: 281736 - DNA, 30 bp, Artificial Sequence
  Synthetic oligonucleotide
gtctgtattatcaacgttgcatcgaacaaa

SEQ ID NO: 281737 - DNA, 30 bp, Artificial Sequence
  Synthetic oligonucleotide
gtcccgagtttgtggagccatcataacaaa

SEQ ID NO: 281738 - DNA, 30 bp, Artificial Sequence
  Synthetic oligonucleotide
aagcccatcagcgacagtctttttaacaaa

SEQ ID NO: 281739 - DNA, 30 bp, Artificial Sequence
  Synthetic oligonucleotide
cgtatttacggcgtagccacaaaacacaaa

SEQ ID NO: 281740 - DNA, 30 bp, Artificial Sequence
  Synthetic oligonucleotide
gaagcgtccgaggtcaggattacacacaaa

SEQ ID NO: 281741 - DNA, 30 bp, Artificial Sequence
  Synthetic oligonucleotide
gaactaccattctctgaggcgttccacaaa

SEQ ID NO: 281742 - DNA, 30 bp, Artificial Sequence
  Synthetic oligonucleotide
gtatcacggggtacccgactggcgcacaaa

SEQ ID NO: 281743 - DNA, 30 bp, Artificial Sequence
  Synthetic oligonucleotide
agtttaaagttagaagacaaactgcacaaa

SEQ ID NO: 281744 - DNA, 30 bp, Artificial Sequence
  Synthetic oligonucleotide
actactcctctggaaggatcgggtcacaaa

SEQ ID NO: 281745 - DNA, 30 bp, Artificial Sequence
  Synthetic oligonucleotide
aatgtccgagatacgcgaggggttcacaaa

SEQ ID NO: 281746 - DNA, 30 bp, Artificial Sequence
  Synthetic oligonucleotide
ggtaacgttcttgttagtaagcaagacaaa

SEQ ID NO: 281747 - DNA, 30 bp, Artificial Sequence
  Synthetic oligonucleotide
aaaagagcctggatacgctggcaagacaaa

SEQ ID NO: 281748 - DNA, 30 bp, Artificial Sequence
  Synthetic oligonucleotide
ccctatcctttacgttagagcacagacaaa

SEQ ID NO: 281749 - DNA, 30 bp, Artificial Sequence
  Synthetic oligonucleotide
acataggattgatccgacctaagagacaaa

SEQ ID NO: 281750 - DNA, 30 bp, Artificial Sequence
  Synthetic oligonucleotide
gaaatacctagacctaaatgtggagacaaa

SEQ ID NO: 281751 - DNA, 30 bp, Artificial Sequence
  Synthetic oligonucleotide
ggttcccggtgattctcgtgcaccgacaaa

SEQ ID NO: 281752 - DNA, 30 bp, Artificial Sequence
  Synthetic oligonucleotide
aatgatgttacaccgggtcgaaaggacaaa

SEQ ID NO: 281753 - DNA, 30 bp, Artificial Sequence
  Synthetic oligonucleotide
aagaggaagtgagcggccccttaggacaaa

SEQ ID NO: 281754 - DNA, 30 bp, Artificial Sequence
  Synthetic oligonucleotide
agcttgtctacgacgccgtgcagggacaaa

SEQ ID NO: 281755 - DNA, 30 bp, Artificial Sequence
  Synthetic oligonucleotide
gctaataaagcgtcatattaacttgacaaa

SEQ ID NO: 281756 - DNA, 30 bp, Artificial Sequence
  Synthetic oligonucleotide
taaggggtaggcagctgggagccatacaaa

SEQ ID NO: 281757 - DNA, 30 bp, Artificial Sequence
  Synthetic oligonucleotide
gggcagcccccgattcactatagatacaaa

SEQ ID NO: 281758 - DNA, 30 bp, Artificial Sequence
  Synthetic oligonucleotide
aactgcacttacgtaccgatttactacaaa

SEQ ID NO: 281759 - DNA, 29 bp, Artificial Sequence
  Synthetic oligonucleotide
gtcttaccattacgatggtagggtacaaa

SEQ ID NO: 281760 - DNA, 30 bp, Artificial Sequence
  Synthetic oligonucleotide
ggacaaagcattatgaggagtatgtacaaa

SEQ ID NO: 281761 - DNA, 30 bp, Artificial Sequence
  Synthetic oligonucleotide
cggatttcggtcgtcgcgcaaacttacaaa

SEQ ID NO: 281762 - DNA, 30 bp, Artificial Sequence
  Synthetic oligonucleotide
cttttcgctgacgggcggacggcttacaaa

SEQ ID NO: 281763 - DNA, 30 bp, Artificial Sequence
  Synthetic oligonucleotide
tacgaccatttggggctagtcaaaaccaaa

SEQ ID NO: 281764 - DNA, 30 bp, Artificial Sequence
  Synthetic oligonucleotide
atattcacacgtgatcatggttacaccaaa

SEQ ID NO: 281765 - DNA, 31 bp, Artificial Sequence
  Synthetic oligonucleotide
cgctaatgctaactcattccgtggcaccaaa

SEQ ID NO: 281766 - DNA, 30 bp, Artificial Sequence
  Synthetic oligonucleotide
tcctcacgagagccacttgctttcaccaaa

SEQ ID NO: 281767 - DNA, 30 bp, Artificial Sequence
  Synthetic oligonucleotide
tttgcgtcgaaaaacagaccccggaccaaa

SEQ ID NO: 281768 - DNA, 30 bp, Artificial Sequence
  Synthetic oligonucleotide
cgcgtgccaagaatgacgcttttgaccaaa

SEQ ID NO: 281769 - DNA, 30 bp, Artificial Sequence
  Synthetic oligonucleotide
acttcgtaatcattatgtctacaacccaaa

SEQ ID NO: 281770 - DNA, 30 bp, Artificial Sequence
  Synthetic oligonucleotide
tagcagcctattagtgcctagcaacccaaa

SEQ ID NO: 281771 - DNA, 30 bp, Artificial Sequence
  Synthetic oligonucleotide
gcgcacctcaaggcgcgtctggaacccaaa

SEQ ID NO: 281772 - DNA, 30 bp, Artificial Sequence
  Synthetic oligonucleotide
ctcgaagagtatgtacgggtatcccccaaa

SEQ ID NO: 281773 - DNA, 30 bp, Artificial Sequence
  Synthetic oligonucleotide
aagggcgtgaatagggattcgcagcccaaa

SEQ ID NO: 281774 - DNA, 30 bp, Artificial Sequence
  Synthetic oligonucleotide
caaccgagccatccatgatgccggcccaaa

SEQ ID NO: 281775 - DNA, 30 bp, Artificial Sequence
  Synthetic oligonucleotide
cagtagtattgtaatgagtatcggcccaaa

SEQ ID NO: 281776 - DNA, 30 bp, Artificial Sequence
  Synthetic oligonucleotide
tcgacacgggtcatacggggtcatcccaaa

SEQ ID NO: 281777 - DNA, 30 bp, Artificial Sequence
  Synthetic oligonucleotide
cctctttgaaaagttctctattgtcccaaa

SEQ ID NO: 281778 - DNA, 30 bp, Artificial Sequence
  Synthetic oligonucleotide
ccaaaaggtccccgattatatattcccaaa

SEQ ID NO: 281779 - DNA, 30 bp, Artificial Sequence
  Synthetic oligonucleotide
acagagcgcgcagcttgcggagacgccaaa

SEQ ID NO: 281780 - DNA, 30 bp, Artificial Sequence
  Synthetic oligonucleotide
acgtgtataagttgactgcagccatccaaa

SEQ ID NO: 281781 - DNA, 30 bp, Artificial Sequence
  Synthetic oligonucleotide
atcgtagctgcatagtaacctatatccaaa

SEQ ID NO: 281782 - DNA, 30 bp, Artificial Sequence
  Synthetic oligonucleotide
ttcctggcaaaagcaaacgcatcctccaaa

SEQ ID NO: 281783 - DNA, 30 bp, Artificial Sequence
  Synthetic oligonucleotide
gtgttgaatacggtatacgagcggtccaaa

SEQ ID NO: 281784 - DNA, 30 bp, Artificial Sequence
  Synthetic oligonucleotide
ctgcggatagagagcatcggagggtccaaa

SEQ ID NO: 281785 - DNA, 30 bp, Artificial Sequence
  Synthetic oligonucleotide
tagactcactcggcagcctcgagttccaaa

SEQ ID NO: 281786 - DNA, 30 bp, Artificial Sequence
  Synthetic oligonucleotide
tgcgggtatatgtaaaaagcaggttccaaa

SEQ ID NO: 281787 - DNA, 30 bp, Artificial Sequence
  Synthetic oligonucleotide
actataaataaatggatcagtatttccaaa

SEQ ID NO: 281788 - DNA, 30 bp, Artificial Sequence
  Synthetic oligonucleotide
ttcgcagccaccctaagatgaacaagcaaa

SEQ ID NO: 281789 - DNA, 31 bp, Artificial Sequence
  Synthetic oligonucleotide
ggtccgacattaggctatgatctcaagcaaa

SEQ ID NO: 281790 - DNA, 30 bp, Artificial Sequence
  Synthetic oligonucleotide
atttcgtcagcggaaggtctgcctagcaaa

SEQ ID NO: 281791 - DNA, 30 bp, Artificial Sequence
  Synthetic oligonucleotide
gtctgcctaacaaatgtttatcttagcaaa

SEQ ID NO: 281792 - DNA, 30 bp, Artificial Sequence
  Synthetic oligonucleotide
aaagtgaaagctatggagggggttagcaaa

SEQ ID NO: 281793 - DNA, 30 bp, Artificial Sequence
  Synthetic oligonucleotide
ctattcggtatgtcgatttaaaaacgcaaa

SEQ ID NO: 281794 - DNA, 30 bp, Artificial Sequence
  Synthetic oligonucleotide
cactgattgtgtgcggttaagtcacgcaaa

SEQ ID NO: 281795 - DNA, 30 bp, Artificial Sequence
  Synthetic oligonucleotide
gatgcaattcgagcacatttctgacgcaaa

SEQ ID NO: 281796 - DNA, 30 bp, Artificial Sequence
  Synthetic oligonucleotide
gggacgcggctaatacagagaaaccgcaaa

SEQ ID NO: 281797 - DNA, 30 bp, Artificial Sequence
  Synthetic oligonucleotide
gtcaagcggccagagaaactcagccgcaaa

SEQ ID NO: 281798 - DNA, 30 bp, Artificial Sequence
  Synthetic oligonucleotide
aaataacgccgaatacaccaaccgcgcaaa

SEQ ID NO: 281799 - DNA, 30 bp, Artificial Sequence
  Synthetic oligonucleotide
cgataattttctacagtgataaatcgcaaa

SEQ ID NO: 281800 - DNA, 30 bp, Artificial Sequence
  Synthetic oligonucleotide
cattgcataggacgcagttccgatcgcaaa

SEQ ID NO: 281801 - DNA, 30 bp, Artificial Sequence
  Synthetic oligonucleotide
agttgggtccattataatgttattcgcaaa

SEQ ID NO: 281802 - DNA, 30 bp, Artificial Sequence
  Synthetic oligonucleotide
tcgtgccgtttggctatgagttacggcaaa

SEQ ID NO: 281803 - DNA, 30 bp, Artificial Sequence
  Synthetic oligonucleotide
atctttcactaagtcgtaaagaagggcaaa

SEQ ID NO: 281804 - DNA, 30 bp, Artificial Sequence
  Synthetic oligonucleotide
catacgggtccttaatagtataatggcaaa

SEQ ID NO: 281805 - DNA, 30 bp, Artificial Sequence
  Synthetic oligonucleotide
cttagggaagtaagcatgacggatggcaaa

SEQ ID NO: 281806 - DNA, 30 bp, Artificial Sequence
  Synthetic oligonucleotide
catacgcgctagttaacacttagtggcaaa

SEQ ID NO: 281807 - DNA, 30 bp, Artificial Sequence
  Synthetic oligonucleotide
cattgatgactagtccatttgcttggcaaa

SEQ ID NO: 281808 - DNA, 30 bp, Artificial Sequence
  Synthetic oligonucleotide
tgatcggggaggcctaggttttaatgcaaa

SEQ ID NO: 281809 - DNA, 30 bp, Artificial Sequence
  Synthetic oligonucleotide
agagagttgcaatataggttgacatgcaaa

SEQ ID NO: 281810 - DNA, 30 bp, Artificial Sequence
  Synthetic oligonucleotide
tgacgcggggagattggttttagatgcaaa

SEQ ID NO: 281811 - DNA, 30 bp, Artificial Sequence
  Synthetic oligonucleotide
agacctaaattgtattattgaggatgcaaa

SEQ ID NO: 281812 - DNA, 30 bp, Artificial Sequence
  Synthetic oligonucleotide
cttagaattagaactagcatgtactgcaaa

SEQ ID NO: 281813 - DNA, 30 bp, Artificial Sequence
  Synthetic oligonucleotide
ttaatcggctaacactgcccatcctgcaaa

SEQ ID NO: 281814 - DNA, 30 bp, Artificial Sequence
  Synthetic oligonucleotide
ttcgtcgcattccattatcaatgctgcaaa

SEQ ID NO: 281815 - DNA, 30 bp, Artificial Sequence
  Synthetic oligonucleotide
taaaggcgttgcgcagactcggtctgcaaa

SEQ ID NO: 281816 - DNA, 30 bp, Artificial Sequence
  Synthetic oligonucleotide
tagaaccggatctgcgccccgctgtgcaaa

SEQ ID NO: 281817 - DNA, 30 bp, Artificial Sequence
  Synthetic oligonucleotide
cagcaacgttcaccgacgttcaattgcaaa

SEQ ID NO: 281818 - DNA, 30 bp, Artificial Sequence
  Synthetic oligonucleotide
agcgtgtggtagaagccggagtattgcaaa

SEQ ID NO: 281819 - DNA, 30 bp, Artificial Sequence
  Synthetic oligonucleotide
gctggaaaagccccaatcggggtaatcaaa

SEQ ID NO: 281820 - DNA, 30 bp, Artificial Sequence
  Synthetic oligonucleotide
cacctggtagactaccgaacggacatcaaa

SEQ ID NO: 281821 - DNA, 30 bp, Artificial Sequence
  Synthetic oligonucleotide
tctcccataatcactgtttttggcatcaaa

SEQ ID NO: 281822 - DNA, 30 bp, Artificial Sequence
  Synthetic oligonucleotide
aaaaaggattactaattcgagatcatcaaa

SEQ ID NO: 281823 - DNA, 30 bp, Artificial Sequence
  Synthetic oligonucleotide
cttacacaactcgagatcgataagatcaaa

SEQ ID NO: 281824 - DNA, 30 bp, Artificial Sequence
  Synthetic oligonucleotide
ggagtgtagcttcgtcgagcttcgatcaaa

SEQ ID NO: 281825 - DNA, 30 bp, Artificial Sequence
  Synthetic oligonucleotide
cctggcgattggaacgatactatgatcaaa

SEQ ID NO: 281826 - DNA, 30 bp, Artificial Sequence
  Synthetic oligonucleotide
catttgtgtaatagttacctcgtgatcaaa

SEQ ID NO: 281827 - DNA, 30 bp, Artificial Sequence
  Synthetic oligonucleotide
cttaatgagggcaagctgagagatatcaaa

SEQ ID NO: 281828 - DNA, 30 bp, Artificial Sequence
  Synthetic oligonucleotide
cgtactgttgccggaccatcagctatcaaa

SEQ ID NO: 281829 - DNA, 30 bp, Artificial Sequence
  Synthetic oligonucleotide
ttttacacaagcacaggagaatttatcaaa

SEQ ID NO: 281830 - DNA, 30 bp, Artificial Sequence
  Synthetic oligonucleotide
ataacaatcggggcgtttgagaaactcaaa

SEQ ID NO: 281831 - DNA, 30 bp, Artificial Sequence
  Synthetic oligonucleotide
tcggccttgaacccaaaataggtactcaaa

SEQ ID NO: 281832 - DNA, 30 bp, Artificial Sequence
  Synthetic oligonucleotide
ccggttaggtcgtaaggactgaccctcaaa

SEQ ID NO: 281833 - DNA, 30 bp, Artificial Sequence
  Synthetic oligonucleotide
taaagtagagttggggaatctaatctcaaa

SEQ ID NO: 281834 - DNA, 30 bp, Artificial Sequence
  Synthetic oligonucleotide
ccgttgaatcgtaatttgacgtttctcaaa

SEQ ID NO: 281835 - DNA, 30 bp, Artificial Sequence
  Synthetic oligonucleotide
ggttctttacgaaagctcatcagagtcaaa

SEQ ID NO: 281836 - DNA, 30 bp, Artificial Sequence
  Synthetic oligonucleotide
tgtaaaggctgtaaggcttccttcgtcaaa

SEQ ID NO: 281837 - DNA, 30 bp, Artificial Sequence
  Synthetic oligonucleotide
gtagaattgcgagcctcattagaggtcaaa

SEQ ID NO: 281838 - DNA, 30 bp, Artificial Sequence
  Synthetic oligonucleotide
tgggccatctgttatagtcaaggggtcaaa

SEQ ID NO: 281839 - DNA, 30 bp, Artificial Sequence
  Synthetic oligonucleotide
tagtcgaggattggctgggtatgggtcaaa

SEQ ID NO: 281840 - DNA, 30 bp, Artificial Sequence
  Synthetic oligonucleotide
tgcggaattttaggtgtgtcgggtgtcaaa

SEQ ID NO: 281841 - DNA, 30 bp, Artificial Sequence
  Synthetic oligonucleotide
aactaaggtggatcgccagctaaattcaaa

SEQ ID NO: 281842 - DNA, 30 bp, Artificial Sequence
  Synthetic oligonucleotide
aaccagttgggtctgtgttacggattcaaa

SEQ ID NO: 281843 - DNA, 30 bp, Artificial Sequence
  Synthetic oligonucleotide
ttggatgtcaggcttctacaacacttcaaa

SEQ ID NO: 281844 - DNA, 30 bp, Artificial Sequence
  Synthetic oligonucleotide
actgtaataaagtgagaaacccctttcaaa

SEQ ID NO: 281845 - DNA, 30 bp, Artificial Sequence
  Synthetic oligonucleotide
aggcgagggctctccgacgcgcgtttcaaa

SEQ ID NO: 281846 - DNA, 30 bp, Artificial Sequence
  Synthetic oligonucleotide
gtctgggtgtgggaccattccgcaaagaaa

SEQ ID NO: 281847 - DNA, 30 bp, Artificial Sequence
  Synthetic oligonucleotide
aattggatccagatttagagctacaagaaa

SEQ ID NO: 281848 - DNA, 30 bp, Artificial Sequence
  Synthetic oligonucleotide
agacggcttaataggagcgacgccaagaaa

SEQ ID NO: 281849 - DNA, 30 bp, Artificial Sequence
  Synthetic oligonucleotide
gtcgtgtcactagaatatcgtggcaagaaa

SEQ ID NO: 281850 - DNA, 30 bp, Artificial Sequence
  Synthetic oligonucleotide
cgctccgtttactctatagttgtcaagaaa

SEQ ID NO: 281851 - DNA, 30 bp, Artificial Sequence
  Synthetic oligonucleotide
tccgtaagcctcaatagggctgagaagaaa

SEQ ID NO: 281852 - DNA, 30 bp, Artificial Sequence
  Synthetic oligonucleotide
gtttaaaagtcttagtggtgatagaagaaa

SEQ ID NO: 281853 - DNA, 30 bp, Artificial Sequence
  Synthetic oligonucleotide
agagtaagctgtgatgctgcctggaagaaa

SEQ ID NO: 281854 - DNA, 30 bp, Artificial Sequence
  Synthetic oligonucleotide
gaggggaatcgaaccattttttgacagaaa

SEQ ID NO: 281855 - DNA, 30 bp, Artificial Sequence
  Synthetic oligonucleotide
ttacttatatgccagtttggcctacagaaa

SEQ ID NO: 281856 - DNA, 30 bp, Artificial Sequence
  Synthetic oligonucleotide
aatacacgtctagtacatcgtgcccagaaa

SEQ ID NO: 281857 - DNA, 30 bp, Artificial Sequence
  Synthetic oligonucleotide
caaagtaaattatgatctccgcggcagaaa

SEQ ID NO: 281858 - DNA, 30 bp, Artificial Sequence
  Synthetic oligonucleotide
tggacgtgattcggtttcctagggcagaaa

SEQ ID NO: 281859 - DNA, 30 bp, Artificial Sequence
  Synthetic oligonucleotide
ctctcggtgccgggtggagttaatcagaaa

SEQ ID NO: 281860 - DNA, 30 bp, Artificial Sequence
  Synthetic oligonucleotide
taataatgattaggtggcgtttcagagaaa

SEQ ID NO: 281861 - DNA, 30 bp, Artificial Sequence
  Synthetic oligonucleotide
tgattttgatcgtatttggtatgcgagaaa

SEQ ID NO: 281862 - DNA, 30 bp, Artificial Sequence
  Synthetic oligonucleotide
catcgtcggttaaattttagtgaggagaaa

SEQ ID NO: 281863 - DNA, 30 bp, Artificial Sequence
  Synthetic oligonucleotide
tcagcggtctgccgagcatattaggagaaa

SEQ ID NO: 281864 - DNA, 30 bp, Artificial Sequence
  Synthetic oligonucleotide
ggacacgatctgggtagagatagtgagaaa

SEQ ID NO: 281865 - DNA, 30 bp, Artificial Sequence
  Synthetic oligonucleotide
aaaagtttcttcgaacgtgtacgtgagaaa

SEQ ID NO: 281866 - DNA, 30 bp, Artificial Sequence
  Synthetic oligonucleotide
ttatacgtcaagtatatgtaggcatagaaa

SEQ ID NO: 281867 - DNA, 30 bp, Artificial Sequence
  Synthetic oligonucleotide
gtccattgatagttgggaaaccgatagaaa

SEQ ID NO: 281868 - DNA, 30 bp, Artificial Sequence
  Synthetic oligonucleotide
tgcggctgatggttcggttgcgtatagaaa

SEQ ID NO: 281869 - DNA, 30 bp, Artificial Sequence
  Synthetic oligonucleotide
ttattacagtcgatcacgtagtagtagaaa

SEQ ID NO: 281870 - DNA, 30 bp, Artificial Sequence
  Synthetic oligonucleotide
catcactgaatacatggatgcgcaacgaaa

SEQ ID NO: 281871 - DNA, 30 bp, Artificial Sequence
  Synthetic oligonucleotide
gtccgcgaaaaataataccccgtaacgaaa

SEQ ID NO: 281872 - DNA, 30 bp, Artificial Sequence
  Synthetic oligonucleotide
tcccatcgcactccggcggacaagacgaaa

SEQ ID NO: 281873 - DNA, 30 bp, Artificial Sequence
  Synthetic oligonucleotide
aaaaccacccaataacatactaagacgaaa

SEQ ID NO: 281874 - DNA, 30 bp, Artificial Sequence
  Synthetic oligonucleotide
tatcggctgtccaagattggttcgacgaaa

SEQ ID NO: 281875 - DNA, 30 bp, Artificial Sequence
  Synthetic oligonucleotide
tattcttgggaggtcatccctctgacgaaa

SEQ ID NO: 281876 - DNA, 30 bp, Artificial Sequence
  Synthetic oligonucleotide
actgtcacactcggacactgcccgccgaaa

SEQ ID NO: 281877 - DNA, 30 bp, Artificial Sequence
  Synthetic oligonucleotide
ttcggaaggatatgggttaccagtccgaaa

SEQ ID NO: 281878 - DNA, 30 bp, Artificial Sequence
  Synthetic oligonucleotide
cgcccggatgcaaatgtccgctacgcgaaa

SEQ ID NO: 281879 - DNA, 30 bp, Artificial Sequence
  Synthetic oligonucleotide
cacacgtgtttgtagtacaggttcgcgaaa

SEQ ID NO: 281880 - DNA, 30 bp, Artificial Sequence
  Synthetic oligonucleotide
cggcctgactcccaaaccattcaggcgaaa

SEQ ID NO: 281881 - DNA, 30 bp, Artificial Sequence
  Synthetic oligonucleotide
tatctatctgggtgtgcatccgtggcgaaa

SEQ ID NO: 281882 - DNA, 30 bp, Artificial Sequence
  Synthetic oligonucleotide
ctccactgcatctacggattttaatcgaaa

SEQ ID NO: 281883 - DNA, 30 bp, Artificial Sequence
  Synthetic oligonucleotide
gcgggttcggatgctttgttgcactcgaaa

SEQ ID NO: 281884 - DNA, 30 bp, Artificial Sequence
  Synthetic oligonucleotide
cactgtcggtaaggccagagggcctcgaaa

SEQ ID NO: 281885 - DNA, 30 bp, Artificial Sequence
  Synthetic oligonucleotide
ctaaaacgatcgaggagcaattagtcgaaa

SEQ ID NO: 281886 - DNA, 30 bp, Artificial Sequence
  Synthetic oligonucleotide
atgtttactaaattgcggtgggtttcgaaa

SEQ ID NO: 281887 - DNA, 30 bp, Artificial Sequence
  Synthetic oligonucleotide
tgtcgcacgtatcccgatatagaaaggaaa

SEQ ID NO: 281888 - DNA, 30 bp, Artificial Sequence
  Synthetic oligonucleotide
tgattaagtcgtagaggcagggtaaggaaa

SEQ ID NO: 281889 - DNA, 30 bp, Artificial Sequence
  Synthetic oligonucleotide
agcgccctatgaatttgtcgtaccaggaaa

SEQ ID NO: 281890 - DNA, 30 bp, Artificial Sequence
  Synthetic oligonucleotide
aaagcggacgtgggcttagaggtcaggaaa

SEQ ID NO: 281891 - DNA, 30 bp, Artificial Sequence
  Synthetic oligonucleotide
ctaagtaatgagattgtttgattgaggaaa

SEQ ID NO: 281892 - DNA, 30 bp, Artificial Sequence
  Synthetic oligonucleotide
acaattatcggtagaaacagcgataggaaa

SEQ ID NO: 281893 - DNA, 30 bp, Artificial Sequence
  Synthetic oligonucleotide
cgcctatcggtctgaggcgactataggaaa

SEQ ID NO: 281894 - DNA, 30 bp, Artificial Sequence
  Synthetic oligonucleotide
cacccttctttatagtgtggctaacggaaa

SEQ ID NO: 281895 - DNA, 30 bp, Artificial Sequence
  Synthetic oligonucleotide
aaggttgtctttccagcacggatacggaaa

SEQ ID NO: 281896 - DNA, 30 bp, Artificial Sequence
  Synthetic oligonucleotide
gcgacgatgggactgcttcgtcgccggaaa

SEQ ID NO: 281897 - DNA, 30 bp, Artificial Sequence
  Synthetic oligonucleotide
aaggctgggaatgggtcggggatccggaaa

SEQ ID NO: 281898 - DNA, 30 bp, Artificial Sequence
  Synthetic oligonucleotide
aaagtatgtctttatctgggggggcggaaa

SEQ ID NO: 281899 - DNA, 30 bp, Artificial Sequence
  Synthetic oligonucleotide
gtcgagtggcaggctcggctcgatcggaaa

SEQ ID NO: 281900 - DNA, 30 bp, Artificial Sequence
  Synthetic oligonucleotide
ggcggtcctgaattttatacccaagggaaa

SEQ ID NO: 281901 - DNA, 30 bp, Artificial Sequence
  Synthetic oligonucleotide
cggtccagaagagcgacctgaccagggaaa

SEQ ID NO: 281902 - DNA, 30 bp, Artificial Sequence
  Synthetic oligonucleotide
aactaggccatttacgattgaggagggaaa

SEQ ID NO: 281903 - DNA, 30 bp, Artificial Sequence
  Synthetic oligonucleotide
gagggaattagattctagccgcacgggaaa

SEQ ID NO: 281904 - DNA, 30 bp, Artificial Sequence
  Synthetic oligonucleotide
cgacgtttcgactaatatactgacgggaaa

SEQ ID NO: 281905 - DNA, 30 bp, Artificial Sequence
  Synthetic oligonucleotide
ggcaccattgtacctttattccgcgggaaa

SEQ ID NO: 281906 - DNA, 30 bp, Artificial Sequence
  Synthetic oligonucleotide
ataggaaaaattctttatgaccaggggaaa

SEQ ID NO: 281907 - DNA, 30 bp, Artificial Sequence
  Synthetic oligonucleotide
ttaagtcctcgtttgctgaaggaggggaaa

SEQ ID NO: 281908 - DNA, 30 bp, Artificial Sequence
  Synthetic oligonucleotide
caattagaaaggcgtacaaattcggggaaa

SEQ ID NO: 281909 - DNA, 30 bp, Artificial Sequence
  Synthetic oligonucleotide
atggtagtcgatccttgggttctggggaaa

SEQ ID NO: 281910 - DNA, 30 bp, Artificial Sequence
  Synthetic oligonucleotide
aagcacagcccgcgcccttggagtgggaaa

SEQ ID NO: 281911 - DNA, 30 bp, Artificial Sequence
  Synthetic oligonucleotide
atcaagcatgagtgtgctctaacatggaaa

SEQ ID NO: 281912 - DNA, 30 bp, Artificial Sequence
  Synthetic oligonucleotide
aaataaggtgcatagagacatcgttggaaa

SEQ ID NO: 281913 - DNA, 30 bp, Artificial Sequence
  Synthetic oligonucleotide
tcttttcgcaagatgttgatactttggaaa

SEQ ID NO: 281914 - DNA, 30 bp, Artificial Sequence
  Synthetic oligonucleotide
agaatgtaccaaaattcacgtctttggaaa

SEQ ID NO: 281915 - DNA, 30 bp, Artificial Sequence
  Synthetic oligonucleotide
gtgtacccgtgttatctatcgtcaatgaaa

SEQ ID NO: 281916 - DNA, 30 bp, Artificial Sequence
  Synthetic oligonucleotide
tcgcttttgaaggcggccgagagaatgaaa

SEQ ID NO: 281917 - DNA, 30 bp, Artificial Sequence
  Synthetic oligonucleotide
ggtctgttggtgaaagtgaaccacatgaaa

SEQ ID NO: 281918 - DNA, 30 bp, Artificial Sequence
  Synthetic oligonucleotide
ttcatgctggatggtcatcagccgatgaaa

SEQ ID NO: 281919 - DNA, 30 bp, Artificial Sequence
  Synthetic oligonucleotide
gcttgattcaatttgacagattcgatgaaa

SEQ ID NO: 281920 - DNA, 30 bp, Artificial Sequence
  Synthetic oligonucleotide
tcaaggttctggagagattacaatatgaaa

SEQ ID NO: 281921 - DNA, 30 bp, Artificial Sequence
  Synthetic oligonucleotide
tggtcctctgggcgacggatggatatgaaa

SEQ ID NO: 281922 - DNA, 30 bp, Artificial Sequence
  Synthetic oligonucleotide
atacacatgtcatgtatttagtgtatgaaa

SEQ ID NO: 281923 - DNA, 30 bp, Artificial Sequence
  Synthetic oligonucleotide
cagttccgaaggcttcatggcatactgaaa

SEQ ID NO: 281924 - DNA, 30 bp, Artificial Sequence
  Synthetic oligonucleotide
atgtaaagtagtacatcgcctgtactgaaa

SEQ ID NO: 281925 - DNA, 30 bp, Artificial Sequence
  Synthetic oligonucleotide
gctgcaccgtaatctcacgagtccctgaaa

SEQ ID NO: 281926 - DNA, 30 bp, Artificial Sequence
  Synthetic oligonucleotide
ttacggcgatggtattcgcggtccctgaaa

SEQ ID NO: 281927 - DNA, 30 bp, Artificial Sequence
  Synthetic oligonucleotide
atccccgagtagaccccagttttgctgaaa

SEQ ID NO: 281928 - DNA, 30 bp, Artificial Sequence
  Synthetic oligonucleotide
cgattcacggtgttataccgagatctgaaa

SEQ ID NO: 281929 - DNA, 30 bp, Artificial Sequence
  Synthetic oligonucleotide
taggcgtaatgtgtattctgatatctgaaa

SEQ ID NO: 281930 - DNA, 30 bp, Artificial Sequence
  Synthetic oligonucleotide
cccacaagattagatgtcaccgctctgaaa

SEQ ID NO: 281931 - DNA, 30 bp, Artificial Sequence
  Synthetic oligonucleotide
ccacgtggggcataaacattgacggtgaaa

SEQ ID NO: 281932 - DNA, 30 bp, Artificial Sequence
  Synthetic oligonucleotide
gagtaccatcaacgggaacggtcggtgaaa

SEQ ID NO: 281933 - DNA, 30 bp, Artificial Sequence
  Synthetic oligonucleotide
attttcgaaggggtggagcggagggtgaaa

SEQ ID NO: 281934 - DNA, 30 bp, Artificial Sequence
  Synthetic oligonucleotide
ctattcaaggtgcgactcgcgggattgaaa

SEQ ID NO: 281935 - DNA, 30 bp, Artificial Sequence
  Synthetic oligonucleotide
ataagccaggagcccctcctgggattgaaa

SEQ ID NO: 281936 - DNA, 30 bp, Artificial Sequence
  Synthetic oligonucleotide
cgggacgggtatgatgccgccttattgaaa

SEQ ID NO: 281937 - DNA, 30 bp, Artificial Sequence
  Synthetic oligonucleotide
aggagggcgtacccaggttttttcttgaaa

SEQ ID NO: 281938 - DNA, 30 bp, Artificial Sequence
  Synthetic oligonucleotide
gtctcacagtagggggttggaacgttgaaa

SEQ ID NO: 281939 - DNA, 30 bp, Artificial Sequence
  Synthetic oligonucleotide
aagtatactgcgagacctgctaggttgaaa

SEQ ID NO: 281940 - DNA, 30 bp, Artificial Sequence
  Synthetic oligonucleotide
ggtaatttaagcctggcaagaatgttgaaa

SEQ ID NO: 281941 - DNA, 30 bp, Artificial Sequence
  Synthetic oligonucleotide
agaatgtactacgggctataactgttgaaa

SEQ ID NO: 281942 - DNA, 30 bp, Artificial Sequence
  Synthetic oligonucleotide
tatggatcacgcattcggatcgtgttgaaa

SEQ ID NO: 281943 - DNA, 30 bp, Artificial Sequence
  Synthetic oligonucleotide
gtggcctcatcgggcaggccccctttgaaa

SEQ ID NO: 281944 - DNA, 30 bp, Artificial Sequence
  Synthetic oligonucleotide
gcgtgatctaaagaacttggtgctttgaaa

SEQ ID NO: 281945 - DNA, 30 bp, Artificial Sequence
  Synthetic oligonucleotide
aagcacgggcattgtaatatttctttgaaa

SEQ ID NO: 281946 - DNA, 30 bp, Artificial Sequence
  Synthetic oligonucleotide
ttaaacatctatggcctcaggcgtttgaaa

SEQ ID NO: 281947 - DNA, 30 bp, Artificial Sequence
  Synthetic oligonucleotide
gagacctatcgtataggcaatggtttgaaa

SEQ ID NO: 281948 - DNA, 30 bp, Artificial Sequence
  Synthetic oligonucleotide
cgcaggtcacgtcgacgggtgctaaataaa

SEQ ID NO: 281949 - DNA, 30 bp, Artificial Sequence
  Synthetic oligonucleotide
cgggaccctgtcgcaacgagggtcaataaa

SEQ ID NO: 281950 - DNA, 30 bp, Artificial Sequence
  Synthetic oligonucleotide
tcctaggagcaactaatacgtgagaataaa

SEQ ID NO: 281951 - DNA, 30 bp, Artificial Sequence
  Synthetic oligonucleotide
ccggtccttaacgcgaacattttgaataaa

SEQ ID NO: 281952 - DNA, 30 bp, Artificial Sequence
  Synthetic oligonucleotide
ggaaagcaattgaacggttaatataataaa

SEQ ID NO: 281953 - DNA, 30 bp, Artificial Sequence
  Synthetic oligonucleotide
ataaactctaaggttttcgtcagtaataaa

SEQ ID NO: 281954 - DNA, 30 bp, Artificial Sequence
  Synthetic oligonucleotide
aggcaattcattaagcttatccgtaataaa

SEQ ID NO: 281955 - DNA, 30 bp, Artificial Sequence
  Synthetic oligonucleotide
tgcgcggttagatggcacggtcgtaataaa

SEQ ID NO: 281956 - DNA, 30 bp, Artificial Sequence
  Synthetic oligonucleotide
tgcaattgtcaaaatttgtctcaacataaa

SEQ ID NO: 281957 - DNA, 30 bp, Artificial Sequence
  Synthetic oligonucleotide
gtgcatgagtttaacagggtcgcacataaa

SEQ ID NO: 281958 - DNA, 30 bp, Artificial Sequence
  Synthetic oligonucleotide
tagccgggaacctaacgcgctgcccataaa

SEQ ID NO: 281959 - DNA, 30 bp, Artificial Sequence
  Synthetic oligonucleotide
ttgcgttgactgcgcatgaggtcccataaa

SEQ ID NO: 281960 - DNA, 30 bp, Artificial Sequence
  Synthetic oligonucleotide
tgcgctgcaatccttccggaaccgcataaa

SEQ ID NO: 281961 - DNA, 30 bp, Artificial Sequence
  Synthetic oligonucleotide
ccgcagtatagacctcgctgattgcataaa

SEQ ID NO: 281962 - DNA, 30 bp, Artificial Sequence
  Synthetic oligonucleotide
agtgaagtgttacatacaaagttgcataaa

SEQ ID NO: 281963 - DNA, 30 bp, Artificial Sequence
  Synthetic oligonucleotide
tgacaatgtagagattttcgggctcataaa

SEQ ID NO: 281964 - DNA, 30 bp, Artificial Sequence
  Synthetic oligonucleotide
tttaggcattccagagtaacaaaagataaa

SEQ ID NO: 281965 - DNA, 30 bp, Artificial Sequence
  Synthetic oligonucleotide
aatgtcctataaaacgccggttaagataaa

SEQ ID NO: 281966 - DNA, 30 bp, Artificial Sequence
  Synthetic oligonucleotide
catgagatctgttcactcaaaacagataaa

SEQ ID NO: 281967 - DNA, 30 bp, Artificial Sequence
  Synthetic oligonucleotide
tctaaacttaagaacctaacttgagataaa

SEQ ID NO: 281968 - DNA, 30 bp, Artificial Sequence
  Synthetic oligonucleotide
gtgaacaatttacgcgataattcggataaa

SEQ ID NO: 281969 - DNA, 30 bp, Artificial Sequence
  Synthetic oligonucleotide
ccatgataaaaggcataagacggggataaa

SEQ ID NO: 281970 - DNA, 29 bp, Artificial Sequence
  Synthetic oligonucleotide
taagttgatgcacgaaggaccatgataaa

SEQ ID NO: 281971 - DNA, 30 bp, Artificial Sequence
  Synthetic oligonucleotide
gttatcgtagtacgtaacataggtgataaa

SEQ ID NO: 281972 - DNA, 30 bp, Artificial Sequence
  Synthetic oligonucleotide
atgtgacaggaattgatattttgtgataaa

SEQ ID NO: 281973 - DNA, 30 bp, Artificial Sequence
  Synthetic oligonucleotide
caaacactcgggtgcacatacaactataaa

SEQ ID NO: 281974 - DNA, 30 bp, Artificial Sequence
  Synthetic oligonucleotide
gcgggtagcttgtagggtcaatactataaa

SEQ ID NO: 281975 - DNA, 30 bp, Artificial Sequence
  Synthetic oligonucleotide
gatgtgtctaaacgggtaatatcctataaa

SEQ ID NO: 281976 - DNA, 30 bp, Artificial Sequence
  Synthetic oligonucleotide
gttggattttgctccgtactgcagtataaa

SEQ ID NO: 281977 - DNA, 32 bp, Artificial Sequence
  Synthetic oligonucleotide
tgatctgttgtgtaggtttactcccgtataaa

SEQ ID NO: 281978 - DNA, 30 bp, Artificial Sequence
  Synthetic oligonucleotide
ggataagctacaggccggggtgggtataaa

SEQ ID NO: 281979 - DNA, 30 bp, Artificial Sequence
  Synthetic oligonucleotide
tgtatgtcgtacacttagatgcattataaa

SEQ ID NO: 281980 - DNA, 30 bp, Artificial Sequence
  Synthetic oligonucleotide
aaacctaaccgaatctcgacttattataaa

SEQ ID NO: 281981 - DNA, 30 bp, Artificial Sequence
  Synthetic oligonucleotide
ctgtaagggtgaaccgcgtgttattataaa

SEQ ID NO: 281982 - DNA, 30 bp, Artificial Sequence
  Synthetic oligonucleotide
gattagttggttcgacaagacgaaactaaa

SEQ ID NO: 281983 - DNA, 30 bp, Artificial Sequence
  Synthetic oligonucleotide
gacttcgtgcaggtagacgtaggcactaaa

SEQ ID NO: 281984 - DNA, 30 bp, Artificial Sequence
  Synthetic oligonucleotide
aggaccacatattatagatcctctactaaa

SEQ ID NO: 281985 - DNA, 30 bp, Artificial Sequence
  Synthetic oligonucleotide
gacctttaaccatagtaaagttgtactaaa

SEQ ID NO: 281986 - DNA, 30 bp, Artificial Sequence
  Synthetic oligonucleotide
aggtgccggcatgagtaatagtatcctaaa

SEQ ID NO: 281987 - DNA, 30 bp, Artificial Sequence
  Synthetic oligonucleotide
tgcacggatatagcatttaccagagctaaa

SEQ ID NO: 281988 - DNA, 30 bp, Artificial Sequence
  Synthetic oligonucleotide
agcgcattatgttaaattgtgggagctaaa

SEQ ID NO: 281989 - DNA, 30 bp, Artificial Sequence
  Synthetic oligonucleotide
gtccttggcatacgcaacctgggggctaaa

SEQ ID NO: 281990 - DNA, 30 bp, Artificial Sequence
  Synthetic oligonucleotide
gcacttgcgtagatatagacctgggctaaa

SEQ ID NO: 281991 - DNA, 30 bp, Artificial Sequence
  Synthetic oligonucleotide
atcctcagcggatatcggccacatgctaaa

SEQ ID NO: 281992 - DNA, 30 bp, Artificial Sequence
  Synthetic oligonucleotide
catagttaaattatatcttcccttgctaaa

SEQ ID NO: 281993 - DNA, 30 bp, Artificial Sequence
  Synthetic oligonucleotide
aaagacaacttaaccgacgaaaaatctaaa

SEQ ID NO: 281994 - DNA, 30 bp, Artificial Sequence
  Synthetic oligonucleotide
tcggtaagaattttaaatactaactctaaa

SEQ ID NO: 281995 - DNA, 30 bp, Artificial Sequence
  Synthetic oligonucleotide
gccgctgacgaagaaggactcccctctaaa

SEQ ID NO: 281996 - DNA, 30 bp, Artificial Sequence
  Synthetic oligonucleotide
tatgtgcgaacgggtgtgcgggcgtctaaa

SEQ ID NO: 281997 - DNA, 30 bp, Artificial Sequence
  Synthetic oligonucleotide
aaagtacgtgggtaggtataccggtctaaa

SEQ ID NO: 281998 - DNA, 30 bp, Artificial Sequence
  Synthetic oligonucleotide
tgcggcctccggctgcaggtaaattctaaa

SEQ ID NO: 281999 - DNA, 30 bp, Artificial Sequence
  Synthetic oligonucleotide
gcgggagtcgcataagtttactcttctaaa

SEQ ID NO: 282000 - DNA, 30 bp, Artificial Sequence
  Synthetic oligonucleotide
cagtgtgaatctaggtcatgtagttctaaa

SEQ ID NO: 282001 - DNA, 30 bp, Artificial Sequence
  Synthetic oligonucleotide
gaaggagaaacttcgctataaatttctaaa

SEQ ID NO: 282002 - DNA, 30 bp, Artificial Sequence
  Synthetic oligonucleotide
agatccgcgagcaaaagtgcggtttctaaa

SEQ ID NO: 282003 - DNA, 30 bp, Artificial Sequence
  Synthetic oligonucleotide
taaaagcagcacgcacccgccaaaagtaaa

SEQ ID NO: 282004 - DNA, 30 bp, Artificial Sequence
  Synthetic oligonucleotide
tttaggatcaggtaggcttactaaagtaaa

SEQ ID NO: 282005 - DNA, 30 bp, Artificial Sequence
  Synthetic oligonucleotide
tgaatcacgcgagatacaacggcaagtaaa

SEQ ID NO: 282006 - DNA, 30 bp, Artificial Sequence
  Synthetic oligonucleotide
tcattaaagattatactcgtctgaagtaaa

SEQ ID NO: 282007 - DNA, 30 bp, Artificial Sequence
  Synthetic oligonucleotide
agtacggtttgaacgtcattgcccagtaaa

SEQ ID NO: 282008 - DNA, 30 bp, Artificial Sequence
  Synthetic oligonucleotide
attggattccaacctcccctagagagtaaa

SEQ ID NO: 282009 - DNA, 30 bp, Artificial Sequence
  Synthetic oligonucleotide
ttgcctggaattgtttgtaatggtagtaaa

SEQ ID NO: 282010 - DNA, 30 bp, Artificial Sequence
  Synthetic oligonucleotide
aacggctcagagcggatataagtccgtaaa

SEQ ID NO: 282011 - DNA, 30 bp, Artificial Sequence
  Synthetic oligonucleotide
tcgagtgaaactgtagcgtgaatgcgtaaa

SEQ ID NO: 282012 - DNA, 30 bp, Artificial Sequence
  Synthetic oligonucleotide
tagtgaccaggactcaccagtcctcgtaaa

SEQ ID NO: 282013 - DNA, 30 bp, Artificial Sequence
  Synthetic oligonucleotide
gactcaggcctgttcatcgcagttcgtaaa

SEQ ID NO: 282014 - DNA, 30 bp, Artificial Sequence
  Synthetic oligonucleotide
cgcctttctcaagaatggattgttcgtaaa

SEQ ID NO: 282015 - DNA, 30 bp, Artificial Sequence
  Synthetic oligonucleotide
gcgggctccccactttttgcgcaaggtaaa

SEQ ID NO: 282016 - DNA, 30 bp, Artificial Sequence
  Synthetic oligonucleotide
gccacctatcgctgaacgatcggcggtaaa

SEQ ID NO: 282017 - DNA, 30 bp, Artificial Sequence
  Synthetic oligonucleotide
gggtcagcacctacgctcggtgagggtaaa

SEQ ID NO: 282018 - DNA, 30 bp, Artificial Sequence
  Synthetic oligonucleotide
cggacagcggaagccaaaggtacgggtaaa

SEQ ID NO: 282019 - DNA, 30 bp, Artificial Sequence
  Synthetic oligonucleotide
cgtacaatcttggacagggaaccgggtaaa

SEQ ID NO: 282020 - DNA, 30 bp, Artificial Sequence
  Synthetic oligonucleotide
taccatttggtgtgtcaaatccatggtaaa

SEQ ID NO: 282021 - DNA, 30 bp, Artificial Sequence
  Synthetic oligonucleotide
gctgcgggttgttcttaagctactggtaaa

SEQ ID NO: 282022 - DNA, 30 bp, Artificial Sequence
  Synthetic oligonucleotide
gtacctggtattggtgtagtattctgtaaa

SEQ ID NO: 282023 - DNA, 30 bp, Artificial Sequence
  Synthetic oligonucleotide
ctagacttaacatctctattaatgtgtaaa

SEQ ID NO: 282024 - DNA, 30 bp, Artificial Sequence
  Synthetic oligonucleotide
gcaagttacagattcaatttgaattgtaaa

SEQ ID NO: 282025 - DNA, 30 bp, Artificial Sequence
  Synthetic oligonucleotide
acggtgtaccgcgagagttgattttgtaaa

SEQ ID NO: 282026 - DNA, 30 bp, Artificial Sequence
  Synthetic oligonucleotide
tgtgtgggacagaggcagggataaattaaa

SEQ ID NO: 282027 - DNA, 30 bp, Artificial Sequence
  Synthetic oligonucleotide
tcgggcttcattcgggtaaggagaattaaa

SEQ ID NO: 282028 - DNA, 30 bp, Artificial Sequence
  Synthetic oligonucleotide
caagtcgggtgtatactccccggaattaaa

SEQ ID NO: 282029 - DNA, 30 bp, Artificial Sequence
  Synthetic oligonucleotide
tcggcaagggaacaaactgcactaattaaa

SEQ ID NO: 282030 - DNA, 30 bp, Artificial Sequence
  Synthetic oligonucleotide
tgtatctaaagatatgtcggacacattaaa

SEQ ID NO: 282031 - DNA, 30 bp, Artificial Sequence
  Synthetic oligonucleotide
cggcgttagacccgaacccatcccattaaa

SEQ ID NO: 282032 - DNA, 30 bp, Artificial Sequence
  Synthetic oligonucleotide
gaacggcgacatctgagcatctgcattaaa

SEQ ID NO: 282033 - DNA, 30 bp, Artificial Sequence
  Synthetic oligonucleotide
atcatagcggactaaagctgcatcattaaa

SEQ ID NO: 282034 - DNA, 30 bp, Artificial Sequence
  Synthetic oligonucleotide
ggtcccctcgcgacggaggggatcattaaa

SEQ ID NO: 282035 - DNA, 30 bp, Artificial Sequence
  Synthetic oligonucleotide
cattacagatgcacccctacactcattaaa

SEQ ID NO: 282036 - DNA, 30 bp, Artificial Sequence
  Synthetic oligonucleotide
ctcacacttgtaacgtcggccctgattaaa

SEQ ID NO: 282037 - DNA, 30 bp, Artificial Sequence
  Synthetic oligonucleotide
tgggtttttaacggtgtgtagaaacttaaa

SEQ ID NO: 282038 - DNA, 31 bp, Artificial Sequence
  Synthetic oligonucleotide
tcaggtcctattagtgcgtcatcaacttaaa

SEQ ID NO: 282039 - DNA, 30 bp, Artificial Sequence
  Synthetic oligonucleotide
gtttactctgtattgcaccttcgacttaaa

SEQ ID NO: 282040 - DNA, 30 bp, Artificial Sequence
  Synthetic oligonucleotide
tgggctgactctatatgaaaatgacttaaa

SEQ ID NO: 282041 - DNA, 30 bp, Artificial Sequence
  Synthetic oligonucleotide
tacacattgcacagtgagcattgccttaaa

SEQ ID NO: 282042 - DNA, 30 bp, Artificial Sequence
  Synthetic oligonucleotide
accgatccatgttagctgcgtgcgcttaaa

SEQ ID NO: 282043 - DNA, 30 bp, Artificial Sequence
  Synthetic oligonucleotide
agaaaattatgaagtggaatgtgtcttaaa

SEQ ID NO: 282044 - DNA, 30 bp, Artificial Sequence
  Synthetic oligonucleotide
gccgcaagggacttaccgcctacagttaaa

SEQ ID NO: 282045 - DNA, 30 bp, Artificial Sequence
  Synthetic oligonucleotide
aagccccagtgtccatctgattccgttaaa

SEQ ID NO: 282046 - DNA, 30 bp, Artificial Sequence
  Synthetic oligonucleotide
ctatccgtgcaacgtacataattcgttaaa

SEQ ID NO: 282047 - DNA, 30 bp, Artificial Sequence
  Synthetic oligonucleotide
atagcatgcgtgtcccttttgaaggttaaa

SEQ ID NO: 282048 - DNA, 30 bp, Artificial Sequence
  Synthetic oligonucleotide
ctgcctaacggtaaccttgaaggggttaaa

SEQ ID NO: 282049 - DNA, 30 bp, Artificial Sequence
  Synthetic oligonucleotide
agcagcggtttgtatgtttgaagtgttaaa

SEQ ID NO: 282050 - DNA, 30 bp, Artificial Sequence
  Synthetic oligonucleotide
acgcaattaaaggcactacttacatttaaa

SEQ ID NO: 282051 - DNA, 30 bp, Artificial Sequence
  Synthetic oligonucleotide
aggggtgggcgctaggttaatgactttaaa

SEQ ID NO: 282052 - DNA, 30 bp, Artificial Sequence
  Synthetic oligonucleotide
taacgtaactggcgcaatgaattctttaaa

SEQ ID NO: 282053 - DNA, 30 bp, Artificial Sequence
  Synthetic oligonucleotide
cgtgttggatagggatagggtacgtttaaa

SEQ ID NO: 282054 - DNA, 30 bp, Artificial Sequence
  Synthetic oligonucleotide
gtggatgttgactgattcaaaccgtttaaa

SEQ ID NO: 282055 - DNA, 30 bp, Artificial Sequence
  Synthetic oligonucleotide
gccaggaattccgtagagtggtggtttaaa

SEQ ID NO: 282056 - DNA, 30 bp, Artificial Sequence
  Synthetic oligonucleotide
gcgcatcggctttaccgttaaacttttaaa

SEQ ID NO: 282057 - DNA, 30 bp, Artificial Sequence
  Synthetic oligonucleotide
ggccgaccgaggttctattcatcaaaacaa

SEQ ID NO: 282058 - DNA, 30 bp, Artificial Sequence
  Synthetic oligonucleotide
gagagagtcttgaacaaatacttaaaacaa

SEQ ID NO: 282059 - DNA, 30 bp, Artificial Sequence
  Synthetic oligonucleotide
gctgctctcgcactaaatatagagaaacaa

SEQ ID NO: 282060 - DNA, 30 bp, Artificial Sequence
  Synthetic oligonucleotide
tttaaagcatcctgcccgtaattgaaacaa

SEQ ID NO: 282061 - DNA, 30 bp, Artificial Sequence
  Synthetic oligonucleotide
cggtgtagcgagcccgtagctaaacaacaa

SEQ ID NO: 282062 - DNA, 30 bp, Artificial Sequence
  Synthetic oligonucleotide
gcatagacaggcggacttaccgcacaacaa

SEQ ID NO: 282063 - DNA, 30 bp, Artificial Sequence
  Synthetic oligonucleotide
tagggagtggattgtcaatggttacaacaa

SEQ ID NO: 282064 - DNA, 30 bp, Artificial Sequence
  Synthetic oligonucleotide
tgacctcatcactgattatcataccaacaa

SEQ ID NO: 282065 - DNA, 30 bp, Artificial Sequence
  Synthetic oligonucleotide
ctaccgaagttgagttcaggtagccaacaa

SEQ ID NO: 282066 - DNA, 30 bp, Artificial Sequence
  Synthetic oligonucleotide
gaacgttccgcctatatgggatcgcaacaa

SEQ ID NO: 282067 - DNA, 30 bp, Artificial Sequence
  Synthetic oligonucleotide
tattgcaggtgaatagtgcaggatcaacaa

SEQ ID NO: 282068 - DNA, 30 bp, Artificial Sequence
  Synthetic oligonucleotide
ggtatttccgaatatttggcaacagaacaa

SEQ ID NO: 282069 - DNA, 30 bp, Artificial Sequence
  Synthetic oligonucleotide
aaaacggcgtttgggagttccgacgaacaa

SEQ ID NO: 282070 - DNA, 30 bp, Artificial Sequence
  Synthetic oligonucleotide
ttaaaacctggggttcacattcgcgaacaa

SEQ ID NO: 282071 - DNA, 30 bp, Artificial Sequence
  Synthetic oligonucleotide
ttccgtacttctcctcggtctaaggaacaa

SEQ ID NO: 282072 - DNA, 30 bp, Artificial Sequence
  Synthetic oligonucleotide
catgcccgtactgcaaccctcagggaacaa

SEQ ID NO: 282073 - DNA, 30 bp, Artificial Sequence
  Synthetic oligonucleotide
tactaggagggcggtatggctttggaacaa

SEQ ID NO: 282074 - DNA, 30 bp, Artificial Sequence
  Synthetic oligonucleotide
gggccgctgagtgcagcgtaatctgaacaa

SEQ ID NO: 282075 - DNA, 30 bp, Artificial Sequence
  Synthetic oligonucleotide
ccaccaaatccagtgtgcttaagtgaacaa

SEQ ID NO: 282076 - DNA, 30 bp, Artificial Sequence
  Synthetic oligonucleotide
tcgcgggatttactcttttgtatctaacaa

SEQ ID NO: 282077 - DNA, 30 bp, Artificial Sequence
  Synthetic oligonucleotide
cgccaagatgctgtcatcattttgtaacaa

SEQ ID NO: 282078 - DNA, 30 bp, Artificial Sequence
  Synthetic oligonucleotide
aaggtgttgttaccgactcgcagaacacaa

SEQ ID NO: 282079 - DNA, 30 bp, Artificial Sequence
  Synthetic oligonucleotide
ttagttcgatgggccctccagctaacacaa

SEQ ID NO: 282080 - DNA, 30 bp, Artificial Sequence
  Synthetic oligonucleotide
tactagaccattgcacatctgttaacacaa

SEQ ID NO: 282081 - DNA, 30 bp, Artificial Sequence
  Synthetic oligonucleotide
taaggggtttcgacgcggatatgcacacaa

SEQ ID NO: 282082 - DNA, 30 bp, Artificial Sequence
  Synthetic oligonucleotide
ccagcaagtgcaaacccgggccagacacaa

SEQ ID NO: 282083 - DNA, 30 bp, Artificial Sequence
  Synthetic oligonucleotide
cagatcgctgccaccttccaatcgacacaa

SEQ ID NO: 282084 - DNA, 30 bp, Artificial Sequence
  Synthetic oligonucleotide
tgcctgtccactccctacgaagggacacaa

SEQ ID NO: 282085 - DNA, 30 bp, Artificial Sequence
  Synthetic oligonucleotide
agcacatcgacggatataggttggacacaa

SEQ ID NO: 282086 - DNA, 30 bp, Artificial Sequence
  Synthetic oligonucleotide
atgtcttaatcacaaaagagttgtacacaa

SEQ ID NO: 282087 - DNA, 30 bp, Artificial Sequence
  Synthetic oligonucleotide
cgttcttcttctaaatatggtgttacacaa

SEQ ID NO: 282088 - DNA, 30 bp, Artificial Sequence
  Synthetic oligonucleotide
gttataggctctctcgttaggccaccacaa

SEQ ID NO: 282089 - DNA, 30 bp, Artificial Sequence
  Synthetic oligonucleotide
agtggagagctcgagggttgtgcaccacaa

SEQ ID NO: 282090 - DNA, 30 bp, Artificial Sequence
  Synthetic oligonucleotide
gatcaaagaatattaatactcggaccacaa

SEQ ID NO: 282091 - DNA, 30 bp, Artificial Sequence
  Synthetic oligonucleotide
tcagacatttaagcgggctaggtaccacaa

SEQ ID NO: 282092 - DNA, 30 bp, Artificial Sequence
  Synthetic oligonucleotide
gttggcattgaacatttcccgttcccacaa

SEQ ID NO: 282093 - DNA, 30 bp, Artificial Sequence
  Synthetic oligonucleotide
gatgttgacaccagtctctcaaggccacaa

SEQ ID NO: 282094 - DNA, 30 bp, Artificial Sequence
  Synthetic oligonucleotide
cggaacctgcaaactgctggcgggccacaa

SEQ ID NO: 282095 - DNA, 30 bp, Artificial Sequence
  Synthetic oligonucleotide
aaactgtcggagatgtctttggtgccacaa

SEQ ID NO: 282096 - DNA, 30 bp, Artificial Sequence
  Synthetic oligonucleotide
acgcacattgcatgagtgggtaaagcacaa

SEQ ID NO: 282097 - DNA, 30 bp, Artificial Sequence
  Synthetic oligonucleotide
ttcgggtcgtaacgatgtgcacacgcacaa

SEQ ID NO: 282098 - DNA, 30 bp, Artificial Sequence
  Synthetic oligonucleotide
ggtctatgcgtcctaaggcatcaggcacaa

SEQ ID NO: 282099 - DNA, 30 bp, Artificial Sequence
  Synthetic oligonucleotide
aaggaaccaaaagcctgactctgggcacaa

SEQ ID NO: 282100 - DNA, 30 bp, Artificial Sequence
  Synthetic oligonucleotide
cctatgacttgccgggtccttgctgcacaa

SEQ ID NO: 282101 - DNA, 30 bp, Artificial Sequence
  Synthetic oligonucleotide
tcgtctctgagggggcactgggaatcacaa

SEQ ID NO: 282102 - DNA, 30 bp, Artificial Sequence
  Synthetic oligonucleotide
cttggaccttattaaacgtggatatcacaa

SEQ ID NO: 282103 - DNA, 30 bp, Artificial Sequence
  Synthetic oligonucleotide
attcggcatactgttcgttacctatcacaa

SEQ ID NO: 282104 - DNA, 30 bp, Artificial Sequence
  Synthetic oligonucleotide
tcgttttggaaagcgatgttggtatcacaa

SEQ ID NO: 282105 - DNA, 30 bp, Artificial Sequence
  Synthetic oligonucleotide
caggagcttgagggaactacatggtcacaa

SEQ ID NO: 282106 - DNA, 30 bp, Artificial Sequence
  Synthetic oligonucleotide
atacatacacaacgttgaagtttgtcacaa

SEQ ID NO: 282107 - DNA, 29 bp, Artificial Sequence
  Synthetic oligonucleotide
atgaccgacgcccgaggatcacttcacaa

SEQ ID NO: 282108 - DNA, 30 bp, Artificial Sequence
  Synthetic oligonucleotide
caaggagtctttcccaggggtatttcacaa

SEQ ID NO: 282109 - DNA, 30 bp, Artificial Sequence
  Synthetic oligonucleotide
gaacgagttctcatcaggatggaaagacaa

SEQ ID NO: 282110 - DNA, 30 bp, Artificial Sequence
  Synthetic oligonucleotide
ttagttgatccgacatttcttacaagacaa

SEQ ID NO: 282111 - DNA, 30 bp, Artificial Sequence
  Synthetic oligonucleotide
gtaactcaatgtccaatagtgggaagacaa

SEQ ID NO: 282112 - DNA, 30 bp, Artificial Sequence
  Synthetic oligonucleotide
cgctctgcaactctggataaacccagacaa

SEQ ID NO: 282113 - DNA, 30 bp, Artificial Sequence
  Synthetic oligonucleotide
cggacactgtttcctttagggagcagacaa

SEQ ID NO: 282114 - DNA, 30 bp, Artificial Sequence
  Synthetic oligonucleotide
agccacagaccggtcgttactgctagacaa

SEQ ID NO: 282115 - DNA, 30 bp, Artificial Sequence
  Synthetic oligonucleotide
cgccgttaaaccatcgccggcagtagacaa

SEQ ID NO: 282116 - DNA, 30 bp, Artificial Sequence
  Synthetic oligonucleotide
cagtatcgaccgttggagcccgcacgacaa

SEQ ID NO: 282117 - DNA, 30 bp, Artificial Sequence
  Synthetic oligonucleotide
gaaaataagtagcggagggctcgacgacaa

SEQ ID NO: 282118 - DNA, 30 bp, Artificial Sequence
  Synthetic oligonucleotide
cttggtctgacctgaggggagaggcgacaa

SEQ ID NO: 282119 - DNA, 30 bp, Artificial Sequence
  Synthetic oligonucleotide
ccgtcaggtcaagtcacgcggtggcgacaa

SEQ ID NO: 282120 - DNA, 30 bp, Artificial Sequence
  Synthetic oligonucleotide
tcaaaggctgcggcggaagcttggcgacaa

SEQ ID NO: 282121 - DNA, 30 bp, Artificial Sequence
  Synthetic oligonucleotide
atgctcggatgtggttgagcgatgcgacaa

SEQ ID NO: 282122 - DNA, 30 bp, Artificial Sequence
  Synthetic oligonucleotide
cattcaaaagccatcccgcgtttaggacaa

SEQ ID NO: 282123 - DNA, 30 bp, Artificial Sequence
  Synthetic oligonucleotide
gatgtccccacaatgtgtcgtacgggacaa

SEQ ID NO: 282124 - DNA, 30 bp, Artificial Sequence
  Synthetic oligonucleotide
caagcaggtccctttatataccggggacaa

SEQ ID NO: 282125 - DNA, 30 bp, Artificial Sequence
  Synthetic oligonucleotide
aagaaatgccacacgcgtagggtgggacaa

SEQ ID NO: 282126 - DNA, 30 bp, Artificial Sequence
  Synthetic oligonucleotide
tgtatacgaacccctcgggatttgggacaa

SEQ ID NO: 282127 - DNA, 30 bp, Artificial Sequence
  Synthetic oligonucleotide
gcatgagggagggttgtagtcattggacaa

SEQ ID NO: 282128 - DNA, 30 bp, Artificial Sequence
  Synthetic oligonucleotide
tgctacctacagggtctagctgttggacaa

SEQ ID NO: 282129 - DNA, 30 bp, Artificial Sequence
  Synthetic oligonucleotide
cgaatcttccccagataatttgggtgacaa

SEQ ID NO: 282130 - DNA, 30 bp, Artificial Sequence
  Synthetic oligonucleotide
aggttataggtgattcgttttccttgacaa

SEQ ID NO: 282131 - DNA, 30 bp, Artificial Sequence
  Synthetic oligonucleotide
tagtgggtgtactggataaatatttgacaa

SEQ ID NO: 282132 - DNA, 30 bp, Artificial Sequence
  Synthetic oligonucleotide
cttgtttacctcgacctgcatcacatacaa

SEQ ID NO: 282133 - DNA, 30 bp, Artificial Sequence
  Synthetic oligonucleotide
gacgctgtgttaggagatgcatctatacaa

SEQ ID NO: 282134 - DNA, 30 bp, Artificial Sequence
  Synthetic oligonucleotide
ggcgccaacaggccggtatgcattatacaa

SEQ ID NO: 282135 - DNA, 30 bp, Artificial Sequence
  Synthetic oligonucleotide
agcattctccggtgttggatccaactacaa

SEQ ID NO: 282136 - DNA, 30 bp, Artificial Sequence
  Synthetic oligonucleotide
cgtattagcacaacgggtcatgaactacaa

SEQ ID NO: 282137 - DNA, 30 bp, Artificial Sequence
  Synthetic oligonucleotide
atctaagttggtaatgtgcgatcactacaa

SEQ ID NO: 282138 - DNA, 30 bp, Artificial Sequence
  Synthetic oligonucleotide
actttcacgggggagtgggtttagctacaa

SEQ ID NO: 282139 - DNA, 30 bp, Artificial Sequence
  Synthetic oligonucleotide
cttacatggaagatggttagagggctacaa

SEQ ID NO: 282140 - DNA, 30 bp, Artificial Sequence
  Synthetic oligonucleotide
atgtgacccttccgacgatcatctctacaa

SEQ ID NO: 282141 - DNA, 30 bp, Artificial Sequence
  Synthetic oligonucleotide
tgaaaagactggtgacggagatgtctacaa

SEQ ID NO: 282142 - DNA, 30 bp, Artificial Sequence
  Synthetic oligonucleotide
aatctgcattcgagaaacttgcaagtacaa

SEQ ID NO: 282143 - DNA, 30 bp, Artificial Sequence
  Synthetic oligonucleotide
gtcgaggtaacttgggcgattctagtacaa

SEQ ID NO: 282144 - DNA, 30 bp, Artificial Sequence
  Synthetic oligonucleotide
gtcgggggtcaaatcaggggattagtacaa

SEQ ID NO: 282145 - DNA, 30 bp, Artificial Sequence
  Synthetic oligonucleotide
atgctctcgagggccaaagttacggtacaa

SEQ ID NO: 282146 - DNA, 30 bp, Artificial Sequence
  Synthetic oligonucleotide
gacattgactccggaagtggcactgtacaa

SEQ ID NO: 282147 - DNA, 30 bp, Artificial Sequence
  Synthetic oligonucleotide
gcactatgtggctcggcgtcgtctgtacaa

SEQ ID NO: 282148 - DNA, 30 bp, Artificial Sequence
  Synthetic oligonucleotide
aatcgccacttgtagtgttaacaattacaa

SEQ ID NO: 282149 - DNA, 30 bp, Artificial Sequence
  Synthetic oligonucleotide
agccggcgaatcgggcctagcgaattacaa

SEQ ID NO: 282150 - DNA, 30 bp, Artificial Sequence
  Synthetic oligonucleotide
cctttcgaaataaagcccgaaagattacaa

SEQ ID NO: 282151 - DNA, 30 bp, Artificial Sequence
  Synthetic oligonucleotide
gtttgccatggcaaatatgaaggattacaa

SEQ ID NO: 282152 - DNA, 30 bp, Artificial Sequence
  Synthetic oligonucleotide
ccggggatatacaagataatagtattacaa

SEQ ID NO: 282153 - DNA, 30 bp, Artificial Sequence
  Synthetic oligonucleotide
agccgacgcactgatttgacttccttacaa

SEQ ID NO: 282154 - DNA, 31 bp, Artificial Sequence
  Synthetic oligonucleotide
agattcagcgactgttaggcgttatttacaa

SEQ ID NO: 282155 - DNA, 30 bp, Artificial Sequence
  Synthetic oligonucleotide
atatggccagtgtccacccctagtttacaa

SEQ ID NO: 282156 - DNA, 30 bp, Artificial Sequence
  Synthetic oligonucleotide
cttgaattatgcccagtcaattaaaaccaa

SEQ ID NO: 282157 - DNA, 30 bp, Artificial Sequence
  Synthetic oligonucleotide
cttatgctttcataggccggcgtaaaccaa

SEQ ID NO: 282158 - DNA, 30 bp, Artificial Sequence
  Synthetic oligonucleotide
cgaaggacgcaggctgttgttcggaaccaa

SEQ ID NO: 282159 - DNA, 30 bp, Artificial Sequence
  Synthetic oligonucleotide
tagggcttataccgaatgtattggaaccaa

SEQ ID NO: 282160 - DNA, 30 bp, Artificial Sequence
  Synthetic oligonucleotide
ccgcagccgagtacttaaatggtgaaccaa

SEQ ID NO: 282161 - DNA, 30 bp, Artificial Sequence
  Synthetic oligonucleotide
atgccaactggcgggcttgtgagtaaccaa

SEQ ID NO: 282162 - DNA, 30 bp, Artificial Sequence
  Synthetic oligonucleotide
ccgtacaacggtgggaatttataccaccaa

SEQ ID NO: 282163 - DNA, 30 bp, Artificial Sequence
  Synthetic oligonucleotide
tagtatagagcttcgtgtattaggcaccaa

SEQ ID NO: 282164 - DNA, 30 bp, Artificial Sequence
  Synthetic oligonucleotide
tgagccatgcagatttgactgactcaccaa

SEQ ID NO: 282165 - DNA, 30 bp, Artificial Sequence
  Synthetic oligonucleotide
ctgttacgactcctagacttggcagaccaa

SEQ ID NO: 282166 - DNA, 30 bp, Artificial Sequence
  Synthetic oligonucleotide
ggattgctaactcagattttacgagaccaa

SEQ ID NO: 282167 - DNA, 30 bp, Artificial Sequence
  Synthetic oligonucleotide
gttatgcctgagggggtatagatagaccaa

SEQ ID NO: 282168 - DNA, 31 bp, Artificial Sequence
  Synthetic oligonucleotide
cggtctcagggtatgcacttagaatgaccaa

SEQ ID NO: 282169 - DNA, 30 bp, Artificial Sequence
  Synthetic oligonucleotide
gcgtttatgctggggtcgcagtatgaccaa

SEQ ID NO: 282170 - DNA, 30 bp, Artificial Sequence
  Synthetic oligonucleotide
ggtgtgtggtcgcgcatttgaagtgaccaa

SEQ ID NO: 282171 - DNA, 30 bp, Artificial Sequence
  Synthetic oligonucleotide
cggcagttcatactctcttcgtcctaccaa

SEQ ID NO: 282172 - DNA, 30 bp, Artificial Sequence
  Synthetic oligonucleotide
gagtttgtatacgtttttgagaagtaccaa

SEQ ID NO: 282173 - DNA, 30 bp, Artificial Sequence
  Synthetic oligonucleotide
cgatatagcacagggtacgaacagtaccaa

SEQ ID NO: 282174 - DNA, 30 bp, Artificial Sequence
  Synthetic oligonucleotide
agaagagataaatgttggtccttaacccaa

SEQ ID NO: 282175 - DNA, 30 bp, Artificial Sequence
  Synthetic oligonucleotide
gaggacgtaaagtagctagaatacacccaa

SEQ ID NO: 282176 - DNA, 30 bp, Artificial Sequence
  Synthetic oligonucleotide
tcctagatcggatctgcgagttacacccaa

SEQ ID NO: 282177 - DNA, 30 bp, Artificial Sequence
  Synthetic oligonucleotide
agtttagatgtccgacgatgcccgacccaa

SEQ ID NO: 282178 - DNA, 30 bp, Artificial Sequence
  Synthetic oligonucleotide
aatctgtgagacaacgggcgtccgacccaa

SEQ ID NO: 282179 - DNA, 30 bp, Artificial Sequence
  Synthetic oligonucleotide
tagaaaaatccatgaaatgggttgacccaa

SEQ ID NO: 282180 - DNA, 30 bp, Artificial Sequence
  Synthetic oligonucleotide
gcatgaggtccaacgacgggagctacccaa

SEQ ID NO: 282181 - DNA, 30 bp, Artificial Sequence
  Synthetic oligonucleotide
ctttcagagtcaggtccgtgacttacccaa

SEQ ID NO: 282182 - DNA, 30 bp, Artificial Sequence
  Synthetic oligonucleotide
gcatcaggtcgggtccgacttgcggcccaa

SEQ ID NO: 282183 - DNA, 30 bp, Artificial Sequence
  Synthetic oligonucleotide
cagtggattgggtaacaaccacactcccaa

SEQ ID NO: 282184 - DNA, 30 bp, Artificial Sequence
  Synthetic oligonucleotide
tacttcagcttttcaggccatacctcccaa

SEQ ID NO: 282185 - DNA, 30 bp, Artificial Sequence
  Synthetic oligonucleotide
gtaagcggtaggtgttccggccagtcccaa

SEQ ID NO: 282186 - DNA, 30 bp, Artificial Sequence
  Synthetic oligonucleotide
ttaggtatttacaacggctctacaagccaa

SEQ ID NO: 282187 - DNA, 30 bp, Artificial Sequence
  Synthetic oligonucleotide
gctcacacgattatgttgattctaagccaa

SEQ ID NO: 282188 - DNA, 30 bp, Artificial Sequence
  Synthetic oligonucleotide
gcccatttgtgtctccaacgggtcagccaa

SEQ ID NO: 282189 - DNA, 30 bp, Artificial Sequence
  Synthetic oligonucleotide
tgttagcaagtacaacaggtagagagccaa

SEQ ID NO: 282190 - DNA, 30 bp, Artificial Sequence
  Synthetic oligonucleotide
agaaatatcgcgcctttctacgagagccaa

SEQ ID NO: 282191 - DNA, 30 bp, Artificial Sequence
  Synthetic oligonucleotide
tataaactaggctgtcaggagtcgagccaa

SEQ ID NO: 282192 - DNA, 30 bp, Artificial Sequence
  Synthetic oligonucleotide
atataacggctacagactaaacgtagccaa

SEQ ID NO: 282193 - DNA, 30 bp, Artificial Sequence
  Synthetic oligonucleotide
caagctgtgccaatatcgtacccacgccaa

SEQ ID NO: 282194 - DNA, 30 bp, Artificial Sequence
  Synthetic oligonucleotide
gcatgtgttatggccggcaaagcacgccaa

SEQ ID NO: 282195 - DNA, 30 bp, Artificial Sequence
  Synthetic oligonucleotide
ccgctaatatgatgaaggtttacaggccaa

SEQ ID NO: 282196 - DNA, 30 bp, Artificial Sequence
  Synthetic oligonucleotide
acgaacaagttgttacgcggtccaggccaa

SEQ ID NO: 282197 - DNA, 30 bp, Artificial Sequence
  Synthetic oligonucleotide
aagataacgagtgccgttcatgacggccaa

SEQ ID NO: 282198 - DNA, 30 bp, Artificial Sequence
  Synthetic oligonucleotide
tacttaaaataagaggctgccagcggccaa

SEQ ID NO: 282199 - DNA, 30 bp, Artificial Sequence
  Synthetic oligonucleotide
gggactacgacatctcgtactgttggccaa

SEQ ID NO: 282200 - DNA, 30 bp, Artificial Sequence
  Synthetic oligonucleotide
taatctcatgagccgatccgttcatgccaa

SEQ ID NO: 282201 - DNA, 30 bp, Artificial Sequence
  Synthetic oligonucleotide
tcacttaggttccgttcggaaaagtgccaa

SEQ ID NO: 282202 - DNA, 30 bp, Artificial Sequence
  Synthetic oligonucleotide
aggacattttgtcggcttggggattgccaa

SEQ ID NO: 282203 - DNA, 30 bp, Artificial Sequence
  Synthetic oligonucleotide
ctcaagtacacgcacgcaagtagttgccaa

SEQ ID NO: 282204 - DNA, 30 bp, Artificial Sequence
  Synthetic oligonucleotide
aaccgatggcaagtcccctctaccatccaa

SEQ ID NO: 282205 - DNA, 30 bp, Artificial Sequence
  Synthetic oligonucleotide
atgttaggttggtggtaccgcgtcatccaa

SEQ ID NO: 282206 - DNA, 30 bp, Artificial Sequence
  Synthetic oligonucleotide
tcactcacagtcgctctgtctttcatccaa

SEQ ID NO: 282207 - DNA, 30 bp, Artificial Sequence
  Synthetic oligonucleotide
ccaaatgaatacattggtgtaaggatccaa

SEQ ID NO: 282208 - DNA, 30 bp, Artificial Sequence
  Synthetic oligonucleotide
atacgtgaggtcaggttcgtcgtgatccaa

SEQ ID NO: 282209 - DNA, 30 bp, Artificial Sequence
  Synthetic oligonucleotide
gaacgtcctacggccctgaccggtatccaa

SEQ ID NO: 282210 - DNA, 30 bp, Artificial Sequence
  Synthetic oligonucleotide
gtgctgtcgaaccatcatgcagcactccaa

SEQ ID NO: 282211 - DNA, 30 bp, Artificial Sequence
  Synthetic oligonucleotide
ggcgaattcgagtaaaaaaggacgctccaa

SEQ ID NO: 282212 - DNA, 31 bp, Artificial Sequence
  Synthetic oligonucleotide
acacgactcagcctctcgttcataagtccaa

SEQ ID NO: 282213 - DNA, 30 bp, Artificial Sequence
  Synthetic oligonucleotide
attacccgtacaaatcgggaattagtccaa

SEQ ID NO: 282214 - DNA, 30 bp, Artificial Sequence
  Synthetic oligonucleotide
ggcggaaatgcgatgacggctatcgtccaa

SEQ ID NO: 282215 - DNA, 35 bp, Artificial Sequence
  Synthetic oligonucleotide
gatgttaggtcgaaattgccaagtccccggtccaa

SEQ ID NO: 282216 - DNA, 30 bp, Artificial Sequence
  Synthetic oligonucleotide
agcactactccggttcgatcatgggtccaa

SEQ ID NO: 282217 - DNA, 30 bp, Artificial Sequence
  Synthetic oligonucleotide
tcgggtgactcagatctacctatggtccaa

SEQ ID NO: 282218 - DNA, 30 bp, Artificial Sequence
  Synthetic oligonucleotide
cgacgccagagaggatcatgactggtccaa

SEQ ID NO: 282219 - DNA, 30 bp, Artificial Sequence
  Synthetic oligonucleotide
gaatggaaacacacgcgggccgttgtccaa

SEQ ID NO: 282220 - DNA, 30 bp, Artificial Sequence
  Synthetic oligonucleotide
cggcatcggagctttgggaacgaattccaa

SEQ ID NO: 282221 - DNA, 30 bp, Artificial Sequence
  Synthetic oligonucleotide
gagaactgccacaatagcagcgaattccaa

SEQ ID NO: 282222 - DNA, 30 bp, Artificial Sequence
  Synthetic oligonucleotide
acttatacatatcgggaaactagcttccaa

SEQ ID NO: 282223 - DNA, 30 bp, Artificial Sequence
  Synthetic oligonucleotide
ctaaggcggatacggcgcaggttcttccaa

SEQ ID NO: 282224 - DNA, 30 bp, Artificial Sequence
  Synthetic oligonucleotide
gcattacggtatcagccagttttcttccaa

SEQ ID NO: 282225 - DNA, 30 bp, Artificial Sequence
  Synthetic oligonucleotide
tgtcgactgttctcacaccgtcacaagcaa

SEQ ID NO: 282226 - DNA, 30 bp, Artificial Sequence
  Synthetic oligonucleotide
agaaccggcagttatggacccgtgaagcaa

SEQ ID NO: 282227 - DNA, 30 bp, Artificial Sequence
  Synthetic oligonucleotide
aaagtcgaaatccggggatcgttgaagcaa

SEQ ID NO: 282228 - DNA, 30 bp, Artificial Sequence
  Synthetic oligonucleotide
tgtcaccgcaccaaggttagagataagcaa

SEQ ID NO: 282229 - DNA, 30 bp, Artificial Sequence
  Synthetic oligonucleotide
taagtcggttcaatcgccatacttaagcaa

SEQ ID NO: 282230 - DNA, 30 bp, Artificial Sequence
  Synthetic oligonucleotide
ctgcatttaaagagatctttaaaacagcaa

SEQ ID NO: 282231 - DNA, 31 bp, Artificial Sequence
  Synthetic oligonucleotide
atgttcggacttcaaatacattaaacagcaa

SEQ ID NO: 282232 - DNA, 30 bp, Artificial Sequence
  Synthetic oligonucleotide
tgttggacttaggttaaagagttacagcaa

SEQ ID NO: 282233 - DNA, 30 bp, Artificial Sequence
  Synthetic oligonucleotide
cgtttccatgagttatccccgggccagcaa

SEQ ID NO: 282234 - DNA, 30 bp, Artificial Sequence
  Synthetic oligonucleotide
gtcgagatctagttggacaaagtccagcaa

SEQ ID NO: 282235 - DNA, 30 bp, Artificial Sequence
  Synthetic oligonucleotide
tgacggtgtcggccaatctacaagcagcaa

SEQ ID NO: 282236 - DNA, 30 bp, Artificial Sequence
  Synthetic oligonucleotide
gtcgaattacgaccgacaattctgcagcaa

SEQ ID NO: 282237 - DNA, 30 bp, Artificial Sequence
  Synthetic oligonucleotide
attttgggcgcaaacgcgagctctcagcaa

SEQ ID NO: 282238 - DNA, 30 bp, Artificial Sequence
  Synthetic oligonucleotide
gcccatgacagtacggtggacattcagcaa

SEQ ID NO: 282239 - DNA, 30 bp, Artificial Sequence
  Synthetic oligonucleotide
acaccttcttaagttctcacataagagcaa

SEQ ID NO: 282240 - DNA, 29 bp, Artificial Sequence
  Synthetic oligonucleotide
cgcggggcacatcctatagcgccgagcaa

SEQ ID NO: 282241 - DNA, 30 bp, Artificial Sequence
  Synthetic oligonucleotide
ccgttaagtgagttgagaggactcgagcaa

SEQ ID NO: 282242 - DNA, 30 bp, Artificial Sequence
  Synthetic oligonucleotide
tttaaagtcctcatgacacatactgagcaa

SEQ ID NO: 282243 - DNA, 30 bp, Artificial Sequence
  Synthetic oligonucleotide
agattctgaagacaatttattggtgagcaa

SEQ ID NO: 282244 - DNA, 30 bp, Artificial Sequence
  Synthetic oligonucleotide
cgcacgatatcggttttaccccaatagcaa

SEQ ID NO: 282245 - DNA, 30 bp, Artificial Sequence
  Synthetic oligonucleotide
caaaagttgggagggtaccgtacatagcaa

SEQ ID NO: 282246 - DNA, 30 bp, Artificial Sequence
  Synthetic oligonucleotide
gatatttcaaattgaagcgtgcgctagcaa

SEQ ID NO: 282247 - DNA, 30 bp, Artificial Sequence
  Synthetic oligonucleotide
tatgcactggtactctccgggttctagcaa

SEQ ID NO: 282248 - DNA, 30 bp, Artificial Sequence
  Synthetic oligonucleotide
tcataataactaacgagacggaggtagcaa

SEQ ID NO: 282249 - DNA, 30 bp, Artificial Sequence
  Synthetic oligonucleotide
ttttaagggcgacgtctagctaattagcaa

SEQ ID NO: 282250 - DNA, 30 bp, Artificial Sequence
  Synthetic oligonucleotide
atgggccttcattcttctagggattagcaa

SEQ ID NO: 282251 - DNA, 30 bp, Artificial Sequence
  Synthetic oligonucleotide
ggaagggactcacagtttaccacaacgcaa

SEQ ID NO: 282252 - DNA, 30 bp, Artificial Sequence
  Synthetic oligonucleotide
cagaaacggcgctgacaatgcgatacgcaa

SEQ ID NO: 282253 - DNA, 30 bp, Artificial Sequence
  Synthetic oligonucleotide
tcaggagtacggcgcttttagagtacgcaa

SEQ ID NO: 282254 - DNA, 30 bp, Artificial Sequence
  Synthetic oligonucleotide
tatgagtacttttatcgagaccacccgcaa

SEQ ID NO: 282255 - DNA, 30 bp, Artificial Sequence
  Synthetic oligonucleotide
agggcgtctcgggtttagagtatgccgcaa

SEQ ID NO: 282256 - DNA, 30 bp, Artificial Sequence
  Synthetic oligonucleotide
tttagcaggtataacaaagccagcgcgcaa

SEQ ID NO: 282257 - DNA, 30 bp, Artificial Sequence
  Synthetic oligonucleotide
tatggagtacgcacgatttcagtatcgcaa

SEQ ID NO: 282258 - DNA, 30 bp, Artificial Sequence
  Synthetic oligonucleotide
gcaggggctagactttttcaatagtcgcaa

SEQ ID NO: 282259 - DNA, 30 bp, Artificial Sequence
  Synthetic oligonucleotide
atcagcccagccatgtcataaccgtcgcaa

SEQ ID NO: 282260 - DNA, 31 bp, Artificial Sequence
  Synthetic oligonucleotide
gttcgtaatgctgcgccacaggccgtcgcaa

SEQ ID NO: 282261 - DNA, 30 bp, Artificial Sequence
  Synthetic oligonucleotide
ggaagacaggcgccaaattgtcattcgcaa

SEQ ID NO: 282262 - DNA, 30 bp, Artificial Sequence
  Synthetic oligonucleotide
gaacaccgacattttgagaggagttcgcaa

SEQ ID NO: 282263 - DNA, 29 bp, Artificial Sequence
  Synthetic oligonucleotide
ctatagtacacatcggcgctatttcgcaa

SEQ ID NO: 282264 - DNA, 30 bp, Artificial Sequence
  Synthetic oligonucleotide
attattgcgatccaatgcctcaaaaggcaa

SEQ ID NO: 282265 - DNA, 30 bp, Artificial Sequence
  Synthetic oligonucleotide
gttgtttaatcctgtcaacaacgaaggcaa

SEQ ID NO: 282266 - DNA, 30 bp, Artificial Sequence
  Synthetic oligonucleotide
gccaccttggaactacataccggaaggcaa

SEQ ID NO: 282267 - DNA, 30 bp, Artificial Sequence
  Synthetic oligonucleotide
aagattagtaaaataaggcgacacaggcaa

SEQ ID NO: 282268 - DNA, 30 bp, Artificial Sequence
  Synthetic oligonucleotide
tcggagaaggattctcaagacgacaggcaa

SEQ ID NO: 282269 - DNA, 30 bp, Artificial Sequence
  Synthetic oligonucleotide
actcgtatatttcaacccctggtcaggcaa

SEQ ID NO: 282270 - DNA, 30 bp, Artificial Sequence
  Synthetic oligonucleotide
ttggctcgcagtcagaagtcggagaggcaa

SEQ ID NO: 282271 - DNA, 30 bp, Artificial Sequence
  Synthetic oligonucleotide
tctgggatattgctataacaacgtaggcaa

SEQ ID NO: 282272 - DNA, 30 bp, Artificial Sequence
  Synthetic oligonucleotide
catcgaaaattgcaagtgttcaaacggcaa

SEQ ID NO: 282273 - DNA, 30 bp, Artificial Sequence
  Synthetic oligonucleotide
ttgaggtctgaaattgttccctaacggcaa

SEQ ID NO: 282274 - DNA, 30 bp, Artificial Sequence
  Synthetic oligonucleotide
gtattactgtcaagcttaccagcacggcaa

SEQ ID NO: 282275 - DNA, 30 bp, Artificial Sequence
  Synthetic oligonucleotide
ggattgtaagacccggcgtcctcacggcaa

SEQ ID NO: 282276 - DNA, 30 bp, Artificial Sequence
  Synthetic oligonucleotide
taaggagggaagcttgcgcgttcacggcaa

SEQ ID NO: 282277 - DNA, 30 bp, Artificial Sequence
  Synthetic oligonucleotide
actcagtactgtggttcacagatacggcaa

SEQ ID NO: 282278 - DNA, 30 bp, Artificial Sequence
  Synthetic oligonucleotide
ggcgtctgtacgggcccgaaagaccggcaa

SEQ ID NO: 282279 - DNA, 30 bp, Artificial Sequence
  Synthetic oligonucleotide
taaaccttcggaggtctatttgaccggcaa

SEQ ID NO: 282280 - DNA, 30 bp, Artificial Sequence
  Synthetic oligonucleotide
gacatatctcccacggaccacggccggcaa

SEQ ID NO: 282281 - DNA, 30 bp, Artificial Sequence
  Synthetic oligonucleotide
gtcacgcctttgcgactgcattagcggcaa

SEQ ID NO: 282282 - DNA, 30 bp, Artificial Sequence
  Synthetic oligonucleotide
agcaatgtaaacccgtggatgactcggcaa

SEQ ID NO: 282283 - DNA, 30 bp, Artificial Sequence
  Synthetic oligonucleotide
ttcatacatgaccgatgagtgggtcggcaa

SEQ ID NO: 282284 - DNA, 30 bp, Artificial Sequence
  Synthetic oligonucleotide
agggcgatgtttacttccgaccttcggcaa

SEQ ID NO: 282285 - DNA, 30 bp, Artificial Sequence
  Synthetic oligonucleotide
gccttagttaggcgaccatatgttcggcaa

SEQ ID NO: 282286 - DNA, 30 bp, Artificial Sequence
  Synthetic oligonucleotide
ggatcgtaattgctctaccgttttcggcaa

SEQ ID NO: 282287 - DNA, 30 bp, Artificial Sequence
  Synthetic oligonucleotide
caagcactaaacaatcccgacggagggcaa

SEQ ID NO: 282288 - DNA, 30 bp, Artificial Sequence
  Synthetic oligonucleotide
atcaaagagtcggtgcagcagcaggggcaa

SEQ ID NO: 282289 - DNA, 30 bp, Artificial Sequence
  Synthetic oligonucleotide
tcgatctgaccggccgcggagacggggcaa

SEQ ID NO: 282290 - DNA, 30 bp, Artificial Sequence
  Synthetic oligonucleotide
aacactttcgggtggcaaacttcggggcaa

SEQ ID NO: 282291 - DNA, 29 bp, Artificial Sequence
  Synthetic oligonucleotide
cgtagttagaggcacattcgctggggcaa

SEQ ID NO: 282292 - DNA, 30 bp, Artificial Sequence
  Synthetic oligonucleotide
tagtatggacgaggggctcttgcatggcaa

SEQ ID NO: 282293 - DNA, 30 bp, Artificial Sequence
  Synthetic oligonucleotide
gctaacagggatgtattgccctactggcaa

SEQ ID NO: 282294 - DNA, 30 bp, Artificial Sequence
  Synthetic oligonucleotide
atagcatctgtgtgcaacttgcgctggcaa

SEQ ID NO: 282295 - DNA, 30 bp, Artificial Sequence
  Synthetic oligonucleotide
atcaaaacgtggctcggacccttctggcaa

SEQ ID NO: 282296 - DNA, 30 bp, Artificial Sequence
  Synthetic oligonucleotide
ggtcttccctcatttaggttagcgtggcaa

SEQ ID NO: 282297 - DNA, 30 bp, Artificial Sequence
  Synthetic oligonucleotide
atagaagacaccactacttacatttggcaa

SEQ ID NO: 282298 - DNA, 30 bp, Artificial Sequence
  Synthetic oligonucleotide
gttataagcatgctattcatttcaatgcaa

SEQ ID NO: 282299 - DNA, 30 bp, Artificial Sequence
  Synthetic oligonucleotide
ggaaattgaacaatgttaataggaatgcaa

SEQ ID NO: 282300 - DNA, 30 bp, Artificial Sequence
  Synthetic oligonucleotide
atgtctaagcatcaactattcagcatgcaa

SEQ ID NO: 282301 - DNA, 30 bp, Artificial Sequence
  Synthetic oligonucleotide
agggagctgcattttaggtcttcgatgcaa

SEQ ID NO: 282302 - DNA, 30 bp, Artificial Sequence
  Synthetic oligonucleotide
ttcgtcaccggttcagtaataatgatgcaa

SEQ ID NO: 282303 - DNA, 30 bp, Artificial Sequence
  Synthetic oligonucleotide
tacgcagagcgtcttgcgacagctatgcaa

SEQ ID NO: 282304 - DNA, 30 bp, Artificial Sequence
  Synthetic oligonucleotide
ccgctccgccgaggcgtctcgtttatgcaa

SEQ ID NO: 282305 - DNA, 30 bp, Artificial Sequence
  Synthetic oligonucleotide
gacactatctcagtattacagggactgcaa

SEQ ID NO: 282306 - DNA, 30 bp, Artificial Sequence
  Synthetic oligonucleotide
ggtaacatatagaccagaatcgccctgcaa

SEQ ID NO: 282307 - DNA, 30 bp, Artificial Sequence
  Synthetic oligonucleotide
agcagacacgtgaggtggacgacgctgcaa

SEQ ID NO: 282308 - DNA, 30 bp, Artificial Sequence
  Synthetic oligonucleotide
acggctctacatggtgtggatacgctgcaa

SEQ ID NO: 282309 - DNA, 31 bp, Artificial Sequence
  Synthetic oligonucleotide
aatggggatgtgaagataaagccatctgcaa

SEQ ID NO: 282310 - DNA, 30 bp, Artificial Sequence
  Synthetic oligonucleotide
actcgtgattgaggggccccctctctgcaa

SEQ ID NO: 282311 - DNA, 30 bp, Artificial Sequence
  Synthetic oligonucleotide
taataaatatcggatgggcggagtctgcaa

SEQ ID NO: 282312 - DNA, 30 bp, Artificial Sequence
  Synthetic oligonucleotide
cggacgtcacatcgcctttaggaagtgcaa

SEQ ID NO: 282313 - DNA, 30 bp, Artificial Sequence
  Synthetic oligonucleotide
aagaagcgcgggaattactaatctgtgcaa

SEQ ID NO: 282314 - DNA, 30 bp, Artificial Sequence
  Synthetic oligonucleotide
ttcacaattgagggactttataaattgcaa

SEQ ID NO: 282315 - DNA, 30 bp, Artificial Sequence
  Synthetic oligonucleotide
caaggcgaacgctcacgttttcaattgcaa

SEQ ID NO: 282316 - DNA, 30 bp, Artificial Sequence
  Synthetic oligonucleotide
agttcttatcgcatatctccacccttgcaa

SEQ ID NO: 282317 - DNA, 30 bp, Artificial Sequence
  Synthetic oligonucleotide
tagcgactcgccactttacattagttgcaa

SEQ ID NO: 282318 - DNA, 30 bp, Artificial Sequence
  Synthetic oligonucleotide
gtggcctcggtatggatacttacgttgcaa

SEQ ID NO: 282319 - DNA, 30 bp, Artificial Sequence
  Synthetic oligonucleotide
ttccaatccagtatcacctaggcgttgcaa

SEQ ID NO: 282320 - DNA, 30 bp, Artificial Sequence
  Synthetic oligonucleotide
agtcatggatgcacaaactgatctttgcaa

SEQ ID NO: 282321 - DNA, 30 bp, Artificial Sequence
  Synthetic oligonucleotide
ctctcgatttagccacttattattttgcaa

SEQ ID NO: 282322 - DNA, 30 bp, Artificial Sequence
  Synthetic oligonucleotide
gaggattgggcaaccaaacaccaaaatcaa

SEQ ID NO: 282323 - DNA, 30 bp, Artificial Sequence
  Synthetic oligonucleotide
ggtatggggtgttgggccataacaaatcaa

SEQ ID NO: 282324 - DNA, 30 bp, Artificial Sequence
  Synthetic oligonucleotide
taaagatcagaggtgactactcgaaatcaa

SEQ ID NO: 282325 - DNA, 30 bp, Artificial Sequence
  Synthetic oligonucleotide
atctcatcgttaggctgtgcatgaaatcaa

SEQ ID NO: 282326 - DNA, 30 bp, Artificial Sequence
  Synthetic oligonucleotide
acactctcaggtggtaaaattgtaaatcaa

SEQ ID NO: 282327 - DNA, 30 bp, Artificial Sequence
  Synthetic oligonucleotide
acctcgtcttccgcttgggaaaagaatcaa

SEQ ID NO: 282328 - DNA, 30 bp, Artificial Sequence
  Synthetic oligonucleotide
catactgatatggcccgacgcttgaatcaa

SEQ ID NO: 282329 - DNA, 30 bp, Artificial Sequence
  Synthetic oligonucleotide
taatatcgttcaagctacaccactaatcaa

SEQ ID NO: 282330 - DNA, 30 bp, Artificial Sequence
  Synthetic oligonucleotide
ctcacgtccattgtgtgggtcgctaatcaa

SEQ ID NO: 282331 - DNA, 30 bp, Artificial Sequence
  Synthetic oligonucleotide
gggtggtgcgcgccatccccaggacatcaa

SEQ ID NO: 282332 - DNA, 30 bp, Artificial Sequence
  Synthetic oligonucleotide
ctagggggcccagaaaagcggcagcatcaa

SEQ ID NO: 282333 - DNA, 30 bp, Artificial Sequence
  Synthetic oligonucleotide
acactgacagggacgcgcgcacatcatcaa

SEQ ID NO: 282334 - DNA, 30 bp, Artificial Sequence
  Synthetic oligonucleotide
gaaccaaataggcggtgaattggtcatcaa

SEQ ID NO: 282335 - DNA, 30 bp, Artificial Sequence
  Synthetic oligonucleotide
tttagctttaaagatgacatgggcgatcaa

SEQ ID NO: 282336 - DNA, 30 bp, Artificial Sequence
  Synthetic oligonucleotide
attcttccggtgagtgttgcgaaggatcaa

SEQ ID NO: 282337 - DNA, 30 bp, Artificial Sequence
  Synthetic oligonucleotide
accctcttcatatacgtcgaaatggatcaa

SEQ ID NO: 282338 - DNA, 30 bp, Artificial Sequence
  Synthetic oligonucleotide
accatctgatattgacacgtacgctatcaa

SEQ ID NO: 282339 - DNA, 30 bp, Artificial Sequence
  Synthetic oligonucleotide
cacttcttccgtgttatctaatattatcaa

SEQ ID NO: 282340 - DNA, 30 bp, Artificial Sequence
  Synthetic oligonucleotide
agcaggataagagtcacacacaaaactcaa

SEQ ID NO: 282341 - DNA, 30 bp, Artificial Sequence
  Synthetic oligonucleotide
cctagcccaatctctgctaacgagactcaa

SEQ ID NO: 282342 - DNA, 30 bp, Artificial Sequence
  Synthetic oligonucleotide
cggtgagtatgttagaagcctctgactcaa

SEQ ID NO: 282343 - DNA, 30 bp, Artificial Sequence
  Synthetic oligonucleotide
gcaagcggccgcatctacaggttgactcaa

SEQ ID NO: 282344 - DNA, 30 bp, Artificial Sequence
  Synthetic oligonucleotide
taatcgcaaagcgtagcgattttgactcaa

SEQ ID NO: 282345 - DNA, 30 bp, Artificial Sequence
  Synthetic oligonucleotide
tttcttaataagaaccatactcctactcaa

SEQ ID NO: 282346 - DNA, 30 bp, Artificial Sequence
  Synthetic oligonucleotide
gatcatatactaaaaaagtgttctactcaa

SEQ ID NO: 282347 - DNA, 30 bp, Artificial Sequence
  Synthetic oligonucleotide
gccgggatgggacattaattacgtactcaa

SEQ ID NO: 282348 - DNA, 30 bp, Artificial Sequence
  Synthetic oligonucleotide
aacggaacttcggttaatctaggacctcaa

SEQ ID NO: 282349 - DNA, 30 bp, Artificial Sequence
  Synthetic oligonucleotide
aacatcctattaggtttggatttccctcaa

SEQ ID NO: 282350 - DNA, 30 bp, Artificial Sequence
  Synthetic oligonucleotide
cgggaggttggccacacaatggggcctcaa

SEQ ID NO: 282351 - DNA, 30 bp, Artificial Sequence
  Synthetic oligonucleotide
aagtcttggcttaggtcaggaattcctcaa

SEQ ID NO: 282352 - DNA, 30 bp, Artificial Sequence
  Synthetic oligonucleotide
agcttatgagagaatgccccattagctcaa

SEQ ID NO: 282353 - DNA, 30 bp, Artificial Sequence
  Synthetic oligonucleotide
atctgcgggaatggcgttactaccgctcaa

SEQ ID NO: 282354 - DNA, 30 bp, Artificial Sequence
  Synthetic oligonucleotide
agccgaggatgtaaggcatccagggctcaa

SEQ ID NO: 282355 - DNA, 30 bp, Artificial Sequence
  Synthetic oligonucleotide
tggggcccgcttttctggccgttggctcaa

SEQ ID NO: 282356 - DNA, 30 bp, Artificial Sequence
  Synthetic oligonucleotide
ggggtagacacagcgtgaatgggatctcaa

SEQ ID NO: 282357 - DNA, 30 bp, Artificial Sequence
  Synthetic oligonucleotide
ctatttcggatgaactgatctatctctcaa

SEQ ID NO: 282358 - DNA, 30 bp, Artificial Sequence
  Synthetic oligonucleotide
gtgagacgaagggaggcactatcgtctcaa

SEQ ID NO: 282359 - DNA, 30 bp, Artificial Sequence
  Synthetic oligonucleotide
tggaccgcaatagggtctacgtcgtctcaa

SEQ ID NO: 282360 - DNA, 30 bp, Artificial Sequence
  Synthetic oligonucleotide
tacgaatgcctgggcaaaagacattctcaa

SEQ ID NO: 282361 - DNA, 30 bp, Artificial Sequence
  Synthetic oligonucleotide
tcacgttgttgtgtcaagaccgtttctcaa

SEQ ID NO: 282362 - DNA, 30 bp, Artificial Sequence
  Synthetic oligonucleotide
atttgataagcaaacagtgcgaacagtcaa

SEQ ID NO: 282363 - DNA, 30 bp, Artificial Sequence
  Synthetic oligonucleotide
gtcgatgaaatgtggggtttccacagtcaa

SEQ ID NO: 282364 - DNA, 30 bp, Artificial Sequence
  Synthetic oligonucleotide
ctgcacgtcaggagtaactttgcgagtcaa

SEQ ID NO: 282365 - DNA, 30 bp, Artificial Sequence
  Synthetic oligonucleotide
agttatactactgcctatttcgatagtcaa

SEQ ID NO: 282366 - DNA, 30 bp, Artificial Sequence
  Synthetic oligonucleotide
gtcgtaccttaggacatatgggttagtcaa

SEQ ID NO: 282367 - DNA, 30 bp, Artificial Sequence
  Synthetic oligonucleotide
ttgctagaaggtttatttctgccacgtcaa

SEQ ID NO: 282368 - DNA, 30 bp, Artificial Sequence
  Synthetic oligonucleotide
aacaggtgttcacgttgtcgtacccgtcaa

SEQ ID NO: 282369 - DNA, 30 bp, Artificial Sequence
  Synthetic oligonucleotide
ttggattcactgccctccctatgccgtcaa

SEQ ID NO: 282370 - DNA, 30 bp, Artificial Sequence
  Synthetic oligonucleotide
ttcagtatgagtcctaagcgtctccgtcaa

SEQ ID NO: 282371 - DNA, 30 bp, Artificial Sequence
  Synthetic oligonucleotide
ctcgctaggattgcccgctcgctaggtcaa

SEQ ID NO: 282372 - DNA, 30 bp, Artificial Sequence
  Synthetic oligonucleotide
aaatgaactactctcagctataacggtcaa

SEQ ID NO: 282373 - DNA, 30 bp, Artificial Sequence
  Synthetic oligonucleotide
caaatcaagctagcctctctcgacggtcaa

SEQ ID NO: 282374 - DNA, 30 bp, Artificial Sequence
  Synthetic oligonucleotide
ttgttgcgtggaattttgagagccggtcaa

SEQ ID NO: 282375 - DNA, 30 bp, Artificial Sequence
  Synthetic oligonucleotide
ctattttagaggacaccagtaaggggtcaa

SEQ ID NO: 282376 - DNA, 30 bp, Artificial Sequence
  Synthetic oligonucleotide
taaagctcaatagtggtcgatcttggtcaa

SEQ ID NO: 282377 - DNA, 30 bp, Artificial Sequence
  Synthetic oligonucleotide
gagaaccgcccaaagcacggctcatgtcaa

SEQ ID NO: 282378 - DNA, 30 bp, Artificial Sequence
  Synthetic oligonucleotide
gtatgtgctcgagtggaacggggatgtcaa

SEQ ID NO: 282379 - DNA, 30 bp, Artificial Sequence
  Synthetic oligonucleotide
agcggctttgcaacagcacctggatgtcaa

SEQ ID NO: 282380 - DNA, 30 bp, Artificial Sequence
  Synthetic oligonucleotide
tctatcagcggagaatggtcaggaattcaa

SEQ ID NO: 282381 - DNA, 30 bp, Artificial Sequence
  Synthetic oligonucleotide
gtactctcgatgttccgtaatctaattcaa

SEQ ID NO: 282382 - DNA, 30 bp, Artificial Sequence
  Synthetic oligonucleotide
tatctcattcaaggtctaaaaaacattcaa

SEQ ID NO: 282383 - DNA, 30 bp, Artificial Sequence
  Synthetic oligonucleotide
gcatcgtaaaaagttgttattcgcattcaa

SEQ ID NO: 282384 - DNA, 30 bp, Artificial Sequence
  Synthetic oligonucleotide
gggcgcgacacgctgctatactagattcaa

SEQ ID NO: 282385 - DNA, 30 bp, Artificial Sequence
  Synthetic oligonucleotide
gcgcgcgccacagccaattgcaggattcaa

SEQ ID NO: 282386 - DNA, 30 bp, Artificial Sequence
  Synthetic oligonucleotide
taaggaagttcacggcgtagtgcacttcaa

SEQ ID NO: 282387 - DNA, 30 bp, Artificial Sequence
  Synthetic oligonucleotide
actaacacgcaggtcataattcatcttcaa

SEQ ID NO: 282388 - DNA, 30 bp, Artificial Sequence
  Synthetic oligonucleotide
cccattggtgcgagccctgcgcaagttcaa

SEQ ID NO: 282389 - DNA, 30 bp, Artificial Sequence
  Synthetic oligonucleotide
ggacccggcttagaagcacctacagttcaa

SEQ ID NO: 282390 - DNA, 30 bp, Artificial Sequence
  Synthetic oligonucleotide
ctgacgagcaacaatgaagtcagagttcaa

SEQ ID NO: 282391 - DNA, 30 bp, Artificial Sequence
  Synthetic oligonucleotide
atgctagagaacgtagattattccgttcaa

SEQ ID NO: 282392 - DNA, 30 bp, Artificial Sequence
  Synthetic oligonucleotide
atggtccccaagttcgaacgggaggttcaa

SEQ ID NO: 282393 - DNA, 30 bp, Artificial Sequence
  Synthetic oligonucleotide
caatgagtggtctggtactttgcggttcaa

SEQ ID NO: 282394 - DNA, 30 bp, Artificial Sequence
  Synthetic oligonucleotide
cacgtaataacaaaaacccagattgttcaa

SEQ ID NO: 282395 - DNA, 30 bp, Artificial Sequence
  Synthetic oligonucleotide
tcttgctcgagatatagtggaccatttcaa

SEQ ID NO: 282396 - DNA, 30 bp, Artificial Sequence
  Synthetic oligonucleotide
tcccgcaccgtgattacacacagatttcaa

SEQ ID NO: 282397 - DNA, 30 bp, Artificial Sequence
  Synthetic oligonucleotide
tgtttcggtcagggagatatacgatttcaa

SEQ ID NO: 282398 - DNA, 30 bp, Artificial Sequence
  Synthetic oligonucleotide
cttgctattgttgaaatccgtggatttcaa

SEQ ID NO: 282399 - DNA, 30 bp, Artificial Sequence
  Synthetic oligonucleotide
ccctatctatatatttcatgaccctttcaa

SEQ ID NO: 282400 - DNA, 30 bp, Artificial Sequence
  Synthetic oligonucleotide
gaaagttgctgaaaaaagccagagtttcaa

SEQ ID NO: 282401 - DNA, 30 bp, Artificial Sequence
  Synthetic oligonucleotide
agtggcagctttcgagtttctacgtttcaa

SEQ ID NO: 282402 - DNA, 30 bp, Artificial Sequence
  Synthetic oligonucleotide
ttatgtccggaggcaagcagaaattttcaa

SEQ ID NO: 282403 - DNA, 30 bp, Artificial Sequence
  Synthetic oligonucleotide
aatctcgggctggagggatataaaaaagaa

SEQ ID NO: 282404 - DNA, 30 bp, Artificial Sequence
  Synthetic oligonucleotide
tcttgccaaccactcattggggcaaaagaa

SEQ ID NO: 282405 - DNA, 30 bp, Artificial Sequence
  Synthetic oligonucleotide
aatcaagatcgtagggacaacttaaaagaa

SEQ ID NO: 282406 - DNA, 30 bp, Artificial Sequence
  Synthetic oligonucleotide
ccggtagacacttattggggggccaaagaa

SEQ ID NO: 282407 - DNA, 30 bp, Artificial Sequence
  Synthetic oligonucleotide
tagctcacatagtagggagtcatcaaagaa

SEQ ID NO: 282408 - DNA, 30 bp, Artificial Sequence
  Synthetic oligonucleotide
tgattcgcgttcgtatagcacacgaaagaa

SEQ ID NO: 282409 - DNA, 30 bp, Artificial Sequence
  Synthetic oligonucleotide
gagggggtatgtttcttgttgtgtaaagaa

SEQ ID NO: 282410 - DNA, 30 bp, Artificial Sequence
  Synthetic oligonucleotide
aatggtcgttgttcaactttatttaaagaa

SEQ ID NO: 282411 - DNA, 30 bp, Artificial Sequence
  Synthetic oligonucleotide
gctaaataccgttcgtcaccgcaacaagaa

SEQ ID NO: 282412 - DNA, 30 bp, Artificial Sequence
  Synthetic oligonucleotide
atattagacgcgttcataaacagccaagaa

SEQ ID NO: 282413 - DNA, 30 bp, Artificial Sequence
  Synthetic oligonucleotide
cgtggatacctcggatccagtatccaagaa

SEQ ID NO: 282414 - DNA, 30 bp, Artificial Sequence
  Synthetic oligonucleotide
gttgagcctcaacccgcacaattccaagaa

SEQ ID NO: 282415 - DNA, 30 bp, Artificial Sequence
  Synthetic oligonucleotide
gtactaattaaggatcgataaacgcaagaa

SEQ ID NO: 282416 - DNA, 30 bp, Artificial Sequence
  Synthetic oligonucleotide
tgggagacttgtaccgaagttgaagaagaa

SEQ ID NO: 282417 - DNA, 30 bp, Artificial Sequence
  Synthetic oligonucleotide
gggcttttatacgaacttgggtaagaagaa

SEQ ID NO: 282418 - DNA, 30 bp, Artificial Sequence
  Synthetic oligonucleotide
ggatttcgaaacttgagccagtaggaagaa

SEQ ID NO: 282419 - DNA, 30 bp, Artificial Sequence
  Synthetic oligonucleotide
ggttagatgttctacttaaggttggaagaa

SEQ ID NO: 282420 - DNA, 30 bp, Artificial Sequence
  Synthetic oligonucleotide
catccgctagtgtagtagtaaattgaagaa

SEQ ID NO: 282421 - DNA, 30 bp, Artificial Sequence
  Synthetic oligonucleotide
tcgttctgaaagagcattacggttgaagaa

SEQ ID NO: 282422 - DNA, 30 bp, Artificial Sequence
  Synthetic oligonucleotide
atcgttaccggcaccaactcgtttgaagaa

SEQ ID NO: 282423 - DNA, 30 bp, Artificial Sequence
  Synthetic oligonucleotide
tcgaggttagcaagtcggcagctataagaa

SEQ ID NO: 282424 - DNA, 30 bp, Artificial Sequence
  Synthetic oligonucleotide
caacgttgcaggtctttatgtttataagaa

SEQ ID NO: 282425 - DNA, 29 bp, Artificial Sequence
  Synthetic oligonucleotide
ttgtagtttattaagcgaaatactaagaa

SEQ ID NO: 282426 - DNA, 30 bp, Artificial Sequence
  Synthetic oligonucleotide
tcgatcaccggcctcccgatctagtaagaa

SEQ ID NO: 282427 - DNA, 30 bp, Artificial Sequence
  Synthetic oligonucleotide
cacaatatcatttagatttgttattaagaa

SEQ ID NO: 282428 - DNA, 30 bp, Artificial Sequence
  Synthetic oligonucleotide
caccattgtgaagcactgtagttaacagaa

SEQ ID NO: 282429 - DNA, 30 bp, Artificial Sequence
  Synthetic oligonucleotide
ggtaaacctgtactgcacgtgttaacagaa

SEQ ID NO: 282430 - DNA, 30 bp, Artificial Sequence
  Synthetic oligonucleotide
gggtactccgtttggcatcaccccacagaa

SEQ ID NO: 282431 - DNA, 30 bp, Artificial Sequence
  Synthetic oligonucleotide
ctttggatgcggacgtatgtcctcacagaa

SEQ ID NO: 282432 - DNA, 30 bp, Artificial Sequence
  Synthetic oligonucleotide
cccgcacataggtaaaccatcaggacagaa

SEQ ID NO: 282433 - DNA, 30 bp, Artificial Sequence
  Synthetic oligonucleotide
agcgacaatcttacccatgcggggacagaa

SEQ ID NO: 282434 - DNA, 30 bp, Artificial Sequence
  Synthetic oligonucleotide
tcggagttactcttagattcaaatacagaa

SEQ ID NO: 282435 - DNA, 30 bp, Artificial Sequence
  Synthetic oligonucleotide
atagtgcatttaagcgcccataaaccagaa

SEQ ID NO: 282436 - DNA, 30 bp, Artificial Sequence
  Synthetic oligonucleotide
ttaaaaaccgaatcggccattagagcagaa

SEQ ID NO: 282437 - DNA, 31 bp, Artificial Sequence
  Synthetic oligonucleotide
gacgggctttttggcatgtttgcgagcagaa

SEQ ID NO: 282438 - DNA, 30 bp, Artificial Sequence
  Synthetic oligonucleotide
gttataccggggcgctaggcgggagcagaa

SEQ ID NO: 282439 - DNA, 30 bp, Artificial Sequence
  Synthetic oligonucleotide
gaggtctaaacttaacaactttgggcagaa

SEQ ID NO: 282440 - DNA, 30 bp, Artificial Sequence
  Synthetic oligonucleotide
ctccaatgtgacgcaactgtaactgcagaa

SEQ ID NO: 282441 - DNA, 30 bp, Artificial Sequence
  Synthetic oligonucleotide
tttcattaaattgtaatcatatgctcagaa

SEQ ID NO: 282442 - DNA, 30 bp, Artificial Sequence
  Synthetic oligonucleotide
atgacgatcgtcaacctggagaattcagaa

SEQ ID NO: 282443 - DNA, 30 bp, Artificial Sequence
  Synthetic oligonucleotide
cggcatgtgtcggcgttcatactaagagaa

SEQ ID NO: 282444 - DNA, 30 bp, Artificial Sequence
  Synthetic oligonucleotide
gagtgctcctctcggttacaaatcagagaa

SEQ ID NO: 282445 - DNA, 30 bp, Artificial Sequence
  Synthetic oligonucleotide
ggttggcatgatccatacgtttggagagaa

SEQ ID NO: 282446 - DNA, 30 bp, Artificial Sequence
  Synthetic oligonucleotide
attgcgtgtaatttatagtgcctgagagaa

SEQ ID NO: 282447 - DNA, 30 bp, Artificial Sequence
  Synthetic oligonucleotide
ataaccgcgacatggtactattttagagaa

SEQ ID NO: 282448 - DNA, 30 bp, Artificial Sequence
  Synthetic oligonucleotide
ggtacgttgtaccgtgcatcacgacgagaa

SEQ ID NO: 282449 - DNA, 30 bp, Artificial Sequence
  Synthetic oligonucleotide
atgtgcaatatctaccatatttggcgagaa

SEQ ID NO: 282450 - DNA, 30 bp, Artificial Sequence
  Synthetic oligonucleotide
ggatctttcctattgtcagatgtgcgagaa

SEQ ID NO: 282451 - DNA, 30 bp, Artificial Sequence
  Synthetic oligonucleotide
gaccagaccaaaacccccccggcgggagaa

SEQ ID NO: 282452 - DNA, 30 bp, Artificial Sequence
  Synthetic oligonucleotide
ctagagggccccactgaccgccatggagaa

SEQ ID NO: 282453 - DNA, 30 bp, Artificial Sequence
  Synthetic oligonucleotide
cgtctcgtgtagtgtgtggcacttggagaa

SEQ ID NO: 282454 - DNA, 30 bp, Artificial Sequence
  Synthetic oligonucleotide
ttcatgagacacctcataggcagatgagaa

SEQ ID NO: 282455 - DNA, 30 bp, Artificial Sequence
  Synthetic oligonucleotide
ccgtgttgaaataacatacctggatgagaa

SEQ ID NO: 282456 - DNA, 30 bp, Artificial Sequence
  Synthetic oligonucleotide
ggcatcagcaaattcagcggtttatgagaa

SEQ ID NO: 282457 - DNA, 30 bp, Artificial Sequence
  Synthetic oligonucleotide
aaggtttggatttctgaatccgagtgagaa

SEQ ID NO: 282458 - DNA, 30 bp, Artificial Sequence
  Synthetic oligonucleotide
ttggttttaccaagcgacgtccggtgagaa

SEQ ID NO: 282459 - DNA, 30 bp, Artificial Sequence
  Synthetic oligonucleotide
gcgagtctcaagttaaagtaggtttgagaa

SEQ ID NO: 282460 - DNA, 30 bp, Artificial Sequence
  Synthetic oligonucleotide
aaaaaagtgcgttttgggctggatatagaa

SEQ ID NO: 282461 - DNA, 30 bp, Artificial Sequence
  Synthetic oligonucleotide
cgcacagatgatgggtatgaccgtatagaa

SEQ ID NO: 282462 - DNA, 30 bp, Artificial Sequence
  Synthetic oligonucleotide
agtcgtccgttgtagtattctggtatagaa

SEQ ID NO: 282463 - DNA, 30 bp, Artificial Sequence
  Synthetic oligonucleotide
tgcaaatgttaagggcttagtgttatagaa

SEQ ID NO: 282464 - DNA, 30 bp, Artificial Sequence
  Synthetic oligonucleotide
cactcttctgttcccagcggaaaactagaa

SEQ ID NO: 282465 - DNA, 30 bp, Artificial Sequence
  Synthetic oligonucleotide
cctataccagagtgcaaggttaggctagaa

SEQ ID NO: 282466 - DNA, 30 bp, Artificial Sequence
  Synthetic oligonucleotide
cctaacagcaaagaagtctgatacgtagaa

SEQ ID NO: 282467 - DNA, 30 bp, Artificial Sequence
  Synthetic oligonucleotide
tatgggacctatggaccttgaagtgtagaa

SEQ ID NO: 282468 - DNA, 30 bp, Artificial Sequence
  Synthetic oligonucleotide
agatcgagatcttgtctacgggaattagaa

SEQ ID NO: 282469 - DNA, 30 bp, Artificial Sequence
  Synthetic oligonucleotide
gttcgttgaacatcagacggtgagttagaa

SEQ ID NO: 282470 - DNA, 30 bp, Artificial Sequence
  Synthetic oligonucleotide
gcctgttgctggattataggcggtttagaa

SEQ ID NO: 282471 - DNA, 30 bp, Artificial Sequence
  Synthetic oligonucleotide
gacctagttaacatactgaagggtttagaa

SEQ ID NO: 282472 - DNA, 30 bp, Artificial Sequence
  Synthetic oligonucleotide
agcgtattcgggggctaaaacaaaaacgaa

SEQ ID NO: 282473 - DNA, 30 bp, Artificial Sequence
  Synthetic oligonucleotide
aagttcgggcggtattgcatcgacaacgaa

SEQ ID NO: 282474 - DNA, 30 bp, Artificial Sequence
  Synthetic oligonucleotide
ttatccagggttctgtatcaaatcaacgaa

SEQ ID NO: 282475 - DNA, 30 bp, Artificial Sequence
  Synthetic oligonucleotide
tactgcctcgcaataattcaccagaacgaa

SEQ ID NO: 282476 - DNA, 30 bp, Artificial Sequence
  Synthetic oligonucleotide
ataagtttacaaaggcatatttggaacgaa

SEQ ID NO: 282477 - DNA, 30 bp, Artificial Sequence
  Synthetic oligonucleotide
cagcctcgggcctagggccagatgaacgaa

SEQ ID NO: 282478 - DNA, 30 bp, Artificial Sequence
  Synthetic oligonucleotide
ccgctaaaggattccgtggtcccacacgaa

SEQ ID NO: 282479 - DNA, 30 bp, Artificial Sequence
  Synthetic oligonucleotide
aagatgtagtgacccgtgttcagacacgaa

SEQ ID NO: 282480 - DNA, 30 bp, Artificial Sequence
  Synthetic oligonucleotide
tgaagggacactctaatttctaaccacgaa

SEQ ID NO: 282481 - DNA, 30 bp, Artificial Sequence
  Synthetic oligonucleotide
gcataacgcggaagacgaactaggcacgaa

SEQ ID NO: 282482 - DNA, 29 bp, Artificial Sequence
  Synthetic oligonucleotide
tcgcaaactaataagttatgtatcacgaa

SEQ ID NO: 282483 - DNA, 30 bp, Artificial Sequence
  Synthetic oligonucleotide
ataggttggtgtggggtaaccgctcacgaa

SEQ ID NO: 282484 - DNA, 30 bp, Artificial Sequence
  Synthetic oligonucleotide
gactgcggatcgctatcccgcacggacgaa

SEQ ID NO: 282485 - DNA, 30 bp, Artificial Sequence
  Synthetic oligonucleotide
gcaaacgcggctaaatacaaattggacgaa

SEQ ID NO: 282486 - DNA, 30 bp, Artificial Sequence
  Synthetic oligonucleotide
ggatcttgaggaagtatggcacctgacgaa

SEQ ID NO: 282487 - DNA, 30 bp, Artificial Sequence
  Synthetic oligonucleotide
gaaggcagcgtgggccgcctttgtgacgaa

SEQ ID NO: 282488 - DNA, 30 bp, Artificial Sequence
  Synthetic oligonucleotide
catcagtgatgaactctagggtcatacgaa

SEQ ID NO: 282489 - DNA, 30 bp, Artificial Sequence
  Synthetic oligonucleotide
cagaatataactaccgataaattctacgaa

SEQ ID NO: 282490 - DNA, 30 bp, Artificial Sequence
  Synthetic oligonucleotide
tgggggttgggtgatctagggccgtacgaa

SEQ ID NO: 282491 - DNA, 30 bp, Artificial Sequence
  Synthetic oligonucleotide
ggacggacagccccgccgcaggattacgaa

SEQ ID NO: 282492 - DNA, 30 bp, Artificial Sequence
  Synthetic oligonucleotide
catagaggtggctttgcttggacaaccgaa

SEQ ID NO: 282493 - DNA, 30 bp, Artificial Sequence
  Synthetic oligonucleotide
cggcacagtggggattaataatcaaccgaa

SEQ ID NO: 282494 - DNA, 30 bp, Artificial Sequence
  Synthetic oligonucleotide
agaatcgtgcaggccttaaatcgaaccgaa

SEQ ID NO: 282495 - DNA, 30 bp, Artificial Sequence
  Synthetic oligonucleotide
atacctttttcgcatcacatggtaaccgaa

SEQ ID NO: 282496 - DNA, 30 bp, Artificial Sequence
  Synthetic oligonucleotide
ccctagagttataacacgggtcccaccgaa

SEQ ID NO: 282497 - DNA, 30 bp, Artificial Sequence
  Synthetic oligonucleotide
gcagcggctgatggcctggttaggaccgaa

SEQ ID NO: 282498 - DNA, 30 bp, Artificial Sequence
  Synthetic oligonucleotide
ctacgctacacagcacaatgggggaccgaa

SEQ ID NO: 282499 - DNA, 30 bp, Artificial Sequence
  Synthetic oligonucleotide
cgcattccaagccatacggatctgaccgaa

SEQ ID NO: 282500 - DNA, 30 bp, Artificial Sequence
  Synthetic oligonucleotide
atgggagtaaagggaggtctaactaccgaa

SEQ ID NO: 282501 - DNA, 30 bp, Artificial Sequence
  Synthetic oligonucleotide
tgataaagtggtcgttgcaaaagtaccgaa

SEQ ID NO: 282502 - DNA, 30 bp, Artificial Sequence
  Synthetic oligonucleotide
gacgtgtacacggctgatacacgtaccgaa

SEQ ID NO: 282503 - DNA, 30 bp, Artificial Sequence
  Synthetic oligonucleotide
aacttgttctcagaggcgctccagcccgaa

SEQ ID NO: 282504 - DNA, 30 bp, Artificial Sequence
  Synthetic oligonucleotide
tctctcaaaaattactcggtaaggcccgaa

SEQ ID NO: 282505 - DNA, 30 bp, Artificial Sequence
  Synthetic oligonucleotide
tgactcctatgggacgtagataaagccgaa

SEQ ID NO: 282506 - DNA, 30 bp, Artificial Sequence
  Synthetic oligonucleotide
acggcagcctagggtaacaaagaatccgaa

SEQ ID NO: 282507 - DNA, 30 bp, Artificial Sequence
  Synthetic oligonucleotide
acaacaatggaacctaacgccggatccgaa

SEQ ID NO: 282508 - DNA, 30 bp, Artificial Sequence
  Synthetic oligonucleotide
tccttacgttcgcatacagcctgatccgaa

SEQ ID NO: 282509 - DNA, 30 bp, Artificial Sequence
  Synthetic oligonucleotide
taacaaatcgtcgcggtaacccgctccgaa

SEQ ID NO: 282510 - DNA, 30 bp, Artificial Sequence
  Synthetic oligonucleotide
gaatgcattcggaaaatagggaggtccgaa

SEQ ID NO: 282511 - DNA, 30 bp, Artificial Sequence
  Synthetic oligonucleotide
gctcgaaagtagaggctctaatcttccgaa

SEQ ID NO: 282512 - DNA, 30 bp, Artificial Sequence
  Synthetic oligonucleotide
ctagtgtgggctgagaagcccaacagcgaa

SEQ ID NO: 282513 - DNA, 30 bp, Artificial Sequence
  Synthetic oligonucleotide
ttccaattacacgcttatataacgagcgaa

SEQ ID NO: 282514 - DNA, 30 bp, Artificial Sequence
  Synthetic oligonucleotide
cgatggcttggcactgcttatatgagcgaa

SEQ ID NO: 282515 - DNA, 30 bp, Artificial Sequence
  Synthetic oligonucleotide
tatcgttgcagagctaaaggagatagcgaa

SEQ ID NO: 282516 - DNA, 30 bp, Artificial Sequence
  Synthetic oligonucleotide
ttgtcaatctcaggctcaatatatagcgaa

SEQ ID NO: 282517 - DNA, 30 bp, Artificial Sequence
  Synthetic oligonucleotide
cggagggcaagcttgggggccgttagcgaa

SEQ ID NO: 282518 - DNA, 30 bp, Artificial Sequence
  Synthetic oligonucleotide
tcaacgctctaacacgatggataacgcgaa

SEQ ID NO: 282519 - DNA, 30 bp, Artificial Sequence
  Synthetic oligonucleotide
tgcgaatacctcactacgttatcacgcgaa

SEQ ID NO: 282520 - DNA, 30 bp, Artificial Sequence
  Synthetic oligonucleotide
gtgccggttacgagccacggcacgcgcgaa

SEQ ID NO: 282521 - DNA, 30 bp, Artificial Sequence
  Synthetic oligonucleotide
gcaccgactcacgtatgaatataaggcgaa

SEQ ID NO: 282522 - DNA, 30 bp, Artificial Sequence
  Synthetic oligonucleotide
cgtggcaatcagggccagcaatacggcgaa

SEQ ID NO: 282523 - DNA, 30 bp, Artificial Sequence
  Synthetic oligonucleotide
tagtaagtacacggggtagtgaccggcgaa

SEQ ID NO: 282524 - DNA, 30 bp, Artificial Sequence
  Synthetic oligonucleotide
gacccgcgtaaaggcctagaaaagggcgaa

SEQ ID NO: 282525 - DNA, 30 bp, Artificial Sequence
  Synthetic oligonucleotide
cccctagtacgcattgtgtgtcagggcgaa

SEQ ID NO: 282526 - DNA, 30 bp, Artificial Sequence
  Synthetic oligonucleotide
gacctgtccgtggcgacagcatagggcgaa

SEQ ID NO: 282527 - DNA, 30 bp, Artificial Sequence
  Synthetic oligonucleotide
gacataagcgtacgctggaaaatatgcgaa

SEQ ID NO: 282528 - DNA, 30 bp, Artificial Sequence
  Synthetic oligonucleotide
gtatagcgcaaagatcggctagtatgcgaa

SEQ ID NO: 282529 - DNA, 30 bp, Artificial Sequence
  Synthetic oligonucleotide
ttagatttctatcatggtcgtatgtgcgaa

SEQ ID NO: 282530 - DNA, 30 bp, Artificial Sequence
  Synthetic oligonucleotide
gaggcaggggtcgaagtcattacttgcgaa

SEQ ID NO: 282531 - DNA, 30 bp, Artificial Sequence
  Synthetic oligonucleotide
taggattctgctgagggctgatgttgcgaa

SEQ ID NO: 282532 - DNA, 30 bp, Artificial Sequence
  Synthetic oligonucleotide
tcacctacctggtaccgcgtattaatcgaa

SEQ ID NO: 282533 - DNA, 30 bp, Artificial Sequence
  Synthetic oligonucleotide
tgaacctcaggatacactatgtgcatcgaa

SEQ ID NO: 282534 - DNA, 30 bp, Artificial Sequence
  Synthetic oligonucleotide
aagataaggttggaaagcccgacgatcgaa

SEQ ID NO: 282535 - DNA, 30 bp, Artificial Sequence
  Synthetic oligonucleotide
actagaaagagaatgatcggagttatcgaa

SEQ ID NO: 282536 - DNA, 30 bp, Artificial Sequence
  Synthetic oligonucleotide
ccatgagtcgtgacgtgggcgttactcgaa

SEQ ID NO: 282537 - DNA, 30 bp, Artificial Sequence
  Synthetic oligonucleotide
ctggtacttcgacttggcgataacctcgaa

SEQ ID NO: 282538 - DNA, 30 bp, Artificial Sequence
  Synthetic oligonucleotide
ttgcaaaccaaatcatagatgctcctcgaa

SEQ ID NO: 282539 - DNA, 30 bp, Artificial Sequence
  Synthetic oligonucleotide
aattcatcaggatagcttgagcagctcgaa

SEQ ID NO: 282540 - DNA, 30 bp, Artificial Sequence
  Synthetic oligonucleotide
ttaactcatgacacgccgggtcggctcgaa

SEQ ID NO: 282541 - DNA, 30 bp, Artificial Sequence
  Synthetic oligonucleotide
atgttccagttaatctgtggggggctcgaa

SEQ ID NO: 282542 - DNA, 30 bp, Artificial Sequence
  Synthetic oligonucleotide
cggggtaaaggtcgggggatcgcagtcgaa

SEQ ID NO: 282543 - DNA, 30 bp, Artificial Sequence
  Synthetic oligonucleotide
cgagcttataaagctatcgatggagtcgaa

SEQ ID NO: 282544 - DNA, 31 bp, Artificial Sequence
  Synthetic oligonucleotide
cacgccggtactccgtactagtcaggtcgaa

SEQ ID NO: 282545 - DNA, 30 bp, Artificial Sequence
  Synthetic oligonucleotide
aatatcctcggttcgagaaaaccggtcgaa

SEQ ID NO: 282546 - DNA, 30 bp, Artificial Sequence
  Synthetic oligonucleotide
ctcagtggacatctgagagccggggtcgaa

SEQ ID NO: 282547 - DNA, 30 bp, Artificial Sequence
  Synthetic oligonucleotide
ggccaccaacccaaggcgtaggttgtcgaa

SEQ ID NO: 282548 - DNA, 30 bp, Artificial Sequence
  Synthetic oligonucleotide
tgttaaccccggaacagtgggagattcgaa

SEQ ID NO: 282549 - DNA, 30 bp, Artificial Sequence
  Synthetic oligonucleotide
gtggtctgcaacggaatatagatattcgaa

SEQ ID NO: 282550 - DNA, 30 bp, Artificial Sequence
  Synthetic oligonucleotide
aaaatcagagtacccaaagtttacttcgaa

SEQ ID NO: 282551 - DNA, 30 bp, Artificial Sequence
  Synthetic oligonucleotide
tggtttggttcgtgtcgcgaaaccttcgaa

SEQ ID NO: 282552 - DNA, 30 bp, Artificial Sequence
  Synthetic oligonucleotide
cctggggaagaagttgactgtgccttcgaa

SEQ ID NO: 282553 - DNA, 30 bp, Artificial Sequence
  Synthetic oligonucleotide
gccaattacccgtgtttgattcgcttcgaa

SEQ ID NO: 282554 - DNA, 30 bp, Artificial Sequence
  Synthetic oligonucleotide
agtttctgctctaacctccaaactttcgaa

SEQ ID NO: 282555 - DNA, 30 bp, Artificial Sequence
  Synthetic oligonucleotide
caaccctgggctcttgtgacaataaaggaa

SEQ ID NO: 282556 - DNA, 30 bp, Artificial Sequence
  Synthetic oligonucleotide
tgggccacaaccccgatttgacccaaggaa

SEQ ID NO: 282557 - DNA, 30 bp, Artificial Sequence
  Synthetic oligonucleotide
tgtagtggctggcgcgggctatagaaggaa

SEQ ID NO: 282558 - DNA, 30 bp, Artificial Sequence
  Synthetic oligonucleotide
taaataccatatagaaggacttcgaaggaa

SEQ ID NO: 282559 - DNA, 30 bp, Artificial Sequence
  Synthetic oligonucleotide
ggtttataaactgggcaggcttcgaaggaa

SEQ ID NO: 282560 - DNA, 30 bp, Artificial Sequence
  Synthetic oligonucleotide
gaaagcgcagcgcagcagaactggaaggaa

SEQ ID NO: 282561 - DNA, 30 bp, Artificial Sequence
  Synthetic oligonucleotide
cacgacttgataccgccttaaattaaggaa

SEQ ID NO: 282562 - DNA, 30 bp, Artificial Sequence
  Synthetic oligonucleotide
ttaaatatgtcagcttgaattgagcaggaa

SEQ ID NO: 282563 - DNA, 30 bp, Artificial Sequence
  Synthetic oligonucleotide
gactgtaaacacgcgatgtaagggcaggaa

SEQ ID NO: 282564 - DNA, 30 bp, Artificial Sequence
  Synthetic oligonucleotide
ggatttaacccgggaatgtgcttgcaggaa

SEQ ID NO: 282565 - DNA, 30 bp, Artificial Sequence
  Synthetic oligonucleotide
caaacccaaccggccttgtaatctcaggaa

SEQ ID NO: 282566 - DNA, 30 bp, Artificial Sequence
  Synthetic oligonucleotide
agcccgcccctttatatcgattttcaggaa

SEQ ID NO: 282567 - DNA, 30 bp, Artificial Sequence
  Synthetic oligonucleotide
acgaatcagtccttgttatttaaagaggaa

SEQ ID NO: 282568 - DNA, 30 bp, Artificial Sequence
  Synthetic oligonucleotide
atcagagaacttcatgtgcagcctgaggaa

SEQ ID NO: 282569 - DNA, 30 bp, Artificial Sequence
  Synthetic oligonucleotide
tatagcacggcatgccataagatataggaa

SEQ ID NO: 282570 - DNA, 30 bp, Artificial Sequence
  Synthetic oligonucleotide
aattacaaaaatctgattaacaactaggaa

SEQ ID NO: 282571 - DNA, 30 bp, Artificial Sequence
  Synthetic oligonucleotide
aagtcaagctatagctggtacgcctaggaa

SEQ ID NO: 282572 - DNA, 30 bp, Artificial Sequence
  Synthetic oligonucleotide
gttggccccgctattaggaatccgtaggaa

SEQ ID NO: 282573 - DNA, 30 bp, Artificial Sequence
  Synthetic oligonucleotide
ggatagcggtggttgcgtgacgggtaggaa

SEQ ID NO: 282574 - DNA, 30 bp, Artificial Sequence
  Synthetic oligonucleotide
gcggctcgcgctcggcaccgaatgtaggaa

SEQ ID NO: 282575 - DNA, 30 bp, Artificial Sequence
  Synthetic oligonucleotide
agcattagaactcctatgatgcgttaggaa

SEQ ID NO: 282576 - DNA, 30 bp, Artificial Sequence
  Synthetic oligonucleotide
attccgaggtggtcttgaattacaacggaa

SEQ ID NO: 282577 - DNA, 30 bp, Artificial Sequence
  Synthetic oligonucleotide
tctatgtcggtaaaagaaggtggaacggaa

SEQ ID NO: 282578 - DNA, 30 bp, Artificial Sequence
  Synthetic oligonucleotide
cccacagcagtgcagatggttatcacggaa

SEQ ID NO: 282579 - DNA, 30 bp, Artificial Sequence
  Synthetic oligonucleotide
ggggtaatggatcgaaaaacgtagacggaa

SEQ ID NO: 282580 - DNA, 30 bp, Artificial Sequence
  Synthetic oligonucleotide
tactgtcggcattgtctgcgggctacggaa

SEQ ID NO: 282581 - DNA, 30 bp, Artificial Sequence
  Synthetic oligonucleotide
agcctcgtgaggttgccttcgcgtacggaa

SEQ ID NO: 282582 - DNA, 30 bp, Artificial Sequence
  Synthetic oligonucleotide
gtcccatccggtgagaaagcataaccggaa

SEQ ID NO: 282583 - DNA, 31 bp, Artificial Sequence
  Synthetic oligonucleotide
aactggttgagcttcccatggagtcccggaa

SEQ ID NO: 282584 - DNA, 30 bp, Artificial Sequence
  Synthetic oligonucleotide
taactagaacgcgtagtccagtagccggaa

SEQ ID NO: 282585 - DNA, 30 bp, Artificial Sequence
  Synthetic oligonucleotide
tgaagttagaggccctccctggcgccggaa

SEQ ID NO: 282586 - DNA, 30 bp, Artificial Sequence
  Synthetic oligonucleotide
ggattataacacatagtccgggtgccggaa

SEQ ID NO: 282587 - DNA, 30 bp, Artificial Sequence
  Synthetic oligonucleotide
ccatggtcagacatctccggacgtccggaa

SEQ ID NO: 282588 - DNA, 30 bp, Artificial Sequence
  Synthetic oligonucleotide
cttctataacgattaacataccgagcggaa

SEQ ID NO: 282589 - DNA, 30 bp, Artificial Sequence
  Synthetic oligonucleotide
ttgataggaattcagggaaggatagcggaa

SEQ ID NO: 282590 - DNA, 30 bp, Artificial Sequence
  Synthetic oligonucleotide
gtgaaagcgcggatgtagcttttagcggaa

SEQ ID NO: 282591 - DNA, 30 bp, Artificial Sequence
  Synthetic oligonucleotide
ataacgcttgaacaatgcgctttcgcggaa

SEQ ID NO: 282592 - DNA, 30 bp, Artificial Sequence
  Synthetic oligonucleotide
ggacgagacgcactgaattaaatggcggaa

SEQ ID NO: 282593 - DNA, 30 bp, Artificial Sequence
  Synthetic oligonucleotide
gacgcctgacataagcaagtattggcggaa

SEQ ID NO: 282594 - DNA, 30 bp, Artificial Sequence
  Synthetic oligonucleotide
caacaaagttcccgttctagacctgcggaa

SEQ ID NO: 282595 - DNA, 30 bp, Artificial Sequence
  Synthetic oligonucleotide
atccccaaccattgagcatcaagtgcggaa

SEQ ID NO: 282596 - DNA, 30 bp, Artificial Sequence
  Synthetic oligonucleotide
cgcggcttgatattaattagtattgcggaa

SEQ ID NO: 282597 - DNA, 30 bp, Artificial Sequence
  Synthetic oligonucleotide
aagcgggagatagcacttgttgtatcggaa

SEQ ID NO: 282598 - DNA, 30 bp, Artificial Sequence
  Synthetic oligonucleotide
aggcccatttggggcttttgtccctcggaa

SEQ ID NO: 282599 - DNA, 30 bp, Artificial Sequence
  Synthetic oligonucleotide
aggtaggcgtcacatcgctctgtctcggaa

SEQ ID NO: 282600 - DNA, 30 bp, Artificial Sequence
  Synthetic oligonucleotide
tttgcaagtcttctatattccaagtcggaa

SEQ ID NO: 282601 - DNA, 30 bp, Artificial Sequence
  Synthetic oligonucleotide
acagcttaataccttcagtataagtcggaa

SEQ ID NO: 282602 - DNA, 30 bp, Artificial Sequence
  Synthetic oligonucleotide
ctagttcactaaaattgtgctgggtcggaa

SEQ ID NO: 282603 - DNA, 30 bp, Artificial Sequence
  Synthetic oligonucleotide
gggacgagttatcaaatttctgtgtcggaa

SEQ ID NO: 282604 - DNA, 30 bp, Artificial Sequence
  Synthetic oligonucleotide
tggcaactgtcgccgaattgtcattcggaa

SEQ ID NO: 282605 - DNA, 30 bp, Artificial Sequence
  Synthetic oligonucleotide
cgaaaggctccgcgtgtcttaatttcggaa

SEQ ID NO: 282606 - DNA, 30 bp, Artificial Sequence
  Synthetic oligonucleotide
atggttattaagctttgaaaatgcagggaa

SEQ ID NO: 282607 - DNA, 30 bp, Artificial Sequence
  Synthetic oligonucleotide
gaagatcttacggtgtgattgtgcagggaa

SEQ ID NO: 282608 - DNA, 30 bp, Artificial Sequence
  Synthetic oligonucleotide
gcactcattacacctgtctaaatcagggaa

SEQ ID NO: 282609 - DNA, 30 bp, Artificial Sequence
  Synthetic oligonucleotide
tttgttgtgttcgtgatagcgctcagggaa

SEQ ID NO: 282610 - DNA, 30 bp, Artificial Sequence
  Synthetic oligonucleotide
tgggagtcgttgcgggtctcgttcagggaa

SEQ ID NO: 282611 - DNA, 30 bp, Artificial Sequence
  Synthetic oligonucleotide
aaggcgaagatatgactaccttatagggaa

SEQ ID NO: 282612 - DNA, 30 bp, Artificial Sequence
  Synthetic oligonucleotide
cgatttgaaccataagatacgacacgggaa

SEQ ID NO: 282613 - DNA, 30 bp, Artificial Sequence
  Synthetic oligonucleotide
gcacctcgcgagtgctgtgatcaccgggaa

SEQ ID NO: 282614 - DNA, 30 bp, Artificial Sequence
  Synthetic oligonucleotide
cacgcaccttcgggtgaccttcaccgggaa

SEQ ID NO: 282615 - DNA, 30 bp, Artificial Sequence
  Synthetic oligonucleotide
cggacgtggatttgacgaagagaccgggaa

SEQ ID NO: 282616 - DNA, 30 bp, Artificial Sequence
  Synthetic oligonucleotide
aaaaaaatgccaggttaccaggaccgggaa

SEQ ID NO: 282617 - DNA, 30 bp, Artificial Sequence
  Synthetic oligonucleotide
agaccggtcgcattgcgctcttcccgggaa

SEQ ID NO: 282618 - DNA, 30 bp, Artificial Sequence
  Synthetic oligonucleotide
atgcattcagtcagtgggaataggcgggaa

SEQ ID NO: 282619 - DNA, 30 bp, Artificial Sequence
  Synthetic oligonucleotide
ttataacagaaggacatccctgccggggaa

SEQ ID NO: 282620 - DNA, 30 bp, Artificial Sequence
  Synthetic oligonucleotide
gagtgtacagggaaaaatattcatggggaa

SEQ ID NO: 282621 - DNA, 30 bp, Artificial Sequence
  Synthetic oligonucleotide
aggagttgaagctaacttatcgttggggaa

SEQ ID NO: 282622 - DNA, 30 bp, Artificial Sequence
  Synthetic oligonucleotide
ttggaccatctaaaggcccatgttggggaa

SEQ ID NO: 282623 - DNA, 30 bp, Artificial Sequence
  Synthetic oligonucleotide
aaggatatacccataactccggaatgggaa

SEQ ID NO: 282624 - DNA, 30 bp, Artificial Sequence
  Synthetic oligonucleotide
aggtattagtggacaaggccggactgggaa

SEQ ID NO: 282625 - DNA, 30 bp, Artificial Sequence
  Synthetic oligonucleotide
agccgggacagtatgacaggcacctgggaa

SEQ ID NO: 282626 - DNA, 30 bp, Artificial Sequence
  Synthetic oligonucleotide
gtatagactcgcgatcgaattgcctgggaa

SEQ ID NO: 282627 - DNA, 30 bp, Artificial Sequence
  Synthetic oligonucleotide
cattccccacagctcagagtgttctgggaa

SEQ ID NO: 282628 - DNA, 30 bp, Artificial Sequence
  Synthetic oligonucleotide
gcatcttaattttccgcgatagcgtgggaa

SEQ ID NO: 282629 - DNA, 30 bp, Artificial Sequence
  Synthetic oligonucleotide
gaggagggtgtctccaggccatgttgggaa

SEQ ID NO: 282630 - DNA, 29 bp, Artificial Sequence
  Synthetic oligonucleotide
ggagtctgggattcagtgtccaaatggaa

SEQ ID NO: 282631 - DNA, 30 bp, Artificial Sequence
  Synthetic oligonucleotide
gtaaagcggacaccccgcgcgataatggaa

SEQ ID NO: 282632 - DNA, 30 bp, Artificial Sequence
  Synthetic oligonucleotide
cgcttatgcaacgaggctccatacatggaa

SEQ ID NO: 282633 - DNA, 30 bp, Artificial Sequence
  Synthetic oligonucleotide
agtctggatttgagagtagtctgcatggaa

SEQ ID NO: 282634 - DNA, 30 bp, Artificial Sequence
  Synthetic oligonucleotide
tgataatatttgaatctagatgtcatggaa

SEQ ID NO: 282635 - DNA, 30 bp, Artificial Sequence
  Synthetic oligonucleotide
ttgtgacatcacgtatttcgcaggatggaa

SEQ ID NO: 282636 - DNA, 30 bp, Artificial Sequence
  Synthetic oligonucleotide
gtctatccagaaaggttatatgggatggaa

SEQ ID NO: 282637 - DNA, 30 bp, Artificial Sequence
  Synthetic oligonucleotide
taaggattacagtattagtattggatggaa

SEQ ID NO: 282638 - DNA, 30 bp, Artificial Sequence
  Synthetic oligonucleotide
agaggttcagtgatctgcgggtatatggaa

SEQ ID NO: 282639 - DNA, 30 bp, Artificial Sequence
  Synthetic oligonucleotide
aagaatcctttcgatcaccaacctatggaa

SEQ ID NO: 282640 - DNA, 30 bp, Artificial Sequence
  Synthetic oligonucleotide
aggaaaacttccgagcgcagccgtatggaa

SEQ ID NO: 282641 - DNA, 30 bp, Artificial Sequence
  Synthetic oligonucleotide
cagcgtctcattctgactcgcattatggaa

SEQ ID NO: 282642 - DNA, 30 bp, Artificial Sequence
  Synthetic oligonucleotide
ctgttaagaaatttcacgtgtcttatggaa

SEQ ID NO: 282643 - DNA, 30 bp, Artificial Sequence
  Synthetic oligonucleotide
gggtcaagacggcagatatgccaactggaa

SEQ ID NO: 282644 - DNA, 30 bp, Artificial Sequence
  Synthetic oligonucleotide
ggcgcgggaaagtgagcgagcggactggaa

SEQ ID NO: 282645 - DNA, 30 bp, Artificial Sequence
  Synthetic oligonucleotide
agggtataatagagcttgatgctactggaa

SEQ ID NO: 282646 - DNA, 30 bp, Artificial Sequence
  Synthetic oligonucleotide
atgcagcacctttaggatgggttactggaa

SEQ ID NO: 282647 - DNA, 30 bp, Artificial Sequence
  Synthetic oligonucleotide
agcgccttcagcggaaatgtaaggctggaa

SEQ ID NO: 282648 - DNA, 30 bp, Artificial Sequence
  Synthetic oligonucleotide
tgctttccggcgtcaacgattgatctggaa

SEQ ID NO: 282649 - DNA, 30 bp, Artificial Sequence
  Synthetic oligonucleotide
gaccccgagctaactcatgttggtctggaa

SEQ ID NO: 282650 - DNA, 30 bp, Artificial Sequence
  Synthetic oligonucleotide
tgagtaaacccatgctctagaaaagtggaa

SEQ ID NO: 282651 - DNA, 30 bp, Artificial Sequence
  Synthetic oligonucleotide
gcatttcagagtaacatgactaaagtggaa

SEQ ID NO: 282652 - DNA, 30 bp, Artificial Sequence
  Synthetic oligonucleotide
ctgccacagccaatattttgtcgagtggaa

SEQ ID NO: 282653 - DNA, 30 bp, Artificial Sequence
  Synthetic oligonucleotide
cgaatgtgtacgaatccagcatccgtggaa

SEQ ID NO: 282654 - DNA, 30 bp, Artificial Sequence
  Synthetic oligonucleotide
caagagatagggtacggtttttaggtggaa

SEQ ID NO: 282655 - DNA, 30 bp, Artificial Sequence
  Synthetic oligonucleotide
actaagacgtaaggtgcgcgcggggtggaa

SEQ ID NO: 282656 - DNA, 30 bp, Artificial Sequence
  Synthetic oligonucleotide
agggctttgttgattactggcagtgtggaa

SEQ ID NO: 282657 - DNA, 30 bp, Artificial Sequence
  Synthetic oligonucleotide
agcgtcgttttgaggcgtcaaaaattggaa

SEQ ID NO: 282658 - DNA, 30 bp, Artificial Sequence
  Synthetic oligonucleotide
tccgtgtctagagtttgtaccgaattggaa

SEQ ID NO: 282659 - DNA, 30 bp, Artificial Sequence
  Synthetic oligonucleotide
ctatgcaagtggggctcgtctctattggaa

SEQ ID NO: 282660 - DNA, 30 bp, Artificial Sequence
  Synthetic oligonucleotide
ctttgagatttatcacgagacaccttggaa

SEQ ID NO: 282661 - DNA, 30 bp, Artificial Sequence
  Synthetic oligonucleotide
ccggagtgtgcccgagctagagccttggaa

SEQ ID NO: 282662 - DNA, 30 bp, Artificial Sequence
  Synthetic oligonucleotide
tgactaaaaactgcttgggcaaagttggaa

SEQ ID NO: 282663 - DNA, 30 bp, Artificial Sequence
  Synthetic oligonucleotide
gctcaaacttaactgcgacagcagttggaa

SEQ ID NO: 282664 - DNA, 30 bp, Artificial Sequence
  Synthetic oligonucleotide
ttcacggtctgacccgttcgtcagttggaa

SEQ ID NO: 282665 - DNA, 30 bp, Artificial Sequence
  Synthetic oligonucleotide
tccgcctatgtgggaggagcttggttggaa

SEQ ID NO: 282666 - DNA, 30 bp, Artificial Sequence
  Synthetic oligonucleotide
ttatgtttggttaaggagcgagtgttggaa

SEQ ID NO: 282667 - DNA, 30 bp, Artificial Sequence
  Synthetic oligonucleotide
actccagggtgcttaacaacgcatttggaa

SEQ ID NO: 282668 - DNA, 30 bp, Artificial Sequence
  Synthetic oligonucleotide
gatgtgggctgagcgcgactatgtttggaa

SEQ ID NO: 282669 - DNA, 30 bp, Artificial Sequence
  Synthetic oligonucleotide
tttactaacctaggtcctttagcaaatgaa

SEQ ID NO: 282670 - DNA, 29 bp, Artificial Sequence
  Synthetic oligonucleotide
ggctcattatttatgtgaaacggaatgaa

SEQ ID NO: 282671 - DNA, 30 bp, Artificial Sequence
  Synthetic oligonucleotide
aagtgtgaagctgttgatcaaaataatgaa

SEQ ID NO: 282672 - DNA, 30 bp, Artificial Sequence
  Synthetic oligonucleotide
ttacctaagcgaattaggaattttaatgaa

SEQ ID NO: 282673 - DNA, 30 bp, Artificial Sequence
  Synthetic oligonucleotide
caacacttgatagttccttgaaaccatgaa

SEQ ID NO: 282674 - DNA, 30 bp, Artificial Sequence
  Synthetic oligonucleotide
ttggctgttcttataaacaacctgcatgaa

SEQ ID NO: 282675 - DNA, 30 bp, Artificial Sequence
  Synthetic oligonucleotide
tccgatataaggttcagtaacgtgcatgaa

SEQ ID NO: 282676 - DNA, 30 bp, Artificial Sequence
  Synthetic oligonucleotide
ccgaatagccttccgacgaggttgcatgaa

SEQ ID NO: 282677 - DNA, 30 bp, Artificial Sequence
  Synthetic oligonucleotide
tgccaaagataaataaggccttatcatgaa

SEQ ID NO: 282678 - DNA, 30 bp, Artificial Sequence
  Synthetic oligonucleotide
tctcgtactagttgtacctagacagatgaa

SEQ ID NO: 282679 - DNA, 30 bp, Artificial Sequence
  Synthetic oligonucleotide
ttctatgctgatcatactgggcgagatgaa

SEQ ID NO: 282680 - DNA, 30 bp, Artificial Sequence
  Synthetic oligonucleotide
tagtgttctgcccgtgagttgggagatgaa

SEQ ID NO: 282681 - DNA, 30 bp, Artificial Sequence
  Synthetic oligonucleotide
caaactcacaagctcagttttttagatgaa

SEQ ID NO: 282682 - DNA, 30 bp, Artificial Sequence
  Synthetic oligonucleotide
aagaaccctgtgttacaacttcaggatgaa

SEQ ID NO: 282683 - DNA, 30 bp, Artificial Sequence
  Synthetic oligonucleotide
aacatgatagagcacatgcgcttggatgaa

SEQ ID NO: 282684 - DNA, 30 bp, Artificial Sequence
  Synthetic oligonucleotide
accactgccagtttgttcggcattgatgaa

SEQ ID NO: 282685 - DNA, 30 bp, Artificial Sequence
  Synthetic oligonucleotide
ggattgtcaagaccgtagtgcgttgatgaa

SEQ ID NO: 282686 - DNA, 30 bp, Artificial Sequence
  Synthetic oligonucleotide
acaagtttaatcgcattcgaggaatatgaa

SEQ ID NO: 282687 - DNA, 30 bp, Artificial Sequence
  Synthetic oligonucleotide
ttattgaggaagtagccacgggactatgaa

SEQ ID NO: 282688 - DNA, 30 bp, Artificial Sequence
  Synthetic oligonucleotide
tccagacgctcacgtaaagccatctatgaa

SEQ ID NO: 282689 - DNA, 30 bp, Artificial Sequence
  Synthetic oligonucleotide
tatatccatttcttgcgtgttacgtatgaa

SEQ ID NO: 282690 - DNA, 30 bp, Artificial Sequence
  Synthetic oligonucleotide
acctaactacgaaatcacaacgcgtatgaa

SEQ ID NO: 282691 - DNA, 30 bp, Artificial Sequence
  Synthetic oligonucleotide
tgtcgctggtaagtctacggagggtatgaa

SEQ ID NO: 282692 - DNA, 30 bp, Artificial Sequence
  Synthetic oligonucleotide
gtgggttgtaggccgtaaaccctgtatgaa

SEQ ID NO: 282693 - DNA, 30 bp, Artificial Sequence
  Synthetic oligonucleotide
gttgtgcccgttctgtcgatctattatgaa

SEQ ID NO: 282694 - DNA, 30 bp, Artificial Sequence
  Synthetic oligonucleotide
gcgtatgtattttaggggctaagaactgaa

SEQ ID NO: 282695 - DNA, 30 bp, Artificial Sequence
  Synthetic oligonucleotide
ccagcagcgaggctaagaccctgcactgaa

SEQ ID NO: 282696 - DNA, 30 bp, Artificial Sequence
  Synthetic oligonucleotide
gaatactatgctcacaactgcaagactgaa

SEQ ID NO: 282697 - DNA, 30 bp, Artificial Sequence
  Synthetic oligonucleotide
agctgcatcgcttaatatagtcagactgaa

SEQ ID NO: 282698 - DNA, 30 bp, Artificial Sequence
  Synthetic oligonucleotide
tcaatcgtggaggaccataactatactgaa

SEQ ID NO: 282699 - DNA, 30 bp, Artificial Sequence
  Synthetic oligonucleotide
gaaccagcgcaagagcgttattgtactgaa

SEQ ID NO: 282700 - DNA, 30 bp, Artificial Sequence
  Synthetic oligonucleotide
agtagcggtcagactcgacagcaacctgaa

SEQ ID NO: 282701 - DNA, 30 bp, Artificial Sequence
  Synthetic oligonucleotide
gagcgacgttccgggtgccgaatgcctgaa

SEQ ID NO: 282702 - DNA, 30 bp, Artificial Sequence
  Synthetic oligonucleotide
taagctctgatggtcaactccgtgcctgaa

SEQ ID NO: 282703 - DNA, 30 bp, Artificial Sequence
  Synthetic oligonucleotide
ttgtaagagttgtcgtcctgagctcctgaa

SEQ ID NO: 282704 - DNA, 30 bp, Artificial Sequence
  Synthetic oligonucleotide
atctcgagactagcaagcgtaggtcctgaa

SEQ ID NO: 282705 - DNA, 30 bp, Artificial Sequence
  Synthetic oligonucleotide
cgtgccctgtctctgagttgaaaagctgaa

SEQ ID NO: 282706 - DNA, 30 bp, Artificial Sequence
  Synthetic oligonucleotide
agcgtgatggaacactacgaggcagctgaa

SEQ ID NO: 282707 - DNA, 30 bp, Artificial Sequence
  Synthetic oligonucleotide
taagggagttcaatcgcagcaggagctgaa

SEQ ID NO: 282708 - DNA, 30 bp, Artificial Sequence
  Synthetic oligonucleotide
acgtttatattaatgagataaatagctgaa

SEQ ID NO: 282709 - DNA, 30 bp, Artificial Sequence
  Synthetic oligonucleotide
aattctgcgttcccaggggagtgggctgaa

SEQ ID NO: 282710 - DNA, 30 bp, Artificial Sequence
  Synthetic oligonucleotide
gtgagaattagaatatgtagagctgctgaa

SEQ ID NO: 282711 - DNA, 30 bp, Artificial Sequence
  Synthetic oligonucleotide
tcctaggaccgtttgttcttccgctctgaa

SEQ ID NO: 282712 - DNA, 30 bp, Artificial Sequence
  Synthetic oligonucleotide
ctctagtatttctgcggataatgctctgaa

SEQ ID NO: 282713 - DNA, 30 bp, Artificial Sequence
  Synthetic oligonucleotide
cgcatactgcaccatcacatgaggtctgaa

SEQ ID NO: 282714 - DNA, 30 bp, Artificial Sequence
  Synthetic oligonucleotide
gctacatgagtctgcacgctactgtctgaa

SEQ ID NO: 282715 - DNA, 30 bp, Artificial Sequence
  Synthetic oligonucleotide
aggtctgattcacccagttatggcagtgaa

SEQ ID NO: 282716 - DNA, 30 bp, Artificial Sequence
  Synthetic oligonucleotide
ggcagctaataacgccgtatgtcgagtgaa

SEQ ID NO: 282717 - DNA, 30 bp, Artificial Sequence
  Synthetic oligonucleotide
gcttcttgtaaaacgttattaaatagtgaa

SEQ ID NO: 282718 - DNA, 30 bp, Artificial Sequence
  Synthetic oligonucleotide
gcgtgatgaggggagcatcatgttagtgaa

SEQ ID NO: 282719 - DNA, 30 bp, Artificial Sequence
  Synthetic oligonucleotide
tggaacctagtgggaggaccgacacgtgaa

SEQ ID NO: 282720 - DNA, 30 bp, Artificial Sequence
  Synthetic oligonucleotide
gagtagaaacagctggaatggtcacgtgaa

SEQ ID NO: 282721 - DNA, 30 bp, Artificial Sequence
  Synthetic oligonucleotide
aaaacaaaagggcggtagattatccgtgaa

SEQ ID NO: 282722 - DNA, 30 bp, Artificial Sequence
  Synthetic oligonucleotide
gaggggttcatcaaaaatcccgtgcgtgaa

SEQ ID NO: 282723 - DNA, 30 bp, Artificial Sequence
  Synthetic oligonucleotide
tgggaagcacgatcccgtcgaagtcgtgaa

SEQ ID NO: 282724 - DNA, 30 bp, Artificial Sequence
  Synthetic oligonucleotide
aaagtctgcatagaatcagctcttcgtgaa

SEQ ID NO: 282725 - DNA, 30 bp, Artificial Sequence
  Synthetic oligonucleotide
gtcgagcattcaaacaggctaatcggtgaa

SEQ ID NO: 282726 - DNA, 30 bp, Artificial Sequence
  Synthetic oligonucleotide
agagcacccgacaacagcgacttcggtgaa

SEQ ID NO: 282727 - DNA, 30 bp, Artificial Sequence
  Synthetic oligonucleotide
ctcgaggataggattggatcggagggtgaa

SEQ ID NO: 282728 - DNA, 30 bp, Artificial Sequence
  Synthetic oligonucleotide
aagaaccctatactggtgaatacgggtgaa

SEQ ID NO: 282729 - DNA, 30 bp, Artificial Sequence
  Synthetic oligonucleotide
ttagggcagcactcgctagctccgggtgaa

SEQ ID NO: 282730 - DNA, 30 bp, Artificial Sequence
  Synthetic oligonucleotide
ctaacttggtcaaataatacattgggtgaa

SEQ ID NO: 282731 - DNA, 30 bp, Artificial Sequence
  Synthetic oligonucleotide
tgacggccttcggaacggacctgtggtgaa

SEQ ID NO: 282732 - DNA, 30 bp, Artificial Sequence
  Synthetic oligonucleotide
gttagaggtagttggctactatttggtgaa

SEQ ID NO: 282733 - DNA, 30 bp, Artificial Sequence
  Synthetic oligonucleotide
ttacatagacacgcgcccacgtttggtgaa

SEQ ID NO: 282734 - DNA, 30 bp, Artificial Sequence
  Synthetic oligonucleotide
acacttaatattctagaattattatgtgaa

SEQ ID NO: 282735 - DNA, 30 bp, Artificial Sequence
  Synthetic oligonucleotide
ggtaagtaaacaccgggtacccgctgtgaa

SEQ ID NO: 282736 - DNA, 30 bp, Artificial Sequence
  Synthetic oligonucleotide
tgctgaaatgatgatgttgaggagtgtgaa

SEQ ID NO: 282737 - DNA, 30 bp, Artificial Sequence
  Synthetic oligonucleotide
gaattcgcactgtcctttacgctgtgtgaa

SEQ ID NO: 282738 - DNA, 30 bp, Artificial Sequence
  Synthetic oligonucleotide
tctgcagcgcgctggaagtagagttgtgaa

SEQ ID NO: 282739 - DNA, 30 bp, Artificial Sequence
  Synthetic oligonucleotide
atataggtgattggggtaattgaaattgaa

SEQ ID NO: 282740 - DNA, 30 bp, Artificial Sequence
  Synthetic oligonucleotide
ttcggacgttaagcgagaaagtcaattgaa

SEQ ID NO: 282741 - DNA, 30 bp, Artificial Sequence
  Synthetic oligonucleotide
aaataagtctagactccattttcaattgaa

SEQ ID NO: 282742 - DNA, 30 bp, Artificial Sequence
  Synthetic oligonucleotide
atcagtacagtgatctgaaactgaattgaa

SEQ ID NO: 282743 - DNA, 30 bp, Artificial Sequence
  Synthetic oligonucleotide
tacactcggacggcccccctgtgaattgaa

SEQ ID NO: 282744 - DNA, 30 bp, Artificial Sequence
  Synthetic oligonucleotide
tggatactttagggatcgtcggacattgaa

SEQ ID NO: 282745 - DNA, 30 bp, Artificial Sequence
  Synthetic oligonucleotide
cggctagatggtatggtgtatggcattgaa

SEQ ID NO: 282746 - DNA, 30 bp, Artificial Sequence
  Synthetic oligonucleotide
gcggcaggggatagggtctttcagattgaa

SEQ ID NO: 282747 - DNA, 30 bp, Artificial Sequence
  Synthetic oligonucleotide
aagaaagttagactacacaaatagattgaa

SEQ ID NO: 282748 - DNA, 30 bp, Artificial Sequence
  Synthetic oligonucleotide
caactactggagtggtgtggtccgattgaa

SEQ ID NO: 282749 - DNA, 30 bp, Artificial Sequence
  Synthetic oligonucleotide
gggcttagggcttctggcagtattattgaa

SEQ ID NO: 282750 - DNA, 30 bp, Artificial Sequence
  Synthetic oligonucleotide
agctaattagtcagtagaccctgacttgaa

SEQ ID NO: 282751 - DNA, 30 bp, Artificial Sequence
  Synthetic oligonucleotide
gatgatccttttaagtgtagacaccttgaa

SEQ ID NO: 282752 - DNA, 30 bp, Artificial Sequence
  Synthetic oligonucleotide
agcggcaatattgatacctactgccttgaa

SEQ ID NO: 282753 - DNA, 30 bp, Artificial Sequence
  Synthetic oligonucleotide
tgtatgggtgcctttaggtagactcttgaa

SEQ ID NO: 282754 - DNA, 30 bp, Artificial Sequence
  Synthetic oligonucleotide
ggctattcaacagtcaatgcctgtcttgaa

SEQ ID NO: 282755 - DNA, 30 bp, Artificial Sequence
  Synthetic oligonucleotide
cgtgcgcccgacttaaggctttgtcttgaa

SEQ ID NO: 282756 - DNA, 30 bp, Artificial Sequence
  Synthetic oligonucleotide
tgacaaatatggagtccgcattgagttgaa

SEQ ID NO: 282757 - DNA, 30 bp, Artificial Sequence
  Synthetic oligonucleotide
atactgctagaagctcgttggatcgttgaa

SEQ ID NO: 282758 - DNA, 30 bp, Artificial Sequence
  Synthetic oligonucleotide
aaacagaaatacactctgccctaggttgaa

SEQ ID NO: 282759 - DNA, 30 bp, Artificial Sequence
  Synthetic oligonucleotide
gcccgttcaagggttcttgtgggtgttgaa

SEQ ID NO: 282760 - DNA, 30 bp, Artificial Sequence
  Synthetic oligonucleotide
aacgaaaccgtcaaaaggttatttgttgaa

SEQ ID NO: 282761 - DNA, 30 bp, Artificial Sequence
  Synthetic oligonucleotide
gaaggttacaattaggtgtcgaaatttgaa

SEQ ID NO: 282762 - DNA, 30 bp, Artificial Sequence
  Synthetic oligonucleotide
gaaggatatataaccatccacccatttgaa

SEQ ID NO: 282763 - DNA, 30 bp, Artificial Sequence
  Synthetic oligonucleotide
acccctacggtagaaaaggccagatttgaa

SEQ ID NO: 282764 - DNA, 30 bp, Artificial Sequence
  Synthetic oligonucleotide
tacttacacaaaaagcatcgcgcctttgaa

SEQ ID NO: 282765 - DNA, 30 bp, Artificial Sequence
  Synthetic oligonucleotide
tcgtgccgagagttttagatcctctttgaa

SEQ ID NO: 282766 - DNA, 30 bp, Artificial Sequence
  Synthetic oligonucleotide
gtatgaaacacaacattagtcgggtttgaa

SEQ ID NO: 282767 - DNA, 30 bp, Artificial Sequence
  Synthetic oligonucleotide
tcaccccacactgtgggcagcatgtttgaa

SEQ ID NO: 282768 - DNA, 30 bp, Artificial Sequence
  Synthetic oligonucleotide
gtaatcagcgcggaaaaacggggttttgaa

SEQ ID NO: 282769 - DNA, 30 bp, Artificial Sequence
  Synthetic oligonucleotide
aaaggggtggcctgtggtgatgtttttgaa

SEQ ID NO: 282770 - DNA, 30 bp, Artificial Sequence
  Synthetic oligonucleotide
catattattcttcgggggcagaaaaaataa

SEQ ID NO: 282771 - DNA, 30 bp, Artificial Sequence
  Synthetic oligonucleotide
ccggttttataacctgaaaagggaaaataa

SEQ ID NO: 282772 - DNA, 30 bp, Artificial Sequence
  Synthetic oligonucleotide
catacatggggcgtcagtagttgaaaataa

SEQ ID NO: 282773 - DNA, 30 bp, Artificial Sequence
  Synthetic oligonucleotide
gtgctgacggagtaaaggtgattcaaataa

SEQ ID NO: 282774 - DNA, 30 bp, Artificial Sequence
  Synthetic oligonucleotide
tgggtttgttaagtgcaaggtttcaaataa

SEQ ID NO: 282775 - DNA, 30 bp, Artificial Sequence
  Synthetic oligonucleotide
gacagtcttaatcgggtctgcgcgaaataa

SEQ ID NO: 282776 - DNA, 30 bp, Artificial Sequence
  Synthetic oligonucleotide
tttaaaggacaattgagactgaataaataa

SEQ ID NO: 282777 - DNA, 30 bp, Artificial Sequence
  Synthetic oligonucleotide
cgagagttaaactcctcttttactaaataa

SEQ ID NO: 282778 - DNA, 30 bp, Artificial Sequence
  Synthetic oligonucleotide
tgctctggcagtgcgcattccattaaataa

SEQ ID NO: 282779 - DNA, 30 bp, Artificial Sequence
  Synthetic oligonucleotide
gccaaggtggccaggttaattgtccaataa

SEQ ID NO: 282780 - DNA, 30 bp, Artificial Sequence
  Synthetic oligonucleotide
gtaataccgcttctgttagtaattcaataa

SEQ ID NO: 282781 - DNA, 30 bp, Artificial Sequence
  Synthetic oligonucleotide
catggttggaggtctgtaagtttagaataa

SEQ ID NO: 282782 - DNA, 30 bp, Artificial Sequence
  Synthetic oligonucleotide
aagtgcacaccaggttcccggggggaataa

SEQ ID NO: 282783 - DNA, 30 bp, Artificial Sequence
  Synthetic oligonucleotide
ttaacagcagagtctcctacgaaataataa

SEQ ID NO: 282784 - DNA, 30 bp, Artificial Sequence
  Synthetic oligonucleotide
cagcgatatgatactgttgcctgataataa

SEQ ID NO: 282785 - DNA, 30 bp, Artificial Sequence
  Synthetic oligonucleotide
attgcgacatagtgatctgcaaagtaataa

SEQ ID NO: 282786 - DNA, 30 bp, Artificial Sequence
  Synthetic oligonucleotide
tgactgatcgcatgcgttccctagtaataa

SEQ ID NO: 282787 - DNA, 30 bp, Artificial Sequence
  Synthetic oligonucleotide
gcaaagccccaaaggctataaacgtaataa

SEQ ID NO: 282788 - DNA, 30 bp, Artificial Sequence
  Synthetic oligonucleotide
atgttgggcaacgtaattcaattgtaataa

SEQ ID NO: 282789 - DNA, 30 bp, Artificial Sequence
  Synthetic oligonucleotide
gcacgtggacagtggagcaagcattaataa

SEQ ID NO: 282790 - DNA, 30 bp, Artificial Sequence
  Synthetic oligonucleotide
agtccccagacttcagtgatcgcttaataa

SEQ ID NO: 282791 - DNA, 30 bp, Artificial Sequence
  Synthetic oligonucleotide
catcgtgggaatgatttccaggtttaataa

SEQ ID NO: 282792 - DNA, 30 bp, Artificial Sequence
  Synthetic oligonucleotide
aatggatctaagacatcgtaataaacataa

SEQ ID NO: 282793 - DNA, 30 bp, Artificial Sequence
  Synthetic oligonucleotide
aacaacttgttcatgaacgccataacataa

SEQ ID NO: 282794 - DNA, 30 bp, Artificial Sequence
  Synthetic oligonucleotide
tatggtggtgtcgcaatcggggacacataa

SEQ ID NO: 282795 - DNA, 30 bp, Artificial Sequence
  Synthetic oligonucleotide
gtagaaacgtcctttaagcttgacacataa

SEQ ID NO: 282796 - DNA, 30 bp, Artificial Sequence
  Synthetic oligonucleotide
tcattacgggtatgtaatacgatcacataa

SEQ ID NO: 282797 - DNA, 30 bp, Artificial Sequence
  Synthetic oligonucleotide
ctgtatgggatactaccaccggtcacataa

SEQ ID NO: 282798 - DNA, 30 bp, Artificial Sequence
  Synthetic oligonucleotide
ttcgttcctggcatcatctcgaggacataa

SEQ ID NO: 282799 - DNA, 30 bp, Artificial Sequence
  Synthetic oligonucleotide
gcattggctaagcgggacaagtggacataa

SEQ ID NO: 282800 - DNA, 30 bp, Artificial Sequence
  Synthetic oligonucleotide
atatccctaactatgacaagtatgacataa

SEQ ID NO: 282801 - DNA, 30 bp, Artificial Sequence
  Synthetic oligonucleotide
cttctagaaccatataccgtcaatccataa

SEQ ID NO: 282802 - DNA, 30 bp, Artificial Sequence
  Synthetic oligonucleotide
tgtctcgctgaactcttgttatgtccataa

SEQ ID NO: 282803 - DNA, 30 bp, Artificial Sequence
  Synthetic oligonucleotide
tgcgtgaggcatgtggttctatccgcataa

SEQ ID NO: 282804 - DNA, 30 bp, Artificial Sequence
  Synthetic oligonucleotide
ctcaaaggtgtgaatacaaggtgcgcataa

SEQ ID NO: 282805 - DNA, 30 bp, Artificial Sequence
  Synthetic oligonucleotide
aaaagaattagacggcgtctggtcgcataa

SEQ ID NO: 282806 - DNA, 30 bp, Artificial Sequence
  Synthetic oligonucleotide
acctggaaagctatccagtactaggcataa

SEQ ID NO: 282807 - DNA, 30 bp, Artificial Sequence
  Synthetic oligonucleotide
gttcgtaattggtcccgcggagcggcataa

SEQ ID NO: 282808 - DNA, 30 bp, Artificial Sequence
  Synthetic oligonucleotide
acatttgccgtaccatgtctactctcataa

SEQ ID NO: 282809 - DNA, 30 bp, Artificial Sequence
  Synthetic oligonucleotide
acatttgacggtttagattccgagtcataa

SEQ ID NO: 282810 - DNA, 30 bp, Artificial Sequence
  Synthetic oligonucleotide
cccttgcaactgctgtttacatcgtcataa

SEQ ID NO: 282811 - DNA, 30 bp, Artificial Sequence
  Synthetic oligonucleotide
cgttatattagcgcggcgcaagtgtcataa

SEQ ID NO: 282812 - DNA, 30 bp, Artificial Sequence
  Synthetic oligonucleotide
ttgtaagcaggctaattgaagttgtcataa

SEQ ID NO: 282813 - DNA, 30 bp, Artificial Sequence
  Synthetic oligonucleotide
aattgcgggcccaaaactgagtcttcataa

SEQ ID NO: 282814 - DNA, 30 bp, Artificial Sequence
  Synthetic oligonucleotide
cttaccctttacgagcgcgatccaagataa

SEQ ID NO: 282815 - DNA, 30 bp, Artificial Sequence
  Synthetic oligonucleotide
agtaatatagtcaaaaggtctggaagataa

SEQ ID NO: 282816 - DNA, 30 bp, Artificial Sequence
  Synthetic oligonucleotide
tggataaagttgctgtttaacaacagataa

SEQ ID NO: 282817 - DNA, 30 bp, Artificial Sequence
  Synthetic oligonucleotide
ccaagttgtgcccgatatcgcaccagataa

SEQ ID NO: 282818 - DNA, 30 bp, Artificial Sequence
  Synthetic oligonucleotide
cgctgggggctatgtctattgaccagataa

SEQ ID NO: 282819 - DNA, 30 bp, Artificial Sequence
  Synthetic oligonucleotide
gacataatatttcggtggttgagcagataa

SEQ ID NO: 282820 - DNA, 30 bp, Artificial Sequence
  Synthetic oligonucleotide
tctgctctgcgatctcacggagtcagataa

SEQ ID NO: 282821 - DNA, 30 bp, Artificial Sequence
  Synthetic oligonucleotide
agtggtcactttatacatcactcgagataa

SEQ ID NO: 282822 - DNA, 30 bp, Artificial Sequence
  Synthetic oligonucleotide
gggaaaagtgtaagtatatgctatagataa

SEQ ID NO: 282823 - DNA, 30 bp, Artificial Sequence
  Synthetic oligonucleotide
acacgcaaattctggtggctgtatagataa

SEQ ID NO: 282824 - DNA, 30 bp, Artificial Sequence
  Synthetic oligonucleotide
ttcaccaggggacttcgatgttgtagataa

SEQ ID NO: 282825 - DNA, 30 bp, Artificial Sequence
  Synthetic oligonucleotide
attcctgatttgcgaaccatcgaacgataa

SEQ ID NO: 282826 - DNA, 30 bp, Artificial Sequence
  Synthetic oligonucleotide
aggatagggaggctaggttaaacccgataa

SEQ ID NO: 282827 - DNA, 30 bp, Artificial Sequence
  Synthetic oligonucleotide
cgctatgcctgcgctattggggtgcgataa

SEQ ID NO: 282828 - DNA, 30 bp, Artificial Sequence
  Synthetic oligonucleotide
gtggtgctatacatacacgagaatcgataa

SEQ ID NO: 282829 - DNA, 30 bp, Artificial Sequence
  Synthetic oligonucleotide
atggtacgggcgcttttacgacctcgataa

SEQ ID NO: 282830 - DNA, 30 bp, Artificial Sequence
  Synthetic oligonucleotide
tatcaggggccttgcaaagatctaggataa

SEQ ID NO: 282831 - DNA, 30 bp, Artificial Sequence
  Synthetic oligonucleotide
agggtgcgttgatgcagcagaagcggataa

SEQ ID NO: 282832 - DNA, 30 bp, Artificial Sequence
  Synthetic oligonucleotide
tccgtcctgctggtgcttgcgatcggataa

SEQ ID NO: 282833 - DNA, 30 bp, Artificial Sequence
  Synthetic oligonucleotide
tccagtgcacttgactactggctcggataa

SEQ ID NO: 282834 - DNA, 30 bp, Artificial Sequence
  Synthetic oligonucleotide
agtatctatgtgcccggggacacgggataa

SEQ ID NO: 282835 - DNA, 30 bp, Artificial Sequence
  Synthetic oligonucleotide
ttgcacactataatagggagttcgggataa

SEQ ID NO: 282836 - DNA, 30 bp, Artificial Sequence
  Synthetic oligonucleotide
ctagtacgcgaggccctaaacaggggataa

SEQ ID NO: 282837 - DNA, 30 bp, Artificial Sequence
  Synthetic oligonucleotide
ttcgttatacgttgtcgcttaaatggataa

SEQ ID NO: 282838 - DNA, 30 bp, Artificial Sequence
  Synthetic oligonucleotide
ataagcgatgtagcaagtggcgatggataa

SEQ ID NO: 282839 - DNA, 30 bp, Artificial Sequence
  Synthetic oligonucleotide
gtagtacgactgagtcggctctatggataa

SEQ ID NO: 282840 - DNA, 30 bp, Artificial Sequence
  Synthetic oligonucleotide
cgcatcagacatgacagttaatttggataa

SEQ ID NO: 282841 - DNA, 30 bp, Artificial Sequence
  Synthetic oligonucleotide
aattaacgagcggccaatagatttggataa

SEQ ID NO: 282842 - DNA, 30 bp, Artificial Sequence
  Synthetic oligonucleotide
tatagatatatttatctcgactttggataa

SEQ ID NO: 282843 - DNA, 30 bp, Artificial Sequence
  Synthetic oligonucleotide
aggaagggcgcttggggatagtaatgataa

SEQ ID NO: 282844 - DNA, 30 bp, Artificial Sequence
  Synthetic oligonucleotide
gtagtacacgtggatgatcatccatgataa

SEQ ID NO: 282845 - DNA, 30 bp, Artificial Sequence
  Synthetic oligonucleotide
cgtatcggttacacggcctgcgactgataa

SEQ ID NO: 282846 - DNA, 30 bp, Artificial Sequence
  Synthetic oligonucleotide
atcgcactagagacgtgcggccgctgataa

SEQ ID NO: 282847 - DNA, 30 bp, Artificial Sequence
  Synthetic oligonucleotide
tctttggtgcaatcaacaggcgtgtgataa

SEQ ID NO: 282848 - DNA, 30 bp, Artificial Sequence
  Synthetic oligonucleotide
tcaaaatgtcgtcatttgtgcttgtgataa

SEQ ID NO: 282849 - DNA, 30 bp, Artificial Sequence
  Synthetic oligonucleotide
ctacgaaaaagtttcggccgagattgataa

SEQ ID NO: 282850 - DNA, 30 bp, Artificial Sequence
  Synthetic oligonucleotide
tcacgtcttttgacctccaatacttgataa

SEQ ID NO: 282851 - DNA, 30 bp, Artificial Sequence
  Synthetic oligonucleotide
tcggcaaaatccgctcatatatcttgataa

SEQ ID NO: 282852 - DNA, 30 bp, Artificial Sequence
  Synthetic oligonucleotide
aaaggtacgggtcctgtgacgcgttgataa

SEQ ID NO: 282853 - DNA, 30 bp, Artificial Sequence
  Synthetic oligonucleotide
cttagcgcgtatggctcatgtgtaatataa

SEQ ID NO: 282854 - DNA, 30 bp, Artificial Sequence
  Synthetic oligonucleotide
gggcggcttatttaactagggcacatataa

SEQ ID NO: 282855 - DNA, 30 bp, Artificial Sequence
  Synthetic oligonucleotide
ttatatcgtaagactcggcttcacatataa

SEQ ID NO: 282856 - DNA, 30 bp, Artificial Sequence
  Synthetic oligonucleotide
cgtcgctgttgttggcattggtacatataa

SEQ ID NO: 282857 - DNA, 30 bp, Artificial Sequence
  Synthetic oligonucleotide
acaaatccagcgcaaatgtatggcatataa

SEQ ID NO: 282858 - DNA, 30 bp, Artificial Sequence
  Synthetic oligonucleotide
gatggcgatgcgacggagtgcatcatataa

SEQ ID NO: 282859 - DNA, 30 bp, Artificial Sequence
  Synthetic oligonucleotide
tgaaattatacggcccactaaaagatataa

SEQ ID NO: 282860 - DNA, 30 bp, Artificial Sequence
  Synthetic oligonucleotide
tgcgggtcgcagcgtcgtaccccgatataa

SEQ ID NO: 282861 - DNA, 30 bp, Artificial Sequence
  Synthetic oligonucleotide
cattgtagctaagctcttcgaatgatataa

SEQ ID NO: 282862 - DNA, 30 bp, Artificial Sequence
  Synthetic oligonucleotide
gtttgcagggtatcagtaacctacctataa

SEQ ID NO: 282863 - DNA, 30 bp, Artificial Sequence
  Synthetic oligonucleotide
tattacccgtgcgctaaacggcgcctataa

SEQ ID NO: 282864 - DNA, 30 bp, Artificial Sequence
  Synthetic oligonucleotide
gttgctcagagtggtcgtacgtggctataa

SEQ ID NO: 282865 - DNA, 30 bp, Artificial Sequence
  Synthetic oligonucleotide
ttggacataaacttggatggcaatctataa

SEQ ID NO: 282866 - DNA, 30 bp, Artificial Sequence
  Synthetic oligonucleotide
atgagtagacccagattccctaatctataa

SEQ ID NO: 282867 - DNA, 30 bp, Artificial Sequence
  Synthetic oligonucleotide
gtagaggaaggttccacctgcgttctataa

SEQ ID NO: 282868 - DNA, 30 bp, Artificial Sequence
  Synthetic oligonucleotide
cactaatggaaacggtgttacccagtataa

SEQ ID NO: 282869 - DNA, 30 bp, Artificial Sequence
  Synthetic oligonucleotide
aaaatatagaaccgccccgtagtagtataa

SEQ ID NO: 282870 - DNA, 30 bp, Artificial Sequence
  Synthetic oligonucleotide
catttcaccattattgtttaatgcgtataa

SEQ ID NO: 282871 - DNA, 30 bp, Artificial Sequence
  Synthetic oligonucleotide
tagcagtggcagtggtatcagagggtataa

SEQ ID NO: 282872 - DNA, 30 bp, Artificial Sequence
  Synthetic oligonucleotide
gctgtcacggaccaaggtcatttggtataa

SEQ ID NO: 282873 - DNA, 30 bp, Artificial Sequence
  Synthetic oligonucleotide
cttgcatgattcgatagcggtgttgtataa

SEQ ID NO: 282874 - DNA, 30 bp, Artificial Sequence
  Synthetic oligonucleotide
gacccaagccgcacctagtataaattataa

SEQ ID NO: 282875 - DNA, 30 bp, Artificial Sequence
  Synthetic oligonucleotide
gcctccagacggtttaactgcggcttataa

SEQ ID NO: 282876 - DNA, 30 bp, Artificial Sequence
  Synthetic oligonucleotide
ggcccgcacctggcaagagcgtgcttataa

SEQ ID NO: 282877 - DNA, 30 bp, Artificial Sequence
  Synthetic oligonucleotide
ggcaatttgatcatggtcaataagttataa

SEQ ID NO: 282878 - DNA, 30 bp, Artificial Sequence
  Synthetic oligonucleotide
ttgggctggagtgaagttaaagcgttataa

SEQ ID NO: 282879 - DNA, 30 bp, Artificial Sequence
  Synthetic oligonucleotide
ttacgactccatgatgtgagggggttataa

SEQ ID NO: 282880 - DNA, 30 bp, Artificial Sequence
  Synthetic oligonucleotide
ctttcattcgcatggtgacccactttataa

SEQ ID NO: 282881 - DNA, 30 bp, Artificial Sequence
  Synthetic oligonucleotide
tagatatctgtggtgagatcttgtttataa

SEQ ID NO: 282882 - DNA, 30 bp, Artificial Sequence
  Synthetic oligonucleotide
gtgcagggataaggacagggttttttataa

SEQ ID NO: 282883 - DNA, 30 bp, Artificial Sequence
  Synthetic oligonucleotide
ggtgtatgctagccttaacatataaactaa

SEQ ID NO: 282884 - DNA, 30 bp, Artificial Sequence
  Synthetic oligonucleotide
agctctagcgataggcgtaaatacaactaa

SEQ ID NO: 282885 - DNA, 30 bp, Artificial Sequence
  Synthetic oligonucleotide
tacgaccttagcggtcatggatccaactaa

SEQ ID NO: 282886 - DNA, 30 bp, Artificial Sequence
  Synthetic oligonucleotide
ggatgtcccattacaaagcaatagaactaa

SEQ ID NO: 282887 - DNA, 30 bp, Artificial Sequence
  Synthetic oligonucleotide
cctactaggcttcgtttaacctagaactaa

SEQ ID NO: 282888 - DNA, 30 bp, Artificial Sequence
  Synthetic oligonucleotide
aagatcgacgttgttgcatctactaactaa

SEQ ID NO: 282889 - DNA, 30 bp, Artificial Sequence
  Synthetic oligonucleotide
gcgaacatagttctaacttttgaacactaa

SEQ ID NO: 282890 - DNA, 30 bp, Artificial Sequence
  Synthetic oligonucleotide
ccgcttacgctcgagattcgttcacactaa

SEQ ID NO: 282891 - DNA, 30 bp, Artificial Sequence
  Synthetic oligonucleotide
aacaacagtcgttgtgaagaccgacactaa

SEQ ID NO: 282892 - DNA, 30 bp, Artificial Sequence
  Synthetic oligonucleotide
gtgtatggctcgagacataaaacccactaa

SEQ ID NO: 282893 - DNA, 30 bp, Artificial Sequence
  Synthetic oligonucleotide
gacgggtcccacctataggcagttcactaa

SEQ ID NO: 282894 - DNA, 30 bp, Artificial Sequence
  Synthetic oligonucleotide
gtgcacaacctgtcaactctttttcactaa

SEQ ID NO: 282895 - DNA, 30 bp, Artificial Sequence
  Synthetic oligonucleotide
ggtgcctcacaaattatccacggagactaa

SEQ ID NO: 282896 - DNA, 30 bp, Artificial Sequence
  Synthetic oligonucleotide
gaacaacacgtgatgatcctttgcgactaa

SEQ ID NO: 282897 - DNA, 30 bp, Artificial Sequence
  Synthetic oligonucleotide
tgcgatgctataacttaaaaggatgactaa

SEQ ID NO: 282898 - DNA, 30 bp, Artificial Sequence
  Synthetic oligonucleotide
tatcgtgtctccaacataccggatgactaa

SEQ ID NO: 282899 - DNA, 30 bp, Artificial Sequence
  Synthetic oligonucleotide
aaagtatttatgagggggctgcctgactaa

SEQ ID NO: 282900 - DNA, 30 bp, Artificial Sequence
  Synthetic oligonucleotide
cagattgggcttcgtaaaattcctgactaa

SEQ ID NO: 282901 - DNA, 30 bp, Artificial Sequence
  Synthetic oligonucleotide
tgagcagcgaattgcaagccagctgactaa

SEQ ID NO: 282902 - DNA, 30 bp, Artificial Sequence
  Synthetic oligonucleotide
acagtgaggctaacccgctgttcatactaa

SEQ ID NO: 282903 - DNA, 30 bp, Artificial Sequence
  Synthetic oligonucleotide
ttagaataaatgaaacacccaaagtactaa

SEQ ID NO: 282904 - DNA, 30 bp, Artificial Sequence
  Synthetic oligonucleotide
tgggggagtctaagatctcaccggtactaa

SEQ ID NO: 282905 - DNA, 30 bp, Artificial Sequence
  Synthetic oligonucleotide
cggtcgcttaaggttaaggaattgtactaa

SEQ ID NO: 282906 - DNA, 30 bp, Artificial Sequence
  Synthetic oligonucleotide
gttgtcgtaatggcccgagtggaaacctaa

SEQ ID NO: 282907 - DNA, 30 bp, Artificial Sequence
  Synthetic oligonucleotide
cggagtactgctgtaaattctttaacctaa

SEQ ID NO: 282908 - DNA, 30 bp, Artificial Sequence
  Synthetic oligonucleotide
acccacccgaattaactttcattcacctaa

SEQ ID NO: 282909 - DNA, 30 bp, Artificial Sequence
  Synthetic oligonucleotide
tcacaaagccatagcccatgacagacctaa

SEQ ID NO: 282910 - DNA, 30 bp, Artificial Sequence
  Synthetic oligonucleotide
ctgggtcatactcacgcaagtgcgacctaa

SEQ ID NO: 282911 - DNA, 30 bp, Artificial Sequence
  Synthetic oligonucleotide
gcgaaagccggacttgcctcttcgacctaa

SEQ ID NO: 282912 - DNA, 30 bp, Artificial Sequence
  Synthetic oligonucleotide
gtgtccctccatacgcaggtgcatacctaa

SEQ ID NO: 282913 - DNA, 30 bp, Artificial Sequence
  Synthetic oligonucleotide
gtgattaggaaataataccaaggtacctaa

SEQ ID NO: 282914 - DNA, 30 bp, Artificial Sequence
  Synthetic oligonucleotide
acgttatgcttcctgttccgagaaccctaa

SEQ ID NO: 282915 - DNA, 30 bp, Artificial Sequence
  Synthetic oligonucleotide
tcggcgtaatgaactctctaatacccctaa

SEQ ID NO: 282916 - DNA, 30 bp, Artificial Sequence
  Synthetic oligonucleotide
ggactagtccccatcagttgacccccctaa

SEQ ID NO: 282917 - DNA, 30 bp, Artificial Sequence
  Synthetic oligonucleotide
cagggaaagtccaaggacagttatccctaa

SEQ ID NO: 282918 - DNA, 30 bp, Artificial Sequence
  Synthetic oligonucleotide
agaccaccaggcggtagatttactccctaa

SEQ ID NO: 282919 - DNA, 30 bp, Artificial Sequence
  Synthetic oligonucleotide
acctgatgaaggtccctaccttaagcctaa

SEQ ID NO: 282920 - DNA, 30 bp, Artificial Sequence
  Synthetic oligonucleotide
ttcacttcccaggcttgatagacagcctaa

SEQ ID NO: 282921 - DNA, 30 bp, Artificial Sequence
  Synthetic oligonucleotide
attcgaagatatatcgcatatttagcctaa

SEQ ID NO: 282922 - DNA, 30 bp, Artificial Sequence
  Synthetic oligonucleotide
tccttgtgcacacgctcaaccgtggcctaa

SEQ ID NO: 282923 - DNA, 30 bp, Artificial Sequence
  Synthetic oligonucleotide
tttcggagcggttgatcatccgtatcctaa

SEQ ID NO: 282924 - DNA, 30 bp, Artificial Sequence
  Synthetic oligonucleotide
agagtatgccgaggtagctgggcctcctaa

SEQ ID NO: 282925 - DNA, 30 bp, Artificial Sequence
  Synthetic oligonucleotide
ttgttgtgttctctttttgtgttttcctaa

SEQ ID NO: 282926 - DNA, 30 bp, Artificial Sequence
  Synthetic oligonucleotide
tacatgaaaccggcaaagggacccagctaa

SEQ ID NO: 282927 - DNA, 30 bp, Artificial Sequence
  Synthetic oligonucleotide
ctggccaatccctgatgaaatcccagctaa

SEQ ID NO: 282928 - DNA, 30 bp, Artificial Sequence
  Synthetic oligonucleotide
cccgtaggactgaatgagcaattcagctaa

SEQ ID NO: 282929 - DNA, 30 bp, Artificial Sequence
  Synthetic oligonucleotide
ctgtgccgtttccttagagagttgagctaa

SEQ ID NO: 282930 - DNA, 30 bp, Artificial Sequence
  Synthetic oligonucleotide
cgctctgtgttggataaagggtctagctaa

SEQ ID NO: 282931 - DNA, 30 bp, Artificial Sequence
  Synthetic oligonucleotide
agagctaggatgctacacggtggacgctaa

SEQ ID NO: 282932 - DNA, 30 bp, Artificial Sequence
  Synthetic oligonucleotide
gggaaatcattgtcgtatacctcccgctaa

SEQ ID NO: 282933 - DNA, 30 bp, Artificial Sequence
  Synthetic oligonucleotide
aactagcccgtgatattacggctccgctaa

SEQ ID NO: 282934 - DNA, 30 bp, Artificial Sequence
  Synthetic oligonucleotide
tgatcggcgcgattgataccaacgcgctaa

SEQ ID NO: 282935 - DNA, 30 bp, Artificial Sequence
  Synthetic oligonucleotide
atcttccctaatggcactggagggcgctaa

SEQ ID NO: 282936 - DNA, 30 bp, Artificial Sequence
  Synthetic oligonucleotide
cggcgttacctaatttaaaagtttcgctaa

SEQ ID NO: 282937 - DNA, 30 bp, Artificial Sequence
  Synthetic oligonucleotide
ggcggacgcccgagcagggattttcgctaa

SEQ ID NO: 282938 - DNA, 30 bp, Artificial Sequence
  Synthetic oligonucleotide
attgcacaaatatgttccactcagtgctaa

SEQ ID NO: 282939 - DNA, 30 bp, Artificial Sequence
  Synthetic oligonucleotide
ctgctacacgtaaactaaccccattgctaa

SEQ ID NO: 282940 - DNA, 30 bp, Artificial Sequence
  Synthetic oligonucleotide
agtctactgttacgataaatgcattgctaa

SEQ ID NO: 282941 - DNA, 30 bp, Artificial Sequence
  Synthetic oligonucleotide
ctataccttgacacaggggactattgctaa

SEQ ID NO: 282942 - DNA, 30 bp, Artificial Sequence
  Synthetic oligonucleotide
gcagacaccctggcactgggcagttgctaa

SEQ ID NO: 282943 - DNA, 30 bp, Artificial Sequence
  Synthetic oligonucleotide
tccgtaggagctcaactccgggaaatctaa

SEQ ID NO: 282944 - DNA, 30 bp, Artificial Sequence
  Synthetic oligonucleotide
gactgaagatttcgcattccgtaaatctaa

SEQ ID NO: 282945 - DNA, 30 bp, Artificial Sequence
  Synthetic oligonucleotide
tggacgattgttagcgaaaattaaatctaa

SEQ ID NO: 282946 - DNA, 30 bp, Artificial Sequence
  Synthetic oligonucleotide
cccgatagtgcagatcgattagtcatctaa

SEQ ID NO: 282947 - DNA, 30 bp, Artificial Sequence
  Synthetic oligonucleotide
gttgcgatgcatgaccaaagtgctatctaa

SEQ ID NO: 282948 - DNA, 30 bp, Artificial Sequence
  Synthetic oligonucleotide
cgaacatctatggtagtggtctctatctaa

SEQ ID NO: 282949 - DNA, 30 bp, Artificial Sequence
  Synthetic oligonucleotide
ttgtatagatctgtaactgggtgtatctaa

SEQ ID NO: 282950 - DNA, 30 bp, Artificial Sequence
  Synthetic oligonucleotide
caaagaccgtgaggggcccaaaaactctaa

SEQ ID NO: 282951 - DNA, 30 bp, Artificial Sequence
  Synthetic oligonucleotide
attatgcaacgtcttcgtggagagctctaa

SEQ ID NO: 282952 - DNA, 30 bp, Artificial Sequence
  Synthetic oligonucleotide
ctaaccaattcaatttggtcaccgctctaa

SEQ ID NO: 282953 - DNA, 30 bp, Artificial Sequence
  Synthetic oligonucleotide
tcccgtaggcattgggacatcaggctctaa

SEQ ID NO: 282954 - DNA, 30 bp, Artificial Sequence
  Synthetic oligonucleotide
catcacagcgctgttccagtcatgctctaa

SEQ ID NO: 282955 - DNA, 30 bp, Artificial Sequence
  Synthetic oligonucleotide
tagttagctcaaatttggtaccaagtctaa

SEQ ID NO: 282956 - DNA, 30 bp, Artificial Sequence
  Synthetic oligonucleotide
atactaatattgagggcattcacagtctaa

SEQ ID NO: 282957 - DNA, 30 bp, Artificial Sequence
  Synthetic oligonucleotide
cctgtctctgcccgagagtatatagtctaa

SEQ ID NO: 282958 - DNA, 30 bp, Artificial Sequence
  Synthetic oligonucleotide
tatgtctagaagaacttacaacaggtctaa

SEQ ID NO: 282959 - DNA, 30 bp, Artificial Sequence
  Synthetic oligonucleotide
caacctccgggaaaatgcggggtggtctaa

SEQ ID NO: 282960 - DNA, 30 bp, Artificial Sequence
  Synthetic oligonucleotide
aacaagccagattgtatccggaatgtctaa

SEQ ID NO: 282961 - DNA, 30 bp, Artificial Sequence
  Synthetic oligonucleotide
acataacgacaaaattaataacaattctaa

SEQ ID NO: 282962 - DNA, 30 bp, Artificial Sequence
  Synthetic oligonucleotide
tcgccatattttatccatgactgattctaa

SEQ ID NO: 282963 - DNA, 30 bp, Artificial Sequence
  Synthetic oligonucleotide
ctcaagaacggatacaaaccacgcttctaa

SEQ ID NO: 282964 - DNA, 30 bp, Artificial Sequence
  Synthetic oligonucleotide
catataccgagatgttggactttcttctaa

SEQ ID NO: 282965 - DNA, 30 bp, Artificial Sequence
  Synthetic oligonucleotide
cagttcacgaatcgtgatcgacggttctaa

SEQ ID NO: 282966 - DNA, 30 bp, Artificial Sequence
  Synthetic oligonucleotide
ggtcagcgaggagtatgatacagtttctaa

SEQ ID NO: 282967 - DNA, 30 bp, Artificial Sequence
  Synthetic oligonucleotide
gtgttgggctccggctcaaattgaaagtaa

SEQ ID NO: 282968 - DNA, 30 bp, Artificial Sequence
  Synthetic oligonucleotide
acattaaccgagatcgaagcatccaagtaa

SEQ ID NO: 282969 - DNA, 30 bp, Artificial Sequence
  Synthetic oligonucleotide
cagcgagcgaattctatgctgggcaagtaa

SEQ ID NO: 282970 - DNA, 31 bp, Artificial Sequence
  Synthetic oligonucleotide
ggagcgggtggggctgatgcaaaggaagtaa

SEQ ID NO: 282971 - DNA, 30 bp, Artificial Sequence
  Synthetic oligonucleotide
tcagcatacagcaaatttgcagtgaagtaa

SEQ ID NO: 282972 - DNA, 30 bp, Artificial Sequence
  Synthetic oligonucleotide
ctatggtataggacagggtggttgaagtaa

SEQ ID NO: 282973 - DNA, 30 bp, Artificial Sequence
  Synthetic oligonucleotide
agattgtatttggaggagaaaggtaagtaa

SEQ ID NO: 282974 - DNA, 30 bp, Artificial Sequence
  Synthetic oligonucleotide
ttgcgaatgcaatgcccggaccgacagtaa

SEQ ID NO: 282975 - DNA, 30 bp, Artificial Sequence
  Synthetic oligonucleotide
tgggaaagcgcttctacgagcggacagtaa

SEQ ID NO: 282976 - DNA, 30 bp, Artificial Sequence
  Synthetic oligonucleotide
ggcatacaactaaatattttgcggcagtaa

SEQ ID NO: 282977 - DNA, 30 bp, Artificial Sequence
  Synthetic oligonucleotide
tggcaatgtaggttaaataatcgagagtaa

SEQ ID NO: 282978 - DNA, 30 bp, Artificial Sequence
  Synthetic oligonucleotide
tgacttggtttagagcatcgcttagagtaa

SEQ ID NO: 282979 - DNA, 30 bp, Artificial Sequence
  Synthetic oligonucleotide
tagagggccgtcttaagtacggacgagtaa

SEQ ID NO: 282980 - DNA, 30 bp, Artificial Sequence
  Synthetic oligonucleotide
gactcatgaggtcacaccattgatgagtaa

SEQ ID NO: 282981 - DNA, 30 bp, Artificial Sequence
  Synthetic oligonucleotide
gtgagatgctgcctagtttcatatgagtaa

SEQ ID NO: 282982 - DNA, 30 bp, Artificial Sequence
  Synthetic oligonucleotide
cgcgccccaaactccggtcgtagtgagtaa

SEQ ID NO: 282983 - DNA, 30 bp, Artificial Sequence
  Synthetic oligonucleotide
agagagaaccggctcttcacaattgagtaa

SEQ ID NO: 282984 - DNA, 30 bp, Artificial Sequence
  Synthetic oligonucleotide
tggttatgaatccctacccaataatagtaa

SEQ ID NO: 282985 - DNA, 30 bp, Artificial Sequence
  Synthetic oligonucleotide
cttacaagtatcgggccagtaggatagtaa

SEQ ID NO: 282986 - DNA, 30 bp, Artificial Sequence
  Synthetic oligonucleotide
tagcctctagaatagtcactgcgctagtaa

SEQ ID NO: 282987 - DNA, 30 bp, Artificial Sequence
  Synthetic oligonucleotide
gcaaagaccaatattattcgtcgctagtaa

SEQ ID NO: 282988 - DNA, 30 bp, Artificial Sequence
  Synthetic oligonucleotide
tgcactagtcatcgtcgagtggtctagtaa

SEQ ID NO: 282989 - DNA, 30 bp, Artificial Sequence
  Synthetic oligonucleotide
tccgctcgtgtgggaaaggcgcggtagtaa

SEQ ID NO: 282990 - DNA, 30 bp, Artificial Sequence
  Synthetic oligonucleotide
agatacaataggggcgccgtatggtagtaa

SEQ ID NO: 282991 - DNA, 30 bp, Artificial Sequence
  Synthetic oligonucleotide
atcctagtgggaggctgaattgtgtagtaa

SEQ ID NO: 282992 - DNA, 30 bp, Artificial Sequence
  Synthetic oligonucleotide
cacgcagagtggctccagtcaacttagtaa

SEQ ID NO: 282993 - DNA, 30 bp, Artificial Sequence
  Synthetic oligonucleotide
tgcaactccacagtgctcacaccttagtaa

SEQ ID NO: 282994 - DNA, 30 bp, Artificial Sequence
  Synthetic oligonucleotide
acgaactgggcagcggccacagcttagtaa

SEQ ID NO: 282995 - DNA, 30 bp, Artificial Sequence
  Synthetic oligonucleotide
aaagtgcatcaagcccctaagcgttagtaa

SEQ ID NO: 282996 - DNA, 30 bp, Artificial Sequence
  Synthetic oligonucleotide
ccttagcggtttatcaggcttttttagtaa

SEQ ID NO: 282997 - DNA, 30 bp, Artificial Sequence
  Synthetic oligonucleotide
gctacagaaattaagccggccttaacgtaa

SEQ ID NO: 282998 - DNA, 30 bp, Artificial Sequence
  Synthetic oligonucleotide
attcctccgggtgaactggtgaacacgtaa

SEQ ID NO: 282999 - DNA, 30 bp, Artificial Sequence
  Synthetic oligonucleotide
catatgtttggaacaggagctcccacgtaa

SEQ ID NO: 283000 - DNA, 30 bp, Artificial Sequence
  Synthetic oligonucleotide
taacaacgtcagtgttgcagctccacgtaa

SEQ ID NO: 283001 - DNA, 30 bp, Artificial Sequence
  Synthetic oligonucleotide
tatccccgagcggtgtcttaagcgacgtaa

SEQ ID NO: 283002 - DNA, 30 bp, Artificial Sequence
  Synthetic oligonucleotide
gtagcatcaggtggtgcagacaatacgtaa

SEQ ID NO: 283003 - DNA, 30 bp, Artificial Sequence
  Synthetic oligonucleotide
agatctgtataccctgtcgcataaccgtaa

SEQ ID NO: 283004 - DNA, 30 bp, Artificial Sequence
  Synthetic oligonucleotide
gaggtgttctcaatatggagacgaccgtaa

SEQ ID NO: 283005 - DNA, 30 bp, Artificial Sequence
  Synthetic oligonucleotide
cggcgagttattgatcggtgcttaccgtaa

SEQ ID NO: 283006 - DNA, 30 bp, Artificial Sequence
  Synthetic oligonucleotide
cctaaggtattttggacggctgccccgtaa

SEQ ID NO: 283007 - DNA, 30 bp, Artificial Sequence
  Synthetic oligonucleotide
aaacatgaaaaatctatacatatcccgtaa

SEQ ID NO: 283008 - DNA, 30 bp, Artificial Sequence
  Synthetic oligonucleotide
ggtcccacattacgattaccccaagcgtaa

SEQ ID NO: 283009 - DNA, 31 bp, Artificial Sequence
  Synthetic oligonucleotide
cctgggccaggcattattatcttgagcgtaa

SEQ ID NO: 283010 - DNA, 30 bp, Artificial Sequence
  Synthetic oligonucleotide
cacttacgccattatgctctagcggcgtaa

SEQ ID NO: 283011 - DNA, 31 bp, Artificial Sequence
  Synthetic oligonucleotide
tggagctcgcgctgactacacaagggcgtaa

SEQ ID NO: 283012 - DNA, 30 bp, Artificial Sequence
  Synthetic oligonucleotide
gttgtgtagagccttcatggcttggcgtaa

SEQ ID NO: 283013 - DNA, 30 bp, Artificial Sequence
  Synthetic oligonucleotide
gccgagattggctggatcaaaaattcgtaa

SEQ ID NO: 283014 - DNA, 30 bp, Artificial Sequence
  Synthetic oligonucleotide
taaggagggactctaaaagccttttcgtaa

SEQ ID NO: 283015 - DNA, 30 bp, Artificial Sequence
  Synthetic oligonucleotide
cactgtctagagcacgttaactcaaggtaa

SEQ ID NO: 283016 - DNA, 30 bp, Artificial Sequence
  Synthetic oligonucleotide
ttgtcacccatatgctcagtgacgaggtaa

SEQ ID NO: 283017 - DNA, 30 bp, Artificial Sequence
  Synthetic oligonucleotide
gcctccaactccttagtcacaaggaggtaa

SEQ ID NO: 283018 - DNA, 30 bp, Artificial Sequence
  Synthetic oligonucleotide
tgggccgggtagggataaccaaggaggtaa

SEQ ID NO: 283019 - DNA, 30 bp, Artificial Sequence
  Synthetic oligonucleotide
catttgattccctgcggagttatgaggtaa

SEQ ID NO: 283020 - DNA, 30 bp, Artificial Sequence
  Synthetic oligonucleotide
aatagagattgatggccagctttgaggtaa

SEQ ID NO: 283021 - DNA, 30 bp, Artificial Sequence
  Synthetic oligonucleotide
acaatgaagcggttcagattggataggtaa

SEQ ID NO: 283022 - DNA, 30 bp, Artificial Sequence
  Synthetic oligonucleotide
gttagggcacaacgtcctctaagtaggtaa

SEQ ID NO: 283023 - DNA, 30 bp, Artificial Sequence
  Synthetic oligonucleotide
tgtgataacgtccaggcacgtcgtaggtaa

SEQ ID NO: 283024 - DNA, 30 bp, Artificial Sequence
  Synthetic oligonucleotide
tgagtagacttagttgagcggggtaggtaa

SEQ ID NO: 283025 - DNA, 30 bp, Artificial Sequence
  Synthetic oligonucleotide
tagctaagaccggctccgcattcacggtaa

SEQ ID NO: 283026 - DNA, 30 bp, Artificial Sequence
  Synthetic oligonucleotide
ggggctttttaagagcatctcatacggtaa

SEQ ID NO: 283027 - DNA, 30 bp, Artificial Sequence
  Synthetic oligonucleotide
cgtgtcgcgtgaaccggctgtgtgcggtaa

SEQ ID NO: 283028 - DNA, 30 bp, Artificial Sequence
  Synthetic oligonucleotide
gcattgttaccatcgtcgaaacaagggtaa

SEQ ID NO: 283029 - DNA, 30 bp, Artificial Sequence
  Synthetic oligonucleotide
caatagcactgcctgttcgttgaagggtaa

SEQ ID NO: 283030 - DNA, 30 bp, Artificial Sequence
  Synthetic oligonucleotide
ggggaaccgcggccgtcacagggggggtaa

SEQ ID NO: 283031 - DNA, 30 bp, Artificial Sequence
  Synthetic oligonucleotide
ggctgcgtatacaccccccaaaactggtaa

SEQ ID NO: 283032 - DNA, 30 bp, Artificial Sequence
  Synthetic oligonucleotide
tcctcaataactttaagaatttcctggtaa

SEQ ID NO: 283033 - DNA, 30 bp, Artificial Sequence
  Synthetic oligonucleotide
atgtcctcatatgatctaaagctctggtaa

SEQ ID NO: 283034 - DNA, 30 bp, Artificial Sequence
  Synthetic oligonucleotide
tgcttccaagtaaacagatggctctggtaa

SEQ ID NO: 283035 - DNA, 30 bp, Artificial Sequence
  Synthetic oligonucleotide
taatctgacctaatcagaataaagtggtaa

SEQ ID NO: 283036 - DNA, 30 bp, Artificial Sequence
  Synthetic oligonucleotide
atgagatagaaactccatcacaagtggtaa

SEQ ID NO: 283037 - DNA, 30 bp, Artificial Sequence
  Synthetic oligonucleotide
ttcgccttgcgtcacgacggagcgtggtaa

SEQ ID NO: 283038 - DNA, 30 bp, Artificial Sequence
  Synthetic oligonucleotide
gcgttaaggcatactgcatagccaatgtaa

SEQ ID NO: 283039 - DNA, 30 bp, Artificial Sequence
  Synthetic oligonucleotide
aaaactaacttagtcagcttaaacatgtaa

SEQ ID NO: 283040 - DNA, 30 bp, Artificial Sequence
  Synthetic oligonucleotide
caactggtgacaccggacataaccatgtaa

SEQ ID NO: 283041 - DNA, 30 bp, Artificial Sequence
  Synthetic oligonucleotide
cgatggcatcgaggaaaaatcgccatgtaa

SEQ ID NO: 283042 - DNA, 30 bp, Artificial Sequence
  Synthetic oligonucleotide
gccgtttatccgggactagtacgcatgtaa

SEQ ID NO: 283043 - DNA, 30 bp, Artificial Sequence
  Synthetic oligonucleotide
tgagatcacagctttcagaacgtcatgtaa

SEQ ID NO: 283044 - DNA, 30 bp, Artificial Sequence
  Synthetic oligonucleotide
catttgccagtaagtcgtcgtcctatgtaa

SEQ ID NO: 283045 - DNA, 30 bp, Artificial Sequence
  Synthetic oligonucleotide
gtacatggctaattccgcctctttatgtaa

SEQ ID NO: 283046 - DNA, 30 bp, Artificial Sequence
  Synthetic oligonucleotide
gcttgggtacggagccgtggttcactgtaa

SEQ ID NO: 283047 - DNA, 30 bp, Artificial Sequence
  Synthetic oligonucleotide
aacgattcatccgttaaagctagactgtaa

SEQ ID NO: 283048 - DNA, 30 bp, Artificial Sequence
  Synthetic oligonucleotide
acactttgctcaaggttgcatccgctgtaa

SEQ ID NO: 283049 - DNA, 30 bp, Artificial Sequence
  Synthetic oligonucleotide
tccacaaaaacaaatcgagcgcttctgtaa

SEQ ID NO: 283050 - DNA, 30 bp, Artificial Sequence
  Synthetic oligonucleotide
tgtaagaaacgactaagacattcagtgtaa

SEQ ID NO: 283051 - DNA, 30 bp, Artificial Sequence
  Synthetic oligonucleotide
cgagctaccaagtataacacgggagtgtaa

SEQ ID NO: 283052 - DNA, 30 bp, Artificial Sequence
  Synthetic oligonucleotide
ggacaacatggtcattctaatgtcgtgtaa

SEQ ID NO: 283053 - DNA, 30 bp, Artificial Sequence
  Synthetic oligonucleotide
ggcacttggcgcgtaattccccgggtgtaa

SEQ ID NO: 283054 - DNA, 30 bp, Artificial Sequence
  Synthetic oligonucleotide
aaggttgtataatctcgctggattgtgtaa

SEQ ID NO: 283055 - DNA, 30 bp, Artificial Sequence
  Synthetic oligonucleotide
atcgcccttaataaaatgtttcgattgtaa

SEQ ID NO: 283056 - DNA, 30 bp, Artificial Sequence
  Synthetic oligonucleotide
tcaccgaaagttcgatgttgcatattgtaa

SEQ ID NO: 283057 - DNA, 30 bp, Artificial Sequence
  Synthetic oligonucleotide
tggcgttcattcgtttggagtcagttgtaa

SEQ ID NO: 283058 - DNA, 30 bp, Artificial Sequence
  Synthetic oligonucleotide
tgaattatatggtagggtggtgcgttgtaa

SEQ ID NO: 283059 - DNA, 30 bp, Artificial Sequence
  Synthetic oligonucleotide
tggcccttaggcaaagcttcccctttgtaa

SEQ ID NO: 283060 - DNA, 30 bp, Artificial Sequence
  Synthetic oligonucleotide
atcttcaggttgacaatcgtgtgtttgtaa

SEQ ID NO: 283061 - DNA, 31 bp, Artificial Sequence
  Synthetic oligonucleotide
aaggtaaatgctgcgaaaaagtaaaaattaa

SEQ ID NO: 283062 - DNA, 30 bp, Artificial Sequence
  Synthetic oligonucleotide
gctttagaagggagcagttccccaaattaa

SEQ ID NO: 283063 - DNA, 30 bp, Artificial Sequence
  Synthetic oligonucleotide
atcaggaggagaggccaaaaatcaaattaa

SEQ ID NO: 283064 - DNA, 30 bp, Artificial Sequence
  Synthetic oligonucleotide
ccgcataaagccccagtgtgcaccaattaa

SEQ ID NO: 283065 - DNA, 30 bp, Artificial Sequence
  Synthetic oligonucleotide
atgcggtgaagctgccgttaccgcaattaa

SEQ ID NO: 283066 - DNA, 30 bp, Artificial Sequence
  Synthetic oligonucleotide
ggagtagagatggtactgctgggcaattaa

SEQ ID NO: 283067 - DNA, 30 bp, Artificial Sequence
  Synthetic oligonucleotide
cgggtctaaccacctcgcggacataattaa

SEQ ID NO: 283068 - DNA, 30 bp, Artificial Sequence
  Synthetic oligonucleotide
gacgtcataatatgtaatgctcataattaa

SEQ ID NO: 283069 - DNA, 30 bp, Artificial Sequence
  Synthetic oligonucleotide
ggatccgaatagtcggagtaaactaattaa

SEQ ID NO: 283070 - DNA, 30 bp, Artificial Sequence
  Synthetic oligonucleotide
gcggaccttgaatagactcttagtaattaa

SEQ ID NO: 283071 - DNA, 30 bp, Artificial Sequence
  Synthetic oligonucleotide
caattcaaaacgaatatatagtttaattaa

SEQ ID NO: 283072 - DNA, 30 bp, Artificial Sequence
  Synthetic oligonucleotide
ccctacggttatagcggaaatcaacattaa

SEQ ID NO: 283073 - DNA, 30 bp, Artificial Sequence
  Synthetic oligonucleotide
gaatgtatgtgagttcacctccgacattaa

SEQ ID NO: 283074 - DNA, 30 bp, Artificial Sequence
  Synthetic oligonucleotide
tcttattttgctaaatccacaggacattaa

SEQ ID NO: 283075 - DNA, 30 bp, Artificial Sequence
  Synthetic oligonucleotide
actacttgtgtggcctctagaacccattaa

SEQ ID NO: 283076 - DNA, 30 bp, Artificial Sequence
  Synthetic oligonucleotide
cacctcaagataagcagcttagagcattaa

SEQ ID NO: 283077 - DNA, 30 bp, Artificial Sequence
  Synthetic oligonucleotide
ggtagccaatacagccctgtatagcattaa

SEQ ID NO: 283078 - DNA, 30 bp, Artificial Sequence
  Synthetic oligonucleotide
ccgcccgcgaaaataatgcgcagtcattaa

SEQ ID NO: 283079 - DNA, 30 bp, Artificial Sequence
  Synthetic oligonucleotide
ggaactagggaaaggttgacacccgattaa

SEQ ID NO: 283080 - DNA, 30 bp, Artificial Sequence
  Synthetic oligonucleotide
aaagtgctttgtggccaattgggcgattaa

SEQ ID NO: 283081 - DNA, 30 bp, Artificial Sequence
  Synthetic oligonucleotide
gcctcaatgggctctggatgactcgattaa

SEQ ID NO: 283082 - DNA, 30 bp, Artificial Sequence
  Synthetic oligonucleotide
ttggtaaaatgacatccaggagaggattaa

SEQ ID NO: 283083 - DNA, 30 bp, Artificial Sequence
  Synthetic oligonucleotide
cggtacagggatccccattctccggattaa

SEQ ID NO: 283084 - DNA, 30 bp, Artificial Sequence
  Synthetic oligonucleotide
ataaattgatgagggaatccaggggattaa

SEQ ID NO: 283085 - DNA, 30 bp, Artificial Sequence
  Synthetic oligonucleotide
gagcggcctcactgtccgttcgtggattaa

SEQ ID NO: 283086 - DNA, 30 bp, Artificial Sequence
  Synthetic oligonucleotide
tccatgactagggttaccaatgtggattaa

SEQ ID NO: 283087 - DNA, 30 bp, Artificial Sequence
  Synthetic oligonucleotide
gctaagcacggaagattagtgccatattaa

SEQ ID NO: 283088 - DNA, 30 bp, Artificial Sequence
  Synthetic oligonucleotide
actgccatcagtaatgcctgtccatattaa

SEQ ID NO: 283089 - DNA, 30 bp, Artificial Sequence
  Synthetic oligonucleotide
cactcttacacccatctagttaactattaa

SEQ ID NO: 283090 - DNA, 30 bp, Artificial Sequence
  Synthetic oligonucleotide
tacgcgagttaccgttcgcggtattattaa

SEQ ID NO: 283091 - DNA, 30 bp, Artificial Sequence
  Synthetic oligonucleotide
ggcggggtattttcaagggatggttattaa

SEQ ID NO: 283092 - DNA, 30 bp, Artificial Sequence
  Synthetic oligonucleotide
cattggttgctccttggcctgatttattaa

SEQ ID NO: 283093 - DNA, 30 bp, Artificial Sequence
  Synthetic oligonucleotide
gcgtgttcttcaggggaactaataacttaa

SEQ ID NO: 283094 - DNA, 30 bp, Artificial Sequence
  Synthetic oligonucleotide
atatcgccgttgcgagtcagtcccacttaa

SEQ ID NO: 283095 - DNA, 30 bp, Artificial Sequence
  Synthetic oligonucleotide
cgagaatgaccatttaagtcactcacttaa

SEQ ID NO: 283096 - DNA, 30 bp, Artificial Sequence
  Synthetic oligonucleotide
cagggcagtcggcgtggtccgaagacttaa

SEQ ID NO: 283097 - DNA, 30 bp, Artificial Sequence
  Synthetic oligonucleotide
gcacaacacttaatatcaagaactacttaa

SEQ ID NO: 283098 - DNA, 30 bp, Artificial Sequence
  Synthetic oligonucleotide
ctatctgagtaagcatttatcactacttaa

SEQ ID NO: 283099 - DNA, 30 bp, Artificial Sequence
  Synthetic oligonucleotide
acgggaggttcctggctaatccctacttaa

SEQ ID NO: 283100 - DNA, 30 bp, Artificial Sequence
  Synthetic oligonucleotide
gcattgtggtatcagattagatctacttaa

SEQ ID NO: 283101 - DNA, 30 bp, Artificial Sequence
  Synthetic oligonucleotide
caaactgggatctttccgcttggcccttaa

SEQ ID NO: 283102 - DNA, 30 bp, Artificial Sequence
  Synthetic oligonucleotide
ggatggtaacggcaggcgagattcccttaa

SEQ ID NO: 283103 - DNA, 30 bp, Artificial Sequence
  Synthetic oligonucleotide
tcgacccacacgcagagttttctgccttaa

SEQ ID NO: 283104 - DNA, 30 bp, Artificial Sequence
  Synthetic oligonucleotide
acctcgtggcgggtacagatcgtgccttaa

SEQ ID NO: 283105 - DNA, 30 bp, Artificial Sequence
  Synthetic oligonucleotide
cggattccacgccgaaaggcatttccttaa

SEQ ID NO: 283106 - DNA, 30 bp, Artificial Sequence
  Synthetic oligonucleotide
cttatggatcgttaaaggaacaaagcttaa

SEQ ID NO: 283107 - DNA, 30 bp, Artificial Sequence
  Synthetic oligonucleotide
gaatggtcatgtcggtcctggcaagcttaa

SEQ ID NO: 283108 - DNA, 30 bp, Artificial Sequence
  Synthetic oligonucleotide
atgctaccaaaggcgtgaggtgcagcttaa

SEQ ID NO: 283109 - DNA, 30 bp, Artificial Sequence
  Synthetic oligonucleotide
ggggtacaagtgccgactggttcagcttaa

SEQ ID NO: 283110 - DNA, 30 bp, Artificial Sequence
  Synthetic oligonucleotide
gcataggagccgtatatttgaagagcttaa

SEQ ID NO: 283111 - DNA, 28 bp, Artificial Sequence
  Synthetic oligonucleotide
acagacattgtaatgtcgagtagcttaa

SEQ ID NO: 283112 - DNA, 30 bp, Artificial Sequence
  Synthetic oligonucleotide
ttatgatgaacatgattctgccccgcttaa

SEQ ID NO: 283113 - DNA, 30 bp, Artificial Sequence
  Synthetic oligonucleotide
agagtgcgcaggatgcgtacacgcgcttaa

SEQ ID NO: 283114 - DNA, 30 bp, Artificial Sequence
  Synthetic oligonucleotide
ccattaacgcacgactctgggggggcttaa

SEQ ID NO: 283115 - DNA, 30 bp, Artificial Sequence
  Synthetic oligonucleotide
gcatattcactgccgtgtgaatttgcttaa

SEQ ID NO: 283116 - DNA, 30 bp, Artificial Sequence
  Synthetic oligonucleotide
cgacccaattgatggggtgaataatcttaa

SEQ ID NO: 283117 - DNA, 30 bp, Artificial Sequence
  Synthetic oligonucleotide
gctataacgggttcactacccacatcttaa

SEQ ID NO: 283118 - DNA, 30 bp, Artificial Sequence
  Synthetic oligonucleotide
gggacctgtgtgatgtggccttagtcttaa

SEQ ID NO: 283119 - DNA, 30 bp, Artificial Sequence
  Synthetic oligonucleotide
ggtagtacgttagcattctccacgtcttaa

SEQ ID NO: 283120 - DNA, 30 bp, Artificial Sequence
  Synthetic oligonucleotide
gaccacggttgctgttcactagcgtcttaa

SEQ ID NO: 283121 - DNA, 30 bp, Artificial Sequence
  Synthetic oligonucleotide
aatgatggccaataattgacagtgtcttaa

SEQ ID NO: 283122 - DNA, 30 bp, Artificial Sequence
  Synthetic oligonucleotide
ttgctgtcatggcgtcctcggcacagttaa

SEQ ID NO: 283123 - DNA, 30 bp, Artificial Sequence
  Synthetic oligonucleotide
agtcccaccaacgtcaaacgccggagttaa

SEQ ID NO: 283124 - DNA, 30 bp, Artificial Sequence
  Synthetic oligonucleotide
gatgggaaccccgcaaaatagtctagttaa

SEQ ID NO: 283125 - DNA, 30 bp, Artificial Sequence
  Synthetic oligonucleotide
tagtgcggttaagttgtgcgccgtagttaa

SEQ ID NO: 283126 - DNA, 30 bp, Artificial Sequence
  Synthetic oligonucleotide
agattactataagcctgccaaaaacgttaa

SEQ ID NO: 283127 - DNA, 30 bp, Artificial Sequence
  Synthetic oligonucleotide
agaaacaggttgaagagtttggcacgttaa

SEQ ID NO: 283128 - DNA, 30 bp, Artificial Sequence
  Synthetic oligonucleotide
cacgctttcgcaacccggcacatccgttaa

SEQ ID NO: 283129 - DNA, 30 bp, Artificial Sequence
  Synthetic oligonucleotide
tctgacgatttggactacgatccgcgttaa

SEQ ID NO: 283130 - DNA, 30 bp, Artificial Sequence
  Synthetic oligonucleotide
acaccttcagtttggtactggttgcgttaa

SEQ ID NO: 283131 - DNA, 30 bp, Artificial Sequence
  Synthetic oligonucleotide
tgcgtatatggcagttccgaccttcgttaa

SEQ ID NO: 283132 - DNA, 30 bp, Artificial Sequence
  Synthetic oligonucleotide
ccctttgaggtgtcgttcagggcaggttaa

SEQ ID NO: 283133 - DNA, 30 bp, Artificial Sequence
  Synthetic oligonucleotide
acacaacgaagtcgtgctgagcccggttaa

SEQ ID NO: 283134 - DNA, 30 bp, Artificial Sequence
  Synthetic oligonucleotide
agtataatgtagtgttcacggcgcggttaa

SEQ ID NO: 283135 - DNA, 30 bp, Artificial Sequence
  Synthetic oligonucleotide
gccgttagcaagttgaggcgactgggttaa

SEQ ID NO: 283136 - DNA, 30 bp, Artificial Sequence
  Synthetic oligonucleotide
aagacaacttcaggaccagtacctggttaa

SEQ ID NO: 283137 - DNA, 30 bp, Artificial Sequence
  Synthetic oligonucleotide
acggagtatttaatgtttaaaggtggttaa

SEQ ID NO: 283138 - DNA, 30 bp, Artificial Sequence
  Synthetic oligonucleotide
acgtcgaccttacgggtcgtctgtggttaa

SEQ ID NO: 283139 - DNA, 30 bp, Artificial Sequence
  Synthetic oligonucleotide
gtaggcccatcaactctgtcgcaatgttaa

SEQ ID NO: 283140 - DNA, 30 bp, Artificial Sequence
  Synthetic oligonucleotide
aagttaggtacccctcccacaggatgttaa

SEQ ID NO: 283141 - DNA, 30 bp, Artificial Sequence
  Synthetic oligonucleotide
tgagaaacaatatcaaacagtttctgttaa

SEQ ID NO: 283142 - DNA, 30 bp, Artificial Sequence
  Synthetic oligonucleotide
tggtaccgggtcgcttgttttcagtgttaa

SEQ ID NO: 283143 - DNA, 30 bp, Artificial Sequence
  Synthetic oligonucleotide
tggggggtccagatgataagatcgtgttaa

SEQ ID NO: 283144 - DNA, 30 bp, Artificial Sequence
  Synthetic oligonucleotide
ttacgatgtggcgtcggagtgtattgttaa

SEQ ID NO: 283145 - DNA, 30 bp, Artificial Sequence
  Synthetic oligonucleotide
cggtgcgccaggagtctgagattttgttaa

SEQ ID NO: 283146 - DNA, 30 bp, Artificial Sequence
  Synthetic oligonucleotide
acgaagccttccgtctactctttttgttaa

SEQ ID NO: 283147 - DNA, 30 bp, Artificial Sequence
  Synthetic oligonucleotide
cacttaaaggagccacgacgcgaaatttaa

SEQ ID NO: 283148 - DNA, 30 bp, Artificial Sequence
  Synthetic oligonucleotide
atgccattgccccaggttgcgaccatttaa

SEQ ID NO: 283149 - DNA, 30 bp, Artificial Sequence
  Synthetic oligonucleotide
gcacgtgcgtggtcgtgaaagatcatttaa

SEQ ID NO: 283150 - DNA, 30 bp, Artificial Sequence
  Synthetic oligonucleotide
ttaacacctgcaacacgcttctagatttaa

SEQ ID NO: 283151 - DNA, 30 bp, Artificial Sequence
  Synthetic oligonucleotide
agagcgcccctgagtgggttagtgatttaa

SEQ ID NO: 283152 - DNA, 30 bp, Artificial Sequence
  Synthetic oligonucleotide
gcaggtggctgttaaagtgctgatatttaa

SEQ ID NO: 283153 - DNA, 30 bp, Artificial Sequence
  Synthetic oligonucleotide
ttgggttacacaccacgggaaactatttaa

SEQ ID NO: 283154 - DNA, 30 bp, Artificial Sequence
  Synthetic oligonucleotide
ggtatggcgtatgacgggtccactatttaa

SEQ ID NO: 283155 - DNA, 30 bp, Artificial Sequence
  Synthetic oligonucleotide
cggctatcattgcattactgggaactttaa

SEQ ID NO: 283156 - DNA, 30 bp, Artificial Sequence
  Synthetic oligonucleotide
caccatgggtgctactagcgcgtactttaa

SEQ ID NO: 283157 - DNA, 30 bp, Artificial Sequence
  Synthetic oligonucleotide
gggaactgcaaccccaatgccggcctttaa

SEQ ID NO: 283158 - DNA, 30 bp, Artificial Sequence
  Synthetic oligonucleotide
cgcttaatggtcttgaatagtatcctttaa

SEQ ID NO: 283159 - DNA, 30 bp, Artificial Sequence
  Synthetic oligonucleotide
cggtctgtgatcctgaacatgaagctttaa

SEQ ID NO: 283160 - DNA, 30 bp, Artificial Sequence
  Synthetic oligonucleotide
atgggcagtgaagcgcctacttatctttaa

SEQ ID NO: 283161 - DNA, 30 bp, Artificial Sequence
  Synthetic oligonucleotide
gggtattatcctgtaaagatttaagtttaa

SEQ ID NO: 283162 - DNA, 30 bp, Artificial Sequence
  Synthetic oligonucleotide
gacatacatgcaggatcgaggtgcgtttaa

SEQ ID NO: 283163 - DNA, 30 bp, Artificial Sequence
  Synthetic oligonucleotide
agcaatcgtgcggcaagctaaatcgtttaa

SEQ ID NO: 283164 - DNA, 30 bp, Artificial Sequence
  Synthetic oligonucleotide
ctacattacataagacggggggtcgtttaa

SEQ ID NO: 283165 - DNA, 30 bp, Artificial Sequence
  Synthetic oligonucleotide
cgctgtgcagtccaatctgtccctgtttaa

SEQ ID NO: 283166 - DNA, 30 bp, Artificial Sequence
  Synthetic oligonucleotide
cgaacaaatacactcgcagaagcattttaa

SEQ ID NO: 283167 - DNA, 30 bp, Artificial Sequence
  Synthetic oligonucleotide
taggtaaccatatatgctaaacgattttaa

SEQ ID NO: 283168 - DNA, 30 bp, Artificial Sequence
  Synthetic oligonucleotide
cagggcgcacttagcttcatgggattttaa

SEQ ID NO: 283169 - DNA, 30 bp, Artificial Sequence
  Synthetic oligonucleotide
tccaatgatcttggagacttttgattttaa

SEQ ID NO: 283170 - DNA, 30 bp, Artificial Sequence
  Synthetic oligonucleotide
aagagttaatgacacttattgaacttttaa

SEQ ID NO: 283171 - DNA, 30 bp, Artificial Sequence
  Synthetic oligonucleotide
gggcctacgccgagcttaaacggcttttaa

SEQ ID NO: 283172 - DNA, 30 bp, Artificial Sequence
  Synthetic oligonucleotide
gtcgtagcgcatatgtattggcggttttaa

SEQ ID NO: 283173 - DNA, 30 bp, Artificial Sequence
  Synthetic oligonucleotide
tttcctaaataaacaaggccacatttttaa

SEQ ID NO: 283174 - DNA, 30 bp, Artificial Sequence
  Synthetic oligonucleotide
tagtactcccaaagttccgcacgaaaaaca

SEQ ID NO: 283175 - DNA, 30 bp, Artificial Sequence
  Synthetic oligonucleotide
ggatcggtccaggtccatgatccgaaaaca

SEQ ID NO: 283176 - DNA, 30 bp, Artificial Sequence
  Synthetic oligonucleotide
gtttcgcaccccacctaataatggaaaaca

SEQ ID NO: 283177 - DNA, 30 bp, Artificial Sequence
  Synthetic oligonucleotide
gctgggatggggtaggggttaggtaaaaca

SEQ ID NO: 283178 - DNA, 30 bp, Artificial Sequence
  Synthetic oligonucleotide
agctgcgtgaggactcacaatgttaaaaca

SEQ ID NO: 283179 - DNA, 30 bp, Artificial Sequence
  Synthetic oligonucleotide
cacgctatatcttgagcctagggacaaaca

SEQ ID NO: 283180 - DNA, 30 bp, Artificial Sequence
  Synthetic oligonucleotide
agggtatatacttcttctgaagcccaaaca

SEQ ID NO: 283181 - DNA, 30 bp, Artificial Sequence
  Synthetic oligonucleotide
taatacgtacattcgtagtactcccaaaca

SEQ ID NO: 283182 - DNA, 30 bp, Artificial Sequence
  Synthetic oligonucleotide
taaaaccgacatgcgtaccggaggcaaaca

SEQ ID NO: 283183 - DNA, 30 bp, Artificial Sequence
  Synthetic oligonucleotide
gcagcgagaaggagctcctcggggcaaaca

SEQ ID NO: 283184 - DNA, 30 bp, Artificial Sequence
  Synthetic oligonucleotide
acacgttggtagccaggcattgtgcaaaca

SEQ ID NO: 283185 - DNA, 30 bp, Artificial Sequence
  Synthetic oligonucleotide
ggaataagcatttgagctacagatcaaaca

SEQ ID NO: 283186 - DNA, 30 bp, Artificial Sequence
  Synthetic oligonucleotide
ccagctcattgaatatgaagagctcaaaca

SEQ ID NO: 283187 - DNA, 30 bp, Artificial Sequence
  Synthetic oligonucleotide
cagaggggaagccgtcttagcattcaaaca

SEQ ID NO: 283188 - DNA, 30 bp, Artificial Sequence
  Synthetic oligonucleotide
ttggtctggctctatctgttcgaagaaaca

SEQ ID NO: 283189 - DNA, 30 bp, Artificial Sequence
  Synthetic oligonucleotide
atcgaatacgtctatcgtctctcagaaaca

SEQ ID NO: 283190 - DNA, 30 bp, Artificial Sequence
  Synthetic oligonucleotide
tggggcgacatttaatcttcaccggaaaca

SEQ ID NO: 283191 - DNA, 30 bp, Artificial Sequence
  Synthetic oligonucleotide
ggctttaatagattcgcctcctcggaaaca

SEQ ID NO: 283192 - DNA, 30 bp, Artificial Sequence
  Synthetic oligonucleotide
tcgcagcgttggtcgtacatccgggaaaca

SEQ ID NO: 283193 - DNA, 30 bp, Artificial Sequence
  Synthetic oligonucleotide
gtaaaaatcccataccctgctgtggaaaca

SEQ ID NO: 283194 - DNA, 30 bp, Artificial Sequence
  Synthetic oligonucleotide
cttcggaagtctcggcagtcggaataaaca

SEQ ID NO: 283195 - DNA, 30 bp, Artificial Sequence
  Synthetic oligonucleotide
tggctgagcgttgcgcatttgacataaaca

SEQ ID NO: 283196 - DNA, 30 bp, Artificial Sequence
  Synthetic oligonucleotide
gccaaagggtgtcaggttgtagcataaaca

SEQ ID NO: 283197 - DNA, 30 bp, Artificial Sequence
  Synthetic oligonucleotide
cacatctcactctagtatcgatgataaaca

SEQ ID NO: 283198 - DNA, 30 bp, Artificial Sequence
  Synthetic oligonucleotide
gccgaaggataggttatgtgatgataaaca

SEQ ID NO: 283199 - DNA, 30 bp, Artificial Sequence
  Synthetic oligonucleotide
gtaaattccagggtaaaggtgctataaaca

SEQ ID NO: 283200 - DNA, 30 bp, Artificial Sequence
  Synthetic oligonucleotide
gttaactacacctgaaatatagactaaaca

SEQ ID NO: 283201 - DNA, 30 bp, Artificial Sequence
  Synthetic oligonucleotide
tactggaaatagggccactcggactaaaca

SEQ ID NO: 283202 - DNA, 30 bp, Artificial Sequence
  Synthetic oligonucleotide
taacggaacgatacgccggtatagtaaaca

SEQ ID NO: 283203 - DNA, 30 bp, Artificial Sequence
  Synthetic oligonucleotide
tctatcagtcatttagatgggaggtaaaca

SEQ ID NO: 283204 - DNA, 30 bp, Artificial Sequence
  Synthetic oligonucleotide
gggtacatcaagtgggggttccacacaaca

SEQ ID NO: 283205 - DNA, 30 bp, Artificial Sequence
  Synthetic oligonucleotide
gtaataattctcagtgaatcaatgacaaca

SEQ ID NO: 283206 - DNA, 30 bp, Artificial Sequence
  Synthetic oligonucleotide
ggaacagtcagcaccacgtacttgacaaca

SEQ ID NO: 283207 - DNA, 30 bp, Artificial Sequence
  Synthetic oligonucleotide
gtttacgaagtgaccttgtcgtcaccaaca

SEQ ID NO: 283208 - DNA, 30 bp, Artificial Sequence
  Synthetic oligonucleotide
atccctgccaaccaccgagatttcccaaca

SEQ ID NO: 283209 - DNA, 30 bp, Artificial Sequence
  Synthetic oligonucleotide
gagcagcaggcgtacatgtatttcccaaca

SEQ ID NO: 283210 - DNA, 30 bp, Artificial Sequence
  Synthetic oligonucleotide
ttgtccccccagacccccgtcgtgccaaca

SEQ ID NO: 283211 - DNA, 30 bp, Artificial Sequence
  Synthetic oligonucleotide
tctcggtagtgaccggtataagatccaaca

SEQ ID NO: 283212 - DNA, 30 bp, Artificial Sequence
  Synthetic oligonucleotide
tctaagcggctcgtgggggcggatccaaca

SEQ ID NO: 283213 - DNA, 30 bp, Artificial Sequence
  Synthetic oligonucleotide
gtaaggagctgattatagttatgtccaaca

SEQ ID NO: 283214 - DNA, 30 bp, Artificial Sequence
  Synthetic oligonucleotide
ctcaatggagtatggcactgtgtagcaaca

SEQ ID NO: 283215 - DNA, 30 bp, Artificial Sequence
  Synthetic oligonucleotide
taggatacgtgtgaaggcagcgccgcaaca

SEQ ID NO: 283216 - DNA, 30 bp, Artificial Sequence
  Synthetic oligonucleotide
gccagccctagacgagtacaactcgcaaca

SEQ ID NO: 283217 - DNA, 30 bp, Artificial Sequence
  Synthetic oligonucleotide
gtatcgacagtccggtaggagtaatcaaca

SEQ ID NO: 283218 - DNA, 30 bp, Artificial Sequence
  Synthetic oligonucleotide
ggtaatttgtaagcaaaagccagatcaaca

SEQ ID NO: 283219 - DNA, 30 bp, Artificial Sequence
  Synthetic oligonucleotide
gtagaataatatctcaaatctacgtcaaca

SEQ ID NO: 283220 - DNA, 30 bp, Artificial Sequence
  Synthetic oligonucleotide
cggtccttggaggtaagaattatttcaaca

SEQ ID NO: 283221 - DNA, 30 bp, Artificial Sequence
  Synthetic oligonucleotide
ggtggcttctctagcgcgtatcagagaaca

SEQ ID NO: 283222 - DNA, 30 bp, Artificial Sequence
  Synthetic oligonucleotide
gctggttgctacgtttagatgtggagaaca

SEQ ID NO: 283223 - DNA, 30 bp, Artificial Sequence
  Synthetic oligonucleotide
gttatagctccatgaagggaaaatagaaca

SEQ ID NO: 283224 - DNA, 30 bp, Artificial Sequence
  Synthetic oligonucleotide
gataagtgggtaccgagcggcattagaaca

SEQ ID NO: 283225 - DNA, 30 bp, Artificial Sequence
  Synthetic oligonucleotide
atattctagcgaaagcgtgggattagaaca

SEQ ID NO: 283226 - DNA, 30 bp, Artificial Sequence
  Synthetic oligonucleotide
aatgccgacaaggatgcgaatcagcgaaca

SEQ ID NO: 283227 - DNA, 28 bp, Artificial Sequence
  Synthetic oligonucleotide
ataagatggctgccccggacgtcgaaca

SEQ ID NO: 283228 - DNA, 30 bp, Artificial Sequence
  Synthetic oligonucleotide
gctacttgcacgaaagactaggcaggaaca

SEQ ID NO: 283229 - DNA, 30 bp, Artificial Sequence
  Synthetic oligonucleotide
ggctttactttccttcagttgcgaggaaca

SEQ ID NO: 283230 - DNA, 30 bp, Artificial Sequence
  Synthetic oligonucleotide
agccttactaccctgggcgatcccggaaca

SEQ ID NO: 283231 - DNA, 30 bp, Artificial Sequence
  Synthetic oligonucleotide
aggttcagcaggcgttgggtttccggaaca

SEQ ID NO: 283232 - DNA, 30 bp, Artificial Sequence
  Synthetic oligonucleotide
atgaaaagcggtaagcattaccgcggaaca

SEQ ID NO: 283233 - DNA, 30 bp, Artificial Sequence
  Synthetic oligonucleotide
atattacgtgggtagtcagccgcgggaaca

SEQ ID NO: 283234 - DNA, 30 bp, Artificial Sequence
  Synthetic oligonucleotide
atggtatatctattttggtaggtgggaaca

SEQ ID NO: 283235 - DNA, 30 bp, Artificial Sequence
  Synthetic oligonucleotide
aaccaataggggcacatagttgatggaaca

SEQ ID NO: 283236 - DNA, 30 bp, Artificial Sequence
  Synthetic oligonucleotide
cactggtcactcgtgttacgttagtgaaca

SEQ ID NO: 283237 - DNA, 30 bp, Artificial Sequence
  Synthetic oligonucleotide
accgggtagacgctcccacaagtgtgaaca

SEQ ID NO: 283238 - DNA, 30 bp, Artificial Sequence
  Synthetic oligonucleotide
acgggatcagtcacgtacagcttttgaaca

SEQ ID NO: 283239 - DNA, 30 bp, Artificial Sequence
  Synthetic oligonucleotide
acgcttgtcaactccggatgagaaataaca

SEQ ID NO: 283240 - DNA, 30 bp, Artificial Sequence
  Synthetic oligonucleotide
cggcctccgtttatgttgcatccaataaca

SEQ ID NO: 283241 - DNA, 30 bp, Artificial Sequence
  Synthetic oligonucleotide
ttctggagtagcccccgagttataataaca

SEQ ID NO: 283242 - DNA, 30 bp, Artificial Sequence
  Synthetic oligonucleotide
ttagttattgaatattacttcggcataaca

SEQ ID NO: 283243 - DNA, 30 bp, Artificial Sequence
  Synthetic oligonucleotide
cccgtgaagatacttagcagcatcataaca

SEQ ID NO: 283244 - DNA, 30 bp, Artificial Sequence
  Synthetic oligonucleotide
tagatagccgaggtggcgcctctcataaca

SEQ ID NO: 283245 - DNA, 30 bp, Artificial Sequence
  Synthetic oligonucleotide
ttatcctcatcgcgtacatacaggataaca

SEQ ID NO: 283246 - DNA, 30 bp, Artificial Sequence
  Synthetic oligonucleotide
tcaattcgtagatcgtttacagttataaca

SEQ ID NO: 283247 - DNA, 30 bp, Artificial Sequence
  Synthetic oligonucleotide
gggttcgcactccccaatactacactaaca

SEQ ID NO: 283248 - DNA, 30 bp, Artificial Sequence
  Synthetic oligonucleotide
gtcggatcaacacaatcgggcagactaaca

SEQ ID NO: 283249 - DNA, 30 bp, Artificial Sequence
  Synthetic oligonucleotide
tgtatgcactgcacatacgtacgactaaca

SEQ ID NO: 283250 - DNA, 30 bp, Artificial Sequence
  Synthetic oligonucleotide
gtgaccagggaatctaagattggactaaca

SEQ ID NO: 283251 - DNA, 30 bp, Artificial Sequence
  Synthetic oligonucleotide
acaaatgacccgtgttcagttagcctaaca

SEQ ID NO: 283252 - DNA, 30 bp, Artificial Sequence
  Synthetic oligonucleotide
atatctcgtcatcgggatccacgcctaaca

SEQ ID NO: 283253 - DNA, 30 bp, Artificial Sequence
  Synthetic oligonucleotide
cgtacaacttttggcacgtcaaaagtaaca

SEQ ID NO: 283254 - DNA, 30 bp, Artificial Sequence
  Synthetic oligonucleotide
ggaaatgagggatctaatgttacagtaaca

SEQ ID NO: 283255 - DNA, 30 bp, Artificial Sequence
  Synthetic oligonucleotide
tgcgttataatccatcaagagatagtaaca

SEQ ID NO: 283256 - DNA, 30 bp, Artificial Sequence
  Synthetic oligonucleotide
gtccccgagcgcttgaagtaagtagtaaca

SEQ ID NO: 283257 - DNA, 30 bp, Artificial Sequence
  Synthetic oligonucleotide
cccttcatccaagctagcccggtagtaaca

SEQ ID NO: 283258 - DNA, 30 bp, Artificial Sequence
  Synthetic oligonucleotide
tcagcattgggtatcatcacaatcgtaaca

SEQ ID NO: 283259 - DNA, 30 bp, Artificial Sequence
  Synthetic oligonucleotide
agacacgtaagtcctccttcagcggtaaca

SEQ ID NO: 283260 - DNA, 30 bp, Artificial Sequence
  Synthetic oligonucleotide
gtagaccggatgtacgattctaatgtaaca

SEQ ID NO: 283261 - DNA, 30 bp, Artificial Sequence
  Synthetic oligonucleotide
ccgggttaggctgtgtgagacattgtaaca

SEQ ID NO: 283262 - DNA, 30 bp, Artificial Sequence
  Synthetic oligonucleotide
ccgaggaaatcgttatgtgtcaacttaaca

SEQ ID NO: 283263 - DNA, 30 bp, Artificial Sequence
  Synthetic oligonucleotide
catatcctagtccttgtgacaatcttaaca

SEQ ID NO: 283264 - DNA, 30 bp, Artificial Sequence
  Synthetic oligonucleotide
caggcttgtattaaatgttttctcttaaca

SEQ ID NO: 283265 - DNA, 30 bp, Artificial Sequence
  Synthetic oligonucleotide
tgaaaagcgctcaatcccagaaagttaaca

SEQ ID NO: 283266 - DNA, 30 bp, Artificial Sequence
  Synthetic oligonucleotide
ggtaagcacttgtgagacactgatttaaca

SEQ ID NO: 283267 - DNA, 30 bp, Artificial Sequence
  Synthetic oligonucleotide
caatcacgcgtttagtgaagaagtttaaca

SEQ ID NO: 283268 - DNA, 30 bp, Artificial Sequence
  Synthetic oligonucleotide
gacgcgcggccagtcggtgctacaaacaca

SEQ ID NO: 283269 - DNA, 30 bp, Artificial Sequence
  Synthetic oligonucleotide
actggtgaggtagaaagatcatgaaacaca

SEQ ID NO: 283270 - DNA, 30 bp, Artificial Sequence
  Synthetic oligonucleotide
agttctatagcagggctaactaacaacaca

SEQ ID NO: 283271 - DNA, 30 bp, Artificial Sequence
  Synthetic oligonucleotide
actgttatcactaaatcggggttcaacaca

SEQ ID NO: 283272 - DNA, 30 bp, Artificial Sequence
  Synthetic oligonucleotide
acttgagcaactacgggttcgcagaacaca

SEQ ID NO: 283273 - DNA, 30 bp, Artificial Sequence
  Synthetic oligonucleotide
ggctactgaattatgtataggtataacaca

SEQ ID NO: 283274 - DNA, 30 bp, Artificial Sequence
  Synthetic oligonucleotide
ttgaaaaaattcagatgtagtcgtaacaca

SEQ ID NO: 283275 - DNA, 30 bp, Artificial Sequence
  Synthetic oligonucleotide
gggacatttggggttgtaagataacacaca

SEQ ID NO: 283276 - DNA, 30 bp, Artificial Sequence
  Synthetic oligonucleotide
tccgatagatccgcgcgcataggacacaca

SEQ ID NO: 283277 - DNA, 30 bp, Artificial Sequence
  Synthetic oligonucleotide
taagaatcctggtacgtttgggagcacaca

SEQ ID NO: 283278 - DNA, 30 bp, Artificial Sequence
  Synthetic oligonucleotide
gtcgtcactaggcaccaagtgtggcacaca

SEQ ID NO: 283279 - DNA, 30 bp, Artificial Sequence
  Synthetic oligonucleotide
atggggactgcgtcctctaagggtcacaca

SEQ ID NO: 283280 - DNA, 30 bp, Artificial Sequence
  Synthetic oligonucleotide
tcgctggcaattaaccgtgtggttcacaca

SEQ ID NO: 283281 - DNA, 30 bp, Artificial Sequence
  Synthetic oligonucleotide
tctatcaacaaaccctggtcccgagacaca

SEQ ID NO: 283282 - DNA, 30 bp, Artificial Sequence
  Synthetic oligonucleotide
tctgacataatacttccgagcaccgacaca

SEQ ID NO: 283283 - DNA, 30 bp, Artificial Sequence
  Synthetic oligonucleotide
tatttatgtcaccgggttcaaggcgacaca

SEQ ID NO: 283284 - DNA, 30 bp, Artificial Sequence
  Synthetic oligonucleotide
gcttacgaaaagtgtccagataaggacaca

SEQ ID NO: 283285 - DNA, 30 bp, Artificial Sequence
  Synthetic oligonucleotide
acactgttttcacagttccggtctgacaca

SEQ ID NO: 283286 - DNA, 30 bp, Artificial Sequence
  Synthetic oligonucleotide
caccgtggatgattgcctatcattgacaca

SEQ ID NO: 283287 - DNA, 30 bp, Artificial Sequence
  Synthetic oligonucleotide
tgcggtggcgcaatgtaacacccatacaca

SEQ ID NO: 283288 - DNA, 30 bp, Artificial Sequence
  Synthetic oligonucleotide
gtcggtatacagctatactctggatacaca

SEQ ID NO: 283289 - DNA, 30 bp, Artificial Sequence
  Synthetic oligonucleotide
cattggtcattcgaataagtgatatacaca

SEQ ID NO: 283290 - DNA, 30 bp, Artificial Sequence
  Synthetic oligonucleotide
tcgttgtaggatatcggcccgccgtacaca

SEQ ID NO: 283291 - DNA, 40 bp, Artificial Sequence
  Synthetic oligonucleotide
cgtgccgggtggtattgtatgatatgcacggtattacaca

SEQ ID NO: 283292 - DNA, 30 bp, Artificial Sequence
  Synthetic oligonucleotide
ggctccggtaccacccggtttacaaccaca

SEQ ID NO: 283293 - DNA, 30 bp, Artificial Sequence
  Synthetic oligonucleotide
tgagattcaccgtaaaaggcggcaaccaca

SEQ ID NO: 283294 - DNA, 30 bp, Artificial Sequence
  Synthetic oligonucleotide
catgggtgcatagacggactgttcaccaca

SEQ ID NO: 283295 - DNA, 30 bp, Artificial Sequence
  Synthetic oligonucleotide
ggggggggcctgcaccagtcgcggaccaca

SEQ ID NO: 283296 - DNA, 30 bp, Artificial Sequence
  Synthetic oligonucleotide
gataggtttccaagttatcttgggaccaca

SEQ ID NO: 283297 - DNA, 30 bp, Artificial Sequence
  Synthetic oligonucleotide
gaggctctcggagagatgggatggaccaca

SEQ ID NO: 283298 - DNA, 30 bp, Artificial Sequence
  Synthetic oligonucleotide
gaatcgactagcgttgatacttctaccaca

SEQ ID NO: 283299 - DNA, 30 bp, Artificial Sequence
  Synthetic oligonucleotide
atgttccgtagacttatgacataacccaca

SEQ ID NO: 283300 - DNA, 30 bp, Artificial Sequence
  Synthetic oligonucleotide
atcgcgggagaaattccactaggacccaca

SEQ ID NO: 283301 - DNA, 30 bp, Artificial Sequence
  Synthetic oligonucleotide
ctcgactcgcactgtcaggattgacccaca

SEQ ID NO: 283302 - DNA, 30 bp, Artificial Sequence
  Synthetic oligonucleotide
attatcaaggatggttaggtaacccccaca

SEQ ID NO: 283303 - DNA, 30 bp, Artificial Sequence
  Synthetic oligonucleotide
cacaggacacccttagtatgggcccccaca

SEQ ID NO: 283304 - DNA, 30 bp, Artificial Sequence
  Synthetic oligonucleotide
atacggtattgggatctccggacagccaca

SEQ ID NO: 283305 - DNA, 30 bp, Artificial Sequence
  Synthetic oligonucleotide
cgctacccttttttgcttgttgtagccaca

SEQ ID NO: 283306 - DNA, 30 bp, Artificial Sequence
  Synthetic oligonucleotide
catgtatacgggcaatgcaggacggccaca

SEQ ID NO: 283307 - DNA, 30 bp, Artificial Sequence
  Synthetic oligonucleotide
ggacttcaggctggtagtcacgtggccaca

SEQ ID NO: 283308 - DNA, 30 bp, Artificial Sequence
  Synthetic oligonucleotide
cttccggaactacggtgacgaaaatccaca

SEQ ID NO: 283309 - DNA, 30 bp, Artificial Sequence
  Synthetic oligonucleotide
ttaacaaactcacaaacgatccaatccaca

SEQ ID NO: 283310 - DNA, 30 bp, Artificial Sequence
  Synthetic oligonucleotide
cttcaatgccgactatgtaagtaatccaca

SEQ ID NO: 283311 - DNA, 30 bp, Artificial Sequence
  Synthetic oligonucleotide
ctaactcgttacaagcgcgaaatatccaca

SEQ ID NO: 283312 - DNA, 30 bp, Artificial Sequence
  Synthetic oligonucleotide
gccggtaccgcgtaccggatagcctccaca

SEQ ID NO: 283313 - DNA, 30 bp, Artificial Sequence
  Synthetic oligonucleotide
tgccgaccgtgctaagggagctcctccaca

SEQ ID NO: 283314 - DNA, 30 bp, Artificial Sequence
  Synthetic oligonucleotide
acgaacgcaagacatgtgttaccgtccaca

SEQ ID NO: 283315 - DNA, 30 bp, Artificial Sequence
  Synthetic oligonucleotide
ttaacatctcctgtcggccaatgttccaca

SEQ ID NO: 283316 - DNA, 30 bp, Artificial Sequence
  Synthetic oligonucleotide
ctataagagttttgagcgttttaaagcaca

SEQ ID NO: 283317 - DNA, 30 bp, Artificial Sequence
  Synthetic oligonucleotide
cttgagtagatgtagcgtagtcacagcaca

SEQ ID NO: 283318 - DNA, 30 bp, Artificial Sequence
  Synthetic oligonucleotide
catagcggaattaattataaggccagcaca

SEQ ID NO: 283319 - DNA, 30 bp, Artificial Sequence
  Synthetic oligonucleotide
tcatcataaagttaggtctgtgggagcaca

SEQ ID NO: 283320 - DNA, 30 bp, Artificial Sequence
  Synthetic oligonucleotide
tgcatggctagagatatgaaacatagcaca

SEQ ID NO: 283321 - DNA, 30 bp, Artificial Sequence
  Synthetic oligonucleotide
cagcgactgtggttccggtgagatagcaca

SEQ ID NO: 283322 - DNA, 30 bp, Artificial Sequence
  Synthetic oligonucleotide
acgtgatgtaaacctgtaggaggtagcaca

SEQ ID NO: 283323 - DNA, 30 bp, Artificial Sequence
  Synthetic oligonucleotide
aacaataggtgtaccctgaaggttagcaca

SEQ ID NO: 283324 - DNA, 30 bp, Artificial Sequence
  Synthetic oligonucleotide
gatcggctaacttaactttgtagccgcaca

SEQ ID NO: 283325 - DNA, 30 bp, Artificial Sequence
  Synthetic oligonucleotide
acaacaagggtttgtgtaggtgtccgcaca

SEQ ID NO: 283326 - DNA, 30 bp, Artificial Sequence
  Synthetic oligonucleotide
gcactagtcgacgggagcacgtaaggcaca

SEQ ID NO: 283327 - DNA, 30 bp, Artificial Sequence
  Synthetic oligonucleotide
cttcccctattcggaaagacagcaggcaca

SEQ ID NO: 283328 - DNA, 30 bp, Artificial Sequence
  Synthetic oligonucleotide
cgactatatactattgcaacaataggcaca

SEQ ID NO: 283329 - DNA, 30 bp, Artificial Sequence
  Synthetic oligonucleotide
gcaatataaccagatcttcgaaccggcaca

SEQ ID NO: 283330 - DNA, 30 bp, Artificial Sequence
  Synthetic oligonucleotide
taaaactattccaaaacgaggcgcggcaca

SEQ ID NO: 283331 - DNA, 30 bp, Artificial Sequence
  Synthetic oligonucleotide
tagtcgttctggctagtggcccagggcaca

SEQ ID NO: 283332 - DNA, 30 bp, Artificial Sequence
  Synthetic oligonucleotide
aagtaaaaatccaccttatcgcggggcaca

SEQ ID NO: 283333 - DNA, 30 bp, Artificial Sequence
  Synthetic oligonucleotide
ccaaccaggcagtcatgtaaagggggcaca

SEQ ID NO: 283334 - DNA, 31 bp, Artificial Sequence
  Synthetic oligonucleotide
aggcggtttgatctacagttttcgtggcaca

SEQ ID NO: 283335 - DNA, 30 bp, Artificial Sequence
  Synthetic oligonucleotide
tgttgtacttggaggttcgcacaatgcaca

SEQ ID NO: 283336 - DNA, 30 bp, Artificial Sequence
  Synthetic oligonucleotide
caagcaaaccaggccccgggataatgcaca

SEQ ID NO: 283337 - DNA, 30 bp, Artificial Sequence
  Synthetic oligonucleotide
atcagggcagattcatcaccgctctgcaca

SEQ ID NO: 283338 - DNA, 30 bp, Artificial Sequence
  Synthetic oligonucleotide
gggtgcacagacccaaaaacaccgtgcaca

SEQ ID NO: 283339 - DNA, 30 bp, Artificial Sequence
  Synthetic oligonucleotide
ggacgcattgaattttaggcgcggtgcaca

SEQ ID NO: 283340 - DNA, 30 bp, Artificial Sequence
  Synthetic oligonucleotide
tttggacgctatcttgaaattagttgcaca

SEQ ID NO: 283341 - DNA, 30 bp, Artificial Sequence
  Synthetic oligonucleotide
acagacttgcatcttgggcatccaatcaca

SEQ ID NO: 283342 - DNA, 30 bp, Artificial Sequence
  Synthetic oligonucleotide
aagtgttggaaagcggcgcccgtaatcaca

SEQ ID NO: 283343 - DNA, 30 bp, Artificial Sequence
  Synthetic oligonucleotide
atcgtccaaaagttgccgccgtggatcaca

SEQ ID NO: 283344 - DNA, 30 bp, Artificial Sequence
  Synthetic oligonucleotide
ctatgttaaccagagggagaagatatcaca

SEQ ID NO: 283345 - DNA, 30 bp, Artificial Sequence
  Synthetic oligonucleotide
tccactaagatcggttacctttttatcaca

SEQ ID NO: 283346 - DNA, 30 bp, Artificial Sequence
  Synthetic oligonucleotide
accaggatttcgtccaatacgcacctcaca

SEQ ID NO: 283347 - DNA, 30 bp, Artificial Sequence
  Synthetic oligonucleotide
gagtctaaactccggggcggagagctcaca

SEQ ID NO: 283348 - DNA, 30 bp, Artificial Sequence
  Synthetic oligonucleotide
tagtccggaaaagccacggcgtgtctcaca

SEQ ID NO: 283349 - DNA, 30 bp, Artificial Sequence
  Synthetic oligonucleotide
atcgctgggtaatgattatgcgaagtcaca

SEQ ID NO: 283350 - DNA, 30 bp, Artificial Sequence
  Synthetic oligonucleotide
tccgggtctttttgacaacagaacgtcaca

SEQ ID NO: 283351 - DNA, 30 bp, Artificial Sequence
  Synthetic oligonucleotide
actgcagagtggtggaagacacaggtcaca

SEQ ID NO: 283352 - DNA, 30 bp, Artificial Sequence
  Synthetic oligonucleotide
acctatccgcgttgacgagcggaggtcaca

SEQ ID NO: 283353 - DNA, 30 bp, Artificial Sequence
  Synthetic oligonucleotide
atgggggtcatatccgcaaaaacggtcaca

SEQ ID NO: 283354 - DNA, 30 bp, Artificial Sequence
  Synthetic oligonucleotide
gcgctagaaactgtctgagattgattcaca

SEQ ID NO: 283355 - DNA, 30 bp, Artificial Sequence
  Synthetic oligonucleotide
ttaaacattggacgcggaaggtgcttcaca

SEQ ID NO: 283356 - DNA, 30 bp, Artificial Sequence
  Synthetic oligonucleotide
aattccggaggtcacaatcccgcgttcaca

SEQ ID NO: 283357 - DNA, 30 bp, Artificial Sequence
  Synthetic oligonucleotide
aacagcccgcgtatcgggctcgatttcaca

SEQ ID NO: 283358 - DNA, 30 bp, Artificial Sequence
  Synthetic oligonucleotide
cggtgtgggtggatacaggttggtttcaca

SEQ ID NO: 283359 - DNA, 30 bp, Artificial Sequence
  Synthetic oligonucleotide
ttcgggtcgactaggcaagtgaaaaagaca

SEQ ID NO: 283360 - DNA, 30 bp, Artificial Sequence
  Synthetic oligonucleotide
caaaaggcaatccctcctgtgtgcaagaca

SEQ ID NO: 283361 - DNA, 30 bp, Artificial Sequence
  Synthetic oligonucleotide
acaccggagaggatccggtatctcaagaca

SEQ ID NO: 283362 - DNA, 30 bp, Artificial Sequence
  Synthetic oligonucleotide
ggagagggaaaacgtcgatttcataagaca

SEQ ID NO: 283363 - DNA, 30 bp, Artificial Sequence
  Synthetic oligonucleotide
taggttgaaagtcaatgtgaagcacagaca

SEQ ID NO: 283364 - DNA, 30 bp, Artificial Sequence
  Synthetic oligonucleotide
tcatgagtggaacgcgccccgcgccagaca

SEQ ID NO: 283365 - DNA, 30 bp, Artificial Sequence
  Synthetic oligonucleotide
ttgatcagccatgttatactaaggcagaca

SEQ ID NO: 283366 - DNA, 30 bp, Artificial Sequence
  Synthetic oligonucleotide
tagtctcgttagaaaacgggcatgcagaca

SEQ ID NO: 283367 - DNA, 30 bp, Artificial Sequence
  Synthetic oligonucleotide
gaatcgagctatcacctggcgtatcagaca

SEQ ID NO: 283368 - DNA, 30 bp, Artificial Sequence
  Synthetic oligonucleotide
aggtcaatataagccggaacaggtcagaca

SEQ ID NO: 283369 - DNA, 30 bp, Artificial Sequence
  Synthetic oligonucleotide
gcggggccgggcggcctgttctgtcagaca

SEQ ID NO: 283370 - DNA, 30 bp, Artificial Sequence
  Synthetic oligonucleotide
tcagccatacgttaagagccatttcagaca

SEQ ID NO: 283371 - DNA, 30 bp, Artificial Sequence
  Synthetic oligonucleotide
aatatctcactcgtgcaatcctacgagaca

SEQ ID NO: 283372 - DNA, 30 bp, Artificial Sequence
  Synthetic oligonucleotide
tagcagggcgagggggttgatttggagaca

SEQ ID NO: 283373 - DNA, 30 bp, Artificial Sequence
  Synthetic oligonucleotide
tgtccaggccgaacctgcgcaagtgagaca

SEQ ID NO: 283374 - DNA, 31 bp, Artificial Sequence
  Synthetic oligonucleotide
atgccgataaaatgagttcggaattgagaca

SEQ ID NO: 283375 - DNA, 30 bp, Artificial Sequence
  Synthetic oligonucleotide
tcgggtacatgcggtaattcccgatagaca

SEQ ID NO: 283376 - DNA, 30 bp, Artificial Sequence
  Synthetic oligonucleotide
gcccagagagttcgtagcaaattatagaca

SEQ ID NO: 283377 - DNA, 30 bp, Artificial Sequence
  Synthetic oligonucleotide
aggttaatgctccgaattcatttctagaca

SEQ ID NO: 283378 - DNA, 30 bp, Artificial Sequence
  Synthetic oligonucleotide
tgaggtgcttcttttatttaggggtagaca

SEQ ID NO: 283379 - DNA, 30 bp, Artificial Sequence
  Synthetic oligonucleotide
tattgaaatcgcgctggtcgggattagaca

SEQ ID NO: 283380 - DNA, 30 bp, Artificial Sequence
  Synthetic oligonucleotide
gttaacaatatacaagaaatggattagaca

SEQ ID NO: 283381 - DNA, 30 bp, Artificial Sequence
  Synthetic oligonucleotide
gctcgcaatgcaaagggtgtattttagaca

SEQ ID NO: 283382 - DNA, 30 bp, Artificial Sequence
  Synthetic oligonucleotide
gttcctggagacgtggtaatgcaaacgaca

SEQ ID NO: 283383 - DNA, 30 bp, Artificial Sequence
  Synthetic oligonucleotide
cgacactcagtcctagggcacggcacgaca

SEQ ID NO: 283384 - DNA, 30 bp, Artificial Sequence
  Synthetic oligonucleotide
tggtctggaatttggtaaaatactacgaca

SEQ ID NO: 283385 - DNA, 30 bp, Artificial Sequence
  Synthetic oligonucleotide
tacggaatatgctgtgtagcagtaccgaca

SEQ ID NO: 283386 - DNA, 30 bp, Artificial Sequence
  Synthetic oligonucleotide
tacgacaaattacattatcgcgtgccgaca

SEQ ID NO: 283387 - DNA, 30 bp, Artificial Sequence
  Synthetic oligonucleotide
cgatcatatgcgaccaattaaggcgcgaca

SEQ ID NO: 283388 - DNA, 30 bp, Artificial Sequence
  Synthetic oligonucleotide
tgtgtctgtgccgggtatccgaaggcgaca

SEQ ID NO: 283389 - DNA, 30 bp, Artificial Sequence
  Synthetic oligonucleotide
gttatggacttcatctataatcaggcgaca

SEQ ID NO: 283390 - DNA, 30 bp, Artificial Sequence
  Synthetic oligonucleotide
atcgagtccttttggtgctactgggcgaca

SEQ ID NO: 283391 - DNA, 30 bp, Artificial Sequence
  Synthetic oligonucleotide
tgcagcgttgaaaccatagggtaatcgaca

SEQ ID NO: 283392 - DNA, 30 bp, Artificial Sequence
  Synthetic oligonucleotide
cggctgatacttgccgcgtatatctcgaca

SEQ ID NO: 283393 - DNA, 30 bp, Artificial Sequence
  Synthetic oligonucleotide
accagagttgatcaccgcaccaggtcgaca

SEQ ID NO: 283394 - DNA, 30 bp, Artificial Sequence
  Synthetic oligonucleotide
gtggatgcaggttagcggcatcaaaggaca

SEQ ID NO: 283395 - DNA, 30 bp, Artificial Sequence
  Synthetic oligonucleotide
atggaattaaatcctcggatataaaggaca

SEQ ID NO: 283396 - DNA, 30 bp, Artificial Sequence
  Synthetic oligonucleotide
gtacaccagccataactccgggcaaggaca

SEQ ID NO: 283397 - DNA, 30 bp, Artificial Sequence
  Synthetic oligonucleotide
gctctcgccttaattcaagatggaaggaca

SEQ ID NO: 283398 - DNA, 30 bp, Artificial Sequence
  Synthetic oligonucleotide
gcggggagtaaccggagcgataacaggaca

SEQ ID NO: 283399 - DNA, 30 bp, Artificial Sequence
  Synthetic oligonucleotide
gcgcgccggtagggtacggaacccaggaca

SEQ ID NO: 283400 - DNA, 30 bp, Artificial Sequence
  Synthetic oligonucleotide
cactacacctatcgaagaacgttcaggaca

SEQ ID NO: 283401 - DNA, 30 bp, Artificial Sequence
  Synthetic oligonucleotide
ggatccatgcggcagtagacatagaggaca

SEQ ID NO: 283402 - DNA, 30 bp, Artificial Sequence
  Synthetic oligonucleotide
taatttctacacgcccgacaactgaggaca

SEQ ID NO: 283403 - DNA, 30 bp, Artificial Sequence
  Synthetic oligonucleotide
gccacactccactgcggaaaggataggaca

SEQ ID NO: 283404 - DNA, 30 bp, Artificial Sequence
  Synthetic oligonucleotide
catactaattagtcaggttgacttaggaca

SEQ ID NO: 283405 - DNA, 30 bp, Artificial Sequence
  Synthetic oligonucleotide
aaggaaccggggagcttggtggttaggaca

SEQ ID NO: 283406 - DNA, 30 bp, Artificial Sequence
  Synthetic oligonucleotide
tacccacagcactggggtgtgggacggaca

SEQ ID NO: 283407 - DNA, 30 bp, Artificial Sequence
  Synthetic oligonucleotide
aacatagcccgaaggccactgtgacggaca

SEQ ID NO: 283408 - DNA, 30 bp, Artificial Sequence
  Synthetic oligonucleotide
taacgtattgcgggcgccaagctacggaca

SEQ ID NO: 283409 - DNA, 30 bp, Artificial Sequence
  Synthetic oligonucleotide
gaaacccccttatgctcggctagccggaca

SEQ ID NO: 283410 - DNA, 30 bp, Artificial Sequence
  Synthetic oligonucleotide
tttcagggacgatcctagtttcgccggaca

SEQ ID NO: 283411 - DNA, 30 bp, Artificial Sequence
  Synthetic oligonucleotide
ggcccgcttccctgtacagtggtccggaca

SEQ ID NO: 283412 - DNA, 30 bp, Artificial Sequence
  Synthetic oligonucleotide
cttgcgtatgtgaaccccccaaagcggaca

SEQ ID NO: 283413 - DNA, 30 bp, Artificial Sequence
  Synthetic oligonucleotide
cggcagacgctacccgtactcgcgcggaca

SEQ ID NO: 283414 - DNA, 30 bp, Artificial Sequence
  Synthetic oligonucleotide
tgggccttcctgggaccgaaataagggaca

SEQ ID NO: 283415 - DNA, 30 bp, Artificial Sequence
  Synthetic oligonucleotide
tcccagtcattaccacccattggagggaca

SEQ ID NO: 283416 - DNA, 30 bp, Artificial Sequence
  Synthetic oligonucleotide
cgacagatactccgcgagtagtcggggaca

SEQ ID NO: 283417 - DNA, 30 bp, Artificial Sequence
  Synthetic oligonucleotide
ttgttctggtcgtcgctaacgtgggggaca

SEQ ID NO: 283418 - DNA, 30 bp, Artificial Sequence
  Synthetic oligonucleotide
ttatcttaaatctaaagaggggaatggaca

SEQ ID NO: 283419 - DNA, 30 bp, Artificial Sequence
  Synthetic oligonucleotide
tatacgagacaaggggtgaacctgtggaca

SEQ ID NO: 283420 - DNA, 30 bp, Artificial Sequence
  Synthetic oligonucleotide
tgggatatgtgtctattgggtgattggaca

SEQ ID NO: 283421 - DNA, 30 bp, Artificial Sequence
  Synthetic oligonucleotide
gttaatttgatagcatttccctattggaca

SEQ ID NO: 283422 - DNA, 30 bp, Artificial Sequence
  Synthetic oligonucleotide
attgtgacaggctcggtgattgtttggaca

SEQ ID NO: 283423 - DNA, 30 bp, Artificial Sequence
  Synthetic oligonucleotide
gcggatcttgtgattggcgctagaatgaca

SEQ ID NO: 283424 - DNA, 30 bp, Artificial Sequence
  Synthetic oligonucleotide
acgaatatatttaatatgccgataatgaca

SEQ ID NO: 283425 - DNA, 30 bp, Artificial Sequence
  Synthetic oligonucleotide
ttctcaaaggaaggcgaaattctaatgaca

SEQ ID NO: 283426 - DNA, 30 bp, Artificial Sequence
  Synthetic oligonucleotide
acccatgtgatgagctcgactcccatgaca

SEQ ID NO: 283427 - DNA, 30 bp, Artificial Sequence
  Synthetic oligonucleotide
gggggagggagatgtaacttgatcatgaca

SEQ ID NO: 283428 - DNA, 30 bp, Artificial Sequence
  Synthetic oligonucleotide
gtgagggaaaataacaacttgtatatgaca

SEQ ID NO: 283429 - DNA, 30 bp, Artificial Sequence
  Synthetic oligonucleotide
cattagactctgtggccgagcggtatgaca

SEQ ID NO: 283430 - DNA, 30 bp, Artificial Sequence
  Synthetic oligonucleotide
ctggtcccacatcgccagattcaactgaca

SEQ ID NO: 283431 - DNA, 30 bp, Artificial Sequence
  Synthetic oligonucleotide
ggaggaacactagggtcgttgcccctgaca

SEQ ID NO: 283432 - DNA, 30 bp, Artificial Sequence
  Synthetic oligonucleotide
tagctaggtgaagttgactcatcgctgaca

SEQ ID NO: 283433 - DNA, 30 bp, Artificial Sequence
  Synthetic oligonucleotide
cgcactcggattgagcccagtatgctgaca

SEQ ID NO: 283434 - DNA, 30 bp, Artificial Sequence
  Synthetic oligonucleotide
gtctgaggggatctttgctagttgctgaca

SEQ ID NO: 283435 - DNA, 30 bp, Artificial Sequence
  Synthetic oligonucleotide
tgcatgcccgagtatatggtcaacgtgaca

SEQ ID NO: 283436 - DNA, 30 bp, Artificial Sequence
  Synthetic oligonucleotide
acccccgtcttttgtttgctcttggtgaca

SEQ ID NO: 283437 - DNA, 30 bp, Artificial Sequence
  Synthetic oligonucleotide
tcgccgcaaccgcagtgtggttaattgaca

SEQ ID NO: 283438 - DNA, 30 bp, Artificial Sequence
  Synthetic oligonucleotide
agcttgatattacgtatattaacattgaca

SEQ ID NO: 283439 - DNA, 30 bp, Artificial Sequence
  Synthetic oligonucleotide
ttctattggtaatgaaagagcccattgaca

SEQ ID NO: 283440 - DNA, 30 bp, Artificial Sequence
  Synthetic oligonucleotide
gcctaatcagagacgtctaatttattgaca

SEQ ID NO: 283441 - DNA, 30 bp, Artificial Sequence
  Synthetic oligonucleotide
tctgctacatctaaccaccggctgttgaca

SEQ ID NO: 283442 - DNA, 30 bp, Artificial Sequence
  Synthetic oligonucleotide
cttccacctcgtcggacctcccatttgaca

SEQ ID NO: 283443 - DNA, 30 bp, Artificial Sequence
  Synthetic oligonucleotide
ttgcagaagcatcgggtgtatataaataca

SEQ ID NO: 283444 - DNA, 30 bp, Artificial Sequence
  Synthetic oligonucleotide
gcaaaaactcgtcaagtaaaagtaaataca

SEQ ID NO: 283445 - DNA, 30 bp, Artificial Sequence
  Synthetic oligonucleotide
acatgtgtggctgcgcgggatttaaataca

SEQ ID NO: 283446 - DNA, 30 bp, Artificial Sequence
  Synthetic oligonucleotide
ccttcagaatgaggcgcgtgctagaataca

SEQ ID NO: 283447 - DNA, 30 bp, Artificial Sequence
  Synthetic oligonucleotide
agtagttaatcgatagtttagaggaataca

SEQ ID NO: 283448 - DNA, 30 bp, Artificial Sequence
  Synthetic oligonucleotide
atctatgccacctgggagactaggaataca

SEQ ID NO: 283449 - DNA, 30 bp, Artificial Sequence
  Synthetic oligonucleotide
aatgctcacctctgtgtcaagcggaataca

SEQ ID NO: 283450 - DNA, 30 bp, Artificial Sequence
  Synthetic oligonucleotide
ccttgttccgggactagtggagttaataca

SEQ ID NO: 283451 - DNA, 30 bp, Artificial Sequence
  Synthetic oligonucleotide
tgtgcgtcgtgtggctgggtagttaataca

SEQ ID NO: 283452 - DNA, 30 bp, Artificial Sequence
  Synthetic oligonucleotide
ctaagtgcccaaagactattgccacataca

SEQ ID NO: 283453 - DNA, 30 bp, Artificial Sequence
  Synthetic oligonucleotide
acctatagacaaataaaggcagtgcataca

SEQ ID NO: 283454 - DNA, 30 bp, Artificial Sequence
  Synthetic oligonucleotide
tccgtttttacggttgaagacacagataca

SEQ ID NO: 283455 - DNA, 30 bp, Artificial Sequence
  Synthetic oligonucleotide
acggttcagatccgacacacgtgtgataca

SEQ ID NO: 283456 - DNA, 30 bp, Artificial Sequence
  Synthetic oligonucleotide
aaaacgactcatgtcactgtcccatataca

SEQ ID NO: 283457 - DNA, 30 bp, Artificial Sequence
  Synthetic oligonucleotide
atgtctaaaagtcgtccgtccaagtataca

SEQ ID NO: 283458 - DNA, 30 bp, Artificial Sequence
  Synthetic oligonucleotide
tgacgcgcagtacttagaatctcttataca

SEQ ID NO: 283459 - DNA, 30 bp, Artificial Sequence
  Synthetic oligonucleotide
ccgtgctcaagccgctcaacgtgttataca

SEQ ID NO: 283460 - DNA, 30 bp, Artificial Sequence
  Synthetic oligonucleotide
gtctgtaggactgctgcggcaagaactaca

SEQ ID NO: 283461 - DNA, 30 bp, Artificial Sequence
  Synthetic oligonucleotide
gtgcctggacccattcgagtctacactaca

SEQ ID NO: 283462 - DNA, 30 bp, Artificial Sequence
  Synthetic oligonucleotide
cgttatatggagacccgtttgatgactaca

SEQ ID NO: 283463 - DNA, 30 bp, Artificial Sequence
  Synthetic oligonucleotide
acgggagagtacacatgtagagtgactaca

SEQ ID NO: 283464 - DNA, 30 bp, Artificial Sequence
  Synthetic oligonucleotide
gaattaccctgatcggtggggtatactaca

SEQ ID NO: 283465 - DNA, 30 bp, Artificial Sequence
  Synthetic oligonucleotide
agtaatgggatggatgccggcaagcctaca

SEQ ID NO: 283466 - DNA, 30 bp, Artificial Sequence
  Synthetic oligonucleotide
aacgatttctccgcatacccttggcctaca

SEQ ID NO: 283467 - DNA, 30 bp, Artificial Sequence
  Synthetic oligonucleotide
cggggacctcgaatacagcgacctcctaca

SEQ ID NO: 283468 - DNA, 30 bp, Artificial Sequence
  Synthetic oligonucleotide
tgaggcgaggactcgtaggagagtcctaca

SEQ ID NO: 283469 - DNA, 30 bp, Artificial Sequence
  Synthetic oligonucleotide
gcaattcggaaggtgttgcgttcggctaca

SEQ ID NO: 283470 - DNA, 30 bp, Artificial Sequence
  Synthetic oligonucleotide
ttgatgtctactccaaggtttgctgctaca

SEQ ID NO: 283471 - DNA, 30 bp, Artificial Sequence
  Synthetic oligonucleotide
caagatgctgcttagccacacacatctaca

SEQ ID NO: 283472 - DNA, 31 bp, Artificial Sequence
  Synthetic oligonucleotide
cgaattacgataggtataggacggatctaca

SEQ ID NO: 283473 - DNA, 30 bp, Artificial Sequence
  Synthetic oligonucleotide
tgttacatgttaagtttatgactctctaca

SEQ ID NO: 283474 - DNA, 30 bp, Artificial Sequence
  Synthetic oligonucleotide
taatttattaagttagggtaggtctctaca

SEQ ID NO: 283475 - DNA, 30 bp, Artificial Sequence
  Synthetic oligonucleotide
caatccatcgggttcttgacggcgtctaca

SEQ ID NO: 283476 - DNA, 30 bp, Artificial Sequence
  Synthetic oligonucleotide
actggtcctcaatgtaaaggacattctaca

SEQ ID NO: 283477 - DNA, 30 bp, Artificial Sequence
  Synthetic oligonucleotide
ggcgcgataggtggtcaccaaacttctaca

SEQ ID NO: 283478 - DNA, 30 bp, Artificial Sequence
  Synthetic oligonucleotide
ggctgaatgcataacctttctgcttctaca

SEQ ID NO: 283479 - DNA, 30 bp, Artificial Sequence
  Synthetic oligonucleotide
aaggactaaacatatggcactttttctaca

SEQ ID NO: 283480 - DNA, 30 bp, Artificial Sequence
  Synthetic oligonucleotide
gctactactggctgctatacggacagtaca

SEQ ID NO: 283481 - DNA, 31 bp, Artificial Sequence
  Synthetic oligonucleotide
acgatattcggttaggggtcggcccagtaca

SEQ ID NO: 283482 - DNA, 30 bp, Artificial Sequence
  Synthetic oligonucleotide
aggtgattgcgatccgtgggaccgagtaca

SEQ ID NO: 283483 - DNA, 30 bp, Artificial Sequence
  Synthetic oligonucleotide
tgacagatgggcgtactggtactgagtaca

SEQ ID NO: 283484 - DNA, 30 bp, Artificial Sequence
  Synthetic oligonucleotide
catggcgttatcggggtgtatgtgagtaca

SEQ ID NO: 283485 - DNA, 30 bp, Artificial Sequence
  Synthetic oligonucleotide
cacatgtgcccatatatggcatctagtaca

SEQ ID NO: 283486 - DNA, 30 bp, Artificial Sequence
  Synthetic oligonucleotide
cgcgatcctacaatcgtgcggagtagtaca

SEQ ID NO: 283487 - DNA, 30 bp, Artificial Sequence
  Synthetic oligonucleotide
ttccgtgtgtgctacgataaccgtagtaca

SEQ ID NO: 283488 - DNA, 30 bp, Artificial Sequence
  Synthetic oligonucleotide
ggcagtgtttggaagcataaaattagtaca

SEQ ID NO: 283489 - DNA, 30 bp, Artificial Sequence
  Synthetic oligonucleotide
ggaaactcgggcaattgatgcatacgtaca

SEQ ID NO: 283490 - DNA, 30 bp, Artificial Sequence
  Synthetic oligonucleotide
taggacggagcttccaccatggcccgtaca

SEQ ID NO: 283491 - DNA, 30 bp, Artificial Sequence
  Synthetic oligonucleotide
aatctcatcttggtacacgactgtcgtaca

SEQ ID NO: 283492 - DNA, 30 bp, Artificial Sequence
  Synthetic oligonucleotide
tatgggccccttaagttgctatacggtaca

SEQ ID NO: 283493 - DNA, 30 bp, Artificial Sequence
  Synthetic oligonucleotide
aagaacggttcggagtcgtgaatcggtaca

SEQ ID NO: 283494 - DNA, 30 bp, Artificial Sequence
  Synthetic oligonucleotide
taacgatacgaggtgtcaaacgtcggtaca

SEQ ID NO: 283495 - DNA, 30 bp, Artificial Sequence
  Synthetic oligonucleotide
tgaattacccgacttcgcaaacagggtaca

SEQ ID NO: 283496 - DNA, 30 bp, Artificial Sequence
  Synthetic oligonucleotide
ctttccaggttgggcggctatccgggtaca

SEQ ID NO: 283497 - DNA, 30 bp, Artificial Sequence
  Synthetic oligonucleotide
gaacggtaacggcagggatgatgatgtaca

SEQ ID NO: 283498 - DNA, 30 bp, Artificial Sequence
  Synthetic oligonucleotide
tctgcctacacaatcctcagagtatgtaca

SEQ ID NO: 283499 - DNA, 30 bp, Artificial Sequence
  Synthetic oligonucleotide
gtatggaaaggttcactcgttagctgtaca

SEQ ID NO: 283500 - DNA, 30 bp, Artificial Sequence
  Synthetic oligonucleotide
ttaaccgggttactagggttatagtgtaca

SEQ ID NO: 283501 - DNA, 30 bp, Artificial Sequence
  Synthetic oligonucleotide
gttcgatctaattccggcgagctgtgtaca

SEQ ID NO: 283502 - DNA, 30 bp, Artificial Sequence
  Synthetic oligonucleotide
actgaacccgtattgcgtacaagttgtaca

SEQ ID NO: 283503 - DNA, 30 bp, Artificial Sequence
  Synthetic oligonucleotide
tctggcacaggtcggggccactgttgtaca

SEQ ID NO: 283504 - DNA, 30 bp, Artificial Sequence
  Synthetic oligonucleotide
aaccgcgctttaataagcccgacaattaca

SEQ ID NO: 283505 - DNA, 30 bp, Artificial Sequence
  Synthetic oligonucleotide
cggggggactcagcgagttcggtaattaca

SEQ ID NO: 283506 - DNA, 30 bp, Artificial Sequence
  Synthetic oligonucleotide
atgccccctcatacctactatcacattaca

SEQ ID NO: 283507 - DNA, 30 bp, Artificial Sequence
  Synthetic oligonucleotide
gcccgacttcccatcatgcttgacattaca

SEQ ID NO: 283508 - DNA, 30 bp, Artificial Sequence
  Synthetic oligonucleotide
tagagccctgcataaggaacatccattaca

SEQ ID NO: 283509 - DNA, 30 bp, Artificial Sequence
  Synthetic oligonucleotide
cacgagtgattaaccaacacagagattaca

SEQ ID NO: 283510 - DNA, 30 bp, Artificial Sequence
  Synthetic oligonucleotide
attaaactatttgtctagtctgcgattaca

SEQ ID NO: 283511 - DNA, 30 bp, Artificial Sequence
  Synthetic oligonucleotide
tgtaattgagggccgcaatggcggattaca

SEQ ID NO: 283512 - DNA, 30 bp, Artificial Sequence
  Synthetic oligonucleotide
agggactaatgaacgcataatatgattaca

SEQ ID NO: 283513 - DNA, 30 bp, Artificial Sequence
  Synthetic oligonucleotide
gacgtaaccgatttggaaaacgtgattaca

SEQ ID NO: 283514 - DNA, 30 bp, Artificial Sequence
  Synthetic oligonucleotide
aatctcgatcgatcgggccctgtgattaca

SEQ ID NO: 283515 - DNA, 30 bp, Artificial Sequence
  Synthetic oligonucleotide
gtaaggcctcatatggagatggaacttaca

SEQ ID NO: 283516 - DNA, 30 bp, Artificial Sequence
  Synthetic oligonucleotide
gaggttagccccttctgaaatccacttaca

SEQ ID NO: 283517 - DNA, 30 bp, Artificial Sequence
  Synthetic oligonucleotide
gggggccgccactcccgctcagtacttaca

SEQ ID NO: 283518 - DNA, 30 bp, Artificial Sequence
  Synthetic oligonucleotide
gcaatagcagcaggtttcaaattacttaca

SEQ ID NO: 283519 - DNA, 30 bp, Artificial Sequence
  Synthetic oligonucleotide
gtcgtcctgggtacaagtacttaccttaca

SEQ ID NO: 283520 - DNA, 30 bp, Artificial Sequence
  Synthetic oligonucleotide
agtaccaaatctttaatatgcctgcttaca

SEQ ID NO: 283521 - DNA, 30 bp, Artificial Sequence
  Synthetic oligonucleotide
atccagtttctttccgcgcatgaagttaca

SEQ ID NO: 283522 - DNA, 30 bp, Artificial Sequence
  Synthetic oligonucleotide
acccatttgagttacgggcgctaagttaca

SEQ ID NO: 283523 - DNA, 30 bp, Artificial Sequence
  Synthetic oligonucleotide
gaaacattgttggaccaaaggaaggttaca

SEQ ID NO: 283524 - DNA, 30 bp, Artificial Sequence
  Synthetic oligonucleotide
ccgtttttcaactgaccccatgaggttaca

SEQ ID NO: 283525 - DNA, 30 bp, Artificial Sequence
  Synthetic oligonucleotide
gcaaattggcatgtttttggaatggttaca

SEQ ID NO: 283526 - DNA, 30 bp, Artificial Sequence
  Synthetic oligonucleotide
gcgcaggtatgtggtttcgggtatgttaca

SEQ ID NO: 283527 - DNA, 30 bp, Artificial Sequence
  Synthetic oligonucleotide
aacgcggggcatagcataacgatctttaca

SEQ ID NO: 283528 - DNA, 30 bp, Artificial Sequence
  Synthetic oligonucleotide
gggtgaaagatcattgttgcggtgtttaca

SEQ ID NO: 283529 - DNA, 30 bp, Artificial Sequence
  Synthetic oligonucleotide
tcaactccgtctggacttcgtcgaaaacca

SEQ ID NO: 283530 - DNA, 28 bp, Artificial Sequence
  Synthetic oligonucleotide
taaagggtgcgtagcgataggcaaacca

SEQ ID NO: 283531 - DNA, 30 bp, Artificial Sequence
  Synthetic oligonucleotide
ctgaggtgctaaaacaggtagacacaacca

SEQ ID NO: 283532 - DNA, 30 bp, Artificial Sequence
  Synthetic oligonucleotide
gcgtgtgatgatcctttcattgcacaacca

SEQ ID NO: 283533 - DNA, 30 bp, Artificial Sequence
  Synthetic oligonucleotide
cttaacctcgcgaccacaggaagacaacca

SEQ ID NO: 283534 - DNA, 30 bp, Artificial Sequence
  Synthetic oligonucleotide
ttttcagtttaaagctgtgcgcaccaacca

SEQ ID NO: 283535 - DNA, 30 bp, Artificial Sequence
  Synthetic oligonucleotide
tttcagagaatttcgtagtggtagcaacca

SEQ ID NO: 283536 - DNA, 30 bp, Artificial Sequence
  Synthetic oligonucleotide
tgaagcgcctaccggcactagctgcaacca

SEQ ID NO: 283537 - DNA, 30 bp, Artificial Sequence
  Synthetic oligonucleotide
cagtacagcgcacgggtaaacaaagaacca

SEQ ID NO: 283538 - DNA, 30 bp, Artificial Sequence
  Synthetic oligonucleotide
atggaaaaagggtgggctaggtaagaacca

SEQ ID NO: 283539 - DNA, 30 bp, Artificial Sequence
  Synthetic oligonucleotide
tattttgcagggtattggcggggagaacca

SEQ ID NO: 283540 - DNA, 30 bp, Artificial Sequence
  Synthetic oligonucleotide
gttgttcgtgattacgaacagaacgaacca

SEQ ID NO: 283541 - DNA, 30 bp, Artificial Sequence
  Synthetic oligonucleotide
agtactttgagattatcgtaagacgaacca

SEQ ID NO: 283542 - DNA, 30 bp, Artificial Sequence
  Synthetic oligonucleotide
cgcatgccctccagtgaatgcaaggaacca

SEQ ID NO: 283543 - DNA, 30 bp, Artificial Sequence
  Synthetic oligonucleotide
gtggcgaccaggtcgttggagcgggaacca

SEQ ID NO: 283544 - DNA, 30 bp, Artificial Sequence
  Synthetic oligonucleotide
tagtgtcacttgtgtcacggcggggaacca

SEQ ID NO: 283545 - DNA, 30 bp, Artificial Sequence
  Synthetic oligonucleotide
cagtttctttcagaagtcacttatgaacca

SEQ ID NO: 283546 - DNA, 30 bp, Artificial Sequence
  Synthetic oligonucleotide
cctagtagaacccaacaccgttatgaacca

SEQ ID NO: 283547 - DNA, 30 bp, Artificial Sequence
  Synthetic oligonucleotide
atattcatttaacgggtctgaactgaacca

SEQ ID NO: 283548 - DNA, 30 bp, Artificial Sequence
  Synthetic oligonucleotide
ctgctgaagattattgcaaggtgtgaacca

SEQ ID NO: 283549 - DNA, 30 bp, Artificial Sequence
  Synthetic oligonucleotide
gtggggattcaggggccatgttgtgaacca

SEQ ID NO: 283550 - DNA, 30 bp, Artificial Sequence
  Synthetic oligonucleotide
cgtattttcgttctctaagatgttgaacca

SEQ ID NO: 283551 - DNA, 30 bp, Artificial Sequence
  Synthetic oligonucleotide
gtagctcaaatgtacgcatagtttgaacca

SEQ ID NO: 283552 - DNA, 30 bp, Artificial Sequence
  Synthetic oligonucleotide
aaccgcagcgagtctgtgtcagcataacca

SEQ ID NO: 283553 - DNA, 30 bp, Artificial Sequence
  Synthetic oligonucleotide
cggcacggctcgattaatcaggcctaacca

SEQ ID NO: 283554 - DNA, 30 bp, Artificial Sequence
  Synthetic oligonucleotide
gggtaaggcacgttatggtgaatctaacca

SEQ ID NO: 283555 - DNA, 30 bp, Artificial Sequence
  Synthetic oligonucleotide
tttcgaggacccggtcgatagctgtaacca

SEQ ID NO: 283556 - DNA, 30 bp, Artificial Sequence
  Synthetic oligonucleotide
aaaagaagcattacctatcgcgtgtaacca

SEQ ID NO: 283557 - DNA, 30 bp, Artificial Sequence
  Synthetic oligonucleotide
atcagggctattgtagaggcggtgtaacca

SEQ ID NO: 283558 - DNA, 30 bp, Artificial Sequence
  Synthetic oligonucleotide
tagcatgggtgtctcgtgtatgtgtaacca

SEQ ID NO: 283559 - DNA, 30 bp, Artificial Sequence
  Synthetic oligonucleotide
tacttggcccgagatagcccacgttaacca

SEQ ID NO: 283560 - DNA, 30 bp, Artificial Sequence
  Synthetic oligonucleotide
cctggatatttacacccactacgttaacca

SEQ ID NO: 283561 - DNA, 30 bp, Artificial Sequence
  Synthetic oligonucleotide
ggaaataggtgagctttcgcataaacacca

SEQ ID NO: 283562 - DNA, 30 bp, Artificial Sequence
  Synthetic oligonucleotide
ggaggtgttactatcgagccgcgaacacca

SEQ ID NO: 283563 - DNA, 30 bp, Artificial Sequence
  Synthetic oligonucleotide
gctcatgcttatctattgtatagcacacca

SEQ ID NO: 283564 - DNA, 30 bp, Artificial Sequence
  Synthetic oligonucleotide
ccatagtattgaattcaaatactcacacca

SEQ ID NO: 283565 - DNA, 30 bp, Artificial Sequence
  Synthetic oligonucleotide
atattatagggataaaaaggacatacacca

SEQ ID NO: 283566 - DNA, 30 bp, Artificial Sequence
  Synthetic oligonucleotide
tttagtcgagatgtcacagaaattacacca

SEQ ID NO: 283567 - DNA, 30 bp, Artificial Sequence
  Synthetic oligonucleotide
aagtcgttgtacaacacctcgaaaccacca

SEQ ID NO: 283568 - DNA, 30 bp, Artificial Sequence
  Synthetic oligonucleotide
taagtcccagacccaagtattacaccacca

SEQ ID NO: 283569 - DNA, 30 bp, Artificial Sequence
  Synthetic oligonucleotide
ggaagatcggggcccggttccggaccacca

SEQ ID NO: 283570 - DNA, 30 bp, Artificial Sequence
  Synthetic oligonucleotide
ccgaggagaaagctcggtgacttaccacca

SEQ ID NO: 283571 - DNA, 30 bp, Artificial Sequence
  Synthetic oligonucleotide
ccaataagggccactgagcgtcatccacca

SEQ ID NO: 283572 - DNA, 30 bp, Artificial Sequence
  Synthetic oligonucleotide
gccacgggcactccatttgtacgtccacca

SEQ ID NO: 283573 - DNA, 30 bp, Artificial Sequence
  Synthetic oligonucleotide
ccattcagagtgacactgaccggcgcacca

SEQ ID NO: 283574 - DNA, 30 bp, Artificial Sequence
  Synthetic oligonucleotide
agcttaactggtacctacgacaaggcacca

SEQ ID NO: 283575 - DNA, 30 bp, Artificial Sequence
  Synthetic oligonucleotide
gatacattagcggtgggaagtaaggcacca

SEQ ID NO: 283576 - DNA, 30 bp, Artificial Sequence
  Synthetic oligonucleotide
tggtctacaagaagttcgaccttggcacca

SEQ ID NO: 283577 - DNA, 30 bp, Artificial Sequence
  Synthetic oligonucleotide
ggaatcgagatgttcgtgataaaatcacca

SEQ ID NO: 283578 - DNA, 30 bp, Artificial Sequence
  Synthetic oligonucleotide
gaaccgaaatgttacgataagaggtcacca

SEQ ID NO: 283579 - DNA, 30 bp, Artificial Sequence
  Synthetic oligonucleotide
ggtcatggcgggcgccaaaaccggtcacca

SEQ ID NO: 283580 - DNA, 30 bp, Artificial Sequence
  Synthetic oligonucleotide
gtcccgggacaccggaaccgtctgtcacca

SEQ ID NO: 283581 - DNA, 30 bp, Artificial Sequence
  Synthetic oligonucleotide
tcgaaggtagtacatcctacgtattcacca

SEQ ID NO: 283582 - DNA, 30 bp, Artificial Sequence
  Synthetic oligonucleotide
ggccttctgtgttgtcatcatccttcacca

SEQ ID NO: 283583 - DNA, 30 bp, Artificial Sequence
  Synthetic oligonucleotide
gttgtcgaagatacttagtagtcttcacca

SEQ ID NO: 283584 - DNA, 30 bp, Artificial Sequence
  Synthetic oligonucleotide
gcagtcgtagctatacgcgtccgaagacca

SEQ ID NO: 283585 - DNA, 30 bp, Artificial Sequence
  Synthetic oligonucleotide
aaagcctgaacgaccttactcttgagacca

SEQ ID NO: 283586 - DNA, 30 bp, Artificial Sequence
  Synthetic oligonucleotide
atagtcatacaacggctcaagttgagacca

SEQ ID NO: 283587 - DNA, 30 bp, Artificial Sequence
  Synthetic oligonucleotide
tcattagatttgggaggtgtcggtagacca

SEQ ID NO: 283588 - DNA, 30 bp, Artificial Sequence
  Synthetic oligonucleotide
gatctcagaggcgatactgtgcttagacca

SEQ ID NO: 283589 - DNA, 30 bp, Artificial Sequence
  Synthetic oligonucleotide
ataagtgttgtgtaggtcaccgcacgacca

SEQ ID NO: 283590 - DNA, 30 bp, Artificial Sequence
  Synthetic oligonucleotide
tcagtgtcgtaccagtccttgctacgacca

SEQ ID NO: 283591 - DNA, 30 bp, Artificial Sequence
  Synthetic oligonucleotide
gtcttgcccatgcttggcttgctacgacca

SEQ ID NO: 283592 - DNA, 30 bp, Artificial Sequence
  Synthetic oligonucleotide
ccggagatgcggtatgatcacgtacgacca

SEQ ID NO: 283593 - DNA, 30 bp, Artificial Sequence
  Synthetic oligonucleotide
attcactcctatcaaggtaagggccgacca

SEQ ID NO: 283594 - DNA, 30 bp, Artificial Sequence
  Synthetic oligonucleotide
aagatccaacttgttgaagttgagcgacca

SEQ ID NO: 283595 - DNA, 30 bp, Artificial Sequence
  Synthetic oligonucleotide
cggcttccaaaaccattaatcccgcgacca

SEQ ID NO: 283596 - DNA, 30 bp, Artificial Sequence
  Synthetic oligonucleotide
gatgatcgtgtttcacccgagaaaggacca

SEQ ID NO: 283597 - DNA, 30 bp, Artificial Sequence
  Synthetic oligonucleotide
gtccgaagcgttgttgtataatccggacca

SEQ ID NO: 283598 - DNA, 30 bp, Artificial Sequence
  Synthetic oligonucleotide
accctatcttatcccggcgaggtcggacca

SEQ ID NO: 283599 - DNA, 30 bp, Artificial Sequence
  Synthetic oligonucleotide
tctccagtaaggtggagtaaacatggacca

SEQ ID NO: 283600 - DNA, 30 bp, Artificial Sequence
  Synthetic oligonucleotide
gggatcacaaattaggtttacattggacca

SEQ ID NO: 283601 - DNA, 30 bp, Artificial Sequence
  Synthetic oligonucleotide
gacagttttgaaacgacacgggttggacca

SEQ ID NO: 283602 - DNA, 30 bp, Artificial Sequence
  Synthetic oligonucleotide
tcaacagcgttctacgacggcctatgacca

SEQ ID NO: 283603 - DNA, 30 bp, Artificial Sequence
  Synthetic oligonucleotide
tcttggatgatttgatggagggggtgacca

SEQ ID NO: 283604 - DNA, 30 bp, Artificial Sequence
  Synthetic oligonucleotide
ataagcagcgattccgatcagtgaatacca

SEQ ID NO: 283605 - DNA, 30 bp, Artificial Sequence
  Synthetic oligonucleotide
tggacttttaagtaactttgtcagatacca

SEQ ID NO: 283606 - DNA, 30 bp, Artificial Sequence
  Synthetic oligonucleotide
ctggaggacgcaaagactggatatatacca

SEQ ID NO: 283607 - DNA, 30 bp, Artificial Sequence
  Synthetic oligonucleotide
cgtctagaagcgacgattcttcttatacca

SEQ ID NO: 283608 - DNA, 30 bp, Artificial Sequence
  Synthetic oligonucleotide
ccatgtatgttagtctcggtaaacctacca

SEQ ID NO: 283609 - DNA, 30 bp, Artificial Sequence
  Synthetic oligonucleotide
agtaatggggaacatatccaatagctacca

SEQ ID NO: 283610 - DNA, 30 bp, Artificial Sequence
  Synthetic oligonucleotide
gggataaaacgcggcgagccttgtctacca

SEQ ID NO: 283611 - DNA, 30 bp, Artificial Sequence
  Synthetic oligonucleotide
cgtgtccaatatggcgagcggacggtacca

SEQ ID NO: 283612 - DNA, 30 bp, Artificial Sequence
  Synthetic oligonucleotide
aatgacgcgggcttaggaaactcggtacca

SEQ ID NO: 283613 - DNA, 30 bp, Artificial Sequence
  Synthetic oligonucleotide
ctattatctgaaagcgtaactatggtacca

SEQ ID NO: 283614 - DNA, 30 bp, Artificial Sequence
  Synthetic oligonucleotide
gcgcaccgcgtgccaccccaggtattacca

SEQ ID NO: 283615 - DNA, 30 bp, Artificial Sequence
  Synthetic oligonucleotide
tacgccctctattacttattaccaaaccca

SEQ ID NO: 283616 - DNA, 30 bp, Artificial Sequence
  Synthetic oligonucleotide
cactcatggtacgcacccgcactgaaccca

SEQ ID NO: 283617 - DNA, 30 bp, Artificial Sequence
  Synthetic oligonucleotide
tcgccttactcataagatgatagtaaccca

SEQ ID NO: 283618 - DNA, 30 bp, Artificial Sequence
  Synthetic oligonucleotide
tgccgggactagcgcttagtgcaacaccca

SEQ ID NO: 283619 - DNA, 30 bp, Artificial Sequence
  Synthetic oligonucleotide
gccacatttagccgatatcccggccaccca

SEQ ID NO: 283620 - DNA, 30 bp, Artificial Sequence
  Synthetic oligonucleotide
attcactttcaacgaaggcggtgccaccca

SEQ ID NO: 283621 - DNA, 30 bp, Artificial Sequence
  Synthetic oligonucleotide
cctgtgtcaatttgtttccctgggcaccca

SEQ ID NO: 283622 - DNA, 30 bp, Artificial Sequence
  Synthetic oligonucleotide
acactcgtgctagtgagagcaattcaccca

SEQ ID NO: 283623 - DNA, 30 bp, Artificial Sequence
  Synthetic oligonucleotide
tcgaggaccatacggcagatgacagaccca

SEQ ID NO: 283624 - DNA, 30 bp, Artificial Sequence
  Synthetic oligonucleotide
ataccacgtacgagtgcttggtgagaccca

SEQ ID NO: 283625 - DNA, 30 bp, Artificial Sequence
  Synthetic oligonucleotide
tccccgttcaacctgcttttcaacgaccca

SEQ ID NO: 283626 - DNA, 30 bp, Artificial Sequence
  Synthetic oligonucleotide
ttggaggtcatgttgtcaggcaccgaccca

SEQ ID NO: 283627 - DNA, 30 bp, Artificial Sequence
  Synthetic oligonucleotide
cgggtgtatgcgcaggagaggttcgaccca

SEQ ID NO: 283628 - DNA, 30 bp, Artificial Sequence
  Synthetic oligonucleotide
tctccgatagccagttgcggacaggaccca

SEQ ID NO: 283629 - DNA, 30 bp, Artificial Sequence
  Synthetic oligonucleotide
ttgcgtcagaacgagtatccctaataccca

SEQ ID NO: 283630 - DNA, 30 bp, Artificial Sequence
  Synthetic oligonucleotide
cagctgtgtttactgcgcgattactaccca

SEQ ID NO: 283631 - DNA, 30 bp, Artificial Sequence
  Synthetic oligonucleotide
ctatcgaccggtcgttggtgggtctaccca

SEQ ID NO: 283632 - DNA, 30 bp, Artificial Sequence
  Synthetic oligonucleotide
cattatctccgacttaaaacacgttaccca

SEQ ID NO: 283633 - DNA, 30 bp, Artificial Sequence
  Synthetic oligonucleotide
gtgctatcttgcctccgcatttgaacccca

SEQ ID NO: 283634 - DNA, 30 bp, Artificial Sequence
  Synthetic oligonucleotide
cagacggattcggcctgtgggataacccca

SEQ ID NO: 283635 - DNA, 30 bp, Artificial Sequence
  Synthetic oligonucleotide
tcaatctagaaagtttaatggctcacccca

SEQ ID NO: 283636 - DNA, 30 bp, Artificial Sequence
  Synthetic oligonucleotide
ggaaaatgcacttgaccagtgccgacccca

SEQ ID NO: 283637 - DNA, 30 bp, Artificial Sequence
  Synthetic oligonucleotide
catgcatggtatcgaattgaacggacccca

SEQ ID NO: 283638 - DNA, 30 bp, Artificial Sequence
  Synthetic oligonucleotide
tgtaacaattgaccgcgtgattggacccca

SEQ ID NO: 283639 - DNA, 30 bp, Artificial Sequence
  Synthetic oligonucleotide
caaagcatcgttcgttgctggtacccccca

SEQ ID NO: 283640 - DNA, 30 bp, Artificial Sequence
  Synthetic oligonucleotide
tctagctgttgcacctatacgtcagcccca

SEQ ID NO: 283641 - DNA, 30 bp, Artificial Sequence
  Synthetic oligonucleotide
tagtttgccacgtgaccttgctacgcccca

SEQ ID NO: 283642 - DNA, 30 bp, Artificial Sequence
  Synthetic oligonucleotide
tgcgacgcatgtaaatttggaaaggcccca

SEQ ID NO: 283643 - DNA, 30 bp, Artificial Sequence
  Synthetic oligonucleotide
tcataaagatgcattgcgagggcggcccca

SEQ ID NO: 283644 - DNA, 30 bp, Artificial Sequence
  Synthetic oligonucleotide
ctgcataccaagtgggagcctacttcccca

SEQ ID NO: 283645 - DNA, 30 bp, Artificial Sequence
  Synthetic oligonucleotide
caggaagtgtgagcaccgagcggttcccca

SEQ ID NO: 283646 - DNA, 30 bp, Artificial Sequence
  Synthetic oligonucleotide
ggtcattataaaggtatgaaaaacagccca

SEQ ID NO: 283647 - DNA, 30 bp, Artificial Sequence
  Synthetic oligonucleotide
cgggggactgggattgtatgaatcagccca

SEQ ID NO: 283648 - DNA, 30 bp, Artificial Sequence
  Synthetic oligonucleotide
acacctccggagccgtgattcatcagccca

SEQ ID NO: 283649 - DNA, 30 bp, Artificial Sequence
  Synthetic oligonucleotide
tcattactctcggccctactttcccgccca

SEQ ID NO: 283650 - DNA, 30 bp, Artificial Sequence
  Synthetic oligonucleotide
aacggcccgccgtcgaagtacgagcgccca

SEQ ID NO: 283651 - DNA, 30 bp, Artificial Sequence
  Synthetic oligonucleotide
aatattcgaataaatgaggttgttcgccca

SEQ ID NO: 283652 - DNA, 30 bp, Artificial Sequence
  Synthetic oligonucleotide
cacttctaagtgttcacactggaaggccca

SEQ ID NO: 283653 - DNA, 30 bp, Artificial Sequence
  Synthetic oligonucleotide
aaaaaggtgctgaaataggtgaggggccca

SEQ ID NO: 283654 - DNA, 30 bp, Artificial Sequence
  Synthetic oligonucleotide
tgcgtggatgatcacttaaggcctggccca

SEQ ID NO: 283655 - DNA, 40 bp, Artificial Sequence
  Synthetic oligonucleotide
accagcatacgtgctaacctcctgtacaatagttggccca

SEQ ID NO: 283656 - DNA, 30 bp, Artificial Sequence
  Synthetic oligonucleotide
ttatgaattaaaattgagtccgttggccca

SEQ ID NO: 283657 - DNA, 30 bp, Artificial Sequence
  Synthetic oligonucleotide
ctctgcgaggatgggagtgttcgctgccca

SEQ ID NO: 283658 - DNA, 30 bp, Artificial Sequence
  Synthetic oligonucleotide
ccaaaggcgagttgccgacaactctgccca

SEQ ID NO: 283659 - DNA, 30 bp, Artificial Sequence
  Synthetic oligonucleotide
ttatatacaatagcgatatcctcgtgccca

SEQ ID NO: 283660 - DNA, 30 bp, Artificial Sequence
  Synthetic oligonucleotide
gaagttactgtcgtgcacgactggtgccca

SEQ ID NO: 283661 - DNA, 30 bp, Artificial Sequence
  Synthetic oligonucleotide
caacatgttttgttaagtctagcttgccca

SEQ ID NO: 283662 - DNA, 30 bp, Artificial Sequence
  Synthetic oligonucleotide
gaatctgttcgactatgtggtagttgccca

SEQ ID NO: 283663 - DNA, 30 bp, Artificial Sequence
  Synthetic oligonucleotide
ctgtttatacatcatttgtttcgaatccca

SEQ ID NO: 283664 - DNA, 30 bp, Artificial Sequence
  Synthetic oligonucleotide
cgatcggataggctgatttgctcgatccca

SEQ ID NO: 283665 - DNA, 30 bp, Artificial Sequence
  Synthetic oligonucleotide
gtccggtataaagtaatatccggtatccca

SEQ ID NO: 283666 - DNA, 30 bp, Artificial Sequence
  Synthetic oligonucleotide
gctggccctcaacgtcttaatgtactccca

SEQ ID NO: 283667 - DNA, 30 bp, Artificial Sequence
  Synthetic oligonucleotide
agctatagggaattaagcgtcaccctccca

SEQ ID NO: 283668 - DNA, 30 bp, Artificial Sequence
  Synthetic oligonucleotide
ggtatcgtatctaatttcgtatctctccca

SEQ ID NO: 283669 - DNA, 30 bp, Artificial Sequence
  Synthetic oligonucleotide
tgaaacggtttaccaatgcgtgcagtccca

SEQ ID NO: 283670 - DNA, 30 bp, Artificial Sequence
  Synthetic oligonucleotide
gacggtatcatctcagtattgaacgtccca

SEQ ID NO: 283671 - DNA, 30 bp, Artificial Sequence
  Synthetic oligonucleotide
ccccgggcgaacttcacagaaagcgtccca

SEQ ID NO: 283672 - DNA, 30 bp, Artificial Sequence
  Synthetic oligonucleotide
actagcataaaccgtaagccactggtccca

SEQ ID NO: 283673 - DNA, 30 bp, Artificial Sequence
  Synthetic oligonucleotide
tgtacgaagctacggtggatccgtgtccca

SEQ ID NO: 283674 - DNA, 30 bp, Artificial Sequence
  Synthetic oligonucleotide
cgggtggcatgagtccgatgaattgtccca

SEQ ID NO: 283675 - DNA, 30 bp, Artificial Sequence
  Synthetic oligonucleotide
gtagcacagtcatcaaaagatgcgttccca

SEQ ID NO: 283676 - DNA, 30 bp, Artificial Sequence
  Synthetic oligonucleotide
aatgttaagacctaacgtggtcaaaagcca

SEQ ID NO: 283677 - DNA, 30 bp, Artificial Sequence
  Synthetic oligonucleotide
accaaaacgagtattccaggaccaaagcca

SEQ ID NO: 283678 - DNA, 30 bp, Artificial Sequence
  Synthetic oligonucleotide
ggtactgttccaggtccccgctcaaagcca

SEQ ID NO: 283679 - DNA, 30 bp, Artificial Sequence
  Synthetic oligonucleotide
cggatgggtattccggatcccccgaagcca

SEQ ID NO: 283680 - DNA, 30 bp, Artificial Sequence
  Synthetic oligonucleotide
gtagacattaaagatgggtactggaagcca

SEQ ID NO: 283681 - DNA, 30 bp, Artificial Sequence
  Synthetic oligonucleotide
tattaatgagccccggtatgaggtaagcca

SEQ ID NO: 283682 - DNA, 30 bp, Artificial Sequence
  Synthetic oligonucleotide
aagtactttccatcagatgtgtaacagcca

SEQ ID NO: 283683 - DNA, 30 bp, Artificial Sequence
  Synthetic oligonucleotide
tgcccgaatgagtacgttgacatacagcca

SEQ ID NO: 283684 - DNA, 30 bp, Artificial Sequence
  Synthetic oligonucleotide
aaaactagcggtgttgccatgtaccagcca

SEQ ID NO: 283685 - DNA, 30 bp, Artificial Sequence
  Synthetic oligonucleotide
gcggcgtgcgccaagtattagggccagcca

SEQ ID NO: 283686 - DNA, 30 bp, Artificial Sequence
  Synthetic oligonucleotide
gattagtatgccacctgagcatgccagcca

SEQ ID NO: 283687 - DNA, 30 bp, Artificial Sequence
  Synthetic oligonucleotide
tcagacgctcacgccgatgcctagcagcca

SEQ ID NO: 283688 - DNA, 30 bp, Artificial Sequence
  Synthetic oligonucleotide
aaaatgcgattgcatgcgtattagcagcca

SEQ ID NO: 283689 - DNA, 30 bp, Artificial Sequence
  Synthetic oligonucleotide
taagatacgttactcataaagaggcagcca

SEQ ID NO: 283690 - DNA, 30 bp, Artificial Sequence
  Synthetic oligonucleotide
acttggtgtactgtgaggtaaaacgagcca

SEQ ID NO: 283691 - DNA, 30 bp, Artificial Sequence
  Synthetic oligonucleotide
gcgtcaaaactaaggacccgagacgagcca

SEQ ID NO: 283692 - DNA, 30 bp, Artificial Sequence
  Synthetic oligonucleotide
gatagcgagctatcaacctagtccgagcca

SEQ ID NO: 283693 - DNA, 30 bp, Artificial Sequence
  Synthetic oligonucleotide
accggcgtacatgtgtcatgcgtcgagcca

SEQ ID NO: 283694 - DNA, 30 bp, Artificial Sequence
  Synthetic oligonucleotide
agtatatgctgctcggaagcgtatgagcca

SEQ ID NO: 283695 - DNA, 30 bp, Artificial Sequence
  Synthetic oligonucleotide
tctgggagaagctataacggccctgagcca

SEQ ID NO: 283696 - DNA, 30 bp, Artificial Sequence
  Synthetic oligonucleotide
aataaacaaagactcatacagtctgagcca

SEQ ID NO: 283697 - DNA, 30 bp, Artificial Sequence
  Synthetic oligonucleotide
ttcggggacagagttgtagtgcttgagcca

SEQ ID NO: 283698 - DNA, 30 bp, Artificial Sequence
  Synthetic oligonucleotide
actctcggggctaatatcatttcatagcca

SEQ ID NO: 283699 - DNA, 30 bp, Artificial Sequence
  Synthetic oligonucleotide
tcaggaacgccttccttatgttgatagcca

SEQ ID NO: 283700 - DNA, 30 bp, Artificial Sequence
  Synthetic oligonucleotide
accgtgaggccacggttaattctgtagcca

SEQ ID NO: 283701 - DNA, 30 bp, Artificial Sequence
  Synthetic oligonucleotide
gtgtgagaaactcaaccgcagatttagcca

SEQ ID NO: 283702 - DNA, 30 bp, Artificial Sequence
  Synthetic oligonucleotide
cgcaggttgtaacgtgggatcagcacgcca

SEQ ID NO: 283703 - DNA, 30 bp, Artificial Sequence
  Synthetic oligonucleotide
tgtgggcacagcactcgactggctacgcca

SEQ ID NO: 283704 - DNA, 30 bp, Artificial Sequence
  Synthetic oligonucleotide
ctttggtcaggctggcaagtacgtacgcca

SEQ ID NO: 283705 - DNA, 30 bp, Artificial Sequence
  Synthetic oligonucleotide
gttggctgctacagaacttaggttacgcca

SEQ ID NO: 283706 - DNA, 30 bp, Artificial Sequence
  Synthetic oligonucleotide
tgggtggctatcctggctctgagaccgcca

SEQ ID NO: 283707 - DNA, 30 bp, Artificial Sequence
  Synthetic oligonucleotide
cctaggtgtgtcttaagagtatgaccgcca

SEQ ID NO: 283708 - DNA, 30 bp, Artificial Sequence
  Synthetic oligonucleotide
gtctgagtagtctttgctgggcacccgcca

SEQ ID NO: 283709 - DNA, 30 bp, Artificial Sequence
  Synthetic oligonucleotide
cgactcttcgcggataaaaaggacgcgcca

SEQ ID NO: 283710 - DNA, 30 bp, Artificial Sequence
  Synthetic oligonucleotide
acggtagcgcatactcaaagaggcgcgcca

SEQ ID NO: 283711 - DNA, 30 bp, Artificial Sequence
  Synthetic oligonucleotide
gtcgaactttgttcgttcatttaggcgcca

SEQ ID NO: 283712 - DNA, 30 bp, Artificial Sequence
  Synthetic oligonucleotide
accatgctatgttaggacctgtatgcgcca

SEQ ID NO: 283713 - DNA, 30 bp, Artificial Sequence
  Synthetic oligonucleotide
ctccgattgagttgtggtcccaaaaggcca

SEQ ID NO: 283714 - DNA, 30 bp, Artificial Sequence
  Synthetic oligonucleotide
gtaagggatgtatcgtgtaccctaaggcca

SEQ ID NO: 283715 - DNA, 30 bp, Artificial Sequence
  Synthetic oligonucleotide
ttgatccactggaaatacctgtacaggcca

SEQ ID NO: 283716 - DNA, 30 bp, Artificial Sequence
  Synthetic oligonucleotide
actatggattcaggtaacagctataggcca

SEQ ID NO: 283717 - DNA, 30 bp, Artificial Sequence
  Synthetic oligonucleotide
tcaccgtgtactggagtcctactgcggcca

SEQ ID NO: 283718 - DNA, 30 bp, Artificial Sequence
  Synthetic oligonucleotide
catggccctaagcattgcatagtgcggcca

SEQ ID NO: 283719 - DNA, 31 bp, Artificial Sequence
  Synthetic oligonucleotide
gagcgtcttaggtaaagttatcgctcggcca

SEQ ID NO: 283720 - DNA, 30 bp, Artificial Sequence
  Synthetic oligonucleotide
gcctcagggggaggtgtcttcagtcggcca

SEQ ID NO: 283721 - DNA, 30 bp, Artificial Sequence
  Synthetic oligonucleotide
gaacatgttatatggcgctatgaagggcca

SEQ ID NO: 283722 - DNA, 30 bp, Artificial Sequence
  Synthetic oligonucleotide
ttgctagaatcttccgtcaaatgagggcca

SEQ ID NO: 283723 - DNA, 30 bp, Artificial Sequence
  Synthetic oligonucleotide
cgtaaacgattgacacgggaggtagggcca

SEQ ID NO: 283724 - DNA, 30 bp, Artificial Sequence
  Synthetic oligonucleotide
caggtaatattatataggcatcgcgggcca

SEQ ID NO: 283725 - DNA, 30 bp, Artificial Sequence
  Synthetic oligonucleotide
ggtcaacaagcatatagttgtacggggcca

SEQ ID NO: 283726 - DNA, 30 bp, Artificial Sequence
  Synthetic oligonucleotide
cagattggatacgcacctccaagggggcca

SEQ ID NO: 283727 - DNA, 30 bp, Artificial Sequence
  Synthetic oligonucleotide
gggataacgctactcggcaagatggggcca

SEQ ID NO: 283728 - DNA, 30 bp, Artificial Sequence
  Synthetic oligonucleotide
taccagcgtacgttgaagacacgtgggcca

SEQ ID NO: 283729 - DNA, 30 bp, Artificial Sequence
  Synthetic oligonucleotide
cacatatcgctttccgtttgttgtgggcca

SEQ ID NO: 283730 - DNA, 30 bp, Artificial Sequence
  Synthetic oligonucleotide
aaagccgcgtatacatttccacaatggcca

SEQ ID NO: 283731 - DNA, 30 bp, Artificial Sequence
  Synthetic oligonucleotide
ggggaatgggtattggagcatacatggcca

SEQ ID NO: 283732 - DNA, 30 bp, Artificial Sequence
  Synthetic oligonucleotide
gttcagtgcattcacaagtgaatatggcca

SEQ ID NO: 283733 - DNA, 30 bp, Artificial Sequence
  Synthetic oligonucleotide
cagggtcactggtgagcactggtatggcca

SEQ ID NO: 283734 - DNA, 30 bp, Artificial Sequence
  Synthetic oligonucleotide
ataacgttttcttgcacggtttactggcca

SEQ ID NO: 283735 - DNA, 30 bp, Artificial Sequence
  Synthetic oligonucleotide
gggatgaacacactccaggtctgctggcca

SEQ ID NO: 283736 - DNA, 30 bp, Artificial Sequence
  Synthetic oligonucleotide
agatacgttaataatccgtacgtctggcca

SEQ ID NO: 283737 - DNA, 30 bp, Artificial Sequence
  Synthetic oligonucleotide
agtgcaattccttaaccgggttagtggcca

SEQ ID NO: 283738 - DNA, 30 bp, Artificial Sequence
  Synthetic oligonucleotide
cagtctttttggtgaatatcttattggcca

SEQ ID NO: 283739 - DNA, 30 bp, Artificial Sequence
  Synthetic oligonucleotide
ttcgtcctacctctaggtcagtgcatgcca

SEQ ID NO: 283740 - DNA, 30 bp, Artificial Sequence
  Synthetic oligonucleotide
tatattaaaggggggggcagagttatgcca

SEQ ID NO: 283741 - DNA, 30 bp, Artificial Sequence
  Synthetic oligonucleotide
atatcatcctcatactctatgaagctgcca

SEQ ID NO: 283742 - DNA, 30 bp, Artificial Sequence
  Synthetic oligonucleotide
tatggagaacacgctgcggtacgagtgcca

SEQ ID NO: 283743 - DNA, 30 bp, Artificial Sequence
  Synthetic oligonucleotide
aacacatgggcttgcttgggcggcgtgcca

SEQ ID NO: 283744 - DNA, 30 bp, Artificial Sequence
  Synthetic oligonucleotide
ttcaaggtgcatatattgacaggggtgcca

SEQ ID NO: 283745 - DNA, 30 bp, Artificial Sequence
  Synthetic oligonucleotide
aaatgtgggaaacggctggccaaattgcca

SEQ ID NO: 283746 - DNA, 30 bp, Artificial Sequence
  Synthetic oligonucleotide
atatgtagtagcctagaacatgaattgcca

SEQ ID NO: 283747 - DNA, 30 bp, Artificial Sequence
  Synthetic oligonucleotide
gcctcagcgagcctcagcggtcgattgcca

SEQ ID NO: 283748 - DNA, 30 bp, Artificial Sequence
  Synthetic oligonucleotide
taggttcgggtacctcaggggtccttgcca

SEQ ID NO: 283749 - DNA, 30 bp, Artificial Sequence
  Synthetic oligonucleotide
aaggctgccataggcagggatctcttgcca

SEQ ID NO: 283750 - DNA, 30 bp, Artificial Sequence
  Synthetic oligonucleotide
gattaaaataccagtcattgtgtcttgcca

SEQ ID NO: 283751 - DNA, 31 bp, Artificial Sequence
  Synthetic oligonucleotide
tggcacaatggttccacgcgctgtgttgcca

SEQ ID NO: 283752 - DNA, 30 bp, Artificial Sequence
  Synthetic oligonucleotide
gtcttcacggatcttagggggaaaaatcca

SEQ ID NO: 283753 - DNA, 30 bp, Artificial Sequence
  Synthetic oligonucleotide
tgaatactcacacgcgaacggctcaatcca

SEQ ID NO: 283754 - DNA, 30 bp, Artificial Sequence
  Synthetic oligonucleotide
gtggctgttataaaattatgggtcaatcca

SEQ ID NO: 283755 - DNA, 30 bp, Artificial Sequence
  Synthetic oligonucleotide
gtattgggaatatggttataacggaatcca

SEQ ID NO: 283756 - DNA, 30 bp, Artificial Sequence
  Synthetic oligonucleotide
tttgcgcctatctcaacgtggctgaatcca

SEQ ID NO: 283757 - DNA, 30 bp, Artificial Sequence
  Synthetic oligonucleotide
cagaacgttacgcgatttcgttgtaatcca

SEQ ID NO: 283758 - DNA, 30 bp, Artificial Sequence
  Synthetic oligonucleotide
ccttaattagaagtggctcaacttaatcca

SEQ ID NO: 283759 - DNA, 30 bp, Artificial Sequence
  Synthetic oligonucleotide
atcagtgaccacagacgggtggcacatcca

SEQ ID NO: 283760 - DNA, 30 bp, Artificial Sequence
  Synthetic oligonucleotide
tgggtatgaccagtgaccctatgacatcca

SEQ ID NO: 283761 - DNA, 30 bp, Artificial Sequence
  Synthetic oligonucleotide
ccgtccgatggttgacggctcctagatcca

SEQ ID NO: 283762 - DNA, 30 bp, Artificial Sequence
  Synthetic oligonucleotide
tgcgcccattcagtctgctcagtagatcca

SEQ ID NO: 283763 - DNA, 30 bp, Artificial Sequence
  Synthetic oligonucleotide
actcaggacacgtagtaatgtggcgatcca

SEQ ID NO: 283764 - DNA, 30 bp, Artificial Sequence
  Synthetic oligonucleotide
tgcttgtgtgctatcacccaatgatatcca

SEQ ID NO: 283765 - DNA, 30 bp, Artificial Sequence
  Synthetic oligonucleotide
tcgttctaaaattatgatacacagtatcca

SEQ ID NO: 283766 - DNA, 30 bp, Artificial Sequence
  Synthetic oligonucleotide
cgcgtgcttgtaaacacggtgcagtatcca

SEQ ID NO: 283767 - DNA, 30 bp, Artificial Sequence
  Synthetic oligonucleotide
gaggaaaggatgaggctactggcgtatcca

SEQ ID NO: 283768 - DNA, 30 bp, Artificial Sequence
  Synthetic oligonucleotide
gaatttacggacgaacgaatgtggtatcca

SEQ ID NO: 283769 - DNA, 30 bp, Artificial Sequence
  Synthetic oligonucleotide
gccgggtttctgaggaacttgatgtatcca

SEQ ID NO: 283770 - DNA, 30 bp, Artificial Sequence
  Synthetic oligonucleotide
caatgctcgagattacaacaatgttatcca

SEQ ID NO: 283771 - DNA, 30 bp, Artificial Sequence
  Synthetic oligonucleotide
gggagcaacatcgtatgataaatttatcca

SEQ ID NO: 283772 - DNA, 30 bp, Artificial Sequence
  Synthetic oligonucleotide
agcagaagccttaagttggctatcactcca

SEQ ID NO: 283773 - DNA, 30 bp, Artificial Sequence
  Synthetic oligonucleotide
tagtatggattacacgtcaagcatactcca

SEQ ID NO: 283774 - DNA, 30 bp, Artificial Sequence
  Synthetic oligonucleotide
ttatctaagtttaatccactagcacctcca

SEQ ID NO: 283775 - DNA, 30 bp, Artificial Sequence
  Synthetic oligonucleotide
tccttaacttaagaggacaaatcacctcca

SEQ ID NO: 283776 - DNA, 30 bp, Artificial Sequence
  Synthetic oligonucleotide
atcactgcagggatgagccaactacctcca

SEQ ID NO: 283777 - DNA, 30 bp, Artificial Sequence
  Synthetic oligonucleotide
attgtctgatacggacactctggccctcca

SEQ ID NO: 283778 - DNA, 30 bp, Artificial Sequence
  Synthetic oligonucleotide
tgatgagtaatcaagtagataactcctcca

SEQ ID NO: 283779 - DNA, 30 bp, Artificial Sequence
  Synthetic oligonucleotide
aagctgtagtaccactggtcacaagctcca

SEQ ID NO: 283780 - DNA, 30 bp, Artificial Sequence
  Synthetic oligonucleotide
cggccgggtctgaattggaggcccgctcca

SEQ ID NO: 283781 - DNA, 30 bp, Artificial Sequence
  Synthetic oligonucleotide
cggagtttatacgagctgatagcggctcca

SEQ ID NO: 283782 - DNA, 30 bp, Artificial Sequence
  Synthetic oligonucleotide
aggtttcgaagcatacctgatggggctcca

SEQ ID NO: 283783 - DNA, 30 bp, Artificial Sequence
  Synthetic oligonucleotide
aaagctttattcgcgcgtaggcgtgctcca

SEQ ID NO: 283784 - DNA, 30 bp, Artificial Sequence
  Synthetic oligonucleotide
taatgggtgcaggcaatggcaattgctcca

SEQ ID NO: 283785 - DNA, 31 bp, Artificial Sequence
  Synthetic oligonucleotide
atcatagcggttttggaaagtgctctctcca

SEQ ID NO: 283786 - DNA, 30 bp, Artificial Sequence
  Synthetic oligonucleotide
agtatctggggcatgtcactcgggtctcca

SEQ ID NO: 283787 - DNA, 30 bp, Artificial Sequence
  Synthetic oligonucleotide
gatacaaattatgcttgcttaatgtctcca

SEQ ID NO: 283788 - DNA, 30 bp, Artificial Sequence
  Synthetic oligonucleotide
caggctcgtgctgttggtttcccaagtcca

SEQ ID NO: 283789 - DNA, 30 bp, Artificial Sequence
  Synthetic oligonucleotide
ataaagaatactagccagccggcaagtcca

SEQ ID NO: 283790 - DNA, 30 bp, Artificial Sequence
  Synthetic oligonucleotide
ctggatcagaccccacgggactcaagtcca

SEQ ID NO: 283791 - DNA, 30 bp, Artificial Sequence
  Synthetic oligonucleotide
gcggtctggggaacatacggtccgagtcca

SEQ ID NO: 283792 - DNA, 30 bp, Artificial Sequence
  Synthetic oligonucleotide
cggaacggccatatgtcgggggttagtcca

SEQ ID NO: 283793 - DNA, 30 bp, Artificial Sequence
  Synthetic oligonucleotide
aagatggtatgcatttcaaagggacgtcca

SEQ ID NO: 283794 - DNA, 30 bp, Artificial Sequence
  Synthetic oligonucleotide
cgtaagtataccgtggttacatgacgtcca

SEQ ID NO: 283795 - DNA, 30 bp, Artificial Sequence
  Synthetic oligonucleotide
agtgggttaccaacctgacatacccgtcca

SEQ ID NO: 283796 - DNA, 30 bp, Artificial Sequence
  Synthetic oligonucleotide
tcttagctatacacccggaactcgcgtcca

SEQ ID NO: 283797 - DNA, 30 bp, Artificial Sequence
  Synthetic oligonucleotide
tagcgacaccagggaggtggctaaggtcca

SEQ ID NO: 283798 - DNA, 30 bp, Artificial Sequence
  Synthetic oligonucleotide
tgtggtacacaattggtgcgggacggtcca

SEQ ID NO: 283799 - DNA, 30 bp, Artificial Sequence
  Synthetic oligonucleotide
gcgagaggtccttgtcacgacagcggtcca

SEQ ID NO: 283800 - DNA, 30 bp, Artificial Sequence
  Synthetic oligonucleotide
ggctaatatggcgtgcatgccgtgggtcca

SEQ ID NO: 283801 - DNA, 30 bp, Artificial Sequence
  Synthetic oligonucleotide
tgaccggacgtggacaaaccgaactgtcca

SEQ ID NO: 283802 - DNA, 30 bp, Artificial Sequence
  Synthetic oligonucleotide
tctatgagggtataccctgacgcctgtcca

SEQ ID NO: 283803 - DNA, 30 bp, Artificial Sequence
  Synthetic oligonucleotide
tcaacaaagagacggtgccaatgctgtcca

SEQ ID NO: 283804 - DNA, 30 bp, Artificial Sequence
  Synthetic oligonucleotide
tccactcaaacgcgtgagctcgtctgtcca

SEQ ID NO: 283805 - DNA, 30 bp, Artificial Sequence
  Synthetic oligonucleotide
ggagctgatgcataatcttcgtattgtcca

SEQ ID NO: 283806 - DNA, 30 bp, Artificial Sequence
  Synthetic oligonucleotide
taacggtcgtctacatttaaatgcattcca

SEQ ID NO: 283807 - DNA, 30 bp, Artificial Sequence
  Synthetic oligonucleotide
cggctggtatccttctatacgctcattcca

SEQ ID NO: 283808 - DNA, 30 bp, Artificial Sequence
  Synthetic oligonucleotide
gcaaaggtgtcattgtcgggcgggattcca

SEQ ID NO: 283809 - DNA, 30 bp, Artificial Sequence
  Synthetic oligonucleotide
taccaggactagttactataatggattcca

SEQ ID NO: 283810 - DNA, 30 bp, Artificial Sequence
  Synthetic oligonucleotide
tcaccggtgaccattgggagtaatattcca

SEQ ID NO: 283811 - DNA, 30 bp, Artificial Sequence
  Synthetic oligonucleotide
gtccggttaccaagcaagcgcggtattcca

SEQ ID NO: 283812 - DNA, 30 bp, Artificial Sequence
  Synthetic oligonucleotide
tgttgccttgagactaggatctcacttcca

SEQ ID NO: 283813 - DNA, 30 bp, Artificial Sequence
  Synthetic oligonucleotide
caatacccgattgctcttaaacaccttcca

SEQ ID NO: 283814 - DNA, 30 bp, Artificial Sequence
  Synthetic oligonucleotide
acgttttcatctaaggggactgcccttcca

SEQ ID NO: 283815 - DNA, 30 bp, Artificial Sequence
  Synthetic oligonucleotide
gggattgttatggcgccgggaatcgttcca

SEQ ID NO: 283816 - DNA, 30 bp, Artificial Sequence
  Synthetic oligonucleotide
tgaggtgtggaatactaattttaggttcca

SEQ ID NO: 283817 - DNA, 30 bp, Artificial Sequence
  Synthetic oligonucleotide
tagggggggattcctcgaaggtgggttcca

SEQ ID NO: 283818 - DNA, 30 bp, Artificial Sequence
  Synthetic oligonucleotide
tgaagtcggccgcaactgccaagatttcca

SEQ ID NO: 283819 - DNA, 30 bp, Artificial Sequence
  Synthetic oligonucleotide
cggtaagcactgacctttggcggctttcca

SEQ ID NO: 283820 - DNA, 30 bp, Artificial Sequence
  Synthetic oligonucleotide
tatcattgctgatggtaccacgagtttcca

SEQ ID NO: 283821 - DNA, 30 bp, Artificial Sequence
  Synthetic oligonucleotide
acaacgcccgaatggtcgttatcttttcca

SEQ ID NO: 283822 - DNA, 30 bp, Artificial Sequence
  Synthetic oligonucleotide
ctgggacaggaggggtgttggatttttcca

SEQ ID NO: 283823 - DNA, 30 bp, Artificial Sequence
  Synthetic oligonucleotide
ccgcaagcatgagaagtttaacgcaaagca

SEQ ID NO: 283824 - DNA, 30 bp, Artificial Sequence
  Synthetic oligonucleotide
aagctgcgctcgcgcggaggttgcaaagca

SEQ ID NO: 283825 - DNA, 30 bp, Artificial Sequence
  Synthetic oligonucleotide
ctgaatcccggcgggaccattcagaaagca

SEQ ID NO: 283826 - DNA, 30 bp, Artificial Sequence
  Synthetic oligonucleotide
tctggcgtttacagggggagccctaaagca

SEQ ID NO: 283827 - DNA, 30 bp, Artificial Sequence
  Synthetic oligonucleotide
cgggctcacgccatctgtgacgttaaagca

SEQ ID NO: 283828 - DNA, 30 bp, Artificial Sequence
  Synthetic oligonucleotide
ggaataagcgcagtggttacgctacaagca

SEQ ID NO: 283829 - DNA, 30 bp, Artificial Sequence
  Synthetic oligonucleotide
ttcacccccagaaacctgggtttacaagca

SEQ ID NO: 283830 - DNA, 30 bp, Artificial Sequence
  Synthetic oligonucleotide
cctgaaaattgagccgatcgggcgcaagca

SEQ ID NO: 283831 - DNA, 30 bp, Artificial Sequence
  Synthetic oligonucleotide
tgctttgtacggttttagctgaatcaagca

SEQ ID NO: 283832 - DNA, 30 bp, Artificial Sequence
  Synthetic oligonucleotide
attaagcccatagtgcatgggcaagaagca

SEQ ID NO: 283833 - DNA, 30 bp, Artificial Sequence
  Synthetic oligonucleotide
cgaggtgtgaccttcacttctacagaagca

SEQ ID NO: 283834 - DNA, 30 bp, Artificial Sequence
  Synthetic oligonucleotide
gggtcgtctaatcgcgctcctgcagaagca

SEQ ID NO: 283835 - DNA, 30 bp, Artificial Sequence
  Synthetic oligonucleotide
cgagatgtcttcaccgggcagtcagaagca

SEQ ID NO: 283836 - DNA, 30 bp, Artificial Sequence
  Synthetic oligonucleotide
gttgtagtttcctcaaagtcaggagaagca

SEQ ID NO: 283837 - DNA, 30 bp, Artificial Sequence
  Synthetic oligonucleotide
gcagtcaacgggtgtatagatttagaagca

SEQ ID NO: 283838 - DNA, 30 bp, Artificial Sequence
  Synthetic oligonucleotide
ccgcatgaacttatgcaagagctggaagca

SEQ ID NO: 283839 - DNA, 30 bp, Artificial Sequence
  Synthetic oligonucleotide
actggtcccgttcgggctatggtggaagca

SEQ ID NO: 283840 - DNA, 30 bp, Artificial Sequence
  Synthetic oligonucleotide
gtacccggtttaagcaccttgtcataagca

SEQ ID NO: 283841 - DNA, 30 bp, Artificial Sequence
  Synthetic oligonucleotide
ctctatgccgctcgggataagcgttaagca

SEQ ID NO: 283842 - DNA, 30 bp, Artificial Sequence
  Synthetic oligonucleotide
gcccggcggagtgtcattcgtcgttaagca

SEQ ID NO: 283843 - DNA, 30 bp, Artificial Sequence
  Synthetic oligonucleotide
cgggttgaattataacagccctgttaagca

SEQ ID NO: 283844 - DNA, 30 bp, Artificial Sequence
  Synthetic oligonucleotide
gattataagcagtattgggcgctaacagca

SEQ ID NO: 283845 - DNA, 30 bp, Artificial Sequence
  Synthetic oligonucleotide
caattaacgaaaccaactactctaacagca

SEQ ID NO: 283846 - DNA, 30 bp, Artificial Sequence
  Synthetic oligonucleotide
ttatcgcctgcgggtcgccctcccacagca

SEQ ID NO: 283847 - DNA, 30 bp, Artificial Sequence
  Synthetic oligonucleotide
aagattgataaacaggcatgcgtcacagca

SEQ ID NO: 283848 - DNA, 30 bp, Artificial Sequence
  Synthetic oligonucleotide
tcagtgaaacttgcgtttgaattcacagca

SEQ ID NO: 283849 - DNA, 30 bp, Artificial Sequence
  Synthetic oligonucleotide
ggcctcaaagtttaaggatcgttcacagca

SEQ ID NO: 283850 - DNA, 30 bp, Artificial Sequence
  Synthetic oligonucleotide
ccaaaacccgcgcccctctcgataccagca

SEQ ID NO: 283851 - DNA, 30 bp, Artificial Sequence
  Synthetic oligonucleotide
tggcatgtcggacctagggtcaacccagca

SEQ ID NO: 283852 - DNA, 30 bp, Artificial Sequence
  Synthetic oligonucleotide
ttaagggataactgtcgtatgtcgccagca

SEQ ID NO: 283853 - DNA, 30 bp, Artificial Sequence
  Synthetic oligonucleotide
gggtaagccctataactccgggtagcagca

SEQ ID NO: 283854 - DNA, 30 bp, Artificial Sequence
  Synthetic oligonucleotide
tgctagtgagcctcaggatggaaggcagca

SEQ ID NO: 283855 - DNA, 30 bp, Artificial Sequence
  Synthetic oligonucleotide
aagaggagaaatgtggcatgaacggcagca

SEQ ID NO: 283856 - DNA, 30 bp, Artificial Sequence
  Synthetic oligonucleotide
ctatgttcccctatgacagcacgggcagca

SEQ ID NO: 283857 - DNA, 30 bp, Artificial Sequence
  Synthetic oligonucleotide
gctatggtcctctagaataagatatcagca

SEQ ID NO: 283858 - DNA, 30 bp, Artificial Sequence
  Synthetic oligonucleotide
aatgctttagcatgttgtacagactcagca

SEQ ID NO: 283859 - DNA, 30 bp, Artificial Sequence
  Synthetic oligonucleotide
gtagctcatatgggcgatacagggtcagca

SEQ ID NO: 283860 - DNA, 30 bp, Artificial Sequence
  Synthetic oligonucleotide
gtatagattactcggaaagtactttcagca

SEQ ID NO: 283861 - DNA, 30 bp, Artificial Sequence
  Synthetic oligonucleotide
aataaacactgatggactttcgtttcagca

SEQ ID NO: 283862 - DNA, 30 bp, Artificial Sequence
  Synthetic oligonucleotide
cttagtttcccgcgcaaaacacgaagagca

SEQ ID NO: 283863 - DNA, 30 bp, Artificial Sequence
  Synthetic oligonucleotide
aagcaggctagctttccgtaaaacagagca

SEQ ID NO: 283864 - DNA, 30 bp, Artificial Sequence
  Synthetic oligonucleotide
gccggttgggcggcgtgagctaagagagca

SEQ ID NO: 283865 - DNA, 30 bp, Artificial Sequence
  Synthetic oligonucleotide
ataaatggtcgtcgccatcgggatagagca

SEQ ID NO: 283866 - DNA, 30 bp, Artificial Sequence
  Synthetic oligonucleotide
attttgcgaccgatggtgtcatctagagca

SEQ ID NO: 283867 - DNA, 31 bp, Artificial Sequence
  Synthetic oligonucleotide
tttatatataaaggcccacgtccaacgagca

SEQ ID NO: 283868 - DNA, 30 bp, Artificial Sequence
  Synthetic oligonucleotide
ttgcagccaaacacggtattttaacgagca

SEQ ID NO: 283869 - DNA, 30 bp, Artificial Sequence
  Synthetic oligonucleotide
cagccccgacaatagacatggatacgagca

SEQ ID NO: 283870 - DNA, 30 bp, Artificial Sequence
  Synthetic oligonucleotide
cttcaccgcccggaatacatatgtcgagca

SEQ ID NO: 283871 - DNA, 30 bp, Artificial Sequence
  Synthetic oligonucleotide
cttaggtctgatggtctgacgtttcgagca

SEQ ID NO: 283872 - DNA, 30 bp, Artificial Sequence
  Synthetic oligonucleotide
catagcagcgtgctactcagaaaaggagca

SEQ ID NO: 283873 - DNA, 30 bp, Artificial Sequence
  Synthetic oligonucleotide
gatattgtactgagcgcgcggtaaggagca

SEQ ID NO: 283874 - DNA, 30 bp, Artificial Sequence
  Synthetic oligonucleotide
gcctatccgtggacgtatccgagaggagca

SEQ ID NO: 283875 - DNA, 30 bp, Artificial Sequence
  Synthetic oligonucleotide
ctagttgttttaaactagagttgaggagca

SEQ ID NO: 283876 - DNA, 30 bp, Artificial Sequence
  Synthetic oligonucleotide
gtctgttcggaaatacagggtccgggagca

SEQ ID NO: 283877 - DNA, 30 bp, Artificial Sequence
  Synthetic oligonucleotide
acaaataaatccggttccacactgggagca

SEQ ID NO: 283878 - DNA, 30 bp, Artificial Sequence
  Synthetic oligonucleotide
ttcacataaactgcagatatatatggagca

SEQ ID NO: 283879 - DNA, 30 bp, Artificial Sequence
  Synthetic oligonucleotide
gacattgaacggatacgtaattatggagca

SEQ ID NO: 283880 - DNA, 30 bp, Artificial Sequence
  Synthetic oligonucleotide
ctcaccaagcaaacatttggcactggagca

SEQ ID NO: 283881 - DNA, 30 bp, Artificial Sequence
  Synthetic oligonucleotide
taacccatggatgtcgcgccttttggagca

SEQ ID NO: 283882 - DNA, 30 bp, Artificial Sequence
  Synthetic oligonucleotide
agtaataattgagtccagccacaatgagca

SEQ ID NO: 283883 - DNA, 30 bp, Artificial Sequence
  Synthetic oligonucleotide
gcttgtaataagagctggaccagctgagca

SEQ ID NO: 283884 - DNA, 30 bp, Artificial Sequence
  Synthetic oligonucleotide
ctctttaatgacagctatacggtgtgagca

SEQ ID NO: 283885 - DNA, 30 bp, Artificial Sequence
  Synthetic oligonucleotide
agtattcacattgttagtgttacttgagca

SEQ ID NO: 283886 - DNA, 30 bp, Artificial Sequence
  Synthetic oligonucleotide
tgaagacccagaacgctagcttacatagca

SEQ ID NO: 283887 - DNA, 30 bp, Artificial Sequence
  Synthetic oligonucleotide
ttgccgatgcaccgcatcacgctcatagca

SEQ ID NO: 283888 - DNA, 30 bp, Artificial Sequence
  Synthetic oligonucleotide
gatttgaggcagggtacttgagcgatagca

SEQ ID NO: 283889 - DNA, 30 bp, Artificial Sequence
  Synthetic oligonucleotide
gtagactgtgcgtgacagaccattatagca

SEQ ID NO: 283890 - DNA, 30 bp, Artificial Sequence
  Synthetic oligonucleotide
ttcacaatagccggcttacacgttatagca

SEQ ID NO: 283891 - DNA, 30 bp, Artificial Sequence
  Synthetic oligonucleotide
tatttttagcgttcgtatattacactagca

SEQ ID NO: 283892 - DNA, 30 bp, Artificial Sequence
  Synthetic oligonucleotide
ggagcaggctgtggccagggtagactagca

SEQ ID NO: 283893 - DNA, 30 bp, Artificial Sequence
  Synthetic oligonucleotide
ctatggatggaagtaggctacttactagca

SEQ ID NO: 283894 - DNA, 30 bp, Artificial Sequence
  Synthetic oligonucleotide
gagtacgcccatgagctcgaggacctagca

SEQ ID NO: 283895 - DNA, 30 bp, Artificial Sequence
  Synthetic oligonucleotide
actgtgcacttgtcatgaataaccctagca

SEQ ID NO: 283896 - DNA, 30 bp, Artificial Sequence
  Synthetic oligonucleotide
attaccttatcatctcaacaacgcctagca

SEQ ID NO: 283897 - DNA, 30 bp, Artificial Sequence
  Synthetic oligonucleotide
ataagcggacaacataggtacttgctagca

SEQ ID NO: 283898 - DNA, 30 bp, Artificial Sequence
  Synthetic oligonucleotide
ctctcaggattagctaggcacccagtagca

SEQ ID NO: 283899 - DNA, 30 bp, Artificial Sequence
  Synthetic oligonucleotide
gcaacccgctgcccgcggaatggagtagca

SEQ ID NO: 283900 - DNA, 30 bp, Artificial Sequence
  Synthetic oligonucleotide
aaaaaggaaagaaagatgcatgtcgtagca

SEQ ID NO: 283901 - DNA, 30 bp, Artificial Sequence
  Synthetic oligonucleotide
atgaatagtgcatacgtatatgtcgtagca

SEQ ID NO: 283902 - DNA, 30 bp, Artificial Sequence
  Synthetic oligonucleotide
ttccttgcacgggtagtaattaaggtagca

SEQ ID NO: 283903 - DNA, 30 bp, Artificial Sequence
  Synthetic oligonucleotide
gtgtctgttctgatagcgttataggtagca

SEQ ID NO: 283904 - DNA, 30 bp, Artificial Sequence
  Synthetic oligonucleotide
aacctctacagatgttcatttagggtagca

SEQ ID NO: 283905 - DNA, 30 bp, Artificial Sequence
  Synthetic oligonucleotide
ggactcattccccgcggtccccgggtagca

SEQ ID NO: 283906 - DNA, 30 bp, Artificial Sequence
  Synthetic oligonucleotide
gattagtactgagttttacgtatggtagca

SEQ ID NO: 283907 - DNA, 30 bp, Artificial Sequence
  Synthetic oligonucleotide
ggaagataggtaatcaacgagagtgtagca

SEQ ID NO: 283908 - DNA, 30 bp, Artificial Sequence
  Synthetic oligonucleotide
ctattggccgattgattcctttgtgtagca

SEQ ID NO: 283909 - DNA, 30 bp, Artificial Sequence
  Synthetic oligonucleotide
gcaggaaattcgatgtaactcgccttagca

SEQ ID NO: 283910 - DNA, 30 bp, Artificial Sequence
  Synthetic oligonucleotide
tatgcaaaaagctcgatccggatcttagca

SEQ ID NO: 283911 - DNA, 30 bp, Artificial Sequence
  Synthetic oligonucleotide
ttccagttataaggctcccaaacgttagca

SEQ ID NO: 283912 - DNA, 30 bp, Artificial Sequence
  Synthetic oligonucleotide
cagcgcgatttaccgtcgagaaggttagca

SEQ ID NO: 283913 - DNA, 30 bp, Artificial Sequence
  Synthetic oligonucleotide
caccatttttataagtagcgcctgttagca

SEQ ID NO: 283914 - DNA, 30 bp, Artificial Sequence
  Synthetic oligonucleotide
gtaatgggtttagagctgtcgaaaaacgca

SEQ ID NO: 283915 - DNA, 30 bp, Artificial Sequence
  Synthetic oligonucleotide
caactttccgtaatccggctgcgaaacgca

SEQ ID NO: 283916 - DNA, 30 bp, Artificial Sequence
  Synthetic oligonucleotide
tgtcgctgctcccttgatcgaataaacgca

SEQ ID NO: 283917 - DNA, 30 bp, Artificial Sequence
  Synthetic oligonucleotide
tgaggacatactctagactgactaaacgca

SEQ ID NO: 283918 - DNA, 30 bp, Artificial Sequence
  Synthetic oligonucleotide
agttaatagggcgtgtctactcgcaacgca

SEQ ID NO: 283919 - DNA, 30 bp, Artificial Sequence
  Synthetic oligonucleotide
atagcgaggacttctacctagctcaacgca

SEQ ID NO: 283920 - DNA, 30 bp, Artificial Sequence
  Synthetic oligonucleotide
catcggatttaagggcttcatgggaacgca

SEQ ID NO: 283921 - DNA, 30 bp, Artificial Sequence
  Synthetic oligonucleotide
taaacctcaagcgtccaataaactaacgca

SEQ ID NO: 283922 - DNA, 30 bp, Artificial Sequence
  Synthetic oligonucleotide
taagcatacgtaggttacatacgtaacgca

SEQ ID NO: 283923 - DNA, 30 bp, Artificial Sequence
  Synthetic oligonucleotide
aattaatgtatacagtcggggcttaacgca

SEQ ID NO: 283924 - DNA, 30 bp, Artificial Sequence
  Synthetic oligonucleotide
aacagcatatatattgatcctgttaacgca

SEQ ID NO: 283925 - DNA, 30 bp, Artificial Sequence
  Synthetic oligonucleotide
gcatgtgtgccagtaatagtgtcacacgca

SEQ ID NO: 283926 - DNA, 30 bp, Artificial Sequence
  Synthetic oligonucleotide
acaaagtttttgtctatgggtggacacgca

SEQ ID NO: 283927 - DNA, 30 bp, Artificial Sequence
  Synthetic oligonucleotide
cacagggcgtgtggtcgtctctcgcacgca

SEQ ID NO: 283928 - DNA, 30 bp, Artificial Sequence
  Synthetic oligonucleotide
ctaaagagacttgattcgatgcggcacgca

SEQ ID NO: 283929 - DNA, 29 bp, Artificial Sequence
  Synthetic oligonucleotide
taacgagccggctcggtcttcggcacgca

SEQ ID NO: 283930 - DNA, 30 bp, Artificial Sequence
  Synthetic oligonucleotide
aggaattcacaatcagagcgtggagacgca

SEQ ID NO: 283931 - DNA, 30 bp, Artificial Sequence
  Synthetic oligonucleotide
ccgcccgaggaggaagatatcacggacgca

SEQ ID NO: 283932 - DNA, 30 bp, Artificial Sequence
  Synthetic oligonucleotide
gcaaagtggtatgcgcactggacggacgca

SEQ ID NO: 283933 - DNA, 30 bp, Artificial Sequence
  Synthetic oligonucleotide
ctgaacatccaatctgtacgtaactacgca

SEQ ID NO: 283934 - DNA, 30 bp, Artificial Sequence
  Synthetic oligonucleotide
aatccgtttatcgacgatataaggtacgca

SEQ ID NO: 283935 - DNA, 30 bp, Artificial Sequence
  Synthetic oligonucleotide
tgacatcaggtcaggtgtatgcggtacgca

SEQ ID NO: 283936 - DNA, 30 bp, Artificial Sequence
  Synthetic oligonucleotide
agtggggtcaagtcgggtgagctgtacgca

SEQ ID NO: 283937 - DNA, 30 bp, Artificial Sequence
  Synthetic oligonucleotide
tgaatctgttaacaagcctcctgaaccgca

SEQ ID NO: 283938 - DNA, 30 bp, Artificial Sequence
  Synthetic oligonucleotide
taatcgcaatatggacaggtgagtaccgca

SEQ ID NO: 283939 - DNA, 30 bp, Artificial Sequence
  Synthetic oligonucleotide
atagcggacgtcttgtctatacggcccgca

SEQ ID NO: 283940 - DNA, 30 bp, Artificial Sequence
  Synthetic oligonucleotide
gtaaatcagaattataatcttaccgccgca

SEQ ID NO: 283941 - DNA, 30 bp, Artificial Sequence
  Synthetic oligonucleotide
ggaggtttttccgacattgtaaaggccgca

SEQ ID NO: 283942 - DNA, 30 bp, Artificial Sequence
  Synthetic oligonucleotide
gcctagtcagaatgtaacggttaggccgca

SEQ ID NO: 283943 - DNA, 30 bp, Artificial Sequence
  Synthetic oligonucleotide
ctgataagtgtatgattaggctcggccgca

SEQ ID NO: 283944 - DNA, 30 bp, Artificial Sequence
  Synthetic oligonucleotide
aatcaggatccattcggtctgaaatccgca

SEQ ID NO: 283945 - DNA, 30 bp, Artificial Sequence
  Synthetic oligonucleotide
ggatgccgcaagaatgccatgaactccgca

SEQ ID NO: 283946 - DNA, 30 bp, Artificial Sequence
  Synthetic oligonucleotide
gttaacttccgaaacttcgacctgtccgca

SEQ ID NO: 283947 - DNA, 30 bp, Artificial Sequence
  Synthetic oligonucleotide
gcccagcggcaactctaaagaatttccgca

SEQ ID NO: 283948 - DNA, 30 bp, Artificial Sequence
  Synthetic oligonucleotide
tccatgtgttgtaccgggttcatttccgca

SEQ ID NO: 283949 - DNA, 30 bp, Artificial Sequence
  Synthetic oligonucleotide
gcagcgatatggtagcaaacttagagcgca

SEQ ID NO: 283950 - DNA, 30 bp, Artificial Sequence
  Synthetic oligonucleotide
ggtagtcgctcacagttaggttctagcgca

SEQ ID NO: 283951 - DNA, 30 bp, Artificial Sequence
  Synthetic oligonucleotide
ccataggttaactccctgaatcaccgcgca

SEQ ID NO: 283952 - DNA, 30 bp, Artificial Sequence
  Synthetic oligonucleotide
tctaattctcgtgtggcactaagccgcgca

SEQ ID NO: 283953 - DNA, 30 bp, Artificial Sequence
  Synthetic oligonucleotide
tacgacactgcgcgtcaggcgtcgcgcgca

SEQ ID NO: 283954 - DNA, 30 bp, Artificial Sequence
  Synthetic oligonucleotide
aggtctcccccgtaaattcgtaatcgcgca

SEQ ID NO: 283955 - DNA, 30 bp, Artificial Sequence
  Synthetic oligonucleotide
atcggttacttaaggcgtttagctcgcgca

SEQ ID NO: 283956 - DNA, 30 bp, Artificial Sequence
  Synthetic oligonucleotide
atatgcacacctctgcagccggaaggcgca

SEQ ID NO: 283957 - DNA, 30 bp, Artificial Sequence
  Synthetic oligonucleotide
cgaaaactcgaatctcaccggtagggcgca

SEQ ID NO: 283958 - DNA, 30 bp, Artificial Sequence
  Synthetic oligonucleotide
tcatagggctttctaaggatgccgggcgca

SEQ ID NO: 283959 - DNA, 30 bp, Artificial Sequence
  Synthetic oligonucleotide
acatcgctcttaactttatcttcgtgcgca

SEQ ID NO: 283960 - DNA, 30 bp, Artificial Sequence
  Synthetic oligonucleotide
cacaaaatttagtactaatattggtgcgca

SEQ ID NO: 283961 - DNA, 30 bp, Artificial Sequence
  Synthetic oligonucleotide
tacctccgaatttgggttgcctcgatcgca

SEQ ID NO: 283962 - DNA, 30 bp, Artificial Sequence
  Synthetic oligonucleotide
gatctgcgccttacgattaagaatatcgca

SEQ ID NO: 283963 - DNA, 30 bp, Artificial Sequence
  Synthetic oligonucleotide
gcggagtatcctaatttgcactaactcgca

SEQ ID NO: 283964 - DNA, 30 bp, Artificial Sequence
  Synthetic oligonucleotide
atctggtaacctagcctcagaagactcgca

SEQ ID NO: 283965 - DNA, 30 bp, Artificial Sequence
  Synthetic oligonucleotide
gcatatactatcaattcttgggtcctcgca

SEQ ID NO: 283966 - DNA, 30 bp, Artificial Sequence
  Synthetic oligonucleotide
gggtttagttctaagacccgacttctcgca

SEQ ID NO: 283967 - DNA, 30 bp, Artificial Sequence
  Synthetic oligonucleotide
agcatcttggacgcagtttattccgtcgca

SEQ ID NO: 283968 - DNA, 30 bp, Artificial Sequence
  Synthetic oligonucleotide
ctataaacatcccttcttattccattcgca

SEQ ID NO: 283969 - DNA, 30 bp, Artificial Sequence
  Synthetic oligonucleotide
gtcatgcaagattacaaagtcgtattcgca

SEQ ID NO: 283970 - DNA, 31 bp, Artificial Sequence
  Synthetic oligonucleotide
aacggtccatcaggaccatgaaccgttcgca

SEQ ID NO: 283971 - DNA, 30 bp, Artificial Sequence
  Synthetic oligonucleotide
atgcccgtgatcaacgatgcgtatttcgca

SEQ ID NO: 283972 - DNA, 30 bp, Artificial Sequence
  Synthetic oligonucleotide
cttctttgtccggaaactcacagtttcgca

SEQ ID NO: 283973 - DNA, 30 bp, Artificial Sequence
  Synthetic oligonucleotide
attctaatcagtgtactgtggtaaaaggca

SEQ ID NO: 283974 - DNA, 30 bp, Artificial Sequence
  Synthetic oligonucleotide
cgtgcaatttgtaatgcattatcaaaggca

SEQ ID NO: 283975 - DNA, 30 bp, Artificial Sequence
  Synthetic oligonucleotide
tattgtgtctacaaagtatactcaaaggca

SEQ ID NO: 283976 - DNA, 31 bp, Artificial Sequence
  Synthetic oligonucleotide
gccaatggcatattcgagcccattaaaggca

SEQ ID NO: 283977 - DNA, 30 bp, Artificial Sequence
  Synthetic oligonucleotide
tctagcggaatgaaccctatactcaaggca

SEQ ID NO: 283978 - DNA, 30 bp, Artificial Sequence
  Synthetic oligonucleotide
aaagaccgcttctcgaatacgccgaaggca

SEQ ID NO: 283979 - DNA, 29 bp, Artificial Sequence
  Synthetic oligonucleotide
gatacacgggttcggatcccctgaaggca

SEQ ID NO: 283980 - DNA, 30 bp, Artificial Sequence
  Synthetic oligonucleotide
gtaaggtgcaaaccgacatatgcccaggca

SEQ ID NO: 283981 - DNA, 30 bp, Artificial Sequence
  Synthetic oligonucleotide
atcggcatggtggagccgctgccgcaggca

SEQ ID NO: 283982 - DNA, 30 bp, Artificial Sequence
  Synthetic oligonucleotide
agaggacgccatgtacattgaaggcaggca

SEQ ID NO: 283983 - DNA, 30 bp, Artificial Sequence
  Synthetic oligonucleotide
actggttagttcgtccttactagtcaggca

SEQ ID NO: 283984 - DNA, 30 bp, Artificial Sequence
  Synthetic oligonucleotide
caggcgaaattttttccctttggagaggca

SEQ ID NO: 283985 - DNA, 30 bp, Artificial Sequence
  Synthetic oligonucleotide
ccaagggcgaatatctatggtatagaggca

SEQ ID NO: 283986 - DNA, 30 bp, Artificial Sequence
  Synthetic oligonucleotide
ccgtactttgaatacataggatccgaggca

SEQ ID NO: 283987 - DNA, 30 bp, Artificial Sequence
  Synthetic oligonucleotide
tttgcgacttagtgctaagaccgcgaggca

SEQ ID NO: 283988 - DNA, 30 bp, Artificial Sequence
  Synthetic oligonucleotide
gcgcatggccatctaaacttagaggaggca

SEQ ID NO: 283989 - DNA, 30 bp, Artificial Sequence
  Synthetic oligonucleotide
tctcatccgtcgggtctaatcacggaggca

SEQ ID NO: 283990 - DNA, 30 bp, Artificial Sequence
  Synthetic oligonucleotide
atcgggtagaacgtacatttggcggaggca

SEQ ID NO: 283991 - DNA, 30 bp, Artificial Sequence
  Synthetic oligonucleotide
tggaaatatcagtcatatacaatggaggca

SEQ ID NO: 283992 - DNA, 31 bp, Artificial Sequence
  Synthetic oligonucleotide
tttggccagccaagtgtacgccaatgaggca

SEQ ID NO: 283993 - DNA, 30 bp, Artificial Sequence
  Synthetic oligonucleotide
gagggccttgctactaaagggaatgaggca

SEQ ID NO: 283994 - DNA, 30 bp, Artificial Sequence
  Synthetic oligonucleotide
gcaataggctctctggtctgagatgaggca

SEQ ID NO: 283995 - DNA, 30 bp, Artificial Sequence
  Synthetic oligonucleotide
caagagattgccacgttctaacaataggca

SEQ ID NO: 283996 - DNA, 30 bp, Artificial Sequence
  Synthetic oligonucleotide
aagacgtagactgctgcgggattataggca

SEQ ID NO: 283997 - DNA, 30 bp, Artificial Sequence
  Synthetic oligonucleotide
atcacgggctcagtaactaataactaggca

SEQ ID NO: 283998 - DNA, 30 bp, Artificial Sequence
  Synthetic oligonucleotide
gtaacttgcgtaggtgtaggcttgtaggca

SEQ ID NO: 283999 - DNA, 30 bp, Artificial Sequence
  Synthetic oligonucleotide
agtgatgttggagctgtccgctcaacggca

SEQ ID NO: 284000 - DNA, 30 bp, Artificial Sequence
  Synthetic oligonucleotide
tcagggcgtaattccagttgcgtaacggca

SEQ ID NO: 284001 - DNA, 29 bp, Artificial Sequence
  Synthetic oligonucleotide
tagcagcggatttcttaatcgtaacggca

SEQ ID NO: 284002 - DNA, 30 bp, Artificial Sequence
  Synthetic oligonucleotide
accggtactggatcgactcaatccacggca

SEQ ID NO: 284003 - DNA, 30 bp, Artificial Sequence
  Synthetic oligonucleotide
gtaaactgagccgcaaactatgcgacggca

SEQ ID NO: 284004 - DNA, 30 bp, Artificial Sequence
  Synthetic oligonucleotide
ttaatgcaatacgttcaaatcaggacggca

SEQ ID NO: 284005 - DNA, 30 bp, Artificial Sequence
  Synthetic oligonucleotide
atacacctataggttcttgtgactacggca

SEQ ID NO: 284006 - DNA, 30 bp, Artificial Sequence
  Synthetic oligonucleotide
aacagtctgatcaattgttgcattacggca

SEQ ID NO: 284007 - DNA, 30 bp, Artificial Sequence
  Synthetic oligonucleotide
gttttagggggttaggtaaagcaaccggca

SEQ ID NO: 284008 - DNA, 30 bp, Artificial Sequence
  Synthetic oligonucleotide
gggggcctttgagccgggtaattcccggca

SEQ ID NO: 284009 - DNA, 30 bp, Artificial Sequence
  Synthetic oligonucleotide
ggtttttcgttgcgatcctttaagccggca

SEQ ID NO: 284010 - DNA, 30 bp, Artificial Sequence
  Synthetic oligonucleotide
ccgaacagtgattctattgtaaatccggca

SEQ ID NO: 284011 - DNA, 30 bp, Artificial Sequence
  Synthetic oligonucleotide
agcgcgaggctcgggatggggtatccggca

SEQ ID NO: 284012 - DNA, 30 bp, Artificial Sequence
  Synthetic oligonucleotide
cagccgtaggaggccaggtcttaagcggca

SEQ ID NO: 284013 - DNA, 30 bp, Artificial Sequence
  Synthetic oligonucleotide
cacgatagaatcgacaaacaggacgcggca

SEQ ID NO: 284014 - DNA, 30 bp, Artificial Sequence
  Synthetic oligonucleotide
atgtcacgattggcggatgatcctgcggca

SEQ ID NO: 284015 - DNA, 30 bp, Artificial Sequence
  Synthetic oligonucleotide
tagagacgcttatttctgtagcgtgcggca

SEQ ID NO: 284016 - DNA, 30 bp, Artificial Sequence
  Synthetic oligonucleotide
gtgggatcttcacgatcttaaagatcggca

SEQ ID NO: 284017 - DNA, 30 bp, Artificial Sequence
  Synthetic oligonucleotide
aaacattaatacaagtcctggagatcggca

SEQ ID NO: 284018 - DNA, 30 bp, Artificial Sequence
  Synthetic oligonucleotide
gcattttacagtgtcatcccaaactcggca

SEQ ID NO: 284019 - DNA, 30 bp, Artificial Sequence
  Synthetic oligonucleotide
gtttatgatagttaaggatccacctcggca

SEQ ID NO: 284020 - DNA, 30 bp, Artificial Sequence
  Synthetic oligonucleotide
gcatgggtctgcttcgtagactcctcggca

SEQ ID NO: 284021 - DNA, 30 bp, Artificial Sequence
  Synthetic oligonucleotide
catgagggtgcttaccactagcggtcggca

SEQ ID NO: 284022 - DNA, 30 bp, Artificial Sequence
  Synthetic oligonucleotide
acccgtatgtagtgttacgttgcttcggca

SEQ ID NO: 284023 - DNA, 30 bp, Artificial Sequence
  Synthetic oligonucleotide
agccctggtcatcgcggaactttttcggca

SEQ ID NO: 284024 - DNA, 30 bp, Artificial Sequence
  Synthetic oligonucleotide
gccccgggattcttcgttagataaagggca

SEQ ID NO: 284025 - DNA, 30 bp, Artificial Sequence
  Synthetic oligonucleotide
gagcttcaatgtaagatagacaacagggca

SEQ ID NO: 284026 - DNA, 30 bp, Artificial Sequence
  Synthetic oligonucleotide
ggggactgttcgcagtcccaggacagggca

SEQ ID NO: 284027 - DNA, 30 bp, Artificial Sequence
  Synthetic oligonucleotide
cttagtcaaatcgagtggtttgagagggca

SEQ ID NO: 284028 - DNA, 30 bp, Artificial Sequence
  Synthetic oligonucleotide
aggagggcgattgggactcgacttagggca

SEQ ID NO: 284029 - DNA, 30 bp, Artificial Sequence
  Synthetic oligonucleotide
tagatgtgatccggattgccgccacgggca

SEQ ID NO: 284030 - DNA, 30 bp, Artificial Sequence
  Synthetic oligonucleotide
catgcgctcgatgtagtgacaatacgggca

SEQ ID NO: 284031 - DNA, 30 bp, Artificial Sequence
  Synthetic oligonucleotide
ttatactgtaaggcacaaggaatacgggca

SEQ ID NO: 284032 - DNA, 30 bp, Artificial Sequence
  Synthetic oligonucleotide
tagagatagtagtgtttatcggcccgggca

SEQ ID NO: 284033 - DNA, 30 bp, Artificial Sequence
  Synthetic oligonucleotide
gtcagtgagacttcgaagtagtcccgggca

SEQ ID NO: 284034 - DNA, 30 bp, Artificial Sequence
  Synthetic oligonucleotide
aggcaagtactcttctaacacgcgcgggca

SEQ ID NO: 284035 - DNA, 30 bp, Artificial Sequence
  Synthetic oligonucleotide
acgttgcatttggaagcagataggcgggca

SEQ ID NO: 284036 - DNA, 30 bp, Artificial Sequence
  Synthetic oligonucleotide
atcgcgcgcttttgacgcgtaagtcgggca

SEQ ID NO: 284037 - DNA, 30 bp, Artificial Sequence
  Synthetic oligonucleotide
aaaccacggtttgacacgagacacggggca

SEQ ID NO: 284038 - DNA, 30 bp, Artificial Sequence
  Synthetic oligonucleotide
gggggtagggcgtcagttccttttggggca

SEQ ID NO: 284039 - DNA, 30 bp, Artificial Sequence
  Synthetic oligonucleotide
ctggacaagacggggccccgctgatgggca

SEQ ID NO: 284040 - DNA, 30 bp, Artificial Sequence
  Synthetic oligonucleotide
gactgcacaagatgtgcagtgccctgggca

SEQ ID NO: 284041 - DNA, 30 bp, Artificial Sequence
  Synthetic oligonucleotide
ccgcccaggaggatggtcaccggctgggca

SEQ ID NO: 284042 - DNA, 30 bp, Artificial Sequence
  Synthetic oligonucleotide
tgaaagctcacccaggcgctcaagtgggca

SEQ ID NO: 284043 - DNA, 30 bp, Artificial Sequence
  Synthetic oligonucleotide
attcgacgaacttaaggctcgccgtgggca

SEQ ID NO: 284044 - DNA, 30 bp, Artificial Sequence
  Synthetic oligonucleotide
cccaatcatatggcatgaatggcttgggca

SEQ ID NO: 284045 - DNA, 30 bp, Artificial Sequence
  Synthetic oligonucleotide
gcggcttgctacagatcatacataatggca

SEQ ID NO: 284046 - DNA, 30 bp, Artificial Sequence
  Synthetic oligonucleotide
ctggcaaaatgattcagggcacacatggca

SEQ ID NO: 284047 - DNA, 30 bp, Artificial Sequence
  Synthetic oligonucleotide
tggacgccggtttgaaccaccgacatggca

SEQ ID NO: 284048 - DNA, 30 bp, Artificial Sequence
  Synthetic oligonucleotide
caggtaattatctggcaaggacccatggca

SEQ ID NO: 284049 - DNA, 30 bp, Artificial Sequence
  Synthetic oligonucleotide
ttattctatcggacctagattatgatggca

SEQ ID NO: 284050 - DNA, 30 bp, Artificial Sequence
  Synthetic oligonucleotide
gtcgtccagcagattatctgagtgatggca

SEQ ID NO: 284051 - DNA, 30 bp, Artificial Sequence
  Synthetic oligonucleotide
tattcgtggtacataatgctacttatggca

SEQ ID NO: 284052 - DNA, 30 bp, Artificial Sequence
  Synthetic oligonucleotide
atgggttataagctgacgggaccactggca

SEQ ID NO: 284053 - DNA, 30 bp, Artificial Sequence
  Synthetic oligonucleotide
aatagcgtgctatagcggacaatactggca

SEQ ID NO: 284054 - DNA, 30 bp, Artificial Sequence
  Synthetic oligonucleotide
ggtgatatatagtaacccccactactggca

SEQ ID NO: 284055 - DNA, 30 bp, Artificial Sequence
  Synthetic oligonucleotide
tcgttaagagacatgaaatagttactggca

SEQ ID NO: 284056 - DNA, 30 bp, Artificial Sequence
  Synthetic oligonucleotide
gtaagattacgaatacttcctcccctggca

SEQ ID NO: 284057 - DNA, 30 bp, Artificial Sequence
  Synthetic oligonucleotide
atctggggacgccgtccatagatcctggca

SEQ ID NO: 284058 - DNA, 30 bp, Artificial Sequence
  Synthetic oligonucleotide
gccggctgcactaatatgcgtttcctggca

SEQ ID NO: 284059 - DNA, 30 bp, Artificial Sequence
  Synthetic oligonucleotide
gctactctaagtttaaaatggctgctggca

SEQ ID NO: 284060 - DNA, 30 bp, Artificial Sequence
  Synthetic oligonucleotide
gacgaagcggcacagaatcaaagagtggca

SEQ ID NO: 284061 - DNA, 30 bp, Artificial Sequence
  Synthetic oligonucleotide
gtttcagttgtggcaccgaggaccgtggca

SEQ ID NO: 284062 - DNA, 30 bp, Artificial Sequence
  Synthetic oligonucleotide
gtcttaaaatcgtgatgcattcgtgtggca

SEQ ID NO: 284063 - DNA, 30 bp, Artificial Sequence
  Synthetic oligonucleotide
gggactgtgccacctatgcggcgattggca

SEQ ID NO: 284064 - DNA, 30 bp, Artificial Sequence
  Synthetic oligonucleotide
tttgggtatacctcgctaaccggattggca

SEQ ID NO: 284065 - DNA, 30 bp, Artificial Sequence
  Synthetic oligonucleotide
gtggcatgacttcattggcaacacttggca

SEQ ID NO: 284066 - DNA, 30 bp, Artificial Sequence
  Synthetic oligonucleotide
cgagccagtagcggtcgctaagacttggca

SEQ ID NO: 284067 - DNA, 30 bp, Artificial Sequence
  Synthetic oligonucleotide
caagctctattgtacaagaggtggttggca

SEQ ID NO: 284068 - DNA, 30 bp, Artificial Sequence
  Synthetic oligonucleotide
cagtcaaaaaacctccagcatttgttggca

SEQ ID NO: 284069 - DNA, 30 bp, Artificial Sequence
  Synthetic oligonucleotide
attttggcacgaaaagggccgcgaaatgca

SEQ ID NO: 284070 - DNA, 30 bp, Artificial Sequence
  Synthetic oligonucleotide
cttggtgatagatcacgtacaaacaatgca

SEQ ID NO: 284071 - DNA, 30 bp, Artificial Sequence
  Synthetic oligonucleotide
ccacatttgggttagggcggtttcaatgca

SEQ ID NO: 284072 - DNA, 30 bp, Artificial Sequence
  Synthetic oligonucleotide
gtctatcacgtatttaaggtcatgaatgca

SEQ ID NO: 284073 - DNA, 30 bp, Artificial Sequence
  Synthetic oligonucleotide
aatgactacaacttatatggattgaatgca

SEQ ID NO: 284074 - DNA, 30 bp, Artificial Sequence
  Synthetic oligonucleotide
gaaccgctcgcaacccgtttatctaatgca

SEQ ID NO: 284075 - DNA, 30 bp, Artificial Sequence
  Synthetic oligonucleotide
accgcaaaacccatgtttcgcgttaatgca

SEQ ID NO: 284076 - DNA, 30 bp, Artificial Sequence
  Synthetic oligonucleotide
gttagcaatctgttgctccaaaaccatgca

SEQ ID NO: 284077 - DNA, 30 bp, Artificial Sequence
  Synthetic oligonucleotide
gtcacgtctataggattccctgcccatgca

SEQ ID NO: 284078 - DNA, 30 bp, Artificial Sequence
  Synthetic oligonucleotide
cccccaccgcgacatcgcggatcccatgca

SEQ ID NO: 284079 - DNA, 30 bp, Artificial Sequence
  Synthetic oligonucleotide
acgaacctgtaccattccgttcctcatgca

SEQ ID NO: 284080 - DNA, 30 bp, Artificial Sequence
  Synthetic oligonucleotide
aagacagagtctgtcgctttatgtcatgca

SEQ ID NO: 284081 - DNA, 30 bp, Artificial Sequence
  Synthetic oligonucleotide
gggagcagagtcgatctttgggttcatgca

SEQ ID NO: 284082 - DNA, 30 bp, Artificial Sequence
  Synthetic oligonucleotide
ttaggaaggtatctacttgaatcggatgca

SEQ ID NO: 284083 - DNA, 30 bp, Artificial Sequence
  Synthetic oligonucleotide
ggatgttcgttatgctaatacagggatgca

SEQ ID NO: 284084 - DNA, 30 bp, Artificial Sequence
  Synthetic oligonucleotide
atttgtattggatagaggtgcactgatgca

SEQ ID NO: 284085 - DNA, 30 bp, Artificial Sequence
  Synthetic oligonucleotide
ccagataagttaatccacccacgtgatgca

SEQ ID NO: 284086 - DNA, 30 bp, Artificial Sequence
  Synthetic oligonucleotide
gggtcagttcggcataggctcggtgatgca

SEQ ID NO: 284087 - DNA, 30 bp, Artificial Sequence
  Synthetic oligonucleotide
acattcttattaatcgagcgcgtatatgca

SEQ ID NO: 284088 - DNA, 30 bp, Artificial Sequence
  Synthetic oligonucleotide
ggcctgaattcctgtaaacgggcttatgca

SEQ ID NO: 284089 - DNA, 30 bp, Artificial Sequence
  Synthetic oligonucleotide
ccccctttgggaagcttggtgagttatgca

SEQ ID NO: 284090 - DNA, 30 bp, Artificial Sequence
  Synthetic oligonucleotide
ctgtcaggatcaccgatcatgaaaactgca

SEQ ID NO: 284091 - DNA, 30 bp, Artificial Sequence
  Synthetic oligonucleotide
ccggcgggtcttagccatgttaccactgca

SEQ ID NO: 284092 - DNA, 30 bp, Artificial Sequence
  Synthetic oligonucleotide
gttacaataatggacttcttacccactgca

SEQ ID NO: 284093 - DNA, 30 bp, Artificial Sequence
  Synthetic oligonucleotide
gagtgcagtacctagaggggatccactgca

SEQ ID NO: 284094 - DNA, 30 bp, Artificial Sequence
  Synthetic oligonucleotide
tgttaagaccaaggaggcatctatactgca

SEQ ID NO: 284095 - DNA, 30 bp, Artificial Sequence
  Synthetic oligonucleotide
gcttcattaaatgatagatatgaacctgca

SEQ ID NO: 284096 - DNA, 30 bp, Artificial Sequence
  Synthetic oligonucleotide
tttgcataatgaaccgtattaacacctgca

SEQ ID NO: 284097 - DNA, 30 bp, Artificial Sequence
  Synthetic oligonucleotide
ggcccttcctcctttactttgtaccctgca

SEQ ID NO: 284098 - DNA, 30 bp, Artificial Sequence
  Synthetic oligonucleotide
tgaataacttgacattgcttacggcctgca

SEQ ID NO: 284099 - DNA, 30 bp, Artificial Sequence
  Synthetic oligonucleotide
aggtgtcaaaagaatccactagctcctgca

SEQ ID NO: 284100 - DNA, 30 bp, Artificial Sequence
  Synthetic oligonucleotide
ccaggacatggcaatgtctgtgaagctgca

SEQ ID NO: 284101 - DNA, 30 bp, Artificial Sequence
  Synthetic oligonucleotide
gacgcttcgccaagggctcgaggcgctgca

SEQ ID NO: 284102 - DNA, 30 bp, Artificial Sequence
  Synthetic oligonucleotide
ataggggatgatctggtgcactgggctgca

SEQ ID NO: 284103 - DNA, 30 bp, Artificial Sequence
  Synthetic oligonucleotide
ggtataagtcacgacgcagacgtggctgca

SEQ ID NO: 284104 - DNA, 30 bp, Artificial Sequence
  Synthetic oligonucleotide
ggtgacgaaaacgaaagacgcactgctgca

SEQ ID NO: 284105 - DNA, 30 bp, Artificial Sequence
  Synthetic oligonucleotide
ggagagaccggtaacgaacggttatctgca

SEQ ID NO: 284106 - DNA, 28 bp, Artificial Sequence
  Synthetic oligonucleotide
gggggaatcattgcagttgccttctgca

SEQ ID NO: 284107 - DNA, 30 bp, Artificial Sequence
  Synthetic oligonucleotide
aatacgggatcagttccttgtccttctgca

SEQ ID NO: 284108 - DNA, 30 bp, Artificial Sequence
  Synthetic oligonucleotide
actcccaggtcggacactgactcaagtgca

SEQ ID NO: 284109 - DNA, 30 bp, Artificial Sequence
  Synthetic oligonucleotide
aactccgggtaaaatatcaaccgcagtgca

SEQ ID NO: 284110 - DNA, 30 bp, Artificial Sequence
  Synthetic oligonucleotide
tgactattggccggtcaccgaggcagtgca

SEQ ID NO: 284111 - DNA, 30 bp, Artificial Sequence
  Synthetic oligonucleotide
ctgcagtcgatctggatagaactgagtgca

SEQ ID NO: 284112 - DNA, 30 bp, Artificial Sequence
  Synthetic oligonucleotide
agcttacagaggacaatgggatttagtgca

SEQ ID NO: 284113 - DNA, 30 bp, Artificial Sequence
  Synthetic oligonucleotide
agtctggggtttttttagtcagagcgtgca

SEQ ID NO: 284114 - DNA, 30 bp, Artificial Sequence
  Synthetic oligonucleotide
ttagtcgtctatcgtcactatctgcgtgca

SEQ ID NO: 284115 - DNA, 30 bp, Artificial Sequence
  Synthetic oligonucleotide
tgagcacgagacgtcgcagaagtgcgtgca

SEQ ID NO: 284116 - DNA, 30 bp, Artificial Sequence
  Synthetic oligonucleotide
aacagtcacgatcaggacgatgatcgtgca

SEQ ID NO: 284117 - DNA, 30 bp, Artificial Sequence
  Synthetic oligonucleotide
agcggtgtagatatacttataattcgtgca

SEQ ID NO: 284118 - DNA, 30 bp, Artificial Sequence
  Synthetic oligonucleotide
gaaatttgcggagaaaaacataacggtgca

SEQ ID NO: 284119 - DNA, 30 bp, Artificial Sequence
  Synthetic oligonucleotide
gtgtacggaattatcgaggcagccggtgca

SEQ ID NO: 284120 - DNA, 30 bp, Artificial Sequence
  Synthetic oligonucleotide
gatagagttgctatcgcccatacgggtgca

SEQ ID NO: 284121 - DNA, 30 bp, Artificial Sequence
  Synthetic oligonucleotide
tgtaaaaggtgcccttcgccaatatgtgca

SEQ ID NO: 284122 - DNA, 30 bp, Artificial Sequence
  Synthetic oligonucleotide
tgcgcttcttagtcgcgtttgagctgtgca

SEQ ID NO: 284123 - DNA, 30 bp, Artificial Sequence
  Synthetic oligonucleotide
cgacgacttatagatgtagtcggctgtgca

SEQ ID NO: 284124 - DNA, 30 bp, Artificial Sequence
  Synthetic oligonucleotide
gacgcgttactgggataacgtctttgtgca

SEQ ID NO: 284125 - DNA, 30 bp, Artificial Sequence
  Synthetic oligonucleotide
tgaaaagtagtcgtaccctggcgcattgca

SEQ ID NO: 284126 - DNA, 30 bp, Artificial Sequence
  Synthetic oligonucleotide
gagttttggggaaccaggaaggtcattgca

SEQ ID NO: 284127 - DNA, 30 bp, Artificial Sequence
  Synthetic oligonucleotide
agcgagtcccggtaggaacatcatattgca

SEQ ID NO: 284128 - DNA, 30 bp, Artificial Sequence
  Synthetic oligonucleotide
ctatttggtggtgaaaaagcagctattgca

SEQ ID NO: 284129 - DNA, 30 bp, Artificial Sequence
  Synthetic oligonucleotide
gaaggtatagttccgaccgcatgtattgca

SEQ ID NO: 284130 - DNA, 30 bp, Artificial Sequence
  Synthetic oligonucleotide
atgattggaccgttgaaacatgcacttgca

SEQ ID NO: 284131 - DNA, 30 bp, Artificial Sequence
  Synthetic oligonucleotide
tcgccttctcatagtgagcagcgacttgca

SEQ ID NO: 284132 - DNA, 30 bp, Artificial Sequence
  Synthetic oligonucleotide
gagggttagttgtgtaggagggtgcttgca

SEQ ID NO: 284133 - DNA, 30 bp, Artificial Sequence
  Synthetic oligonucleotide
aaacaccaaaaggcaattgacggtcttgca

SEQ ID NO: 284134 - DNA, 30 bp, Artificial Sequence
  Synthetic oligonucleotide
caggcttgggaaacggttggtattcttgca

SEQ ID NO: 284135 - DNA, 30 bp, Artificial Sequence
  Synthetic oligonucleotide
ttgaaatatcatacttactggagagttgca

SEQ ID NO: 284136 - DNA, 30 bp, Artificial Sequence
  Synthetic oligonucleotide
caaagtcaattaacaatttggcaggttgca

SEQ ID NO: 284137 - DNA, 30 bp, Artificial Sequence
  Synthetic oligonucleotide
aggtatacaggagacgactgaggggttgca

SEQ ID NO: 284138 - DNA, 30 bp, Artificial Sequence
  Synthetic oligonucleotide
cctgcacataggaatgtagtttatgttgca

SEQ ID NO: 284139 - DNA, 30 bp, Artificial Sequence
  Synthetic oligonucleotide
acgtactccttagatcacgatcaatttgca

SEQ ID NO: 284140 - DNA, 30 bp, Artificial Sequence
  Synthetic oligonucleotide
cgtattatgaagctccgccgcgtatttgca

SEQ ID NO: 284141 - DNA, 30 bp, Artificial Sequence
  Synthetic oligonucleotide
tccgtgacgtgttggttaacagggtttgca

SEQ ID NO: 284142 - DNA, 30 bp, Artificial Sequence
  Synthetic oligonucleotide
gatcgaaccgcccggcctgcgtgttttgca

SEQ ID NO: 284143 - DNA, 30 bp, Artificial Sequence
  Synthetic oligonucleotide
taaataaataacgattcaattgtcaaatca

SEQ ID NO: 284144 - DNA, 30 bp, Artificial Sequence
  Synthetic oligonucleotide
ggagtttataatttcacccctttcaaatca

SEQ ID NO: 284145 - DNA, 30 bp, Artificial Sequence
  Synthetic oligonucleotide
agggtatataaagcggttgacaggaaatca

SEQ ID NO: 284146 - DNA, 30 bp, Artificial Sequence
  Synthetic oligonucleotide
ggaaggcgttccgagttaacgatgaaatca

SEQ ID NO: 284147 - DNA, 30 bp, Artificial Sequence
  Synthetic oligonucleotide
agctaaacggctaaactgaattataaatca

SEQ ID NO: 284148 - DNA, 30 bp, Artificial Sequence
  Synthetic oligonucleotide
agaatatataagtggggagactctaaatca

SEQ ID NO: 284149 - DNA, 30 bp, Artificial Sequence
  Synthetic oligonucleotide
aagtacgaggaatatgtatatcgtaaatca

SEQ ID NO: 284150 - DNA, 30 bp, Artificial Sequence
  Synthetic oligonucleotide
taaaagaaactgaggatttcgcttaaatca

SEQ ID NO: 284151 - DNA, 30 bp, Artificial Sequence
  Synthetic oligonucleotide
tgctccgatttacgtattattcgccaatca

SEQ ID NO: 284152 - DNA, 30 bp, Artificial Sequence
  Synthetic oligonucleotide
ttaaataactcacatcagcacggccaatca

SEQ ID NO: 284153 - DNA, 30 bp, Artificial Sequence
  Synthetic oligonucleotide
tcggatactcaggtaagcacgtagcaatca

SEQ ID NO: 284154 - DNA, 30 bp, Artificial Sequence
  Synthetic oligonucleotide
taaggtaatggggatgatagggatcaatca

SEQ ID NO: 284155 - DNA, 30 bp, Artificial Sequence
  Synthetic oligonucleotide
ccaacactatataaatccagcgcagaatca

SEQ ID NO: 284156 - DNA, 30 bp, Artificial Sequence
  Synthetic oligonucleotide
ccaggtttggaccccgaaagatgagaatca

SEQ ID NO: 284157 - DNA, 30 bp, Artificial Sequence
  Synthetic oligonucleotide
aaagagagccagaggcctactctagaatca

SEQ ID NO: 284158 - DNA, 30 bp, Artificial Sequence
  Synthetic oligonucleotide
gacgcctaaatccctccggcaaacgaatca

SEQ ID NO: 284159 - DNA, 30 bp, Artificial Sequence
  Synthetic oligonucleotide
aattctgaaatcaaagaaaaaaccgaatca

SEQ ID NO: 284160 - DNA, 30 bp, Artificial Sequence
  Synthetic oligonucleotide
cgacgcgcactttcaaatgggggggaatca

SEQ ID NO: 284161 - DNA, 30 bp, Artificial Sequence
  Synthetic oligonucleotide
cgatccatgatatgtacgttaagtgaatca

SEQ ID NO: 284162 - DNA, 30 bp, Artificial Sequence
  Synthetic oligonucleotide
tagtgacttgcttaatcgtcttcataatca

SEQ ID NO: 284163 - DNA, 30 bp, Artificial Sequence
  Synthetic oligonucleotide
agtaaaggtacgatcctataaagataatca

SEQ ID NO: 284164 - DNA, 30 bp, Artificial Sequence
  Synthetic oligonucleotide
gccacgagggtcgatgccgttggataatca

SEQ ID NO: 284165 - DNA, 30 bp, Artificial Sequence
  Synthetic oligonucleotide
actcctgaaactctgacctagtactaatca

SEQ ID NO: 284166 - DNA, 30 bp, Artificial Sequence
  Synthetic oligonucleotide
ggaggctgagattaagagactctctaatca

SEQ ID NO: 284167 - DNA, 30 bp, Artificial Sequence
  Synthetic oligonucleotide
ccatgtattaaacacacgcatcgttaatca

SEQ ID NO: 284168 - DNA, 30 bp, Artificial Sequence
  Synthetic oligonucleotide
ttttactaggtggaaacgtccaagacatca

SEQ ID NO: 284169 - DNA, 30 bp, Artificial Sequence
  Synthetic oligonucleotide
ttcgttagatgatggctgccttggacatca

SEQ ID NO: 284170 - DNA, 30 bp, Artificial Sequence
  Synthetic oligonucleotide
catattcgatctcattagtataatacatca

SEQ ID NO: 284171 - DNA, 30 bp, Artificial Sequence
  Synthetic oligonucleotide
aactgccatggtcctataatcagtacatca

SEQ ID NO: 284172 - DNA, 30 bp, Artificial Sequence
  Synthetic oligonucleotide
acgatggctttatcttaaggtcaaccatca

SEQ ID NO: 284173 - DNA, 30 bp, Artificial Sequence
  Synthetic oligonucleotide
cggtgccctgtgtcgatacgagaaccatca

SEQ ID NO: 284174 - DNA, 30 bp, Artificial Sequence
  Synthetic oligonucleotide
gcgacagataacgatgcgtggttaccatca

SEQ ID NO: 284175 - DNA, 30 bp, Artificial Sequence
  Synthetic oligonucleotide
atacagggcgaaaatgtctatttaccatca

SEQ ID NO: 284176 - DNA, 30 bp, Artificial Sequence
  Synthetic oligonucleotide
tagtggaatgtcctagtgaatggcccatca

SEQ ID NO: 284177 - DNA, 30 bp, Artificial Sequence
  Synthetic oligonucleotide
gaaaatggcgcactgaaagtaaagccatca

SEQ ID NO: 284178 - DNA, 30 bp, Artificial Sequence
  Synthetic oligonucleotide
tgaagtattgttgccagactcaaagcatca

SEQ ID NO: 284179 - DNA, 30 bp, Artificial Sequence
  Synthetic oligonucleotide
actccggattgtcaaaagtgtttagcatca

SEQ ID NO: 284180 - DNA, 30 bp, Artificial Sequence
  Synthetic oligonucleotide
agccatgcgactcgtctttcgtacgcatca

SEQ ID NO: 284181 - DNA, 30 bp, Artificial Sequence
  Synthetic oligonucleotide
tatgtatggctacgaataagccgcgcatca

SEQ ID NO: 284182 - DNA, 30 bp, Artificial Sequence
  Synthetic oligonucleotide
gcctgggaatggcaacgacacggggcatca

SEQ ID NO: 284183 - DNA, 30 bp, Artificial Sequence
  Synthetic oligonucleotide
aagatggtgtctagattggcagatgcatca

SEQ ID NO: 284184 - DNA, 30 bp, Artificial Sequence
  Synthetic oligonucleotide
cgtttataggggcttcggtgggatgcatca

SEQ ID NO: 284185 - DNA, 30 bp, Artificial Sequence
  Synthetic oligonucleotide
cattccgattaagacggttcatatgcatca

SEQ ID NO: 284186 - DNA, 30 bp, Artificial Sequence
  Synthetic oligonucleotide
ggtaacacaactccgttcgcataatcatca

SEQ ID NO: 284187 - DNA, 30 bp, Artificial Sequence
  Synthetic oligonucleotide
ccactaccaaatttcatacttaagtcatca

SEQ ID NO: 284188 - DNA, 30 bp, Artificial Sequence
  Synthetic oligonucleotide
caatcacctagggcgttgccgtcttcatca

SEQ ID NO: 284189 - DNA, 30 bp, Artificial Sequence
  Synthetic oligonucleotide
gggtttgggtcagtccgcgcacggagatca

SEQ ID NO: 284190 - DNA, 30 bp, Artificial Sequence
  Synthetic oligonucleotide
tacaaattcggcgtaaagtacttgagatca

SEQ ID NO: 284191 - DNA, 30 bp, Artificial Sequence
  Synthetic oligonucleotide
gtcctctcggttaggaagtacttgagatca

SEQ ID NO: 284192 - DNA, 30 bp, Artificial Sequence
  Synthetic oligonucleotide
atagcctcatcaaggaattcccctagatca

SEQ ID NO: 284193 - DNA, 30 bp, Artificial Sequence
  Synthetic oligonucleotide
gtcccgtcttcccatgggtatagtagatca

SEQ ID NO: 284194 - DNA, 30 bp, Artificial Sequence
  Synthetic oligonucleotide
aacaatgatttatcgtcgtaaggtagatca

SEQ ID NO: 284195 - DNA, 30 bp, Artificial Sequence
  Synthetic oligonucleotide
attctacgcgtaaagcgggaaccacgatca

SEQ ID NO: 284196 - DNA, 30 bp, Artificial Sequence
  Synthetic oligonucleotide
atcgaagaaactgccctacgtgcacgatca

SEQ ID NO: 284197 - DNA, 30 bp, Artificial Sequence
  Synthetic oligonucleotide
agcaggattcctactttgtttctacgatca

SEQ ID NO: 284198 - DNA, 30 bp, Artificial Sequence
  Synthetic oligonucleotide
tcgaccgccgggatcaactacttacgatca

SEQ ID NO: 284199 - DNA, 30 bp, Artificial Sequence
  Synthetic oligonucleotide
gcgtatgcctcctcctaagggtagcgatca

SEQ ID NO: 284200 - DNA, 30 bp, Artificial Sequence
  Synthetic oligonucleotide
tattgggcctcattaaccgaagggcgatca

SEQ ID NO: 284201 - DNA, 30 bp, Artificial Sequence
  Synthetic oligonucleotide
gcatgaaacaggatcgctcatgggcgatca

SEQ ID NO: 284202 - DNA, 30 bp, Artificial Sequence
  Synthetic oligonucleotide
gtccttcgatctccagtgatctatcgatca

SEQ ID NO: 284203 - DNA, 30 bp, Artificial Sequence
  Synthetic oligonucleotide
cgttattgaggttgcacatcttatcgatca

SEQ ID NO: 284204 - DNA, 30 bp, Artificial Sequence
  Synthetic oligonucleotide
agtgcatgggtttcgaacacggctcgatca

SEQ ID NO: 284205 - DNA, 30 bp, Artificial Sequence
  Synthetic oligonucleotide
ctgaaacctggaatgagtgcgcgcggatca

SEQ ID NO: 284206 - DNA, 30 bp, Artificial Sequence
  Synthetic oligonucleotide
ctgttgaaggttgtagatgaactcggatca

SEQ ID NO: 284207 - DNA, 30 bp, Artificial Sequence
  Synthetic oligonucleotide
ttccaggctcattagcatataacgggatca

SEQ ID NO: 284208 - DNA, 31 bp, Artificial Sequence
  Synthetic oligonucleotide
gattacagaagtgttaatccgcacgggatca

SEQ ID NO: 284209 - DNA, 30 bp, Artificial Sequence
  Synthetic oligonucleotide
gctcaacaggaattaccatacgcgggatca

SEQ ID NO: 284210 - DNA, 30 bp, Artificial Sequence
  Synthetic oligonucleotide
gctataacgtgttgaatcttggctggatca

SEQ ID NO: 284211 - DNA, 30 bp, Artificial Sequence
  Synthetic oligonucleotide
ctctgccggaggaccgcgggttctggatca

SEQ ID NO: 284212 - DNA, 30 bp, Artificial Sequence
  Synthetic oligonucleotide
ccagtagtctatggttagtggctctgatca

SEQ ID NO: 284213 - DNA, 30 bp, Artificial Sequence
  Synthetic oligonucleotide
taaatagcatacatgcacgccaggtgatca

SEQ ID NO: 284214 - DNA, 30 bp, Artificial Sequence
  Synthetic oligonucleotide
catgtgccatgattagtgccatgttgatca

SEQ ID NO: 284215 - DNA, 30 bp, Artificial Sequence
  Synthetic oligonucleotide
gtgtactcgaattgttacaagaaaatatca

SEQ ID NO: 284216 - DNA, 30 bp, Artificial Sequence
  Synthetic oligonucleotide
gaaggacctcgagttgacatttaaatatca

SEQ ID NO: 284217 - DNA, 30 bp, Artificial Sequence
  Synthetic oligonucleotide
cggtccttttgatcctgggggtacatatca

SEQ ID NO: 284218 - DNA, 30 bp, Artificial Sequence
  Synthetic oligonucleotide
caggactcggggtcttagatgcgcatatca

SEQ ID NO: 284219 - DNA, 30 bp, Artificial Sequence
  Synthetic oligonucleotide
gaaccggtgggacgaaggcgaattatatca

SEQ ID NO: 284220 - DNA, 31 bp, Artificial Sequence
  Synthetic oligonucleotide
gccattcagattatttgacttcgacctatca

SEQ ID NO: 284221 - DNA, 30 bp, Artificial Sequence
  Synthetic oligonucleotide
ttgacagtagctgtcctacgaaagctatca

SEQ ID NO: 284222 - DNA, 30 bp, Artificial Sequence
  Synthetic oligonucleotide
gcatagaattctgcagcgatagcgctatca

SEQ ID NO: 284223 - DNA, 30 bp, Artificial Sequence
  Synthetic oligonucleotide
ttgagtaatcggtagtcggcgatgctatca

SEQ ID NO: 284224 - DNA, 30 bp, Artificial Sequence
  Synthetic oligonucleotide
cacgggaacattatgctagcacgtctatca

SEQ ID NO: 284225 - DNA, 30 bp, Artificial Sequence
  Synthetic oligonucleotide
aacaacagaatcggggttacgattctatca

SEQ ID NO: 284226 - DNA, 30 bp, Artificial Sequence
  Synthetic oligonucleotide
ggggtaaaataaggcaagccggttctatca

SEQ ID NO: 284227 - DNA, 30 bp, Artificial Sequence
  Synthetic oligonucleotide
ggtgtattacagcgaatatgaccagtatca

SEQ ID NO: 284228 - DNA, 30 bp, Artificial Sequence
  Synthetic oligonucleotide
agtagtccgcgtgctgtggtttgagtatca

SEQ ID NO: 284229 - DNA, 30 bp, Artificial Sequence
  Synthetic oligonucleotide
ggctctagaccactaagagctaacgtatca

SEQ ID NO: 284230 - DNA, 30 bp, Artificial Sequence
  Synthetic oligonucleotide
cccgcgaatcgtgcggttcagtcggtatca

SEQ ID NO: 284231 - DNA, 30 bp, Artificial Sequence
  Synthetic oligonucleotide
gccgcccctacgcgaccttcaagggtatca

SEQ ID NO: 284232 - DNA, 30 bp, Artificial Sequence
  Synthetic oligonucleotide
cggcatttggagatgaagttgattgtatca

SEQ ID NO: 284233 - DNA, 30 bp, Artificial Sequence
  Synthetic oligonucleotide
tacatagggtctgctatgcgagttgtatca

SEQ ID NO: 284234 - DNA, 30 bp, Artificial Sequence
  Synthetic oligonucleotide
ttctagcactcgcgaggatgtgcattatca

SEQ ID NO: 284235 - DNA, 30 bp, Artificial Sequence
  Synthetic oligonucleotide
cccacgcacgaattatacgggcgattatca

SEQ ID NO: 284236 - DNA, 30 bp, Artificial Sequence
  Synthetic oligonucleotide
aacgaagcaacccagaaccggaacttatca

SEQ ID NO: 284237 - DNA, 30 bp, Artificial Sequence
  Synthetic oligonucleotide
gtcttagatcatgggtgctaccccttatca

SEQ ID NO: 284238 - DNA, 30 bp, Artificial Sequence
  Synthetic oligonucleotide
cgcatcggtacactagtagtagtgttatca

SEQ ID NO: 284239 - DNA, 30 bp, Artificial Sequence
  Synthetic oligonucleotide
tcatagagtttgtggtcgaagctaaactca

SEQ ID NO: 284240 - DNA, 30 bp, Artificial Sequence
  Synthetic oligonucleotide
gtacgccactcgcgtcaacaagtaaactca

SEQ ID NO: 284241 - DNA, 30 bp, Artificial Sequence
  Synthetic oligonucleotide
attatgggtagataaggggagtagaactca

SEQ ID NO: 284242 - DNA, 30 bp, Artificial Sequence
  Synthetic oligonucleotide
aattcgggttgacccggcaccgcgaactca

SEQ ID NO: 284243 - DNA, 30 bp, Artificial Sequence
  Synthetic oligonucleotide
tttggtgcaaaagcctagaatccacactca

SEQ ID NO: 284244 - DNA, 30 bp, Artificial Sequence
  Synthetic oligonucleotide
tcatgttgtcgccccaatccggcacactca

SEQ ID NO: 284245 - DNA, 30 bp, Artificial Sequence
  Synthetic oligonucleotide
aagatcgtggggaacggggataaccactca

SEQ ID NO: 284246 - DNA, 30 bp, Artificial Sequence
  Synthetic oligonucleotide
cctcatcacgtaaggcagaccctgcactca

SEQ ID NO: 284247 - DNA, 30 bp, Artificial Sequence
  Synthetic oligonucleotide
gctggtagtctattgtgtactgaagactca

SEQ ID NO: 284248 - DNA, 30 bp, Artificial Sequence
  Synthetic oligonucleotide
ccccgaacgcgtgcctaggttagcgactca

SEQ ID NO: 284249 - DNA, 30 bp, Artificial Sequence
  Synthetic oligonucleotide
agccttgtcaggctggggaccgttgactca

SEQ ID NO: 284250 - DNA, 30 bp, Artificial Sequence
  Synthetic oligonucleotide
cagcctcataagagtactactgtctactca

SEQ ID NO: 284251 - DNA, 30 bp, Artificial Sequence
  Synthetic oligonucleotide
gagtcaaacactgatgaacaccagtactca

SEQ ID NO: 284252 - DNA, 30 bp, Artificial Sequence
  Synthetic oligonucleotide
cgtgggaccgcttttgagaacgtgtactca

SEQ ID NO: 284253 - DNA, 30 bp, Artificial Sequence
  Synthetic oligonucleotide
cctatattatcctggtttacacgttactca

SEQ ID NO: 284254 - DNA, 30 bp, Artificial Sequence
  Synthetic oligonucleotide
gactagttgaaatgattgcactgttactca

SEQ ID NO: 284255 - DNA, 30 bp, Artificial Sequence
  Synthetic oligonucleotide
atcagctacataacattaaggatcacctca

SEQ ID NO: 284256 - DNA, 30 bp, Artificial Sequence
  Synthetic oligonucleotide
ctcttcttcataagaaatcactatacctca

SEQ ID NO: 284257 - DNA, 31 bp, Artificial Sequence
  Synthetic oligonucleotide
cgcgctgcggttaagttacgtatcgccctca

SEQ ID NO: 284258 - DNA, 30 bp, Artificial Sequence
  Synthetic oligonucleotide
atccaaatataccgatcaaacgttccctca

SEQ ID NO: 284259 - DNA, 30 bp, Artificial Sequence
  Synthetic oligonucleotide
agagtggcattaacatggttgctagcctca

SEQ ID NO: 284260 - DNA, 30 bp, Artificial Sequence
  Synthetic oligonucleotide
gcgtgactaattaaacgggagaaatcctca

SEQ ID NO: 284261 - DNA, 30 bp, Artificial Sequence
  Synthetic oligonucleotide
aagacaatccgtcagcaaacaccctcctca

SEQ ID NO: 284262 - DNA, 30 bp, Artificial Sequence
  Synthetic oligonucleotide
tgttgcagggcaccctgcctacattcctca

SEQ ID NO: 284263 - DNA, 30 bp, Artificial Sequence
  Synthetic oligonucleotide
agcctatcctgtcaatgttttgcaagctca

SEQ ID NO: 284264 - DNA, 30 bp, Artificial Sequence
  Synthetic oligonucleotide
ccatgatcgcgagagtgacccggaagctca

SEQ ID NO: 284265 - DNA, 30 bp, Artificial Sequence
  Synthetic oligonucleotide
aatccactttcgatcggtgtagtaagctca

SEQ ID NO: 284266 - DNA, 30 bp, Artificial Sequence
  Synthetic oligonucleotide
cttggagggtccgtgattaaggtaagctca

SEQ ID NO: 284267 - DNA, 30 bp, Artificial Sequence
  Synthetic oligonucleotide
ggccaggaggctagagcgagcgtcagctca

SEQ ID NO: 284268 - DNA, 30 bp, Artificial Sequence
  Synthetic oligonucleotide
ggacgtagccgaataagagcggtgagctca

SEQ ID NO: 284269 - DNA, 30 bp, Artificial Sequence
  Synthetic oligonucleotide
actttgcctagctactcacagactagctca

SEQ ID NO: 284270 - DNA, 30 bp, Artificial Sequence
  Synthetic oligonucleotide
gtactccgccgataccctattcttagctca

SEQ ID NO: 284271 - DNA, 30 bp, Artificial Sequence
  Synthetic oligonucleotide
tggagtggtaccctgaggtgaccacgctca

SEQ ID NO: 284272 - DNA, 30 bp, Artificial Sequence
  Synthetic oligonucleotide
tgatttgcgccccatatgagatcacgctca

SEQ ID NO: 284273 - DNA, 30 bp, Artificial Sequence
  Synthetic oligonucleotide
tcctgacgtaggacattggatagacgctca

SEQ ID NO: 284274 - DNA, 30 bp, Artificial Sequence
  Synthetic oligonucleotide
tcgattccgttgtgcctgtaaagccgctca

SEQ ID NO: 284275 - DNA, 30 bp, Artificial Sequence
  Synthetic oligonucleotide
ggcccgcacataaacaggtttatccgctca

SEQ ID NO: 284276 - DNA, 30 bp, Artificial Sequence
  Synthetic oligonucleotide
gcacaggttctagagccggcatcgcgctca

SEQ ID NO: 284277 - DNA, 30 bp, Artificial Sequence
  Synthetic oligonucleotide
gttaaccgatgttttcgagagatgcgctca

SEQ ID NO: 284278 - DNA, 30 bp, Artificial Sequence
  Synthetic oligonucleotide
ctgatcgggagaatctattaaggtcgctca

SEQ ID NO: 284279 - DNA, 30 bp, Artificial Sequence
  Synthetic oligonucleotide
ttgtcaattgattaagatatttaaggctca

SEQ ID NO: 284280 - DNA, 30 bp, Artificial Sequence
  Synthetic oligonucleotide
tgcacgtaataaataccaggtaccggctca

SEQ ID NO: 284281 - DNA, 30 bp, Artificial Sequence
  Synthetic oligonucleotide
gttatataagtcacccgagtcacgggctca

SEQ ID NO: 284282 - DNA, 30 bp, Artificial Sequence
  Synthetic oligonucleotide
ttccagtcgatgttttcgggcctgggctca

SEQ ID NO: 284283 - DNA, 30 bp, Artificial Sequence
  Synthetic oligonucleotide
actctaagacggatgcgtctcgttggctca

SEQ ID NO: 284284 - DNA, 30 bp, Artificial Sequence
  Synthetic oligonucleotide
gctgcgccgattctcctcgagcgctgctca

SEQ ID NO: 284285 - DNA, 31 bp, Artificial Sequence
  Synthetic oligonucleotide
taacaccgtcgccattgcgtcgaggtgctca

SEQ ID NO: 284286 - DNA, 30 bp, Artificial Sequence
  Synthetic oligonucleotide
ggcgcgaggaaatgtctatacaattgctca

SEQ ID NO: 284287 - DNA, 31 bp, Artificial Sequence
  Synthetic oligonucleotide
gaggtcctgtgtagggtgtagtacaatctca

SEQ ID NO: 284288 - DNA, 30 bp, Artificial Sequence
  Synthetic oligonucleotide
aatggagggtgtataaatacctgaatctca

SEQ ID NO: 284289 - DNA, 30 bp, Artificial Sequence
  Synthetic oligonucleotide
cttgggcggcttttagggaacctgatctca

SEQ ID NO: 284290 - DNA, 30 bp, Artificial Sequence
  Synthetic oligonucleotide
acctgtagacgttacacgagcgatatctca

SEQ ID NO: 284291 - DNA, 30 bp, Artificial Sequence
  Synthetic oligonucleotide
aaaactctatgaccatttgaaaagctctca

SEQ ID NO: 284292 - DNA, 30 bp, Artificial Sequence
  Synthetic oligonucleotide
atcattaatcgggctgtcggctatctctca

SEQ ID NO: 284293 - DNA, 30 bp, Artificial Sequence
  Synthetic oligonucleotide
gccgcaatcgttgcaaaccccgctctctca

SEQ ID NO: 284294 - DNA, 30 bp, Artificial Sequence
  Synthetic oligonucleotide
atcaagcaacggctgaggcgcagtgtctca

SEQ ID NO: 284295 - DNA, 30 bp, Artificial Sequence
  Synthetic oligonucleotide
gaggggcgaaatcaacggaccattgtctca

SEQ ID NO: 284296 - DNA, 30 bp, Artificial Sequence
  Synthetic oligonucleotide
acaaaccggttacaaccgcttattgtctca

SEQ ID NO: 284297 - DNA, 30 bp, Artificial Sequence
  Synthetic oligonucleotide
gcttagtgctggcataaaaatcaattctca

SEQ ID NO: 284298 - DNA, 30 bp, Artificial Sequence
  Synthetic oligonucleotide
cgactagtcccatggaggacggtattctca

SEQ ID NO: 284299 - DNA, 30 bp, Artificial Sequence
  Synthetic oligonucleotide
ggcgcgctctcggagctggtcgagttctca

SEQ ID NO: 284300 - DNA, 30 bp, Artificial Sequence
  Synthetic oligonucleotide
cgttattcgaaagctatatctataaagtca

SEQ ID NO: 284301 - DNA, 30 bp, Artificial Sequence
  Synthetic oligonucleotide
tacattgttcagcgtgaaggggcgaagtca

SEQ ID NO: 284302 - DNA, 30 bp, Artificial Sequence
  Synthetic oligonucleotide
ggtgcatggctcctaacattatctaagtca

SEQ ID NO: 284303 - DNA, 30 bp, Artificial Sequence
  Synthetic oligonucleotide
aagacctactcagtcatctcaggtaagtca

SEQ ID NO: 284304 - DNA, 30 bp, Artificial Sequence
  Synthetic oligonucleotide
gtcgggttttcccctatgacaacacagtca

SEQ ID NO: 284305 - DNA, 30 bp, Artificial Sequence
  Synthetic oligonucleotide
gccattcaggatggaggtgatcaccagtca

SEQ ID NO: 284306 - DNA, 30 bp, Artificial Sequence
  Synthetic oligonucleotide
gctcagtgggatactatagcgtaccagtca

SEQ ID NO: 284307 - DNA, 31 bp, Artificial Sequence
  Synthetic oligonucleotide
acaccttaacgctacaaggaagtagcagtca

SEQ ID NO: 284308 - DNA, 30 bp, Artificial Sequence
  Synthetic oligonucleotide
tcgtgggcccggcttattcggtatcagtca

SEQ ID NO: 284309 - DNA, 30 bp, Artificial Sequence
  Synthetic oligonucleotide
accaggtaggtacgtagctcatttcagtca

SEQ ID NO: 284310 - DNA, 30 bp, Artificial Sequence
  Synthetic oligonucleotide
gacattgtgttagcctcgcttaaagagtca

SEQ ID NO: 284311 - DNA, 30 bp, Artificial Sequence
  Synthetic oligonucleotide
tccgggactgtgactaggatggcagagtca

SEQ ID NO: 284312 - DNA, 30 bp, Artificial Sequence
  Synthetic oligonucleotide
gcacacaatgtgtaatagatgcgcgagtca

SEQ ID NO: 284313 - DNA, 30 bp, Artificial Sequence
  Synthetic oligonucleotide
gtattttcagggtttccgacaatcgagtca

SEQ ID NO: 284314 - DNA, 30 bp, Artificial Sequence
  Synthetic oligonucleotide
ctagcgccttcgcggtgggctcaggagtca

SEQ ID NO: 284315 - DNA, 30 bp, Artificial Sequence
  Synthetic oligonucleotide
cagaaccgctccctaacgtgcatggagtca

SEQ ID NO: 284316 - DNA, 30 bp, Artificial Sequence
  Synthetic oligonucleotide
tgagggagggtgcagtgagtctactagtca

SEQ ID NO: 284317 - DNA, 30 bp, Artificial Sequence
  Synthetic oligonucleotide
tagctaggctacgggacgctgtactagtca

SEQ ID NO: 284318 - DNA, 30 bp, Artificial Sequence
  Synthetic oligonucleotide
cctggcctgagccaatcaacatagtagtca

SEQ ID NO: 284319 - DNA, 30 bp, Artificial Sequence
  Synthetic oligonucleotide
agtcggctgagaatttattgtacgtagtca

SEQ ID NO: 284320 - DNA, 30 bp, Artificial Sequence
  Synthetic oligonucleotide
gaatacagctccttaatgcaatggtagtca

SEQ ID NO: 284321 - DNA, 30 bp, Artificial Sequence
  Synthetic oligonucleotide
gggggcagtgactctcggccgggaacgtca

SEQ ID NO: 284322 - DNA, 30 bp, Artificial Sequence
  Synthetic oligonucleotide
taaatgacaggagcggcccggggaacgtca

SEQ ID NO: 284323 - DNA, 30 bp, Artificial Sequence
  Synthetic oligonucleotide
tttgacccatataagaattctgtaacgtca

SEQ ID NO: 284324 - DNA, 30 bp, Artificial Sequence
  Synthetic oligonucleotide
atagctagaaacgggacttgctacacgtca

SEQ ID NO: 284325 - DNA, 30 bp, Artificial Sequence
  Synthetic oligonucleotide
tgtatgaggtttttaaataaagagacgtca

SEQ ID NO: 284326 - DNA, 30 bp, Artificial Sequence
  Synthetic oligonucleotide
ttgagcaacgtacgttggacggagacgtca

SEQ ID NO: 284327 - DNA, 30 bp, Artificial Sequence
  Synthetic oligonucleotide
tctcgctaacgagttataagactgacgtca

SEQ ID NO: 284328 - DNA, 30 bp, Artificial Sequence
  Synthetic oligonucleotide
cagaagcttcgtttcgtccgactgacgtca

SEQ ID NO: 284329 - DNA, 30 bp, Artificial Sequence
  Synthetic oligonucleotide
atgggtggagtcgttgggtgtttgacgtca

SEQ ID NO: 284330 - DNA, 30 bp, Artificial Sequence
  Synthetic oligonucleotide
ggcagtaccgaacactcggctggtacgtca

SEQ ID NO: 284331 - DNA, 30 bp, Artificial Sequence
  Synthetic oligonucleotide
ttggatgtgggcctacaaacctcaccgtca

SEQ ID NO: 284332 - DNA, 30 bp, Artificial Sequence
  Synthetic oligonucleotide
gaattcccgaacgagtgttagggcccgtca

SEQ ID NO: 284333 - DNA, 30 bp, Artificial Sequence
  Synthetic oligonucleotide
ctatgcccaagttggaaggacagtccgtca

SEQ ID NO: 284334 - DNA, 30 bp, Artificial Sequence
  Synthetic oligonucleotide
attagtctaaacatggtatgtaaagcgtca

SEQ ID NO: 284335 - DNA, 30 bp, Artificial Sequence
  Synthetic oligonucleotide
gcggatgaatcaattgaccggtacgcgtca

SEQ ID NO: 284336 - DNA, 30 bp, Artificial Sequence
  Synthetic oligonucleotide
ctattcccggctggcgttaatgtcgcgtca

SEQ ID NO: 284337 - DNA, 30 bp, Artificial Sequence
  Synthetic oligonucleotide
actgcccggacaacgcatattaatgcgtca

SEQ ID NO: 284338 - DNA, 30 bp, Artificial Sequence
  Synthetic oligonucleotide
cggttgacgacttctgtacgctctgcgtca

SEQ ID NO: 284339 - DNA, 30 bp, Artificial Sequence
  Synthetic oligonucleotide
aatcaaaatcggaaagtatgtatatcgtca

SEQ ID NO: 284340 - DNA, 30 bp, Artificial Sequence
  Synthetic oligonucleotide
ttactagcctgcctcaaatcctactcgtca

SEQ ID NO: 284341 - DNA, 30 bp, Artificial Sequence
  Synthetic oligonucleotide
ccgtttggttacgccgttacgccctcgtca

SEQ ID NO: 284342 - DNA, 30 bp, Artificial Sequence
  Synthetic oligonucleotide
agttcaaatttgggtgacacagtgtcgtca

SEQ ID NO: 284343 - DNA, 30 bp, Artificial Sequence
  Synthetic oligonucleotide
agaacaaccaatggttttagccattcgtca

SEQ ID NO: 284344 - DNA, 30 bp, Artificial Sequence
  Synthetic oligonucleotide
tatggtaactgatagttactggaaaggtca

SEQ ID NO: 284345 - DNA, 30 bp, Artificial Sequence
  Synthetic oligonucleotide
ggctcggccgtttcgatagacggaaggtca

SEQ ID NO: 284346 - DNA, 30 bp, Artificial Sequence
  Synthetic oligonucleotide
cgtatatgtactttcctataggtaaggtca

SEQ ID NO: 284347 - DNA, 30 bp, Artificial Sequence
  Synthetic oligonucleotide
aactgggttaatacgtgggctttaaggtca

SEQ ID NO: 284348 - DNA, 30 bp, Artificial Sequence
  Synthetic oligonucleotide
tccgtaacaccgcctgggtctaacaggtca

SEQ ID NO: 284349 - DNA, 30 bp, Artificial Sequence
  Synthetic oligonucleotide
ctacaagtaacagtatggtctaccaggtca

SEQ ID NO: 284350 - DNA, 30 bp, Artificial Sequence
  Synthetic oligonucleotide
cctatcgtggaccgaagattgagcaggtca

SEQ ID NO: 284351 - DNA, 30 bp, Artificial Sequence
  Synthetic oligonucleotide
gtacggtgccactcatattaacataggtca

SEQ ID NO: 284352 - DNA, 30 bp, Artificial Sequence
  Synthetic oligonucleotide
acgttaggtttcaagacagccgaacggtca

SEQ ID NO: 284353 - DNA, 30 bp, Artificial Sequence
  Synthetic oligonucleotide
ggagccccggctcaggttgttaaccggtca

SEQ ID NO: 284354 - DNA, 30 bp, Artificial Sequence
  Synthetic oligonucleotide
gcattttcgggataaatggttaggcggtca

SEQ ID NO: 284355 - DNA, 30 bp, Artificial Sequence
  Synthetic oligonucleotide
tctttacagtatgtatgaaatcatcggtca

SEQ ID NO: 284356 - DNA, 30 bp, Artificial Sequence
  Synthetic oligonucleotide
gtcccgaatcagtggtcacgcggtcggtca

SEQ ID NO: 284357 - DNA, 30 bp, Artificial Sequence
  Synthetic oligonucleotide
ggaggagcttttaggccagcgaaagggtca

SEQ ID NO: 284358 - DNA, 30 bp, Artificial Sequence
  Synthetic oligonucleotide
ccgttcttatgtgcggcctaataagggtca

SEQ ID NO: 284359 - DNA, 30 bp, Artificial Sequence
  Synthetic oligonucleotide
tgaacgtatgttattgtaatgggagggtca

SEQ ID NO: 284360 - DNA, 30 bp, Artificial Sequence
  Synthetic oligonucleotide
aggacgtgtgttatgccatgattagggtca

SEQ ID NO: 284361 - DNA, 30 bp, Artificial Sequence
  Synthetic oligonucleotide
ttaggttacaagtgatgtcgccacgggtca

SEQ ID NO: 284362 - DNA, 30 bp, Artificial Sequence
  Synthetic oligonucleotide
tcccggagccgttcccaatcccaggggtca

SEQ ID NO: 284363 - DNA, 30 bp, Artificial Sequence
  Synthetic oligonucleotide
caacggcggaggctattaccgtcggggtca

SEQ ID NO: 284364 - DNA, 30 bp, Artificial Sequence
  Synthetic oligonucleotide
tccgttgcttaaagataacacacctggtca

SEQ ID NO: 284365 - DNA, 30 bp, Artificial Sequence
  Synthetic oligonucleotide
atacgactgtagacatcagtgggctggtca

SEQ ID NO: 284366 - DNA, 30 bp, Artificial Sequence
  Synthetic oligonucleotide
aagaccataaggggaccatttcagtggtca

SEQ ID NO: 284367 - DNA, 30 bp, Artificial Sequence
  Synthetic oligonucleotide
tccattggtcactagtaccaaaggtggtca

SEQ ID NO: 284368 - DNA, 30 bp, Artificial Sequence
  Synthetic oligonucleotide
cacgtgattatatccaatcggcggtggtca

SEQ ID NO: 284369 - DNA, 30 bp, Artificial Sequence
  Synthetic oligonucleotide
actatcggcaagattcgcaggtattggtca

SEQ ID NO: 284370 - DNA, 30 bp, Artificial Sequence
  Synthetic oligonucleotide
tggctaaaacccctatggcccttttggtca

SEQ ID NO: 284371 - DNA, 30 bp, Artificial Sequence
  Synthetic oligonucleotide
actgtgtaagatatacgatctggaatgtca

SEQ ID NO: 284372 - DNA, 30 bp, Artificial Sequence
  Synthetic oligonucleotide
acagatattgatcgcgtcaaggccatgtca

SEQ ID NO: 284373 - DNA, 30 bp, Artificial Sequence
  Synthetic oligonucleotide
ttacgtaaagatctctggcagcagatgtca

SEQ ID NO: 284374 - DNA, 30 bp, Artificial Sequence
  Synthetic oligonucleotide
ttatgttcgcgggcacagctagagatgtca

SEQ ID NO: 284375 - DNA, 30 bp, Artificial Sequence
  Synthetic oligonucleotide
ttcgatagagatagcgggcacacgatgtca

SEQ ID NO: 284376 - DNA, 30 bp, Artificial Sequence
  Synthetic oligonucleotide
agtctaagcgtttataatgcaactatgtca

SEQ ID NO: 284377 - DNA, 30 bp, Artificial Sequence
  Synthetic oligonucleotide
ggtcgcagaatgcaggtatccaccctgtca

SEQ ID NO: 284378 - DNA, 30 bp, Artificial Sequence
  Synthetic oligonucleotide
ccaaggtacccccggagcgtcagcctgtca

SEQ ID NO: 284379 - DNA, 30 bp, Artificial Sequence
  Synthetic oligonucleotide
aaagatggtactatacactacaggctgtca

SEQ ID NO: 284380 - DNA, 30 bp, Artificial Sequence
  Synthetic oligonucleotide
ctggttaattttcggcattgtaggctgtca

SEQ ID NO: 284381 - DNA, 30 bp, Artificial Sequence
  Synthetic oligonucleotide
ctcaaaagcacgacggcgacccgtctgtca

SEQ ID NO: 284382 - DNA, 30 bp, Artificial Sequence
  Synthetic oligonucleotide
cgcggggccacgatgcctgtgattctgtca

SEQ ID NO: 284383 - DNA, 30 bp, Artificial Sequence
  Synthetic oligonucleotide
tgaccttcggccctcttaacacccgtgtca

SEQ ID NO: 284384 - DNA, 29 bp, Artificial Sequence
  Synthetic oligonucleotide
ttatcgggcaactatgggaaagcgtgtca

SEQ ID NO: 284385 - DNA, 30 bp, Artificial Sequence
  Synthetic oligonucleotide
cagcctaatgggaggccgcgcgcggtgtca

SEQ ID NO: 284386 - DNA, 30 bp, Artificial Sequence
  Synthetic oligonucleotide
acggtgacttctatatactttagggtgtca

SEQ ID NO: 284387 - DNA, 30 bp, Artificial Sequence
  Synthetic oligonucleotide
ccgtgtggtgcggtcgagactccattgtca

SEQ ID NO: 284388 - DNA, 30 bp, Artificial Sequence
  Synthetic oligonucleotide
gcatgtgctaggtactacgatttattgtca

SEQ ID NO: 284389 - DNA, 30 bp, Artificial Sequence
  Synthetic oligonucleotide
tatttggccgaacaggtgagacacttgtca

SEQ ID NO: 284390 - DNA, 30 bp, Artificial Sequence
  Synthetic oligonucleotide
ttctaaaagcatacgtagagatacttgtca

SEQ ID NO: 284391 - DNA, 30 bp, Artificial Sequence
  Synthetic oligonucleotide
aaaagtatcttaaagggacgttagttgtca

SEQ ID NO: 284392 - DNA, 30 bp, Artificial Sequence
  Synthetic oligonucleotide
tcctcgtggcctagtaggaacatgttgtca

SEQ ID NO: 284393 - DNA, 30 bp, Artificial Sequence
  Synthetic oligonucleotide
cagagaatgtaagacggagaatctttgtca

SEQ ID NO: 284394 - DNA, 30 bp, Artificial Sequence
  Synthetic oligonucleotide
accggttcctgggtgagcatagcaaattca

SEQ ID NO: 284395 - DNA, 30 bp, Artificial Sequence
  Synthetic oligonucleotide
cattcttcccgttacagtggcggaaattca

SEQ ID NO: 284396 - DNA, 30 bp, Artificial Sequence
  Synthetic oligonucleotide
tagatataggcaatagagttgtccaattca

SEQ ID NO: 284397 - DNA, 30 bp, Artificial Sequence
  Synthetic oligonucleotide
tgttcacgttaccaataggggggcaattca

SEQ ID NO: 284398 - DNA, 30 bp, Artificial Sequence
  Synthetic oligonucleotide
accactcgaatttcctcggaagagaattca

SEQ ID NO: 284399 - DNA, 30 bp, Artificial Sequence
  Synthetic oligonucleotide
ccgacatgactacctgtagcagagaattca

SEQ ID NO: 284400 - DNA, 30 bp, Artificial Sequence
  Synthetic oligonucleotide
catggtcgggcgcttgtggtggtgaattca

SEQ ID NO: 284401 - DNA, 30 bp, Artificial Sequence
  Synthetic oligonucleotide
tgaacgatgaggcgatcggtttctaattca

SEQ ID NO: 284402 - DNA, 30 bp, Artificial Sequence
  Synthetic oligonucleotide
taaatgattcgattcagagtctgtaattca

SEQ ID NO: 284403 - DNA, 30 bp, Artificial Sequence
  Synthetic oligonucleotide
cggtgaccctcccgccggaaggttaattca

SEQ ID NO: 284404 - DNA, 30 bp, Artificial Sequence
  Synthetic oligonucleotide
acggcgaggctacttgtcacaacccattca

SEQ ID NO: 284405 - DNA, 30 bp, Artificial Sequence
  Synthetic oligonucleotide
actcccgtgattaacactctacctcattca

SEQ ID NO: 284406 - DNA, 30 bp, Artificial Sequence
  Synthetic oligonucleotide
ctgggcggttggtccacctattcagattca

SEQ ID NO: 284407 - DNA, 30 bp, Artificial Sequence
  Synthetic oligonucleotide
cggcatagactagcttggttgcgagattca

SEQ ID NO: 284408 - DNA, 30 bp, Artificial Sequence
  Synthetic oligonucleotide
agtgtgtttaatgatcttacgttagattca

SEQ ID NO: 284409 - DNA, 30 bp, Artificial Sequence
  Synthetic oligonucleotide
tgtcaacagtctatcgcgcctggcgattca

SEQ ID NO: 284410 - DNA, 30 bp, Artificial Sequence
  Synthetic oligonucleotide
ggcctaccagataaggtcatcgtcgattca

SEQ ID NO: 284411 - DNA, 30 bp, Artificial Sequence
  Synthetic oligonucleotide
gacagttcttatagtgtggcaccggattca

SEQ ID NO: 284412 - DNA, 30 bp, Artificial Sequence
  Synthetic oligonucleotide
gagtttcctcttttaaacttccctgattca

SEQ ID NO: 284413 - DNA, 30 bp, Artificial Sequence
  Synthetic oligonucleotide
acgcgagcacctgaccggtgagttgattca

SEQ ID NO: 284414 - DNA, 30 bp, Artificial Sequence
  Synthetic oligonucleotide
gagaagctgaatgatactgtcaaatattca

SEQ ID NO: 284415 - DNA, 30 bp, Artificial Sequence
  Synthetic oligonucleotide
gtggatagtattacagacatcgaatattca

SEQ ID NO: 284416 - DNA, 30 bp, Artificial Sequence
  Synthetic oligonucleotide
ctttggtggccgtgccacttcatatattca

SEQ ID NO: 284417 - DNA, 30 bp, Artificial Sequence
  Synthetic oligonucleotide
tgttcaagagggtatcgatcgaactattca

SEQ ID NO: 284418 - DNA, 30 bp, Artificial Sequence
  Synthetic oligonucleotide
atacgctaacgtcggcgacaacgctattca

SEQ ID NO: 284419 - DNA, 30 bp, Artificial Sequence
  Synthetic oligonucleotide
gacactgcacggctaacttgttcgtattca

SEQ ID NO: 284420 - DNA, 30 bp, Artificial Sequence
  Synthetic oligonucleotide
cgtagaagaacccctgaatagaggtattca

SEQ ID NO: 284421 - DNA, 30 bp, Artificial Sequence
  Synthetic oligonucleotide
actcacataatgtttgatcatgcttattca

SEQ ID NO: 284422 - DNA, 30 bp, Artificial Sequence
  Synthetic oligonucleotide
ccaggctagcgggcacgcctaagttattca

SEQ ID NO: 284423 - DNA, 30 bp, Artificial Sequence
  Synthetic oligonucleotide
acagaaactcgagaacgcgggcgttattca

SEQ ID NO: 284424 - DNA, 30 bp, Artificial Sequence
  Synthetic oligonucleotide
cgtagatggatatattaagagctttattca

SEQ ID NO: 284425 - DNA, 30 bp, Artificial Sequence
  Synthetic oligonucleotide
gagtttggaaacgactacacaaaaacttca

SEQ ID NO: 284426 - DNA, 30 bp, Artificial Sequence
  Synthetic oligonucleotide
tgagtcgttgttacgattgagaaaacttca

SEQ ID NO: 284427 - DNA, 30 bp, Artificial Sequence
  Synthetic oligonucleotide
atttgtttctcaagtacctcacacacttca

SEQ ID NO: 284428 - DNA, 30 bp, Artificial Sequence
  Synthetic oligonucleotide
aaactgtaacgggaatcctggtatacttca

SEQ ID NO: 284429 - DNA, 30 bp, Artificial Sequence
  Synthetic oligonucleotide
agacttggttagctgacgatttctacttca

SEQ ID NO: 284430 - DNA, 30 bp, Artificial Sequence
  Synthetic oligonucleotide
gtgcgggatgtccgtatgagacgtacttca

SEQ ID NO: 284431 - DNA, 30 bp, Artificial Sequence
  Synthetic oligonucleotide
aaaagtgaagccaagagtggtcttacttca

SEQ ID NO: 284432 - DNA, 30 bp, Artificial Sequence
  Synthetic oligonucleotide
gcctatggttgcgtctagtaggttacttca

SEQ ID NO: 284433 - DNA, 30 bp, Artificial Sequence
  Synthetic oligonucleotide
catgacgcgggcgcctttccttttacttca

SEQ ID NO: 284434 - DNA, 30 bp, Artificial Sequence
  Synthetic oligonucleotide
ccactgaggtgaacgtaagtttttacttca

SEQ ID NO: 284435 - DNA, 30 bp, Artificial Sequence
  Synthetic oligonucleotide
accgtctaggtcggaagcccaagaccttca

SEQ ID NO: 284436 - DNA, 30 bp, Artificial Sequence
  Synthetic oligonucleotide
agctaacctctacaaagaaagtccccttca

SEQ ID NO: 284437 - DNA, 30 bp, Artificial Sequence
  Synthetic oligonucleotide
acaagtgggactttcgatagccgcccttca

SEQ ID NO: 284438 - DNA, 30 bp, Artificial Sequence
  Synthetic oligonucleotide
atccttgtagaagggcgatgacgagcttca

SEQ ID NO: 284439 - DNA, 30 bp, Artificial Sequence
  Synthetic oligonucleotide
ctccgcactataccgactatcatagcttca

SEQ ID NO: 284440 - DNA, 30 bp, Artificial Sequence
  Synthetic oligonucleotide
tccgtggtaccactcgtaccattagcttca

SEQ ID NO: 284441 - DNA, 30 bp, Artificial Sequence
  Synthetic oligonucleotide
atcccctgctcccacgacgtgggcgcttca

SEQ ID NO: 284442 - DNA, 30 bp, Artificial Sequence
  Synthetic oligonucleotide
taggacaacgaagcagcatcgagtgcttca

SEQ ID NO: 284443 - DNA, 30 bp, Artificial Sequence
  Synthetic oligonucleotide
actggggaggtttcctgttacgtatcttca

SEQ ID NO: 284444 - DNA, 30 bp, Artificial Sequence
  Synthetic oligonucleotide
ttcgtaccggggcactcgctggactcttca

SEQ ID NO: 284445 - DNA, 30 bp, Artificial Sequence
  Synthetic oligonucleotide
atatgtattgcggccaataatctgtcttca

SEQ ID NO: 284446 - DNA, 30 bp, Artificial Sequence
  Synthetic oligonucleotide
tattcgtcacaactacgtcccgtgtcttca

SEQ ID NO: 284447 - DNA, 30 bp, Artificial Sequence
  Synthetic oligonucleotide
gtctcaaacggtcattcctgagtaagttca

SEQ ID NO: 284448 - DNA, 30 bp, Artificial Sequence
  Synthetic oligonucleotide
acagtacagcggcaaaacggcaccagttca

SEQ ID NO: 284449 - DNA, 30 bp, Artificial Sequence
  Synthetic oligonucleotide
tccctatggccttcatgaatgaccagttca

SEQ ID NO: 284450 - DNA, 30 bp, Artificial Sequence
  Synthetic oligonucleotide
gatgggggagaactagccgataccagttca

SEQ ID NO: 284451 - DNA, 30 bp, Artificial Sequence
  Synthetic oligonucleotide
gattgagtgttctcggcggacagcagttca

SEQ ID NO: 284452 - DNA, 30 bp, Artificial Sequence
  Synthetic oligonucleotide
ttttgcggagccagtaaattgcagagttca

SEQ ID NO: 284453 - DNA, 30 bp, Artificial Sequence
  Synthetic oligonucleotide
tagaagggtacactttagatatctagttca

SEQ ID NO: 284454 - DNA, 30 bp, Artificial Sequence
  Synthetic oligonucleotide
gcggcatcgagcctatttgcgcaacgttca

SEQ ID NO: 284455 - DNA, 30 bp, Artificial Sequence
  Synthetic oligonucleotide
aaaacccattcaagggcggcagaacgttca

SEQ ID NO: 284456 - DNA, 30 bp, Artificial Sequence
  Synthetic oligonucleotide
gggccattttttcacccagtctaccgttca

SEQ ID NO: 284457 - DNA, 30 bp, Artificial Sequence
  Synthetic oligonucleotide
aatttagtgctcgaggtccacttccgttca

SEQ ID NO: 284458 - DNA, 30 bp, Artificial Sequence
  Synthetic oligonucleotide
ctgcgcggtcagaaacttactaggcgttca

SEQ ID NO: 284459 - DNA, 30 bp, Artificial Sequence
  Synthetic oligonucleotide
ctagaacattgaggccccccaatgcgttca

SEQ ID NO: 284460 - DNA, 30 bp, Artificial Sequence
  Synthetic oligonucleotide
taacccacgatgtcgagaaaatgtcgttca

SEQ ID NO: 284461 - DNA, 30 bp, Artificial Sequence
  Synthetic oligonucleotide
gggttcttggtcagtatccgccttcgttca

SEQ ID NO: 284462 - DNA, 30 bp, Artificial Sequence
  Synthetic oligonucleotide
agccatagataaaagagtgtgtaaggttca

SEQ ID NO: 284463 - DNA, 30 bp, Artificial Sequence
  Synthetic oligonucleotide
agattagaagatcgcacacttgcaggttca

SEQ ID NO: 284464 - DNA, 30 bp, Artificial Sequence
  Synthetic oligonucleotide
gtaatgacattatctcgcagaactggttca

SEQ ID NO: 284465 - DNA, 30 bp, Artificial Sequence
  Synthetic oligonucleotide
ctaacggttagaccaggggcctctggttca

SEQ ID NO: 284466 - DNA, 30 bp, Artificial Sequence
  Synthetic oligonucleotide
ccttgtgacttccatctctagcttggttca

SEQ ID NO: 284467 - DNA, 30 bp, Artificial Sequence
  Synthetic oligonucleotide
catgatgatcgggagggagtgcttggttca

SEQ ID NO: 284468 - DNA, 30 bp, Artificial Sequence
  Synthetic oligonucleotide
gctcggacgtccacgaatcccctatgttca

SEQ ID NO: 284469 - DNA, 30 bp, Artificial Sequence
  Synthetic oligonucleotide
ctgtctccgcgcctgagtactccgtgttca

SEQ ID NO: 284470 - DNA, 30 bp, Artificial Sequence
  Synthetic oligonucleotide
gtgtaagctcgcctttagctccattgttca

SEQ ID NO: 284471 - DNA, 30 bp, Artificial Sequence
  Synthetic oligonucleotide
aaccacattagcgtaggagaggattgttca

SEQ ID NO: 284472 - DNA, 30 bp, Artificial Sequence
  Synthetic oligonucleotide
tgtccaacgttgatatgcaactattgttca

SEQ ID NO: 284473 - DNA, 30 bp, Artificial Sequence
  Synthetic oligonucleotide
gcactccggtgtgtccgaataagaatttca

SEQ ID NO: 284474 - DNA, 30 bp, Artificial Sequence
  Synthetic oligonucleotide
gactggcaggtcaaagagcgcggcatttca

SEQ ID NO: 284475 - DNA, 30 bp, Artificial Sequence
  Synthetic oligonucleotide
cgacggtcatcaattgagaggatcatttca

SEQ ID NO: 284476 - DNA, 30 bp, Artificial Sequence
  Synthetic oligonucleotide
tgcggatgagaaaattagaggaggatttca

SEQ ID NO: 284477 - DNA, 30 bp, Artificial Sequence
  Synthetic oligonucleotide
aggaagctgcttatagtcattctgatttca

SEQ ID NO: 284478 - DNA, 30 bp, Artificial Sequence
  Synthetic oligonucleotide
gaggcactatcgaggtcctgtgatatttca

SEQ ID NO: 284479 - DNA, 30 bp, Artificial Sequence
  Synthetic oligonucleotide
caaatacgggcccagacttccaagctttca

SEQ ID NO: 284480 - DNA, 30 bp, Artificial Sequence
  Synthetic oligonucleotide
tgcaactatctgtgggataactcgctttca

SEQ ID NO: 284481 - DNA, 30 bp, Artificial Sequence
  Synthetic oligonucleotide
atgaaagtgcgacaagctccgtcgctttca

SEQ ID NO: 284482 - DNA, 30 bp, Artificial Sequence
  Synthetic oligonucleotide
gacatcgcttaatccgttgactggctttca

SEQ ID NO: 284483 - DNA, 30 bp, Artificial Sequence
  Synthetic oligonucleotide
tcagagaatgcgcatccatcgcttctttca

SEQ ID NO: 284484 - DNA, 30 bp, Artificial Sequence
  Synthetic oligonucleotide
tcaatcgctcgatcgccagtctgagtttca

SEQ ID NO: 284485 - DNA, 30 bp, Artificial Sequence
  Synthetic oligonucleotide
agtcgagaaaaatttgatttcatagtttca

SEQ ID NO: 284486 - DNA, 30 bp, Artificial Sequence
  Synthetic oligonucleotide
gtagttagtacttaggcaaaagtagtttca

SEQ ID NO: 284487 - DNA, 30 bp, Artificial Sequence
  Synthetic oligonucleotide
taatgggatgaagcgaactacaccgtttca

SEQ ID NO: 284488 - DNA, 30 bp, Artificial Sequence
  Synthetic oligonucleotide
tcccacatcgaaggacgtattgccgtttca

SEQ ID NO: 284489 - DNA, 30 bp, Artificial Sequence
  Synthetic oligonucleotide
ttctaagggcgtactaaggtaaaggtttca

SEQ ID NO: 284490 - DNA, 30 bp, Artificial Sequence
  Synthetic oligonucleotide
aatcgtttacaatgataagtagaggtttca

SEQ ID NO: 284491 - DNA, 30 bp, Artificial Sequence
  Synthetic oligonucleotide
aacttctgaggttaataagcctaggtttca

SEQ ID NO: 284492 - DNA, 30 bp, Artificial Sequence
  Synthetic oligonucleotide
taacagtacggacagatacatagggtttca

SEQ ID NO: 284493 - DNA, 30 bp, Artificial Sequence
  Synthetic oligonucleotide
cacagaagtatgctcctctcagtggtttca

SEQ ID NO: 284494 - DNA, 30 bp, Artificial Sequence
  Synthetic oligonucleotide
cggagacgagtccgcggcaacgatgtttca

SEQ ID NO: 284495 - DNA, 30 bp, Artificial Sequence
  Synthetic oligonucleotide
ttagggacgaaaggtggtcagattgtttca

SEQ ID NO: 284496 - DNA, 30 bp, Artificial Sequence
  Synthetic oligonucleotide
gcaattatagccttgcaagaacttgtttca

SEQ ID NO: 284497 - DNA, 30 bp, Artificial Sequence
  Synthetic oligonucleotide
acggcgagctgaagtgctactcaattttca

SEQ ID NO: 284498 - DNA, 30 bp, Artificial Sequence
  Synthetic oligonucleotide
cgggcactggctagtgacccagaattttca

SEQ ID NO: 284499 - DNA, 30 bp, Artificial Sequence
  Synthetic oligonucleotide
ggcctgagccaggtgaggaatagattttca

SEQ ID NO: 284500 - DNA, 30 bp, Artificial Sequence
  Synthetic oligonucleotide
gttgtaagcaaaggaagaactaccttttca

SEQ ID NO: 284501 - DNA, 30 bp, Artificial Sequence
  Synthetic oligonucleotide
tgatggagcgcatatcgatccgtcttttca

SEQ ID NO: 284502 - DNA, 30 bp, Artificial Sequence
  Synthetic oligonucleotide
ggagaccatcaccgacggtgtcggttttca

SEQ ID NO: 284503 - DNA, 30 bp, Artificial Sequence
  Synthetic oligonucleotide
gtccgaaatcgagaatggaggatgttttca

SEQ ID NO: 284504 - DNA, 30 bp, Artificial Sequence
  Synthetic oligonucleotide
gcaccaatcttcgttaaatcgaaaaaaaga

SEQ ID NO: 284505 - DNA, 30 bp, Artificial Sequence
  Synthetic oligonucleotide
ttacgtagtgacaaagtatgctaaaaaaga

SEQ ID NO: 284506 - DNA, 30 bp, Artificial Sequence
  Synthetic oligonucleotide
atatatcgctcagggtaaacacgaaaaaga

SEQ ID NO: 284507 - DNA, 30 bp, Artificial Sequence
  Synthetic oligonucleotide
agcgctttcgactttgttacagtaaaaaga

SEQ ID NO: 284508 - DNA, 30 bp, Artificial Sequence
  Synthetic oligonucleotide
ataggactactggggtcagcatccaaaaga

SEQ ID NO: 284509 - DNA, 30 bp, Artificial Sequence
  Synthetic oligonucleotide
ccgccctgatgagcagagtcggtcaaaaga

SEQ ID NO: 284510 - DNA, 30 bp, Artificial Sequence
  Synthetic oligonucleotide
tagagaagtctttcgcggcgggtcaaaaga

SEQ ID NO: 284511 - DNA, 30 bp, Artificial Sequence
  Synthetic oligonucleotide
gaagtatggcccgtagaattggagaaaaga

SEQ ID NO: 284512 - DNA, 30 bp, Artificial Sequence
  Synthetic oligonucleotide
cggtttggtgcgacatgtttctagaaaaga

SEQ ID NO: 284513 - DNA, 30 bp, Artificial Sequence
  Synthetic oligonucleotide
tagagacgtgtttcgggaggtcttaaaaga

SEQ ID NO: 284514 - DNA, 30 bp, Artificial Sequence
  Synthetic oligonucleotide
acccaacaatataggcaaatggcacaaaga

SEQ ID NO: 284515 - DNA, 30 bp, Artificial Sequence
  Synthetic oligonucleotide
cggtaaagtcattattattagctacaaaga

SEQ ID NO: 284516 - DNA, 30 bp, Artificial Sequence
  Synthetic oligonucleotide
gaaaaacatgagaagcttccagagcaaaga

SEQ ID NO: 284517 - DNA, 30 bp, Artificial Sequence
  Synthetic oligonucleotide
tttgatgtggcatcaacaggatcgcaaaga

SEQ ID NO: 284518 - DNA, 30 bp, Artificial Sequence
  Synthetic oligonucleotide
atgtttatacgagacatttgcactcaaaga

SEQ ID NO: 284519 - DNA, 30 bp, Artificial Sequence
  Synthetic oligonucleotide
atacaggagtttaccttaacatttcaaaga

SEQ ID NO: 284520 - DNA, 30 bp, Artificial Sequence
  Synthetic oligonucleotide
tacaataaattttcaagaaggcaagaaaga

SEQ ID NO: 284521 - DNA, 30 bp, Artificial Sequence
  Synthetic oligonucleotide
ctgatattgtaacaggagtgttaagaaaga

SEQ ID NO: 284522 - DNA, 30 bp, Artificial Sequence
  Synthetic oligonucleotide
gccaaatttgggagcacaagattagaaaga

SEQ ID NO: 284523 - DNA, 30 bp, Artificial Sequence
  Synthetic oligonucleotide
aacctagggctttcggagaaggtcgaaaga

SEQ ID NO: 284524 - DNA, 30 bp, Artificial Sequence
  Synthetic oligonucleotide
cttcttacagtctcgccaaagacggaaaga

SEQ ID NO: 284525 - DNA, 30 bp, Artificial Sequence
  Synthetic oligonucleotide
taaagctattggcctgtttacagggaaaga

SEQ ID NO: 284526 - DNA, 30 bp, Artificial Sequence
  Synthetic oligonucleotide
gatacggtgctgtcgcttcatagtgaaaga

SEQ ID NO: 284527 - DNA, 30 bp, Artificial Sequence
  Synthetic oligonucleotide
taggagctaacagaaatggcttttgaaaga

SEQ ID NO: 284528 - DNA, 30 bp, Artificial Sequence
  Synthetic oligonucleotide
agcatgtacgatattatagcgtgataaaga

SEQ ID NO: 284529 - DNA, 30 bp, Artificial Sequence
  Synthetic oligonucleotide
cgcccgcatgttaagtttggcatataaaga

SEQ ID NO: 284530 - DNA, 30 bp, Artificial Sequence
  Synthetic oligonucleotide
taatcgacgagcagatccactgtataaaga

SEQ ID NO: 284531 - DNA, 30 bp, Artificial Sequence
  Synthetic oligonucleotide
aaatcgaacgcgctcgttgtatcgtaaaga

SEQ ID NO: 284532 - DNA, 30 bp, Artificial Sequence
  Synthetic oligonucleotide
gatctcatcattcgagcgtttgtttaaaga

SEQ ID NO: 284533 - DNA, 30 bp, Artificial Sequence
  Synthetic oligonucleotide
agacatcggcaattcttatattaaacaaga

SEQ ID NO: 284534 - DNA, 30 bp, Artificial Sequence
  Synthetic oligonucleotide
gattacagatcatggttcatcaccacaaga

SEQ ID NO: 284535 - DNA, 30 bp, Artificial Sequence
  Synthetic oligonucleotide
gcatctgatggcatcaggtaatcgacaaga

SEQ ID NO: 284536 - DNA, 30 bp, Artificial Sequence
  Synthetic oligonucleotide
tattctacatggtactcggttcgtacaaga

SEQ ID NO: 284537 - DNA, 30 bp, Artificial Sequence
  Synthetic oligonucleotide
tgttccaccgcctgtacaggggcaccaaga

SEQ ID NO: 284538 - DNA, 30 bp, Artificial Sequence
  Synthetic oligonucleotide
gtctaccagaaacgcttgctcagaccaaga

SEQ ID NO: 284539 - DNA, 30 bp, Artificial Sequence
  Synthetic oligonucleotide
tcactgttatcgtagaatcgacgaccaaga

SEQ ID NO: 284540 - DNA, 30 bp, Artificial Sequence
  Synthetic oligonucleotide
atctattttctgcggaaacagggaccaaga

SEQ ID NO: 284541 - DNA, 30 bp, Artificial Sequence
  Synthetic oligonucleotide
tacgacagtagtcatcggtctgtaccaaga

SEQ ID NO: 284542 - DNA, 30 bp, Artificial Sequence
  Synthetic oligonucleotide
attatagtttgaatataggtgcacccaaga

SEQ ID NO: 284543 - DNA, 30 bp, Artificial Sequence
  Synthetic oligonucleotide
actggatagcccacgcggctatggccaaga

SEQ ID NO: 284544 - DNA, 30 bp, Artificial Sequence
  Synthetic oligonucleotide
aatggccctgtgcattattcgtttccaaga

SEQ ID NO: 284545 - DNA, 30 bp, Artificial Sequence
  Synthetic oligonucleotide
ttgcgggccagtcacaacatatcagcaaga

SEQ ID NO: 284546 - DNA, 30 bp, Artificial Sequence
  Synthetic oligonucleotide
ttgacacagttagcgtatacggacgcaaga

SEQ ID NO: 284547 - DNA, 30 bp, Artificial Sequence
  Synthetic oligonucleotide
tagcttctatggtttatctctctcgcaaga

SEQ ID NO: 284548 - DNA, 30 bp, Artificial Sequence
  Synthetic oligonucleotide
gcatcctggatacaattccgaaaggcaaga

SEQ ID NO: 284549 - DNA, 30 bp, Artificial Sequence
  Synthetic oligonucleotide
aaccaaacttttggatccgtcacggcaaga

SEQ ID NO: 284550 - DNA, 30 bp, Artificial Sequence
  Synthetic oligonucleotide
tgtactacgtctacgcctagcggggcaaga

SEQ ID NO: 284551 - DNA, 30 bp, Artificial Sequence
  Synthetic oligonucleotide
tgcgccaaacgggattggcacaatgcaaga

SEQ ID NO: 284552 - DNA, 30 bp, Artificial Sequence
  Synthetic oligonucleotide
cagacttaacaagctaccacagctgcaaga

SEQ ID NO: 284553 - DNA, 30 bp, Artificial Sequence
  Synthetic oligonucleotide
cctgcactgttcagaaggagctgtgcaaga

SEQ ID NO: 284554 - DNA, 30 bp, Artificial Sequence
  Synthetic oligonucleotide
gatatcatctgtggcaccatggcctcaaga

SEQ ID NO: 284555 - DNA, 30 bp, Artificial Sequence
  Synthetic oligonucleotide
tggatccgacaatcaagtgcgatgtcaaga

SEQ ID NO: 284556 - DNA, 30 bp, Artificial Sequence
  Synthetic oligonucleotide
tcgcagctgtctagcatttggcgttcaaga

SEQ ID NO: 284557 - DNA, 30 bp, Artificial Sequence
  Synthetic oligonucleotide
atgacggggcgtgcagcgaacctttcaaga

SEQ ID NO: 284558 - DNA, 30 bp, Artificial Sequence
  Synthetic oligonucleotide
gtcataagtacgatgctggactgaagaaga

SEQ ID NO: 284559 - DNA, 30 bp, Artificial Sequence
  Synthetic oligonucleotide
cgtaatgcgtgatatcacgtatacagaaga

SEQ ID NO: 284560 - DNA, 30 bp, Artificial Sequence
  Synthetic oligonucleotide
ggatcgctgtccccataggaattcagaaga

SEQ ID NO: 284561 - DNA, 30 bp, Artificial Sequence
  Synthetic oligonucleotide
atagatcctgtccagcatggtgatagaaga

SEQ ID NO: 284562 - DNA, 30 bp, Artificial Sequence
  Synthetic oligonucleotide
ccacaaaccctcgttcgagacggtagaaga

SEQ ID NO: 284563 - DNA, 30 bp, Artificial Sequence
  Synthetic oligonucleotide
ttgatcgacatccaggctaagtgtagaaga

SEQ ID NO: 284564 - DNA, 30 bp, Artificial Sequence
  Synthetic oligonucleotide
ccacggagggtcccgtcaacaagacgaaga

SEQ ID NO: 284565 - DNA, 30 bp, Artificial Sequence
  Synthetic oligonucleotide
catcagcggtctagtgactacggacgaaga

SEQ ID NO: 284566 - DNA, 30 bp, Artificial Sequence
  Synthetic oligonucleotide
catttatgtgaatgtgatctgcaccgaaga

SEQ ID NO: 284567 - DNA, 30 bp, Artificial Sequence
  Synthetic oligonucleotide
ccagcacagattttctagggttcgcgaaga

SEQ ID NO: 284568 - DNA, 30 bp, Artificial Sequence
  Synthetic oligonucleotide
tcttaggtttgagagcgtgataggcgaaga

SEQ ID NO: 284569 - DNA, 30 bp, Artificial Sequence
  Synthetic oligonucleotide
caagcgtctaaatgatgcatagggcgaaga

SEQ ID NO: 284570 - DNA, 30 bp, Artificial Sequence
  Synthetic oligonucleotide
ggaatattgcgtcaaagattactgcgaaga

SEQ ID NO: 284571 - DNA, 30 bp, Artificial Sequence
  Synthetic oligonucleotide
cgatttgttgaatttagatttcttcgaaga

SEQ ID NO: 284572 - DNA, 30 bp, Artificial Sequence
  Synthetic oligonucleotide
catttgtgcttgacggcatatgttcgaaga

SEQ ID NO: 284573 - DNA, 30 bp, Artificial Sequence
  Synthetic oligonucleotide
aaaaagggtccaacacctgataaaggaaga

SEQ ID NO: 284574 - DNA, 31 bp, Artificial Sequence
  Synthetic oligonucleotide
gctcggcagaaacatagcctgtgcaggaaga

SEQ ID NO: 284575 - DNA, 30 bp, Artificial Sequence
  Synthetic oligonucleotide
ctgcggtgaaatcatcctgatcagggaaga

SEQ ID NO: 284576 - DNA, 30 bp, Artificial Sequence
  Synthetic oligonucleotide
cttgcattggaggttctaaatcctggaaga

SEQ ID NO: 284577 - DNA, 30 bp, Artificial Sequence
  Synthetic oligonucleotide
tcattgtcataagatttgacgacatgaaga

SEQ ID NO: 284578 - DNA, 30 bp, Artificial Sequence
  Synthetic oligonucleotide
gcgtagccgtgacatacggttccatgaaga

SEQ ID NO: 284579 - DNA, 30 bp, Artificial Sequence
  Synthetic oligonucleotide
tacaatcagataactgccacttcatgaaga

SEQ ID NO: 284580 - DNA, 30 bp, Artificial Sequence
  Synthetic oligonucleotide
tttcgtactgttaagatcctgctatgaaga

SEQ ID NO: 284581 - DNA, 30 bp, Artificial Sequence
  Synthetic oligonucleotide
taaatgagagcacgcgaacacaagtgaaga

SEQ ID NO: 284582 - DNA, 30 bp, Artificial Sequence
  Synthetic oligonucleotide
aggtaccagatctccagttgcgagtgaaga

SEQ ID NO: 284583 - DNA, 30 bp, Artificial Sequence
  Synthetic oligonucleotide
agtgtgcgataatatgtgccaatgtgaaga

SEQ ID NO: 284584 - DNA, 30 bp, Artificial Sequence
  Synthetic oligonucleotide
ctctcgggtggatctggaggttaaataaga

SEQ ID NO: 284585 - DNA, 30 bp, Artificial Sequence
  Synthetic oligonucleotide
tgctatacctgaaggttattcagcataaga

SEQ ID NO: 284586 - DNA, 30 bp, Artificial Sequence
  Synthetic oligonucleotide
tttatcaaaccggtatcttgggtgataaga

SEQ ID NO: 284587 - DNA, 30 bp, Artificial Sequence
  Synthetic oligonucleotide
acttattcgttggaccaagaatcactaaga

SEQ ID NO: 284588 - DNA, 30 bp, Artificial Sequence
  Synthetic oligonucleotide
tcgttctcaaatcgatagtagctactaaga

SEQ ID NO: 284589 - DNA, 30 bp, Artificial Sequence
  Synthetic oligonucleotide
agtatggtctatcgttcgggttacctaaga

SEQ ID NO: 284590 - DNA, 30 bp, Artificial Sequence
  Synthetic oligonucleotide
cctcttggacacaggctgtacaccctaaga

SEQ ID NO: 284591 - DNA, 30 bp, Artificial Sequence
  Synthetic oligonucleotide
gtactcacctgaccagcgattggcctaaga

SEQ ID NO: 284592 - DNA, 30 bp, Artificial Sequence
  Synthetic oligonucleotide
ataaggggcatacaaatatgtttcctaaga

SEQ ID NO: 284593 - DNA, 30 bp, Artificial Sequence
  Synthetic oligonucleotide
aagaaggtagagattttataagctctaaga

SEQ ID NO: 284594 - DNA, 30 bp, Artificial Sequence
  Synthetic oligonucleotide
ggagttatgtcatgacggatatctctaaga

SEQ ID NO: 284595 - DNA, 30 bp, Artificial Sequence
  Synthetic oligonucleotide
gaccgaagcagttcagacagacaggtaaga

SEQ ID NO: 284596 - DNA, 30 bp, Artificial Sequence
  Synthetic oligonucleotide
gatcctgctgaagaactcagggcggtaaga

SEQ ID NO: 284597 - DNA, 30 bp, Artificial Sequence
  Synthetic oligonucleotide
cagtattgagtcagctatatagtggtaaga

SEQ ID NO: 284598 - DNA, 30 bp, Artificial Sequence
  Synthetic oligonucleotide
caatccattagccgaaatgtcaatgtaaga

SEQ ID NO: 284599 - DNA, 30 bp, Artificial Sequence
  Synthetic oligonucleotide
tataataactgacggtagcgacatgtaaga

SEQ ID NO: 284600 - DNA, 30 bp, Artificial Sequence
  Synthetic oligonucleotide
cgtttttgaaaaacacttggacaattaaga

SEQ ID NO: 284601 - DNA, 30 bp, Artificial Sequence
  Synthetic oligonucleotide
tgtgttcaaaggcttggtggcgcattaaga

SEQ ID NO: 284602 - DNA, 30 bp, Artificial Sequence
  Synthetic oligonucleotide
gtatgcggttgggcttttctatgattaaga

SEQ ID NO: 284603 - DNA, 30 bp, Artificial Sequence
  Synthetic oligonucleotide
cgcatctcggttaacgatttttgattaaga

SEQ ID NO: 284604 - DNA, 30 bp, Artificial Sequence
  Synthetic oligonucleotide
cagcacaaatgtattggcttcgccttaaga

SEQ ID NO: 284605 - DNA, 30 bp, Artificial Sequence
  Synthetic oligonucleotide
tgccagcgatctcgtgaacattccttaaga

SEQ ID NO: 284606 - DNA, 30 bp, Artificial Sequence
  Synthetic oligonucleotide
tatcagcatccgacgtattcacgcttaaga

SEQ ID NO: 284607 - DNA, 30 bp, Artificial Sequence
  Synthetic oligonucleotide
atgcgcattgaggcgataacctatttaaga

SEQ ID NO: 284608 - DNA, 30 bp, Artificial Sequence
  Synthetic oligonucleotide
ttcgcgtggtatacctggataagtttaaga

SEQ ID NO: 284609 - DNA, 29 bp, Artificial Sequence
  Synthetic oligonucleotide
tactcaacgccattgcgtagcgtttaaga

SEQ ID NO: 284610 - DNA, 30 bp, Artificial Sequence
  Synthetic oligonucleotide
tgtaaggatcagttaccaacgcgtttaaga

SEQ ID NO: 284611 - DNA, 30 bp, Artificial Sequence
  Synthetic oligonucleotide
catgtccgacagtcgtagtaaaaaaacaga

SEQ ID NO: 284612 - DNA, 30 bp, Artificial Sequence
  Synthetic oligonucleotide
tatttcatcggcgcgccgatctcaaacaga

SEQ ID NO: 284613 - DNA, 30 bp, Artificial Sequence
  Synthetic oligonucleotide
ggtttgctcttgcatagcaacgtaaacaga

SEQ ID NO: 284614 - DNA, 30 bp, Artificial Sequence
  Synthetic oligonucleotide
aatcaaagctatcgtgatggcgccaacaga

SEQ ID NO: 284615 - DNA, 30 bp, Artificial Sequence
  Synthetic oligonucleotide
tgtggaatatggcatgccggacggaacaga

SEQ ID NO: 284616 - DNA, 30 bp, Artificial Sequence
  Synthetic oligonucleotide
tcaaaacaataagaaaaattcgataacaga

SEQ ID NO: 284617 - DNA, 30 bp, Artificial Sequence
  Synthetic oligonucleotide
tggatcccctgaaggttatcacctaacaga

SEQ ID NO: 284618 - DNA, 30 bp, Artificial Sequence
  Synthetic oligonucleotide
tctgcgagtcttcggatgtatttacacaga

SEQ ID NO: 284619 - DNA, 30 bp, Artificial Sequence
  Synthetic oligonucleotide
gcgtaaaagcggatagatcgcggccacaga

SEQ ID NO: 284620 - DNA, 30 bp, Artificial Sequence
  Synthetic oligonucleotide
tgaggtggttggtatgttgccaggcacaga

SEQ ID NO: 284621 - DNA, 30 bp, Artificial Sequence
  Synthetic oligonucleotide
aaactgtacaatttatggcaggatcacaga

SEQ ID NO: 284622 - DNA, 30 bp, Artificial Sequence
  Synthetic oligonucleotide
caatgaggagcatgtgactaggatcacaga

SEQ ID NO: 284623 - DNA, 30 bp, Artificial Sequence
  Synthetic oligonucleotide
ctagtgcctcagggttaaccggttcacaga

SEQ ID NO: 284624 - DNA, 30 bp, Artificial Sequence
  Synthetic oligonucleotide
agactgcgtttgttaggggaaggagacaga

SEQ ID NO: 284625 - DNA, 30 bp, Artificial Sequence
  Synthetic oligonucleotide
caactcactcgtactagggtatacgacaga

SEQ ID NO: 284626 - DNA, 30 bp, Artificial Sequence
  Synthetic oligonucleotide
tactatgtagaagactgccaggccgacaga

SEQ ID NO: 284627 - DNA, 30 bp, Artificial Sequence
  Synthetic oligonucleotide
ttaggttcccgggtgatgtagtccgacaga

SEQ ID NO: 284628 - DNA, 30 bp, Artificial Sequence
  Synthetic oligonucleotide
aatcgtacgggagaccggaggggcgacaga

SEQ ID NO: 284629 - DNA, 30 bp, Artificial Sequence
  Synthetic oligonucleotide
tttgcactcgcgctaatatgccgggacaga

SEQ ID NO: 284630 - DNA, 30 bp, Artificial Sequence
  Synthetic oligonucleotide
gaggaccctggatattacatatgggacaga

SEQ ID NO: 284631 - DNA, 30 bp, Artificial Sequence
  Synthetic oligonucleotide
atatatgcgtatgtatgccactgggacaga

SEQ ID NO: 284632 - DNA, 30 bp, Artificial Sequence
  Synthetic oligonucleotide
gcgggaactatccgggtccggaatgacaga

SEQ ID NO: 284633 - DNA, 30 bp, Artificial Sequence
  Synthetic oligonucleotide
tatctcccgatctcctatagcagtgacaga

SEQ ID NO: 284634 - DNA, 30 bp, Artificial Sequence
  Synthetic oligonucleotide
ccatatggagtctcgtaatccattgacaga

SEQ ID NO: 284635 - DNA, 30 bp, Artificial Sequence
  Synthetic oligonucleotide
tatcccttaagatgtatagtttgatacaga

SEQ ID NO: 284636 - DNA, 30 bp, Artificial Sequence
  Synthetic oligonucleotide
gcccggtgtccccgggtgggtaagtacaga

SEQ ID NO: 284637 - DNA, 30 bp, Artificial Sequence
  Synthetic oligonucleotide
tttgacgagaaaacggtctctggttacaga

SEQ ID NO: 284638 - DNA, 30 bp, Artificial Sequence
  Synthetic oligonucleotide
ctatctctgtcaaatatataacgaaccaga

SEQ ID NO: 284639 - DNA, 30 bp, Artificial Sequence
  Synthetic oligonucleotide
aacgttggtcctatatattctaggaccaga

SEQ ID NO: 284640 - DNA, 30 bp, Artificial Sequence
  Synthetic oligonucleotide
tttatgcccagtaccgagagagggaccaga

SEQ ID NO: 284641 - DNA, 30 bp, Artificial Sequence
  Synthetic oligonucleotide
agctcatccgggtaataatgtggtaccaga

SEQ ID NO: 284642 - DNA, 30 bp, Artificial Sequence
  Synthetic oligonucleotide
gagtaaacttgggtcggtccgccacccaga

SEQ ID NO: 284643 - DNA, 30 bp, Artificial Sequence
  Synthetic oligonucleotide
tccgactgatggaccaaatgcttacccaga

SEQ ID NO: 284644 - DNA, 30 bp, Artificial Sequence
  Synthetic oligonucleotide
tgctggtaacggcagcaacgtcaccccaga

SEQ ID NO: 284645 - DNA, 30 bp, Artificial Sequence
  Synthetic oligonucleotide
aaggttcccgggagttgtggtgagcccaga

SEQ ID NO: 284646 - DNA, 30 bp, Artificial Sequence
  Synthetic oligonucleotide
cccctcgcgcgaggactggactagcccaga

SEQ ID NO: 284647 - DNA, 30 bp, Artificial Sequence
  Synthetic oligonucleotide
aaaaagcggtagacgcgtacaccgcccaga

SEQ ID NO: 284648 - DNA, 30 bp, Artificial Sequence
  Synthetic oligonucleotide
taaaaatgttagtcacggcggaacgccaga

SEQ ID NO: 284649 - DNA, 30 bp, Artificial Sequence
  Synthetic oligonucleotide
gagatttgcgaaacgcattgtagcgccaga

SEQ ID NO: 284650 - DNA, 30 bp, Artificial Sequence
  Synthetic oligonucleotide
tatattggtagtttggtttaactcgccaga

SEQ ID NO: 284651 - DNA, 30 bp, Artificial Sequence
  Synthetic oligonucleotide
agatgattacatcacgcaccatgtgccaga

SEQ ID NO: 284652 - DNA, 30 bp, Artificial Sequence
  Synthetic oligonucleotide
ctgggccgagcgtaactgtacgttgccaga

SEQ ID NO: 284653 - DNA, 30 bp, Artificial Sequence
  Synthetic oligonucleotide
ataggactgtggtcagtaagtatatccaga

SEQ ID NO: 284654 - DNA, 30 bp, Artificial Sequence
  Synthetic oligonucleotide
ctggtggccatcatctctcggctatccaga

SEQ ID NO: 284655 - DNA, 30 bp, Artificial Sequence
  Synthetic oligonucleotide
gtgatggttagtttcatccaagagtccaga

SEQ ID NO: 284656 - DNA, 30 bp, Artificial Sequence
  Synthetic oligonucleotide
tgccgtcatctgatgatatatatgtccaga

SEQ ID NO: 284657 - DNA, 30 bp, Artificial Sequence
  Synthetic oligonucleotide
ttgcatacaagcccgggatgaggttccaga

SEQ ID NO: 284658 - DNA, 31 bp, Artificial Sequence
  Synthetic oligonucleotide
ggggaacggcacgtgcgcttcgggttccaga

SEQ ID NO: 284659 - DNA, 30 bp, Artificial Sequence
  Synthetic oligonucleotide
agtctacgcggaaggatcgcgtgttccaga

SEQ ID NO: 284660 - DNA, 30 bp, Artificial Sequence
  Synthetic oligonucleotide
atttaggattgctcaatcctcatttccaga

SEQ ID NO: 284661 - DNA, 30 bp, Artificial Sequence
  Synthetic oligonucleotide
gcacggtttttatatccgagtggaagcaga

SEQ ID NO: 284662 - DNA, 30 bp, Artificial Sequence
  Synthetic oligonucleotide
aaattggggtcccgggagttgtgaagcaga

SEQ ID NO: 284663 - DNA, 30 bp, Artificial Sequence
  Synthetic oligonucleotide
aacgtgagagtgacatgaaccgccagcaga

SEQ ID NO: 284664 - DNA, 30 bp, Artificial Sequence
  Synthetic oligonucleotide
attcatagattgcttacgtcagagagcaga

SEQ ID NO: 284665 - DNA, 30 bp, Artificial Sequence
  Synthetic oligonucleotide
taaattgtagttgaaatttcgaggagcaga

SEQ ID NO: 284666 - DNA, 30 bp, Artificial Sequence
  Synthetic oligonucleotide
tgttctctggaattgtctcaaatgagcaga

SEQ ID NO: 284667 - DNA, 30 bp, Artificial Sequence
  Synthetic oligonucleotide
agcgtgcagtcttgtcccttttatagcaga

SEQ ID NO: 284668 - DNA, 30 bp, Artificial Sequence
  Synthetic oligonucleotide
cgcgcacagagtccgcggccccaacgcaga

SEQ ID NO: 284669 - DNA, 30 bp, Artificial Sequence
  Synthetic oligonucleotide
cggttcggattcaagctacacatacgcaga

SEQ ID NO: 284670 - DNA, 30 bp, Artificial Sequence
  Synthetic oligonucleotide
ctagcgtactacatttatgtcactcgcaga

SEQ ID NO: 284671 - DNA, 30 bp, Artificial Sequence
  Synthetic oligonucleotide
ctatcagtaaaagttttacgccctcgcaga

SEQ ID NO: 284672 - DNA, 30 bp, Artificial Sequence
  Synthetic oligonucleotide
atttcaggtgctgttcaacctaaaggcaga

SEQ ID NO: 284673 - DNA, 30 bp, Artificial Sequence
  Synthetic oligonucleotide
catgcgacacaatcggcgcttggaggcaga

SEQ ID NO: 284674 - DNA, 30 bp, Artificial Sequence
  Synthetic oligonucleotide
gcagcatgggggtatggatccctaggcaga

SEQ ID NO: 284675 - DNA, 30 bp, Artificial Sequence
  Synthetic oligonucleotide
atcgtgtactggctacggccgctaggcaga

SEQ ID NO: 284676 - DNA, 30 bp, Artificial Sequence
  Synthetic oligonucleotide
tctatgatctggacatccagtggcggcaga

SEQ ID NO: 284677 - DNA, 30 bp, Artificial Sequence
  Synthetic oligonucleotide
tatataggtagtatttgtgtatagggcaga

SEQ ID NO: 284678 - DNA, 29 bp, Artificial Sequence
  Synthetic oligonucleotide
gtgaagtattgatgccggagccgggcaga

SEQ ID NO: 284679 - DNA, 30 bp, Artificial Sequence
  Synthetic oligonucleotide
caatcccaatcggtgaccagtaagtgcaga

SEQ ID NO: 284680 - DNA, 30 bp, Artificial Sequence
  Synthetic oligonucleotide
gaacgcaactccgcagatatcacttgcaga

SEQ ID NO: 284681 - DNA, 30 bp, Artificial Sequence
  Synthetic oligonucleotide
ttggcggagataaacctgttgataatcaga

SEQ ID NO: 284682 - DNA, 30 bp, Artificial Sequence
  Synthetic oligonucleotide
ttttggaatacgttaagctagcacatcaga

SEQ ID NO: 284683 - DNA, 30 bp, Artificial Sequence
  Synthetic oligonucleotide
caagatcttgttttggatgatgccatcaga

SEQ ID NO: 284684 - DNA, 31 bp, Artificial Sequence
  Synthetic oligonucleotide
atgatctcataagttgtaaatgaagatcaga

SEQ ID NO: 284685 - DNA, 30 bp, Artificial Sequence
  Synthetic oligonucleotide
ttcataataggcaatttaacaaggatcaga

SEQ ID NO: 284686 - DNA, 30 bp, Artificial Sequence
  Synthetic oligonucleotide
cgctcggggggggcaagcggtaatatcaga

SEQ ID NO: 284687 - DNA, 30 bp, Artificial Sequence
  Synthetic oligonucleotide
ctatcactttaaataatgattaatatcaga

SEQ ID NO: 284688 - DNA, 30 bp, Artificial Sequence
  Synthetic oligonucleotide
ttcatcttactgagagaggcaattatcaga

SEQ ID NO: 284689 - DNA, 30 bp, Artificial Sequence
  Synthetic oligonucleotide
ggccgcagccgtcaaggtagcggactcaga

SEQ ID NO: 284690 - DNA, 30 bp, Artificial Sequence
  Synthetic oligonucleotide
cattgattgaaggcagacggattactcaga

SEQ ID NO: 284691 - DNA, 30 bp, Artificial Sequence
  Synthetic oligonucleotide
atattccacgcgtaatctctcgccctcaga

SEQ ID NO: 284692 - DNA, 30 bp, Artificial Sequence
  Synthetic oligonucleotide
ctcgctcttacgctggcacgatccctcaga

SEQ ID NO: 284693 - DNA, 30 bp, Artificial Sequence
  Synthetic oligonucleotide
taggttctaaactagctaatgtctctcaga

SEQ ID NO: 284694 - DNA, 30 bp, Artificial Sequence
  Synthetic oligonucleotide
ttagggcgttgtatatgccgagaggtcaga

SEQ ID NO: 284695 - DNA, 30 bp, Artificial Sequence
  Synthetic oligonucleotide
gcaagctcgccttaagacctggaggtcaga

SEQ ID NO: 284696 - DNA, 30 bp, Artificial Sequence
  Synthetic oligonucleotide
ggcatttatctcgttataccagatgtcaga

SEQ ID NO: 284697 - DNA, 30 bp, Artificial Sequence
  Synthetic oligonucleotide
cacagttaaggcatttatcttcctgtcaga

SEQ ID NO: 284698 - DNA, 30 bp, Artificial Sequence
  Synthetic oligonucleotide
agttcggctcaagttgcgcgccaattcaga

SEQ ID NO: 284699 - DNA, 30 bp, Artificial Sequence
  Synthetic oligonucleotide
tgtttacgcggggaagctaaagccttcaga

SEQ ID NO: 284700 - DNA, 30 bp, Artificial Sequence
  Synthetic oligonucleotide
aaccaacgccctagggcgaatcagttcaga

SEQ ID NO: 284701 - DNA, 31 bp, Artificial Sequence
  Synthetic oligonucleotide
ctcccttttaacagaggcggatgcgttcaga

SEQ ID NO: 284702 - DNA, 30 bp, Artificial Sequence
  Synthetic oligonucleotide
accccccacgataatttatagggaaagaga

SEQ ID NO: 284703 - DNA, 30 bp, Artificial Sequence
  Synthetic oligonucleotide
gatctttagatttgcttggaccggaagaga

SEQ ID NO: 284704 - DNA, 30 bp, Artificial Sequence
  Synthetic oligonucleotide
tgaaaaagcgcccaccggtcagggaagaga

SEQ ID NO: 284705 - DNA, 30 bp, Artificial Sequence
  Synthetic oligonucleotide
atgatgaggcagatgagtgtgtataagaga

SEQ ID NO: 284706 - DNA, 30 bp, Artificial Sequence
  Synthetic oligonucleotide
gtccttgggttgcatagaacgcaacagaga

SEQ ID NO: 284707 - DNA, 30 bp, Artificial Sequence
  Synthetic oligonucleotide
taggcccgggtgaacccaatagcgcagaga

SEQ ID NO: 284708 - DNA, 30 bp, Artificial Sequence
  Synthetic oligonucleotide
ccgctgggcttatccgaagctaatcagaga

SEQ ID NO: 284709 - DNA, 30 bp, Artificial Sequence
  Synthetic oligonucleotide
aagtagtcccctagttgctgatatcagaga

SEQ ID NO: 284710 - DNA, 30 bp, Artificial Sequence
  Synthetic oligonucleotide
acggcgagcctatcttattatagtcagaga

SEQ ID NO: 284711 - DNA, 30 bp, Artificial Sequence
  Synthetic oligonucleotide
ggatataattaggttggaaactttcagaga

SEQ ID NO: 284712 - DNA, 30 bp, Artificial Sequence
  Synthetic oligonucleotide
cagcataatcggtaataatccacagagaga

SEQ ID NO: 284713 - DNA, 30 bp, Artificial Sequence
  Synthetic oligonucleotide
aatactctgttaagctcggatggagagaga

SEQ ID NO: 284714 - DNA, 30 bp, Artificial Sequence
  Synthetic oligonucleotide
aatgtaagacatctgcgtggattagagaga

SEQ ID NO: 284715 - DNA, 30 bp, Artificial Sequence
  Synthetic oligonucleotide
aatgtctggaggatcgataggtacgagaga

SEQ ID NO: 284716 - DNA, 30 bp, Artificial Sequence
  Synthetic oligonucleotide
agtgagaccaggccagagagacactagaga

SEQ ID NO: 284717 - DNA, 30 bp, Artificial Sequence
  Synthetic oligonucleotide
gaaggtcccaggattttgtgagtttagaga

SEQ ID NO: 284718 - DNA, 30 bp, Artificial Sequence
  Synthetic oligonucleotide
ttgcacggcaattggttaaatgtttagaga

SEQ ID NO: 284719 - DNA, 30 bp, Artificial Sequence
  Synthetic oligonucleotide
tgctgttaactgtatcacggcgtcacgaga

SEQ ID NO: 284720 - DNA, 30 bp, Artificial Sequence
  Synthetic oligonucleotide
tgtaaaccctcggtaacatgtgggacgaga

SEQ ID NO: 284721 - DNA, 30 bp, Artificial Sequence
  Synthetic oligonucleotide
actgtaattgctctgtaggtcatgacgaga

SEQ ID NO: 284722 - DNA, 30 bp, Artificial Sequence
  Synthetic oligonucleotide
gatcacacaccaggtgcatttctgacgaga

SEQ ID NO: 284723 - DNA, 30 bp, Artificial Sequence
  Synthetic oligonucleotide
acgaccatccggaaaaattattttacgaga

SEQ ID NO: 284724 - DNA, 30 bp, Artificial Sequence
  Synthetic oligonucleotide
gatacttctgagcccataaccacaccgaga

SEQ ID NO: 284725 - DNA, 30 bp, Artificial Sequence
  Synthetic oligonucleotide
tgtaccgttcggagagccgcgcacccgaga

SEQ ID NO: 284726 - DNA, 30 bp, Artificial Sequence
  Synthetic oligonucleotide
tcaattattgcacctgaacgtcacccgaga

SEQ ID NO: 284727 - DNA, 30 bp, Artificial Sequence
  Synthetic oligonucleotide
cttaaagtgctagccacccggatcccgaga

SEQ ID NO: 284728 - DNA, 30 bp, Artificial Sequence
  Synthetic oligonucleotide
agacgccaattggagcgccattagccgaga

SEQ ID NO: 284729 - DNA, 30 bp, Artificial Sequence
  Synthetic oligonucleotide
gagccagggatagtccggcgatggccgaga

SEQ ID NO: 284730 - DNA, 30 bp, Artificial Sequence
  Synthetic oligonucleotide
tttgagggtgtaaaatagcggatgccgaga

SEQ ID NO: 284731 - DNA, 30 bp, Artificial Sequence
  Synthetic oligonucleotide
ctcttagaggtctggcatcgtcctccgaga

SEQ ID NO: 284732 - DNA, 30 bp, Artificial Sequence
  Synthetic oligonucleotide
aatacaggcagcggaattaactttccgaga

SEQ ID NO: 284733 - DNA, 30 bp, Artificial Sequence
  Synthetic oligonucleotide
gatggtaagcagggcttcacctttccgaga

SEQ ID NO: 284734 - DNA, 30 bp, Artificial Sequence
  Synthetic oligonucleotide
tatatgaatcagaagacggtaatcgcgaga

SEQ ID NO: 284735 - DNA, 30 bp, Artificial Sequence
  Synthetic oligonucleotide
gttaagggttgactcagtctagatgcgaga

SEQ ID NO: 284736 - DNA, 30 bp, Artificial Sequence
  Synthetic oligonucleotide
gagcccatggggatgtagaccagtgcgaga

SEQ ID NO: 284737 - DNA, 30 bp, Artificial Sequence
  Synthetic oligonucleotide
cccgggatgtattgggtgcatggtgcgaga

SEQ ID NO: 284738 - DNA, 30 bp, Artificial Sequence
  Synthetic oligonucleotide
cgttgatcgaccagtgttgtgccgtcgaga

SEQ ID NO: 284739 - DNA, 30 bp, Artificial Sequence
  Synthetic oligonucleotide
gtgttgaaggacgtaatacctcgttcgaga

SEQ ID NO: 284740 - DNA, 30 bp, Artificial Sequence
  Synthetic oligonucleotide
actcatgcgaagcaacaaagcgtttcgaga

SEQ ID NO: 284741 - DNA, 30 bp, Artificial Sequence
  Synthetic oligonucleotide
cgacgagataacctcgtcttataaaggaga

SEQ ID NO: 284742 - DNA, 30 bp, Artificial Sequence
  Synthetic oligonucleotide
gagatggaacgcgggatttgtgcaaggaga

SEQ ID NO: 284743 - DNA, 30 bp, Artificial Sequence
  Synthetic oligonucleotide
catttcctaaggcaccctcttataaggaga

SEQ ID NO: 284744 - DNA, 30 bp, Artificial Sequence
  Synthetic oligonucleotide
atggtgtactgcacgatcctggtcaggaga

SEQ ID NO: 284745 - DNA, 30 bp, Artificial Sequence
  Synthetic oligonucleotide
agtggtatctattgttcccggaggaggaga

SEQ ID NO: 284746 - DNA, 30 bp, Artificial Sequence
  Synthetic oligonucleotide
caaatgtgcacccagtcataggggaggaga

SEQ ID NO: 284747 - DNA, 30 bp, Artificial Sequence
  Synthetic oligonucleotide
ggttagagaacgacggccttggggaggaga

SEQ ID NO: 284748 - DNA, 30 bp, Artificial Sequence
  Synthetic oligonucleotide
cacagcagggaaggggactcctataggaga

SEQ ID NO: 284749 - DNA, 30 bp, Artificial Sequence
  Synthetic oligonucleotide
atgcggtacactcagcggtttccacggaga

SEQ ID NO: 284750 - DNA, 30 bp, Artificial Sequence
  Synthetic oligonucleotide
atataaaagaccggggggggacgacggaga

SEQ ID NO: 284751 - DNA, 30 bp, Artificial Sequence
  Synthetic oligonucleotide
gagtcgaccccggataaagacggacggaga

SEQ ID NO: 284752 - DNA, 30 bp, Artificial Sequence
  Synthetic oligonucleotide
tgatgacccgcgccgtattgcactcggaga

SEQ ID NO: 284753 - DNA, 30 bp, Artificial Sequence
  Synthetic oligonucleotide
accgttggcatcactaagggtcctcggaga

SEQ ID NO: 284754 - DNA, 30 bp, Artificial Sequence
  Synthetic oligonucleotide
atgggtgcctattaacccatggaagggaga

SEQ ID NO: 284755 - DNA, 30 bp, Artificial Sequence
  Synthetic oligonucleotide
acaaaattgcgggcggtaatttacgggaga

SEQ ID NO: 284756 - DNA, 30 bp, Artificial Sequence
  Synthetic oligonucleotide
aggttccccgagggggagtctaaggggaga

SEQ ID NO: 284757 - DNA, 30 bp, Artificial Sequence
  Synthetic oligonucleotide
gtgcatggggcccgcgacgatcttgggaga

SEQ ID NO: 284758 - DNA, 30 bp, Artificial Sequence
  Synthetic oligonucleotide
ataaatcaataagtttcgcctgttgggaga

SEQ ID NO: 284759 - DNA, 30 bp, Artificial Sequence
  Synthetic oligonucleotide
gacagatacgggaccttggttgttgggaga

SEQ ID NO: 284760 - DNA, 30 bp, Artificial Sequence
  Synthetic oligonucleotide
actgtcattacatatcatggtaaatggaga

SEQ ID NO: 284761 - DNA, 30 bp, Artificial Sequence
  Synthetic oligonucleotide
actagatcccgggaggtcaaagaatggaga

SEQ ID NO: 284762 - DNA, 30 bp, Artificial Sequence
  Synthetic oligonucleotide
ttgccagtgtataggatagtaccctggaga

SEQ ID NO: 284763 - DNA, 30 bp, Artificial Sequence
  Synthetic oligonucleotide
gtttcaatgcagtagaggctttcctggaga

SEQ ID NO: 284764 - DNA, 30 bp, Artificial Sequence
  Synthetic oligonucleotide
tgtaaacgggcggctaccatctcgtggaga

SEQ ID NO: 284765 - DNA, 30 bp, Artificial Sequence
  Synthetic oligonucleotide
ttgaccagtgcgaagttagtaaggtggaga

SEQ ID NO: 284766 - DNA, 30 bp, Artificial Sequence
  Synthetic oligonucleotide
agatgtggcagcgcattttaatggtggaga

SEQ ID NO: 284767 - DNA, 30 bp, Artificial Sequence
  Synthetic oligonucleotide
gcagggccttattgtattgggatttggaga

SEQ ID NO: 284768 - DNA, 30 bp, Artificial Sequence
  Synthetic oligonucleotide
gtgacatacaagaattatgtagacatgaga

SEQ ID NO: 284769 - DNA, 30 bp, Artificial Sequence
  Synthetic oligonucleotide
cggttgtgtggaaatgaatgttgcatgaga

SEQ ID NO: 284770 - DNA, 30 bp, Artificial Sequence
  Synthetic oligonucleotide
tgaatactttcgagtgatcgattcatgaga

SEQ ID NO: 284771 - DNA, 30 bp, Artificial Sequence
  Synthetic oligonucleotide
gatttgtcgggtgcctcacgagggatgaga

SEQ ID NO: 284772 - DNA, 30 bp, Artificial Sequence
  Synthetic oligonucleotide
ggtgggagcaggtaatcttagctgatgaga

SEQ ID NO: 284773 - DNA, 30 bp, Artificial Sequence
  Synthetic oligonucleotide
agccttcggatggttagacatgatatgaga

SEQ ID NO: 284774 - DNA, 30 bp, Artificial Sequence
  Synthetic oligonucleotide
ctcttgattaactaaaaatgctctatgaga

SEQ ID NO: 284775 - DNA, 30 bp, Artificial Sequence
  Synthetic oligonucleotide
cgccatcgtggcctgttcgtttgtatgaga

SEQ ID NO: 284776 - DNA, 30 bp, Artificial Sequence
  Synthetic oligonucleotide
aaacactgatcaggctgcaccaaactgaga

SEQ ID NO: 284777 - DNA, 30 bp, Artificial Sequence
  Synthetic oligonucleotide
gtgacgcggacgttgttatccccactgaga

SEQ ID NO: 284778 - DNA, 30 bp, Artificial Sequence
  Synthetic oligonucleotide
ctgcgtgtagacagcgaccgtgtactgaga

SEQ ID NO: 284779 - DNA, 30 bp, Artificial Sequence
  Synthetic oligonucleotide
gaagtcttagatggcgaacatgacctgaga

SEQ ID NO: 284780 - DNA, 30 bp, Artificial Sequence
  Synthetic oligonucleotide
tatgttacagtgcatataagatacctgaga

SEQ ID NO: 284781 - DNA, 30 bp, Artificial Sequence
  Synthetic oligonucleotide
agcacatccggcggaggcccccagctgaga

SEQ ID NO: 284782 - DNA, 30 bp, Artificial Sequence
  Synthetic oligonucleotide
ttgaagaattgtctcccgccggggctgaga

SEQ ID NO: 284783 - DNA, 30 bp, Artificial Sequence
  Synthetic oligonucleotide
cccggtcgtaccctcggtgtacgagtgaga

SEQ ID NO: 284784 - DNA, 30 bp, Artificial Sequence
  Synthetic oligonucleotide
cgagggataaagcgcctggtgggcgtgaga

SEQ ID NO: 284785 - DNA, 30 bp, Artificial Sequence
  Synthetic oligonucleotide
tctggtgataacatgtttaagagggtgaga

SEQ ID NO: 284786 - DNA, 30 bp, Artificial Sequence
  Synthetic oligonucleotide
cggtgaaaacctctcatgaaagatgtgaga

SEQ ID NO: 284787 - DNA, 30 bp, Artificial Sequence
  Synthetic oligonucleotide
actataatactcctgcgacgagctgtgaga

SEQ ID NO: 284788 - DNA, 30 bp, Artificial Sequence
  Synthetic oligonucleotide
gaacgtagtgaatggatgctaggtgtgaga

SEQ ID NO: 284789 - DNA, 30 bp, Artificial Sequence
  Synthetic oligonucleotide
ctctccggtaatgttaatctgaaattgaga

SEQ ID NO: 284790 - DNA, 30 bp, Artificial Sequence
  Synthetic oligonucleotide
gggaaatatagaggcttccgctatttgaga

SEQ ID NO: 284791 - DNA, 30 bp, Artificial Sequence
  Synthetic oligonucleotide
ctacttcagtaaaggcgggtggctttgaga

SEQ ID NO: 284792 - DNA, 30 bp, Artificial Sequence
  Synthetic oligonucleotide
gagtatgactctaagggggtgtgaaataga

SEQ ID NO: 284793 - DNA, 30 bp, Artificial Sequence
  Synthetic oligonucleotide
cctcacacacccaggtatgaggccaataga

SEQ ID NO: 284794 - DNA, 30 bp, Artificial Sequence
  Synthetic oligonucleotide
atagccaactggccgtaacggtccaataga

SEQ ID NO: 284795 - DNA, 30 bp, Artificial Sequence
  Synthetic oligonucleotide
ttggactacgtgtagacagctggcaataga

SEQ ID NO: 284796 - DNA, 30 bp, Artificial Sequence
  Synthetic oligonucleotide
ggtaacggtccgtctcaatctatcaataga

SEQ ID NO: 284797 - DNA, 30 bp, Artificial Sequence
  Synthetic oligonucleotide
ggcaacgcctaagtctgttagtcgaataga

SEQ ID NO: 284798 - DNA, 30 bp, Artificial Sequence
  Synthetic oligonucleotide
gactggcctagttcacaaatgaggaataga

SEQ ID NO: 284799 - DNA, 30 bp, Artificial Sequence
  Synthetic oligonucleotide
tcgatggttgcgactgtgttataccataga

SEQ ID NO: 284800 - DNA, 30 bp, Artificial Sequence
  Synthetic oligonucleotide
ttcgacgggagaatcgcaacagggcataga

SEQ ID NO: 284801 - DNA, 30 bp, Artificial Sequence
  Synthetic oligonucleotide
gcgcgggcagataagggcacatttcataga

SEQ ID NO: 284802 - DNA, 30 bp, Artificial Sequence
  Synthetic oligonucleotide
actagttgttggtttacagctacagataga

SEQ ID NO: 284803 - DNA, 30 bp, Artificial Sequence
  Synthetic oligonucleotide
aacgtcggggccacgggtacaggagataga

SEQ ID NO: 284804 - DNA, 30 bp, Artificial Sequence
  Synthetic oligonucleotide
gcatctagcgcggattactgttgagataga

SEQ ID NO: 284805 - DNA, 30 bp, Artificial Sequence
  Synthetic oligonucleotide
cgcctgtaaacaggcatggtactagataga

SEQ ID NO: 284806 - DNA, 30 bp, Artificial Sequence
  Synthetic oligonucleotide
actctgttatgaatggaaagtaccgataga

SEQ ID NO: 284807 - DNA, 30 bp, Artificial Sequence
  Synthetic oligonucleotide
gtatgtttcagagtagtagtaaaggataga

SEQ ID NO: 284808 - DNA, 30 bp, Artificial Sequence
  Synthetic oligonucleotide
gtatatcttaaagggagccgactatataga

SEQ ID NO: 284809 - DNA, 30 bp, Artificial Sequence
  Synthetic oligonucleotide
gtggatgggtgcataatcctggtatataga

SEQ ID NO: 284810 - DNA, 30 bp, Artificial Sequence
  Synthetic oligonucleotide
gcgggatcgactgagtgacccccctataga

SEQ ID NO: 284811 - DNA, 30 bp, Artificial Sequence
  Synthetic oligonucleotide
taggtggcatacatacaagcaatctataga

SEQ ID NO: 284812 - DNA, 26 bp, Artificial Sequence
  Synthetic oligonucleotide
cgacaatcatcatcttagggtataga

SEQ ID NO: 284813 - DNA, 30 bp, Artificial Sequence
  Synthetic oligonucleotide
ggcgacccattatactaccgcatttataga

SEQ ID NO: 284814 - DNA, 30 bp, Artificial Sequence
  Synthetic oligonucleotide
gtagctgcgcagacgaagctcgaaactaga

SEQ ID NO: 284815 - DNA, 30 bp, Artificial Sequence
  Synthetic oligonucleotide
gcagttatcggcggtacataattaactaga

SEQ ID NO: 284816 - DNA, 30 bp, Artificial Sequence
  Synthetic oligonucleotide
ctgaataatggaaagggctgacgcactaga

SEQ ID NO: 284817 - DNA, 30 bp, Artificial Sequence
  Synthetic oligonucleotide
gcacgggtttacaaggtgcagcagactaga

SEQ ID NO: 284818 - DNA, 30 bp, Artificial Sequence
  Synthetic oligonucleotide
tgaacacgctcttccgcaacccgtactaga

SEQ ID NO: 284819 - DNA, 30 bp, Artificial Sequence
  Synthetic oligonucleotide
agcacagtctatcagttggtgcgtactaga

SEQ ID NO: 284820 - DNA, 30 bp, Artificial Sequence
  Synthetic oligonucleotide
gatcaaaatgtgggaacatggattactaga

SEQ ID NO: 284821 - DNA, 30 bp, Artificial Sequence
  Synthetic oligonucleotide
ggttggccaggcaccgctgcctcccctaga

SEQ ID NO: 284822 - DNA, 30 bp, Artificial Sequence
  Synthetic oligonucleotide
attcacagagatatcccgcgggatcctaga

SEQ ID NO: 284823 - DNA, 30 bp, Artificial Sequence
  Synthetic oligonucleotide
ttgagtcatggtgtgacaatacgtcctaga

SEQ ID NO: 284824 - DNA, 30 bp, Artificial Sequence
  Synthetic oligonucleotide
aattaacacgcatcaatttatgtcgctaga

SEQ ID NO: 284825 - DNA, 30 bp, Artificial Sequence
  Synthetic oligonucleotide
tcgagcccttgttatggcgattaggctaga

SEQ ID NO: 284826 - DNA, 30 bp, Artificial Sequence
  Synthetic oligonucleotide
caggcgctagggcggaggaaaccggctaga

SEQ ID NO: 284827 - DNA, 30 bp, Artificial Sequence
  Synthetic oligonucleotide
aaggacataaatgctgaccattgtgctaga

SEQ ID NO: 284828 - DNA, 30 bp, Artificial Sequence
  Synthetic oligonucleotide
taaaaatccagtaaccgaaactcctctaga

SEQ ID NO: 284829 - DNA, 30 bp, Artificial Sequence
  Synthetic oligonucleotide
acttaatgtgttagcgagattggctctaga

SEQ ID NO: 284830 - DNA, 30 bp, Artificial Sequence
  Synthetic oligonucleotide
caatcgattgcgcttcgactgttctctaga

SEQ ID NO: 284831 - DNA, 30 bp, Artificial Sequence
  Synthetic oligonucleotide
ggggggaatctagggttgccgtcgtctaga

SEQ ID NO: 284832 - DNA, 30 bp, Artificial Sequence
  Synthetic oligonucleotide
aagattctttgaggaacctaactgtctaga

SEQ ID NO: 284833 - DNA, 30 bp, Artificial Sequence
  Synthetic oligonucleotide
aatgtcaacctttcgcgttcaagttctaga

SEQ ID NO: 284834 - DNA, 30 bp, Artificial Sequence
  Synthetic oligonucleotide
acacgttggccagtcgaacatcgaagtaga

SEQ ID NO: 284835 - DNA, 30 bp, Artificial Sequence
  Synthetic oligonucleotide
tggagtaagcagctttggtgtaacagtaga

SEQ ID NO: 284836 - DNA, 30 bp, Artificial Sequence
  Synthetic oligonucleotide
tgacatctgttggcgacttctcggagtaga

SEQ ID NO: 284837 - DNA, 30 bp, Artificial Sequence
  Synthetic oligonucleotide
gacagcgtattgagcattcagggacgtaga

SEQ ID NO: 284838 - DNA, 30 bp, Artificial Sequence
  Synthetic oligonucleotide
aactatcatgaggaaacggggtggcgtaga

SEQ ID NO: 284839 - DNA, 30 bp, Artificial Sequence
  Synthetic oligonucleotide
ttcacacgtgtagcttcagtgacaggtaga

SEQ ID NO: 284840 - DNA, 30 bp, Artificial Sequence
  Synthetic oligonucleotide
ccagacccttgtcaaccatcgcacggtaga

SEQ ID NO: 284841 - DNA, 30 bp, Artificial Sequence
  Synthetic oligonucleotide
gggccttaatagcccgtcagttccggtaga

SEQ ID NO: 284842 - DNA, 30 bp, Artificial Sequence
  Synthetic oligonucleotide
aggatctgtggttgtttttggtgcggtaga

SEQ ID NO: 284843 - DNA, 30 bp, Artificial Sequence
  Synthetic oligonucleotide
cctgtctgccaacgttgtgattgcggtaga

SEQ ID NO: 284844 - DNA, 30 bp, Artificial Sequence
  Synthetic oligonucleotide
taaatgataaccttattatattgcggtaga

SEQ ID NO: 284845 - DNA, 30 bp, Artificial Sequence
  Synthetic oligonucleotide
accagggtacggggggttaaggagggtaga

SEQ ID NO: 284846 - DNA, 30 bp, Artificial Sequence
  Synthetic oligonucleotide
ctatcgggtgtcccgcgcgttaggggtaga

SEQ ID NO: 284847 - DNA, 30 bp, Artificial Sequence
  Synthetic oligonucleotide
taagctaaacaatgtttaactatgggtaga

SEQ ID NO: 284848 - DNA, 30 bp, Artificial Sequence
  Synthetic oligonucleotide
tctttaatcgccacaagtagtctgggtaga

SEQ ID NO: 284849 - DNA, 30 bp, Artificial Sequence
  Synthetic oligonucleotide
tgcaccgttcacactcgaggatatggtaga

SEQ ID NO: 284850 - DNA, 30 bp, Artificial Sequence
  Synthetic oligonucleotide
tgaccagaatatgaaccttgatttggtaga

SEQ ID NO: 284851 - DNA, 30 bp, Artificial Sequence
  Synthetic oligonucleotide
gataaggagcatctgggcaagtcatgtaga

SEQ ID NO: 284852 - DNA, 30 bp, Artificial Sequence
  Synthetic oligonucleotide
acatcagactgaagtgcccttccctgtaga

SEQ ID NO: 284853 - DNA, 30 bp, Artificial Sequence
  Synthetic oligonucleotide
tgctactcgaatccggatagtgattgtaga

SEQ ID NO: 284854 - DNA, 30 bp, Artificial Sequence
  Synthetic oligonucleotide
tcgaaccactaggcggacttcataattaga

SEQ ID NO: 284855 - DNA, 30 bp, Artificial Sequence
  Synthetic oligonucleotide
caccagtgcccacatcgaatagccattaga

SEQ ID NO: 284856 - DNA, 30 bp, Artificial Sequence
  Synthetic oligonucleotide
ttacgtgtctgtcctttcactatcattaga

SEQ ID NO: 284857 - DNA, 30 bp, Artificial Sequence
  Synthetic oligonucleotide
acatctagtgaatagacatgggtgattaga

SEQ ID NO: 284858 - DNA, 30 bp, Artificial Sequence
  Synthetic oligonucleotide
cgttaagctctgacaccgttgaatattaga

SEQ ID NO: 284859 - DNA, 30 bp, Artificial Sequence
  Synthetic oligonucleotide
cgagggggtattactcaggtctttattaga

SEQ ID NO: 284860 - DNA, 30 bp, Artificial Sequence
  Synthetic oligonucleotide
atcagcggtgttttgtcccaatgccttaga

SEQ ID NO: 284861 - DNA, 30 bp, Artificial Sequence
  Synthetic oligonucleotide
agcgtgttcccggaaacaagtacgcttaga

SEQ ID NO: 284862 - DNA, 30 bp, Artificial Sequence
  Synthetic oligonucleotide
gtcggactcaatacaagtcactggcttaga

SEQ ID NO: 284863 - DNA, 30 bp, Artificial Sequence
  Synthetic oligonucleotide
gtgcgcatttacttctatccccgtcttaga

SEQ ID NO: 284864 - DNA, 30 bp, Artificial Sequence
  Synthetic oligonucleotide
ggcataatgctttgttctaacgaagttaga

SEQ ID NO: 284865 - DNA, 30 bp, Artificial Sequence
  Synthetic oligonucleotide
gagtcggatacaccgtctgtataagttaga

SEQ ID NO: 284866 - DNA, 30 bp, Artificial Sequence
  Synthetic oligonucleotide
catctagtaagagagatggtaaacgttaga

SEQ ID NO: 284867 - DNA, 30 bp, Artificial Sequence
  Synthetic oligonucleotide
gacaactggtaataattggcagccgttaga

SEQ ID NO: 284868 - DNA, 30 bp, Artificial Sequence
  Synthetic oligonucleotide
atatcaagcatttgtgaaactcgcgttaga

SEQ ID NO: 284869 - DNA, 30 bp, Artificial Sequence
  Synthetic oligonucleotide
gtatcggccaagtagcttcttttggttaga

SEQ ID NO: 284870 - DNA, 30 bp, Artificial Sequence
  Synthetic oligonucleotide
agaaaaacaacgtgcagcataattgttaga

SEQ ID NO: 284871 - DNA, 30 bp, Artificial Sequence
  Synthetic oligonucleotide
caaaggatttgtcgccatgttgaatttaga

SEQ ID NO: 284872 - DNA, 30 bp, Artificial Sequence
  Synthetic oligonucleotide
aggggtctttccctcgccggtacctttaga

SEQ ID NO: 284873 - DNA, 30 bp, Artificial Sequence
  Synthetic oligonucleotide
catgtgaaatcccagccaccctcctttaga

SEQ ID NO: 284874 - DNA, 30 bp, Artificial Sequence
  Synthetic oligonucleotide
catcaggcgggcgagggttaaagttttaga

SEQ ID NO: 284875 - DNA, 30 bp, Artificial Sequence
  Synthetic oligonucleotide
tgatggagtacgcgcatttactgttttaga

SEQ ID NO: 284876 - DNA, 30 bp, Artificial Sequence
  Synthetic oligonucleotide
gggccgaccatattcaccgcggcgaaacga

SEQ ID NO: 284877 - DNA, 30 bp, Artificial Sequence
  Synthetic oligonucleotide
aaaatacgctgagataggaataaacaacga

SEQ ID NO: 284878 - DNA, 30 bp, Artificial Sequence
  Synthetic oligonucleotide
tctatcacaaagttatttgaataacaacga

SEQ ID NO: 284879 - DNA, 30 bp, Artificial Sequence
  Synthetic oligonucleotide
ctgcacaggcggcatattgccatccaacga

SEQ ID NO: 284880 - DNA, 30 bp, Artificial Sequence
  Synthetic oligonucleotide
gatcaatacctgagaagaaatcgtcaacga

SEQ ID NO: 284881 - DNA, 30 bp, Artificial Sequence
  Synthetic oligonucleotide
cataccattagcgcgctgtcaattcaacga

SEQ ID NO: 284882 - DNA, 30 bp, Artificial Sequence
  Synthetic oligonucleotide
cttcggctacgtgtaacgctaacagaacga

SEQ ID NO: 284883 - DNA, 30 bp, Artificial Sequence
  Synthetic oligonucleotide
tcggccggcaaagattaacgttacgaacga

SEQ ID NO: 284884 - DNA, 30 bp, Artificial Sequence
  Synthetic oligonucleotide
gaataccggtacgttgcaagcagggaacga

SEQ ID NO: 284885 - DNA, 30 bp, Artificial Sequence
  Synthetic oligonucleotide
tacggtatgaatatcacacttagggaacga

SEQ ID NO: 284886 - DNA, 30 bp, Artificial Sequence
  Synthetic oligonucleotide
tcgattttccaaaatggtgtgctggaacga

SEQ ID NO: 284887 - DNA, 30 bp, Artificial Sequence
  Synthetic oligonucleotide
atcggctggggatgaaaacctctggaacga

SEQ ID NO: 284888 - DNA, 30 bp, Artificial Sequence
  Synthetic oligonucleotide
gctaatgctaaacatccactttatgaacga

SEQ ID NO: 284889 - DNA, 30 bp, Artificial Sequence
  Synthetic oligonucleotide
tgccagaaggaagcgctaaaatcctaacga

SEQ ID NO: 284890 - DNA, 30 bp, Artificial Sequence
  Synthetic oligonucleotide
tagttgatactatggggcaggcgctaacga

SEQ ID NO: 284891 - DNA, 30 bp, Artificial Sequence
  Synthetic oligonucleotide
ggcaaggatttttttaccgtcgtctaacga

SEQ ID NO: 284892 - DNA, 30 bp, Artificial Sequence
  Synthetic oligonucleotide
taatgaaagtctaataaagtaacgtaacga

SEQ ID NO: 284893 - DNA, 30 bp, Artificial Sequence
  Synthetic oligonucleotide
ttgggggagcaacggaagcaatattaacga

SEQ ID NO: 284894 - DNA, 30 bp, Artificial Sequence
  Synthetic oligonucleotide
cccggcaattgcaactggttatgttaacga

SEQ ID NO: 284895 - DNA, 30 bp, Artificial Sequence
  Synthetic oligonucleotide
aatggggttacatataccaacaagacacga

SEQ ID NO: 284896 - DNA, 30 bp, Artificial Sequence
  Synthetic oligonucleotide
gacggacggcgtgattaaacaaatacacga

SEQ ID NO: 284897 - DNA, 30 bp, Artificial Sequence
  Synthetic oligonucleotide
aggtcctctcctaaaggtaatcgtacacga

SEQ ID NO: 284898 - DNA, 30 bp, Artificial Sequence
  Synthetic oligonucleotide
ctgctgaccaggttaagattgctaccacga

SEQ ID NO: 284899 - DNA, 30 bp, Artificial Sequence
  Synthetic oligonucleotide
ccagagtatacacgaaccgggtacccacga

SEQ ID NO: 284900 - DNA, 30 bp, Artificial Sequence
  Synthetic oligonucleotide
aagattgtgcagtatgacttccagccacga

SEQ ID NO: 284901 - DNA, 30 bp, Artificial Sequence
  Synthetic oligonucleotide
acagccccatattgtaagttcgctccacga

SEQ ID NO: 284902 - DNA, 30 bp, Artificial Sequence
  Synthetic oligonucleotide
catttattgaaagaggactaaggtccacga

SEQ ID NO: 284903 - DNA, 30 bp, Artificial Sequence
  Synthetic oligonucleotide
ctcactgttgatacaacggctacggcacga

SEQ ID NO: 284904 - DNA, 30 bp, Artificial Sequence
  Synthetic oligonucleotide
taggaaatccacggtagtgcaaatgcacga

SEQ ID NO: 284905 - DNA, 30 bp, Artificial Sequence
  Synthetic oligonucleotide
atctaacgacttgagcccattaatgcacga

SEQ ID NO: 284906 - DNA, 30 bp, Artificial Sequence
  Synthetic oligonucleotide
gaatctaggtgattcgaatgtaactcacga

SEQ ID NO: 284907 - DNA, 30 bp, Artificial Sequence
  Synthetic oligonucleotide
agccacgaatgcaacccccgcatgtcacga

SEQ ID NO: 284908 - DNA, 30 bp, Artificial Sequence
  Synthetic oligonucleotide
aaacgaggaccgcgtctcggtcattcacga

SEQ ID NO: 284909 - DNA, 30 bp, Artificial Sequence
  Synthetic oligonucleotide
ttcttgtcagtggaaattggtgcttcacga

SEQ ID NO: 284910 - DNA, 30 bp, Artificial Sequence
  Synthetic oligonucleotide
catcttcgctctacccaaagcatttcacga

SEQ ID NO: 284911 - DNA, 30 bp, Artificial Sequence
  Synthetic oligonucleotide
ccacttctcatatatccaatattttcacga

SEQ ID NO: 284912 - DNA, 30 bp, Artificial Sequence
  Synthetic oligonucleotide
tgcagggtccagagtacgtcacaaagacga

SEQ ID NO: 284913 - DNA, 30 bp, Artificial Sequence
  Synthetic oligonucleotide
ataatcaccctcatacgtgaagaaagacga

SEQ ID NO: 284914 - DNA, 30 bp, Artificial Sequence
  Synthetic oligonucleotide
gttatttgtcgttgagcaccagtaagacga

SEQ ID NO: 284915 - DNA, 30 bp, Artificial Sequence
  Synthetic oligonucleotide
ctatcaagattgcactttatgtggagacga

SEQ ID NO: 284916 - DNA, 30 bp, Artificial Sequence
  Synthetic oligonucleotide
ccatagaccaacatggtcggtagtagacga

SEQ ID NO: 284917 - DNA, 30 bp, Artificial Sequence
  Synthetic oligonucleotide
atgccgaaaacttttgtatgcattcgacga

SEQ ID NO: 284918 - DNA, 30 bp, Artificial Sequence
  Synthetic oligonucleotide
accaaattagcagtacacttaagcggacga

SEQ ID NO: 284919 - DNA, 30 bp, Artificial Sequence
  Synthetic oligonucleotide
cctgcagaataatttgcaggttcgggacga

SEQ ID NO: 284920 - DNA, 30 bp, Artificial Sequence
  Synthetic oligonucleotide
aggcggccgaagtgcacttcattgggacga

SEQ ID NO: 284921 - DNA, 30 bp, Artificial Sequence
  Synthetic oligonucleotide
tggttaatgcgttcctcttcgcatggacga

SEQ ID NO: 284922 - DNA, 30 bp, Artificial Sequence
  Synthetic oligonucleotide
cgacaactcaaaggttacattcatggacga

SEQ ID NO: 284923 - DNA, 30 bp, Artificial Sequence
  Synthetic oligonucleotide
aaaccagagcggtataagggtgctggacga

SEQ ID NO: 284924 - DNA, 30 bp, Artificial Sequence
  Synthetic oligonucleotide
ttcagagctctggacatattcacatgacga

SEQ ID NO: 284925 - DNA, 30 bp, Artificial Sequence
  Synthetic oligonucleotide
caagaaactaaacggttaaaggactgacga

SEQ ID NO: 284926 - DNA, 30 bp, Artificial Sequence
  Synthetic oligonucleotide
ctgtatcacagtcaacgacgtgactgacga

SEQ ID NO: 284927 - DNA, 30 bp, Artificial Sequence
  Synthetic oligonucleotide
cccttacggatatggcatgttagctgacga

SEQ ID NO: 284928 - DNA, 30 bp, Artificial Sequence
  Synthetic oligonucleotide
tgtatcttagggatcttcagagtgtgacga

SEQ ID NO: 284929 - DNA, 30 bp, Artificial Sequence
  Synthetic oligonucleotide
agaaccgcataaccaactccacgttgacga

SEQ ID NO: 284930 - DNA, 30 bp, Artificial Sequence
  Synthetic oligonucleotide
agtacttgccgttgagggaaagaaatacga

SEQ ID NO: 284931 - DNA, 30 bp, Artificial Sequence
  Synthetic oligonucleotide
tattgaggataggcaccgaccctaatacga

SEQ ID NO: 284932 - DNA, 30 bp, Artificial Sequence
  Synthetic oligonucleotide
aattcaaggtcgtaaacgttacagatacga

SEQ ID NO: 284933 - DNA, 30 bp, Artificial Sequence
  Synthetic oligonucleotide
atgtagggtgccacctacatgtcgatacga

SEQ ID NO: 284934 - DNA, 29 bp, Artificial Sequence
  Synthetic oligonucleotide
cttacaaactctacacgcattatatacga

SEQ ID NO: 284935 - DNA, 30 bp, Artificial Sequence
  Synthetic oligonucleotide
agcagtgcgcccgagtgaagtattatacga

SEQ ID NO: 284936 - DNA, 30 bp, Artificial Sequence
  Synthetic oligonucleotide
ggttcactataactatatcgttaactacga

SEQ ID NO: 284937 - DNA, 30 bp, Artificial Sequence
  Synthetic oligonucleotide
tggcttccagtcgaattgactacactacga

SEQ ID NO: 284938 - DNA, 30 bp, Artificial Sequence
  Synthetic oligonucleotide
actaatatcggtatatagtaatcactacga

SEQ ID NO: 284939 - DNA, 30 bp, Artificial Sequence
  Synthetic oligonucleotide
gcgccggagcacgtacgcacctgactacga

SEQ ID NO: 284940 - DNA, 30 bp, Artificial Sequence
  Synthetic oligonucleotide
tttgggcacagactgaagcgctgcctacga

SEQ ID NO: 284941 - DNA, 30 bp, Artificial Sequence
  Synthetic oligonucleotide
gctgtctggccacagcgggccaatctacga

SEQ ID NO: 284942 - DNA, 29 bp, Artificial Sequence
  Synthetic oligonucleotide
cgaaggcagtctattgtgtgggtctacga

SEQ ID NO: 284943 - DNA, 30 bp, Artificial Sequence
  Synthetic oligonucleotide
atcgctgatttgccgggggtaaacgtacga

SEQ ID NO: 284944 - DNA, 30 bp, Artificial Sequence
  Synthetic oligonucleotide
ccgcgtctccagatcttggacgacgtacga

SEQ ID NO: 284945 - DNA, 30 bp, Artificial Sequence
  Synthetic oligonucleotide
acgtacgaattcgcatcaggccgcgtacga

SEQ ID NO: 284946 - DNA, 30 bp, Artificial Sequence
  Synthetic oligonucleotide
gggtataatcccgctatgttatgcgtacga

SEQ ID NO: 284947 - DNA, 30 bp, Artificial Sequence
  Synthetic oligonucleotide
caatgcatcgcgtataacgacgcggtacga

SEQ ID NO: 284948 - DNA, 30 bp, Artificial Sequence
  Synthetic oligonucleotide
gatagttggagccgtaactattcggtacga

SEQ ID NO: 284949 - DNA, 30 bp, Artificial Sequence
  Synthetic oligonucleotide
tgataagattcctatatatagagggtacga

SEQ ID NO: 284950 - DNA, 30 bp, Artificial Sequence
  Synthetic oligonucleotide
gcaccctcagaagtggtatagtgggtacga

SEQ ID NO: 284951 - DNA, 30 bp, Artificial Sequence
  Synthetic oligonucleotide
cagattacagacgcgcaactaggtgtacga

SEQ ID NO: 284952 - DNA, 30 bp, Artificial Sequence
  Synthetic oligonucleotide
ctcgttaggctgcgagtcaccgttgtacga

SEQ ID NO: 284953 - DNA, 30 bp, Artificial Sequence
  Synthetic oligonucleotide
gtgaccagttggggacagttcgcattacga

SEQ ID NO: 284954 - DNA, 30 bp, Artificial Sequence
  Synthetic oligonucleotide
cgcgaggtctcgtaatgccatgtattacga

SEQ ID NO: 284955 - DNA, 30 bp, Artificial Sequence
  Synthetic oligonucleotide
gttagtggggaatcgctacgcgccttacga

SEQ ID NO: 284956 - DNA, 30 bp, Artificial Sequence
  Synthetic oligonucleotide
ctaacgaggattctgcctctcgccaaccga

SEQ ID NO: 284957 - DNA, 30 bp, Artificial Sequence
  Synthetic oligonucleotide
tcggcgccactatgcatagctagtaaccga

SEQ ID NO: 284958 - DNA, 27 bp, Artificial Sequence
  Synthetic oligonucleotide
gttgcagtgtttcatacccgtaaccga

SEQ ID NO: 284959 - DNA, 30 bp, Artificial Sequence
  Synthetic oligonucleotide
atttgtcaactacacgtaataacacaccga

SEQ ID NO: 284960 - DNA, 30 bp, Artificial Sequence
  Synthetic oligonucleotide
tggaagggaactttactccgcccacaccga

SEQ ID NO: 284961 - DNA, 30 bp, Artificial Sequence
  Synthetic oligonucleotide
tcgattcctgtcgcaagtaagtcacaccga

SEQ ID NO: 284962 - DNA, 30 bp, Artificial Sequence
  Synthetic oligonucleotide
tgcctggagaacgacggcgattagcaccga

SEQ ID NO: 284963 - DNA, 30 bp, Artificial Sequence
  Synthetic oligonucleotide
aatcccatagtactttcccattgtcaccga

SEQ ID NO: 284964 - DNA, 30 bp, Artificial Sequence
  Synthetic oligonucleotide
gttgtacgatgcgaggtaattttagaccga

SEQ ID NO: 284965 - DNA, 30 bp, Artificial Sequence
  Synthetic oligonucleotide
aaccgttgtgttcactgaagagccgaccga

SEQ ID NO: 284966 - DNA, 30 bp, Artificial Sequence
  Synthetic oligonucleotide
tataaatgtaggcaacagttagccgaccga

SEQ ID NO: 284967 - DNA, 30 bp, Artificial Sequence
  Synthetic oligonucleotide
cgccctcacccgtgggcctggtccgaccga

SEQ ID NO: 284968 - DNA, 30 bp, Artificial Sequence
  Synthetic oligonucleotide
tacaaacggagctttgggggaagcgaccga

SEQ ID NO: 284969 - DNA, 30 bp, Artificial Sequence
  Synthetic oligonucleotide
aataggtaggaagggtatccccaggaccga

SEQ ID NO: 284970 - DNA, 31 bp, Artificial Sequence
  Synthetic oligonucleotide
cgtgatagggaccgcccctccgttggaccga

SEQ ID NO: 284971 - DNA, 30 bp, Artificial Sequence
  Synthetic oligonucleotide
ggataacaacttcagctttgttatgaccga

SEQ ID NO: 284972 - DNA, 30 bp, Artificial Sequence
  Synthetic oligonucleotide
ttgatcagtagtcgggagctaaaataccga

SEQ ID NO: 284973 - DNA, 30 bp, Artificial Sequence
  Synthetic oligonucleotide
taaaagaagaacgtgtggtagacataccga

SEQ ID NO: 284974 - DNA, 30 bp, Artificial Sequence
  Synthetic oligonucleotide
agctggatgtttgctctgcaggtataccga

SEQ ID NO: 284975 - DNA, 30 bp, Artificial Sequence
  Synthetic oligonucleotide
cgtatgttgaatagtgtatcaaactaccga

SEQ ID NO: 284976 - DNA, 30 bp, Artificial Sequence
  Synthetic oligonucleotide
ttatagaatatacgctgacgactgtaccga

SEQ ID NO: 284977 - DNA, 30 bp, Artificial Sequence
  Synthetic oligonucleotide
tgttaaccatcgctacagttaaattaccga

SEQ ID NO: 284978 - DNA, 30 bp, Artificial Sequence
  Synthetic oligonucleotide
ttaacagtttcagtggataggcattaccga

SEQ ID NO: 284979 - DNA, 30 bp, Artificial Sequence
  Synthetic oligonucleotide
gagccagatcggcagaggtatcaaacccga

SEQ ID NO: 284980 - DNA, 30 bp, Artificial Sequence
  Synthetic oligonucleotide
gaaccatcctgctgagaaagaccgacccga

SEQ ID NO: 284981 - DNA, 30 bp, Artificial Sequence
  Synthetic oligonucleotide
actttcgtagtggatagattcccgacccga

SEQ ID NO: 284982 - DNA, 30 bp, Artificial Sequence
  Synthetic oligonucleotide
gttccagaccgatcagatacggcgacccga

SEQ ID NO: 284983 - DNA, 30 bp, Artificial Sequence
  Synthetic oligonucleotide
agcagcaagcagttgatagcatcgacccga

SEQ ID NO: 284984 - DNA, 30 bp, Artificial Sequence
  Synthetic oligonucleotide
gtaacgcgaagtagcccacgttcgacccga

SEQ ID NO: 284985 - DNA, 30 bp, Artificial Sequence
  Synthetic oligonucleotide
tagtgaaatgtaacatggccaataccccga

SEQ ID NO: 284986 - DNA, 30 bp, Artificial Sequence
  Synthetic oligonucleotide
taagtgcggccggtcccaatagagccccga

SEQ ID NO: 284987 - DNA, 30 bp, Artificial Sequence
  Synthetic oligonucleotide
gaggatgctcagaccatcaaggagccccga

SEQ ID NO: 284988 - DNA, 30 bp, Artificial Sequence
  Synthetic oligonucleotide
gggctgtcgagtctaggtatggtgccccga

SEQ ID NO: 284989 - DNA, 30 bp, Artificial Sequence
  Synthetic oligonucleotide
attcacaggttacctcaaaagaacgcccga

SEQ ID NO: 284990 - DNA, 30 bp, Artificial Sequence
  Synthetic oligonucleotide
ttattccgcttagcaatgccttacgcccga

SEQ ID NO: 284991 - DNA, 30 bp, Artificial Sequence
  Synthetic oligonucleotide
gacgctgagggcaagtaccgataggcccga

SEQ ID NO: 284992 - DNA, 30 bp, Artificial Sequence
  Synthetic oligonucleotide
cgtgggggggcaggaattaaaggggcccga

SEQ ID NO: 284993 - DNA, 30 bp, Artificial Sequence
  Synthetic oligonucleotide
tcttgacactcgggcccaacgcctgcccga

SEQ ID NO: 284994 - DNA, 30 bp, Artificial Sequence
  Synthetic oligonucleotide
ggactccgtcttttccaaagagagtcccga

SEQ ID NO: 284995 - DNA, 30 bp, Artificial Sequence
  Synthetic oligonucleotide
cattcgccgaaatttgtgcacaagagccga

SEQ ID NO: 284996 - DNA, 30 bp, Artificial Sequence
  Synthetic oligonucleotide
attggcgacagaacatcaaatctgagccga

SEQ ID NO: 284997 - DNA, 30 bp, Artificial Sequence
  Synthetic oligonucleotide
aacataaagtaactcgggtatccacgccga

SEQ ID NO: 284998 - DNA, 30 bp, Artificial Sequence
  Synthetic oligonucleotide
ttcaacaatcaagaagtaatgcatcgccga

SEQ ID NO: 284999 - DNA, 30 bp, Artificial Sequence
  Synthetic oligonucleotide
accgtactcgttcgttgcgtatatcgccga

SEQ ID NO: 285000 - DNA, 29 bp, Artificial Sequence
  Synthetic oligonucleotide
ctatacatcggaataatcatgctcgccga

SEQ ID NO: 285001 - DNA, 30 bp, Artificial Sequence
  Synthetic oligonucleotide
aaaaaggttttcgtgggttctcctggccga

SEQ ID NO: 285002 - DNA, 30 bp, Artificial Sequence
  Synthetic oligonucleotide
tacgatgcatcgaagactcttgttggccga

SEQ ID NO: 285003 - DNA, 30 bp, Artificial Sequence
  Synthetic oligonucleotide
aattactagtgactgagccgcctatgccga

SEQ ID NO: 285004 - DNA, 30 bp, Artificial Sequence
  Synthetic oligonucleotide
aaacaccgcgtgaaacaatataagtgccga

SEQ ID NO: 285005 - DNA, 30 bp, Artificial Sequence
  Synthetic oligonucleotide
cctgacgcagagatggggttagcttgccga

SEQ ID NO: 285006 - DNA, 30 bp, Artificial Sequence
  Synthetic oligonucleotide
caggcactcttaacagtgcgagggatccga

SEQ ID NO: 285007 - DNA, 30 bp, Artificial Sequence
  Synthetic oligonucleotide
acacctttcattctttcagcggctatccga

SEQ ID NO: 285008 - DNA, 30 bp, Artificial Sequence
  Synthetic oligonucleotide
agctttactggtggtcgtgcgattatccga

SEQ ID NO: 285009 - DNA, 30 bp, Artificial Sequence
  Synthetic oligonucleotide
ctgcttttttcgttctaacctaacctccga

SEQ ID NO: 285010 - DNA, 30 bp, Artificial Sequence
  Synthetic oligonucleotide
tccctagaaagtaaatagctctgcctccga

SEQ ID NO: 285011 - DNA, 30 bp, Artificial Sequence
  Synthetic oligonucleotide
acgtcagtataagtgggaaaatttctccga

SEQ ID NO: 285012 - DNA, 30 bp, Artificial Sequence
  Synthetic oligonucleotide
cggggttcctatgcgctgccagaagtccga

SEQ ID NO: 285013 - DNA, 30 bp, Artificial Sequence
  Synthetic oligonucleotide
aatgacatccatctggggggtgcagtccga

SEQ ID NO: 285014 - DNA, 30 bp, Artificial Sequence
  Synthetic oligonucleotide
cagcgatcagggggtttgcgcttagtccga

SEQ ID NO: 285015 - DNA, 30 bp, Artificial Sequence
  Synthetic oligonucleotide
caaggataggtccctggtttggaggtccga

SEQ ID NO: 285016 - DNA, 30 bp, Artificial Sequence
  Synthetic oligonucleotide
cattgccagtccgggagtcgtatggtccga

SEQ ID NO: 285017 - DNA, 30 bp, Artificial Sequence
  Synthetic oligonucleotide
gagagttaagctacgtctttcaatgtccga

SEQ ID NO: 285018 - DNA, 30 bp, Artificial Sequence
  Synthetic oligonucleotide
gtgattgtcttgattcaatttctattccga

SEQ ID NO: 285019 - DNA, 30 bp, Artificial Sequence
  Synthetic oligonucleotide
gactcagcccgatataaggaatagttccga

SEQ ID NO: 285020 - DNA, 30 bp, Artificial Sequence
  Synthetic oligonucleotide
aagtaaatccagggatagtcttagttccga

SEQ ID NO: 285021 - DNA, 30 bp, Artificial Sequence
  Synthetic oligonucleotide
acctcctgcaggcggaatatcccgttccga

SEQ ID NO: 285022 - DNA, 30 bp, Artificial Sequence
  Synthetic oligonucleotide
acccgtcagccaaccctggttgcgttccga

SEQ ID NO: 285023 - DNA, 30 bp, Artificial Sequence
  Synthetic oligonucleotide
tagcatgacgggtggttactattgttccga

SEQ ID NO: 285024 - DNA, 30 bp, Artificial Sequence
  Synthetic oligonucleotide
cgtggatctcgttgaaagaagaaaaagcga

SEQ ID NO: 285025 - DNA, 30 bp, Artificial Sequence
  Synthetic oligonucleotide
gtcttgctgtcctcgcgcagtgaaaagcga

SEQ ID NO: 285026 - DNA, 30 bp, Artificial Sequence
  Synthetic oligonucleotide
cttgggctcgttaaggcacattgcaagcga

SEQ ID NO: 285027 - DNA, 30 bp, Artificial Sequence
  Synthetic oligonucleotide
accgctgattagactaagatcaggaagcga

SEQ ID NO: 285028 - DNA, 30 bp, Artificial Sequence
  Synthetic oligonucleotide
gtccttcgtcgaatgttagctcggaagcga

SEQ ID NO: 285029 - DNA, 30 bp, Artificial Sequence
  Synthetic oligonucleotide
tcttggggaattcaagcaatgctgaagcga

SEQ ID NO: 285030 - DNA, 30 bp, Artificial Sequence
  Synthetic oligonucleotide
acgccccatcactccttacgggataagcga

SEQ ID NO: 285031 - DNA, 30 bp, Artificial Sequence
  Synthetic oligonucleotide
tgttaaccctttctacacctaccacagcga

SEQ ID NO: 285032 - DNA, 30 bp, Artificial Sequence
  Synthetic oligonucleotide
caagagggcatgttctttgtgtgacagcga

SEQ ID NO: 285033 - DNA, 30 bp, Artificial Sequence
  Synthetic oligonucleotide
atacagtgtcatagtgtattattacagcga

SEQ ID NO: 285034 - DNA, 30 bp, Artificial Sequence
  Synthetic oligonucleotide
tcctgtggggtggccgctcagatgcagcga

SEQ ID NO: 285035 - DNA, 30 bp, Artificial Sequence
  Synthetic oligonucleotide
ttgagcgatttctggtacagggtgcagcga

SEQ ID NO: 285036 - DNA, 30 bp, Artificial Sequence
  Synthetic oligonucleotide
attctagcggggggactcggcgtagagcga

SEQ ID NO: 285037 - DNA, 30 bp, Artificial Sequence
  Synthetic oligonucleotide
catatcaccaatgcaggacgaaacgagcga

SEQ ID NO: 285038 - DNA, 30 bp, Artificial Sequence
  Synthetic oligonucleotide
ggcagcacagtcagcgctgataaggagcga

SEQ ID NO: 285039 - DNA, 30 bp, Artificial Sequence
  Synthetic oligonucleotide
taccaggggtttaagccactcggggagcga

SEQ ID NO: 285040 - DNA, 30 bp, Artificial Sequence
  Synthetic oligonucleotide
atgcacgtaattgtatctacacatgagcga

SEQ ID NO: 285041 - DNA, 30 bp, Artificial Sequence
  Synthetic oligonucleotide
ggcgtgcgtgtctacggcacgtttgagcga

SEQ ID NO: 285042 - DNA, 30 bp, Artificial Sequence
  Synthetic oligonucleotide
ggaaccacgtttgtcattccgtcctagcga

SEQ ID NO: 285043 - DNA, 30 bp, Artificial Sequence
  Synthetic oligonucleotide
aacataactagcgcggatgcgggctagcga

SEQ ID NO: 285044 - DNA, 30 bp, Artificial Sequence
  Synthetic oligonucleotide
gtgctaggtcgacgccttctcacgtagcga

SEQ ID NO: 285045 - DNA, 30 bp, Artificial Sequence
  Synthetic oligonucleotide
cgttaatggcttagtctttctgtgtagcga

SEQ ID NO: 285046 - DNA, 30 bp, Artificial Sequence
  Synthetic oligonucleotide
agtagcactgcttatgatcgaccttagcga

SEQ ID NO: 285047 - DNA, 30 bp, Artificial Sequence
  Synthetic oligonucleotide
gcacactcagtctgatatagcttttagcga

SEQ ID NO: 285048 - DNA, 30 bp, Artificial Sequence
  Synthetic oligonucleotide
ctaaactcccggcacctgtggttttagcga

SEQ ID NO: 285049 - DNA, 30 bp, Artificial Sequence
  Synthetic oligonucleotide
aacgttaaacgggctgtgctctgaacgcga

SEQ ID NO: 285050 - DNA, 30 bp, Artificial Sequence
  Synthetic oligonucleotide
tccaatcatccggcgaaaatgttaacgcga

SEQ ID NO: 285051 - DNA, 30 bp, Artificial Sequence
  Synthetic oligonucleotide
aaagtatcattataggcaattctcacgcga

SEQ ID NO: 285052 - DNA, 30 bp, Artificial Sequence
  Synthetic oligonucleotide
ttaagctcccatgacagacttttcacgcga

SEQ ID NO: 285053 - DNA, 30 bp, Artificial Sequence
  Synthetic oligonucleotide
tagaggcggtcgtgaacgcgagcgacgcga

SEQ ID NO: 285054 - DNA, 30 bp, Artificial Sequence
  Synthetic oligonucleotide
ctctccatatggtccgagcatgggacgcga

SEQ ID NO: 285055 - DNA, 30 bp, Artificial Sequence
  Synthetic oligonucleotide
gcaatctaaaagcataattatgggacgcga

SEQ ID NO: 285056 - DNA, 30 bp, Artificial Sequence
  Synthetic oligonucleotide
aacgtacattataattaggatggtacgcga

SEQ ID NO: 285057 - DNA, 30 bp, Artificial Sequence
  Synthetic oligonucleotide
cggcttggcaatccaatgtgttttacgcga

SEQ ID NO: 285058 - DNA, 30 bp, Artificial Sequence
  Synthetic oligonucleotide
ttcgggtaggccgcatctctcctaccgcga

SEQ ID NO: 285059 - DNA, 30 bp, Artificial Sequence
  Synthetic oligonucleotide
tagtgaatgatcgtgtaaagggccccgcga

SEQ ID NO: 285060 - DNA, 30 bp, Artificial Sequence
  Synthetic oligonucleotide
aaaaagcgcgaacgtccctgatgcccgcga

SEQ ID NO: 285061 - DNA, 30 bp, Artificial Sequence
  Synthetic oligonucleotide
gtgtccagcggaacaactgtgtagccgcga

SEQ ID NO: 285062 - DNA, 30 bp, Artificial Sequence
  Synthetic oligonucleotide
gacgcgatcaatagtggtcccttgccgcga

SEQ ID NO: 285063 - DNA, 30 bp, Artificial Sequence
  Synthetic oligonucleotide
ctacacgctgtccacgtgaactatccgcga

SEQ ID NO: 285064 - DNA, 30 bp, Artificial Sequence
  Synthetic oligonucleotide
cagcgattaaccacggagatagttccgcga

SEQ ID NO: 285065 - DNA, 30 bp, Artificial Sequence
  Synthetic oligonucleotide
actaggggtaacgtatatcttaccgcgcga

SEQ ID NO: 285066 - DNA, 30 bp, Artificial Sequence
  Synthetic oligonucleotide
agtagcatatcgtgcattacggccgcgcga

SEQ ID NO: 285067 - DNA, 30 bp, Artificial Sequence
  Synthetic oligonucleotide
atacttttcagggcaaaaaagagcgcgcga

SEQ ID NO: 285068 - DNA, 29 bp, Artificial Sequence
  Synthetic oligonucleotide
ggggcaacccctgaaatatactcgcgcga

SEQ ID NO: 285069 - DNA, 30 bp, Artificial Sequence
  Synthetic oligonucleotide
tagtttcgaacgtagtaggagtgggcgcga

SEQ ID NO: 285070 - DNA, 30 bp, Artificial Sequence
  Synthetic oligonucleotide
ctgggcgctatcagtttgaagttatcgcga

SEQ ID NO: 285071 - DNA, 30 bp, Artificial Sequence
  Synthetic oligonucleotide
taccccgagagtttttgaaagaagtcgcga

SEQ ID NO: 285072 - DNA, 30 bp, Artificial Sequence
  Synthetic oligonucleotide
caacactgacgccaagctacagggtcgcga

SEQ ID NO: 285073 - DNA, 30 bp, Artificial Sequence
  Synthetic oligonucleotide
cagatttactgtatgggaacccaaaggcga

SEQ ID NO: 285074 - DNA, 31 bp, Artificial Sequence
  Synthetic oligonucleotide
ggaggctcgcgagccggaccgcaacaggcga

SEQ ID NO: 285075 - DNA, 30 bp, Artificial Sequence
  Synthetic oligonucleotide
catgggtctgtaccgcgcttttccaggcga

SEQ ID NO: 285076 - DNA, 30 bp, Artificial Sequence
  Synthetic oligonucleotide
agattcaaacgtaccggtcagcgcaggcga

SEQ ID NO: 285077 - DNA, 30 bp, Artificial Sequence
  Synthetic oligonucleotide
tgtacaatccagtaatagtatcgcaggcga

SEQ ID NO: 285078 - DNA, 30 bp, Artificial Sequence
  Synthetic oligonucleotide
ctttcattgaagagacggggacagaggcga

SEQ ID NO: 285079 - DNA, 30 bp, Artificial Sequence
  Synthetic oligonucleotide
cctgtctgggatcactccgcagtgaggcga

SEQ ID NO: 285080 - DNA, 30 bp, Artificial Sequence
  Synthetic oligonucleotide
cagagaagtctagttcctttaactaggcga

SEQ ID NO: 285081 - DNA, 30 bp, Artificial Sequence
  Synthetic oligonucleotide
ggattcccagcggagccacctagtaggcga

SEQ ID NO: 285082 - DNA, 30 bp, Artificial Sequence
  Synthetic oligonucleotide
tacagacaggggacacagcacagacggcga

SEQ ID NO: 285083 - DNA, 30 bp, Artificial Sequence
  Synthetic oligonucleotide
gggacccttcaaaagggcataggacggcga

SEQ ID NO: 285084 - DNA, 30 bp, Artificial Sequence
  Synthetic oligonucleotide
cagtatcacgtgaacccgtcaatgcggcga

SEQ ID NO: 285085 - DNA, 30 bp, Artificial Sequence
  Synthetic oligonucleotide
ggaaggttgcgctgctacggttttcggcga

SEQ ID NO: 285086 - DNA, 30 bp, Artificial Sequence
  Synthetic oligonucleotide
tcggttggaacacaacgaggacacgggcga

SEQ ID NO: 285087 - DNA, 30 bp, Artificial Sequence
  Synthetic oligonucleotide
atcaaaaacgatgtgggaccgaaggggcga

SEQ ID NO: 285088 - DNA, 30 bp, Artificial Sequence
  Synthetic oligonucleotide
gaattgattacgctgaaaaacctggggcga

SEQ ID NO: 285089 - DNA, 30 bp, Artificial Sequence
  Synthetic oligonucleotide
cactacagcctacgcacaggtgatgggcga

SEQ ID NO: 285090 - DNA, 30 bp, Artificial Sequence
  Synthetic oligonucleotide
gccataccgtctcaatggagtcctgggcga

SEQ ID NO: 285091 - DNA, 30 bp, Artificial Sequence
  Synthetic oligonucleotide
gcagtaacaccctttttgcaacttgggcga

SEQ ID NO: 285092 - DNA, 30 bp, Artificial Sequence
  Synthetic oligonucleotide
tagagaaacgcgcgaacgaccacatggcga

SEQ ID NO: 285093 - DNA, 30 bp, Artificial Sequence
  Synthetic oligonucleotide
ttattggtctaatcccagggccactggcga

SEQ ID NO: 285094 - DNA, 30 bp, Artificial Sequence
  Synthetic oligonucleotide
cgatgacggcgtctgtaaagatgctggcga

SEQ ID NO: 285095 - DNA, 30 bp, Artificial Sequence
  Synthetic oligonucleotide
tagaatcgtttgctgttaggttagtggcga

SEQ ID NO: 285096 - DNA, 30 bp, Artificial Sequence
  Synthetic oligonucleotide
cctaacaaaatggcccggggccggtggcga

SEQ ID NO: 285097 - DNA, 30 bp, Artificial Sequence
  Synthetic oligonucleotide
cggagttagtcatgtcacataatgtggcga

SEQ ID NO: 285098 - DNA, 30 bp, Artificial Sequence
  Synthetic oligonucleotide
gtgcacggcttgttttcttgtttgtggcga

SEQ ID NO: 285099 - DNA, 30 bp, Artificial Sequence
  Synthetic oligonucleotide
acccctatggcctgttgcaaggattggcga

SEQ ID NO: 285100 - DNA, 30 bp, Artificial Sequence
  Synthetic oligonucleotide
tgggacaggctgcagtcaaaggtttggcga

SEQ ID NO: 285101 - DNA, 30 bp, Artificial Sequence
  Synthetic oligonucleotide
cgggtagtcggagggtgtgcttgcatgcga

SEQ ID NO: 285102 - DNA, 30 bp, Artificial Sequence
  Synthetic oligonucleotide
caaaagtgcttaaaatagtaactcatgcga

SEQ ID NO: 285103 - DNA, 30 bp, Artificial Sequence
  Synthetic oligonucleotide
atgatgttgagacgtcaatgtgagatgcga

SEQ ID NO: 285104 - DNA, 30 bp, Artificial Sequence
  Synthetic oligonucleotide
ggatgttcagttattcggttaaggatgcga

SEQ ID NO: 285105 - DNA, 30 bp, Artificial Sequence
  Synthetic oligonucleotide
aaaagggttgctgttaaagggctgatgcga

SEQ ID NO: 285106 - DNA, 30 bp, Artificial Sequence
  Synthetic oligonucleotide
acccagggggaccagtgccatagtatgcga

SEQ ID NO: 285107 - DNA, 30 bp, Artificial Sequence
  Synthetic oligonucleotide
gggcgtccgactcctgggatgcgactgcga

SEQ ID NO: 285108 - DNA, 30 bp, Artificial Sequence
  Synthetic oligonucleotide
cttggtgatgtgagtctatgttgactgcga

SEQ ID NO: 285109 - DNA, 30 bp, Artificial Sequence
  Synthetic oligonucleotide
agatagacaggttacctggtattactgcga

SEQ ID NO: 285110 - DNA, 30 bp, Artificial Sequence
  Synthetic oligonucleotide
gaccggtccagcctatccgcagacctgcga

SEQ ID NO: 285111 - DNA, 30 bp, Artificial Sequence
  Synthetic oligonucleotide
gaaaaacaatcacacgtgggtcagctgcga

SEQ ID NO: 285112 - DNA, 30 bp, Artificial Sequence
  Synthetic oligonucleotide
cgtttattgatatccgtagatgcgctgcga

SEQ ID NO: 285113 - DNA, 30 bp, Artificial Sequence
  Synthetic oligonucleotide
aactccatgtcagcccacctttttctgcga

SEQ ID NO: 285114 - DNA, 30 bp, Artificial Sequence
  Synthetic oligonucleotide
atcacatttagcatattcccttcagtgcga

SEQ ID NO: 285115 - DNA, 30 bp, Artificial Sequence
  Synthetic oligonucleotide
tccgagggtaagcgattctggaccgtgcga

SEQ ID NO: 285116 - DNA, 30 bp, Artificial Sequence
  Synthetic oligonucleotide
gtggccctcggcgcggggatctccgtgcga

SEQ ID NO: 285117 - DNA, 30 bp, Artificial Sequence
  Synthetic oligonucleotide
tttggagaggcacggccgctttgcgtgcga

SEQ ID NO: 285118 - DNA, 30 bp, Artificial Sequence
  Synthetic oligonucleotide
gcccagcaaggctgagttgctaaggtgcga

SEQ ID NO: 285119 - DNA, 30 bp, Artificial Sequence
  Synthetic oligonucleotide
tattcatctggactatactatacggtgcga

SEQ ID NO: 285120 - DNA, 30 bp, Artificial Sequence
  Synthetic oligonucleotide
tgaagattggtcatattttctttcttgcga

SEQ ID NO: 285121 - DNA, 30 bp, Artificial Sequence
  Synthetic oligonucleotide
ggatcattgaaggcacataataatttgcga

SEQ ID NO: 285122 - DNA, 30 bp, Artificial Sequence
  Synthetic oligonucleotide
agttaccatttgtcacaatattctttgcga

SEQ ID NO: 285123 - DNA, 30 bp, Artificial Sequence
  Synthetic oligonucleotide
caacaggagcaacgtcgctcgagtttgcga

SEQ ID NO: 285124 - DNA, 30 bp, Artificial Sequence
  Synthetic oligonucleotide
tcaatcggcagtggcgctgggggtttgcga

SEQ ID NO: 285125 - DNA, 30 bp, Artificial Sequence
  Synthetic oligonucleotide
agatcaatagtacttctatgttgtttgcga

SEQ ID NO: 285126 - DNA, 30 bp, Artificial Sequence
  Synthetic oligonucleotide
cgaaacgttcctgcggcttataaaaatcga

SEQ ID NO: 285127 - DNA, 30 bp, Artificial Sequence
  Synthetic oligonucleotide
gtgtctagctgccacgggggttaaaatcga

SEQ ID NO: 285128 - DNA, 30 bp, Artificial Sequence
  Synthetic oligonucleotide
atgtgtggattctgcgagaacctaaatcga

SEQ ID NO: 285129 - DNA, 31 bp, Artificial Sequence
  Synthetic oligonucleotide
cagggatcgagttgctgggcttgtcaatcga

SEQ ID NO: 285130 - DNA, 30 bp, Artificial Sequence
  Synthetic oligonucleotide
ctgcaatcacgcacatcctaaccgaatcga

SEQ ID NO: 285131 - DNA, 30 bp, Artificial Sequence
  Synthetic oligonucleotide
gtactaagactagaaggggttgttaatcga

SEQ ID NO: 285132 - DNA, 30 bp, Artificial Sequence
  Synthetic oligonucleotide
gaattcggaagtgttctgcagggacatcga

SEQ ID NO: 285133 - DNA, 30 bp, Artificial Sequence
  Synthetic oligonucleotide
ggccgattgataaactgcgatctacatcga

SEQ ID NO: 285134 - DNA, 30 bp, Artificial Sequence
  Synthetic oligonucleotide
tgtttggtagaagtctccgaaacccatcga

SEQ ID NO: 285135 - DNA, 30 bp, Artificial Sequence
  Synthetic oligonucleotide
ttaacgcttatttccggcaatacccatcga

SEQ ID NO: 285136 - DNA, 30 bp, Artificial Sequence
  Synthetic oligonucleotide
gaagtaaaattgttggtaaatgtccatcga

SEQ ID NO: 285137 - DNA, 30 bp, Artificial Sequence
  Synthetic oligonucleotide
gatctgcatgaaaaggaccatacgcatcga

SEQ ID NO: 285138 - DNA, 30 bp, Artificial Sequence
  Synthetic oligonucleotide
catatctaagactacaggtgatggcatcga

SEQ ID NO: 285139 - DNA, 30 bp, Artificial Sequence
  Synthetic oligonucleotide
cttgcttatttgctgaagcaagcggatcga

SEQ ID NO: 285140 - DNA, 30 bp, Artificial Sequence
  Synthetic oligonucleotide
cccggagaaacggtggaatgggcggatcga

SEQ ID NO: 285141 - DNA, 30 bp, Artificial Sequence
  Synthetic oligonucleotide
tattgggaacagcgccggggtatggatcga

SEQ ID NO: 285142 - DNA, 30 bp, Artificial Sequence
  Synthetic oligonucleotide
aaaacatcctaccgctatgaacctgatcga

SEQ ID NO: 285143 - DNA, 30 bp, Artificial Sequence
  Synthetic oligonucleotide
aaagcttagtcccctgttaagagtgatcga

SEQ ID NO: 285144 - DNA, 30 bp, Artificial Sequence
  Synthetic oligonucleotide
gcacattggtccaatccatctcgtgatcga

SEQ ID NO: 285145 - DNA, 30 bp, Artificial Sequence
  Synthetic oligonucleotide
gtcctaggtgagataacacttgactatcga

SEQ ID NO: 285146 - DNA, 30 bp, Artificial Sequence
  Synthetic oligonucleotide
acattcgattagtttactacagcctatcga

SEQ ID NO: 285147 - DNA, 30 bp, Artificial Sequence
  Synthetic oligonucleotide
atcctgtgtgacgacaaagggtattatcga

SEQ ID NO: 285148 - DNA, 30 bp, Artificial Sequence
  Synthetic oligonucleotide
gtagcgtaggagagacagttcgcttatcga

SEQ ID NO: 285149 - DNA, 30 bp, Artificial Sequence
  Synthetic oligonucleotide
aagctgtcccaacacggtattaacactcga

SEQ ID NO: 285150 - DNA, 30 bp, Artificial Sequence
  Synthetic oligonucleotide
actgcggttcgaagtctatggtgcactcga

SEQ ID NO: 285151 - DNA, 30 bp, Artificial Sequence
  Synthetic oligonucleotide
atgggcgcaggaggtatatcttgcactcga

SEQ ID NO: 285152 - DNA, 30 bp, Artificial Sequence
  Synthetic oligonucleotide
gaaactaggcagtcatcaacgtcgactcga

SEQ ID NO: 285153 - DNA, 30 bp, Artificial Sequence
  Synthetic oligonucleotide
tcacggggtgattttttcggtgtgactcga

SEQ ID NO: 285154 - DNA, 30 bp, Artificial Sequence
  Synthetic oligonucleotide
actccagggggtacgaccgtgtatactcga

SEQ ID NO: 285155 - DNA, 30 bp, Artificial Sequence
  Synthetic oligonucleotide
tattcatctcagggtaaagagcgtactcga

SEQ ID NO: 285156 - DNA, 30 bp, Artificial Sequence
  Synthetic oligonucleotide
tgcaaccctaaaaattttatacgacctcga

SEQ ID NO: 285157 - DNA, 30 bp, Artificial Sequence
  Synthetic oligonucleotide
tgcatagggcggactacaagtctacctcga

SEQ ID NO: 285158 - DNA, 30 bp, Artificial Sequence
  Synthetic oligonucleotide
attacggtggaccaaaatctgttccctcga

SEQ ID NO: 285159 - DNA, 30 bp, Artificial Sequence
  Synthetic oligonucleotide
gcgggcttcgcgcttgcgctcaaagctcga

SEQ ID NO: 285160 - DNA, 30 bp, Artificial Sequence
  Synthetic oligonucleotide
ttgcatactcgaaactaagtctacgctcga

SEQ ID NO: 285161 - DNA, 30 bp, Artificial Sequence
  Synthetic oligonucleotide
ccggggttgagcagggctacaaccgctcga

SEQ ID NO: 285162 - DNA, 30 bp, Artificial Sequence
  Synthetic oligonucleotide
aggggcacaaacggacgttatctggctcga

SEQ ID NO: 285163 - DNA, 30 bp, Artificial Sequence
  Synthetic oligonucleotide
gtccgcaggtcgcataagtacatatctcga

SEQ ID NO: 285164 - DNA, 30 bp, Artificial Sequence
  Synthetic oligonucleotide
tacaggcgggattcttgattagtatctcga

SEQ ID NO: 285165 - DNA, 30 bp, Artificial Sequence
  Synthetic oligonucleotide
gaggatgaggcgcgatttgtaagctctcga

SEQ ID NO: 285166 - DNA, 31 bp, Artificial Sequence
  Synthetic oligonucleotide
gtgagttcacatctggtgagagcagtctcga

SEQ ID NO: 285167 - DNA, 30 bp, Artificial Sequence
  Synthetic oligonucleotide
agtctggtccgcattattatacggtctcga

SEQ ID NO: 285168 - DNA, 30 bp, Artificial Sequence
  Synthetic oligonucleotide
ttatacaaaaggaaatcgagttggtctcga

SEQ ID NO: 285169 - DNA, 30 bp, Artificial Sequence
  Synthetic oligonucleotide
agtaccgaggggtttactgtgttgtctcga

SEQ ID NO: 285170 - DNA, 30 bp, Artificial Sequence
  Synthetic oligonucleotide
agatttggtacccacgtggcgcgttctcga

SEQ ID NO: 285171 - DNA, 30 bp, Artificial Sequence
  Synthetic oligonucleotide
cttgtagttgagatttgttcgacaagtcga

SEQ ID NO: 285172 - DNA, 30 bp, Artificial Sequence
  Synthetic oligonucleotide
gtatcgttttctattttctgtttgagtcga

SEQ ID NO: 285173 - DNA, 30 bp, Artificial Sequence
  Synthetic oligonucleotide
gaccagtagcaaataatcgctacccgtcga

SEQ ID NO: 285174 - DNA, 30 bp, Artificial Sequence
  Synthetic oligonucleotide
tctggacgatcgacaggggacgcgcgtcga

SEQ ID NO: 285175 - DNA, 30 bp, Artificial Sequence
  Synthetic oligonucleotide
tgatggcgcgacgggggactatctcgtcga

SEQ ID NO: 285176 - DNA, 30 bp, Artificial Sequence
  Synthetic oligonucleotide
ttgcgtacatatgctcttttaagtcgtcga

SEQ ID NO: 285177 - DNA, 30 bp, Artificial Sequence
  Synthetic oligonucleotide
gaatgtgcacgcgattgggattgaggtcga

SEQ ID NO: 285178 - DNA, 30 bp, Artificial Sequence
  Synthetic oligonucleotide
caacagaatgctctaattagtctaggtcga

SEQ ID NO: 285179 - DNA, 30 bp, Artificial Sequence
  Synthetic oligonucleotide
cctcccagagcgtgaggtaaaaacggtcga

SEQ ID NO: 285180 - DNA, 30 bp, Artificial Sequence
  Synthetic oligonucleotide
cttatctcctgcatggggctccgcggtcga

SEQ ID NO: 285181 - DNA, 30 bp, Artificial Sequence
  Synthetic oligonucleotide
aaacctgaatcctctcggtgttagggtcga

SEQ ID NO: 285182 - DNA, 30 bp, Artificial Sequence
  Synthetic oligonucleotide
gcatttcatatcgatcggtcattgtgtcga

SEQ ID NO: 285183 - DNA, 30 bp, Artificial Sequence
  Synthetic oligonucleotide
ggttctctttggtcaataggtcggattcga

SEQ ID NO: 285184 - DNA, 30 bp, Artificial Sequence
  Synthetic oligonucleotide
aactaacgataagaggcctgccctattcga

SEQ ID NO: 285185 - DNA, 30 bp, Artificial Sequence
  Synthetic oligonucleotide
actggtctgggaccagtcatcttacttcga

SEQ ID NO: 285186 - DNA, 30 bp, Artificial Sequence
  Synthetic oligonucleotide
gcgtagtcttactctccgctcaagcttcga

SEQ ID NO: 285187 - DNA, 30 bp, Artificial Sequence
  Synthetic oligonucleotide
atctccggaaaagttatagacgggcttcga

SEQ ID NO: 285188 - DNA, 30 bp, Artificial Sequence
  Synthetic oligonucleotide
gcttcgcggaaacgccgttgacatcttcga

SEQ ID NO: 285189 - DNA, 30 bp, Artificial Sequence
  Synthetic oligonucleotide
ctcgcccacgggtatgtaagaggtcttcga

SEQ ID NO: 285190 - DNA, 30 bp, Artificial Sequence
  Synthetic oligonucleotide
aactcgcataggctcagataggaagttcga

SEQ ID NO: 285191 - DNA, 30 bp, Artificial Sequence
  Synthetic oligonucleotide
aattgtgtcaaagtgacagcttaagttcga

SEQ ID NO: 285192 - DNA, 30 bp, Artificial Sequence
  Synthetic oligonucleotide
acataatggttacatcgtcaggacgttcga

SEQ ID NO: 285193 - DNA, 30 bp, Artificial Sequence
  Synthetic oligonucleotide
attggagattgatgaaccttggacgttcga

SEQ ID NO: 285194 - DNA, 30 bp, Artificial Sequence
  Synthetic oligonucleotide
cttaagcgtctctgtcattctcgggttcga

SEQ ID NO: 285195 - DNA, 30 bp, Artificial Sequence
  Synthetic oligonucleotide
ttcaacgcagggatggcccatgtggttcga

SEQ ID NO: 285196 - DNA, 30 bp, Artificial Sequence
  Synthetic oligonucleotide
taaatatattggtgtaatttccatgttcga

SEQ ID NO: 285197 - DNA, 30 bp, Artificial Sequence
  Synthetic oligonucleotide
tcggtctctcgcgcgccagtagtgtttcga

SEQ ID NO: 285198 - DNA, 30 bp, Artificial Sequence
  Synthetic oligonucleotide
cacggagtcatggacaacatgagttttcga

SEQ ID NO: 285199 - DNA, 30 bp, Artificial Sequence
  Synthetic oligonucleotide
attctaaaagtagagagtatggccaaagga

SEQ ID NO: 285200 - DNA, 30 bp, Artificial Sequence
  Synthetic oligonucleotide
cggctctaaggaccatgccgaagcaaagga

SEQ ID NO: 285201 - DNA, 30 bp, Artificial Sequence
  Synthetic oligonucleotide
agagcgattggtagagtttggcataaagga

SEQ ID NO: 285202 - DNA, 30 bp, Artificial Sequence
  Synthetic oligonucleotide
ttgcattatctagaatcgaaatttaaagga

SEQ ID NO: 285203 - DNA, 30 bp, Artificial Sequence
  Synthetic oligonucleotide
cggtaatttagggttcggtaccgacaagga

SEQ ID NO: 285204 - DNA, 30 bp, Artificial Sequence
  Synthetic oligonucleotide
tcttagcttacctggatagggtgacaagga

SEQ ID NO: 285205 - DNA, 30 bp, Artificial Sequence
  Synthetic oligonucleotide
cgatggccctcagggaggtttacccaagga

SEQ ID NO: 285206 - DNA, 30 bp, Artificial Sequence
  Synthetic oligonucleotide
aaaggtagaaggacgggacggctccaagga

SEQ ID NO: 285207 - DNA, 30 bp, Artificial Sequence
  Synthetic oligonucleotide
gagcaacaatctagttcgttagtccaagga

SEQ ID NO: 285208 - DNA, 30 bp, Artificial Sequence
  Synthetic oligonucleotide
aatgccatttcgctcagtcgcctgcaagga

SEQ ID NO: 285209 - DNA, 30 bp, Artificial Sequence
  Synthetic oligonucleotide
tagctcgatttaacccgatcgtttcaagga

SEQ ID NO: 285210 - DNA, 30 bp, Artificial Sequence
  Synthetic oligonucleotide
ccaaactatccatccctatggtcagaagga

SEQ ID NO: 285211 - DNA, 30 bp, Artificial Sequence
  Synthetic oligonucleotide
gtctgagctgcttgaaaaaaaaccgaagga

SEQ ID NO: 285212 - DNA, 30 bp, Artificial Sequence
  Synthetic oligonucleotide
ggatccgattcgctacccgcagtcgaagga

SEQ ID NO: 285213 - DNA, 30 bp, Artificial Sequence
  Synthetic oligonucleotide
ctctgtattataccgtaaatttaggaagga

SEQ ID NO: 285214 - DNA, 30 bp, Artificial Sequence
  Synthetic oligonucleotide
agtcgggttttactaaaccgtgcggaagga

SEQ ID NO: 285215 - DNA, 30 bp, Artificial Sequence
  Synthetic oligonucleotide
ttgtgcctagtgcacgatttccgggaagga

SEQ ID NO: 285216 - DNA, 30 bp, Artificial Sequence
  Synthetic oligonucleotide
atccccggacaggaaagatgggaataagga

SEQ ID NO: 285217 - DNA, 30 bp, Artificial Sequence
  Synthetic oligonucleotide
gctccatcaattacgacagcaagataagga

SEQ ID NO: 285218 - DNA, 30 bp, Artificial Sequence
  Synthetic oligonucleotide
ccaatgtaggcatcgatggaggtataagga

SEQ ID NO: 285219 - DNA, 30 bp, Artificial Sequence
  Synthetic oligonucleotide
taacgctaatctggagttacgaagtaagga

SEQ ID NO: 285220 - DNA, 30 bp, Artificial Sequence
  Synthetic oligonucleotide
caaccctcgctaaagccggggtggtaagga

SEQ ID NO: 285221 - DNA, 30 bp, Artificial Sequence
  Synthetic oligonucleotide
ttataggtacaggccatttaagaaacagga

SEQ ID NO: 285222 - DNA, 30 bp, Artificial Sequence
  Synthetic oligonucleotide
catctaatgcttggacatgtgataacagga

SEQ ID NO: 285223 - DNA, 30 bp, Artificial Sequence
  Synthetic oligonucleotide
tcctgagccagcgtagactctcacacagga

SEQ ID NO: 285224 - DNA, 30 bp, Artificial Sequence
  Synthetic oligonucleotide
ctgtatggaatacatcttacggccacagga

SEQ ID NO: 285225 - DNA, 30 bp, Artificial Sequence
  Synthetic oligonucleotide
ccagcatgtttgtttctttgtctgacagga

SEQ ID NO: 285226 - DNA, 30 bp, Artificial Sequence
  Synthetic oligonucleotide
agggcggacttctacagacgtgtgacagga

SEQ ID NO: 285227 - DNA, 30 bp, Artificial Sequence
  Synthetic oligonucleotide
cgtaatttaattgctcgacatttgacagga

SEQ ID NO: 285228 - DNA, 30 bp, Artificial Sequence
  Synthetic oligonucleotide
cgctgaatcgggctaatagtagctacagga

SEQ ID NO: 285229 - DNA, 30 bp, Artificial Sequence
  Synthetic oligonucleotide
gatcagatagtctgtatgtttccaccagga

SEQ ID NO: 285230 - DNA, 30 bp, Artificial Sequence
  Synthetic oligonucleotide
atagtcagccgacgggtagctggaccagga

SEQ ID NO: 285231 - DNA, 30 bp, Artificial Sequence
  Synthetic oligonucleotide
acaccgacatacgtaatcgcctgaccagga

SEQ ID NO: 285232 - DNA, 30 bp, Artificial Sequence
  Synthetic oligonucleotide
ctgacgatgtgggactcggggctaccagga

SEQ ID NO: 285233 - DNA, 30 bp, Artificial Sequence
  Synthetic oligonucleotide
atgagcggtaaatctctcagggcgccagga

SEQ ID NO: 285234 - DNA, 30 bp, Artificial Sequence
  Synthetic oligonucleotide
cactgatatacatgcaggctatcgccagga

SEQ ID NO: 285235 - DNA, 30 bp, Artificial Sequence
  Synthetic oligonucleotide
gttaggatacgcacggcgattctgccagga

SEQ ID NO: 285236 - DNA, 30 bp, Artificial Sequence
  Synthetic oligonucleotide
gcagaattgagaccgaccatggtgccagga

SEQ ID NO: 285237 - DNA, 30 bp, Artificial Sequence
  Synthetic oligonucleotide
gggatgaccgccacgctaactcgagcagga

SEQ ID NO: 285238 - DNA, 30 bp, Artificial Sequence
  Synthetic oligonucleotide
ctattggaggctacgatgagttgagcagga

SEQ ID NO: 285239 - DNA, 30 bp, Artificial Sequence
  Synthetic oligonucleotide
tgcctctgtcatgtctgtgccgtagcagga

SEQ ID NO: 285240 - DNA, 30 bp, Artificial Sequence
  Synthetic oligonucleotide
ttaaacaaacggataattagatccgcagga

SEQ ID NO: 285241 - DNA, 30 bp, Artificial Sequence
  Synthetic oligonucleotide
cacctgcggttgaaggattgcccggcagga

SEQ ID NO: 285242 - DNA, 30 bp, Artificial Sequence
  Synthetic oligonucleotide
gggcgacggggtgagccttatatggcagga

SEQ ID NO: 285243 - DNA, 30 bp, Artificial Sequence
  Synthetic oligonucleotide
tcagaattatagaaatacgcgctggcagga

SEQ ID NO: 285244 - DNA, 30 bp, Artificial Sequence
  Synthetic oligonucleotide
ggaagtcacccatgtggtgtgtatgcagga

SEQ ID NO: 285245 - DNA, 30 bp, Artificial Sequence
  Synthetic oligonucleotide
cggctgatgtaggttaacggtaaatcagga

SEQ ID NO: 285246 - DNA, 30 bp, Artificial Sequence
  Synthetic oligonucleotide
tagaagacatggggcgctaatctatcagga

SEQ ID NO: 285247 - DNA, 30 bp, Artificial Sequence
  Synthetic oligonucleotide
tttgctcaagaccggtgtgtgtcctcagga

SEQ ID NO: 285248 - DNA, 30 bp, Artificial Sequence
  Synthetic oligonucleotide
tttcaagcagtcatgtcacaaacgtcagga

SEQ ID NO: 285249 - DNA, 30 bp, Artificial Sequence
  Synthetic oligonucleotide
catgcagatcgggctttacaggcaagagga

SEQ ID NO: 285250 - DNA, 30 bp, Artificial Sequence
  Synthetic oligonucleotide
gtgttatttcgacgcactcagagaagagga

SEQ ID NO: 285251 - DNA, 30 bp, Artificial Sequence
  Synthetic oligonucleotide
cccgtgacatacacgggatgtcgaagagga

SEQ ID NO: 285252 - DNA, 30 bp, Artificial Sequence
  Synthetic oligonucleotide
aagccgtaattaggcagcgagaccagagga

SEQ ID NO: 285253 - DNA, 30 bp, Artificial Sequence
  Synthetic oligonucleotide
tcagttgtcaggttaccaatacatagagga

SEQ ID NO: 285254 - DNA, 30 bp, Artificial Sequence
  Synthetic oligonucleotide
gcagacaaaaacggaatgtcctctagagga

SEQ ID NO: 285255 - DNA, 30 bp, Artificial Sequence
  Synthetic oligonucleotide
tctcggaggtaaattatacgtcttagagga

SEQ ID NO: 285256 - DNA, 30 bp, Artificial Sequence
  Synthetic oligonucleotide
acccttttgtaataccaaatcccacgagga

SEQ ID NO: 285257 - DNA, 30 bp, Artificial Sequence
  Synthetic oligonucleotide
ggacaaaaccccccaccgtagagacgagga

SEQ ID NO: 285258 - DNA, 30 bp, Artificial Sequence
  Synthetic oligonucleotide
gtatcaaaggtagtacctttgcgacgagga

SEQ ID NO: 285259 - DNA, 30 bp, Artificial Sequence
  Synthetic oligonucleotide
catataaaagttttcttgggaagccgagga

SEQ ID NO: 285260 - DNA, 30 bp, Artificial Sequence
  Synthetic oligonucleotide
ttaccccttccaggcggcactatgcgagga

SEQ ID NO: 285261 - DNA, 30 bp, Artificial Sequence
  Synthetic oligonucleotide
tcacctgagggcagacaacccttgcgagga

SEQ ID NO: 285262 - DNA, 30 bp, Artificial Sequence
  Synthetic oligonucleotide
aatcaagttacgtgggttacacctcgagga

SEQ ID NO: 285263 - DNA, 30 bp, Artificial Sequence
  Synthetic oligonucleotide
tcgagatgacgatcagtacaatctcgagga

SEQ ID NO: 285264 - DNA, 30 bp, Artificial Sequence
  Synthetic oligonucleotide
ttaaacttgcaggttaggagttgtcgagga

SEQ ID NO: 285265 - DNA, 30 bp, Artificial Sequence
  Synthetic oligonucleotide
aaagattacgacacacgagtggcgggagga

SEQ ID NO: 285266 - DNA, 30 bp, Artificial Sequence
  Synthetic oligonucleotide
caatccggagatatcgaccacgatggagga

SEQ ID NO: 285267 - DNA, 30 bp, Artificial Sequence
  Synthetic oligonucleotide
cctgtcgggtgaaaaccctgctgctgagga

SEQ ID NO: 285268 - DNA, 30 bp, Artificial Sequence
  Synthetic oligonucleotide
gagttgatttgaagacggttactctgagga

SEQ ID NO: 285269 - DNA, 30 bp, Artificial Sequence
  Synthetic oligonucleotide
gagctggcggtaggctcggtatcgtgagga

SEQ ID NO: 285270 - DNA, 30 bp, Artificial Sequence
  Synthetic oligonucleotide
gtatatttcaaaggaagtgtcatgtgagga

SEQ ID NO: 285271 - DNA, 30 bp, Artificial Sequence
  Synthetic oligonucleotide
cacatcatcagtggacatttaaattgagga

SEQ ID NO: 285272 - DNA, 30 bp, Artificial Sequence
  Synthetic oligonucleotide
agtgttgcttagtcgtttgtcatttgagga

SEQ ID NO: 285273 - DNA, 30 bp, Artificial Sequence
  Synthetic oligonucleotide
tttcggctggtcacctgagtgttttgagga

SEQ ID NO: 285274 - DNA, 30 bp, Artificial Sequence
  Synthetic oligonucleotide
ccaagacaacgcacacattttcgaatagga

SEQ ID NO: 285275 - DNA, 30 bp, Artificial Sequence
  Synthetic oligonucleotide
gggacggccaggcgtgtggaacacatagga

SEQ ID NO: 285276 - DNA, 30 bp, Artificial Sequence
  Synthetic oligonucleotide
tgcattgccgtccatggtgggtgcatagga

SEQ ID NO: 285277 - DNA, 30 bp, Artificial Sequence
  Synthetic oligonucleotide
tcgaatagtaaggctctactcgtcatagga

SEQ ID NO: 285278 - DNA, 30 bp, Artificial Sequence
  Synthetic oligonucleotide
gaatagttactggagatccgcgtgatagga

SEQ ID NO: 285279 - DNA, 30 bp, Artificial Sequence
  Synthetic oligonucleotide
tgttaaatgatgaagaaatggcttatagga

SEQ ID NO: 285280 - DNA, 30 bp, Artificial Sequence
  Synthetic oligonucleotide
gggcagagttctatggtggattttatagga

SEQ ID NO: 285281 - DNA, 30 bp, Artificial Sequence
  Synthetic oligonucleotide
tttaaataagaaataattcatcgactagga

SEQ ID NO: 285282 - DNA, 30 bp, Artificial Sequence
  Synthetic oligonucleotide
agtcacgtaaggttaagtccacccctagga

SEQ ID NO: 285283 - DNA, 30 bp, Artificial Sequence
  Synthetic oligonucleotide
tgatccctctcgctgatacacaggctagga

SEQ ID NO: 285284 - DNA, 30 bp, Artificial Sequence
  Synthetic oligonucleotide
acgtttcgaaacaagctcgtccaagtagga

SEQ ID NO: 285285 - DNA, 30 bp, Artificial Sequence
  Synthetic oligonucleotide
taaagcgtttgagcggtgagatcagtagga

SEQ ID NO: 285286 - DNA, 30 bp, Artificial Sequence
  Synthetic oligonucleotide
gtaatcggttggatcggccgtcgcgtagga

SEQ ID NO: 285287 - DNA, 30 bp, Artificial Sequence
  Synthetic oligonucleotide
ccatctaacatttacttaaagacggtagga

SEQ ID NO: 285288 - DNA, 30 bp, Artificial Sequence
  Synthetic oligonucleotide
aaatacaccgagcaggtcatcgcggtagga

SEQ ID NO: 285289 - DNA, 30 bp, Artificial Sequence
  Synthetic oligonucleotide
cctagatccggataatgggtatcggtagga

SEQ ID NO: 285290 - DNA, 30 bp, Artificial Sequence
  Synthetic oligonucleotide
gttgaatgtcctcaatcaattgatgtagga

SEQ ID NO: 285291 - DNA, 30 bp, Artificial Sequence
  Synthetic oligonucleotide
gaatgttaatcttattcaacgtttgtagga

SEQ ID NO: 285292 - DNA, 30 bp, Artificial Sequence
  Synthetic oligonucleotide
ccctctgacgcacactcggtcttattagga

SEQ ID NO: 285293 - DNA, 30 bp, Artificial Sequence
  Synthetic oligonucleotide
attattacagtgtccgcatcggagttagga

SEQ ID NO: 285294 - DNA, 30 bp, Artificial Sequence
  Synthetic oligonucleotide
tgtcgggaaggtcgatctgcgcggttagga

SEQ ID NO: 285295 - DNA, 30 bp, Artificial Sequence
  Synthetic oligonucleotide
gtgaagatatctgagtatgactatttagga

SEQ ID NO: 285296 - DNA, 30 bp, Artificial Sequence
  Synthetic oligonucleotide
gtcttatggcaacacggggtccgtttagga

SEQ ID NO: 285297 - DNA, 30 bp, Artificial Sequence
  Synthetic oligonucleotide
atagtcctgattggaacaataggtttagga

SEQ ID NO: 285298 - DNA, 30 bp, Artificial Sequence
  Synthetic oligonucleotide
actcctcgaggaaccagggaaacaaacgga

SEQ ID NO: 285299 - DNA, 30 bp, Artificial Sequence
  Synthetic oligonucleotide
cgcgcccaattcctaagcgtgagcaacgga

SEQ ID NO: 285300 - DNA, 30 bp, Artificial Sequence
  Synthetic oligonucleotide
gagtagcaagccaacagaagcctgaacgga

SEQ ID NO: 285301 - DNA, 30 bp, Artificial Sequence
  Synthetic oligonucleotide
gcagaattttgacggtcgaagaataacgga

SEQ ID NO: 285302 - DNA, 30 bp, Artificial Sequence
  Synthetic oligonucleotide
ataggtcatttgtattggtcagttaacgga

SEQ ID NO: 285303 - DNA, 30 bp, Artificial Sequence
  Synthetic oligonucleotide
cgcggccagctcggtgagactgcacacgga

SEQ ID NO: 285304 - DNA, 30 bp, Artificial Sequence
  Synthetic oligonucleotide
ccttaccgcgacatacctagagtccacgga

SEQ ID NO: 285305 - DNA, 30 bp, Artificial Sequence
  Synthetic oligonucleotide
taagaggcactatgcctaaaccctcacgga

SEQ ID NO: 285306 - DNA, 30 bp, Artificial Sequence
  Synthetic oligonucleotide
gaactgtgagtcgtatcgatctctcacgga

SEQ ID NO: 285307 - DNA, 30 bp, Artificial Sequence
  Synthetic oligonucleotide
cgactaaacggctcacgccgggttcacgga

SEQ ID NO: 285308 - DNA, 30 bp, Artificial Sequence
  Synthetic oligonucleotide
catgtcttaggggccgatagtcaagacgga

SEQ ID NO: 285309 - DNA, 30 bp, Artificial Sequence
  Synthetic oligonucleotide
acaatcggagcgttgatgtgagaagacgga

SEQ ID NO: 285310 - DNA, 30 bp, Artificial Sequence
  Synthetic oligonucleotide
tcaagcttcacgtatgtcaacttagacgga

SEQ ID NO: 285311 - DNA, 30 bp, Artificial Sequence
  Synthetic oligonucleotide
aatttcggatagtgatttagcggatacgga

SEQ ID NO: 285312 - DNA, 30 bp, Artificial Sequence
  Synthetic oligonucleotide
ttacaatcggggtacgcctttctatacgga

SEQ ID NO: 285313 - DNA, 30 bp, Artificial Sequence
  Synthetic oligonucleotide
gcgttctccaggttccagaatttatacgga

SEQ ID NO: 285314 - DNA, 30 bp, Artificial Sequence
  Synthetic oligonucleotide
acgcaacctacggcatggatagcctacgga

SEQ ID NO: 285315 - DNA, 30 bp, Artificial Sequence
  Synthetic oligonucleotide
atccgattaaagtcggtgaaaagctacgga

SEQ ID NO: 285316 - DNA, 30 bp, Artificial Sequence
  Synthetic oligonucleotide
agccacatggacgctatgtctatctacgga

SEQ ID NO: 285317 - DNA, 30 bp, Artificial Sequence
  Synthetic oligonucleotide
ggtatcgcgggaaagactttaacgtacgga

SEQ ID NO: 285318 - DNA, 30 bp, Artificial Sequence
  Synthetic oligonucleotide
ctgaaacccggcacgctcagtctgtacgga

SEQ ID NO: 285319 - DNA, 30 bp, Artificial Sequence
  Synthetic oligonucleotide
aagcgccctcgtgattcaacaaattacgga

SEQ ID NO: 285320 - DNA, 30 bp, Artificial Sequence
  Synthetic oligonucleotide
tcaattgcttagtactctagtgtttacgga

SEQ ID NO: 285321 - DNA, 30 bp, Artificial Sequence
  Synthetic oligonucleotide
gtgtcgcgggatatctccaatgcaaccgga

SEQ ID NO: 285322 - DNA, 30 bp, Artificial Sequence
  Synthetic oligonucleotide
tgttttggaattaacgaactagtaaccgga

SEQ ID NO: 285323 - DNA, 30 bp, Artificial Sequence
  Synthetic oligonucleotide
gcgcgccacctctgacacggacacaccgga

SEQ ID NO: 285324 - DNA, 30 bp, Artificial Sequence
  Synthetic oligonucleotide
ttcagactccatacacctagggcacccgga

SEQ ID NO: 285325 - DNA, 30 bp, Artificial Sequence
  Synthetic oligonucleotide
ttagccgtaccgactagatgacatcccgga

SEQ ID NO: 285326 - DNA, 30 bp, Artificial Sequence
  Synthetic oligonucleotide
atatggaggatcgattggagcactcccgga

SEQ ID NO: 285327 - DNA, 30 bp, Artificial Sequence
  Synthetic oligonucleotide
tgcattttttactcgtgcggtcacgccgga

SEQ ID NO: 285328 - DNA, 30 bp, Artificial Sequence
  Synthetic oligonucleotide
tctctcgactgggctcattggggtgccgga

SEQ ID NO: 285329 - DNA, 30 bp, Artificial Sequence
  Synthetic oligonucleotide
gggttcagcatctcaaggatagcctccgga

SEQ ID NO: 285330 - DNA, 30 bp, Artificial Sequence
  Synthetic oligonucleotide
atcgataattgaatatcggcacagtccgga

SEQ ID NO: 285331 - DNA, 31 bp, Artificial Sequence
  Synthetic oligonucleotide
ctcggcataggcctcgtgtatgccttccgga

SEQ ID NO: 285332 - DNA, 30 bp, Artificial Sequence
  Synthetic oligonucleotide
gaggtcgagagcaacgtgtcgggttccgga

SEQ ID NO: 285333 - DNA, 30 bp, Artificial Sequence
  Synthetic oligonucleotide
aattcgagatgtagattatggtgttccgga

SEQ ID NO: 285334 - DNA, 30 bp, Artificial Sequence
  Synthetic oligonucleotide
aagcagacttgctttccgcatctttccgga

SEQ ID NO: 285335 - DNA, 30 bp, Artificial Sequence
  Synthetic oligonucleotide
gagtaagcatacaacggaaccccgagcgga

SEQ ID NO: 285336 - DNA, 30 bp, Artificial Sequence
  Synthetic oligonucleotide
tcggtctcgtagtcatggtataatagcgga

SEQ ID NO: 285337 - DNA, 30 bp, Artificial Sequence
  Synthetic oligonucleotide
gctgataatagatcctcatgtgctagcgga

SEQ ID NO: 285338 - DNA, 30 bp, Artificial Sequence
  Synthetic oligonucleotide
ggggagcgaccagccacatatcaacgcgga

SEQ ID NO: 285339 - DNA, 30 bp, Artificial Sequence
  Synthetic oligonucleotide
taaccacgtgatcgtcagtatctacgcgga

SEQ ID NO: 285340 - DNA, 30 bp, Artificial Sequence
  Synthetic oligonucleotide
gcatcgataacaccttaacgggtgcgcgga

SEQ ID NO: 285341 - DNA, 30 bp, Artificial Sequence
  Synthetic oligonucleotide
agccggtgtgtggagcatgataatcgcgga

SEQ ID NO: 285342 - DNA, 30 bp, Artificial Sequence
  Synthetic oligonucleotide
atttatccaggatcttattgggctcgcgga

SEQ ID NO: 285343 - DNA, 30 bp, Artificial Sequence
  Synthetic oligonucleotide
ctcagagccttaatatcgggccaaggcgga

SEQ ID NO: 285344 - DNA, 30 bp, Artificial Sequence
  Synthetic oligonucleotide
gttgcataccgtctaggggaagacggcgga

SEQ ID NO: 285345 - DNA, 30 bp, Artificial Sequence
  Synthetic oligonucleotide
tcgaaatacgtagtcccgtcgcagggcgga

SEQ ID NO: 285346 - DNA, 30 bp, Artificial Sequence
  Synthetic oligonucleotide
ggaagtccggaaaatagacccacgggcgga

SEQ ID NO: 285347 - DNA, 30 bp, Artificial Sequence
  Synthetic oligonucleotide
ggtaaacaggccatccgaagcccgggcgga

SEQ ID NO: 285348 - DNA, 30 bp, Artificial Sequence
  Synthetic oligonucleotide
ttgggcagttttcgagatagggggggcgga

SEQ ID NO: 285349 - DNA, 30 bp, Artificial Sequence
  Synthetic oligonucleotide
tacgtagactgcatgtggaaatttggcgga

SEQ ID NO: 285350 - DNA, 30 bp, Artificial Sequence
  Synthetic oligonucleotide
gagaggcattttgtcataccaaaatgcgga

SEQ ID NO: 285351 - DNA, 30 bp, Artificial Sequence
  Synthetic oligonucleotide
gtagaccatttagtgatattgccatgcgga

SEQ ID NO: 285352 - DNA, 30 bp, Artificial Sequence
  Synthetic oligonucleotide
gtgaaggaacggttggccgaacagtgcgga

SEQ ID NO: 285353 - DNA, 30 bp, Artificial Sequence
  Synthetic oligonucleotide
acaggctatccatgattgctaatgtgcgga

SEQ ID NO: 285354 - DNA, 30 bp, Artificial Sequence
  Synthetic oligonucleotide
atccgtacctgggcccggaaggattgcgga

SEQ ID NO: 285355 - DNA, 30 bp, Artificial Sequence
  Synthetic oligonucleotide
gagtcatgagccgaggtgaaatgttgcgga

SEQ ID NO: 285356 - DNA, 30 bp, Artificial Sequence
  Synthetic oligonucleotide
acaggggaggcatagaggggcccaatcgga

SEQ ID NO: 285357 - DNA, 30 bp, Artificial Sequence
  Synthetic oligonucleotide
agcacttcggctggtcaatttaccatcgga

SEQ ID NO: 285358 - DNA, 30 bp, Artificial Sequence
  Synthetic oligonucleotide
gatcggtggacaagcaggaagccgatcgga

SEQ ID NO: 285359 - DNA, 30 bp, Artificial Sequence
  Synthetic oligonucleotide
cccctaccgtaactgtctgataggatcgga

SEQ ID NO: 285360 - DNA, 30 bp, Artificial Sequence
  Synthetic oligonucleotide
gctggggacttttagaggggtcggatcgga

SEQ ID NO: 285361 - DNA, 30 bp, Artificial Sequence
  Synthetic oligonucleotide
ctaacttatgtacctatggtagcactcgga

SEQ ID NO: 285362 - DNA, 30 bp, Artificial Sequence
  Synthetic oligonucleotide
taacataattcacccaattcgtatctcgga

SEQ ID NO: 285363 - DNA, 30 bp, Artificial Sequence
  Synthetic oligonucleotide
tgtgctactaataattcttcttcagtcgga

SEQ ID NO: 285364 - DNA, 30 bp, Artificial Sequence
  Synthetic oligonucleotide
ctacgtagaaattactgctgacgagtcgga

SEQ ID NO: 285365 - DNA, 30 bp, Artificial Sequence
  Synthetic oligonucleotide
tgcagtcgtgcgatggtgcgaaacgtcgga

SEQ ID NO: 285366 - DNA, 30 bp, Artificial Sequence
  Synthetic oligonucleotide
gagaaccaagggcctcgaaacgacgtcgga

SEQ ID NO: 285367 - DNA, 30 bp, Artificial Sequence
  Synthetic oligonucleotide
ttagtatagaccatgtttagaccggtcgga

SEQ ID NO: 285368 - DNA, 30 bp, Artificial Sequence
  Synthetic oligonucleotide
actgcgtattgttctcctataggggtcgga

SEQ ID NO: 285369 - DNA, 30 bp, Artificial Sequence
  Synthetic oligonucleotide
gttattaatttcaatcgggtactggtcgga

SEQ ID NO: 285370 - DNA, 30 bp, Artificial Sequence
  Synthetic oligonucleotide
agggatgaactttgccgataagcattcgga

SEQ ID NO: 285371 - DNA, 30 bp, Artificial Sequence
  Synthetic oligonucleotide
gataacgtggtggcatagaatgtattcgga

SEQ ID NO: 285372 - DNA, 30 bp, Artificial Sequence
  Synthetic oligonucleotide
aggtgctcgatccgacatgccatcttcgga

SEQ ID NO: 285373 - DNA, 30 bp, Artificial Sequence
  Synthetic oligonucleotide
gtttgtacacatattcatacaacgttcgga

SEQ ID NO: 285374 - DNA, 30 bp, Artificial Sequence
  Synthetic oligonucleotide
taagttcgagcactcgccccaaggttcgga

SEQ ID NO: 285375 - DNA, 30 bp, Artificial Sequence
  Synthetic oligonucleotide
taggtaacggcagtaactttggggttcgga

SEQ ID NO: 285376 - DNA, 30 bp, Artificial Sequence
  Synthetic oligonucleotide
ttgcgctctgggcgcggacgttatttcgga

SEQ ID NO: 285377 - DNA, 30 bp, Artificial Sequence
  Synthetic oligonucleotide
tgagaaccccggccctacataattttcgga

SEQ ID NO: 285378 - DNA, 30 bp, Artificial Sequence
  Synthetic oligonucleotide
aacgcataaaggggctttaagattttcgga

SEQ ID NO: 285379 - DNA, 30 bp, Artificial Sequence
  Synthetic oligonucleotide
ggttataatcgagtagggacatttttcgga

SEQ ID NO: 285380 - DNA, 30 bp, Artificial Sequence
  Synthetic oligonucleotide
ccgcaccctcgtgctagtaaataaaaggga

SEQ ID NO: 285381 - DNA, 30 bp, Artificial Sequence
  Synthetic oligonucleotide
tatcaccatagtatggaaagctaaaaggga

SEQ ID NO: 285382 - DNA, 30 bp, Artificial Sequence
  Synthetic oligonucleotide
ggattggcacgtgcagtggcaccaaaggga

SEQ ID NO: 285383 - DNA, 30 bp, Artificial Sequence
  Synthetic oligonucleotide
caataaggaaagtaacttgtagtcaaggga

SEQ ID NO: 285384 - DNA, 30 bp, Artificial Sequence
  Synthetic oligonucleotide
gaatcgatgagtgagacaccggggaaggga

SEQ ID NO: 285385 - DNA, 30 bp, Artificial Sequence
  Synthetic oligonucleotide
tcgttgtcaaactattgccatacacaggga

SEQ ID NO: 285386 - DNA, 30 bp, Artificial Sequence
  Synthetic oligonucleotide
gtggaccagccacctccgcaccgccaggga

SEQ ID NO: 285387 - DNA, 30 bp, Artificial Sequence
  Synthetic oligonucleotide
ccatagaagagtttggacggcttccaggga

SEQ ID NO: 285388 - DNA, 30 bp, Artificial Sequence
  Synthetic oligonucleotide
tttgcctagacgttgtggcattctcaggga

SEQ ID NO: 285389 - DNA, 25 bp, Artificial Sequence
  Synthetic oligonucleotide
gtaagaggtaggctatagtcaggga

SEQ ID NO: 285390 - DNA, 30 bp, Artificial Sequence
  Synthetic oligonucleotide
acctagggtattctgggaagggaagaggga

SEQ ID NO: 285391 - DNA, 30 bp, Artificial Sequence
  Synthetic oligonucleotide
gacagatacgcacaatacttcgacgaggga

SEQ ID NO: 285392 - DNA, 30 bp, Artificial Sequence
  Synthetic oligonucleotide
atccgacgtctttcaggcgaaacggaggga

SEQ ID NO: 285393 - DNA, 30 bp, Artificial Sequence
  Synthetic oligonucleotide
ttcaaagtgttgactggcatggctgaggga

SEQ ID NO: 285394 - DNA, 30 bp, Artificial Sequence
  Synthetic oligonucleotide
tagcgaaccagatttggactttgtgaggga

SEQ ID NO: 285395 - DNA, 30 bp, Artificial Sequence
  Synthetic oligonucleotide
atttctgggatacgtatgacagttgaggga

SEQ ID NO: 285396 - DNA, 30 bp, Artificial Sequence
  Synthetic oligonucleotide
tttataggaaaaccattaccatgataggga

SEQ ID NO: 285397 - DNA, 30 bp, Artificial Sequence
  Synthetic oligonucleotide
caacatcgggataagaccgcggtataggga

SEQ ID NO: 285398 - DNA, 30 bp, Artificial Sequence
  Synthetic oligonucleotide
cttgggtccatgcccaaggttgactaggga

SEQ ID NO: 285399 - DNA, 30 bp, Artificial Sequence
  Synthetic oligonucleotide
cgcttctcaccaatctctatcaagtaggga

SEQ ID NO: 285400 - DNA, 30 bp, Artificial Sequence
  Synthetic oligonucleotide
gatcggacccataaggccgtccattaggga

SEQ ID NO: 285401 - DNA, 30 bp, Artificial Sequence
  Synthetic oligonucleotide
tacctttcaggtccgcaggtgcaaacggga

SEQ ID NO: 285402 - DNA, 30 bp, Artificial Sequence
  Synthetic oligonucleotide
ttaaacgtacagggggctgcggaaacggga

SEQ ID NO: 285403 - DNA, 30 bp, Artificial Sequence
  Synthetic oligonucleotide
tgtggagggagcatcataagcacaacggga

SEQ ID NO: 285404 - DNA, 30 bp, Artificial Sequence
  Synthetic oligonucleotide
ggacgtagtttacgcaaaggatgaacggga

SEQ ID NO: 285405 - DNA, 30 bp, Artificial Sequence
  Synthetic oligonucleotide
gttaacagtcgcgatagggattgaacggga

SEQ ID NO: 285406 - DNA, 30 bp, Artificial Sequence
  Synthetic oligonucleotide
aagaacctgcacacggcaggttgcacggga

SEQ ID NO: 285407 - DNA, 30 bp, Artificial Sequence
  Synthetic oligonucleotide
agactattgaggccggaaagaggaccggga

SEQ ID NO: 285408 - DNA, 30 bp, Artificial Sequence
  Synthetic oligonucleotide
ttccaatggggtctaactttcaccccggga

SEQ ID NO: 285409 - DNA, 30 bp, Artificial Sequence
  Synthetic oligonucleotide
tttcggaactcaggcatcgcgaagccggga

SEQ ID NO: 285410 - DNA, 30 bp, Artificial Sequence
  Synthetic oligonucleotide
cactacagccaaatcagaatatggccggga

SEQ ID NO: 285411 - DNA, 30 bp, Artificial Sequence
  Synthetic oligonucleotide
atgcgcgatctttcgattattatgccggga

SEQ ID NO: 285412 - DNA, 30 bp, Artificial Sequence
  Synthetic oligonucleotide
ttgcagagccttggagctagcgatccggga

SEQ ID NO: 285413 - DNA, 30 bp, Artificial Sequence
  Synthetic oligonucleotide
tgcatctttagtaaggtctagactccggga

SEQ ID NO: 285414 - DNA, 30 bp, Artificial Sequence
  Synthetic oligonucleotide
gactactagagtagggacaacgttccggga

SEQ ID NO: 285415 - DNA, 30 bp, Artificial Sequence
  Synthetic oligonucleotide
tttgttgcaatgagcaattgttaagcggga

SEQ ID NO: 285416 - DNA, 30 bp, Artificial Sequence
  Synthetic oligonucleotide
ttaccggtcacgctcgctcatagagcggga

SEQ ID NO: 285417 - DNA, 30 bp, Artificial Sequence
  Synthetic oligonucleotide
ataagatgcagatatctctcggatgcggga

SEQ ID NO: 285418 - DNA, 30 bp, Artificial Sequence
  Synthetic oligonucleotide
tgatggttatcgaaggaggagagtgcggga

SEQ ID NO: 285419 - DNA, 30 bp, Artificial Sequence
  Synthetic oligonucleotide
actagcgttggatgctatgctggtgcggga

SEQ ID NO: 285420 - DNA, 30 bp, Artificial Sequence
  Synthetic oligonucleotide
gtataaagtcccctacacagtgaatcggga

SEQ ID NO: 285421 - DNA, 30 bp, Artificial Sequence
  Synthetic oligonucleotide
agtattccttagattcttcaccactcggga

SEQ ID NO: 285422 - DNA, 30 bp, Artificial Sequence
  Synthetic oligonucleotide
ggggaactttgcataaacgattactcggga

SEQ ID NO: 285423 - DNA, 30 bp, Artificial Sequence
  Synthetic oligonucleotide
gagacatccgcgtcataggttgcctcggga

SEQ ID NO: 285424 - DNA, 30 bp, Artificial Sequence
  Synthetic oligonucleotide
agccaagtaatttaattaggaaattcggga

SEQ ID NO: 285425 - DNA, 30 bp, Artificial Sequence
  Synthetic oligonucleotide
gttacgggttccgctagacttgcaagggga

SEQ ID NO: 285426 - DNA, 30 bp, Artificial Sequence
  Synthetic oligonucleotide
tgatagacatacatacattggggaagggga

SEQ ID NO: 285427 - DNA, 30 bp, Artificial Sequence
  Synthetic oligonucleotide
cgaagtgccaaccttaagccagtaagggga

SEQ ID NO: 285428 - DNA, 30 bp, Artificial Sequence
  Synthetic oligonucleotide
agtgggtgatatcaatagctcaccagggga

SEQ ID NO: 285429 - DNA, 30 bp, Artificial Sequence
  Synthetic oligonucleotide
aggcatcggagggagtgtgagtggagggga

SEQ ID NO: 285430 - DNA, 30 bp, Artificial Sequence
  Synthetic oligonucleotide
aatagactagagtccatttcggatagggga

SEQ ID NO: 285431 - DNA, 30 bp, Artificial Sequence
  Synthetic oligonucleotide
aaattgctaggcgagtcagcgactagggga

SEQ ID NO: 285432 - DNA, 30 bp, Artificial Sequence
  Synthetic oligonucleotide
tcacagcgattgttaactagagttagggga

SEQ ID NO: 285433 - DNA, 30 bp, Artificial Sequence
  Synthetic oligonucleotide
gtgtgtcctccgatccacgtccaacgggga

SEQ ID NO: 285434 - DNA, 30 bp, Artificial Sequence
  Synthetic oligonucleotide
atatcagcccgctcgggactcgaacgggga

SEQ ID NO: 285435 - DNA, 30 bp, Artificial Sequence
  Synthetic oligonucleotide
taacaattaattggcgaacgtgtacgggga

SEQ ID NO: 285436 - DNA, 30 bp, Artificial Sequence
  Synthetic oligonucleotide
tgacaccctcaccactggcttaggcgggga

SEQ ID NO: 285437 - DNA, 30 bp, Artificial Sequence
  Synthetic oligonucleotide
aacaatgcaagaatggcatttgttcgggga

SEQ ID NO: 285438 - DNA, 30 bp, Artificial Sequence
  Synthetic oligonucleotide
tttgtacgatcaggactaatttttcgggga

SEQ ID NO: 285439 - DNA, 30 bp, Artificial Sequence
  Synthetic oligonucleotide
atggacaatggaatatccggttgaggggga

SEQ ID NO: 285440 - DNA, 30 bp, Artificial Sequence
  Synthetic oligonucleotide
acatggtgtcacgcaacggtaaacggggga

SEQ ID NO: 285441 - DNA, 30 bp, Artificial Sequence
  Synthetic oligonucleotide
tgcttgatcctcgttgagtttcacggggga

SEQ ID NO: 285442 - DNA, 29 bp, Artificial Sequence
  Synthetic oligonucleotide
taacgtaaagtccgtagcaagccggggga

SEQ ID NO: 285443 - DNA, 40 bp, Artificial Sequence
  Synthetic oligonucleotide
aagataatacattcatggtatggtcggggaccggggggga

SEQ ID NO: 285444 - DNA, 35 bp, Artificial Sequence
  Synthetic oligonucleotide
aagataatacattcatggtatggtatcggggggga

SEQ ID NO: 285445 - DNA, 40 bp, Artificial Sequence
  Synthetic oligonucleotide
aagataatacattcatggtatggtcgggggtcggggggga

SEQ ID NO: 285446 - DNA, 30 bp, Artificial Sequence
  Synthetic oligonucleotide
aagaataggtcaggggactgtttgggggga

SEQ ID NO: 285447 - DNA, 30 bp, Artificial Sequence
  Synthetic oligonucleotide
aagagttcaatcaagaaatgatatggggga

SEQ ID NO: 285448 - DNA, 30 bp, Artificial Sequence
  Synthetic oligonucleotide
accaggtacgcttgagttgcgtatggggga

SEQ ID NO: 285449 - DNA, 30 bp, Artificial Sequence
  Synthetic oligonucleotide
cgcaggtgaatcttgctcctgagtggggga

SEQ ID NO: 285450 - DNA, 30 bp, Artificial Sequence
  Synthetic oligonucleotide
aaaacggattaccacttagaggttggggga

SEQ ID NO: 285451 - DNA, 30 bp, Artificial Sequence
  Synthetic oligonucleotide
agagtgtttatcgcactcagcggatgggga

SEQ ID NO: 285452 - DNA, 30 bp, Artificial Sequence
  Synthetic oligonucleotide
atattaggattacctagaagaatatgggga

SEQ ID NO: 285453 - DNA, 30 bp, Artificial Sequence
  Synthetic oligonucleotide
gtgggaaggtttatcgtcgttgtatgggga

SEQ ID NO: 285454 - DNA, 30 bp, Artificial Sequence
  Synthetic oligonucleotide
cgtagataaaactcactcaactcgtgggga

SEQ ID NO: 285455 - DNA, 30 bp, Artificial Sequence
  Synthetic oligonucleotide
ttaggatcctcggcgataatgtgttgggga

SEQ ID NO: 285456 - DNA, 30 bp, Artificial Sequence
  Synthetic oligonucleotide
gatcttaggcgagggctaacactttgggga

SEQ ID NO: 285457 - DNA, 30 bp, Artificial Sequence
  Synthetic oligonucleotide
ggaacgaagtcagcgctattcaaaatggga

SEQ ID NO: 285458 - DNA, 30 bp, Artificial Sequence
  Synthetic oligonucleotide
ccccgatccaggtgggagagtgaaatggga

SEQ ID NO: 285459 - DNA, 30 bp, Artificial Sequence
  Synthetic oligonucleotide
ctaataatgctatttcattaaggaatggga

SEQ ID NO: 285460 - DNA, 30 bp, Artificial Sequence
  Synthetic oligonucleotide
gcccgtgttcacgcaaacagggtcatggga

SEQ ID NO: 285461 - DNA, 30 bp, Artificial Sequence
  Synthetic oligonucleotide
gacggaagtcagaggtgggcgttcatggga

SEQ ID NO: 285462 - DNA, 30 bp, Artificial Sequence
  Synthetic oligonucleotide
gcatgtttaacaggggatttacggatggga

SEQ ID NO: 285463 - DNA, 30 bp, Artificial Sequence
  Synthetic oligonucleotide
gatcgacagggccgagcgatagggatggga

SEQ ID NO: 285464 - DNA, 30 bp, Artificial Sequence
  Synthetic oligonucleotide
ggagaatggttgcagttcgcaagtatggga

SEQ ID NO: 285465 - DNA, 30 bp, Artificial Sequence
  Synthetic oligonucleotide
gcagagagagtcattaactcggttatggga

SEQ ID NO: 285466 - DNA, 30 bp, Artificial Sequence
  Synthetic oligonucleotide
tgcatcccatctgacgacacgaacctggga

SEQ ID NO: 285467 - DNA, 30 bp, Artificial Sequence
  Synthetic oligonucleotide
atctgaccagaaggatccaacaaagtggga

SEQ ID NO: 285468 - DNA, 30 bp, Artificial Sequence
  Synthetic oligonucleotide
gacagctcttagcgagaaatttcagtggga

SEQ ID NO: 285469 - DNA, 29 bp, Artificial Sequence
  Synthetic oligonucleotide
atgtgtgctgaaccagtactctagtggga

SEQ ID NO: 285470 - DNA, 30 bp, Artificial Sequence
  Synthetic oligonucleotide
catatcggacgacgtcatgcgaacgtggga

SEQ ID NO: 285471 - DNA, 30 bp, Artificial Sequence
  Synthetic oligonucleotide
cccctagctaaagtggggccgaaggtggga

SEQ ID NO: 285472 - DNA, 30 bp, Artificial Sequence
  Synthetic oligonucleotide
gcagtaaataaaaactgttgcagggtggga

SEQ ID NO: 285473 - DNA, 30 bp, Artificial Sequence
  Synthetic oligonucleotide
tacttctttaaggcttatgggatggtggga

SEQ ID NO: 285474 - DNA, 30 bp, Artificial Sequence
  Synthetic oligonucleotide
tagcctggtttatcgcaagagttggtggga

SEQ ID NO: 285475 - DNA, 30 bp, Artificial Sequence
  Synthetic oligonucleotide
gcccactggcgggtaacctccgatgtggga

SEQ ID NO: 285476 - DNA, 30 bp, Artificial Sequence
  Synthetic oligonucleotide
atggggattgcggtgtaggaagaattggga

SEQ ID NO: 285477 - DNA, 30 bp, Artificial Sequence
  Synthetic oligonucleotide
ggaacccgcgggtaagtaataatattggga

SEQ ID NO: 285478 - DNA, 30 bp, Artificial Sequence
  Synthetic oligonucleotide
ccgaaggttacgggagaatttccgttggga

SEQ ID NO: 285479 - DNA, 30 bp, Artificial Sequence
  Synthetic oligonucleotide
tcctcacgggggattgtatttccgttggga

SEQ ID NO: 285480 - DNA, 30 bp, Artificial Sequence
  Synthetic oligonucleotide
cttaatggcaaatgcctaaccgcgttggga

SEQ ID NO: 285481 - DNA, 30 bp, Artificial Sequence
  Synthetic oligonucleotide
accgaaaggatcaaggtagcggggttggga

SEQ ID NO: 285482 - DNA, 30 bp, Artificial Sequence
  Synthetic oligonucleotide
gatgcaagttaagtgccgcttttgttggga

SEQ ID NO: 285483 - DNA, 30 bp, Artificial Sequence
  Synthetic oligonucleotide
aaagactgagcgagggatcaggctttggga

SEQ ID NO: 285484 - DNA, 30 bp, Artificial Sequence
  Synthetic oligonucleotide
attctcgatagaaccgtgtgcgtaaatgga

SEQ ID NO: 285485 - DNA, 30 bp, Artificial Sequence
  Synthetic oligonucleotide
gtatcgggcgtacaaccaacggtaaatgga

SEQ ID NO: 285486 - DNA, 30 bp, Artificial Sequence
  Synthetic oligonucleotide
gatttgcgtaaactcgattagtacaatgga

SEQ ID NO: 285487 - DNA, 30 bp, Artificial Sequence
  Synthetic oligonucleotide
cgatacctcaccgtctccgggcccaatgga

SEQ ID NO: 285488 - DNA, 30 bp, Artificial Sequence
  Synthetic oligonucleotide
aacgtagtgtcctccttatgggggaatgga

SEQ ID NO: 285489 - DNA, 30 bp, Artificial Sequence
  Synthetic oligonucleotide
gtacgtgcgtccccgcgcaattggaatgga

SEQ ID NO: 285490 - DNA, 30 bp, Artificial Sequence
  Synthetic oligonucleotide
gaataggaaaatcgtacatattggaatgga

SEQ ID NO: 285491 - DNA, 30 bp, Artificial Sequence
  Synthetic oligonucleotide
gatacattaattcctagcgtcctgaatgga

SEQ ID NO: 285492 - DNA, 30 bp, Artificial Sequence
  Synthetic oligonucleotide
ttggcttccgaaaaagtctagcctaatgga

SEQ ID NO: 285493 - DNA, 30 bp, Artificial Sequence
  Synthetic oligonucleotide
aatgtgcactctatggggtaccgtaatgga

SEQ ID NO: 285494 - DNA, 30 bp, Artificial Sequence
  Synthetic oligonucleotide
attagtatctgaaggggggcccgtaatgga

SEQ ID NO: 285495 - DNA, 30 bp, Artificial Sequence
  Synthetic oligonucleotide
agtaccgcaggttttatagcaggtaatgga

SEQ ID NO: 285496 - DNA, 30 bp, Artificial Sequence
  Synthetic oligonucleotide
tttcacagtcagatacctgcagaacatgga

SEQ ID NO: 285497 - DNA, 30 bp, Artificial Sequence
  Synthetic oligonucleotide
ctagtttaacgaaaaggaaaacaccatgga

SEQ ID NO: 285498 - DNA, 30 bp, Artificial Sequence
  Synthetic oligonucleotide
ttgtaacttttatttccgaatgaccatgga

SEQ ID NO: 285499 - DNA, 30 bp, Artificial Sequence
  Synthetic oligonucleotide
ggggcattaatggaggctccgtcccatgga

SEQ ID NO: 285500 - DNA, 30 bp, Artificial Sequence
  Synthetic oligonucleotide
tttgggggcagagcaaatttccgccatgga

SEQ ID NO: 285501 - DNA, 30 bp, Artificial Sequence
  Synthetic oligonucleotide
ggatcccgtcgtattgaaaactcgcatgga

SEQ ID NO: 285502 - DNA, 30 bp, Artificial Sequence
  Synthetic oligonucleotide
gtccccatagcactagagtcttcgcatgga

SEQ ID NO: 285503 - DNA, 30 bp, Artificial Sequence
  Synthetic oligonucleotide
gacatacgaattggctccgccgggcatgga

SEQ ID NO: 285504 - DNA, 30 bp, Artificial Sequence
  Synthetic oligonucleotide
tccatattaatacctagagctctgcatgga

SEQ ID NO: 285505 - DNA, 30 bp, Artificial Sequence
  Synthetic oligonucleotide
tagacccacatttaattagcattgcatgga

SEQ ID NO: 285506 - DNA, 30 bp, Artificial Sequence
  Synthetic oligonucleotide
ggatagttggctgcggattgtagtcatgga

SEQ ID NO: 285507 - DNA, 30 bp, Artificial Sequence
  Synthetic oligonucleotide
cttgagggactctgcaacgcctgtcatgga

SEQ ID NO: 285508 - DNA, 30 bp, Artificial Sequence
  Synthetic oligonucleotide
ctttagagaggcgttctgaataaggatgga

SEQ ID NO: 285509 - DNA, 30 bp, Artificial Sequence
  Synthetic oligonucleotide
accagtaaaatatgccgccccctggatgga

SEQ ID NO: 285510 - DNA, 30 bp, Artificial Sequence
  Synthetic oligonucleotide
cttacaggagcataaacgactcatgatgga

SEQ ID NO: 285511 - DNA, 30 bp, Artificial Sequence
  Synthetic oligonucleotide
tgaaggtccgccgttacgaattttgatgga

SEQ ID NO: 285512 - DNA, 30 bp, Artificial Sequence
  Synthetic oligonucleotide
atcgccaacctccagatcggctcatatgga

SEQ ID NO: 285513 - DNA, 30 bp, Artificial Sequence
  Synthetic oligonucleotide
cccttgagaggagtataccgactctatgga

SEQ ID NO: 285514 - DNA, 30 bp, Artificial Sequence
  Synthetic oligonucleotide
tactgattgtaatacaaccggaagtatgga

SEQ ID NO: 285515 - DNA, 30 bp, Artificial Sequence
  Synthetic oligonucleotide
tctaaggcttgctcaatgcttacgtatgga

SEQ ID NO: 285516 - DNA, 31 bp, Artificial Sequence
  Synthetic oligonucleotide
caaattcttcatctaagtccgtaattatgga

SEQ ID NO: 285517 - DNA, 30 bp, Artificial Sequence
  Synthetic oligonucleotide
cggttatgatcaaatactgagcgttatgga

SEQ ID NO: 285518 - DNA, 30 bp, Artificial Sequence
  Synthetic oligonucleotide
cgcggaactttgtcttatataggttatgga

SEQ ID NO: 285519 - DNA, 30 bp, Artificial Sequence
  Synthetic oligonucleotide
attaaaatacactttttatttgtaactgga

SEQ ID NO: 285520 - DNA, 30 bp, Artificial Sequence
  Synthetic oligonucleotide
ctcaacgaggcagtaggatattacactgga

SEQ ID NO: 285521 - DNA, 30 bp, Artificial Sequence
  Synthetic oligonucleotide
gttgatcctgtctcagagaagaagactgga

SEQ ID NO: 285522 - DNA, 30 bp, Artificial Sequence
  Synthetic oligonucleotide
tctgtcaatttgagctgaataggtactgga

SEQ ID NO: 285523 - DNA, 30 bp, Artificial Sequence
  Synthetic oligonucleotide
tttctcataaacttaatcacggaacctgga

SEQ ID NO: 285524 - DNA, 30 bp, Artificial Sequence
  Synthetic oligonucleotide
cacatttcgcacttaaggctacaccctgga

SEQ ID NO: 285525 - DNA, 30 bp, Artificial Sequence
  Synthetic oligonucleotide
accgctcttagcgcgcttatgtggcctgga

SEQ ID NO: 285526 - DNA, 30 bp, Artificial Sequence
  Synthetic oligonucleotide
tgtcaaactaaactgcgagagtctcctgga

SEQ ID NO: 285527 - DNA, 30 bp, Artificial Sequence
  Synthetic oligonucleotide
gtccaaaaagggaccattcgaattcctgga

SEQ ID NO: 285528 - DNA, 30 bp, Artificial Sequence
  Synthetic oligonucleotide
tctcggtggccaatggccagatcagctgga

SEQ ID NO: 285529 - DNA, 30 bp, Artificial Sequence
  Synthetic oligonucleotide
aagttacgattatgatcccggggcgctgga

SEQ ID NO: 285530 - DNA, 30 bp, Artificial Sequence
  Synthetic oligonucleotide
atgacccagtcaacggctgaacgggctgga

SEQ ID NO: 285531 - DNA, 30 bp, Artificial Sequence
  Synthetic oligonucleotide
cataatgtgagtggccagcgtcatgctgga

SEQ ID NO: 285532 - DNA, 30 bp, Artificial Sequence
  Synthetic oligonucleotide
gcctttgtttcggaacacgaagatgctgga

SEQ ID NO: 285533 - DNA, 30 bp, Artificial Sequence
  Synthetic oligonucleotide
cattgtgcaggagttcagcaaaaatctgga

SEQ ID NO: 285534 - DNA, 30 bp, Artificial Sequence
  Synthetic oligonucleotide
agtatagatcgagcgggtgtggcatctgga

SEQ ID NO: 285535 - DNA, 30 bp, Artificial Sequence
  Synthetic oligonucleotide
cctctcagccaggtgctacaatcatctgga

SEQ ID NO: 285536 - DNA, 30 bp, Artificial Sequence
  Synthetic oligonucleotide
ggtcgtttttgggggctggcaccgtctgga

SEQ ID NO: 285537 - DNA, 30 bp, Artificial Sequence
  Synthetic oligonucleotide
ccacgaataaatacaaggttggattctgga

SEQ ID NO: 285538 - DNA, 30 bp, Artificial Sequence
  Synthetic oligonucleotide
cgttagagtgtgactcgactgggttctgga

SEQ ID NO: 285539 - DNA, 30 bp, Artificial Sequence
  Synthetic oligonucleotide
ccgcggccaagggctggccatatttctgga

SEQ ID NO: 285540 - DNA, 30 bp, Artificial Sequence
  Synthetic oligonucleotide
cgggagtgccgaccacgagccgtttctgga

SEQ ID NO: 285541 - DNA, 30 bp, Artificial Sequence
  Synthetic oligonucleotide
tggaataagtcatcccaatacatcagtgga

SEQ ID NO: 285542 - DNA, 30 bp, Artificial Sequence
  Synthetic oligonucleotide
ttagtcgaattctcaacgcgtaagagtgga

SEQ ID NO: 285543 - DNA, 30 bp, Artificial Sequence
  Synthetic oligonucleotide
ttaggtactaacccaagttactaacgtgga

SEQ ID NO: 285544 - DNA, 30 bp, Artificial Sequence
  Synthetic oligonucleotide
ccgtccgggataggccccctgttacgtgga

SEQ ID NO: 285545 - DNA, 30 bp, Artificial Sequence
  Synthetic oligonucleotide
aagtgctcgctaaaggtgaaagaccgtgga

SEQ ID NO: 285546 - DNA, 30 bp, Artificial Sequence
  Synthetic oligonucleotide
gctatggttctttaggttaaagggcgtgga

SEQ ID NO: 285547 - DNA, 30 bp, Artificial Sequence
  Synthetic oligonucleotide
acaaacaaactgcctcgacatcctcgtgga

SEQ ID NO: 285548 - DNA, 30 bp, Artificial Sequence
  Synthetic oligonucleotide
tagagacttatggggggttgatgtcgtgga

SEQ ID NO: 285549 - DNA, 30 bp, Artificial Sequence
  Synthetic oligonucleotide
tcggtataatgagatataatcattcgtgga

SEQ ID NO: 285550 - DNA, 30 bp, Artificial Sequence
  Synthetic oligonucleotide
aaaggttaaccgtcctgatctagaggtgga

SEQ ID NO: 285551 - DNA, 30 bp, Artificial Sequence
  Synthetic oligonucleotide
tgagcctacgaccacagcagcggaggtgga

SEQ ID NO: 285552 - DNA, 30 bp, Artificial Sequence
  Synthetic oligonucleotide
gtttggtacaaggacggcaagaacggtgga

SEQ ID NO: 285553 - DNA, 30 bp, Artificial Sequence
  Synthetic oligonucleotide
aaagatatcgttgaattacggcacggtgga

SEQ ID NO: 285554 - DNA, 30 bp, Artificial Sequence
  Synthetic oligonucleotide
agcacgggggggtcctggatatagggtgga

SEQ ID NO: 285555 - DNA, 31 bp, Artificial Sequence
  Synthetic oligonucleotide
ttccagtatgagtaactagacggcgggtgga

SEQ ID NO: 285556 - DNA, 30 bp, Artificial Sequence
  Synthetic oligonucleotide
tgggctaccgtccatttaagcaatggtgga

SEQ ID NO: 285557 - DNA, 30 bp, Artificial Sequence
  Synthetic oligonucleotide
agtacgaagcgtgacttcgtgtatggtgga

SEQ ID NO: 285558 - DNA, 30 bp, Artificial Sequence
  Synthetic oligonucleotide
ctacatggccatcatcggctttatggtgga

SEQ ID NO: 285559 - DNA, 30 bp, Artificial Sequence
  Synthetic oligonucleotide
gcactcttgaggctttgagaaattggtgga

SEQ ID NO: 285560 - DNA, 30 bp, Artificial Sequence
  Synthetic oligonucleotide
tccgggcgttacagagattagaaatgtgga

SEQ ID NO: 285561 - DNA, 30 bp, Artificial Sequence
  Synthetic oligonucleotide
ggtcattgcaggttcttagcggaatgtgga

SEQ ID NO: 285562 - DNA, 30 bp, Artificial Sequence
  Synthetic oligonucleotide
cgcactcatctgaacaagctttaatgtgga

SEQ ID NO: 285563 - DNA, 30 bp, Artificial Sequence
  Synthetic oligonucleotide
ataacgattacgaacttctcggtatgtgga

SEQ ID NO: 285564 - DNA, 30 bp, Artificial Sequence
  Synthetic oligonucleotide
cggtatgtaacaggtttatcggactgtgga

SEQ ID NO: 285565 - DNA, 30 bp, Artificial Sequence
  Synthetic oligonucleotide
cgtgtatcagatgattagtcctcctgtgga

SEQ ID NO: 285566 - DNA, 30 bp, Artificial Sequence
  Synthetic oligonucleotide
ggggtgaaagttccgccatcttagtgtgga

SEQ ID NO: 285567 - DNA, 30 bp, Artificial Sequence
  Synthetic oligonucleotide
gatgtagggaaattggatatgaattgtgga

SEQ ID NO: 285568 - DNA, 30 bp, Artificial Sequence
  Synthetic oligonucleotide
cctattgtgataagggcatgatattgtgga

SEQ ID NO: 285569 - DNA, 30 bp, Artificial Sequence
  Synthetic oligonucleotide
ggagtcatcttagcaagcgcatcttgtgga

SEQ ID NO: 285570 - DNA, 30 bp, Artificial Sequence
  Synthetic oligonucleotide
aacggcaaactacgtgcttatctttgtgga

SEQ ID NO: 285571 - DNA, 30 bp, Artificial Sequence
  Synthetic oligonucleotide
ctctttatgcgcgttagtgcagaaattgga

SEQ ID NO: 285572 - DNA, 30 bp, Artificial Sequence
  Synthetic oligonucleotide
atagtacgtccacgtcatttcacaattgga

SEQ ID NO: 285573 - DNA, 30 bp, Artificial Sequence
  Synthetic oligonucleotide
agcaacactaccatctttttcaatattgga

SEQ ID NO: 285574 - DNA, 30 bp, Artificial Sequence
  Synthetic oligonucleotide
ttgtttgtaataaagagatcgactattgga

SEQ ID NO: 285575 - DNA, 30 bp, Artificial Sequence
  Synthetic oligonucleotide
ggcatcgtaaagttttagattcgtattgga

SEQ ID NO: 285576 - DNA, 30 bp, Artificial Sequence
  Synthetic oligonucleotide
catggtgccttagcccattattcacttgga

SEQ ID NO: 285577 - DNA, 30 bp, Artificial Sequence
  Synthetic oligonucleotide
ctatactgagtttcggacattagacttgga

SEQ ID NO: 285578 - DNA, 30 bp, Artificial Sequence
  Synthetic oligonucleotide
gtcgttgtaaatataattgtccgacttgga

SEQ ID NO: 285579 - DNA, 30 bp, Artificial Sequence
  Synthetic oligonucleotide
ctattcatactactgcaagtaggacttgga

SEQ ID NO: 285580 - DNA, 30 bp, Artificial Sequence
  Synthetic oligonucleotide
tatcgcaacacctctttcaactgtcttgga

SEQ ID NO: 285581 - DNA, 30 bp, Artificial Sequence
  Synthetic oligonucleotide
gcaactggcccaactaaggcacgagttgga

SEQ ID NO: 285582 - DNA, 30 bp, Artificial Sequence
  Synthetic oligonucleotide
ttgtggtgatcccgcagatggttagttgga

SEQ ID NO: 285583 - DNA, 30 bp, Artificial Sequence
  Synthetic oligonucleotide
tcagagtatcgaacgcccgatgacgttgga

SEQ ID NO: 285584 - DNA, 30 bp, Artificial Sequence
  Synthetic oligonucleotide
aaccccgactacagtgaggacatcgttgga

SEQ ID NO: 285585 - DNA, 30 bp, Artificial Sequence
  Synthetic oligonucleotide
gctcagcgagtatactacgacagggttgga

SEQ ID NO: 285586 - DNA, 30 bp, Artificial Sequence
  Synthetic oligonucleotide
catggctgctttgacgcctgcccatttgga

SEQ ID NO: 285587 - DNA, 30 bp, Artificial Sequence
  Synthetic oligonucleotide
ccgcagtgaggacgaaggatcggatttgga

SEQ ID NO: 285588 - DNA, 30 bp, Artificial Sequence
  Synthetic oligonucleotide
atatgacccactggggggtatgactttgga

SEQ ID NO: 285589 - DNA, 30 bp, Artificial Sequence
  Synthetic oligonucleotide
accggaaaaaataggacataaggctttgga

SEQ ID NO: 285590 - DNA, 30 bp, Artificial Sequence
  Synthetic oligonucleotide
gcctaagtcattaaaacgcgcatctttgga

SEQ ID NO: 285591 - DNA, 30 bp, Artificial Sequence
  Synthetic oligonucleotide
ggctcaggaggcctgagccctgagtttgga

SEQ ID NO: 285592 - DNA, 30 bp, Artificial Sequence
  Synthetic oligonucleotide
gcgtctcacggggacgggtccatgtttgga

SEQ ID NO: 285593 - DNA, 30 bp, Artificial Sequence
  Synthetic oligonucleotide
ggtgttggtaggggtccgctccgttttgga

SEQ ID NO: 285594 - DNA, 30 bp, Artificial Sequence
  Synthetic oligonucleotide
atcatgatatccgtctagctccaaaaatga

SEQ ID NO: 285595 - DNA, 30 bp, Artificial Sequence
  Synthetic oligonucleotide
tataccgcgtaaaaagatatggaaaaatga

SEQ ID NO: 285596 - DNA, 30 bp, Artificial Sequence
  Synthetic oligonucleotide
gcttttcaatgtaaccgaatgtgcaaatga

SEQ ID NO: 285597 - DNA, 30 bp, Artificial Sequence
  Synthetic oligonucleotide
aaatccggctcataaggttcggtgaaatga

SEQ ID NO: 285598 - DNA, 30 bp, Artificial Sequence
  Synthetic oligonucleotide
cacgctttcgcagcaatctcagaacaatga

SEQ ID NO: 285599 - DNA, 30 bp, Artificial Sequence
  Synthetic oligonucleotide
caaacttcgtgaataccttcctgagaatga

SEQ ID NO: 285600 - DNA, 30 bp, Artificial Sequence
  Synthetic oligonucleotide
acgccatccgtaaagtaatcatccgaatga

SEQ ID NO: 285601 - DNA, 30 bp, Artificial Sequence
  Synthetic oligonucleotide
aaggtattcgaaagaatatcatccgaatga

SEQ ID NO: 285602 - DNA, 30 bp, Artificial Sequence
  Synthetic oligonucleotide
atcatgcgaagtcttaaagatttcgaatga

SEQ ID NO: 285603 - DNA, 30 bp, Artificial Sequence
  Synthetic oligonucleotide
taactgtcagctgggcgcgaggtggaatga

SEQ ID NO: 285604 - DNA, 30 bp, Artificial Sequence
  Synthetic oligonucleotide
cgccgttaaaaggtaacgctatcataatga

SEQ ID NO: 285605 - DNA, 31 bp, Artificial Sequence
  Synthetic oligonucleotide
agcgcaggacgaattaattagtgcctaatga

SEQ ID NO: 285606 - DNA, 30 bp, Artificial Sequence
  Synthetic oligonucleotide
agaaagtctagcgctgggcggaagacatga

SEQ ID NO: 285607 - DNA, 30 bp, Artificial Sequence
  Synthetic oligonucleotide
actcctagaaatgatgtaggatctacatga

SEQ ID NO: 285608 - DNA, 30 bp, Artificial Sequence
  Synthetic oligonucleotide
agagcgcagcaaaacatctttgtaccatga

SEQ ID NO: 285609 - DNA, 30 bp, Artificial Sequence
  Synthetic oligonucleotide
tttgtatcaatactaaacacaactccatga

SEQ ID NO: 285610 - DNA, 30 bp, Artificial Sequence
  Synthetic oligonucleotide
gcatggatagttggtttctatacagcatga

SEQ ID NO: 285611 - DNA, 30 bp, Artificial Sequence
  Synthetic oligonucleotide
accttagactttcgggtaaccagagcatga

SEQ ID NO: 285612 - DNA, 30 bp, Artificial Sequence
  Synthetic oligonucleotide
ctccaaaaagtggcggaacaaatagcatga

SEQ ID NO: 285613 - DNA, 30 bp, Artificial Sequence
  Synthetic oligonucleotide
tcgaaagctttggtggattgcttagcatga

SEQ ID NO: 285614 - DNA, 30 bp, Artificial Sequence
  Synthetic oligonucleotide
gtactattggacacgccaggtgaggcatga

SEQ ID NO: 285615 - DNA, 30 bp, Artificial Sequence
  Synthetic oligonucleotide
ggtactagtcattgtttgtcatcggcatga

SEQ ID NO: 285616 - DNA, 30 bp, Artificial Sequence
  Synthetic oligonucleotide
agtcttactatgtgtgaagctatggcatga

SEQ ID NO: 285617 - DNA, 30 bp, Artificial Sequence
  Synthetic oligonucleotide
tacctagtatatggtcatctggtggcatga

SEQ ID NO: 285618 - DNA, 30 bp, Artificial Sequence
  Synthetic oligonucleotide
aagagttgggacttaacggtccatgcatga

SEQ ID NO: 285619 - DNA, 30 bp, Artificial Sequence
  Synthetic oligonucleotide
agtcatgtttgggaccaggttggatcatga

SEQ ID NO: 285620 - DNA, 30 bp, Artificial Sequence
  Synthetic oligonucleotide
tatcaatcggcgccttaactattatcatga

SEQ ID NO: 285621 - DNA, 30 bp, Artificial Sequence
  Synthetic oligonucleotide
acttacgcactacacctccggtattcatga

SEQ ID NO: 285622 - DNA, 30 bp, Artificial Sequence
  Synthetic oligonucleotide
catcctaaataaatcaccaaaagttcatga

SEQ ID NO: 285623 - DNA, 30 bp, Artificial Sequence
  Synthetic oligonucleotide
ttatatcgagaagtgaataaccgttcatga

SEQ ID NO: 285624 - DNA, 30 bp, Artificial Sequence
  Synthetic oligonucleotide
tgaagcagggttaatgtgatcaccagatga

SEQ ID NO: 285625 - DNA, 30 bp, Artificial Sequence
  Synthetic oligonucleotide
ctggcatctattagtaacggtaatagatga

SEQ ID NO: 285626 - DNA, 30 bp, Artificial Sequence
  Synthetic oligonucleotide
tgaagggcgtgtctatggaacgatagatga

SEQ ID NO: 285627 - DNA, 30 bp, Artificial Sequence
  Synthetic oligonucleotide
aaattaagcccaccgatggtctctagatga

SEQ ID NO: 285628 - DNA, 30 bp, Artificial Sequence
  Synthetic oligonucleotide
ttctctcaggggcgtatgtatggtagatga

SEQ ID NO: 285629 - DNA, 30 bp, Artificial Sequence
  Synthetic oligonucleotide
cttctgatgaccgggcgacatcaccgatga

SEQ ID NO: 285630 - DNA, 30 bp, Artificial Sequence
  Synthetic oligonucleotide
ccgataatccagccgctctccacccgatga

SEQ ID NO: 285631 - DNA, 30 bp, Artificial Sequence
  Synthetic oligonucleotide
tttggggtagccctggcgggacagcgatga

SEQ ID NO: 285632 - DNA, 30 bp, Artificial Sequence
  Synthetic oligonucleotide
cccagtccgactaggaagcgtcttcgatga

SEQ ID NO: 285633 - DNA, 30 bp, Artificial Sequence
  Synthetic oligonucleotide
cccacacccgatctggaatgctttcgatga

SEQ ID NO: 285634 - DNA, 30 bp, Artificial Sequence
  Synthetic oligonucleotide
gaataaagattaaatgattcgactggatga

SEQ ID NO: 285635 - DNA, 30 bp, Artificial Sequence
  Synthetic oligonucleotide
ttagattgtgaacttatccctaaatgatga

SEQ ID NO: 285636 - DNA, 30 bp, Artificial Sequence
  Synthetic oligonucleotide
agggctcagtaacatactagatcatgatga

SEQ ID NO: 285637 - DNA, 30 bp, Artificial Sequence
  Synthetic oligonucleotide
gcttggcgttatcaaaaacgtccctgatga

SEQ ID NO: 285638 - DNA, 30 bp, Artificial Sequence
  Synthetic oligonucleotide
aaacagcgatggcacagttttggctgatga

SEQ ID NO: 285639 - DNA, 30 bp, Artificial Sequence
  Synthetic oligonucleotide
gcggcttgatgcgccctgaatgattgatga

SEQ ID NO: 285640 - DNA, 30 bp, Artificial Sequence
  Synthetic oligonucleotide
aaggtatgcggcttacggggatattgatga

SEQ ID NO: 285641 - DNA, 30 bp, Artificial Sequence
  Synthetic oligonucleotide
catattttaccaatcaatagcgtaatatga

SEQ ID NO: 285642 - DNA, 30 bp, Artificial Sequence
  Synthetic oligonucleotide
ccagttctgcacataccgagaggcatatga

SEQ ID NO: 285643 - DNA, 30 bp, Artificial Sequence
  Synthetic oligonucleotide
cggtagcaacagtccgcccgatgcatatga

SEQ ID NO: 285644 - DNA, 30 bp, Artificial Sequence
  Synthetic oligonucleotide
ggaaagagggcactggcaatcgtcatatga

SEQ ID NO: 285645 - DNA, 30 bp, Artificial Sequence
  Synthetic oligonucleotide
tttagtatccgagtacggccattgatatga

SEQ ID NO: 285646 - DNA, 30 bp, Artificial Sequence
  Synthetic oligonucleotide
ttgtttcacaatttcggtaaaggtatatga

SEQ ID NO: 285647 - DNA, 30 bp, Artificial Sequence
  Synthetic oligonucleotide
gcagaacgcgtccagggctttgacctatga

SEQ ID NO: 285648 - DNA, 30 bp, Artificial Sequence
  Synthetic oligonucleotide
tgcttcattccgtcaaggggggtgctatga

SEQ ID NO: 285649 - DNA, 30 bp, Artificial Sequence
  Synthetic oligonucleotide
tgaagcccctagcgacggattgaagtatga

SEQ ID NO: 285650 - DNA, 30 bp, Artificial Sequence
  Synthetic oligonucleotide
ctaccaacgtgtctaccctcgctagtatga

SEQ ID NO: 285651 - DNA, 30 bp, Artificial Sequence
  Synthetic oligonucleotide
ctacaagtgaaatacccatatctcgtatga

SEQ ID NO: 285652 - DNA, 30 bp, Artificial Sequence
  Synthetic oligonucleotide
tcgcggttatcagtaaggaactcggtatga

SEQ ID NO: 285653 - DNA, 30 bp, Artificial Sequence
  Synthetic oligonucleotide
cccgtcgaggcggaatccccccgggtatga

SEQ ID NO: 285654 - DNA, 30 bp, Artificial Sequence
  Synthetic oligonucleotide
ttaggcggccgttccgaggagaatgtatga

SEQ ID NO: 285655 - DNA, 30 bp, Artificial Sequence
  Synthetic oligonucleotide
atagacttgttgagggtatccagtgtatga

SEQ ID NO: 285656 - DNA, 30 bp, Artificial Sequence
  Synthetic oligonucleotide
tgggtctgtatttgtttcgagggtgtatga

SEQ ID NO: 285657 - DNA, 30 bp, Artificial Sequence
  Synthetic oligonucleotide
gctacagcgtcatatacgaccacgttatga

SEQ ID NO: 285658 - DNA, 30 bp, Artificial Sequence
  Synthetic oligonucleotide
taatgaggcaaaggctagttattgttatga

SEQ ID NO: 285659 - DNA, 30 bp, Artificial Sequence
  Synthetic oligonucleotide
tatcgggacattggtcctggagaaaactga

SEQ ID NO: 285660 - DNA, 30 bp, Artificial Sequence
  Synthetic oligonucleotide
aacataaagtctagcaatgaggtaaactga

SEQ ID NO: 285661 - DNA, 30 bp, Artificial Sequence
  Synthetic oligonucleotide
aaaagtcgcaggcgagatattagcaactga

SEQ ID NO: 285662 - DNA, 30 bp, Artificial Sequence
  Synthetic oligonucleotide
gtagggcacaaccggggcatggtcaactga

SEQ ID NO: 285663 - DNA, 30 bp, Artificial Sequence
  Synthetic oligonucleotide
cccatagggacctggatgtataagaactga

SEQ ID NO: 285664 - DNA, 30 bp, Artificial Sequence
  Synthetic oligonucleotide
agatcaggtaacggttggttcattaactga

SEQ ID NO: 285665 - DNA, 30 bp, Artificial Sequence
  Synthetic oligonucleotide
cttctcttaagagtggcaagccttaactga

SEQ ID NO: 285666 - DNA, 30 bp, Artificial Sequence
  Synthetic oligonucleotide
ccaggacctttgtaaatttgatgacactga

SEQ ID NO: 285667 - DNA, 30 bp, Artificial Sequence
  Synthetic oligonucleotide
tcaatagtgatcttcaacgtaccccactga

SEQ ID NO: 285668 - DNA, 30 bp, Artificial Sequence
  Synthetic oligonucleotide
gggaacatagaattgctggaagatcactga

SEQ ID NO: 285669 - DNA, 30 bp, Artificial Sequence
  Synthetic oligonucleotide
gatggggcgggtttcattgctattcactga

SEQ ID NO: 285670 - DNA, 30 bp, Artificial Sequence
  Synthetic oligonucleotide
acgtttcgattagaatataaggttcactga

SEQ ID NO: 285671 - DNA, 30 bp, Artificial Sequence
  Synthetic oligonucleotide
ccgaaacaatactatcactcaagagactga

SEQ ID NO: 285672 - DNA, 30 bp, Artificial Sequence
  Synthetic oligonucleotide
gttggcggatcggcatgaatgtcatactga

SEQ ID NO: 285673 - DNA, 30 bp, Artificial Sequence
  Synthetic oligonucleotide
catgatggatcggtgcgtccagtgtactga

SEQ ID NO: 285674 - DNA, 30 bp, Artificial Sequence
  Synthetic oligonucleotide
ccggagagcagtgagccggtaagttactga

SEQ ID NO: 285675 - DNA, 30 bp, Artificial Sequence
  Synthetic oligonucleotide
aactcgctacataccagtcggcaaacctga

SEQ ID NO: 285676 - DNA, 30 bp, Artificial Sequence
  Synthetic oligonucleotide
gctttcaatcgactagaacccacaacctga

SEQ ID NO: 285677 - DNA, 30 bp, Artificial Sequence
  Synthetic oligonucleotide
acgtgacacgcttcaaatcgtataacctga

SEQ ID NO: 285678 - DNA, 30 bp, Artificial Sequence
  Synthetic oligonucleotide
tatgagcccgcaggctaggcacctacctga

SEQ ID NO: 285679 - DNA, 30 bp, Artificial Sequence
  Synthetic oligonucleotide
ccggaactagtcgcggccctcgagccctga

SEQ ID NO: 285680 - DNA, 30 bp, Artificial Sequence
  Synthetic oligonucleotide
tattgccgtgttgacgtgtgatagccctga

SEQ ID NO: 285681 - DNA, 30 bp, Artificial Sequence
  Synthetic oligonucleotide
gtctcgtaattaagcccgtgcacgccctga

SEQ ID NO: 285682 - DNA, 30 bp, Artificial Sequence
  Synthetic oligonucleotide
cgccccctactatagagaacgacgccctga

SEQ ID NO: 285683 - DNA, 30 bp, Artificial Sequence
  Synthetic oligonucleotide
acgacgtattacgacatcttagtcgcctga

SEQ ID NO: 285684 - DNA, 30 bp, Artificial Sequence
  Synthetic oligonucleotide
tcatgagcgagtatctccggtatggcctga

SEQ ID NO: 285685 - DNA, 30 bp, Artificial Sequence
  Synthetic oligonucleotide
tgagcgtgccaacacatcgtgccctcctga

SEQ ID NO: 285686 - DNA, 30 bp, Artificial Sequence
  Synthetic oligonucleotide
ctaacagaatacagttatgagcgctcctga

SEQ ID NO: 285687 - DNA, 30 bp, Artificial Sequence
  Synthetic oligonucleotide
cattggtgctctaagaaatcttagtcctga

SEQ ID NO: 285688 - DNA, 30 bp, Artificial Sequence
  Synthetic oligonucleotide
taaatggcaagatgtacaataccttcctga

SEQ ID NO: 285689 - DNA, 30 bp, Artificial Sequence
  Synthetic oligonucleotide
cgtgggaacagcagatctgaagcttcctga

SEQ ID NO: 285690 - DNA, 30 bp, Artificial Sequence
  Synthetic oligonucleotide
atggctactcaggaactggtttcttcctga

SEQ ID NO: 285691 - DNA, 30 bp, Artificial Sequence
  Synthetic oligonucleotide
gaaaagcatggcctgcttgtcatttcctga

SEQ ID NO: 285692 - DNA, 30 bp, Artificial Sequence
  Synthetic oligonucleotide
tcgaagtgacctgccttcctagcaagctga

SEQ ID NO: 285693 - DNA, 30 bp, Artificial Sequence
  Synthetic oligonucleotide
tggtggaggcgggactggtgtgtaagctga

SEQ ID NO: 285694 - DNA, 30 bp, Artificial Sequence
  Synthetic oligonucleotide
tttggacctctatgccaagaattcagctga

SEQ ID NO: 285695 - DNA, 30 bp, Artificial Sequence
  Synthetic oligonucleotide
tctgccgaacatttttcgtgttatagctga

SEQ ID NO: 285696 - DNA, 30 bp, Artificial Sequence
  Synthetic oligonucleotide
aaaatgcagacacgacgtatacaacgctga

SEQ ID NO: 285697 - DNA, 30 bp, Artificial Sequence
  Synthetic oligonucleotide
tcatttgaggccggggctgagcttcgctga

SEQ ID NO: 285698 - DNA, 30 bp, Artificial Sequence
  Synthetic oligonucleotide
tgcaggacatcttgcaacctagttcgctga

SEQ ID NO: 285699 - DNA, 30 bp, Artificial Sequence
  Synthetic oligonucleotide
ggatgggttgtgcgggaccgtgcaggctga

SEQ ID NO: 285700 - DNA, 29 bp, Artificial Sequence
  Synthetic oligonucleotide
aaatctatcacgttacagtcttcggctga

SEQ ID NO: 285701 - DNA, 30 bp, Artificial Sequence
  Synthetic oligonucleotide
ggccttaatcgtttcacagatttcggctga

SEQ ID NO: 285702 - DNA, 30 bp, Artificial Sequence
  Synthetic oligonucleotide
aataaagatatcgtcggttataaatgctga

SEQ ID NO: 285703 - DNA, 30 bp, Artificial Sequence
  Synthetic oligonucleotide
ctatttgatggttgagtacatgcatgctga

SEQ ID NO: 285704 - DNA, 30 bp, Artificial Sequence
  Synthetic oligonucleotide
taagaccgcagccgcgccggacgatgctga

SEQ ID NO: 285705 - DNA, 30 bp, Artificial Sequence
  Synthetic oligonucleotide
ggccgagccttagatatcctcggctgctga

SEQ ID NO: 285706 - DNA, 30 bp, Artificial Sequence
  Synthetic oligonucleotide
tccgttttgaaaagaaaaataatctgctga

SEQ ID NO: 285707 - DNA, 30 bp, Artificial Sequence
  Synthetic oligonucleotide
atggtgagtcagaagctctttgtctgctga

SEQ ID NO: 285708 - DNA, 30 bp, Artificial Sequence
  Synthetic oligonucleotide
cccgatgtcttcggttatagtacttgctga

SEQ ID NO: 285709 - DNA, 30 bp, Artificial Sequence
  Synthetic oligonucleotide
acccacgttgaatggacatcctcaatctga

SEQ ID NO: 285710 - DNA, 30 bp, Artificial Sequence
  Synthetic oligonucleotide
gttgcgtaggcttcgccgctccgaatctga

SEQ ID NO: 285711 - DNA, 30 bp, Artificial Sequence
  Synthetic oligonucleotide
gacactgtttgcgagaaaggtaagatctga

SEQ ID NO: 285712 - DNA, 30 bp, Artificial Sequence
  Synthetic oligonucleotide
tgtcgtggccagctctacttaaatatctga

SEQ ID NO: 285713 - DNA, 30 bp, Artificial Sequence
  Synthetic oligonucleotide
cataaggctctgtgattttcgtatatctga

SEQ ID NO: 285714 - DNA, 30 bp, Artificial Sequence
  Synthetic oligonucleotide
gtatagcggatgcgacgaaactcgctctga

SEQ ID NO: 285715 - DNA, 30 bp, Artificial Sequence
  Synthetic oligonucleotide
tccgagtcagttagcaattaatcagtctga

SEQ ID NO: 285716 - DNA, 30 bp, Artificial Sequence
  Synthetic oligonucleotide
gtgtcgagttgaagccctacctgagtctga

SEQ ID NO: 285717 - DNA, 30 bp, Artificial Sequence
  Synthetic oligonucleotide
gtgtatccactccatcctggtgcggtctga

SEQ ID NO: 285718 - DNA, 30 bp, Artificial Sequence
  Synthetic oligonucleotide
gtcagttataagtggcgtgctagggtctga

SEQ ID NO: 285719 - DNA, 30 bp, Artificial Sequence
  Synthetic oligonucleotide
ggtaggcgtttaatacatgaacgggtctga

SEQ ID NO: 285720 - DNA, 30 bp, Artificial Sequence
  Synthetic oligonucleotide
tgaggccaatgaccgactcgggaattctga

SEQ ID NO: 285721 - DNA, 30 bp, Artificial Sequence
  Synthetic oligonucleotide
gaaccatgagaggtattcctatgcttctga

SEQ ID NO: 285722 - DNA, 30 bp, Artificial Sequence
  Synthetic oligonucleotide
tgtgttctggcatgccgggggtaaaagtga

SEQ ID NO: 285723 - DNA, 30 bp, Artificial Sequence
  Synthetic oligonucleotide
agtagggtttagagcaaccgatcaaagtga

SEQ ID NO: 285724 - DNA, 30 bp, Artificial Sequence
  Synthetic oligonucleotide
ccagatctcaaaaaactttgcataaagtga

SEQ ID NO: 285725 - DNA, 30 bp, Artificial Sequence
  Synthetic oligonucleotide
ccggcttaggaccgatgtacgctaaagtga

SEQ ID NO: 285726 - DNA, 30 bp, Artificial Sequence
  Synthetic oligonucleotide
agttcatggtaccccaaatggcacaagtga

SEQ ID NO: 285727 - DNA, 30 bp, Artificial Sequence
  Synthetic oligonucleotide
ccttaagggcgtagagtacctgtcaagtga

SEQ ID NO: 285728 - DNA, 30 bp, Artificial Sequence
  Synthetic oligonucleotide
cgagcgcgttcgagtttagcgacgaagtga

SEQ ID NO: 285729 - DNA, 30 bp, Artificial Sequence
  Synthetic oligonucleotide
tgcaatgcacctgtaacggcctataagtga

SEQ ID NO: 285730 - DNA, 30 bp, Artificial Sequence
  Synthetic oligonucleotide
atcccgctaaggattgatttgcgtaagtga

SEQ ID NO: 285731 - DNA, 30 bp, Artificial Sequence
  Synthetic oligonucleotide
catcggcaggatcgcacgagttttaagtga

SEQ ID NO: 285732 - DNA, 30 bp, Artificial Sequence
  Synthetic oligonucleotide
agggattatcatggttcttgagaacagtga

SEQ ID NO: 285733 - DNA, 30 bp, Artificial Sequence
  Synthetic oligonucleotide
gtttgttttgagaaaggaagggggcagtga

SEQ ID NO: 285734 - DNA, 30 bp, Artificial Sequence
  Synthetic oligonucleotide
tattagtcatcgtcgtttgtttaagagtga

SEQ ID NO: 285735 - DNA, 30 bp, Artificial Sequence
  Synthetic oligonucleotide
tttaccaggtgcgtggctagaccagagtga

SEQ ID NO: 285736 - DNA, 30 bp, Artificial Sequence
  Synthetic oligonucleotide
tgtagttcgccgggctcccattcagagtga

SEQ ID NO: 285737 - DNA, 30 bp, Artificial Sequence
  Synthetic oligonucleotide
ggatcccttctggcgatcgtagacgagtga

SEQ ID NO: 285738 - DNA, 30 bp, Artificial Sequence
  Synthetic oligonucleotide
tggcgacataaacgtttggtatacgagtga

SEQ ID NO: 285739 - DNA, 30 bp, Artificial Sequence
  Synthetic oligonucleotide
ttgtataatggttaagaaaccgccgagtga

SEQ ID NO: 285740 - DNA, 30 bp, Artificial Sequence
  Synthetic oligonucleotide
ttaatggggacttttgcatgcattgagtga

SEQ ID NO: 285741 - DNA, 30 bp, Artificial Sequence
  Synthetic oligonucleotide
gcgaatctgttgtcataggactactagtga

SEQ ID NO: 285742 - DNA, 30 bp, Artificial Sequence
  Synthetic oligonucleotide
tatgtgtctaagttataaagaaagtagtga

SEQ ID NO: 285743 - DNA, 30 bp, Artificial Sequence
  Synthetic oligonucleotide
tattgggtgatggaggtgcaccagtagtga

SEQ ID NO: 285744 - DNA, 30 bp, Artificial Sequence
  Synthetic oligonucleotide
catcggtcttcagtggctacgccgtagtga

SEQ ID NO: 285745 - DNA, 30 bp, Artificial Sequence
  Synthetic oligonucleotide
ggttgttcgacttcccgagctgattagtga

SEQ ID NO: 285746 - DNA, 30 bp, Artificial Sequence
  Synthetic oligonucleotide
catttaagggggcacccttgggcttagtga

SEQ ID NO: 285747 - DNA, 30 bp, Artificial Sequence
  Synthetic oligonucleotide
tctcgggttgtctaacgctgtggaacgtga

SEQ ID NO: 285748 - DNA, 30 bp, Artificial Sequence
  Synthetic oligonucleotide
caatcctaaacgacatgtaagtcgacgtga

SEQ ID NO: 285749 - DNA, 30 bp, Artificial Sequence
  Synthetic oligonucleotide
ctgtggcagaaatcgaacacgtggacgtga

SEQ ID NO: 285750 - DNA, 30 bp, Artificial Sequence
  Synthetic oligonucleotide
taccattcgttatcattgttatttacgtga

SEQ ID NO: 285751 - DNA, 30 bp, Artificial Sequence
  Synthetic oligonucleotide
tactatcggtaatccagataggccccgtga

SEQ ID NO: 285752 - DNA, 30 bp, Artificial Sequence
  Synthetic oligonucleotide
atgctggtctggtaccagcagatcccgtga

SEQ ID NO: 285753 - DNA, 30 bp, Artificial Sequence
  Synthetic oligonucleotide
aagaacatgcgagatgatgaagtcccgtga

SEQ ID NO: 285754 - DNA, 30 bp, Artificial Sequence
  Synthetic oligonucleotide
atcctgtaatgaaacaccacatggccgtga

SEQ ID NO: 285755 - DNA, 30 bp, Artificial Sequence
  Synthetic oligonucleotide
cagcgtcgaggactcgccttgagagcgtga

SEQ ID NO: 285756 - DNA, 30 bp, Artificial Sequence
  Synthetic oligonucleotide
caaaccggtatacgtttgcgcttagcgtga

SEQ ID NO: 285757 - DNA, 30 bp, Artificial Sequence
  Synthetic oligonucleotide
attccgggacgcctccaagtccccgcgtga

SEQ ID NO: 285758 - DNA, 30 bp, Artificial Sequence
  Synthetic oligonucleotide
gattacacgaaggttagggtccgcgcgtga

SEQ ID NO: 285759 - DNA, 30 bp, Artificial Sequence
  Synthetic oligonucleotide
ccgctacctcatctacatttgtcggcgtga

SEQ ID NO: 285760 - DNA, 30 bp, Artificial Sequence
  Synthetic oligonucleotide
agtgagattgaggttcactatgctgcgtga

SEQ ID NO: 285761 - DNA, 30 bp, Artificial Sequence
  Synthetic oligonucleotide
tctgccattgcataaaacggatttgcgtga

SEQ ID NO: 285762 - DNA, 30 bp, Artificial Sequence
  Synthetic oligonucleotide
ggctttagacaaaagtatcgcgaatcgtga

SEQ ID NO: 285763 - DNA, 30 bp, Artificial Sequence
  Synthetic oligonucleotide
tggcggggctgcacctaaagagcatcgtga

SEQ ID NO: 285764 - DNA, 30 bp, Artificial Sequence
  Synthetic oligonucleotide
ctggaacactcacatgcttccggatcgtga

SEQ ID NO: 285765 - DNA, 30 bp, Artificial Sequence
  Synthetic oligonucleotide
gtcatacggtatcattctcgaatatcgtga

SEQ ID NO: 285766 - DNA, 30 bp, Artificial Sequence
  Synthetic oligonucleotide
actatgtttcatcgttataggtcctcgtga

SEQ ID NO: 285767 - DNA, 30 bp, Artificial Sequence
  Synthetic oligonucleotide
taccgcagtagatgagcggaaatttcgtga

SEQ ID NO: 285768 - DNA, 30 bp, Artificial Sequence
  Synthetic oligonucleotide
agcgacgaattcagttctaccggaaggtga

SEQ ID NO: 285769 - DNA, 30 bp, Artificial Sequence
  Synthetic oligonucleotide
aaagcacataagtagatggtacggaggtga

SEQ ID NO: 285770 - DNA, 30 bp, Artificial Sequence
  Synthetic oligonucleotide
gctgaacctgagagacagaaacataggtga

SEQ ID NO: 285771 - DNA, 30 bp, Artificial Sequence
  Synthetic oligonucleotide
gggctgatgggcgtggccggttctaggtga

SEQ ID NO: 285772 - DNA, 30 bp, Artificial Sequence
  Synthetic oligonucleotide
ccgattagtcacattagctgcggtaggtga

SEQ ID NO: 285773 - DNA, 30 bp, Artificial Sequence
  Synthetic oligonucleotide
atttacttatgcgatgctgagattaggtga

SEQ ID NO: 285774 - DNA, 30 bp, Artificial Sequence
  Synthetic oligonucleotide
cgtgtgcgacccctattcctaacacggtga

SEQ ID NO: 285775 - DNA, 30 bp, Artificial Sequence
  Synthetic oligonucleotide
cctcctgggaccctacgggtatcccggtga

SEQ ID NO: 285776 - DNA, 30 bp, Artificial Sequence
  Synthetic oligonucleotide
gcgaccggacgatgcaatgttttccggtga

SEQ ID NO: 285777 - DNA, 30 bp, Artificial Sequence
  Synthetic oligonucleotide
atagtcttatgcgtagtaccgtagcggtga

SEQ ID NO: 285778 - DNA, 30 bp, Artificial Sequence
  Synthetic oligonucleotide
gacatgaaggttcaaagttaggcgcggtga

SEQ ID NO: 285779 - DNA, 30 bp, Artificial Sequence
  Synthetic oligonucleotide
attcatttacagatccgtttgcgtcggtga

SEQ ID NO: 285780 - DNA, 30 bp, Artificial Sequence
  Synthetic oligonucleotide
gatgatgattttaagcgccttattcggtga

SEQ ID NO: 285781 - DNA, 30 bp, Artificial Sequence
  Synthetic oligonucleotide
gcactccagattcgtctctgtgttcggtga

SEQ ID NO: 285782 - DNA, 30 bp, Artificial Sequence
  Synthetic oligonucleotide
ctctgcctggtttacggtgaatcagggtga

SEQ ID NO: 285783 - DNA, 30 bp, Artificial Sequence
  Synthetic oligonucleotide
ttgctgtcctaccgtctaaactcagggtga

SEQ ID NO: 285784 - DNA, 30 bp, Artificial Sequence
  Synthetic oligonucleotide
catccccgttaagcgcattatctagggtga

SEQ ID NO: 285785 - DNA, 30 bp, Artificial Sequence
  Synthetic oligonucleotide
aatagaggatccctaaacgttgacgggtga

SEQ ID NO: 285786 - DNA, 30 bp, Artificial Sequence
  Synthetic oligonucleotide
tgagttcggaacggaagctgatacgggtga

SEQ ID NO: 285787 - DNA, 30 bp, Artificial Sequence
  Synthetic oligonucleotide
tcgtagccacattctcagtggaaggggtga

SEQ ID NO: 285788 - DNA, 30 bp, Artificial Sequence
  Synthetic oligonucleotide
tggtagtacgtttctttcagttcggggtga

SEQ ID NO: 285789 - DNA, 30 bp, Artificial Sequence
  Synthetic oligonucleotide
gtggaacaaacggagttattcctggggtga

SEQ ID NO: 285790 - DNA, 30 bp, Artificial Sequence
  Synthetic oligonucleotide
gcgtcaagacgttggacttcaccatggtga

SEQ ID NO: 285791 - DNA, 30 bp, Artificial Sequence
  Synthetic oligonucleotide
agataaatttagtattagttcgcctggtga

SEQ ID NO: 285792 - DNA, 30 bp, Artificial Sequence
  Synthetic oligonucleotide
gttttggagcgatgtggcaatctctggtga

SEQ ID NO: 285793 - DNA, 30 bp, Artificial Sequence
  Synthetic oligonucleotide
cgagttgcgctttctcttgtggtctggtga

SEQ ID NO: 285794 - DNA, 30 bp, Artificial Sequence
  Synthetic oligonucleotide
caccgtattcgaacgttttgtaagtggtga

SEQ ID NO: 285795 - DNA, 30 bp, Artificial Sequence
  Synthetic oligonucleotide
gcagtcttgctcatgactttgtgaatgtga

SEQ ID NO: 285796 - DNA, 30 bp, Artificial Sequence
  Synthetic oligonucleotide
tggccagtccttggagtcggcataatgtga

SEQ ID NO: 285797 - DNA, 30 bp, Artificial Sequence
  Synthetic oligonucleotide
tgcttcgtggggagcaacctcgtaatgtga

SEQ ID NO: 285798 - DNA, 30 bp, Artificial Sequence
  Synthetic oligonucleotide
ttccggattctggaaccccacgacatgtga

SEQ ID NO: 285799 - DNA, 30 bp, Artificial Sequence
  Synthetic oligonucleotide
atttcagcggtcccagtctctgacatgtga

SEQ ID NO: 285800 - DNA, 30 bp, Artificial Sequence
  Synthetic oligonucleotide
gggtttggcggaactcgtttttacatgtga

SEQ ID NO: 285801 - DNA, 30 bp, Artificial Sequence
  Synthetic oligonucleotide
acttacaactgcggatcataactcatgtga

SEQ ID NO: 285802 - DNA, 30 bp, Artificial Sequence
  Synthetic oligonucleotide
aacaagtaaagagcatacttcttcatgtga

SEQ ID NO: 285803 - DNA, 30 bp, Artificial Sequence
  Synthetic oligonucleotide
ctggtgagtttgagagctaaagagatgtga

SEQ ID NO: 285804 - DNA, 30 bp, Artificial Sequence
  Synthetic oligonucleotide
ctcggctactggaaccgaggcgtgatgtga

SEQ ID NO: 285805 - DNA, 30 bp, Artificial Sequence
  Synthetic oligonucleotide
attgcccaaaagaagataggtcatatgtga

SEQ ID NO: 285806 - DNA, 30 bp, Artificial Sequence
  Synthetic oligonucleotide
atgggtcaacagcgcatcgctatgctgtga

SEQ ID NO: 285807 - DNA, 30 bp, Artificial Sequence
  Synthetic oligonucleotide
tctgtcgttcgaaaaaaggtggtgctgtga

SEQ ID NO: 285808 - DNA, 30 bp, Artificial Sequence
  Synthetic oligonucleotide
tgtgtactcaatgggcctaattgtctgtga

SEQ ID NO: 285809 - DNA, 30 bp, Artificial Sequence
  Synthetic oligonucleotide
gtgcggacggacgatcactgatttctgtga

SEQ ID NO: 285810 - DNA, 30 bp, Artificial Sequence
  Synthetic oligonucleotide
gttctggcatagatagctgaacaagtgtga

SEQ ID NO: 285811 - DNA, 30 bp, Artificial Sequence
  Synthetic oligonucleotide
tgaggactgtttcgacgtctggcagtgtga

SEQ ID NO: 285812 - DNA, 30 bp, Artificial Sequence
  Synthetic oligonucleotide
tgatcctcttcgaaaacatctgccgtgtga

SEQ ID NO: 285813 - DNA, 30 bp, Artificial Sequence
  Synthetic oligonucleotide
accggtattgcgctaaccggattggtgtga

SEQ ID NO: 285814 - DNA, 30 bp, Artificial Sequence
  Synthetic oligonucleotide
gtgttaatgccggctgtctgcttggtgtga

SEQ ID NO: 285815 - DNA, 30 bp, Artificial Sequence
  Synthetic oligonucleotide
agcagcaagaaaagggtagataatgtgtga

SEQ ID NO: 285816 - DNA, 30 bp, Artificial Sequence
  Synthetic oligonucleotide
acagatagccaagcgatttaaattgtgtga

SEQ ID NO: 285817 - DNA, 30 bp, Artificial Sequence
  Synthetic oligonucleotide
gtacattttgtcatagtccttccattgtga

SEQ ID NO: 285818 - DNA, 30 bp, Artificial Sequence
  Synthetic oligonucleotide
ctgggtagataactcctatgtggattgtga

SEQ ID NO: 285819 - DNA, 30 bp, Artificial Sequence
  Synthetic oligonucleotide
atattagctgcctcgtatcaaatattgtga

SEQ ID NO: 285820 - DNA, 30 bp, Artificial Sequence
  Synthetic oligonucleotide
ccggatctttgcgcatgatcaaagttgtga

SEQ ID NO: 285821 - DNA, 30 bp, Artificial Sequence
  Synthetic oligonucleotide
gggtcggaggacatgccggggacaaattga

SEQ ID NO: 285822 - DNA, 30 bp, Artificial Sequence
  Synthetic oligonucleotide
tggtaggttcacacgcatgggccaaattga

SEQ ID NO: 285823 - DNA, 30 bp, Artificial Sequence
  Synthetic oligonucleotide
tcatatcggagaacaggaaggttaaattga

SEQ ID NO: 285824 - DNA, 30 bp, Artificial Sequence
  Synthetic oligonucleotide
tccagacctctgttggtacatgggaattga

SEQ ID NO: 285825 - DNA, 30 bp, Artificial Sequence
  Synthetic oligonucleotide
acggcatttcgctttttgatagttaattga

SEQ ID NO: 285826 - DNA, 30 bp, Artificial Sequence
  Synthetic oligonucleotide
cctggcatggcgcatttgagagcccattga

SEQ ID NO: 285827 - DNA, 30 bp, Artificial Sequence
  Synthetic oligonucleotide
gacatgaaggatgatgggattagccattga

SEQ ID NO: 285828 - DNA, 30 bp, Artificial Sequence
  Synthetic oligonucleotide
taatagaaattgtgtcgacgttatcattga

SEQ ID NO: 285829 - DNA, 30 bp, Artificial Sequence
  Synthetic oligonucleotide
ctctaaatgggtgggtcgcggacagattga

SEQ ID NO: 285830 - DNA, 30 bp, Artificial Sequence
  Synthetic oligonucleotide
tctagtcttataagtcggctcgttgattga

SEQ ID NO: 285831 - DNA, 30 bp, Artificial Sequence
  Synthetic oligonucleotide
tcaagtgacaaagccatgacagtttattga

SEQ ID NO: 285832 - DNA, 31 bp, Artificial Sequence
  Synthetic oligonucleotide
cgactatgtggcttcgcgcttaagaacttga

SEQ ID NO: 285833 - DNA, 30 bp, Artificial Sequence
  Synthetic oligonucleotide
tagatgtgttaagagggttaattaacttga

SEQ ID NO: 285834 - DNA, 30 bp, Artificial Sequence
  Synthetic oligonucleotide
aataatgattttccacgtgctaagacttga

SEQ ID NO: 285835 - DNA, 30 bp, Artificial Sequence
  Synthetic oligonucleotide
ttgttggggggtgcataaattaagacttga

SEQ ID NO: 285836 - DNA, 30 bp, Artificial Sequence
  Synthetic oligonucleotide
agctgggatgctaggtaggcccaaccttga

SEQ ID NO: 285837 - DNA, 30 bp, Artificial Sequence
  Synthetic oligonucleotide
tctagatggaaggctgctgaccagccttga

SEQ ID NO: 285838 - DNA, 30 bp, Artificial Sequence
  Synthetic oligonucleotide
atcagaggagcgctggaaattgggccttga

SEQ ID NO: 285839 - DNA, 30 bp, Artificial Sequence
  Synthetic oligonucleotide
gcccctagttaagggccataatggccttga

SEQ ID NO: 285840 - DNA, 30 bp, Artificial Sequence
  Synthetic oligonucleotide
gtctcgaacagatcaggcccgcatccttga

SEQ ID NO: 285841 - DNA, 30 bp, Artificial Sequence
  Synthetic oligonucleotide
acggtgttagtccataaagtagctccttga

SEQ ID NO: 285842 - DNA, 30 bp, Artificial Sequence
  Synthetic oligonucleotide
tgacagtgtttatttggtgaacaagcttga

SEQ ID NO: 285843 - DNA, 30 bp, Artificial Sequence
  Synthetic oligonucleotide
cacggaccctcagatgttttgccagcttga

SEQ ID NO: 285844 - DNA, 30 bp, Artificial Sequence
  Synthetic oligonucleotide
taggagtatcactagtgacactcagcttga

SEQ ID NO: 285845 - DNA, 30 bp, Artificial Sequence
  Synthetic oligonucleotide
gcaccgcgtctatcaataagggacgcttga

SEQ ID NO: 285846 - DNA, 30 bp, Artificial Sequence
  Synthetic oligonucleotide
tgatcccttggaccgagcatttacgcttga

SEQ ID NO: 285847 - DNA, 30 bp, Artificial Sequence
  Synthetic oligonucleotide
ggaatccgttcacaatcgatagtcgcttga

SEQ ID NO: 285848 - DNA, 30 bp, Artificial Sequence
  Synthetic oligonucleotide
tatacatacttgggggtccgattggcttga

SEQ ID NO: 285849 - DNA, 30 bp, Artificial Sequence
  Synthetic oligonucleotide
agccggcatgaactaggttatttggcttga

SEQ ID NO: 285850 - DNA, 30 bp, Artificial Sequence
  Synthetic oligonucleotide
tgtaaaactggcttaaaaactaaatcttga

SEQ ID NO: 285851 - DNA, 30 bp, Artificial Sequence
  Synthetic oligonucleotide
ggagcactcattattatgttaccatcttga

SEQ ID NO: 285852 - DNA, 30 bp, Artificial Sequence
  Synthetic oligonucleotide
ttacaacgaagcggttattcgggatcttga

SEQ ID NO: 285853 - DNA, 30 bp, Artificial Sequence
  Synthetic oligonucleotide
aaaaaacctgcttgcggtgcgcactcttga

SEQ ID NO: 285854 - DNA, 30 bp, Artificial Sequence
  Synthetic oligonucleotide
ggttttagggccaaactcataagctcttga

SEQ ID NO: 285855 - DNA, 30 bp, Artificial Sequence
  Synthetic oligonucleotide
tcgggatggttagcccagtatagctcttga

SEQ ID NO: 285856 - DNA, 30 bp, Artificial Sequence
  Synthetic oligonucleotide
tgtccagctccgtttccaatgatctcttga

SEQ ID NO: 285857 - DNA, 30 bp, Artificial Sequence
  Synthetic oligonucleotide
gtctatcaccagacctccggggagtcttga

SEQ ID NO: 285858 - DNA, 30 bp, Artificial Sequence
  Synthetic oligonucleotide
agactaacagaggaagccagttagtcttga

SEQ ID NO: 285859 - DNA, 30 bp, Artificial Sequence
  Synthetic oligonucleotide
gtgaaagacttagtaagtgctacgtcttga

SEQ ID NO: 285860 - DNA, 30 bp, Artificial Sequence
  Synthetic oligonucleotide
atgaagcctggactccctccttcgtcttga

SEQ ID NO: 285861 - DNA, 30 bp, Artificial Sequence
  Synthetic oligonucleotide
cggcttaggtacagcgggaggcggtcttga

SEQ ID NO: 285862 - DNA, 30 bp, Artificial Sequence
  Synthetic oligonucleotide
cggatcctgtcgttagtggaagggtcttga

SEQ ID NO: 285863 - DNA, 30 bp, Artificial Sequence
  Synthetic oligonucleotide
cggatccaacggccactgaacccttcttga

SEQ ID NO: 285864 - DNA, 30 bp, Artificial Sequence
  Synthetic oligonucleotide
aactattggcaaggattccagatttcttga

SEQ ID NO: 285865 - DNA, 30 bp, Artificial Sequence
  Synthetic oligonucleotide
aggaggggcacaaactgggcctaaagttga

SEQ ID NO: 285866 - DNA, 30 bp, Artificial Sequence
  Synthetic oligonucleotide
ttgcatgccgcttttgtatccccaagttga

SEQ ID NO: 285867 - DNA, 30 bp, Artificial Sequence
  Synthetic oligonucleotide
tcattactcgggcaagaaactgagagttga

SEQ ID NO: 285868 - DNA, 30 bp, Artificial Sequence
  Synthetic oligonucleotide
gtactctcgggctataggactccgagttga

SEQ ID NO: 285869 - DNA, 30 bp, Artificial Sequence
  Synthetic oligonucleotide
tagtagcaacgttctaggccgcatagttga

SEQ ID NO: 285870 - DNA, 29 bp, Artificial Sequence
  Synthetic oligonucleotide
gagcaatgagcctttggtaggatagttga

SEQ ID NO: 285871 - DNA, 30 bp, Artificial Sequence
  Synthetic oligonucleotide
aagttgcaaggaactttaaagtaccgttga

SEQ ID NO: 285872 - DNA, 30 bp, Artificial Sequence
  Synthetic oligonucleotide
tcgccgctccgcgcataacgatcgcgttga

SEQ ID NO: 285873 - DNA, 30 bp, Artificial Sequence
  Synthetic oligonucleotide
aagaccgcctagacacttaataggcgttga

SEQ ID NO: 285874 - DNA, 30 bp, Artificial Sequence
  Synthetic oligonucleotide
ttagtgaattcactcaagtacgggcgttga

SEQ ID NO: 285875 - DNA, 30 bp, Artificial Sequence
  Synthetic oligonucleotide
ataccggattacgtggatctagctcgttga

SEQ ID NO: 285876 - DNA, 30 bp, Artificial Sequence
  Synthetic oligonucleotide
ttaaaggagctgaaattcggataaggttga

SEQ ID NO: 285877 - DNA, 30 bp, Artificial Sequence
  Synthetic oligonucleotide
ttccctataactgatacgaagtgaggttga

SEQ ID NO: 285878 - DNA, 30 bp, Artificial Sequence
  Synthetic oligonucleotide
cgcaattgaacgatctgcacgagcggttga

SEQ ID NO: 285879 - DNA, 30 bp, Artificial Sequence
  Synthetic oligonucleotide
ggaaggctgtagatcacaattttcggttga

SEQ ID NO: 285880 - DNA, 30 bp, Artificial Sequence
  Synthetic oligonucleotide
actcccactcgcatcttcgaagagggttga

SEQ ID NO: 285881 - DNA, 30 bp, Artificial Sequence
  Synthetic oligonucleotide
gatggcataagccagtagacaattggttga

SEQ ID NO: 285882 - DNA, 30 bp, Artificial Sequence
  Synthetic oligonucleotide
attgatatcacgacacctatgtaatgttga

SEQ ID NO: 285883 - DNA, 30 bp, Artificial Sequence
  Synthetic oligonucleotide
tggggatcaatttcactttgttgctgttga

SEQ ID NO: 285884 - DNA, 30 bp, Artificial Sequence
  Synthetic oligonucleotide
aaaatccaggcacgtaacccattgtgttga

SEQ ID NO: 285885 - DNA, 30 bp, Artificial Sequence
  Synthetic oligonucleotide
tgtagtctaacaggatcaaagttgtgttga

SEQ ID NO: 285886 - DNA, 30 bp, Artificial Sequence
  Synthetic oligonucleotide
agatcgcttgggaccctccacgcttgttga

SEQ ID NO: 285887 - DNA, 30 bp, Artificial Sequence
  Synthetic oligonucleotide
gcggtaggagaccggctgctagcaatttga

SEQ ID NO: 285888 - DNA, 30 bp, Artificial Sequence
  Synthetic oligonucleotide
tgcgacgacgacaacgccttgcacatttga

SEQ ID NO: 285889 - DNA, 30 bp, Artificial Sequence
  Synthetic oligonucleotide
ggcttattgtttcaaccgccccccatttga

SEQ ID NO: 285890 - DNA, 30 bp, Artificial Sequence
  Synthetic oligonucleotide
acagctaactccagtcggatactcatttga

SEQ ID NO: 285891 - DNA, 30 bp, Artificial Sequence
  Synthetic oligonucleotide
tggtaactaagagtaaagtctaggatttga

SEQ ID NO: 285892 - DNA, 30 bp, Artificial Sequence
  Synthetic oligonucleotide
tgttagtactcaccttgtgacgggatttga

SEQ ID NO: 285893 - DNA, 30 bp, Artificial Sequence
  Synthetic oligonucleotide
tcggataaattaggaggccggccactttga

SEQ ID NO: 285894 - DNA, 30 bp, Artificial Sequence
  Synthetic oligonucleotide
ttcaccttggtacatgagcaggcgctttga

SEQ ID NO: 285895 - DNA, 30 bp, Artificial Sequence
  Synthetic oligonucleotide
atctgccgtgaagtctacctgaatctttga

SEQ ID NO: 285896 - DNA, 30 bp, Artificial Sequence
  Synthetic oligonucleotide
gtgtcccctttgacagtatggctagtttga

SEQ ID NO: 285897 - DNA, 30 bp, Artificial Sequence
  Synthetic oligonucleotide
ggtctgaaggagtacgagatccccgtttga

SEQ ID NO: 285898 - DNA, 30 bp, Artificial Sequence
  Synthetic oligonucleotide
ccagattgtggtacttaaacgagcgtttga

SEQ ID NO: 285899 - DNA, 30 bp, Artificial Sequence
  Synthetic oligonucleotide
atacggttggtaattattgacagggtttga

SEQ ID NO: 285900 - DNA, 30 bp, Artificial Sequence
  Synthetic oligonucleotide
atccagaggtcgaacaagtagttattttga

SEQ ID NO: 285901 - DNA, 30 bp, Artificial Sequence
  Synthetic oligonucleotide
aacggcccgttgaggccaaggaacttttga

SEQ ID NO: 285902 - DNA, 30 bp, Artificial Sequence
  Synthetic oligonucleotide
gcgcgatacggtcttttataacccttttga

SEQ ID NO: 285903 - DNA, 30 bp, Artificial Sequence
  Synthetic oligonucleotide
tttgatgtcggtaaagggcgcgagttttga

SEQ ID NO: 285904 - DNA, 30 bp, Artificial Sequence
  Synthetic oligonucleotide
taaactacaagcactacaaacacgttttga

SEQ ID NO: 285905 - DNA, 30 bp, Artificial Sequence
  Synthetic oligonucleotide
ctcatgtggagttcaagcgatagaaaaata

SEQ ID NO: 285906 - DNA, 30 bp, Artificial Sequence
  Synthetic oligonucleotide
catgcatataggtccaacagctacaaaata

SEQ ID NO: 285907 - DNA, 30 bp, Artificial Sequence
  Synthetic oligonucleotide
aggttattcaaggtgggttataccaaaata

SEQ ID NO: 285908 - DNA, 30 bp, Artificial Sequence
  Synthetic oligonucleotide
ctatcccaaggttgggggatacagaaaata

SEQ ID NO: 285909 - DNA, 30 bp, Artificial Sequence
  Synthetic oligonucleotide
atcttagatgagttaccgattcagaaaata

SEQ ID NO: 285910 - DNA, 30 bp, Artificial Sequence
  Synthetic oligonucleotide
tgtggtagggactgttaacgttagaaaata

SEQ ID NO: 285911 - DNA, 30 bp, Artificial Sequence
  Synthetic oligonucleotide
ctctgagttacttgccgaagatcgaaaata

SEQ ID NO: 285912 - DNA, 30 bp, Artificial Sequence
  Synthetic oligonucleotide
acgggtaatatctttctaatgtctaaaata

SEQ ID NO: 285913 - DNA, 30 bp, Artificial Sequence
  Synthetic oligonucleotide
caggccaccctctggaaatatagtaaaata

SEQ ID NO: 285914 - DNA, 30 bp, Artificial Sequence
  Synthetic oligonucleotide
tgatgcgagtcataagaggattcccaaata

SEQ ID NO: 285915 - DNA, 30 bp, Artificial Sequence
  Synthetic oligonucleotide
cgcatatccggaccgaggtactcgcaaata

SEQ ID NO: 285916 - DNA, 30 bp, Artificial Sequence
  Synthetic oligonucleotide
gcagctaaaggcggcaatcattcgcaaata

SEQ ID NO: 285917 - DNA, 30 bp, Artificial Sequence
  Synthetic oligonucleotide
ccggcggaaaatatgcggaaaaggcaaata

SEQ ID NO: 285918 - DNA, 30 bp, Artificial Sequence
  Synthetic oligonucleotide
taaatgtcggggaaattatcgaggcaaata

SEQ ID NO: 285919 - DNA, 30 bp, Artificial Sequence
  Synthetic oligonucleotide
gcctgaagacgaccctgacaaaatcaaata

SEQ ID NO: 285920 - DNA, 30 bp, Artificial Sequence
  Synthetic oligonucleotide
actttcctggcggaagtgcgcaatcaaata

SEQ ID NO: 285921 - DNA, 30 bp, Artificial Sequence
  Synthetic oligonucleotide
ccggccaatctagagctcggatctcaaata

SEQ ID NO: 285922 - DNA, 30 bp, Artificial Sequence
  Synthetic oligonucleotide
gcttaatgatagacatcactccgtcaaata

SEQ ID NO: 285923 - DNA, 30 bp, Artificial Sequence
  Synthetic oligonucleotide
gtgcgccgtaggatgagcgccgttcaaata

SEQ ID NO: 285924 - DNA, 30 bp, Artificial Sequence
  Synthetic oligonucleotide
acccatgccaaggtgtaacgtgttcaaata

SEQ ID NO: 285925 - DNA, 30 bp, Artificial Sequence
  Synthetic oligonucleotide
taaccatgatccaggtcccaacccgaaata

SEQ ID NO: 285926 - DNA, 30 bp, Artificial Sequence
  Synthetic oligonucleotide
catgtcggagcatcggggctagccgaaata

SEQ ID NO: 285927 - DNA, 30 bp, Artificial Sequence
  Synthetic oligonucleotide
tcttaaggcctgtggtgaggacgcgaaata

SEQ ID NO: 285928 - DNA, 30 bp, Artificial Sequence
  Synthetic oligonucleotide
ttgcccggatggtcgctagggtgcgaaata

SEQ ID NO: 285929 - DNA, 30 bp, Artificial Sequence
  Synthetic oligonucleotide
acttaaggcgattctcatttcatcgaaata

SEQ ID NO: 285930 - DNA, 30 bp, Artificial Sequence
  Synthetic oligonucleotide
gcgtggccaagatgccgctcccaggaaata

SEQ ID NO: 285931 - DNA, 30 bp, Artificial Sequence
  Synthetic oligonucleotide
gagggccctaagtgatggccttgggaaata

SEQ ID NO: 285932 - DNA, 30 bp, Artificial Sequence
  Synthetic oligonucleotide
gtgaggagcgtatactcacaaaatgaaata

SEQ ID NO: 285933 - DNA, 30 bp, Artificial Sequence
  Synthetic oligonucleotide
ctaggggttttagatgctacccgtgaaata

SEQ ID NO: 285934 - DNA, 30 bp, Artificial Sequence
  Synthetic oligonucleotide
tcagcacagccgagctcagaggttgaaata

SEQ ID NO: 285935 - DNA, 30 bp, Artificial Sequence
  Synthetic oligonucleotide
tgcccgctaaatactcgttttaaataaata

SEQ ID NO: 285936 - DNA, 30 bp, Artificial Sequence
  Synthetic oligonucleotide
taacgtcgtggaagtactgtatgataaata

SEQ ID NO: 285937 - DNA, 30 bp, Artificial Sequence
  Synthetic oligonucleotide
gtaggtgtcgtggtcagtgtcctctaaata

SEQ ID NO: 285938 - DNA, 30 bp, Artificial Sequence
  Synthetic oligonucleotide
tctacgacgcggaggtattaccagtaaata

SEQ ID NO: 285939 - DNA, 30 bp, Artificial Sequence
  Synthetic oligonucleotide
cgcgagtctgcgtgccctcgtccgtaaata

SEQ ID NO: 285940 - DNA, 30 bp, Artificial Sequence
  Synthetic oligonucleotide
cgggataccgttatatttgaacggtaaata

SEQ ID NO: 285941 - DNA, 30 bp, Artificial Sequence
  Synthetic oligonucleotide
ctgtctttatgtggaaacagactgtaaata

SEQ ID NO: 285942 - DNA, 30 bp, Artificial Sequence
  Synthetic oligonucleotide
gatgtcactctgctaaactcagtgtaaata

SEQ ID NO: 285943 - DNA, 30 bp, Artificial Sequence
  Synthetic oligonucleotide
agtccctcgagtataagagctagttaaata

SEQ ID NO: 285944 - DNA, 30 bp, Artificial Sequence
  Synthetic oligonucleotide
gtcgcctagatagcccggggcttttaaata

SEQ ID NO: 285945 - DNA, 30 bp, Artificial Sequence
  Synthetic oligonucleotide
cgcgttaaaggagcttaagttttttaaata

SEQ ID NO: 285946 - DNA, 30 bp, Artificial Sequence
  Synthetic oligonucleotide
tgtacgaaggtccccgatccttaaacaata

SEQ ID NO: 285947 - DNA, 30 bp, Artificial Sequence
  Synthetic oligonucleotide
tcattacatacctaccggtttccaacaata

SEQ ID NO: 285948 - DNA, 30 bp, Artificial Sequence
  Synthetic oligonucleotide
aattcaaatgctgacgagactagaacaata

SEQ ID NO: 285949 - DNA, 30 bp, Artificial Sequence
  Synthetic oligonucleotide
ggtccgatgagtcctaagcgattaacaata

SEQ ID NO: 285950 - DNA, 30 bp, Artificial Sequence
  Synthetic oligonucleotide
tatagaatgcgttgcgaatggaacacaata

SEQ ID NO: 285951 - DNA, 30 bp, Artificial Sequence
  Synthetic oligonucleotide
caggataaactgctagctgcttacacaata

SEQ ID NO: 285952 - DNA, 30 bp, Artificial Sequence
  Synthetic oligonucleotide
ttaccactggtaatcgatgggctcacaata

SEQ ID NO: 285953 - DNA, 31 bp, Artificial Sequence
  Synthetic oligonucleotide
atacacttattattaccgggaggagacaata

SEQ ID NO: 285954 - DNA, 30 bp, Artificial Sequence
  Synthetic oligonucleotide
tgtccggcgacgtcccaatatcctacaata

SEQ ID NO: 285955 - DNA, 30 bp, Artificial Sequence
  Synthetic oligonucleotide
tttaccgtgcgcgatacgaaataaccaata

SEQ ID NO: 285956 - DNA, 30 bp, Artificial Sequence
  Synthetic oligonucleotide
aaagtcggtaacttggttggtacaccaata

SEQ ID NO: 285957 - DNA, 30 bp, Artificial Sequence
  Synthetic oligonucleotide
ttcagcctgcggagacacaagagaccaata

SEQ ID NO: 285958 - DNA, 30 bp, Artificial Sequence
  Synthetic oligonucleotide
taacggttaacgaggttggttagaccaata

SEQ ID NO: 285959 - DNA, 30 bp, Artificial Sequence
  Synthetic oligonucleotide
gcccgtacatctgacctacgcgagccaata

SEQ ID NO: 285960 - DNA, 30 bp, Artificial Sequence
  Synthetic oligonucleotide
cggcgataggcagtcctatcacggccaata

SEQ ID NO: 285961 - DNA, 30 bp, Artificial Sequence
  Synthetic oligonucleotide
gacacgcgcatgagtcagatactgccaata

SEQ ID NO: 285962 - DNA, 30 bp, Artificial Sequence
  Synthetic oligonucleotide
tcttaagcgcgtcaagaatacagtccaata

SEQ ID NO: 285963 - DNA, 30 bp, Artificial Sequence
  Synthetic oligonucleotide
gtttgattgaatccttaatatggcgcaata

SEQ ID NO: 285964 - DNA, 30 bp, Artificial Sequence
  Synthetic oligonucleotide
tggcacctaaataaggtgatgcaggcaata

SEQ ID NO: 285965 - DNA, 30 bp, Artificial Sequence
  Synthetic oligonucleotide
agggttcattgtgtggggcacacggcaata

SEQ ID NO: 285966 - DNA, 30 bp, Artificial Sequence
  Synthetic oligonucleotide
taagtttctctctagcgataaggggcaata

SEQ ID NO: 285967 - DNA, 30 bp, Artificial Sequence
  Synthetic oligonucleotide
ttcggtcaataaaaaagacggtgggcaata

SEQ ID NO: 285968 - DNA, 30 bp, Artificial Sequence
  Synthetic oligonucleotide
tcacgtagaagatgctagttagatgcaata

SEQ ID NO: 285969 - DNA, 30 bp, Artificial Sequence
  Synthetic oligonucleotide
cggaggttatgtggatctcagcgtgcaata

SEQ ID NO: 285970 - DNA, 30 bp, Artificial Sequence
  Synthetic oligonucleotide
gtatcaattaagggtcggtgtattgcaata

SEQ ID NO: 285971 - DNA, 30 bp, Artificial Sequence
  Synthetic oligonucleotide
tctgggatccccacgggtacagaatcaata

SEQ ID NO: 285972 - DNA, 27 bp, Artificial Sequence
  Synthetic oligonucleotide
atgggtcgtgcaaccagtgaatcaata

SEQ ID NO: 285973 - DNA, 30 bp, Artificial Sequence
  Synthetic oligonucleotide
gaattaagaggcgacctttggacatcaata

SEQ ID NO: 285974 - DNA, 30 bp, Artificial Sequence
  Synthetic oligonucleotide
accttttacgtaggcaccaagtgatcaata

SEQ ID NO: 285975 - DNA, 30 bp, Artificial Sequence
  Synthetic oligonucleotide
agtaagcagaagtattccatgatatcaata

SEQ ID NO: 285976 - DNA, 30 bp, Artificial Sequence
  Synthetic oligonucleotide
ctcgaatctaaaactactagtaactcaata

SEQ ID NO: 285977 - DNA, 30 bp, Artificial Sequence
  Synthetic oligonucleotide
gcatctcatttgtatcagcgacactcaata

SEQ ID NO: 285978 - DNA, 30 bp, Artificial Sequence
  Synthetic oligonucleotide
ggaggtccgtacagttggtctcactcaata

SEQ ID NO: 285979 - DNA, 30 bp, Artificial Sequence
  Synthetic oligonucleotide
caccacgatatatggatttaaggctcaata

SEQ ID NO: 285980 - DNA, 30 bp, Artificial Sequence
  Synthetic oligonucleotide
ggaggggttgcgtcgttgactctctcaata

SEQ ID NO: 285981 - DNA, 30 bp, Artificial Sequence
  Synthetic oligonucleotide
ctattcattttcagtatgtatctgtcaata

SEQ ID NO: 285982 - DNA, 30 bp, Artificial Sequence
  Synthetic oligonucleotide
cgcttctagcgtgagacctcactaagaata

SEQ ID NO: 285983 - DNA, 30 bp, Artificial Sequence
  Synthetic oligonucleotide
aatacgtacatggagttcgactgcagaata

SEQ ID NO: 285984 - DNA, 30 bp, Artificial Sequence
  Synthetic oligonucleotide
aatgtatagcgtaaacgactacagagaata

SEQ ID NO: 285985 - DNA, 30 bp, Artificial Sequence
  Synthetic oligonucleotide
gttcaagtgacaggtaataagtagagaata

SEQ ID NO: 285986 - DNA, 30 bp, Artificial Sequence
  Synthetic oligonucleotide
tataacggatccatagctaaaacgagaata

SEQ ID NO: 285987 - DNA, 30 bp, Artificial Sequence
  Synthetic oligonucleotide
gagtcaaaggcttatgtgtgggggagaata

SEQ ID NO: 285988 - DNA, 30 bp, Artificial Sequence
  Synthetic oligonucleotide
aacacgctagctgtgtaaaattggagaata

SEQ ID NO: 285989 - DNA, 30 bp, Artificial Sequence
  Synthetic oligonucleotide
agaccatggcgaggcgggatatatagaata

SEQ ID NO: 285990 - DNA, 30 bp, Artificial Sequence
  Synthetic oligonucleotide
ttcagaaaaaatagagcttgaaaacgaata

SEQ ID NO: 285991 - DNA, 30 bp, Artificial Sequence
  Synthetic oligonucleotide
gaagggtcccgctccatattcctacgaata

SEQ ID NO: 285992 - DNA, 30 bp, Artificial Sequence
  Synthetic oligonucleotide
caggaacgccgaccttcaaaggcgcgaata

SEQ ID NO: 285993 - DNA, 30 bp, Artificial Sequence
  Synthetic oligonucleotide
acgtttggtttccaacgtactcggcgaata

SEQ ID NO: 285994 - DNA, 30 bp, Artificial Sequence
  Synthetic oligonucleotide
taaaatgagcgcaatgggcttcggcgaata

SEQ ID NO: 285995 - DNA, 30 bp, Artificial Sequence
  Synthetic oligonucleotide
caaccgatccaaaatcttaaacatcgaata

SEQ ID NO: 285996 - DNA, 30 bp, Artificial Sequence
  Synthetic oligonucleotide
aggcctggacgatgcgtaggaggaggaata

SEQ ID NO: 285997 - DNA, 30 bp, Artificial Sequence
  Synthetic oligonucleotide
atggctacaatgtagtccctgtgaggaata

SEQ ID NO: 285998 - DNA, 27 bp, Artificial Sequence
  Synthetic oligonucleotide
ccggtgctatggtacgattgaggaata

SEQ ID NO: 285999 - DNA, 30 bp, Artificial Sequence
  Synthetic oligonucleotide
gagtcactaacaagtttcgtaataggaata

SEQ ID NO: 286000 - DNA, 30 bp, Artificial Sequence
  Synthetic oligonucleotide
cacacataggacaatcagggcaacggaata

SEQ ID NO: 286001 - DNA, 30 bp, Artificial Sequence
  Synthetic oligonucleotide
cacggtgttgcaaagagcaaggccggaata

SEQ ID NO: 286002 - DNA, 30 bp, Artificial Sequence
  Synthetic oligonucleotide
tagatattactcaaatgtagaggcggaata

SEQ ID NO: 286003 - DNA, 30 bp, Artificial Sequence
  Synthetic oligonucleotide
cggttactgaggcagtaaaaatagggaata

SEQ ID NO: 286004 - DNA, 30 bp, Artificial Sequence
  Synthetic oligonucleotide
gcagggattcaggttcgttgtaggggaata

SEQ ID NO: 286005 - DNA, 30 bp, Artificial Sequence
  Synthetic oligonucleotide
tccatcacgccatcacgcggtcggggaata

SEQ ID NO: 286006 - DNA, 30 bp, Artificial Sequence
  Synthetic oligonucleotide
tcgatatagtagttgaatggtgggggaata

SEQ ID NO: 286007 - DNA, 30 bp, Artificial Sequence
  Synthetic oligonucleotide
gtttggagctctgacagagctttgggaata

SEQ ID NO: 286008 - DNA, 30 bp, Artificial Sequence
  Synthetic oligonucleotide
taatgcacgctcacggtcctgtctggaata

SEQ ID NO: 286009 - DNA, 30 bp, Artificial Sequence
  Synthetic oligonucleotide
aagagtcatgtaggcgggtatagtggaata

SEQ ID NO: 286010 - DNA, 30 bp, Artificial Sequence
  Synthetic oligonucleotide
gaaagtagaacgttcagccacaaatgaata

SEQ ID NO: 286011 - DNA, 30 bp, Artificial Sequence
  Synthetic oligonucleotide
gaacacacttgcggtccagatgaatgaata

SEQ ID NO: 286012 - DNA, 30 bp, Artificial Sequence
  Synthetic oligonucleotide
gcatctatcgccgtaatcctgtaatgaata

SEQ ID NO: 286013 - DNA, 30 bp, Artificial Sequence
  Synthetic oligonucleotide
gctatcgcaacgcgcaaatgatcatgaata

SEQ ID NO: 286014 - DNA, 30 bp, Artificial Sequence
  Synthetic oligonucleotide
cccatgcatgccgggaggcatcgctgaata

SEQ ID NO: 286015 - DNA, 30 bp, Artificial Sequence
  Synthetic oligonucleotide
catgtgcattaggcaccgttcctgtgaata

SEQ ID NO: 286016 - DNA, 30 bp, Artificial Sequence
  Synthetic oligonucleotide
acctaatctgttagagcagatgattgaata

SEQ ID NO: 286017 - DNA, 30 bp, Artificial Sequence
  Synthetic oligonucleotide
atcgatagttctgtgagcatgcgttgaata

SEQ ID NO: 286018 - DNA, 30 bp, Artificial Sequence
  Synthetic oligonucleotide
aggaatacgcatcgtatgcaggaaataata

SEQ ID NO: 286019 - DNA, 30 bp, Artificial Sequence
  Synthetic oligonucleotide
atcgtatcagtataagctgaaggaataata

SEQ ID NO: 286020 - DNA, 30 bp, Artificial Sequence
  Synthetic oligonucleotide
gatttggacatgtaaaagcaacccataata

SEQ ID NO: 286021 - DNA, 30 bp, Artificial Sequence
  Synthetic oligonucleotide
caattccacctggacatgatcgccataata

SEQ ID NO: 286022 - DNA, 30 bp, Artificial Sequence
  Synthetic oligonucleotide
ggatagggaatttctgttaacaagataata

SEQ ID NO: 286023 - DNA, 30 bp, Artificial Sequence
  Synthetic oligonucleotide
aggctttgcaatgggacacccagtataata

SEQ ID NO: 286024 - DNA, 30 bp, Artificial Sequence
  Synthetic oligonucleotide
acaaggtggaagatacacaagcgcctaata

SEQ ID NO: 286025 - DNA, 30 bp, Artificial Sequence
  Synthetic oligonucleotide
gagagatcagtctgacaatatcgcctaata

SEQ ID NO: 286026 - DNA, 30 bp, Artificial Sequence
  Synthetic oligonucleotide
ctgaatcgatgggcgggatgtggcctaata

SEQ ID NO: 286027 - DNA, 30 bp, Artificial Sequence
  Synthetic oligonucleotide
acatacgaccatgatctaaggctcctaata

SEQ ID NO: 286028 - DNA, 30 bp, Artificial Sequence
  Synthetic oligonucleotide
accatgcgtgggaatgcggcgaaagtaata

SEQ ID NO: 286029 - DNA, 30 bp, Artificial Sequence
  Synthetic oligonucleotide
taaattagcaaaacctgggactaagtaata

SEQ ID NO: 286030 - DNA, 30 bp, Artificial Sequence
  Synthetic oligonucleotide
taccaccaacagtaaagggactcagtaata

SEQ ID NO: 286031 - DNA, 30 bp, Artificial Sequence
  Synthetic oligonucleotide
cgcctaggctttcgttggcggtgagtaata

SEQ ID NO: 286032 - DNA, 30 bp, Artificial Sequence
  Synthetic oligonucleotide
ggttgcaaccgggtgcacaaggtcgtaata

SEQ ID NO: 286033 - DNA, 30 bp, Artificial Sequence
  Synthetic oligonucleotide
cctgcacatttgcttgtgataaaggtaata

SEQ ID NO: 286034 - DNA, 30 bp, Artificial Sequence
  Synthetic oligonucleotide
gtatttactaccaagagtagaacggtaata

SEQ ID NO: 286035 - DNA, 30 bp, Artificial Sequence
  Synthetic oligonucleotide
cgtgcgtacccccgcgtacgtacggtaata

SEQ ID NO: 286036 - DNA, 29 bp, Artificial Sequence
  Synthetic oligonucleotide
ttcaatgggatgtcattccaagggtaata

SEQ ID NO: 286037 - DNA, 31 bp, Artificial Sequence
  Synthetic oligonucleotide
aaggaaatccctcgagtgattgtgggtaata

SEQ ID NO: 286038 - DNA, 30 bp, Artificial Sequence
  Synthetic oligonucleotide
cccaggccaggagacctcacactggtaata

SEQ ID NO: 286039 - DNA, 30 bp, Artificial Sequence
  Synthetic oligonucleotide
tgggtcaagtgttaaggaccaaatgtaata

SEQ ID NO: 286040 - DNA, 30 bp, Artificial Sequence
  Synthetic oligonucleotide
atacttcaacggggtttcgtaactgtaata

SEQ ID NO: 286041 - DNA, 30 bp, Artificial Sequence
  Synthetic oligonucleotide
tgagctttaaatagagatattattgtaata

SEQ ID NO: 286042 - DNA, 30 bp, Artificial Sequence
  Synthetic oligonucleotide
tagaaattcgaaccccagtaccttgtaata

SEQ ID NO: 286043 - DNA, 30 bp, Artificial Sequence
  Synthetic oligonucleotide
ttagggatggggactcacggcacattaata

SEQ ID NO: 286044 - DNA, 30 bp, Artificial Sequence
  Synthetic oligonucleotide
acatgccaaaagggcaaccgtccattaata

SEQ ID NO: 286045 - DNA, 30 bp, Artificial Sequence
  Synthetic oligonucleotide
agcatgtgattaacagagcaatgattaata

SEQ ID NO: 286046 - DNA, 30 bp, Artificial Sequence
  Synthetic oligonucleotide
ggtctagcaggggcactaatatgattaata

SEQ ID NO: 286047 - DNA, 30 bp, Artificial Sequence
  Synthetic oligonucleotide
cccgtgtacaatccggaaggactattaata

SEQ ID NO: 286048 - DNA, 30 bp, Artificial Sequence
  Synthetic oligonucleotide
ctaactgtttagatatcaggtaacttaata

SEQ ID NO: 286049 - DNA, 30 bp, Artificial Sequence
  Synthetic oligonucleotide
ataaaaaaagagctatttgcgagcttaata

SEQ ID NO: 286050 - DNA, 30 bp, Artificial Sequence
  Synthetic oligonucleotide
ttgcatatgactgtccgctaatggttaata

SEQ ID NO: 286051 - DNA, 30 bp, Artificial Sequence
  Synthetic oligonucleotide
cggtcagcgggcggttatgtgaaaaacata

SEQ ID NO: 286052 - DNA, 30 bp, Artificial Sequence
  Synthetic oligonucleotide
atcccattcgcgtgagactggtaaaacata

SEQ ID NO: 286053 - DNA, 30 bp, Artificial Sequence
  Synthetic oligonucleotide
ccaccgtaacgtcagtgtgaaataaacata

SEQ ID NO: 286054 - DNA, 30 bp, Artificial Sequence
  Synthetic oligonucleotide
aaccaggtccgacgggggatcgacaacata

SEQ ID NO: 286055 - DNA, 30 bp, Artificial Sequence
  Synthetic oligonucleotide
cctatagctttaggtgggaatcccaacata

SEQ ID NO: 286056 - DNA, 30 bp, Artificial Sequence
  Synthetic oligonucleotide
tattggactctaagaccgttagtgaacata

SEQ ID NO: 286057 - DNA, 30 bp, Artificial Sequence
  Synthetic oligonucleotide
aagaaagtgggggcagccaaggtgaacata

SEQ ID NO: 286058 - DNA, 30 bp, Artificial Sequence
  Synthetic oligonucleotide
tcgctattatacaacaacagccgacacata

SEQ ID NO: 286059 - DNA, 30 bp, Artificial Sequence
  Synthetic oligonucleotide
ctagagtcaggagtctcaatctgccacata

SEQ ID NO: 286060 - DNA, 30 bp, Artificial Sequence
  Synthetic oligonucleotide
ccggagagttcataaagcgactatcacata

SEQ ID NO: 286061 - DNA, 30 bp, Artificial Sequence
  Synthetic oligonucleotide
tggtttagcgctgacgagctctcagacata

SEQ ID NO: 286062 - DNA, 30 bp, Artificial Sequence
  Synthetic oligonucleotide
ggtgctacgggccgtaccccaatagacata

SEQ ID NO: 286063 - DNA, 30 bp, Artificial Sequence
  Synthetic oligonucleotide
agtatttaaatgatctcggaagtagacata

SEQ ID NO: 286064 - DNA, 30 bp, Artificial Sequence
  Synthetic oligonucleotide
aaggttataatttgcgatattcgcgacata

SEQ ID NO: 286065 - DNA, 30 bp, Artificial Sequence
  Synthetic oligonucleotide
gttgaagggattagcgatgcgggcgacata

SEQ ID NO: 286066 - DNA, 30 bp, Artificial Sequence
  Synthetic oligonucleotide
gatgcaggagcagtacacctcagggacata

SEQ ID NO: 286067 - DNA, 30 bp, Artificial Sequence
  Synthetic oligonucleotide
tttcctgggtcaggggaggattgggacata

SEQ ID NO: 286068 - DNA, 30 bp, Artificial Sequence
  Synthetic oligonucleotide
tgggaggacacagacattattaatgacata

SEQ ID NO: 286069 - DNA, 30 bp, Artificial Sequence
  Synthetic oligonucleotide
acgtttcgaacagtgtggtctagatacata

SEQ ID NO: 286070 - DNA, 30 bp, Artificial Sequence
  Synthetic oligonucleotide
tcttcccatattagtccgcccccctacata

SEQ ID NO: 286071 - DNA, 30 bp, Artificial Sequence
  Synthetic oligonucleotide
cggctttcggcgagaccccgtccctacata

SEQ ID NO: 286072 - DNA, 30 bp, Artificial Sequence
  Synthetic oligonucleotide
cctggttcctctagaccactgtagtacata

SEQ ID NO: 286073 - DNA, 30 bp, Artificial Sequence
  Synthetic oligonucleotide
tgaacttgacgcggccacataacgtacata

SEQ ID NO: 286074 - DNA, 30 bp, Artificial Sequence
  Synthetic oligonucleotide
ttaagacggctgacaatcaatcggtacata

SEQ ID NO: 286075 - DNA, 30 bp, Artificial Sequence
  Synthetic oligonucleotide
gcccggaattaaacctcatatcggtacata

SEQ ID NO: 286076 - DNA, 30 bp, Artificial Sequence
  Synthetic oligonucleotide
tagtgtatagaaaatccgccactgtacata

SEQ ID NO: 286077 - DNA, 30 bp, Artificial Sequence
  Synthetic oligonucleotide
tttgccgcggcgtgagacatggtgtacata

SEQ ID NO: 286078 - DNA, 30 bp, Artificial Sequence
  Synthetic oligonucleotide
cgtatgttgtacactcaagctgtgtacata

SEQ ID NO: 286079 - DNA, 30 bp, Artificial Sequence
  Synthetic oligonucleotide
tggacaacttgaatgcgaaacgcttacata

SEQ ID NO: 286080 - DNA, 30 bp, Artificial Sequence
  Synthetic oligonucleotide
gccatatagctcgtggggagaggaaccata

SEQ ID NO: 286081 - DNA, 30 bp, Artificial Sequence
  Synthetic oligonucleotide
cttagccgcggatcaacgggagtcaccata

SEQ ID NO: 286082 - DNA, 30 bp, Artificial Sequence
  Synthetic oligonucleotide
ccgccggtatcaacagcttgctctaccata

SEQ ID NO: 286083 - DNA, 30 bp, Artificial Sequence
  Synthetic oligonucleotide
gggacactgcgtttagaaattcaccccata

SEQ ID NO: 286084 - DNA, 30 bp, Artificial Sequence
  Synthetic oligonucleotide
tgtcgttcacacacggagggaacccccata

SEQ ID NO: 286085 - DNA, 30 bp, Artificial Sequence
  Synthetic oligonucleotide
cagtatgggataattaggcggtgccccata

SEQ ID NO: 286086 - DNA, 30 bp, Artificial Sequence
  Synthetic oligonucleotide
tcctctaagatcttgaagaatcggcccata

SEQ ID NO: 286087 - DNA, 30 bp, Artificial Sequence
  Synthetic oligonucleotide
tgttggggattttacggtgagtaagccata

SEQ ID NO: 286088 - DNA, 30 bp, Artificial Sequence
  Synthetic oligonucleotide
ggggtaatggcagaacgccgaaccgccata

SEQ ID NO: 286089 - DNA, 30 bp, Artificial Sequence
  Synthetic oligonucleotide
ggtatgcacggagcccaagtctccgccata

SEQ ID NO: 286090 - DNA, 30 bp, Artificial Sequence
  Synthetic oligonucleotide
actctaagaggtagttgtggagtcgccata

SEQ ID NO: 286091 - DNA, 30 bp, Artificial Sequence
  Synthetic oligonucleotide
ggactttcatgagccaatacagcggccata

SEQ ID NO: 286092 - DNA, 30 bp, Artificial Sequence
  Synthetic oligonucleotide
actagcatgatcgcctcattagatgccata

SEQ ID NO: 286093 - DNA, 30 bp, Artificial Sequence
  Synthetic oligonucleotide
gagcccgtaccacatgggaaacaatccata

SEQ ID NO: 286094 - DNA, 30 bp, Artificial Sequence
  Synthetic oligonucleotide
accgcttagcggtccatttctggatccata

SEQ ID NO: 286095 - DNA, 30 bp, Artificial Sequence
  Synthetic oligonucleotide
ggccaaatttctttatagccatggtccata

SEQ ID NO: 286096 - DNA, 30 bp, Artificial Sequence
  Synthetic oligonucleotide
acagacgcacaatttctgtcatggtccata

SEQ ID NO: 286097 - DNA, 30 bp, Artificial Sequence
  Synthetic oligonucleotide
gaggcgcgtactggcagcgggtggtccata

SEQ ID NO: 286098 - DNA, 30 bp, Artificial Sequence
  Synthetic oligonucleotide
agatcgcaagcgtctctaaccttgtccata

SEQ ID NO: 286099 - DNA, 30 bp, Artificial Sequence
  Synthetic oligonucleotide
tccttgaaacatcgggcaaaggattccata

SEQ ID NO: 286100 - DNA, 30 bp, Artificial Sequence
  Synthetic oligonucleotide
cttaatatggcataacgttcccgaagcata

SEQ ID NO: 286101 - DNA, 30 bp, Artificial Sequence
  Synthetic oligonucleotide
atttgttcgattactcggttcctaagcata

SEQ ID NO: 286102 - DNA, 30 bp, Artificial Sequence
  Synthetic oligonucleotide
gcgagctacatatgcacctctttaagcata

SEQ ID NO: 286103 - DNA, 30 bp, Artificial Sequence
  Synthetic oligonucleotide
aaatgtcttgcctgtgtaatgtcgagcata

SEQ ID NO: 286104 - DNA, 30 bp, Artificial Sequence
  Synthetic oligonucleotide
tagggccataaataaaaatagggtagcata

SEQ ID NO: 286105 - DNA, 30 bp, Artificial Sequence
  Synthetic oligonucleotide
tttgaagtcatgcctatcgcatagcgcata

SEQ ID NO: 286106 - DNA, 30 bp, Artificial Sequence
  Synthetic oligonucleotide
cctggtaaatatgagcttccagatcgcata

SEQ ID NO: 286107 - DNA, 29 bp, Artificial Sequence
  Synthetic oligonucleotide
aacggataatgcgagccggcgatcgcata

SEQ ID NO: 286108 - DNA, 30 bp, Artificial Sequence
  Synthetic oligonucleotide
accttccctcgggtatgaggtattcgcata

SEQ ID NO: 286109 - DNA, 30 bp, Artificial Sequence
  Synthetic oligonucleotide
actaagtatgaaaagggtaactttcgcata

SEQ ID NO: 286110 - DNA, 30 bp, Artificial Sequence
  Synthetic oligonucleotide
atgtgatgggatacggcttgggaaggcata

SEQ ID NO: 286111 - DNA, 30 bp, Artificial Sequence
  Synthetic oligonucleotide
aggtgtttagtttagcatttaataggcata

SEQ ID NO: 286112 - DNA, 30 bp, Artificial Sequence
  Synthetic oligonucleotide
gacaagatccccagatgtagcaccggcata

SEQ ID NO: 286113 - DNA, 30 bp, Artificial Sequence
  Synthetic oligonucleotide
cgggaataaccttgcaatacttccggcata

SEQ ID NO: 286114 - DNA, 30 bp, Artificial Sequence
  Synthetic oligonucleotide
ggttccccacttgcttccacatgcggcata

SEQ ID NO: 286115 - DNA, 30 bp, Artificial Sequence
  Synthetic oligonucleotide
acataacggatcgggacggtagtcggcata

SEQ ID NO: 286116 - DNA, 30 bp, Artificial Sequence
  Synthetic oligonucleotide
caacatccgagtgtgggcatgcgtggcata

SEQ ID NO: 286117 - DNA, 30 bp, Artificial Sequence
  Synthetic oligonucleotide
tggaggtttacatactacgtcattggcata

SEQ ID NO: 286118 - DNA, 30 bp, Artificial Sequence
  Synthetic oligonucleotide
gtactcgcactacccgtcagacttggcata

SEQ ID NO: 286119 - DNA, 30 bp, Artificial Sequence
  Synthetic oligonucleotide
cccgcaggcaccgtactcctactatgcata

SEQ ID NO: 286120 - DNA, 30 bp, Artificial Sequence
  Synthetic oligonucleotide
gcttgccttctactccaaaaatggtgcata

SEQ ID NO: 286121 - DNA, 30 bp, Artificial Sequence
  Synthetic oligonucleotide
ccgtatccttggagttaccgcgattgcata

SEQ ID NO: 286122 - DNA, 30 bp, Artificial Sequence
  Synthetic oligonucleotide
agtcagatctatgtatgttccatttgcata

SEQ ID NO: 286123 - DNA, 30 bp, Artificial Sequence
  Synthetic oligonucleotide
ctaagtgacccaggactggagtcaatcata

SEQ ID NO: 286124 - DNA, 30 bp, Artificial Sequence
  Synthetic oligonucleotide
cgagtgggtcctctacccagggagatcata

SEQ ID NO: 286125 - DNA, 30 bp, Artificial Sequence
  Synthetic oligonucleotide
cacatcctggcaaccgggtatacgatcata

SEQ ID NO: 286126 - DNA, 30 bp, Artificial Sequence
  Synthetic oligonucleotide
gttctggcagcgaatctcaaattgatcata

SEQ ID NO: 286127 - DNA, 30 bp, Artificial Sequence
  Synthetic oligonucleotide
gtgtgagagctttatagacagcgtatcata

SEQ ID NO: 286128 - DNA, 30 bp, Artificial Sequence
  Synthetic oligonucleotide
attcaacgaggacagcctgtgccactcata

SEQ ID NO: 286129 - DNA, 30 bp, Artificial Sequence
  Synthetic oligonucleotide
gagcaatagggaaacttccaatcactcata

SEQ ID NO: 286130 - DNA, 30 bp, Artificial Sequence
  Synthetic oligonucleotide
ggcgctacaggagcaacacgggtactcata

SEQ ID NO: 286131 - DNA, 30 bp, Artificial Sequence
  Synthetic oligonucleotide
gtttatcgtatgacggctcaagacctcata

SEQ ID NO: 286132 - DNA, 30 bp, Artificial Sequence
  Synthetic oligonucleotide
taacacacgttgtccatgacagacctcata

SEQ ID NO: 286133 - DNA, 30 bp, Artificial Sequence
  Synthetic oligonucleotide
acgcattgcgtccagggaagttacctcata

SEQ ID NO: 286134 - DNA, 30 bp, Artificial Sequence
  Synthetic oligonucleotide
gtcctggactaaattgatctcaagctcata

SEQ ID NO: 286135 - DNA, 30 bp, Artificial Sequence
  Synthetic oligonucleotide
cgattataatgtaacaaccagacgctcata

SEQ ID NO: 286136 - DNA, 30 bp, Artificial Sequence
  Synthetic oligonucleotide
gagagaagaatgcaacccctcgcgctcata

SEQ ID NO: 286137 - DNA, 30 bp, Artificial Sequence
  Synthetic oligonucleotide
aaaaggggaccgtcacagcgtactctcata

SEQ ID NO: 286138 - DNA, 30 bp, Artificial Sequence
  Synthetic oligonucleotide
tggggcgagcaacatcctgtgtccgtcata

SEQ ID NO: 286139 - DNA, 30 bp, Artificial Sequence
  Synthetic oligonucleotide
agtccagaaccttactcgtgctgggtcata

SEQ ID NO: 286140 - DNA, 30 bp, Artificial Sequence
  Synthetic oligonucleotide
tgttagttcctgagcaaatacatggtcata

SEQ ID NO: 286141 - DNA, 30 bp, Artificial Sequence
  Synthetic oligonucleotide
tccgaagtattggagtccgcagatgtcata

SEQ ID NO: 286142 - DNA, 30 bp, Artificial Sequence
  Synthetic oligonucleotide
gattactcaagataatatcgctaattcata

SEQ ID NO: 286143 - DNA, 30 bp, Artificial Sequence
  Synthetic oligonucleotide
ataagtctccggtccaaaggggtgttcata

SEQ ID NO: 286144 - DNA, 30 bp, Artificial Sequence
  Synthetic oligonucleotide
agatccgataaaactcttatcaacaagata

SEQ ID NO: 286145 - DNA, 30 bp, Artificial Sequence
  Synthetic oligonucleotide
taatactgcatatcagcgggcccgaagata

SEQ ID NO: 286146 - DNA, 30 bp, Artificial Sequence
  Synthetic oligonucleotide
acgacaaattcgcggttacgagataagata

SEQ ID NO: 286147 - DNA, 30 bp, Artificial Sequence
  Synthetic oligonucleotide
aaaccggcagtccacgagtcacgtaagata

SEQ ID NO: 286148 - DNA, 30 bp, Artificial Sequence
  Synthetic oligonucleotide
tccttgtcgccgtgagagatgtttaagata

SEQ ID NO: 286149 - DNA, 30 bp, Artificial Sequence
  Synthetic oligonucleotide
ttgacccctcgtaaagaacttaggcagata

SEQ ID NO: 286150 - DNA, 30 bp, Artificial Sequence
  Synthetic oligonucleotide
tgggatctaagacctagtgaagggcagata

SEQ ID NO: 286151 - DNA, 30 bp, Artificial Sequence
  Synthetic oligonucleotide
acatagcgaagaattgagagttgagagata

SEQ ID NO: 286152 - DNA, 30 bp, Artificial Sequence
  Synthetic oligonucleotide
aataggatccttgataccagtactgagata

SEQ ID NO: 286153 - DNA, 30 bp, Artificial Sequence
  Synthetic oligonucleotide
gccggacgctaccagagcaacagtgagata

SEQ ID NO: 286154 - DNA, 30 bp, Artificial Sequence
  Synthetic oligonucleotide
ttgcttgggggtgtccattgcagtgagata

SEQ ID NO: 286155 - DNA, 30 bp, Artificial Sequence
  Synthetic oligonucleotide
tatcagctcgacaagtgtatcagtgagata

SEQ ID NO: 286156 - DNA, 30 bp, Artificial Sequence
  Synthetic oligonucleotide
tgagttgaaatgtgacccacagcatagata

SEQ ID NO: 286157 - DNA, 30 bp, Artificial Sequence
  Synthetic oligonucleotide
gcaaggatctagcttcttggggcctagata

SEQ ID NO: 286158 - DNA, 30 bp, Artificial Sequence
  Synthetic oligonucleotide
cttaaggagcacacctgaacggagtagata

SEQ ID NO: 286159 - DNA, 30 bp, Artificial Sequence
  Synthetic oligonucleotide
gaaagtatccaatcctagattcggtagata

SEQ ID NO: 286160 - DNA, 30 bp, Artificial Sequence
  Synthetic oligonucleotide
tagaataatcagatcgaacgtgggtagata

SEQ ID NO: 286161 - DNA, 30 bp, Artificial Sequence
  Synthetic oligonucleotide
atcaggtctgtgctcataaaacattagata

SEQ ID NO: 286162 - DNA, 30 bp, Artificial Sequence
  Synthetic oligonucleotide
tggaacttcctcgtagtaaccgcttagata

SEQ ID NO: 286163 - DNA, 30 bp, Artificial Sequence
  Synthetic oligonucleotide
acactgaacgtaagcttaaaggaaacgata

SEQ ID NO: 286164 - DNA, 30 bp, Artificial Sequence
  Synthetic oligonucleotide
taaatttaactgcgctgcggctaaacgata

SEQ ID NO: 286165 - DNA, 30 bp, Artificial Sequence
  Synthetic oligonucleotide
cgctgaatgggtaattccggtgttacgata

SEQ ID NO: 286166 - DNA, 30 bp, Artificial Sequence
  Synthetic oligonucleotide
gggggaggcaagtcaaatttcagaccgata

SEQ ID NO: 286167 - DNA, 30 bp, Artificial Sequence
  Synthetic oligonucleotide
gtttggtgtgttaacagacacggaccgata

SEQ ID NO: 286168 - DNA, 30 bp, Artificial Sequence
  Synthetic oligonucleotide
tgggttaacgtaagaagcgacgtaccgata

SEQ ID NO: 286169 - DNA, 30 bp, Artificial Sequence
  Synthetic oligonucleotide
cataaccatacaaagcatgtggacccgata

SEQ ID NO: 286170 - DNA, 30 bp, Artificial Sequence
  Synthetic oligonucleotide
tcttaccccggttccacattgaccccgata

SEQ ID NO: 286171 - DNA, 30 bp, Artificial Sequence
  Synthetic oligonucleotide
gaaggagcatagggaaggctgagcccgata

SEQ ID NO: 286172 - DNA, 30 bp, Artificial Sequence
  Synthetic oligonucleotide
gcgtcttcgggggcaaagtttcgtccgata

SEQ ID NO: 286173 - DNA, 30 bp, Artificial Sequence
  Synthetic oligonucleotide
ccgcgcgcgttcggaatggactgtccgata

SEQ ID NO: 286174 - DNA, 30 bp, Artificial Sequence
  Synthetic oligonucleotide
tgtctgagttgctagtttacctgtccgata

SEQ ID NO: 286175 - DNA, 30 bp, Artificial Sequence
  Synthetic oligonucleotide
caatcgatccttgcgattagggaagcgata

SEQ ID NO: 286176 - DNA, 30 bp, Artificial Sequence
  Synthetic oligonucleotide
ctgtcgcgcgattcgacagtccgagcgata

SEQ ID NO: 286177 - DNA, 30 bp, Artificial Sequence
  Synthetic oligonucleotide
aggggtaacaactcgtttgctaacgcgata

SEQ ID NO: 286178 - DNA, 30 bp, Artificial Sequence
  Synthetic oligonucleotide
gtaaacctttggtacgggctaatggcgata

SEQ ID NO: 286179 - DNA, 30 bp, Artificial Sequence
  Synthetic oligonucleotide
ctcttgaacccacttacggcatcctcgata

SEQ ID NO: 286180 - DNA, 30 bp, Artificial Sequence
  Synthetic oligonucleotide
aatacagcctgtcactaggtaatctcgata

SEQ ID NO: 286181 - DNA, 30 bp, Artificial Sequence
  Synthetic oligonucleotide
caggtagaagaggttagcatttcgtcgata

SEQ ID NO: 286182 - DNA, 30 bp, Artificial Sequence
  Synthetic oligonucleotide
gtttaagtagaagtcttaggagtttcgata

SEQ ID NO: 286183 - DNA, 30 bp, Artificial Sequence
  Synthetic oligonucleotide
atattgggcggccgtcattgagcaaggata

SEQ ID NO: 286184 - DNA, 30 bp, Artificial Sequence
  Synthetic oligonucleotide
ttaacttcattgacaatgatcataaggata

SEQ ID NO: 286185 - DNA, 30 bp, Artificial Sequence
  Synthetic oligonucleotide
cgatgcaggactcaggcatttctaaggata

SEQ ID NO: 286186 - DNA, 30 bp, Artificial Sequence
  Synthetic oligonucleotide
ggttcgattccctcgcaccgaaagaggata

SEQ ID NO: 286187 - DNA, 31 bp, Artificial Sequence
  Synthetic oligonucleotide
ttctacaggaagtagaattgggtcgaggata

SEQ ID NO: 286188 - DNA, 30 bp, Artificial Sequence
  Synthetic oligonucleotide
ttcattggatcgtacgctagagggaggata

SEQ ID NO: 286189 - DNA, 30 bp, Artificial Sequence
  Synthetic oligonucleotide
gcttccttgaccatcttaagcgtgaggata

SEQ ID NO: 286190 - DNA, 30 bp, Artificial Sequence
  Synthetic oligonucleotide
aggatagttgtatcaaggcacttgaggata

SEQ ID NO: 286191 - DNA, 30 bp, Artificial Sequence
  Synthetic oligonucleotide
accgattaactccactgtgcatataggata

SEQ ID NO: 286192 - DNA, 30 bp, Artificial Sequence
  Synthetic oligonucleotide
gaagcccatggctgccgggcctctaggata

SEQ ID NO: 286193 - DNA, 30 bp, Artificial Sequence
  Synthetic oligonucleotide
ggtaaatgattcctatttgtgcgtaggata

SEQ ID NO: 286194 - DNA, 30 bp, Artificial Sequence
  Synthetic oligonucleotide
tcacgggttcataagaggtactgtaggata

SEQ ID NO: 286195 - DNA, 30 bp, Artificial Sequence
  Synthetic oligonucleotide
tgatccgtgttcgatgtggccattaggata

SEQ ID NO: 286196 - DNA, 30 bp, Artificial Sequence
  Synthetic oligonucleotide
ggatcgtttaccaggtcaaaaacacggata

SEQ ID NO: 286197 - DNA, 30 bp, Artificial Sequence
  Synthetic oligonucleotide
gtacctaaagtggcacgataacgacggata

SEQ ID NO: 286198 - DNA, 30 bp, Artificial Sequence
  Synthetic oligonucleotide
ggggatttgacggtaaagtgatgacggata

SEQ ID NO: 286199 - DNA, 30 bp, Artificial Sequence
  Synthetic oligonucleotide
tatcacgatatggcaatatcgtaccggata

SEQ ID NO: 286200 - DNA, 30 bp, Artificial Sequence
  Synthetic oligonucleotide
gcgggcgggatctagtggaaggcccggata

SEQ ID NO: 286201 - DNA, 30 bp, Artificial Sequence
  Synthetic oligonucleotide
cgaagatgtgctgcaggtctggcgcggata

SEQ ID NO: 286202 - DNA, 30 bp, Artificial Sequence
  Synthetic oligonucleotide
gcgtgtcctaccccctttgaagttcggata

SEQ ID NO: 286203 - DNA, 30 bp, Artificial Sequence
  Synthetic oligonucleotide
cacgtgtacgagctttgaggggttcggata

SEQ ID NO: 286204 - DNA, 30 bp, Artificial Sequence
  Synthetic oligonucleotide
tccgcaattgtcgacggggagttagggata

SEQ ID NO: 286205 - DNA, 30 bp, Artificial Sequence
  Synthetic oligonucleotide
gggctgcagtaattcaatagctacgggata

SEQ ID NO: 286206 - DNA, 30 bp, Artificial Sequence
  Synthetic oligonucleotide
tgtgtactacagtaacgtgcgtacgggata

SEQ ID NO: 286207 - DNA, 30 bp, Artificial Sequence
  Synthetic oligonucleotide
ataagcacctgtaattatccccccgggata

SEQ ID NO: 286208 - DNA, 30 bp, Artificial Sequence
  Synthetic oligonucleotide
gttagtggccttccttatttctccgggata

SEQ ID NO: 286209 - DNA, 30 bp, Artificial Sequence
  Synthetic oligonucleotide
gagcgtataccacgtttgcagtccgggata

SEQ ID NO: 286210 - DNA, 30 bp, Artificial Sequence
  Synthetic oligonucleotide
ataatgcacggtgagactgacgtggggata

SEQ ID NO: 286211 - DNA, 30 bp, Artificial Sequence
  Synthetic oligonucleotide
gcacctaaaaagtttattggtgtggggata

SEQ ID NO: 286212 - DNA, 30 bp, Artificial Sequence
  Synthetic oligonucleotide
gctcatggcgttcacaaatcttgtgggata

SEQ ID NO: 286213 - DNA, 30 bp, Artificial Sequence
  Synthetic oligonucleotide
cattatataccagcgagcacgaaatggata

SEQ ID NO: 286214 - DNA, 30 bp, Artificial Sequence
  Synthetic oligonucleotide
gctgagttagaagtgagtgtaacatggata

SEQ ID NO: 286215 - DNA, 30 bp, Artificial Sequence
  Synthetic oligonucleotide
caaccagttattgaaaagccgagatggata

SEQ ID NO: 286216 - DNA, 30 bp, Artificial Sequence
  Synthetic oligonucleotide
tttcgggtaactggtaccaggacctggata

SEQ ID NO: 286217 - DNA, 30 bp, Artificial Sequence
  Synthetic oligonucleotide
gcacacaccgtcaggaattcccgctggata

SEQ ID NO: 286218 - DNA, 30 bp, Artificial Sequence
  Synthetic oligonucleotide
ttggtccatttatggtccttgtgctggata

SEQ ID NO: 286219 - DNA, 30 bp, Artificial Sequence
  Synthetic oligonucleotide
aggatttcgagcggcttcgtggcgtggata

SEQ ID NO: 286220 - DNA, 30 bp, Artificial Sequence
  Synthetic oligonucleotide
aatcgggggcgcggaattggaggttggata

SEQ ID NO: 286221 - DNA, 30 bp, Artificial Sequence
  Synthetic oligonucleotide
caatcagcgaaggatcgttgataaatgata

SEQ ID NO: 286222 - DNA, 30 bp, Artificial Sequence
  Synthetic oligonucleotide
aatggcttatgtcttacagtataaatgata

SEQ ID NO: 286223 - DNA, 30 bp, Artificial Sequence
  Synthetic oligonucleotide
cgatattcccaggtgcgcgtcccaatgata

SEQ ID NO: 286224 - DNA, 30 bp, Artificial Sequence
  Synthetic oligonucleotide
tcaccccttatacgtgtgaaaggaatgata

SEQ ID NO: 286225 - DNA, 30 bp, Artificial Sequence
  Synthetic oligonucleotide
ctgccccgtctgcatcgaggaggaatgata

SEQ ID NO: 286226 - DNA, 30 bp, Artificial Sequence
  Synthetic oligonucleotide
agatgtataggatttcgcgtattaatgata

SEQ ID NO: 286227 - DNA, 30 bp, Artificial Sequence
  Synthetic oligonucleotide
atatgatacttgcggttctgtaagatgata

SEQ ID NO: 286228 - DNA, 30 bp, Artificial Sequence
  Synthetic oligonucleotide
gttactccgtgatcggttaaagtgatgata

SEQ ID NO: 286229 - DNA, 30 bp, Artificial Sequence
  Synthetic oligonucleotide
taggctcaacggtgacctgtgaatatgata

SEQ ID NO: 286230 - DNA, 31 bp, Artificial Sequence
  Synthetic oligonucleotide
aagatagctgggctttttatacgatatgata

SEQ ID NO: 286231 - DNA, 30 bp, Artificial Sequence
  Synthetic oligonucleotide
ctgtatttgggccaggactcgtctatgata

SEQ ID NO: 286232 - DNA, 30 bp, Artificial Sequence
  Synthetic oligonucleotide
cattatgagaatttgaaggtaggtatgata

SEQ ID NO: 286233 - DNA, 30 bp, Artificial Sequence
  Synthetic oligonucleotide
acatgggtcaggacagagagaattatgata

SEQ ID NO: 286234 - DNA, 30 bp, Artificial Sequence
  Synthetic oligonucleotide
aaagctagagatcagcacataggactgata

SEQ ID NO: 286235 - DNA, 30 bp, Artificial Sequence
  Synthetic oligonucleotide
gatcagcgaccacagcatcaaaagctgata

SEQ ID NO: 286236 - DNA, 30 bp, Artificial Sequence
  Synthetic oligonucleotide
gagttacaggaacttggtctttatctgata

SEQ ID NO: 286237 - DNA, 30 bp, Artificial Sequence
  Synthetic oligonucleotide
atcgatgcccagaggctatcgaccgtgata

SEQ ID NO: 286238 - DNA, 30 bp, Artificial Sequence
  Synthetic oligonucleotide
gcagaaacaagacgtcataggttggtgata

SEQ ID NO: 286239 - DNA, 30 bp, Artificial Sequence
  Synthetic oligonucleotide
gtaggggtacattctccaacagatgtgata

SEQ ID NO: 286240 - DNA, 30 bp, Artificial Sequence
  Synthetic oligonucleotide
tggggaagcccgggagaacaaactgtgata

SEQ ID NO: 286241 - DNA, 30 bp, Artificial Sequence
  Synthetic oligonucleotide
gatgcgatttccctgctgcggtccttgata

SEQ ID NO: 286242 - DNA, 30 bp, Artificial Sequence
  Synthetic oligonucleotide
gtggttgtaaccagtaagtataggttgata

SEQ ID NO: 286243 - DNA, 30 bp, Artificial Sequence
  Synthetic oligonucleotide
gtatcagagcgcggctggtgtcctttgata

SEQ ID NO: 286244 - DNA, 30 bp, Artificial Sequence
  Synthetic oligonucleotide
accggcagccgaactacgtgcgtaaatata

SEQ ID NO: 286245 - DNA, 30 bp, Artificial Sequence
  Synthetic oligonucleotide
gtgcaacctgcagaaggagcattaaatata

SEQ ID NO: 286246 - DNA, 30 bp, Artificial Sequence
  Synthetic oligonucleotide
tattagggaatgaatagtgcgcacaatata

SEQ ID NO: 286247 - DNA, 30 bp, Artificial Sequence
  Synthetic oligonucleotide
gtaataaccagcgaaatgctgcccaatata

SEQ ID NO: 286248 - DNA, 30 bp, Artificial Sequence
  Synthetic oligonucleotide
gcttgcgaagaaccgcgcagctccaatata

SEQ ID NO: 286249 - DNA, 30 bp, Artificial Sequence
  Synthetic oligonucleotide
ttagcctgggcccaactccacagcaatata

SEQ ID NO: 286250 - DNA, 30 bp, Artificial Sequence
  Synthetic oligonucleotide
ggaatgtcaaaagccaactcaaagaatata

SEQ ID NO: 286251 - DNA, 30 bp, Artificial Sequence
  Synthetic oligonucleotide
cggttgaccatcaggcgaatcaaacatata

SEQ ID NO: 286252 - DNA, 30 bp, Artificial Sequence
  Synthetic oligonucleotide
tgtatgtaagagtaacaacgtccccatata

SEQ ID NO: 286253 - DNA, 30 bp, Artificial Sequence
  Synthetic oligonucleotide
ggtcggtagttttgtaggtctatgcatata

SEQ ID NO: 286254 - DNA, 30 bp, Artificial Sequence
  Synthetic oligonucleotide
ctgtgggctacagagcgatagaatcatata

SEQ ID NO: 286255 - DNA, 30 bp, Artificial Sequence
  Synthetic oligonucleotide
ggaatgttaattggggggtggcatcatata

SEQ ID NO: 286256 - DNA, 30 bp, Artificial Sequence
  Synthetic oligonucleotide
aaaatgcgcacagtgcagtactatcatata

SEQ ID NO: 286257 - DNA, 30 bp, Artificial Sequence
  Synthetic oligonucleotide
tatatgagagtcgacagtctttgtcatata

SEQ ID NO: 286258 - DNA, 30 bp, Artificial Sequence
  Synthetic oligonucleotide
tacgtatatggatctcgtgaatgagatata

SEQ ID NO: 286259 - DNA, 30 bp, Artificial Sequence
  Synthetic oligonucleotide
ggattccataccggcacacgacccgatata

SEQ ID NO: 286260 - DNA, 30 bp, Artificial Sequence
  Synthetic oligonucleotide
tctgactaggtaacctcgtgtggcgatata

SEQ ID NO: 286261 - DNA, 30 bp, Artificial Sequence
  Synthetic oligonucleotide
aaacgtgtgtagcggtcagactcggatata

SEQ ID NO: 286262 - DNA, 30 bp, Artificial Sequence
  Synthetic oligonucleotide
aaggtctttagaaagaaaacgacctatata

SEQ ID NO: 286263 - DNA, 30 bp, Artificial Sequence
  Synthetic oligonucleotide
gaaaagctggatatggttaaaggttatata

SEQ ID NO: 286264 - DNA, 30 bp, Artificial Sequence
  Synthetic oligonucleotide
ttgagtgcagggaagcacatgatttatata

SEQ ID NO: 286265 - DNA, 30 bp, Artificial Sequence
  Synthetic oligonucleotide
ggcgattggtattccgaaatgttttatata

SEQ ID NO: 286266 - DNA, 30 bp, Artificial Sequence
  Synthetic oligonucleotide
atgaatggcgtattgcgatgagaaactata

SEQ ID NO: 286267 - DNA, 30 bp, Artificial Sequence
  Synthetic oligonucleotide
cccctaatgcatccctacgtatgcactata

SEQ ID NO: 286268 - DNA, 30 bp, Artificial Sequence
  Synthetic oligonucleotide
cagtgcgcaggttaagctggttcacctata

SEQ ID NO: 286269 - DNA, 30 bp, Artificial Sequence
  Synthetic oligonucleotide
ccggaaaaataggctgaacgttgacctata

SEQ ID NO: 286270 - DNA, 30 bp, Artificial Sequence
  Synthetic oligonucleotide
gaggtgctattcatcacaggattacctata

SEQ ID NO: 286271 - DNA, 30 bp, Artificial Sequence
  Synthetic oligonucleotide
atgatcagggctaatcaatcacggcctata

SEQ ID NO: 286272 - DNA, 30 bp, Artificial Sequence
  Synthetic oligonucleotide
taggtagtgctccccgtcttcctagctata

SEQ ID NO: 286273 - DNA, 30 bp, Artificial Sequence
  Synthetic oligonucleotide
gacgaataagtttgttacgagctagctata

SEQ ID NO: 286274 - DNA, 30 bp, Artificial Sequence
  Synthetic oligonucleotide
catgtcataccgccaaaacgtggcgctata

SEQ ID NO: 286275 - DNA, 30 bp, Artificial Sequence
  Synthetic oligonucleotide
ccgtgcagacatataatcagggaggctata

SEQ ID NO: 286276 - DNA, 30 bp, Artificial Sequence
  Synthetic oligonucleotide
acaaacacgaaacatggacctggggctata

SEQ ID NO: 286277 - DNA, 30 bp, Artificial Sequence
  Synthetic oligonucleotide
ttagcgtaggtcgttggaagccatgctata

SEQ ID NO: 286278 - DNA, 30 bp, Artificial Sequence
  Synthetic oligonucleotide
tctaacccatagcaccaaccgcgtgctata

SEQ ID NO: 286279 - DNA, 30 bp, Artificial Sequence
  Synthetic oligonucleotide
tttacgagtgacttcgagagttgtgctata

SEQ ID NO: 286280 - DNA, 30 bp, Artificial Sequence
  Synthetic oligonucleotide
tttgtacatacgagtttaaccgaatctata

SEQ ID NO: 286281 - DNA, 30 bp, Artificial Sequence
  Synthetic oligonucleotide
tcccgggcaaatggattccttggatctata

SEQ ID NO: 286282 - DNA, 30 bp, Artificial Sequence
  Synthetic oligonucleotide
gttgccttctcatgggttccaatatctata

SEQ ID NO: 286283 - DNA, 29 bp, Artificial Sequence
  Synthetic oligonucleotide
taagggcatcactgaatcgagcgtctata

SEQ ID NO: 286284 - DNA, 30 bp, Artificial Sequence
  Synthetic oligonucleotide
accgcaccggaatggagctgagcgtctata

SEQ ID NO: 286285 - DNA, 30 bp, Artificial Sequence
  Synthetic oligonucleotide
taggagcgacgggtcgagcccgcgtctata

SEQ ID NO: 286286 - DNA, 30 bp, Artificial Sequence
  Synthetic oligonucleotide
tctatatggaccgacgcgcgtaacagtata

SEQ ID NO: 286287 - DNA, 30 bp, Artificial Sequence
  Synthetic oligonucleotide
actctgcaggtcgcagtgaagtgcagtata

SEQ ID NO: 286288 - DNA, 30 bp, Artificial Sequence
  Synthetic oligonucleotide
tggacaaatacgacctcgcaagagagtata

SEQ ID NO: 286289 - DNA, 30 bp, Artificial Sequence
  Synthetic oligonucleotide
ccgggctacgttaaaagcaactatagtata

SEQ ID NO: 286290 - DNA, 30 bp, Artificial Sequence
  Synthetic oligonucleotide
gtcgaacggggcgtatatcaacaacgtata

SEQ ID NO: 286291 - DNA, 30 bp, Artificial Sequence
  Synthetic oligonucleotide
ggcctccatcatggccatccttgccgtata

SEQ ID NO: 286292 - DNA, 30 bp, Artificial Sequence
  Synthetic oligonucleotide
aactccaaccaacatcagtgaatccgtata

SEQ ID NO: 286293 - DNA, 30 bp, Artificial Sequence
  Synthetic oligonucleotide
cctggttgacacacgcacgattcgcgtata

SEQ ID NO: 286294 - DNA, 30 bp, Artificial Sequence
  Synthetic oligonucleotide
atcggaccgcgagacttgttctggcgtata

SEQ ID NO: 286295 - DNA, 30 bp, Artificial Sequence
  Synthetic oligonucleotide
cgcgaagacttattcatgttggtgcgtata

SEQ ID NO: 286296 - DNA, 30 bp, Artificial Sequence
  Synthetic oligonucleotide
cacgtttcgtgatacaaaggaactcgtata

SEQ ID NO: 286297 - DNA, 30 bp, Artificial Sequence
  Synthetic oligonucleotide
tactcgcagtccatctgcaaatctcgtata

SEQ ID NO: 286298 - DNA, 30 bp, Artificial Sequence
  Synthetic oligonucleotide
gtactgccctagcaagtgtccattcgtata

SEQ ID NO: 286299 - DNA, 30 bp, Artificial Sequence
  Synthetic oligonucleotide
gcctgcaaatgctaacatgcggaaggtata

SEQ ID NO: 286300 - DNA, 30 bp, Artificial Sequence
  Synthetic oligonucleotide
gatatatcgaattagtctcagtaaggtata

SEQ ID NO: 286301 - DNA, 30 bp, Artificial Sequence
  Synthetic oligonucleotide
acagggttatagaacggtaaaagaggtata

SEQ ID NO: 286302 - DNA, 30 bp, Artificial Sequence
  Synthetic oligonucleotide
tatgtgcttatggttaattaaagaggtata

SEQ ID NO: 286303 - DNA, 30 bp, Artificial Sequence
  Synthetic oligonucleotide
gcacaatcgcgggtaagtggttgaggtata

SEQ ID NO: 286304 - DNA, 30 bp, Artificial Sequence
  Synthetic oligonucleotide
gcacttatcggggggagaatacacggtata

SEQ ID NO: 286305 - DNA, 30 bp, Artificial Sequence
  Synthetic oligonucleotide
tgccctcacagaaacgtggttccgggtata

SEQ ID NO: 286306 - DNA, 30 bp, Artificial Sequence
  Synthetic oligonucleotide
cagtagcagatacgtatcctccggggtata

SEQ ID NO: 286307 - DNA, 30 bp, Artificial Sequence
  Synthetic oligonucleotide
tagttgatatgtggaacacttcggggtata

SEQ ID NO: 286308 - DNA, 30 bp, Artificial Sequence
  Synthetic oligonucleotide
gattgtagcgcgtgacggagtgggggtata

SEQ ID NO: 286309 - DNA, 30 bp, Artificial Sequence
  Synthetic oligonucleotide
gaaactagtcacacttatgtagatggtata

SEQ ID NO: 286310 - DNA, 30 bp, Artificial Sequence
  Synthetic oligonucleotide
gctcacacggatagtgcgttaactggtata

SEQ ID NO: 286311 - DNA, 30 bp, Artificial Sequence
  Synthetic oligonucleotide
tcgggtaggccggcggattttcctggtata

SEQ ID NO: 286312 - DNA, 30 bp, Artificial Sequence
  Synthetic oligonucleotide
ccttagaaccgtattaatgtacaatgtata

SEQ ID NO: 286313 - DNA, 30 bp, Artificial Sequence
  Synthetic oligonucleotide
gcggtagcatgtctgtacagtgtctgtata

SEQ ID NO: 286314 - DNA, 30 bp, Artificial Sequence
  Synthetic oligonucleotide
gcgaaggcgccagctcacccatagtgtata

SEQ ID NO: 286315 - DNA, 30 bp, Artificial Sequence
  Synthetic oligonucleotide
ctgctctcgggtagggtcgaatcgtgtata

SEQ ID NO: 286316 - DNA, 30 bp, Artificial Sequence
  Synthetic oligonucleotide
gctgagtcctgtgttcatcgtatgtgtata

SEQ ID NO: 286317 - DNA, 30 bp, Artificial Sequence
  Synthetic oligonucleotide
ggcgaattggttatccgccaacgttgtata

SEQ ID NO: 286318 - DNA, 30 bp, Artificial Sequence
  Synthetic oligonucleotide
gaaccaccagaacaaatgtaagtaattata

SEQ ID NO: 286319 - DNA, 30 bp, Artificial Sequence
  Synthetic oligonucleotide
tgagtgtacgccgcattggggaagattata

SEQ ID NO: 286320 - DNA, 30 bp, Artificial Sequence
  Synthetic oligonucleotide
tccctgggctactgggttggttcccttata

SEQ ID NO: 286321 - DNA, 30 bp, Artificial Sequence
  Synthetic oligonucleotide
aattaaagagccaaaagggcaggccttata

SEQ ID NO: 286322 - DNA, 30 bp, Artificial Sequence
  Synthetic oligonucleotide
gggacaacggagtataccctcggccttata

SEQ ID NO: 286323 - DNA, 31 bp, Artificial Sequence
  Synthetic oligonucleotide
ttatgggaattactctcggcacccgcttata

SEQ ID NO: 286324 - DNA, 30 bp, Artificial Sequence
  Synthetic oligonucleotide
gaaagatctaaagtcctaggtgggcttata

SEQ ID NO: 286325 - DNA, 30 bp, Artificial Sequence
  Synthetic oligonucleotide
atcctatcaataagatctattgggcttata

SEQ ID NO: 286326 - DNA, 30 bp, Artificial Sequence
  Synthetic oligonucleotide
cccttagtgatccgaaccggaattcttata

SEQ ID NO: 286327 - DNA, 30 bp, Artificial Sequence
  Synthetic oligonucleotide
ggaacttctgatctattgctgccagttata

SEQ ID NO: 286328 - DNA, 30 bp, Artificial Sequence
  Synthetic oligonucleotide
gactaggtctaccgactacatgcagttata

SEQ ID NO: 286329 - DNA, 30 bp, Artificial Sequence
  Synthetic oligonucleotide
aacttcggcgatatcacgcggatagttata

SEQ ID NO: 286330 - DNA, 30 bp, Artificial Sequence
  Synthetic oligonucleotide
ataggttcacatagatggaagagcgttata

SEQ ID NO: 286331 - DNA, 30 bp, Artificial Sequence
  Synthetic oligonucleotide
ccacgctcgacattccctgtacaggttata

SEQ ID NO: 286332 - DNA, 30 bp, Artificial Sequence
  Synthetic oligonucleotide
agcatctaccccaattctccttaggttata

SEQ ID NO: 286333 - DNA, 30 bp, Artificial Sequence
  Synthetic oligonucleotide
cctgagaggtagagtcataaggtggttata

SEQ ID NO: 286334 - DNA, 30 bp, Artificial Sequence
  Synthetic oligonucleotide
gaacgagccgcgtttaatacaattgttata

SEQ ID NO: 286335 - DNA, 30 bp, Artificial Sequence
  Synthetic oligonucleotide
tgagtcgcgaaaggtgccaaaaaatttata

SEQ ID NO: 286336 - DNA, 30 bp, Artificial Sequence
  Synthetic oligonucleotide
aagttcagcttggtgtgccgggaatttata

SEQ ID NO: 286337 - DNA, 30 bp, Artificial Sequence
  Synthetic oligonucleotide
gccacggacgttagaaaactaccctttata

SEQ ID NO: 286338 - DNA, 30 bp, Artificial Sequence
  Synthetic oligonucleotide
cgttaagggattcagtcggaactctttata

SEQ ID NO: 286339 - DNA, 30 bp, Artificial Sequence
  Synthetic oligonucleotide
ctgtaagtggaaattgtggccaagtttata

SEQ ID NO: 286340 - DNA, 30 bp, Artificial Sequence
  Synthetic oligonucleotide
ggtgatggtaaaccgaacgtatggtttata

SEQ ID NO: 286341 - DNA, 30 bp, Artificial Sequence
  Synthetic oligonucleotide
atgtgtgtccagttgagattcatttttata

SEQ ID NO: 286342 - DNA, 30 bp, Artificial Sequence
  Synthetic oligonucleotide
gcgctttagaaaggtacccaagaaaaacta

SEQ ID NO: 286343 - DNA, 31 bp, Artificial Sequence
  Synthetic oligonucleotide
ggctgcagtttccctaagtcaaaacaaacta

SEQ ID NO: 286344 - DNA, 30 bp, Artificial Sequence
  Synthetic oligonucleotide
caaaggggcctttgtgtcgggaacaaacta

SEQ ID NO: 286345 - DNA, 30 bp, Artificial Sequence
  Synthetic oligonucleotide
cttgacggtcacttatcttgggataaacta

SEQ ID NO: 286346 - DNA, 30 bp, Artificial Sequence
  Synthetic oligonucleotide
agaataagtggagtgcactgatctaaacta

SEQ ID NO: 286347 - DNA, 30 bp, Artificial Sequence
  Synthetic oligonucleotide
gtcggcccatagttgggatctcgtaaacta

SEQ ID NO: 286348 - DNA, 30 bp, Artificial Sequence
  Synthetic oligonucleotide
taaaatctacgcacgtgtattgaccaacta

SEQ ID NO: 286349 - DNA, 30 bp, Artificial Sequence
  Synthetic oligonucleotide
cttgggttgcccgctcagaattcgcaacta

SEQ ID NO: 286350 - DNA, 30 bp, Artificial Sequence
  Synthetic oligonucleotide
tgacgctcgacacatatataggggcaacta

SEQ ID NO: 286351 - DNA, 30 bp, Artificial Sequence
  Synthetic oligonucleotide
ggtaagtgtcagcggtgacgatatcaacta

SEQ ID NO: 286352 - DNA, 30 bp, Artificial Sequence
  Synthetic oligonucleotide
ccgcgcggggtctaaacgcggtccgaacta

SEQ ID NO: 286353 - DNA, 30 bp, Artificial Sequence
  Synthetic oligonucleotide
gtcttagaactcgtgggttgtgcataacta

SEQ ID NO: 286354 - DNA, 30 bp, Artificial Sequence
  Synthetic oligonucleotide
ttgcaatattaaggtgggcaagtataacta

SEQ ID NO: 286355 - DNA, 30 bp, Artificial Sequence
  Synthetic oligonucleotide
cttcgtgctaggtgattacgaaggtaacta

SEQ ID NO: 286356 - DNA, 30 bp, Artificial Sequence
  Synthetic oligonucleotide
ggctctggggctggtgtgatcaattaacta

SEQ ID NO: 286357 - DNA, 30 bp, Artificial Sequence
  Synthetic oligonucleotide
agggtaatgccctttgagtgttcttaacta

SEQ ID NO: 286358 - DNA, 30 bp, Artificial Sequence
  Synthetic oligonucleotide
agcgtctttctccaactgcagcacacacta

SEQ ID NO: 286359 - DNA, 30 bp, Artificial Sequence
  Synthetic oligonucleotide
ttatcttagataatctcagtcccgacacta

SEQ ID NO: 286360 - DNA, 30 bp, Artificial Sequence
  Synthetic oligonucleotide
tttggaacctggcagttcagggatacacta

SEQ ID NO: 286361 - DNA, 30 bp, Artificial Sequence
  Synthetic oligonucleotide
agaagtgtgaaccacccgccgttaccacta

SEQ ID NO: 286362 - DNA, 30 bp, Artificial Sequence
  Synthetic oligonucleotide
tgtcggcaagcgtttagactacatccacta

SEQ ID NO: 286363 - DNA, 30 bp, Artificial Sequence
  Synthetic oligonucleotide
ctttaaataactctaagaagaactccacta

SEQ ID NO: 286364 - DNA, 30 bp, Artificial Sequence
  Synthetic oligonucleotide
tccacagtaagccaaaattactccgcacta

SEQ ID NO: 286365 - DNA, 30 bp, Artificial Sequence
  Synthetic oligonucleotide
tgtagtgactgggaacttcctctcgcacta

SEQ ID NO: 286366 - DNA, 30 bp, Artificial Sequence
  Synthetic oligonucleotide
gacgttacgacgaccgtggtaaatgcacta

SEQ ID NO: 286367 - DNA, 30 bp, Artificial Sequence
  Synthetic oligonucleotide
cgtaagactatcgcagcgaattctgcacta

SEQ ID NO: 286368 - DNA, 30 bp, Artificial Sequence
  Synthetic oligonucleotide
gcggtgaccctgatttcaggtgttgcacta

SEQ ID NO: 286369 - DNA, 30 bp, Artificial Sequence
  Synthetic oligonucleotide
agtgaacatctctcattcagtagatcacta

SEQ ID NO: 286370 - DNA, 30 bp, Artificial Sequence
  Synthetic oligonucleotide
agatcatcgctggttgaccttggatcacta

SEQ ID NO: 286371 - DNA, 30 bp, Artificial Sequence
  Synthetic oligonucleotide
accctagtcaaagttgtgacaagctcacta

SEQ ID NO: 286372 - DNA, 30 bp, Artificial Sequence
  Synthetic oligonucleotide
ggaaggccatcgccagttcgttcttcacta

SEQ ID NO: 286373 - DNA, 30 bp, Artificial Sequence
  Synthetic oligonucleotide
agttggcagaagcatttctggagttcacta

SEQ ID NO: 286374 - DNA, 30 bp, Artificial Sequence
  Synthetic oligonucleotide
atgggcctttgtggataccaacaaagacta

SEQ ID NO: 286375 - DNA, 30 bp, Artificial Sequence
  Synthetic oligonucleotide
tcattaagtggtctgggttctcaaagacta

SEQ ID NO: 286376 - DNA, 30 bp, Artificial Sequence
  Synthetic oligonucleotide
ttacgacgcgtttggtggtaagcaagacta

SEQ ID NO: 286377 - DNA, 30 bp, Artificial Sequence
  Synthetic oligonucleotide
atggtaaatcctacaataagcgcaagacta

SEQ ID NO: 286378 - DNA, 30 bp, Artificial Sequence
  Synthetic oligonucleotide
gcaagtggctcctaaacacctcacagacta

SEQ ID NO: 286379 - DNA, 30 bp, Artificial Sequence
  Synthetic oligonucleotide
acagcgtaacgtcgcgatgccaagagacta

SEQ ID NO: 286380 - DNA, 30 bp, Artificial Sequence
  Synthetic oligonucleotide
agggtcgcatggcgctcacgcgggagacta

SEQ ID NO: 286381 - DNA, 30 bp, Artificial Sequence
  Synthetic oligonucleotide
agttgtttaacgtactggtaggggagacta

SEQ ID NO: 286382 - DNA, 30 bp, Artificial Sequence
  Synthetic oligonucleotide
tcatatggcgatgtgatgcagactagacta

SEQ ID NO: 286383 - DNA, 30 bp, Artificial Sequence
  Synthetic oligonucleotide
ttgagcaggatctcccagacgcgtagacta

SEQ ID NO: 286384 - DNA, 30 bp, Artificial Sequence
  Synthetic oligonucleotide
tagccataacgtgcacgttatcgtagacta

SEQ ID NO: 286385 - DNA, 30 bp, Artificial Sequence
  Synthetic oligonucleotide
aggaatgaatatattgcgaatggacgacta

SEQ ID NO: 286386 - DNA, 30 bp, Artificial Sequence
  Synthetic oligonucleotide
gcttccgtattctcacctagcctacgacta

SEQ ID NO: 286387 - DNA, 29 bp, Artificial Sequence
  Synthetic oligonucleotide
gcatcagcgtgctgaaattgggccgacta

SEQ ID NO: 286388 - DNA, 30 bp, Artificial Sequence
  Synthetic oligonucleotide
agcgaacgcaatcgacggggaacgcgacta

SEQ ID NO: 286389 - DNA, 30 bp, Artificial Sequence
  Synthetic oligonucleotide
gacaacacaacaccacataattggcgacta

SEQ ID NO: 286390 - DNA, 30 bp, Artificial Sequence
  Synthetic oligonucleotide
ttcagaccgccaggcactgtaggtcgacta

SEQ ID NO: 286391 - DNA, 30 bp, Artificial Sequence
  Synthetic oligonucleotide
atggaatgtaacaggggccgtacaggacta

SEQ ID NO: 286392 - DNA, 30 bp, Artificial Sequence
  Synthetic oligonucleotide
cgctgatgtgtctggtgtgatacgggacta

SEQ ID NO: 286393 - DNA, 30 bp, Artificial Sequence
  Synthetic oligonucleotide
ttagcactgaccgtaaagtcaaatggacta

SEQ ID NO: 286394 - DNA, 30 bp, Artificial Sequence
  Synthetic oligonucleotide
ttgcgcccttcgagtagaatgcctggacta

SEQ ID NO: 286395 - DNA, 30 bp, Artificial Sequence
  Synthetic oligonucleotide
gaccattaccccttgatccggagtggacta

SEQ ID NO: 286396 - DNA, 30 bp, Artificial Sequence
  Synthetic oligonucleotide
caaatcgggtcaagttaaatggcgtgacta

SEQ ID NO: 286397 - DNA, 30 bp, Artificial Sequence
  Synthetic oligonucleotide
aaggacttggttcgcccgtgtctgtgacta

SEQ ID NO: 286398 - DNA, 30 bp, Artificial Sequence
  Synthetic oligonucleotide
ggataaacatacagtttaaatatttgacta

SEQ ID NO: 286399 - DNA, 30 bp, Artificial Sequence
  Synthetic oligonucleotide
gcaattgctaaggtgggccaataaatacta

SEQ ID NO: 286400 - DNA, 30 bp, Artificial Sequence
  Synthetic oligonucleotide
gtcggtgcattcggatctaaaggaatacta

SEQ ID NO: 286401 - DNA, 30 bp, Artificial Sequence
  Synthetic oligonucleotide
gaggagatcggagatctggacttaatacta

SEQ ID NO: 286402 - DNA, 30 bp, Artificial Sequence
  Synthetic oligonucleotide
agcattgtctcactccataacatcatacta

SEQ ID NO: 286403 - DNA, 30 bp, Artificial Sequence
  Synthetic oligonucleotide
gatatctaagtcacgagtgaggagatacta

SEQ ID NO: 286404 - DNA, 25 bp, Artificial Sequence
  Synthetic oligonucleotide
cgtagaggggaattcctcgatacta

SEQ ID NO: 286405 - DNA, 30 bp, Artificial Sequence
  Synthetic oligonucleotide
gaactcgaaacaggacgagcaaagctacta

SEQ ID NO: 286406 - DNA, 30 bp, Artificial Sequence
  Synthetic oligonucleotide
tgagtgcaagcgagtggtgaacagctacta

SEQ ID NO: 286407 - DNA, 30 bp, Artificial Sequence
  Synthetic oligonucleotide
gactaattgatctgacgctacgagctacta

SEQ ID NO: 286408 - DNA, 30 bp, Artificial Sequence
  Synthetic oligonucleotide
atatcctcgtaagaataggaagctctacta

SEQ ID NO: 286409 - DNA, 30 bp, Artificial Sequence
  Synthetic oligonucleotide
tcactccagttatcccactgggttctacta

SEQ ID NO: 286410 - DNA, 30 bp, Artificial Sequence
  Synthetic oligonucleotide
cgatttagttttgagttttatgcagtacta

SEQ ID NO: 286411 - DNA, 30 bp, Artificial Sequence
  Synthetic oligonucleotide
aaacaaggctactatgtgagatcagtacta

SEQ ID NO: 286412 - DNA, 30 bp, Artificial Sequence
  Synthetic oligonucleotide
acatgagttatctacaggcttagagtacta

SEQ ID NO: 286413 - DNA, 30 bp, Artificial Sequence
  Synthetic oligonucleotide
ttgcccgggggccaatgcgcattcgtacta

SEQ ID NO: 286414 - DNA, 30 bp, Artificial Sequence
  Synthetic oligonucleotide
gggtcccagcagtcggcgggaccggtacta

SEQ ID NO: 286415 - DNA, 30 bp, Artificial Sequence
  Synthetic oligonucleotide
cattaaacaagggcccgccaagcggtacta

SEQ ID NO: 286416 - DNA, 30 bp, Artificial Sequence
  Synthetic oligonucleotide
cattcgaaacactagtgtcgaatggtacta

SEQ ID NO: 286417 - DNA, 30 bp, Artificial Sequence
  Synthetic oligonucleotide
tacgcggactgagaggcgttaaatgtacta

SEQ ID NO: 286418 - DNA, 30 bp, Artificial Sequence
  Synthetic oligonucleotide
gccatggaaagctaactcaagcatgtacta

SEQ ID NO: 286419 - DNA, 30 bp, Artificial Sequence
  Synthetic oligonucleotide
ctggacaccaagggatgctcaaaattacta

SEQ ID NO: 286420 - DNA, 30 bp, Artificial Sequence
  Synthetic oligonucleotide
ttgctatcgagtgacatctatccattacta

SEQ ID NO: 286421 - DNA, 30 bp, Artificial Sequence
  Synthetic oligonucleotide
agccagtcattatgtgcctgggcgttacta

SEQ ID NO: 286422 - DNA, 30 bp, Artificial Sequence
  Synthetic oligonucleotide
ggaaggttctgaagaaggactaggttacta

SEQ ID NO: 286423 - DNA, 30 bp, Artificial Sequence
  Synthetic oligonucleotide
cgctcgggttgtagtttatacgtgttacta

SEQ ID NO: 286424 - DNA, 30 bp, Artificial Sequence
  Synthetic oligonucleotide
ctaacattaagcgggtgaaaggatttacta

SEQ ID NO: 286425 - DNA, 30 bp, Artificial Sequence
  Synthetic oligonucleotide
ccgcaacgaatatgttcgggcgctttacta

SEQ ID NO: 286426 - DNA, 30 bp, Artificial Sequence
  Synthetic oligonucleotide
acaatagaggcctcctggccggacaaccta

SEQ ID NO: 286427 - DNA, 30 bp, Artificial Sequence
  Synthetic oligonucleotide
aaccacgattgacgagctgcatccaaccta

SEQ ID NO: 286428 - DNA, 30 bp, Artificial Sequence
  Synthetic oligonucleotide
tttgaaaaataaacagcctagatcaaccta

SEQ ID NO: 286429 - DNA, 30 bp, Artificial Sequence
  Synthetic oligonucleotide
tatggcgatcaaggggagggaacgaaccta

SEQ ID NO: 286430 - DNA, 30 bp, Artificial Sequence
  Synthetic oligonucleotide
tgaagtagagggagatacagttggaaccta

SEQ ID NO: 286431 - DNA, 30 bp, Artificial Sequence
  Synthetic oligonucleotide
gggggatggttagccatgtctactaaccta

SEQ ID NO: 286432 - DNA, 30 bp, Artificial Sequence
  Synthetic oligonucleotide
ttggctatggataaacaccgccgtaaccta

SEQ ID NO: 286433 - DNA, 30 bp, Artificial Sequence
  Synthetic oligonucleotide
gtgctaatacggctcccttacgttaaccta

SEQ ID NO: 286434 - DNA, 30 bp, Artificial Sequence
  Synthetic oligonucleotide
cggcgaaggcaaggtagttccgcacaccta

SEQ ID NO: 286435 - DNA, 30 bp, Artificial Sequence
  Synthetic oligonucleotide
actgaaacaattagtgtagggtcacaccta

SEQ ID NO: 286436 - DNA, 30 bp, Artificial Sequence
  Synthetic oligonucleotide
tatcgaacttaccagtattccctccaccta

SEQ ID NO: 286437 - DNA, 30 bp, Artificial Sequence
  Synthetic oligonucleotide
gggttgaccgtagacagccaggggcaccta

SEQ ID NO: 286438 - DNA, 30 bp, Artificial Sequence
  Synthetic oligonucleotide
gtagtattcacctcactattacgtcaccta

SEQ ID NO: 286439 - DNA, 30 bp, Artificial Sequence
  Synthetic oligonucleotide
tgtgaacagtctctttgtagttcagaccta

SEQ ID NO: 286440 - DNA, 30 bp, Artificial Sequence
  Synthetic oligonucleotide
attgggaatatgacctatctcgacgaccta

SEQ ID NO: 286441 - DNA, 30 bp, Artificial Sequence
  Synthetic oligonucleotide
tgtggattagacatacgccttgcggaccta

SEQ ID NO: 286442 - DNA, 30 bp, Artificial Sequence
  Synthetic oligonucleotide
ccggtctgggtactcataggcgcataccta

SEQ ID NO: 286443 - DNA, 30 bp, Artificial Sequence
  Synthetic oligonucleotide
gcactgtcacactggcaatcccactaccta

SEQ ID NO: 286444 - DNA, 30 bp, Artificial Sequence
  Synthetic oligonucleotide
gtcagatgacatgttatgccggcctaccta

SEQ ID NO: 286445 - DNA, 30 bp, Artificial Sequence
  Synthetic oligonucleotide
ttccatagcattcaatagagaaagtaccta

SEQ ID NO: 286446 - DNA, 30 bp, Artificial Sequence
  Synthetic oligonucleotide
aacacaaccagcgatagctattattaccta

SEQ ID NO: 286447 - DNA, 30 bp, Artificial Sequence
  Synthetic oligonucleotide
cataacgcgttgtatgaggtcacttaccta

SEQ ID NO: 286448 - DNA, 30 bp, Artificial Sequence
  Synthetic oligonucleotide
caaacatgttgcgtgatctatctttaccta

SEQ ID NO: 286449 - DNA, 30 bp, Artificial Sequence
  Synthetic oligonucleotide
atacaagtaaccattgacaagagtacccta

SEQ ID NO: 286450 - DNA, 30 bp, Artificial Sequence
  Synthetic oligonucleotide
ggccgacggtctccgtgagtcggtacccta

SEQ ID NO: 286451 - DNA, 30 bp, Artificial Sequence
  Synthetic oligonucleotide
aagaaatgttggttgtctgagcttacccta

SEQ ID NO: 286452 - DNA, 30 bp, Artificial Sequence
  Synthetic oligonucleotide
agactaaaacaatttttaaaaaaaccccta

SEQ ID NO: 286453 - DNA, 30 bp, Artificial Sequence
  Synthetic oligonucleotide
taccaaggacgagatggggctggcccccta

SEQ ID NO: 286454 - DNA, 30 bp, Artificial Sequence
  Synthetic oligonucleotide
gtaagactgttgacatgccttgttccccta

SEQ ID NO: 286455 - DNA, 30 bp, Artificial Sequence
  Synthetic oligonucleotide
tgtcctctaggtataaagactattgcccta

SEQ ID NO: 286456 - DNA, 30 bp, Artificial Sequence
  Synthetic oligonucleotide
aactcagaccgtaggcggggctttgcccta

SEQ ID NO: 286457 - DNA, 30 bp, Artificial Sequence
  Synthetic oligonucleotide
agaaaaccttcaaatgcggctaaatcccta

SEQ ID NO: 286458 - DNA, 30 bp, Artificial Sequence
  Synthetic oligonucleotide
ataacgggaagtaaaaatctgttatcccta

SEQ ID NO: 286459 - DNA, 30 bp, Artificial Sequence
  Synthetic oligonucleotide
tttaggaaactgggcggtagagaaagccta

SEQ ID NO: 286460 - DNA, 30 bp, Artificial Sequence
  Synthetic oligonucleotide
ttctgacacacaagcagcgtaagaagccta

SEQ ID NO: 286461 - DNA, 30 bp, Artificial Sequence
  Synthetic oligonucleotide
tatcacagatcgccaagcactaccagccta

SEQ ID NO: 286462 - DNA, 30 bp, Artificial Sequence
  Synthetic oligonucleotide
gactatattcattaagggcgaatcagccta

SEQ ID NO: 286463 - DNA, 30 bp, Artificial Sequence
  Synthetic oligonucleotide
tagtgacggccgggcctgttcatgagccta

SEQ ID NO: 286464 - DNA, 30 bp, Artificial Sequence
  Synthetic oligonucleotide
gcgcccattattagaaccagggctagccta

SEQ ID NO: 286465 - DNA, 30 bp, Artificial Sequence
  Synthetic oligonucleotide
agtgcagttggtatataatgacgacgccta

SEQ ID NO: 286466 - DNA, 30 bp, Artificial Sequence
  Synthetic oligonucleotide
ccgagcaagaggttagcggggacccgccta

SEQ ID NO: 286467 - DNA, 30 bp, Artificial Sequence
  Synthetic oligonucleotide
ggggctctcctttattgattagcgcgccta

SEQ ID NO: 286468 - DNA, 30 bp, Artificial Sequence
  Synthetic oligonucleotide
tgacccataggtccaactcaattgcgccta

SEQ ID NO: 286469 - DNA, 30 bp, Artificial Sequence
  Synthetic oligonucleotide
ctttgagcagggctactatctaaaggccta

SEQ ID NO: 286470 - DNA, 30 bp, Artificial Sequence
  Synthetic oligonucleotide
gcacttggcggcagcgacaaagaaggccta

SEQ ID NO: 286471 - DNA, 30 bp, Artificial Sequence
  Synthetic oligonucleotide
cacggtccgccataggatccaacaggccta

SEQ ID NO: 286472 - DNA, 30 bp, Artificial Sequence
  Synthetic oligonucleotide
ccatataaggttgacccagctagaggccta

SEQ ID NO: 286473 - DNA, 30 bp, Artificial Sequence
  Synthetic oligonucleotide
agttaagattggtgtcagactttaggccta

SEQ ID NO: 286474 - DNA, 30 bp, Artificial Sequence
  Synthetic oligonucleotide
ttgtgtagaagtggttttcatagcggccta

SEQ ID NO: 286475 - DNA, 30 bp, Artificial Sequence
  Synthetic oligonucleotide
agggatgcggtttgagagtgcaagggccta

SEQ ID NO: 286476 - DNA, 30 bp, Artificial Sequence
  Synthetic oligonucleotide
taggagatgattgcgacaatgtagggccta

SEQ ID NO: 286477 - DNA, 30 bp, Artificial Sequence
  Synthetic oligonucleotide
ctagggaattgcctcaagtacgggggccta

SEQ ID NO: 286478 - DNA, 30 bp, Artificial Sequence
  Synthetic oligonucleotide
gactcgtgtactaaagcagcccgtggccta

SEQ ID NO: 286479 - DNA, 30 bp, Artificial Sequence
  Synthetic oligonucleotide
tatagtatgtgtgaagtggttatctgccta

SEQ ID NO: 286480 - DNA, 31 bp, Artificial Sequence
  Synthetic oligonucleotide
gacaaacctcggagcctatggatcgtgccta

SEQ ID NO: 286481 - DNA, 30 bp, Artificial Sequence
  Synthetic oligonucleotide
atatcggttgagaactagggaaaaatccta

SEQ ID NO: 286482 - DNA, 30 bp, Artificial Sequence
  Synthetic oligonucleotide
ataatttgtacgtctattcgtgcaatccta

SEQ ID NO: 286483 - DNA, 30 bp, Artificial Sequence
  Synthetic oligonucleotide
gcttgaacgcagtcggccacgtacatccta

SEQ ID NO: 286484 - DNA, 30 bp, Artificial Sequence
  Synthetic oligonucleotide
ggggcgcacgacatcatggaccgcatccta

SEQ ID NO: 286485 - DNA, 30 bp, Artificial Sequence
  Synthetic oligonucleotide
tgtgctaataccggctcggccggcatccta

SEQ ID NO: 286486 - DNA, 30 bp, Artificial Sequence
  Synthetic oligonucleotide
attttatcgaaaccgggcgtaaagatccta

SEQ ID NO: 286487 - DNA, 30 bp, Artificial Sequence
  Synthetic oligonucleotide
caatgaattaaaaagatcataatgatccta

SEQ ID NO: 286488 - DNA, 29 bp, Artificial Sequence
  Synthetic oligonucleotide
tcgtatcaaacagcaaaaaggatatccta

SEQ ID NO: 286489 - DNA, 30 bp, Artificial Sequence
  Synthetic oligonucleotide
aaagcaactaagtgcggtgaaaaactccta

SEQ ID NO: 286490 - DNA, 30 bp, Artificial Sequence
  Synthetic oligonucleotide
caagagccttcatgagccccacaactccta

SEQ ID NO: 286491 - DNA, 30 bp, Artificial Sequence
  Synthetic oligonucleotide
cgaaaaccgataggctcctatcaactccta

SEQ ID NO: 286492 - DNA, 30 bp, Artificial Sequence
  Synthetic oligonucleotide
attgcttggacgcgcaatccggccctccta

SEQ ID NO: 286493 - DNA, 30 bp, Artificial Sequence
  Synthetic oligonucleotide
atcactagacgtgcactgttatgcctccta

SEQ ID NO: 286494 - DNA, 29 bp, Artificial Sequence
  Synthetic oligonucleotide
ggctcgaattctgacaatggtcgctccta

SEQ ID NO: 286495 - DNA, 30 bp, Artificial Sequence
  Synthetic oligonucleotide
atacctggacaagtctacaacttagtccta

SEQ ID NO: 286496 - DNA, 30 bp, Artificial Sequence
  Synthetic oligonucleotide
ccccagggttcgctcattatgaacgtccta

SEQ ID NO: 286497 - DNA, 30 bp, Artificial Sequence
  Synthetic oligonucleotide
tcgggtggatggcgctaaacacgcgtccta

SEQ ID NO: 286498 - DNA, 30 bp, Artificial Sequence
  Synthetic oligonucleotide
ggatgcacagttggggataaatgcgtccta

SEQ ID NO: 286499 - DNA, 30 bp, Artificial Sequence
  Synthetic oligonucleotide
agatgcgcaagggaggtatgaccggtccta

SEQ ID NO: 286500 - DNA, 30 bp, Artificial Sequence
  Synthetic oligonucleotide
gatggagtccataagaaaattagattccta

SEQ ID NO: 286501 - DNA, 30 bp, Artificial Sequence
  Synthetic oligonucleotide
tcaccgacttcccccctaacgtggttccta

SEQ ID NO: 286502 - DNA, 30 bp, Artificial Sequence
  Synthetic oligonucleotide
acttgatttgggtaccgcaagtcaaagcta

SEQ ID NO: 286503 - DNA, 30 bp, Artificial Sequence
  Synthetic oligonucleotide
aagaattaaagcagcagtagtataaagcta

SEQ ID NO: 286504 - DNA, 30 bp, Artificial Sequence
  Synthetic oligonucleotide
gatgtataaccaattttagtgagcaagcta

SEQ ID NO: 286505 - DNA, 30 bp, Artificial Sequence
  Synthetic oligonucleotide
gggcacagcacaataaatggccataagcta

SEQ ID NO: 286506 - DNA, 30 bp, Artificial Sequence
  Synthetic oligonucleotide
gattcgaaaaattcaacgctttgtaagcta

SEQ ID NO: 286507 - DNA, 30 bp, Artificial Sequence
  Synthetic oligonucleotide
gagcaacactgtaagatgcgacttaagcta

SEQ ID NO: 286508 - DNA, 30 bp, Artificial Sequence
  Synthetic oligonucleotide
agcttatgcatttaacgaattcttaagcta

SEQ ID NO: 286509 - DNA, 30 bp, Artificial Sequence
  Synthetic oligonucleotide
cactgctcaaggggctggagacgacagcta

SEQ ID NO: 286510 - DNA, 30 bp, Artificial Sequence
  Synthetic oligonucleotide
tccctagtgcattgcaatggttgacagcta

SEQ ID NO: 286511 - DNA, 30 bp, Artificial Sequence
  Synthetic oligonucleotide
tacacctagtcggctgacggccagcagcta

SEQ ID NO: 286512 - DNA, 30 bp, Artificial Sequence
  Synthetic oligonucleotide
ttcagcacacacgaaatgcgctagcagcta

SEQ ID NO: 286513 - DNA, 30 bp, Artificial Sequence
  Synthetic oligonucleotide
gaacgctcgaccgcgagagcgattcagcta

SEQ ID NO: 286514 - DNA, 30 bp, Artificial Sequence
  Synthetic oligonucleotide
acgtcttgttgattgtagccccttcagcta

SEQ ID NO: 286515 - DNA, 30 bp, Artificial Sequence
  Synthetic oligonucleotide
ggaatctattagtcgcaatcaggcgagcta

SEQ ID NO: 286516 - DNA, 30 bp, Artificial Sequence
  Synthetic oligonucleotide
ggcttgtccactgctcggtataaggagcta

SEQ ID NO: 286517 - DNA, 30 bp, Artificial Sequence
  Synthetic oligonucleotide
gaatctgtgcgactacgctgggaggagcta

SEQ ID NO: 286518 - DNA, 30 bp, Artificial Sequence
  Synthetic oligonucleotide
gacagctgaaacacgttcactatggagcta

SEQ ID NO: 286519 - DNA, 30 bp, Artificial Sequence
  Synthetic oligonucleotide
gatggatcaaactaaaggctggtggagcta

SEQ ID NO: 286520 - DNA, 30 bp, Artificial Sequence
  Synthetic oligonucleotide
ttatgattctcaggcgggcactgtgagcta

SEQ ID NO: 286521 - DNA, 30 bp, Artificial Sequence
  Synthetic oligonucleotide
ttcaacgtgtgctttatgcatattgagcta

SEQ ID NO: 286522 - DNA, 30 bp, Artificial Sequence
  Synthetic oligonucleotide
taacatatatgtttccaagcgagatagcta

SEQ ID NO: 286523 - DNA, 30 bp, Artificial Sequence
  Synthetic oligonucleotide
cgcggtgggaattgatttgaagtctagcta

SEQ ID NO: 286524 - DNA, 30 bp, Artificial Sequence
  Synthetic oligonucleotide
cacgttccatatttcgccaggccgtagcta

SEQ ID NO: 286525 - DNA, 30 bp, Artificial Sequence
  Synthetic oligonucleotide
aggaaatcatgtatccaaggtcattagcta

SEQ ID NO: 286526 - DNA, 30 bp, Artificial Sequence
  Synthetic oligonucleotide
ctcttactaaaaatggatttcaaaacgcta

SEQ ID NO: 286527 - DNA, 30 bp, Artificial Sequence
  Synthetic oligonucleotide
agactgaagacatcgggtacatcaacgcta

SEQ ID NO: 286528 - DNA, 30 bp, Artificial Sequence
  Synthetic oligonucleotide
acctcccaccactgcaactcttgaacgcta

SEQ ID NO: 286529 - DNA, 30 bp, Artificial Sequence
  Synthetic oligonucleotide
ttgtactgagaacaaacggaagagacgcta

SEQ ID NO: 286530 - DNA, 30 bp, Artificial Sequence
  Synthetic oligonucleotide
ttaaagggggctcaacccgagggtacgcta

SEQ ID NO: 286531 - DNA, 30 bp, Artificial Sequence
  Synthetic oligonucleotide
aactacacttcagcagtacgttttacgcta

SEQ ID NO: 286532 - DNA, 30 bp, Artificial Sequence
  Synthetic oligonucleotide
atcaagttcagtaatcgagacgcaccgcta

SEQ ID NO: 286533 - DNA, 30 bp, Artificial Sequence
  Synthetic oligonucleotide
cctcgagagtgcaccagcacaacgccgcta

SEQ ID NO: 286534 - DNA, 30 bp, Artificial Sequence
  Synthetic oligonucleotide
cgaccgaactgtattgaaattacgccgcta

SEQ ID NO: 286535 - DNA, 30 bp, Artificial Sequence
  Synthetic oligonucleotide
ataacatctgatatgtaatataaagcgcta

SEQ ID NO: 286536 - DNA, 30 bp, Artificial Sequence
  Synthetic oligonucleotide
aaatgaggcctgaggggccaagcagcgcta

SEQ ID NO: 286537 - DNA, 30 bp, Artificial Sequence
  Synthetic oligonucleotide
aattagccttctctgtcgctgtgagcgcta

SEQ ID NO: 286538 - DNA, 30 bp, Artificial Sequence
  Synthetic oligonucleotide
aattgagggatcaataccggcctggcgcta

SEQ ID NO: 286539 - DNA, 30 bp, Artificial Sequence
  Synthetic oligonucleotide
tatacttaacgtgggtcacggtctgcgcta

SEQ ID NO: 286540 - DNA, 30 bp, Artificial Sequence
  Synthetic oligonucleotide
taaccagtccaaagccacaatgactcgcta

SEQ ID NO: 286541 - DNA, 30 bp, Artificial Sequence
  Synthetic oligonucleotide
ccaaggaaccccaatatgggcgtctcgcta

SEQ ID NO: 286542 - DNA, 30 bp, Artificial Sequence
  Synthetic oligonucleotide
gaggttcgggactcatcgcgcaagtcgcta

SEQ ID NO: 286543 - DNA, 30 bp, Artificial Sequence
  Synthetic oligonucleotide
aggcgattgtgagcctgcacggattcgcta

SEQ ID NO: 286544 - DNA, 30 bp, Artificial Sequence
  Synthetic oligonucleotide
atattgatttgcgccaacaaatcttcgcta

SEQ ID NO: 286545 - DNA, 30 bp, Artificial Sequence
  Synthetic oligonucleotide
gaggcgaataagacgcgcaggtcttcgcta

SEQ ID NO: 286546 - DNA, 30 bp, Artificial Sequence
  Synthetic oligonucleotide
ccactcccatttaagctctgcaaaaggcta

SEQ ID NO: 286547 - DNA, 30 bp, Artificial Sequence
  Synthetic oligonucleotide
agacacacgactcagcggctatgaaggcta

SEQ ID NO: 286548 - DNA, 30 bp, Artificial Sequence
  Synthetic oligonucleotide
ggagttatgggtatggcggattacaggcta

SEQ ID NO: 286549 - DNA, 30 bp, Artificial Sequence
  Synthetic oligonucleotide
gccacatattgtcagtgatagatcaggcta

SEQ ID NO: 286550 - DNA, 30 bp, Artificial Sequence
  Synthetic oligonucleotide
tagccgagtaaagatgttacgaagaggcta

SEQ ID NO: 286551 - DNA, 30 bp, Artificial Sequence
  Synthetic oligonucleotide
gataagcgcaacaattttacgatgaggcta

SEQ ID NO: 286552 - DNA, 30 bp, Artificial Sequence
  Synthetic oligonucleotide
ggacatagccggttgatccatcctaggcta

SEQ ID NO: 286553 - DNA, 30 bp, Artificial Sequence
  Synthetic oligonucleotide
aatagtgaagcgctgattcccaaacggcta

SEQ ID NO: 286554 - DNA, 30 bp, Artificial Sequence
  Synthetic oligonucleotide
ttaattgaatacaatgaggtgatacggcta

SEQ ID NO: 286555 - DNA, 30 bp, Artificial Sequence
  Synthetic oligonucleotide
gcgttgcccgggtcggccggcaaccggcta

SEQ ID NO: 286556 - DNA, 30 bp, Artificial Sequence
  Synthetic oligonucleotide
ccgctgaattattagggaaaaacgcggcta

SEQ ID NO: 286557 - DNA, 30 bp, Artificial Sequence
  Synthetic oligonucleotide
gtctccgcgggcgtccggggaatgcggcta

SEQ ID NO: 286558 - DNA, 30 bp, Artificial Sequence
  Synthetic oligonucleotide
ctcaggcaggttgttcataagcatcggcta

SEQ ID NO: 286559 - DNA, 30 bp, Artificial Sequence
  Synthetic oligonucleotide
atcgcttcatagtatgccgcttatcggcta

SEQ ID NO: 286560 - DNA, 30 bp, Artificial Sequence
  Synthetic oligonucleotide
ggtcaattagtgcaaaactaccaagggcta

SEQ ID NO: 286561 - DNA, 30 bp, Artificial Sequence
  Synthetic oligonucleotide
cttcgatctatgcatacaacatgagggcta

SEQ ID NO: 286562 - DNA, 30 bp, Artificial Sequence
  Synthetic oligonucleotide
atatcataatcagaatgtactatggggcta

SEQ ID NO: 286563 - DNA, 30 bp, Artificial Sequence
  Synthetic oligonucleotide
ttacctcgcgtagcgcgtaaggtggggcta

SEQ ID NO: 286564 - DNA, 30 bp, Artificial Sequence
  Synthetic oligonucleotide
gagtgagttgactgatatcactatgggcta

SEQ ID NO: 286565 - DNA, 30 bp, Artificial Sequence
  Synthetic oligonucleotide
cttgacaaggtacctatgcgtgctgggcta

SEQ ID NO: 286566 - DNA, 30 bp, Artificial Sequence
  Synthetic oligonucleotide
ttctggcatgggtgcgtccgagttgggcta

SEQ ID NO: 286567 - DNA, 30 bp, Artificial Sequence
  Synthetic oligonucleotide
ttacatgagaacgcgatcggggttgggcta

SEQ ID NO: 286568 - DNA, 30 bp, Artificial Sequence
  Synthetic oligonucleotide
gcaatagcactgtccctcactccatggcta

SEQ ID NO: 286569 - DNA, 30 bp, Artificial Sequence
  Synthetic oligonucleotide
gcggagccacacaagaaattcgtctggcta

SEQ ID NO: 286570 - DNA, 30 bp, Artificial Sequence
  Synthetic oligonucleotide
attaatcatcggtgtgtagccaattggcta

SEQ ID NO: 286571 - DNA, 30 bp, Artificial Sequence
  Synthetic oligonucleotide
ctatgggaaccgacgcgggggctaatgcta

SEQ ID NO: 286572 - DNA, 30 bp, Artificial Sequence
  Synthetic oligonucleotide
gcggtgatatttgataactgtaccatgcta

SEQ ID NO: 286573 - DNA, 30 bp, Artificial Sequence
  Synthetic oligonucleotide
aaggtcagaattgatcgtttgacgatgcta

SEQ ID NO: 286574 - DNA, 30 bp, Artificial Sequence
  Synthetic oligonucleotide
ggcgtcaatcgtagaggcctccctatgcta

SEQ ID NO: 286575 - DNA, 30 bp, Artificial Sequence
  Synthetic oligonucleotide
gcctcaagagaagtcgtgtgtttgctgcta

SEQ ID NO: 286576 - DNA, 30 bp, Artificial Sequence
  Synthetic oligonucleotide
tttgagatgaacaccacaagtcatctgcta

SEQ ID NO: 286577 - DNA, 30 bp, Artificial Sequence
  Synthetic oligonucleotide
taaagagtcgaatatattaccccagtgcta

SEQ ID NO: 286578 - DNA, 30 bp, Artificial Sequence
  Synthetic oligonucleotide
taagggctagaacgagtgcccagagtgcta

SEQ ID NO: 286579 - DNA, 30 bp, Artificial Sequence
  Synthetic oligonucleotide
gaaaggccgcttacaacgatgggagtgcta

SEQ ID NO: 286580 - DNA, 30 bp, Artificial Sequence
  Synthetic oligonucleotide
agcagttgtattgcagagagaacattgcta

SEQ ID NO: 286581 - DNA, 31 bp, Artificial Sequence
  Synthetic oligonucleotide
agggtccaaacacttgcccgcttcattgcta

SEQ ID NO: 286582 - DNA, 30 bp, Artificial Sequence
  Synthetic oligonucleotide
ttgagctacacttcggaattttcattgcta

SEQ ID NO: 286583 - DNA, 30 bp, Artificial Sequence
  Synthetic oligonucleotide
tatgagactgctagaccgacttacttgcta

SEQ ID NO: 286584 - DNA, 30 bp, Artificial Sequence
  Synthetic oligonucleotide
actcagggggagtcattagcaataaatcta

SEQ ID NO: 286585 - DNA, 30 bp, Artificial Sequence
  Synthetic oligonucleotide
attggggcgacgtatagcagtcacaatcta

SEQ ID NO: 286586 - DNA, 30 bp, Artificial Sequence
  Synthetic oligonucleotide
tactatataggaaaaagtactgacaatcta

SEQ ID NO: 286587 - DNA, 30 bp, Artificial Sequence
  Synthetic oligonucleotide
ccagatttgctttctggtaataccaatcta

SEQ ID NO: 286588 - DNA, 30 bp, Artificial Sequence
  Synthetic oligonucleotide
taagggggtttatttgatccgcagaatcta

SEQ ID NO: 286589 - DNA, 30 bp, Artificial Sequence
  Synthetic oligonucleotide
ggttccacgcgtaatgcctctgggaatcta

SEQ ID NO: 286590 - DNA, 30 bp, Artificial Sequence
  Synthetic oligonucleotide
ccatagcatgcaaactggcaagataatcta

SEQ ID NO: 286591 - DNA, 30 bp, Artificial Sequence
  Synthetic oligonucleotide
tgtggtttaacatgtacggacgataatcta

SEQ ID NO: 286592 - DNA, 30 bp, Artificial Sequence
  Synthetic oligonucleotide
acgcgtgaacattgataggaaactaatcta

SEQ ID NO: 286593 - DNA, 30 bp, Artificial Sequence
  Synthetic oligonucleotide
ggtagtaatagtaagcctcatcagcatcta

SEQ ID NO: 286594 - DNA, 30 bp, Artificial Sequence
  Synthetic oligonucleotide
aaacaacggggttcacgttggcgtcatcta

SEQ ID NO: 286595 - DNA, 30 bp, Artificial Sequence
  Synthetic oligonucleotide
cattttatcttcgttctactaggtcatcta

SEQ ID NO: 286596 - DNA, 30 bp, Artificial Sequence
  Synthetic oligonucleotide
catttggtgattggctacaattaagatcta

SEQ ID NO: 286597 - DNA, 30 bp, Artificial Sequence
  Synthetic oligonucleotide
taagttacatggaagtccgatcttgatcta

SEQ ID NO: 286598 - DNA, 30 bp, Artificial Sequence
  Synthetic oligonucleotide
catagctaccttgggcttgcgcaatatcta

SEQ ID NO: 286599 - DNA, 30 bp, Artificial Sequence
  Synthetic oligonucleotide
gacaaataccgcatacggggatcatatcta

SEQ ID NO: 286600 - DNA, 30 bp, Artificial Sequence
  Synthetic oligonucleotide
cgtaccttactcggtacttcgctatatcta

SEQ ID NO: 286601 - DNA, 30 bp, Artificial Sequence
  Synthetic oligonucleotide
ctagaccgacgccctagaataagttatcta

SEQ ID NO: 286602 - DNA, 30 bp, Artificial Sequence
  Synthetic oligonucleotide
ggatctttgaagttgtgcaaccgttatcta

SEQ ID NO: 286603 - DNA, 30 bp, Artificial Sequence
  Synthetic oligonucleotide
ctttctcaaacctcttgagggaaaactcta

SEQ ID NO: 286604 - DNA, 30 bp, Artificial Sequence
  Synthetic oligonucleotide
cgcaaagtattgttccacctttaaactcta

SEQ ID NO: 286605 - DNA, 30 bp, Artificial Sequence
  Synthetic oligonucleotide
ataggctcaggcagtaagaagctaactcta

SEQ ID NO: 286606 - DNA, 30 bp, Artificial Sequence
  Synthetic oligonucleotide
ggtatttgattacacccgcacaacactcta

SEQ ID NO: 286607 - DNA, 30 bp, Artificial Sequence
  Synthetic oligonucleotide
gattgaggccttaatacagaaaccactcta

SEQ ID NO: 286608 - DNA, 30 bp, Artificial Sequence
  Synthetic oligonucleotide
ccacggatgattctggtatttgtgactcta

SEQ ID NO: 286609 - DNA, 30 bp, Artificial Sequence
  Synthetic oligonucleotide
gacaagtatatataggtaacgtgtactcta

SEQ ID NO: 286610 - DNA, 30 bp, Artificial Sequence
  Synthetic oligonucleotide
gcatcaagtatggttaatttgaaacctcta

SEQ ID NO: 286611 - DNA, 30 bp, Artificial Sequence
  Synthetic oligonucleotide
tcagctttcattatcgccgtcggacctcta

SEQ ID NO: 286612 - DNA, 30 bp, Artificial Sequence
  Synthetic oligonucleotide
ccacggcggtagaccggggagacagctcta

SEQ ID NO: 286613 - DNA, 30 bp, Artificial Sequence
  Synthetic oligonucleotide
tcgctatagtctgcaggagcggccgctcta

SEQ ID NO: 286614 - DNA, 30 bp, Artificial Sequence
  Synthetic oligonucleotide
gctccgcggtcatcccggttagtcgctcta

SEQ ID NO: 286615 - DNA, 30 bp, Artificial Sequence
  Synthetic oligonucleotide
ggtattattggcagtcctgtctgggctcta

SEQ ID NO: 286616 - DNA, 30 bp, Artificial Sequence
  Synthetic oligonucleotide
gggggcttcataaacggtagtaatgctcta

SEQ ID NO: 286617 - DNA, 30 bp, Artificial Sequence
  Synthetic oligonucleotide
ggcggggcaatccctcgacctcatgctcta

SEQ ID NO: 286618 - DNA, 30 bp, Artificial Sequence
  Synthetic oligonucleotide
atatcatatggagtcggtacctaatctcta

SEQ ID NO: 286619 - DNA, 30 bp, Artificial Sequence
  Synthetic oligonucleotide
taaccggaataaaatgaggttggatctcta

SEQ ID NO: 286620 - DNA, 30 bp, Artificial Sequence
  Synthetic oligonucleotide
tacagtttagctacacagtgtatctctcta

SEQ ID NO: 286621 - DNA, 30 bp, Artificial Sequence
  Synthetic oligonucleotide
gtggtcacgtttatggttcgtacttctcta

SEQ ID NO: 286622 - DNA, 30 bp, Artificial Sequence
  Synthetic oligonucleotide
actctccaacaactcgttaggaccagtcta

SEQ ID NO: 286623 - DNA, 30 bp, Artificial Sequence
  Synthetic oligonucleotide
aaatagacgaacccgacaggtttcagtcta

SEQ ID NO: 286624 - DNA, 30 bp, Artificial Sequence
  Synthetic oligonucleotide
tgaagactgcattgagatggggagagtcta

SEQ ID NO: 286625 - DNA, 30 bp, Artificial Sequence
  Synthetic oligonucleotide
cccctgctgggcacgtcgatttggagtcta

SEQ ID NO: 286626 - DNA, 30 bp, Artificial Sequence
  Synthetic oligonucleotide
gatgtgtcctggctcacgtgcaatagtcta

SEQ ID NO: 286627 - DNA, 30 bp, Artificial Sequence
  Synthetic oligonucleotide
agccgttatgcgtagtagagaattagtcta

SEQ ID NO: 286628 - DNA, 30 bp, Artificial Sequence
  Synthetic oligonucleotide
agagatgcgtgagtcgggcactgccgtcta

SEQ ID NO: 286629 - DNA, 30 bp, Artificial Sequence
  Synthetic oligonucleotide
tgtgtgatataccggagtcttcagcgtcta

SEQ ID NO: 286630 - DNA, 30 bp, Artificial Sequence
  Synthetic oligonucleotide
caccttgggcctcgcgctcgatagcgtcta

SEQ ID NO: 286631 - DNA, 30 bp, Artificial Sequence
  Synthetic oligonucleotide
aacttacccacgattttgggaatgcgtcta

SEQ ID NO: 286632 - DNA, 30 bp, Artificial Sequence
  Synthetic oligonucleotide
gtcataatcgatggaggtttttgaggtcta

SEQ ID NO: 286633 - DNA, 30 bp, Artificial Sequence
  Synthetic oligonucleotide
agggtattcagtgtaaacctcggcggtcta

SEQ ID NO: 286634 - DNA, 30 bp, Artificial Sequence
  Synthetic oligonucleotide
accgacgccaatcaaatacttgtcggtcta

SEQ ID NO: 286635 - DNA, 30 bp, Artificial Sequence
  Synthetic oligonucleotide
tagacgggatttgcgtctgggcaatgtcta

SEQ ID NO: 286636 - DNA, 30 bp, Artificial Sequence
  Synthetic oligonucleotide
agggtcctgttggatagtcaaacatgtcta

SEQ ID NO: 286637 - DNA, 30 bp, Artificial Sequence
  Synthetic oligonucleotide
aaggtataaatgttcgcctctgtatgtcta

SEQ ID NO: 286638 - DNA, 30 bp, Artificial Sequence
  Synthetic oligonucleotide
tactgtggaggggtcagataggactgtcta

SEQ ID NO: 286639 - DNA, 30 bp, Artificial Sequence
  Synthetic oligonucleotide
cgatttttcaaggtttgagttttctgtcta

SEQ ID NO: 286640 - DNA, 30 bp, Artificial Sequence
  Synthetic oligonucleotide
acaagttgacagggcactaacaagtgtcta

SEQ ID NO: 286641 - DNA, 30 bp, Artificial Sequence
  Synthetic oligonucleotide
tacatcgatagaacggtgatctattgtcta

SEQ ID NO: 286642 - DNA, 30 bp, Artificial Sequence
  Synthetic oligonucleotide
tcagtaaacaggtgcctaagcgcttgtcta

SEQ ID NO: 286643 - DNA, 30 bp, Artificial Sequence
  Synthetic oligonucleotide
ttactgagagaccgcagacaacgttgtcta

SEQ ID NO: 286644 - DNA, 30 bp, Artificial Sequence
  Synthetic oligonucleotide
agcgctttattgtctacgagctgttgtcta

SEQ ID NO: 286645 - DNA, 30 bp, Artificial Sequence
  Synthetic oligonucleotide
gtcgcgatcgaaaagcttgaaacaattcta

SEQ ID NO: 286646 - DNA, 30 bp, Artificial Sequence
  Synthetic oligonucleotide
acgtgcgaaggagacgtgtgtccaattcta

SEQ ID NO: 286647 - DNA, 30 bp, Artificial Sequence
  Synthetic oligonucleotide
ggtgctacgcgaacacgtatcagaattcta

SEQ ID NO: 286648 - DNA, 30 bp, Artificial Sequence
  Synthetic oligonucleotide
aactaaacaattaatattctaataattcta

SEQ ID NO: 286649 - DNA, 30 bp, Artificial Sequence
  Synthetic oligonucleotide
gtaagattgagggctgattctaccattcta

SEQ ID NO: 286650 - DNA, 30 bp, Artificial Sequence
  Synthetic oligonucleotide
actctgacgttacacgtgaaactcattcta

SEQ ID NO: 286651 - DNA, 30 bp, Artificial Sequence
  Synthetic oligonucleotide
ggttagaacgtacattccccggttattcta

SEQ ID NO: 286652 - DNA, 30 bp, Artificial Sequence
  Synthetic oligonucleotide
aagggtagtgtaagggacggcacacttcta

SEQ ID NO: 286653 - DNA, 30 bp, Artificial Sequence
  Synthetic oligonucleotide
aacgaagttgtctcctaaacgatacttcta

SEQ ID NO: 286654 - DNA, 30 bp, Artificial Sequence
  Synthetic oligonucleotide
gtcatcatggattaggatccactcgttcta

SEQ ID NO: 286655 - DNA, 30 bp, Artificial Sequence
  Synthetic oligonucleotide
cgtacggagagcgtgagtcttcatgttcta

SEQ ID NO: 286656 - DNA, 30 bp, Artificial Sequence
  Synthetic oligonucleotide
taggaatatggttagtaatgcactgttcta

SEQ ID NO: 286657 - DNA, 30 bp, Artificial Sequence
  Synthetic oligonucleotide
cgggggtacagagtcgtaagttgtgttcta

SEQ ID NO: 286658 - DNA, 30 bp, Artificial Sequence
  Synthetic oligonucleotide
gtcggcgatcacctcgttagggttgttcta

SEQ ID NO: 286659 - DNA, 30 bp, Artificial Sequence
  Synthetic oligonucleotide
cccaaaagacactttatatagcgatttcta

SEQ ID NO: 286660 - DNA, 30 bp, Artificial Sequence
  Synthetic oligonucleotide
gacagtcgaatctcaaaaggtgagtttcta

SEQ ID NO: 286661 - DNA, 30 bp, Artificial Sequence
  Synthetic oligonucleotide
gccaacgggtaccttggacgatattttcta

SEQ ID NO: 286662 - DNA, 30 bp, Artificial Sequence
  Synthetic oligonucleotide
attcgttaggtgcgcggtgcaaaaaaagta

SEQ ID NO: 286663 - DNA, 30 bp, Artificial Sequence
  Synthetic oligonucleotide
tgctccttgtaaatccgtatagaaaaagta

SEQ ID NO: 286664 - DNA, 30 bp, Artificial Sequence
  Synthetic oligonucleotide
agttaagtggagtgtgatcaagtgaaagta

SEQ ID NO: 286665 - DNA, 30 bp, Artificial Sequence
  Synthetic oligonucleotide
atcactaatgtaaaaagggcagcacaagta

SEQ ID NO: 286666 - DNA, 30 bp, Artificial Sequence
  Synthetic oligonucleotide
gctggaccaaaatccctttgtggacaagta

SEQ ID NO: 286667 - DNA, 30 bp, Artificial Sequence
  Synthetic oligonucleotide
gccgtcactgacggttcgtactcccaagta

SEQ ID NO: 286668 - DNA, 30 bp, Artificial Sequence
  Synthetic oligonucleotide
acgtcgcaaacacctgatcttagccaagta

SEQ ID NO: 286669 - DNA, 30 bp, Artificial Sequence
  Synthetic oligonucleotide
tgacatttacacactcccctcacgcaagta

SEQ ID NO: 286670 - DNA, 30 bp, Artificial Sequence
  Synthetic oligonucleotide
atgtactaagactacaccgagccgcaagta

SEQ ID NO: 286671 - DNA, 30 bp, Artificial Sequence
  Synthetic oligonucleotide
gcatagctcaacccagtttgctggcaagta

SEQ ID NO: 286672 - DNA, 30 bp, Artificial Sequence
  Synthetic oligonucleotide
cctaataggtttgggatcatgtgagaagta

SEQ ID NO: 286673 - DNA, 30 bp, Artificial Sequence
  Synthetic oligonucleotide
cagattggtgccatactgcatctagaagta

SEQ ID NO: 286674 - DNA, 30 bp, Artificial Sequence
  Synthetic oligonucleotide
tgtaatcttagtaatttcaaggtagaagta

SEQ ID NO: 286675 - DNA, 30 bp, Artificial Sequence
  Synthetic oligonucleotide
cgtgttgtacgtgtgcctacggaggaagta

SEQ ID NO: 286676 - DNA, 30 bp, Artificial Sequence
  Synthetic oligonucleotide
gtaggggctttaaaaaagacaagataagta

SEQ ID NO: 286677 - DNA, 30 bp, Artificial Sequence
  Synthetic oligonucleotide
gtacaataggatcgtttgacacgataagta

SEQ ID NO: 286678 - DNA, 30 bp, Artificial Sequence
  Synthetic oligonucleotide
tttagcaatggggaagcaaatatataagta

SEQ ID NO: 286679 - DNA, 30 bp, Artificial Sequence
  Synthetic oligonucleotide
agtactgacgcgtccggtctaccctaagta

SEQ ID NO: 286680 - DNA, 30 bp, Artificial Sequence
  Synthetic oligonucleotide
taaattatgatcaggcgcgcgtgctaagta

SEQ ID NO: 286681 - DNA, 30 bp, Artificial Sequence
  Synthetic oligonucleotide
agcgtcttgagaaatcaaggctagtaagta

SEQ ID NO: 286682 - DNA, 30 bp, Artificial Sequence
  Synthetic oligonucleotide
aatgttgccaagctgccaccacggtaagta

SEQ ID NO: 286683 - DNA, 30 bp, Artificial Sequence
  Synthetic oligonucleotide
taaaattgatcgatggtagtgcggtaagta

SEQ ID NO: 286684 - DNA, 30 bp, Artificial Sequence
  Synthetic oligonucleotide
ccttagtcaagcgggttttcatattaagta

SEQ ID NO: 286685 - DNA, 30 bp, Artificial Sequence
  Synthetic oligonucleotide
accggtgttcgtaaaatctgtctttaagta

SEQ ID NO: 286686 - DNA, 30 bp, Artificial Sequence
  Synthetic oligonucleotide
caaatcgagaaaataatggacgtttaagta

SEQ ID NO: 286687 - DNA, 30 bp, Artificial Sequence
  Synthetic oligonucleotide
caaggagccctcgttattacacacacagta

SEQ ID NO: 286688 - DNA, 30 bp, Artificial Sequence
  Synthetic oligonucleotide
ttgatccattagtggctctgtgacacagta

SEQ ID NO: 286689 - DNA, 30 bp, Artificial Sequence
  Synthetic oligonucleotide
tacaatcagagactgaatttccccacagta

SEQ ID NO: 286690 - DNA, 30 bp, Artificial Sequence
  Synthetic oligonucleotide
ggtaatacagggcagcataccatgacagta

SEQ ID NO: 286691 - DNA, 30 bp, Artificial Sequence
  Synthetic oligonucleotide
tacggtccccaatacacagcgctgacagta

SEQ ID NO: 286692 - DNA, 30 bp, Artificial Sequence
  Synthetic oligonucleotide
cgaaacgcttgaagacgcaacttgacagta

SEQ ID NO: 286693 - DNA, 30 bp, Artificial Sequence
  Synthetic oligonucleotide
gctataatttccaggcacttcccaccagta

SEQ ID NO: 286694 - DNA, 30 bp, Artificial Sequence
  Synthetic oligonucleotide
gcagggtggggccaaatacccgtcccagta

SEQ ID NO: 286695 - DNA, 30 bp, Artificial Sequence
  Synthetic oligonucleotide
cagtaacgccgaagtaacatattcccagta

SEQ ID NO: 286696 - DNA, 30 bp, Artificial Sequence
  Synthetic oligonucleotide
gccatttcgaaacacacaactaatccagta

SEQ ID NO: 286697 - DNA, 30 bp, Artificial Sequence
  Synthetic oligonucleotide
ttaaccgggtatggtactatatctccagta

SEQ ID NO: 286698 - DNA, 30 bp, Artificial Sequence
  Synthetic oligonucleotide
aagattgtaggcggagtagagtttccagta

SEQ ID NO: 286699 - DNA, 30 bp, Artificial Sequence
  Synthetic oligonucleotide
gtatgaagtgaaatcatggattttccagta

SEQ ID NO: 286700 - DNA, 30 bp, Artificial Sequence
  Synthetic oligonucleotide
ttaaaagcggagggggcggacatagcagta

SEQ ID NO: 286701 - DNA, 30 bp, Artificial Sequence
  Synthetic oligonucleotide
gttaatggggaattatacgtgatagcagta

SEQ ID NO: 286702 - DNA, 30 bp, Artificial Sequence
  Synthetic oligonucleotide
tccgtagaacactgcgggtggcacgcagta

SEQ ID NO: 286703 - DNA, 30 bp, Artificial Sequence
  Synthetic oligonucleotide
aaccctaaatatggtccttccagggcagta

SEQ ID NO: 286704 - DNA, 30 bp, Artificial Sequence
  Synthetic oligonucleotide
ctgcgctgacttaaggttctaagtgcagta

SEQ ID NO: 286705 - DNA, 30 bp, Artificial Sequence
  Synthetic oligonucleotide
tatcaggagtagttacccagcaaatcagta

SEQ ID NO: 286706 - DNA, 30 bp, Artificial Sequence
  Synthetic oligonucleotide
ggatagggacctgcgtgatgtaaatcagta

SEQ ID NO: 286707 - DNA, 30 bp, Artificial Sequence
  Synthetic oligonucleotide
tgaagatatccaatttagcttggttcagta

SEQ ID NO: 286708 - DNA, 30 bp, Artificial Sequence
  Synthetic oligonucleotide
cttagcggtaccttacatattatttcagta

SEQ ID NO: 286709 - DNA, 30 bp, Artificial Sequence
  Synthetic oligonucleotide
cgtgcctctggtaaatgtattcgaagagta

SEQ ID NO: 286710 - DNA, 30 bp, Artificial Sequence
  Synthetic oligonucleotide
gggcgcctagggcatattactgtaagagta

SEQ ID NO: 286711 - DNA, 30 bp, Artificial Sequence
  Synthetic oligonucleotide
aaaaagcgtacagttttctaaaacagagta

SEQ ID NO: 286712 - DNA, 30 bp, Artificial Sequence
  Synthetic oligonucleotide
aagtgctaggttaaaccgtggcccagagta

SEQ ID NO: 286713 - DNA, 30 bp, Artificial Sequence
  Synthetic oligonucleotide
agtagtagatcaggatgtctgatcagagta

SEQ ID NO: 286714 - DNA, 30 bp, Artificial Sequence
  Synthetic oligonucleotide
aactgatggaactttagcacctcgagagta

SEQ ID NO: 286715 - DNA, 30 bp, Artificial Sequence
  Synthetic oligonucleotide
aagatgatctcaagtctctgagggagagta

SEQ ID NO: 286716 - DNA, 30 bp, Artificial Sequence
  Synthetic oligonucleotide
agtacagtacgcacatgtacttggagagta

SEQ ID NO: 286717 - DNA, 30 bp, Artificial Sequence
  Synthetic oligonucleotide
tacatcacactaattcccggggctagagta

SEQ ID NO: 286718 - DNA, 30 bp, Artificial Sequence
  Synthetic oligonucleotide
gtccggagaatccatagttgtagacgagta

SEQ ID NO: 286719 - DNA, 30 bp, Artificial Sequence
  Synthetic oligonucleotide
ggtattatccatgcgtgaccatgacgagta

SEQ ID NO: 286720 - DNA, 30 bp, Artificial Sequence
  Synthetic oligonucleotide
tgacactgggcggactcagacacccgagta

SEQ ID NO: 286721 - DNA, 30 bp, Artificial Sequence
  Synthetic oligonucleotide
gcccttaagtacctgcaacgtttccgagta

SEQ ID NO: 286722 - DNA, 30 bp, Artificial Sequence
  Synthetic oligonucleotide
ggaataaatcacttgggatgatgtcgagta

SEQ ID NO: 286723 - DNA, 30 bp, Artificial Sequence
  Synthetic oligonucleotide
tctgacggtcagagtgtctaagcaggagta

SEQ ID NO: 286724 - DNA, 30 bp, Artificial Sequence
  Synthetic oligonucleotide
tacacggcgccgaagttatttggaggagta

SEQ ID NO: 286725 - DNA, 30 bp, Artificial Sequence
  Synthetic oligonucleotide
gttggtattacgtcttcatggctaggagta

SEQ ID NO: 286726 - DNA, 30 bp, Artificial Sequence
  Synthetic oligonucleotide
taatatgcgggtccgtgctactggggagta

SEQ ID NO: 286727 - DNA, 30 bp, Artificial Sequence
  Synthetic oligonucleotide
tagtttccccatgaccccgcttgtggagta

SEQ ID NO: 286728 - DNA, 30 bp, Artificial Sequence
  Synthetic oligonucleotide
aatatgctatcggacagcttgagctgagta

SEQ ID NO: 286729 - DNA, 30 bp, Artificial Sequence
  Synthetic oligonucleotide
gggggaaagaccggagcgtactgctgagta

SEQ ID NO: 286730 - DNA, 30 bp, Artificial Sequence
  Synthetic oligonucleotide
atcgcctgatagtacgtcggcgcgtgagta

SEQ ID NO: 286731 - DNA, 30 bp, Artificial Sequence
  Synthetic oligonucleotide
aacggatatcatacgacgaagtcttgagta

SEQ ID NO: 286732 - DNA, 40 bp, Artificial Sequence
  Synthetic oligonucleotide
cgatagatatgtcccaatcaagggtcgcgattgttgagta

SEQ ID NO: 286733 - DNA, 30 bp, Artificial Sequence
  Synthetic oligonucleotide
ttggggtcgcgaacacctgataaaatagta

SEQ ID NO: 286734 - DNA, 30 bp, Artificial Sequence
  Synthetic oligonucleotide
acctactgataagcccatggaggcatagta

SEQ ID NO: 286735 - DNA, 30 bp, Artificial Sequence
  Synthetic oligonucleotide
gcaacggtgcactcgtatacccagatagta

SEQ ID NO: 286736 - DNA, 30 bp, Artificial Sequence
  Synthetic oligonucleotide
gcacacggagtcgttaaacggacgatagta

SEQ ID NO: 286737 - DNA, 30 bp, Artificial Sequence
  Synthetic oligonucleotide
caaaatgcgtgaccatcacataggatagta

SEQ ID NO: 286738 - DNA, 30 bp, Artificial Sequence
  Synthetic oligonucleotide
agaagtacgaatagtgtaatctggatagta

SEQ ID NO: 286739 - DNA, 30 bp, Artificial Sequence
  Synthetic oligonucleotide
cagtcaaaagagaggtagcgttggatagta

SEQ ID NO: 286740 - DNA, 30 bp, Artificial Sequence
  Synthetic oligonucleotide
atgtggggccgtgaagattttcctatagta

SEQ ID NO: 286741 - DNA, 30 bp, Artificial Sequence
  Synthetic oligonucleotide
agagctggcacccatgaagggtgtatagta

SEQ ID NO: 286742 - DNA, 30 bp, Artificial Sequence
  Synthetic oligonucleotide
tgccaaagatatattttacgagaactagta

SEQ ID NO: 286743 - DNA, 30 bp, Artificial Sequence
  Synthetic oligonucleotide
tcggtgtaatcgtgaaaactattactagta

SEQ ID NO: 286744 - DNA, 30 bp, Artificial Sequence
  Synthetic oligonucleotide
cggctccacctcgtggaacgagtcctagta

SEQ ID NO: 286745 - DNA, 30 bp, Artificial Sequence
  Synthetic oligonucleotide
ggctaaagaccttcctaatgtgtcctagta

SEQ ID NO: 286746 - DNA, 30 bp, Artificial Sequence
  Synthetic oligonucleotide
cccctaattggttatatagaggacgtagta

SEQ ID NO: 286747 - DNA, 30 bp, Artificial Sequence
  Synthetic oligonucleotide
cggtacacgggataccaaggtcctgtagta

SEQ ID NO: 286748 - DNA, 30 bp, Artificial Sequence
  Synthetic oligonucleotide
gtaatctgaaattgtggaaactctgtagta

SEQ ID NO: 286749 - DNA, 30 bp, Artificial Sequence
  Synthetic oligonucleotide
gcatagaagggttcgagttttattgtagta

SEQ ID NO: 286750 - DNA, 30 bp, Artificial Sequence
  Synthetic oligonucleotide
gcggttttgcagaagcatagggcattagta

SEQ ID NO: 286751 - DNA, 30 bp, Artificial Sequence
  Synthetic oligonucleotide
tgtacgcaacccgtaatccctaacttagta

SEQ ID NO: 286752 - DNA, 30 bp, Artificial Sequence
  Synthetic oligonucleotide
gaggacttggagttccaggcatacttagta

SEQ ID NO: 286753 - DNA, 30 bp, Artificial Sequence
  Synthetic oligonucleotide
caacacgtcgcctacggatgccgcttagta

SEQ ID NO: 286754 - DNA, 30 bp, Artificial Sequence
  Synthetic oligonucleotide
ccagcgccgatgaagaaattacggttagta

SEQ ID NO: 286755 - DNA, 30 bp, Artificial Sequence
  Synthetic oligonucleotide
ctagcctcaaggccaaccaagcggttagta

SEQ ID NO: 286756 - DNA, 30 bp, Artificial Sequence
  Synthetic oligonucleotide
gtacagggtcgtgagagtcggtatttagta

SEQ ID NO: 286757 - DNA, 30 bp, Artificial Sequence
  Synthetic oligonucleotide
atgtggtccctcggctggggaattttagta

SEQ ID NO: 286758 - DNA, 30 bp, Artificial Sequence
  Synthetic oligonucleotide
tgctaaagttgaacttcgcgctataacgta

SEQ ID NO: 286759 - DNA, 30 bp, Artificial Sequence
  Synthetic oligonucleotide
tcgccactaaccgctgggaatcgtaacgta

SEQ ID NO: 286760 - DNA, 30 bp, Artificial Sequence
  Synthetic oligonucleotide
agaaaaacgacgagcttataagcacacgta

SEQ ID NO: 286761 - DNA, 30 bp, Artificial Sequence
  Synthetic oligonucleotide
cacgtacctaaaaggaattggggacacgta

SEQ ID NO: 286762 - DNA, 30 bp, Artificial Sequence
  Synthetic oligonucleotide
tagatagacacaagatttttaagccacgta

SEQ ID NO: 286763 - DNA, 30 bp, Artificial Sequence
  Synthetic oligonucleotide
atccattgatctcgcagccgtgcgcacgta

SEQ ID NO: 286764 - DNA, 30 bp, Artificial Sequence
  Synthetic oligonucleotide
gcaagaaagtttcgtatgcaaatgcacgta

SEQ ID NO: 286765 - DNA, 30 bp, Artificial Sequence
  Synthetic oligonucleotide
gtcagcgctaccatgaagctatctcacgta

SEQ ID NO: 286766 - DNA, 30 bp, Artificial Sequence
  Synthetic oligonucleotide
ctcaccaggagcgcgggatttgaggacgta

SEQ ID NO: 286767 - DNA, 30 bp, Artificial Sequence
  Synthetic oligonucleotide
aggcaagacacctccgaattcgcggacgta

SEQ ID NO: 286768 - DNA, 30 bp, Artificial Sequence
  Synthetic oligonucleotide
attcgccggacaatgttttgttcggacgta

SEQ ID NO: 286769 - DNA, 30 bp, Artificial Sequence
  Synthetic oligonucleotide
gtctcgtgttatgaactgggcgaatacgta

SEQ ID NO: 286770 - DNA, 30 bp, Artificial Sequence
  Synthetic oligonucleotide
tatagcgagcgaaaaagaccataatacgta

SEQ ID NO: 286771 - DNA, 30 bp, Artificial Sequence
  Synthetic oligonucleotide
gaggactttttgctccaacgcgtatacgta

SEQ ID NO: 286772 - DNA, 30 bp, Artificial Sequence
  Synthetic oligonucleotide
tcgacctactttctcacaaactggtacgta

SEQ ID NO: 286773 - DNA, 30 bp, Artificial Sequence
  Synthetic oligonucleotide
aacagagcgctaactctgtcaagttacgta

SEQ ID NO: 286774 - DNA, 30 bp, Artificial Sequence
  Synthetic oligonucleotide
tcctcatctagtctaggaagacgttacgta

SEQ ID NO: 286775 - DNA, 30 bp, Artificial Sequence
  Synthetic oligonucleotide
tagttcagcttgggagtcttgctcaccgta

SEQ ID NO: 286776 - DNA, 30 bp, Artificial Sequence
  Synthetic oligonucleotide
ggatagcacccatactgattcgtcaccgta

SEQ ID NO: 286777 - DNA, 30 bp, Artificial Sequence
  Synthetic oligonucleotide
tgaaggtactaacgttctttgacgaccgta

SEQ ID NO: 286778 - DNA, 30 bp, Artificial Sequence
  Synthetic oligonucleotide
gcggactactcgggtgagaggccgaccgta

SEQ ID NO: 286779 - DNA, 30 bp, Artificial Sequence
  Synthetic oligonucleotide
acggtatcatttgggttaacgcgtaccgta

SEQ ID NO: 286780 - DNA, 30 bp, Artificial Sequence
  Synthetic oligonucleotide
tataggtcagggactgttgaaagacccgta

SEQ ID NO: 286781 - DNA, 30 bp, Artificial Sequence
  Synthetic oligonucleotide
cagtatcggagaaggcggagggccgccgta

SEQ ID NO: 286782 - DNA, 30 bp, Artificial Sequence
  Synthetic oligonucleotide
tcgcatccggactccggaacaggcgccgta

SEQ ID NO: 286783 - DNA, 30 bp, Artificial Sequence
  Synthetic oligonucleotide
atgagaattaaaagttgggtatgggccgta

SEQ ID NO: 286784 - DNA, 31 bp, Artificial Sequence
  Synthetic oligonucleotide
aagcctcactaatcggcgcgttctctccgta

SEQ ID NO: 286785 - DNA, 30 bp, Artificial Sequence
  Synthetic oligonucleotide
ttgaagaggaagagtttcatgaggtccgta

SEQ ID NO: 286786 - DNA, 30 bp, Artificial Sequence
  Synthetic oligonucleotide
gctgaggaggtcaaagagtatttgtccgta

SEQ ID NO: 286787 - DNA, 30 bp, Artificial Sequence
  Synthetic oligonucleotide
tcgttccaccggactagggctttgtccgta

SEQ ID NO: 286788 - DNA, 30 bp, Artificial Sequence
  Synthetic oligonucleotide
tttgcaacgaacaataagtcccattccgta

SEQ ID NO: 286789 - DNA, 30 bp, Artificial Sequence
  Synthetic oligonucleotide
aatcctatagtggccggaaagcgttccgta

SEQ ID NO: 286790 - DNA, 30 bp, Artificial Sequence
  Synthetic oligonucleotide
gtcccgtcttgtctcgttccatgttccgta

SEQ ID NO: 286791 - DNA, 30 bp, Artificial Sequence
  Synthetic oligonucleotide
tcagggcccacattgtcccgcaacagcgta

SEQ ID NO: 286792 - DNA, 30 bp, Artificial Sequence
  Synthetic oligonucleotide
atcctgtaccggcacacgggcagcagcgta

SEQ ID NO: 286793 - DNA, 30 bp, Artificial Sequence
  Synthetic oligonucleotide
agggaaacgttcaccataattcgcagcgta

SEQ ID NO: 286794 - DNA, 30 bp, Artificial Sequence
  Synthetic oligonucleotide
ggtttgacgttcttctgtctggtcagcgta

SEQ ID NO: 286795 - DNA, 30 bp, Artificial Sequence
  Synthetic oligonucleotide
ggtacgatcttttttttcatgttcagcgta

SEQ ID NO: 286796 - DNA, 30 bp, Artificial Sequence
  Synthetic oligonucleotide
cgaagtattgtttaactccagcagagcgta

SEQ ID NO: 286797 - DNA, 30 bp, Artificial Sequence
  Synthetic oligonucleotide
caataacctgcagcgtcaagttggagcgta

SEQ ID NO: 286798 - DNA, 30 bp, Artificial Sequence
  Synthetic oligonucleotide
tcacaaatataaattatacgccatagcgta

SEQ ID NO: 286799 - DNA, 30 bp, Artificial Sequence
  Synthetic oligonucleotide
ttccgcttagactagctctagtatagcgta

SEQ ID NO: 286800 - DNA, 30 bp, Artificial Sequence
  Synthetic oligonucleotide
cgaattgctagattatatcatgaacgcgta

SEQ ID NO: 286801 - DNA, 30 bp, Artificial Sequence
  Synthetic oligonucleotide
tgaagtgatcggctttgccctatccgcgta

SEQ ID NO: 286802 - DNA, 30 bp, Artificial Sequence
  Synthetic oligonucleotide
caccgggcaaagtgatatttattccgcgta

SEQ ID NO: 286803 - DNA, 30 bp, Artificial Sequence
  Synthetic oligonucleotide
atcaaagagcgatggtaactccggcgcgta

SEQ ID NO: 286804 - DNA, 30 bp, Artificial Sequence
  Synthetic oligonucleotide
gcgcttccacagtctgtccctgggcgcgta

SEQ ID NO: 286805 - DNA, 30 bp, Artificial Sequence
  Synthetic oligonucleotide
ggcgtcctacgcatgggacccatgcgcgta

SEQ ID NO: 286806 - DNA, 30 bp, Artificial Sequence
  Synthetic oligonucleotide
aaggtccgtacatgggtcgcgtatcgcgta

SEQ ID NO: 286807 - DNA, 30 bp, Artificial Sequence
  Synthetic oligonucleotide
atgcggtgcactgtgcgacaacaaggcgta

SEQ ID NO: 286808 - DNA, 30 bp, Artificial Sequence
  Synthetic oligonucleotide
tagctttaagaggctccactcaccggcgta

SEQ ID NO: 286809 - DNA, 30 bp, Artificial Sequence
  Synthetic oligonucleotide
ggcaaacgttttgcttcaatcagcggcgta

SEQ ID NO: 286810 - DNA, 30 bp, Artificial Sequence
  Synthetic oligonucleotide
tccctgcaaaagagggaacgatgcggcgta

SEQ ID NO: 286811 - DNA, 30 bp, Artificial Sequence
  Synthetic oligonucleotide
taccccagtttgggtcagcaggcgggcgta

SEQ ID NO: 286812 - DNA, 30 bp, Artificial Sequence
  Synthetic oligonucleotide
ggaaattacggcttaactcggtcgggcgta

SEQ ID NO: 286813 - DNA, 30 bp, Artificial Sequence
  Synthetic oligonucleotide
cgcagtggtaaagcaaacgttcggggcgta

SEQ ID NO: 286814 - DNA, 30 bp, Artificial Sequence
  Synthetic oligonucleotide
aactccggggagtgcggtgttttgggcgta

SEQ ID NO: 286815 - DNA, 30 bp, Artificial Sequence
  Synthetic oligonucleotide
ttatactcagcagagaaactgggatgcgta

SEQ ID NO: 286816 - DNA, 30 bp, Artificial Sequence
  Synthetic oligonucleotide
gaagacagatcgctcaaagcagtatgcgta

SEQ ID NO: 286817 - DNA, 30 bp, Artificial Sequence
  Synthetic oligonucleotide
gaaatcacaatcgaaattgttacctgcgta

SEQ ID NO: 286818 - DNA, 30 bp, Artificial Sequence
  Synthetic oligonucleotide
tatataccctgcggcgtgcccgcctgcgta

SEQ ID NO: 286819 - DNA, 30 bp, Artificial Sequence
  Synthetic oligonucleotide
ctataaaacacactgattgtaagctgcgta

SEQ ID NO: 286820 - DNA, 30 bp, Artificial Sequence
  Synthetic oligonucleotide
aagacgtatatggggtcggcaggctgcgta

SEQ ID NO: 286821 - DNA, 30 bp, Artificial Sequence
  Synthetic oligonucleotide
actcccgtttaattaaattcggagtgcgta

SEQ ID NO: 286822 - DNA, 30 bp, Artificial Sequence
  Synthetic oligonucleotide
acacttatgcaagaccttggatagtgcgta

SEQ ID NO: 286823 - DNA, 30 bp, Artificial Sequence
  Synthetic oligonucleotide
aaagagtgtccggcaacagcacgttgcgta

SEQ ID NO: 286824 - DNA, 30 bp, Artificial Sequence
  Synthetic oligonucleotide
tcacccttttacacagatcgctcaatcgta

SEQ ID NO: 286825 - DNA, 29 bp, Artificial Sequence
  Synthetic oligonucleotide
ccgcgcgtaccttccatgtcataatcgta

SEQ ID NO: 286826 - DNA, 30 bp, Artificial Sequence
  Synthetic oligonucleotide
ggttaacgtatagagctctactccatcgta

SEQ ID NO: 286827 - DNA, 30 bp, Artificial Sequence
  Synthetic oligonucleotide
agaagtgttaaagtctcggacgtcatcgta

SEQ ID NO: 286828 - DNA, 30 bp, Artificial Sequence
  Synthetic oligonucleotide
accgggatgcccgttacgctcgagatcgta

SEQ ID NO: 286829 - DNA, 30 bp, Artificial Sequence
  Synthetic oligonucleotide
tatggccataacagctcccttgagatcgta

SEQ ID NO: 286830 - DNA, 30 bp, Artificial Sequence
  Synthetic oligonucleotide
tgtggtcgtcgtcgaggtgttgcgatcgta

SEQ ID NO: 286831 - DNA, 30 bp, Artificial Sequence
  Synthetic oligonucleotide
caataaacacggacgcgattagttatcgta

SEQ ID NO: 286832 - DNA, 30 bp, Artificial Sequence
  Synthetic oligonucleotide
tcctggatattgatttttcgcatactcgta

SEQ ID NO: 286833 - DNA, 30 bp, Artificial Sequence
  Synthetic oligonucleotide
aacagccttaccgcgggaaatagcctcgta

SEQ ID NO: 286834 - DNA, 30 bp, Artificial Sequence
  Synthetic oligonucleotide
tctcaaaggggggactgacacaagctcgta

SEQ ID NO: 286835 - DNA, 30 bp, Artificial Sequence
  Synthetic oligonucleotide
ccttcgaacaacggggcacgtcctctcgta

SEQ ID NO: 286836 - DNA, 30 bp, Artificial Sequence
  Synthetic oligonucleotide
gagctgtcctaacgactagtcggtctcgta

SEQ ID NO: 286837 - DNA, 30 bp, Artificial Sequence
  Synthetic oligonucleotide
attagatgaacggcggtacttgtagtcgta

SEQ ID NO: 286838 - DNA, 30 bp, Artificial Sequence
  Synthetic oligonucleotide
acaagcacaggtctgtgtttgcacgtcgta

SEQ ID NO: 286839 - DNA, 30 bp, Artificial Sequence
  Synthetic oligonucleotide
aaaggccctacgcgtgcgaggtttgtcgta

SEQ ID NO: 286840 - DNA, 30 bp, Artificial Sequence
  Synthetic oligonucleotide
caccccagctccaccaaactttttgtcgta

SEQ ID NO: 286841 - DNA, 30 bp, Artificial Sequence
  Synthetic oligonucleotide
aaagaaggccaccttgaaatagtattcgta

SEQ ID NO: 286842 - DNA, 30 bp, Artificial Sequence
  Synthetic oligonucleotide
cgcatgcgacgcgagatctcatacttcgta

SEQ ID NO: 286843 - DNA, 30 bp, Artificial Sequence
  Synthetic oligonucleotide
gctgtagcaagatacataggtaccttcgta

SEQ ID NO: 286844 - DNA, 30 bp, Artificial Sequence
  Synthetic oligonucleotide
cttgtaacataagtgcatacgtgcttcgta

SEQ ID NO: 286845 - DNA, 30 bp, Artificial Sequence
  Synthetic oligonucleotide
ggggcaccccctagcgacagccagttcgta

SEQ ID NO: 286846 - DNA, 30 bp, Artificial Sequence
  Synthetic oligonucleotide
gaagtcggctgttcctcagataggttcgta

SEQ ID NO: 286847 - DNA, 30 bp, Artificial Sequence
  Synthetic oligonucleotide
ggatgcttttatggcagtgaggctttcgta

SEQ ID NO: 286848 - DNA, 30 bp, Artificial Sequence
  Synthetic oligonucleotide
acttcaactatgcacctcgttacaaaggta

SEQ ID NO: 286849 - DNA, 30 bp, Artificial Sequence
  Synthetic oligonucleotide
ggattacgatggagtattaacctaaaggta

SEQ ID NO: 286850 - DNA, 30 bp, Artificial Sequence
  Synthetic oligonucleotide
gctaccgtcttaacatagtgggtaaaggta

SEQ ID NO: 286851 - DNA, 29 bp, Artificial Sequence
  Synthetic oligonucleotide
cacaacacgctagcatgaaaaataaggta

SEQ ID NO: 286852 - DNA, 30 bp, Artificial Sequence
  Synthetic oligonucleotide
tctcttgtaagtgggcaaagtacccaggta

SEQ ID NO: 286853 - DNA, 30 bp, Artificial Sequence
  Synthetic oligonucleotide
agagctaacaagacaggctaatcccaggta

SEQ ID NO: 286854 - DNA, 30 bp, Artificial Sequence
  Synthetic oligonucleotide
gtaggcacagagtgaaaggtaacgcaggta

SEQ ID NO: 286855 - DNA, 30 bp, Artificial Sequence
  Synthetic oligonucleotide
caggatctaatgtcgcgcgcggtgcaggta

SEQ ID NO: 286856 - DNA, 30 bp, Artificial Sequence
  Synthetic oligonucleotide
tacataatcagaaatatcgggcgtcaggta

SEQ ID NO: 286857 - DNA, 30 bp, Artificial Sequence
  Synthetic oligonucleotide
gagaatagatcgcacgcatcagttcaggta

SEQ ID NO: 286858 - DNA, 30 bp, Artificial Sequence
  Synthetic oligonucleotide
acatcctaatcttgatagggggacgaggta

SEQ ID NO: 286859 - DNA, 30 bp, Artificial Sequence
  Synthetic oligonucleotide
aaaagctccccaagctaataaaccgaggta

SEQ ID NO: 286860 - DNA, 30 bp, Artificial Sequence
  Synthetic oligonucleotide
ggtagagtctggccagagtatgaggaggta

SEQ ID NO: 286861 - DNA, 30 bp, Artificial Sequence
  Synthetic oligonucleotide
tcgcccagagaacattggttgtgggaggta

SEQ ID NO: 286862 - DNA, 30 bp, Artificial Sequence
  Synthetic oligonucleotide
gtcccggctgcattggtgctcgtggaggta

SEQ ID NO: 286863 - DNA, 30 bp, Artificial Sequence
  Synthetic oligonucleotide
ggcggtgtaaagactggcaggcttgaggta

SEQ ID NO: 286864 - DNA, 30 bp, Artificial Sequence
  Synthetic oligonucleotide
cggtagccgagctccggtcatgaataggta

SEQ ID NO: 286865 - DNA, 30 bp, Artificial Sequence
  Synthetic oligonucleotide
cctgactcagtacggacagagtcataggta

SEQ ID NO: 286866 - DNA, 30 bp, Artificial Sequence
  Synthetic oligonucleotide
atcattaaccgccttgggggttgataggta

SEQ ID NO: 286867 - DNA, 31 bp, Artificial Sequence
  Synthetic oligonucleotide
tcggaaaaggcgctgcacgcaagtataggta

SEQ ID NO: 286868 - DNA, 30 bp, Artificial Sequence
  Synthetic oligonucleotide
aaccggtccaagagtccttggcactaggta

SEQ ID NO: 286869 - DNA, 30 bp, Artificial Sequence
  Synthetic oligonucleotide
gttatggtgtgtgcgggttccaggtaggta

SEQ ID NO: 286870 - DNA, 30 bp, Artificial Sequence
  Synthetic oligonucleotide
cctccacgtcggtttttcgagaggtaggta

SEQ ID NO: 286871 - DNA, 30 bp, Artificial Sequence
  Synthetic oligonucleotide
agttagtaaacaggaacggattggtaggta

SEQ ID NO: 286872 - DNA, 30 bp, Artificial Sequence
  Synthetic oligonucleotide
aaaatggggtgatctccagtagtgtaggta

SEQ ID NO: 286873 - DNA, 30 bp, Artificial Sequence
  Synthetic oligonucleotide
gccgcgtagcggaactgggtaaattaggta

SEQ ID NO: 286874 - DNA, 30 bp, Artificial Sequence
  Synthetic oligonucleotide
ctgggtacagagcgtgccagcagttaggta

SEQ ID NO: 286875 - DNA, 30 bp, Artificial Sequence
  Synthetic oligonucleotide
cgcgactgatcgcgcgtattgcgttaggta

SEQ ID NO: 286876 - DNA, 30 bp, Artificial Sequence
  Synthetic oligonucleotide
tggagaggattatgtgacgcaaacacggta

SEQ ID NO: 286877 - DNA, 30 bp, Artificial Sequence
  Synthetic oligonucleotide
ggtcagattacatgcgcagcccagacggta

SEQ ID NO: 286878 - DNA, 30 bp, Artificial Sequence
  Synthetic oligonucleotide
gtggagttggctactcgcctggcgacggta

SEQ ID NO: 286879 - DNA, 30 bp, Artificial Sequence
  Synthetic oligonucleotide
gacagtgggtctactgagctaatgacggta

SEQ ID NO: 286880 - DNA, 30 bp, Artificial Sequence
  Synthetic oligonucleotide
tgctgggtataaatgtttctcgtgacggta

SEQ ID NO: 286881 - DNA, 31 bp, Artificial Sequence
  Synthetic oligonucleotide
gtagtagacatcttacataagggtgacggta

SEQ ID NO: 286882 - DNA, 30 bp, Artificial Sequence
  Synthetic oligonucleotide
atgcgtgttgggactaacatttatacggta

SEQ ID NO: 286883 - DNA, 30 bp, Artificial Sequence
  Synthetic oligonucleotide
gttactattgcaccagtatgaggtacggta

SEQ ID NO: 286884 - DNA, 31 bp, Artificial Sequence
  Synthetic oligonucleotide
cggtctgctgtaggtcccagcatgtacggta

SEQ ID NO: 286885 - DNA, 30 bp, Artificial Sequence
  Synthetic oligonucleotide
tttacaggcaagataggcgcaataccggta

SEQ ID NO: 286886 - DNA, 30 bp, Artificial Sequence
  Synthetic oligonucleotide
cgcgtagtattgggctcttcggccccggta

SEQ ID NO: 286887 - DNA, 30 bp, Artificial Sequence
  Synthetic oligonucleotide
cccaggttcgcaaaagccccaaggccggta

SEQ ID NO: 286888 - DNA, 30 bp, Artificial Sequence
  Synthetic oligonucleotide
tcatgaagttccgactggtgagctccggta

SEQ ID NO: 286889 - DNA, 30 bp, Artificial Sequence
  Synthetic oligonucleotide
ggaaggtcccccagtataacagcagcggta

SEQ ID NO: 286890 - DNA, 30 bp, Artificial Sequence
  Synthetic oligonucleotide
gtttataggcggcttgtactaagcgcggta

SEQ ID NO: 286891 - DNA, 30 bp, Artificial Sequence
  Synthetic oligonucleotide
ctgctgagtcggaggtacgcagtcgcggta

SEQ ID NO: 286892 - DNA, 30 bp, Artificial Sequence
  Synthetic oligonucleotide
cttctctgccattgggctagccaggcggta

SEQ ID NO: 286893 - DNA, 30 bp, Artificial Sequence
  Synthetic oligonucleotide
cggtgcgggcttagccatctagaggcggta

SEQ ID NO: 286894 - DNA, 30 bp, Artificial Sequence
  Synthetic oligonucleotide
tatcgaaatagtgcaaaatcgctggcggta

SEQ ID NO: 286895 - DNA, 30 bp, Artificial Sequence
  Synthetic oligonucleotide
tttcgtcgatactatggtttaaatgcggta

SEQ ID NO: 286896 - DNA, 30 bp, Artificial Sequence
  Synthetic oligonucleotide
aagctcccgttacccggacgtaatgcggta

SEQ ID NO: 286897 - DNA, 30 bp, Artificial Sequence
  Synthetic oligonucleotide
gggaatgttacgacgaatctgcgtgcggta

SEQ ID NO: 286898 - DNA, 30 bp, Artificial Sequence
  Synthetic oligonucleotide
attagcaaacctgataaagaacttgcggta

SEQ ID NO: 286899 - DNA, 30 bp, Artificial Sequence
  Synthetic oligonucleotide
atcggcgtggatgacactttgcaatcggta

SEQ ID NO: 286900 - DNA, 30 bp, Artificial Sequence
  Synthetic oligonucleotide
ggacggtcgatccatacgtaaagatcggta

SEQ ID NO: 286901 - DNA, 30 bp, Artificial Sequence
  Synthetic oligonucleotide
cggacaagcatacattgttggtgatcggta

SEQ ID NO: 286902 - DNA, 31 bp, Artificial Sequence
  Synthetic oligonucleotide
tgcattagtcctccgggaggttcggtcggta

SEQ ID NO: 286903 - DNA, 30 bp, Artificial Sequence
  Synthetic oligonucleotide
cgtggtaaccagtgtttatagccttcggta

SEQ ID NO: 286904 - DNA, 30 bp, Artificial Sequence
  Synthetic oligonucleotide
tacggtgataattataatgtgagttcggta

SEQ ID NO: 286905 - DNA, 30 bp, Artificial Sequence
  Synthetic oligonucleotide
ccaatttagtttaactcgcctgtttcggta

SEQ ID NO: 286906 - DNA, 30 bp, Artificial Sequence
  Synthetic oligonucleotide
cctgcccacgtatcatgcacctaaagggta

SEQ ID NO: 286907 - DNA, 30 bp, Artificial Sequence
  Synthetic oligonucleotide
gctctgtagcggtctcagtagcgaagggta

SEQ ID NO: 286908 - DNA, 30 bp, Artificial Sequence
  Synthetic oligonucleotide
acttagttgattcccccgaaggctagggta

SEQ ID NO: 286909 - DNA, 30 bp, Artificial Sequence
  Synthetic oligonucleotide
agtcctcctcggcccggcttatctagggta

SEQ ID NO: 286910 - DNA, 30 bp, Artificial Sequence
  Synthetic oligonucleotide
ttgagcatgatagtgcttggatgacgggta

SEQ ID NO: 286911 - DNA, 30 bp, Artificial Sequence
  Synthetic oligonucleotide
ttcacgaatcctctgtatcaacaccgggta

SEQ ID NO: 286912 - DNA, 30 bp, Artificial Sequence
  Synthetic oligonucleotide
ccaatgacgtacgcgcgtaggccccgggta

SEQ ID NO: 286913 - DNA, 30 bp, Artificial Sequence
  Synthetic oligonucleotide
catgctaattcaatggggaattcccgggta

SEQ ID NO: 286914 - DNA, 30 bp, Artificial Sequence
  Synthetic oligonucleotide
gcacagcaatctgctttcgcgagccgggta

SEQ ID NO: 286915 - DNA, 31 bp, Artificial Sequence
  Synthetic oligonucleotide
ccagatgtcataaacaaatgaacgccgggta

SEQ ID NO: 286916 - DNA, 30 bp, Artificial Sequence
  Synthetic oligonucleotide
ggtctcaaattccgaggtgaggcgcgggta

SEQ ID NO: 286917 - DNA, 30 bp, Artificial Sequence
  Synthetic oligonucleotide
gggctaagaagcgatttcgtctcaggggta

SEQ ID NO: 286918 - DNA, 30 bp, Artificial Sequence
  Synthetic oligonucleotide
aagtgcatcacacggtacgtgagaggggta

SEQ ID NO: 286919 - DNA, 30 bp, Artificial Sequence
  Synthetic oligonucleotide
gtatgtttcgataagcatgctcgaggggta

SEQ ID NO: 286920 - DNA, 30 bp, Artificial Sequence
  Synthetic oligonucleotide
agacgttctaactgtgcgtcgaacggggta

SEQ ID NO: 286921 - DNA, 30 bp, Artificial Sequence
  Synthetic oligonucleotide
gcaaaaggcttggcagcacattacggggta

SEQ ID NO: 286922 - DNA, 30 bp, Artificial Sequence
  Synthetic oligonucleotide
tgcgtaacttttctcctctgaaccggggta

SEQ ID NO: 286923 - DNA, 30 bp, Artificial Sequence
  Synthetic oligonucleotide
tagacgcatacaacatgtagatccggggta

SEQ ID NO: 286924 - DNA, 31 bp, Artificial Sequence
  Synthetic oligonucleotide
agcgcagttaccctaagaatgattcggggta

SEQ ID NO: 286925 - DNA, 30 bp, Artificial Sequence
  Synthetic oligonucleotide
aaaaagaggtgtcatagcttctagggggta

SEQ ID NO: 286926 - DNA, 30 bp, Artificial Sequence
  Synthetic oligonucleotide
ctgcgactctttatcgcggtttcgggggta

SEQ ID NO: 286927 - DNA, 30 bp, Artificial Sequence
  Synthetic oligonucleotide
gactggttgaaggtcaaatcggggggggta

SEQ ID NO: 286928 - DNA, 30 bp, Artificial Sequence
  Synthetic oligonucleotide
atggcgcaaccctttcaacggctgggggta

SEQ ID NO: 286929 - DNA, 30 bp, Artificial Sequence
  Synthetic oligonucleotide
agtaggtgactaaggtggggaattggggta

SEQ ID NO: 286930 - DNA, 30 bp, Artificial Sequence
  Synthetic oligonucleotide
gccttaagcttaatttggggttcatgggta

SEQ ID NO: 286931 - DNA, 30 bp, Artificial Sequence
  Synthetic oligonucleotide
ggtagggatgtgtttcgagcgggatgggta

SEQ ID NO: 286932 - DNA, 30 bp, Artificial Sequence
  Synthetic oligonucleotide
tgggcccgttagcacccttcgacctgggta

SEQ ID NO: 286933 - DNA, 30 bp, Artificial Sequence
  Synthetic oligonucleotide
gcgggtcacagtcaacacagaccgtgggta

SEQ ID NO: 286934 - DNA, 30 bp, Artificial Sequence
  Synthetic oligonucleotide
gttaacagcccaggtcaaataccgtgggta

SEQ ID NO: 286935 - DNA, 30 bp, Artificial Sequence
  Synthetic oligonucleotide
tcgcttatcaaaattgtgatgtcgtgggta

SEQ ID NO: 286936 - DNA, 30 bp, Artificial Sequence
  Synthetic oligonucleotide
ccgacctactacgcacctctggtttgggta

SEQ ID NO: 286937 - DNA, 30 bp, Artificial Sequence
  Synthetic oligonucleotide
agaaatgcaaagtcacttcggttttgggta

SEQ ID NO: 286938 - DNA, 30 bp, Artificial Sequence
  Synthetic oligonucleotide
atctcatagccgtacttatcgagaatggta

SEQ ID NO: 286939 - DNA, 30 bp, Artificial Sequence
  Synthetic oligonucleotide
gtagtacatcatactcgctggataatggta

SEQ ID NO: 286940 - DNA, 31 bp, Artificial Sequence
  Synthetic oligonucleotide
gatagcttacatggaatgctcagacatggta

SEQ ID NO: 286941 - DNA, 30 bp, Artificial Sequence
  Synthetic oligonucleotide
cccacgaaagggcgccaagcaaccatggta

SEQ ID NO: 286942 - DNA, 30 bp, Artificial Sequence
  Synthetic oligonucleotide
aaagtgggatttatggggatattcatggta

SEQ ID NO: 286943 - DNA, 30 bp, Artificial Sequence
  Synthetic oligonucleotide
gcaagcccttaatgtctcactgggatggta

SEQ ID NO: 286944 - DNA, 30 bp, Artificial Sequence
  Synthetic oligonucleotide
cgttgtgcctttttgtttccgttgatggta

SEQ ID NO: 286945 - DNA, 30 bp, Artificial Sequence
  Synthetic oligonucleotide
accagcggagataatgacggatgtatggta

SEQ ID NO: 286946 - DNA, 30 bp, Artificial Sequence
  Synthetic oligonucleotide
cgaggtttaacggtggcctaaattatggta

SEQ ID NO: 286947 - DNA, 30 bp, Artificial Sequence
  Synthetic oligonucleotide
ctgccacgcggaatagaacggccactggta

SEQ ID NO: 286948 - DNA, 30 bp, Artificial Sequence
  Synthetic oligonucleotide
atagtatgatcctcacggatgtacctggta

SEQ ID NO: 286949 - DNA, 30 bp, Artificial Sequence
  Synthetic oligonucleotide
tctgacctacgtggctttctaaccctggta

SEQ ID NO: 286950 - DNA, 30 bp, Artificial Sequence
  Synthetic oligonucleotide
acctctaccgcggccaatggagagctggta

SEQ ID NO: 286951 - DNA, 30 bp, Artificial Sequence
  Synthetic oligonucleotide
tccatcgctacgttaagtaacaatctggta

SEQ ID NO: 286952 - DNA, 30 bp, Artificial Sequence
  Synthetic oligonucleotide
ctccacatccgacgctggagctgagtggta

SEQ ID NO: 286953 - DNA, 30 bp, Artificial Sequence
  Synthetic oligonucleotide
attcgtaagatgatgaaggcgttcgtggta

SEQ ID NO: 286954 - DNA, 30 bp, Artificial Sequence
  Synthetic oligonucleotide
ttcatcgttatagaaatggggtaggtggta

SEQ ID NO: 286955 - DNA, 30 bp, Artificial Sequence
  Synthetic oligonucleotide
cagttatactttaagctcggttaggtggta

SEQ ID NO: 286956 - DNA, 30 bp, Artificial Sequence
  Synthetic oligonucleotide
ttggtattatggctgcactctagggtggta

SEQ ID NO: 286957 - DNA, 30 bp, Artificial Sequence
  Synthetic oligonucleotide
aataacgggacgtgaatgagcctggtggta

SEQ ID NO: 286958 - DNA, 30 bp, Artificial Sequence
  Synthetic oligonucleotide
tactccgacttaggaaaggcgcttgtggta

SEQ ID NO: 286959 - DNA, 30 bp, Artificial Sequence
  Synthetic oligonucleotide
gaataagacggactcaaaagataattggta

SEQ ID NO: 286960 - DNA, 30 bp, Artificial Sequence
  Synthetic oligonucleotide
aaggaacagcctaatagtgcgtgattggta

SEQ ID NO: 286961 - DNA, 30 bp, Artificial Sequence
  Synthetic oligonucleotide
tggataacccacgtagttgcgatcttggta

SEQ ID NO: 286962 - DNA, 30 bp, Artificial Sequence
  Synthetic oligonucleotide
ggctcataggcatcctgcaaagtcttggta

SEQ ID NO: 286963 - DNA, 30 bp, Artificial Sequence
  Synthetic oligonucleotide
cggcgctctaaccacctgttatatttggta

SEQ ID NO: 286964 - DNA, 30 bp, Artificial Sequence
  Synthetic oligonucleotide
gcgattagtaaattaaagtgacgtttggta

SEQ ID NO: 286965 - DNA, 30 bp, Artificial Sequence
  Synthetic oligonucleotide
attcgatgagcccagtctacctaaaatgta

SEQ ID NO: 286966 - DNA, 30 bp, Artificial Sequence
  Synthetic oligonucleotide
tgcgcgtcgggagtttactgtgcaaatgta

SEQ ID NO: 286967 - DNA, 30 bp, Artificial Sequence
  Synthetic oligonucleotide
tcccaattcaacgttggattttcaaatgta

SEQ ID NO: 286968 - DNA, 30 bp, Artificial Sequence
  Synthetic oligonucleotide
actcggccatcgtcaatgttttcaaatgta

SEQ ID NO: 286969 - DNA, 30 bp, Artificial Sequence
  Synthetic oligonucleotide
aggacctttgatctattcgttggaaatgta

SEQ ID NO: 286970 - DNA, 30 bp, Artificial Sequence
  Synthetic oligonucleotide
catcgccctacggccgggtgcccgaatgta

SEQ ID NO: 286971 - DNA, 30 bp, Artificial Sequence
  Synthetic oligonucleotide
atcggttagggacccccggcccggaatgta

SEQ ID NO: 286972 - DNA, 30 bp, Artificial Sequence
  Synthetic oligonucleotide
cttgattcgattaggcggaatctgaatgta

SEQ ID NO: 286973 - DNA, 30 bp, Artificial Sequence
  Synthetic oligonucleotide
aacgccgtgcaacggccaggccttaatgta

SEQ ID NO: 286974 - DNA, 30 bp, Artificial Sequence
  Synthetic oligonucleotide
cgcggtacttgattaggaaagaaccatgta

SEQ ID NO: 286975 - DNA, 30 bp, Artificial Sequence
  Synthetic oligonucleotide
taacgcataggatagtaatcgatccatgta

SEQ ID NO: 286976 - DNA, 30 bp, Artificial Sequence
  Synthetic oligonucleotide
gttgtaggtgtctttatggtcgtccatgta

SEQ ID NO: 286977 - DNA, 30 bp, Artificial Sequence
  Synthetic oligonucleotide
aaatgtattcacactagatccatgcatgta

SEQ ID NO: 286978 - DNA, 30 bp, Artificial Sequence
  Synthetic oligonucleotide
cagacgcctccaccccgcactacagatgta

SEQ ID NO: 286979 - DNA, 30 bp, Artificial Sequence
  Synthetic oligonucleotide
actaaggagcaacctcgcaacggagatgta

SEQ ID NO: 286980 - DNA, 30 bp, Artificial Sequence
  Synthetic oligonucleotide
tgaggaatgggaaacttcgccgtagatgta

SEQ ID NO: 286981 - DNA, 30 bp, Artificial Sequence
  Synthetic oligonucleotide
tcgtcatgtggtgcttgtacccacgatgta

SEQ ID NO: 286982 - DNA, 30 bp, Artificial Sequence
  Synthetic oligonucleotide
cgtttggcatattaaaacatgttcgatgta

SEQ ID NO: 286983 - DNA, 30 bp, Artificial Sequence
  Synthetic oligonucleotide
ccgtagcgtttgtaaatctgagaggatgta

SEQ ID NO: 286984 - DNA, 30 bp, Artificial Sequence
  Synthetic oligonucleotide
ggcttatgtcctgcgatacacggggatgta

SEQ ID NO: 286985 - DNA, 30 bp, Artificial Sequence
  Synthetic oligonucleotide
agaagttattcagaaggttgggatgatgta

SEQ ID NO: 286986 - DNA, 30 bp, Artificial Sequence
  Synthetic oligonucleotide
catacattaaggaactccctatatgatgta

SEQ ID NO: 286987 - DNA, 30 bp, Artificial Sequence
  Synthetic oligonucleotide
ggacgttaggtggtgaaagttcgtgatgta

SEQ ID NO: 286988 - DNA, 30 bp, Artificial Sequence
  Synthetic oligonucleotide
tattcccggacttcgctcctacactatgta

SEQ ID NO: 286989 - DNA, 30 bp, Artificial Sequence
  Synthetic oligonucleotide
taaccaatagggatacacatttcctatgta

SEQ ID NO: 286990 - DNA, 30 bp, Artificial Sequence
  Synthetic oligonucleotide
gcaatcattcaagaccaatacttgtatgta

SEQ ID NO: 286991 - DNA, 30 bp, Artificial Sequence
  Synthetic oligonucleotide
atgccatccaatgtccgaaccgcttatgta

SEQ ID NO: 286992 - DNA, 30 bp, Artificial Sequence
  Synthetic oligonucleotide
agtcctagcttgaccgtcgattcttatgta

SEQ ID NO: 286993 - DNA, 30 bp, Artificial Sequence
  Synthetic oligonucleotide
caacagatactctgcttgcggcgaactgta

SEQ ID NO: 286994 - DNA, 30 bp, Artificial Sequence
  Synthetic oligonucleotide
cgaacaatcatggcttgtgtatgcactgta

SEQ ID NO: 286995 - DNA, 30 bp, Artificial Sequence
  Synthetic oligonucleotide
tgtgaacagcgaaagttaaagaagactgta

SEQ ID NO: 286996 - DNA, 30 bp, Artificial Sequence
  Synthetic oligonucleotide
gcgactgaccaacccctgtcacggactgta

SEQ ID NO: 286997 - DNA, 30 bp, Artificial Sequence
  Synthetic oligonucleotide
aaagtgagcactgtcggcccagcccctgta

SEQ ID NO: 286998 - DNA, 30 bp, Artificial Sequence
  Synthetic oligonucleotide
ggagggcttttagacatgggcagccctgta

SEQ ID NO: 286999 - DNA, 30 bp, Artificial Sequence
  Synthetic oligonucleotide
tatctgtgctcagcgttgttcactcctgta

SEQ ID NO: 287000 - DNA, 30 bp, Artificial Sequence
  Synthetic oligonucleotide
gctgtgagaggttagtgggttgaagctgta

SEQ ID NO: 287001 - DNA, 30 bp, Artificial Sequence
  Synthetic oligonucleotide
tatcatttaaaacatagtatagtggctgta

SEQ ID NO: 287002 - DNA, 30 bp, Artificial Sequence
  Synthetic oligonucleotide
taagacatataggtacctttataatctgta

SEQ ID NO: 287003 - DNA, 30 bp, Artificial Sequence
  Synthetic oligonucleotide
agttagggatctgttaaaatttgatctgta

SEQ ID NO: 287004 - DNA, 30 bp, Artificial Sequence
  Synthetic oligonucleotide
tgattgggtggcatacttcttcactctgta

SEQ ID NO: 287005 - DNA, 30 bp, Artificial Sequence
  Synthetic oligonucleotide
gtcatactagagcttagtaatacctctgta

SEQ ID NO: 287006 - DNA, 30 bp, Artificial Sequence
  Synthetic oligonucleotide
tcagtataggacgcgcctaggagctctgta

SEQ ID NO: 287007 - DNA, 30 bp, Artificial Sequence
  Synthetic oligonucleotide
aagaaagggtttagttctcggcggtctgta

SEQ ID NO: 287008 - DNA, 30 bp, Artificial Sequence
  Synthetic oligonucleotide
aacccgatgatgcattccaaagggtctgta

SEQ ID NO: 287009 - DNA, 30 bp, Artificial Sequence
  Synthetic oligonucleotide
ggatcgcccgcacagaggcgaatgtctgta

SEQ ID NO: 287010 - DNA, 30 bp, Artificial Sequence
  Synthetic oligonucleotide
gtgtactttgagtgattggttttgtctgta

SEQ ID NO: 287011 - DNA, 30 bp, Artificial Sequence
  Synthetic oligonucleotide
actagggacgggtcaagatgttattctgta

SEQ ID NO: 287012 - DNA, 30 bp, Artificial Sequence
  Synthetic oligonucleotide
atgacacaaaggctcgcgtgttaaagtgta

SEQ ID NO: 287013 - DNA, 30 bp, Artificial Sequence
  Synthetic oligonucleotide
ggaaccttcctatcagtgatccccagtgta

SEQ ID NO: 287014 - DNA, 30 bp, Artificial Sequence
  Synthetic oligonucleotide
tctgaatattgattgccctgtgccagtgta

SEQ ID NO: 287015 - DNA, 30 bp, Artificial Sequence
  Synthetic oligonucleotide
aacccaaatattaggtttgtctggagtgta

SEQ ID NO: 287016 - DNA, 30 bp, Artificial Sequence
  Synthetic oligonucleotide
tatagtgatagcttcgacgcccaacgtgta

SEQ ID NO: 287017 - DNA, 30 bp, Artificial Sequence
  Synthetic oligonucleotide
ggtcaacaaggagttcgccgggaacgtgta

SEQ ID NO: 287018 - DNA, 30 bp, Artificial Sequence
  Synthetic oligonucleotide
cacatgaattcatttccgtgtcaccgtgta

SEQ ID NO: 287019 - DNA, 30 bp, Artificial Sequence
  Synthetic oligonucleotide
tcagggttctcttctgctgtaaagcgtgta

SEQ ID NO: 287020 - DNA, 30 bp, Artificial Sequence
  Synthetic oligonucleotide
tgttaatgggtacgctacttcaagcgtgta

SEQ ID NO: 287021 - DNA, 30 bp, Artificial Sequence
  Synthetic oligonucleotide
cgataacgcttccttgttgttcagcgtgta

SEQ ID NO: 287022 - DNA, 30 bp, Artificial Sequence
  Synthetic oligonucleotide
acacggggaacctgcgccatggagcgtgta

SEQ ID NO: 287023 - DNA, 25 bp, Artificial Sequence
  Synthetic oligonucleotide
ttagtacaagttatgagggcgtgta

SEQ ID NO: 287024 - DNA, 30 bp, Artificial Sequence
  Synthetic oligonucleotide
cgtcctgaagaaacgtttctggatcgtgta

SEQ ID NO: 287025 - DNA, 30 bp, Artificial Sequence
  Synthetic oligonucleotide
atggggctcgcccgtgaccatgaaggtgta

SEQ ID NO: 287026 - DNA, 30 bp, Artificial Sequence
  Synthetic oligonucleotide
ccgtagggtgtctacccgcactgaggtgta

SEQ ID NO: 287027 - DNA, 30 bp, Artificial Sequence
  Synthetic oligonucleotide
tttacccgacaacactcaaacaacggtgta

SEQ ID NO: 287028 - DNA, 30 bp, Artificial Sequence
  Synthetic oligonucleotide
ttaattgcggtatcaaggaccactggtgta

SEQ ID NO: 287029 - DNA, 30 bp, Artificial Sequence
  Synthetic oligonucleotide
cgtgcgaggaggttgaggctccctggtgta

SEQ ID NO: 287030 - DNA, 30 bp, Artificial Sequence
  Synthetic oligonucleotide
ttagataacatcgtcgataaatactgtgta

SEQ ID NO: 287031 - DNA, 30 bp, Artificial Sequence
  Synthetic oligonucleotide
gccccaacgacactggttcatcgctgtgta

SEQ ID NO: 287032 - DNA, 30 bp, Artificial Sequence
  Synthetic oligonucleotide
aaaattctaacgaacagtcggtagtgtgta

SEQ ID NO: 287033 - DNA, 30 bp, Artificial Sequence
  Synthetic oligonucleotide
tctaggcatacactcgggcactggtgtgta

SEQ ID NO: 287034 - DNA, 30 bp, Artificial Sequence
  Synthetic oligonucleotide
accaatatcaaaaggtgcgtgcaaattgta

SEQ ID NO: 287035 - DNA, 30 bp, Artificial Sequence
  Synthetic oligonucleotide
gtcttacggattaataacgttcagattgta

SEQ ID NO: 287036 - DNA, 30 bp, Artificial Sequence
  Synthetic oligonucleotide
atgcttcaacaataaaacacgaggattgta

SEQ ID NO: 287037 - DNA, 30 bp, Artificial Sequence
  Synthetic oligonucleotide
agtatgcgtggagatcggacttggattgta

SEQ ID NO: 287038 - DNA, 30 bp, Artificial Sequence
  Synthetic oligonucleotide
actcagtggggaaagacagtgggtattgta

SEQ ID NO: 287039 - DNA, 30 bp, Artificial Sequence
  Synthetic oligonucleotide
agcgggcgcaggatccccggatcacttgta

SEQ ID NO: 287040 - DNA, 30 bp, Artificial Sequence
  Synthetic oligonucleotide
cgctacaatctcgagcgacgcgaccttgta

SEQ ID NO: 287041 - DNA, 30 bp, Artificial Sequence
  Synthetic oligonucleotide
gacggtataagcataaaggtgaggcttgta

SEQ ID NO: 287042 - DNA, 30 bp, Artificial Sequence
  Synthetic oligonucleotide
aattccggaggattaggcatgtggcttgta

SEQ ID NO: 287043 - DNA, 30 bp, Artificial Sequence
  Synthetic oligonucleotide
ccatacaaagagggtttagagaatcttgta

SEQ ID NO: 287044 - DNA, 30 bp, Artificial Sequence
  Synthetic oligonucleotide
aaatgggatggggcaagaaaggatcttgta

SEQ ID NO: 287045 - DNA, 30 bp, Artificial Sequence
  Synthetic oligonucleotide
tcaccacatgcttgcttaaccattcttgta

SEQ ID NO: 287046 - DNA, 30 bp, Artificial Sequence
  Synthetic oligonucleotide
gcatctgtttcaagggtcttcattcttgta

SEQ ID NO: 287047 - DNA, 30 bp, Artificial Sequence
  Synthetic oligonucleotide
ccaattcatgaccactgtcagccagttgta

SEQ ID NO: 287048 - DNA, 30 bp, Artificial Sequence
  Synthetic oligonucleotide
gtcgaagttcacttatacctggacgttgta

SEQ ID NO: 287049 - DNA, 30 bp, Artificial Sequence
  Synthetic oligonucleotide
tcaacttctgtcaagaagataaccgttgta

SEQ ID NO: 287050 - DNA, 30 bp, Artificial Sequence
  Synthetic oligonucleotide
ggccaaggcaaagggtgtatcgccgttgta

SEQ ID NO: 287051 - DNA, 30 bp, Artificial Sequence
  Synthetic oligonucleotide
gcgaaattgaagctagttatagtcgttgta

SEQ ID NO: 287052 - DNA, 30 bp, Artificial Sequence
  Synthetic oligonucleotide
actgcgctaacatcctggatgccatttgta

SEQ ID NO: 287053 - DNA, 30 bp, Artificial Sequence
  Synthetic oligonucleotide
agccatagatttgacgtctgggtatttgta

SEQ ID NO: 287054 - DNA, 30 bp, Artificial Sequence
  Synthetic oligonucleotide
agggagcagtatctcaaactattctttgta

SEQ ID NO: 287055 - DNA, 30 bp, Artificial Sequence
  Synthetic oligonucleotide
tatgctgccacttttattcactattttgta

SEQ ID NO: 287056 - DNA, 30 bp, Artificial Sequence
  Synthetic oligonucleotide
gggggagacgtggggtgaccagcttttgta

SEQ ID NO: 287057 - DNA, 30 bp, Artificial Sequence
  Synthetic oligonucleotide
gtcatccgctgtggatgaccccgttttgta

SEQ ID NO: 287058 - DNA, 30 bp, Artificial Sequence
  Synthetic oligonucleotide
cctcataggaccacaaatgcgagaaaatta

SEQ ID NO: 287059 - DNA, 30 bp, Artificial Sequence
  Synthetic oligonucleotide
ctactacgcctagaaccatagctaaaatta

SEQ ID NO: 287060 - DNA, 30 bp, Artificial Sequence
  Synthetic oligonucleotide
atgtctcttcgtggacgaaccggcaaatta

SEQ ID NO: 287061 - DNA, 30 bp, Artificial Sequence
  Synthetic oligonucleotide
gtagttacccctcgtacttgtttcaaatta

SEQ ID NO: 287062 - DNA, 31 bp, Artificial Sequence
  Synthetic oligonucleotide
cgagtggaagtcctgctttgacaagaaatta

SEQ ID NO: 287063 - DNA, 30 bp, Artificial Sequence
  Synthetic oligonucleotide
agttacggcacgagggccgtcgagaaatta

SEQ ID NO: 287064 - DNA, 30 bp, Artificial Sequence
  Synthetic oligonucleotide
tagaattgtgctgaccaatgacggaaatta

SEQ ID NO: 287065 - DNA, 30 bp, Artificial Sequence
  Synthetic oligonucleotide
acgggtgctagtaaagagttaatgaaatta

SEQ ID NO: 287066 - DNA, 30 bp, Artificial Sequence
  Synthetic oligonucleotide
gctaaataagcgtgataaacgtataaatta

SEQ ID NO: 287067 - DNA, 30 bp, Artificial Sequence
  Synthetic oligonucleotide
gtgtatgactgttaattaacgactaaatta

SEQ ID NO: 287068 - DNA, 30 bp, Artificial Sequence
  Synthetic oligonucleotide
acaagttttcactagctcacacgtaaatta

SEQ ID NO: 287069 - DNA, 30 bp, Artificial Sequence
  Synthetic oligonucleotide
tctgtaagagacaggccttcgtgtaaatta

SEQ ID NO: 287070 - DNA, 30 bp, Artificial Sequence
  Synthetic oligonucleotide
gtcgaagtaccgacagtcggtggacaatta

SEQ ID NO: 287071 - DNA, 30 bp, Artificial Sequence
  Synthetic oligonucleotide
ctagggcccccagcagaaatgatacaatta

SEQ ID NO: 287072 - DNA, 30 bp, Artificial Sequence
  Synthetic oligonucleotide
gactgggccgcaccgtcgggaaaccaatta

SEQ ID NO: 287073 - DNA, 30 bp, Artificial Sequence
  Synthetic oligonucleotide
ttagtgtattcacaaagaatatggcaatta

SEQ ID NO: 287074 - DNA, 30 bp, Artificial Sequence
  Synthetic oligonucleotide
cgtggcattcgaagtacgcgtatgcaatta

SEQ ID NO: 287075 - DNA, 30 bp, Artificial Sequence
  Synthetic oligonucleotide
tcgagctccggtttaaatatgattcaatta

SEQ ID NO: 287076 - DNA, 30 bp, Artificial Sequence
  Synthetic oligonucleotide
atgcatacgctactgggaaactaagaatta

SEQ ID NO: 287077 - DNA, 30 bp, Artificial Sequence
  Synthetic oligonucleotide
tccatatagattcatctgacttacgaatta

SEQ ID NO: 287078 - DNA, 30 bp, Artificial Sequence
  Synthetic oligonucleotide
atatactgagcactccttttacaggaatta

SEQ ID NO: 287079 - DNA, 30 bp, Artificial Sequence
  Synthetic oligonucleotide
ggctgcggagactttgcaaattaggaatta

SEQ ID NO: 287080 - DNA, 30 bp, Artificial Sequence
  Synthetic oligonucleotide
gggatgttggaacaaaagtgttatgaatta

SEQ ID NO: 287081 - DNA, 30 bp, Artificial Sequence
  Synthetic oligonucleotide
gagatagacgacgcgttactggcataatta

SEQ ID NO: 287082 - DNA, 30 bp, Artificial Sequence
  Synthetic oligonucleotide
tgcacgtccacagggcaggatagataatta

SEQ ID NO: 287083 - DNA, 30 bp, Artificial Sequence
  Synthetic oligonucleotide
gctgatccgagtcgtcgatggaactaatta

SEQ ID NO: 287084 - DNA, 30 bp, Artificial Sequence
  Synthetic oligonucleotide
taggagcactcacgcagcgcgccctaatta

SEQ ID NO: 287085 - DNA, 30 bp, Artificial Sequence
  Synthetic oligonucleotide
gcggacccgggagcgcggaggtgctaatta

SEQ ID NO: 287086 - DNA, 30 bp, Artificial Sequence
  Synthetic oligonucleotide
ggccggggaatggaaattaatcattaatta

SEQ ID NO: 287087 - DNA, 30 bp, Artificial Sequence
  Synthetic oligonucleotide
gagaaggaaacattcgttcgaacttaatta

SEQ ID NO: 287088 - DNA, 30 bp, Artificial Sequence
  Synthetic oligonucleotide
agagatacaacaatctgataataaacatta

SEQ ID NO: 287089 - DNA, 30 bp, Artificial Sequence
  Synthetic oligonucleotide
catgagcagtggtgcttggaggacacatta

SEQ ID NO: 287090 - DNA, 30 bp, Artificial Sequence
  Synthetic oligonucleotide
gaggctgtgctttattgaatcggcacatta

SEQ ID NO: 287091 - DNA, 30 bp, Artificial Sequence
  Synthetic oligonucleotide
ggtcccatcagtaaacggtaggtcacatta

SEQ ID NO: 287092 - DNA, 30 bp, Artificial Sequence
  Synthetic oligonucleotide
ctacttaggtagaagcatattgtcacatta

SEQ ID NO: 287093 - DNA, 30 bp, Artificial Sequence
  Synthetic oligonucleotide
actgcgctggtgtagggggatcggacatta

SEQ ID NO: 287094 - DNA, 30 bp, Artificial Sequence
  Synthetic oligonucleotide
ctaccgatggttccctcgtgcgtgacatta

SEQ ID NO: 287095 - DNA, 30 bp, Artificial Sequence
  Synthetic oligonucleotide
ttgaatcaaaggtgttgaacgcttacatta

SEQ ID NO: 287096 - DNA, 30 bp, Artificial Sequence
  Synthetic oligonucleotide
tttcgaccagaacaggaccaggttacatta

SEQ ID NO: 287097 - DNA, 30 bp, Artificial Sequence
  Synthetic oligonucleotide
aacgcagtagtgtgcatacataaaccatta

SEQ ID NO: 287098 - DNA, 30 bp, Artificial Sequence
  Synthetic oligonucleotide
acgagcaggtgggtcagtaaaccaccatta

SEQ ID NO: 287099 - DNA, 30 bp, Artificial Sequence
  Synthetic oligonucleotide
tcccacatggtgcatcggagctcaccatta

SEQ ID NO: 287100 - DNA, 30 bp, Artificial Sequence
  Synthetic oligonucleotide
gaagggacagcggaaggctttgtaccatta

SEQ ID NO: 287101 - DNA, 30 bp, Artificial Sequence
  Synthetic oligonucleotide
actgacagattcagatccatggacccatta

SEQ ID NO: 287102 - DNA, 30 bp, Artificial Sequence
  Synthetic oligonucleotide
cgtgcccagccgtcgatagacgcgccatta

SEQ ID NO: 287103 - DNA, 30 bp, Artificial Sequence
  Synthetic oligonucleotide
taataggcattagcccaatcaaggccatta

SEQ ID NO: 287104 - DNA, 30 bp, Artificial Sequence
  Synthetic oligonucleotide
cggacgcggtatggagggcaaggtccatta

SEQ ID NO: 287105 - DNA, 30 bp, Artificial Sequence
  Synthetic oligonucleotide
taaatagtcgaccaggagaagagagcatta

SEQ ID NO: 287106 - DNA, 30 bp, Artificial Sequence
  Synthetic oligonucleotide
ggaaatggcccggggaggatgatagcatta

SEQ ID NO: 287107 - DNA, 30 bp, Artificial Sequence
  Synthetic oligonucleotide
aggtagacatgacactctccgcacgcatta

SEQ ID NO: 287108 - DNA, 30 bp, Artificial Sequence
  Synthetic oligonucleotide
gtgcccgtctgtgcccatttgcacgcatta

SEQ ID NO: 287109 - DNA, 30 bp, Artificial Sequence
  Synthetic oligonucleotide
tacgtgagagatgatcgggattaggcatta

SEQ ID NO: 287110 - DNA, 30 bp, Artificial Sequence
  Synthetic oligonucleotide
ccgcgcataactcgtatatgggtggcatta

SEQ ID NO: 287111 - DNA, 30 bp, Artificial Sequence
  Synthetic oligonucleotide
gcttttacgagctaggggggacgtgcatta

SEQ ID NO: 287112 - DNA, 30 bp, Artificial Sequence
  Synthetic oligonucleotide
gcgatcgaattcaccaaaatagaatcatta

SEQ ID NO: 287113 - DNA, 30 bp, Artificial Sequence
  Synthetic oligonucleotide
aattaaccctcaagtgtggtgaaaagatta

SEQ ID NO: 287114 - DNA, 30 bp, Artificial Sequence
  Synthetic oligonucleotide
tgatgagtaccgcccaagcgacgaagatta

SEQ ID NO: 287115 - DNA, 30 bp, Artificial Sequence
  Synthetic oligonucleotide
cctggtcacctcaacgtgcgaagcagatta

SEQ ID NO: 287116 - DNA, 30 bp, Artificial Sequence
  Synthetic oligonucleotide
gcttattgttttgaccgaggagtcagatta

SEQ ID NO: 287117 - DNA, 30 bp, Artificial Sequence
  Synthetic oligonucleotide
atgtaacaatatacgctgccccagagatta

SEQ ID NO: 287118 - DNA, 30 bp, Artificial Sequence
  Synthetic oligonucleotide
atttcgcgaaaatccgagcacgcgagatta

SEQ ID NO: 287119 - DNA, 30 bp, Artificial Sequence
  Synthetic oligonucleotide
tcgaatcccgggtaataaatatcgagatta

SEQ ID NO: 287120 - DNA, 30 bp, Artificial Sequence
  Synthetic oligonucleotide
gagttgcgattgaagatttgagtgagatta

SEQ ID NO: 287121 - DNA, 30 bp, Artificial Sequence
  Synthetic oligonucleotide
gggcaaataagacagcgaacgtttagatta

SEQ ID NO: 287122 - DNA, 30 bp, Artificial Sequence
  Synthetic oligonucleotide
aatctttccgttaggtgggctgcacgatta

SEQ ID NO: 287123 - DNA, 30 bp, Artificial Sequence
  Synthetic oligonucleotide
ttagccagcgcgctgtagaaagaccgatta

SEQ ID NO: 287124 - DNA, 30 bp, Artificial Sequence
  Synthetic oligonucleotide
aagtagccggttacacatacaacgcgatta

SEQ ID NO: 287125 - DNA, 30 bp, Artificial Sequence
  Synthetic oligonucleotide
gccctgcctcattagataggaacgcgatta

SEQ ID NO: 287126 - DNA, 30 bp, Artificial Sequence
  Synthetic oligonucleotide
cggtatttaatatctgcccaaatgcgatta

SEQ ID NO: 287127 - DNA, 30 bp, Artificial Sequence
  Synthetic oligonucleotide
aagaatgtcattcgaggtaatagaggatta

SEQ ID NO: 287128 - DNA, 30 bp, Artificial Sequence
  Synthetic oligonucleotide
cctgcataccgggtcaaattactaggatta

SEQ ID NO: 287129 - DNA, 30 bp, Artificial Sequence
  Synthetic oligonucleotide
gcatatttgtagcgcctttccagcggatta

SEQ ID NO: 287130 - DNA, 30 bp, Artificial Sequence
  Synthetic oligonucleotide
ataactcagtggtcaatcaggatcggatta

SEQ ID NO: 287131 - DNA, 30 bp, Artificial Sequence
  Synthetic oligonucleotide
tataagacagatggaagaaccgcgggatta

SEQ ID NO: 287132 - DNA, 30 bp, Artificial Sequence
  Synthetic oligonucleotide
tgaatgataacgataaaattacggggatta

SEQ ID NO: 287133 - DNA, 30 bp, Artificial Sequence
  Synthetic oligonucleotide
gtcagtcgctggatcgacggggggggatta

SEQ ID NO: 287134 - DNA, 30 bp, Artificial Sequence
  Synthetic oligonucleotide
caagaaattagataattggcactgggatta

SEQ ID NO: 287135 - DNA, 30 bp, Artificial Sequence
  Synthetic oligonucleotide
gagtacagagtcaccctgttatgtggatta

SEQ ID NO: 287136 - DNA, 30 bp, Artificial Sequence
  Synthetic oligonucleotide
gttcgcgttaactacagcgagccatgatta

SEQ ID NO: 287137 - DNA, 30 bp, Artificial Sequence
  Synthetic oligonucleotide
taggtggcaagagcttgctctggatgatta

SEQ ID NO: 287138 - DNA, 30 bp, Artificial Sequence
  Synthetic oligonucleotide
gcttggaacttgacgcttgcactatgatta

SEQ ID NO: 287139 - DNA, 30 bp, Artificial Sequence
  Synthetic oligonucleotide
aatccgaggttaagtgctgggatctgatta

SEQ ID NO: 287140 - DNA, 30 bp, Artificial Sequence
  Synthetic oligonucleotide
ttaaaatcaatggagtgaagcaagtgatta

SEQ ID NO: 287141 - DNA, 30 bp, Artificial Sequence
  Synthetic oligonucleotide
gttggtcggaaaattaacaagtggtgatta

SEQ ID NO: 287142 - DNA, 30 bp, Artificial Sequence
  Synthetic oligonucleotide
ggcatcggacctaaaacgcgttggtgatta

SEQ ID NO: 287143 - DNA, 30 bp, Artificial Sequence
  Synthetic oligonucleotide
gcgggaaagggaccgtacgaggtgtgatta

SEQ ID NO: 287144 - DNA, 30 bp, Artificial Sequence
  Synthetic oligonucleotide
acattcgctttatatgcgatcgattgatta

SEQ ID NO: 287145 - DNA, 30 bp, Artificial Sequence
  Synthetic oligonucleotide
gtagcatcaagttggggaggtcgttgatta

SEQ ID NO: 287146 - DNA, 30 bp, Artificial Sequence
  Synthetic oligonucleotide
aagacatatctgacaacactctgttgatta

SEQ ID NO: 287147 - DNA, 30 bp, Artificial Sequence
  Synthetic oligonucleotide
cgatgtgtcgagtatatgaaatcaatatta

SEQ ID NO: 287148 - DNA, 31 bp, Artificial Sequence
  Synthetic oligonucleotide
acacagaagatgtgaatataacataatatta

SEQ ID NO: 287149 - DNA, 30 bp, Artificial Sequence
  Synthetic oligonucleotide
agggcgatcaaccgaatcctagggatatta

SEQ ID NO: 287150 - DNA, 30 bp, Artificial Sequence
  Synthetic oligonucleotide
gatacatgagaccatcgaatctggatatta

SEQ ID NO: 287151 - DNA, 30 bp, Artificial Sequence
  Synthetic oligonucleotide
agtctggaactcgatcggggatgtatatta

SEQ ID NO: 287152 - DNA, 30 bp, Artificial Sequence
  Synthetic oligonucleotide
ccaagaggttgtgtacactttgaactatta

SEQ ID NO: 287153 - DNA, 30 bp, Artificial Sequence
  Synthetic oligonucleotide
tggtacaattgtaagtgtagcagactatta

SEQ ID NO: 287154 - DNA, 30 bp, Artificial Sequence
  Synthetic oligonucleotide
catggttaactcgctttctactacctatta

SEQ ID NO: 287155 - DNA, 30 bp, Artificial Sequence
  Synthetic oligonucleotide
cctaactaggtacaacagttcagtgtatta

SEQ ID NO: 287156 - DNA, 30 bp, Artificial Sequence
  Synthetic oligonucleotide
atgcattaaacatatgggatatgattatta

SEQ ID NO: 287157 - DNA, 30 bp, Artificial Sequence
  Synthetic oligonucleotide
acttgggcgccccgcgcggcaaacttatta

SEQ ID NO: 287158 - DNA, 30 bp, Artificial Sequence
  Synthetic oligonucleotide
gtcaatccaaatgagcatctctagttatta

SEQ ID NO: 287159 - DNA, 30 bp, Artificial Sequence
  Synthetic oligonucleotide
gcagaaggtctcagtgaagacaggttatta

SEQ ID NO: 287160 - DNA, 30 bp, Artificial Sequence
  Synthetic oligonucleotide
gacgaccacgcgtcgctgagacggttatta

SEQ ID NO: 287161 - DNA, 30 bp, Artificial Sequence
  Synthetic oligonucleotide
cggtgctccgcctggtcttgtcatttatta

SEQ ID NO: 287162 - DNA, 30 bp, Artificial Sequence
  Synthetic oligonucleotide
tgacattactgacaaccataatgaaactta

SEQ ID NO: 287163 - DNA, 30 bp, Artificial Sequence
  Synthetic oligonucleotide
ttaggagtactatgtcttccaagcaactta

SEQ ID NO: 287164 - DNA, 30 bp, Artificial Sequence
  Synthetic oligonucleotide
tgctcggtcccttatggagtacgtaactta

SEQ ID NO: 287165 - DNA, 30 bp, Artificial Sequence
  Synthetic oligonucleotide
gggacctggcgccgttgctcgggtaactta

SEQ ID NO: 287166 - DNA, 30 bp, Artificial Sequence
  Synthetic oligonucleotide
ccgccttctctcggcaaacgagcacactta

SEQ ID NO: 287167 - DNA, 30 bp, Artificial Sequence
  Synthetic oligonucleotide
ttcgcatattcggttagcctggcccactta

SEQ ID NO: 287168 - DNA, 30 bp, Artificial Sequence
  Synthetic oligonucleotide
tgaggaccagcttttgtaaaagtccactta

SEQ ID NO: 287169 - DNA, 30 bp, Artificial Sequence
  Synthetic oligonucleotide
gcggggacagtggaatatgacgttcactta

SEQ ID NO: 287170 - DNA, 30 bp, Artificial Sequence
  Synthetic oligonucleotide
ggccaaatgcgacacccttctaaagactta

SEQ ID NO: 287171 - DNA, 30 bp, Artificial Sequence
  Synthetic oligonucleotide
tgggttacccgttgttacaaacaagactta

SEQ ID NO: 287172 - DNA, 30 bp, Artificial Sequence
  Synthetic oligonucleotide
gtcgatataatttaccacctccaagactta

SEQ ID NO: 287173 - DNA, 30 bp, Artificial Sequence
  Synthetic oligonucleotide
caaacggatcgtaatcataactaagactta

SEQ ID NO: 287174 - DNA, 30 bp, Artificial Sequence
  Synthetic oligonucleotide
gttcaccactaacagtcgtctgacgactta

SEQ ID NO: 287175 - DNA, 29 bp, Artificial Sequence
  Synthetic oligonucleotide
ttatcctaatgagattaagacgcgactta

SEQ ID NO: 287176 - DNA, 30 bp, Artificial Sequence
  Synthetic oligonucleotide
ccctgggtggtcaggctggaataggactta

SEQ ID NO: 287177 - DNA, 30 bp, Artificial Sequence
  Synthetic oligonucleotide
ctagaagtcggtgacgcgctacctgactta

SEQ ID NO: 287178 - DNA, 30 bp, Artificial Sequence
  Synthetic oligonucleotide
tagctatgtttatatgagcctagtgactta

SEQ ID NO: 287179 - DNA, 30 bp, Artificial Sequence
  Synthetic oligonucleotide
caccttcataaacggggaatggttgactta

SEQ ID NO: 287180 - DNA, 30 bp, Artificial Sequence
  Synthetic oligonucleotide
gtgagtatacgggcgacaacgtaatactta

SEQ ID NO: 287181 - DNA, 30 bp, Artificial Sequence
  Synthetic oligonucleotide
acacgagtgaggttatcaccgtgatactta

SEQ ID NO: 287182 - DNA, 30 bp, Artificial Sequence
  Synthetic oligonucleotide
gctctacatgcgtttcgggacctatactta

SEQ ID NO: 287183 - DNA, 30 bp, Artificial Sequence
  Synthetic oligonucleotide
gaaaatcgatgaattggagccccctactta

SEQ ID NO: 287184 - DNA, 30 bp, Artificial Sequence
  Synthetic oligonucleotide
gctggaaaatactcaccgccattctactta

SEQ ID NO: 287185 - DNA, 30 bp, Artificial Sequence
  Synthetic oligonucleotide
tgtgaccttagcttgagcttctagtactta

SEQ ID NO: 287186 - DNA, 30 bp, Artificial Sequence
  Synthetic oligonucleotide
ggtattctattaaggaatcgaggttactta

SEQ ID NO: 287187 - DNA, 30 bp, Artificial Sequence
  Synthetic oligonucleotide
acaataaccctaattcatgaggtttactta

SEQ ID NO: 287188 - DNA, 30 bp, Artificial Sequence
  Synthetic oligonucleotide
gggtttgtaagcagccgtacccaaacctta

SEQ ID NO: 287189 - DNA, 30 bp, Artificial Sequence
  Synthetic oligonucleotide
tttcagtggacgaaggcgccctgaacctta

SEQ ID NO: 287190 - DNA, 30 bp, Artificial Sequence
  Synthetic oligonucleotide
catagacccggtagaaacagcaggacctta

SEQ ID NO: 287191 - DNA, 30 bp, Artificial Sequence
  Synthetic oligonucleotide
ggtcagaatgaccacgttatgtgtacctta

SEQ ID NO: 287192 - DNA, 30 bp, Artificial Sequence
  Synthetic oligonucleotide
aaatctgcacgattagtgtgacgagcctta

SEQ ID NO: 287193 - DNA, 30 bp, Artificial Sequence
  Synthetic oligonucleotide
gacactcgaaactcagcagtcctcgcctta

SEQ ID NO: 287194 - DNA, 30 bp, Artificial Sequence
  Synthetic oligonucleotide
aaggggccaaacgctgggtaggcggcctta

SEQ ID NO: 287195 - DNA, 30 bp, Artificial Sequence
  Synthetic oligonucleotide
cgcttacagagatgggcaaccagggcctta

SEQ ID NO: 287196 - DNA, 30 bp, Artificial Sequence
  Synthetic oligonucleotide
cttaccgtgctcacattgtcccctgcctta

SEQ ID NO: 287197 - DNA, 30 bp, Artificial Sequence
  Synthetic oligonucleotide
atcgttgacgagaactcaagtgctgcctta

SEQ ID NO: 287198 - DNA, 30 bp, Artificial Sequence
  Synthetic oligonucleotide
tatgcgccagcgcgtcctgacattgcctta

SEQ ID NO: 287199 - DNA, 30 bp, Artificial Sequence
  Synthetic oligonucleotide
cgaatcctacgtagatagcatgttgcctta

SEQ ID NO: 287200 - DNA, 30 bp, Artificial Sequence
  Synthetic oligonucleotide
tatacatacttcctcttcattcaatcctta

SEQ ID NO: 287201 - DNA, 30 bp, Artificial Sequence
  Synthetic oligonucleotide
caaggggccgtcgtgcgttggaactcctta

SEQ ID NO: 287202 - DNA, 30 bp, Artificial Sequence
  Synthetic oligonucleotide
ttaaaggtaaactctagttgcccctcctta

SEQ ID NO: 287203 - DNA, 30 bp, Artificial Sequence
  Synthetic oligonucleotide
tagaaccagtagcaaaaactatgctcctta

SEQ ID NO: 287204 - DNA, 30 bp, Artificial Sequence
  Synthetic oligonucleotide
catggacaacacaggggcggcgcgtcctta

SEQ ID NO: 287205 - DNA, 30 bp, Artificial Sequence
  Synthetic oligonucleotide
agaagtgttttctgcacagggatgtcctta

SEQ ID NO: 287206 - DNA, 30 bp, Artificial Sequence
  Synthetic oligonucleotide
actttacggtccaagtcccgtacttcctta

SEQ ID NO: 287207 - DNA, 30 bp, Artificial Sequence
  Synthetic oligonucleotide
acaggtggcgcataggggtggatttcctta

SEQ ID NO: 287208 - DNA, 30 bp, Artificial Sequence
  Synthetic oligonucleotide
cggccggccacaactggcgcctacagctta

SEQ ID NO: 287209 - DNA, 30 bp, Artificial Sequence
  Synthetic oligonucleotide
caagactaaccacctattatacatagctta

SEQ ID NO: 287210 - DNA, 30 bp, Artificial Sequence
  Synthetic oligonucleotide
catcatcaagccctggaaaccaaacgctta

SEQ ID NO: 287211 - DNA, 30 bp, Artificial Sequence
  Synthetic oligonucleotide
ggcatactcctagtcaggactaaacgctta

SEQ ID NO: 287212 - DNA, 30 bp, Artificial Sequence
  Synthetic oligonucleotide
aggtatttcgtcctaagttgattacgctta

SEQ ID NO: 287213 - DNA, 30 bp, Artificial Sequence
  Synthetic oligonucleotide
gcggcagttggcagactcggaacccgctta

SEQ ID NO: 287214 - DNA, 30 bp, Artificial Sequence
  Synthetic oligonucleotide
tatgtgcaggccaacgttaggtagcgctta

SEQ ID NO: 287215 - DNA, 30 bp, Artificial Sequence
  Synthetic oligonucleotide
ggcgatagctacaaacaacggccgcgctta

SEQ ID NO: 287216 - DNA, 30 bp, Artificial Sequence
  Synthetic oligonucleotide
caatcgttgtggcttgagggtccgcgctta

SEQ ID NO: 287217 - DNA, 30 bp, Artificial Sequence
  Synthetic oligonucleotide
gttatttgaaaggttatagcagatcgctta

SEQ ID NO: 287218 - DNA, 30 bp, Artificial Sequence
  Synthetic oligonucleotide
ggtggtggtcctcggagaattcgtcgctta

SEQ ID NO: 287219 - DNA, 30 bp, Artificial Sequence
  Synthetic oligonucleotide
tgggaggtgtgccacgttacaggtcgctta

SEQ ID NO: 287220 - DNA, 30 bp, Artificial Sequence
  Synthetic oligonucleotide
acaatatcgaccgccgtcgtcgaaggctta

SEQ ID NO: 287221 - DNA, 30 bp, Artificial Sequence
  Synthetic oligonucleotide
acttcagctcccttttcacgggcaggctta

SEQ ID NO: 287222 - DNA, 30 bp, Artificial Sequence
  Synthetic oligonucleotide
tggtcggacagctcgaattcatacggctta

SEQ ID NO: 287223 - DNA, 30 bp, Artificial Sequence
  Synthetic oligonucleotide
tccatgcaagagccaacttttttcggctta

SEQ ID NO: 287224 - DNA, 30 bp, Artificial Sequence
  Synthetic oligonucleotide
agcgctgaaagggccccgaggaagggctta

SEQ ID NO: 287225 - DNA, 30 bp, Artificial Sequence
  Synthetic oligonucleotide
agtggaagggattgatggcagtcgggctta

SEQ ID NO: 287226 - DNA, 30 bp, Artificial Sequence
  Synthetic oligonucleotide
gcgccaagcaactggaatacaaaatgctta

SEQ ID NO: 287227 - DNA, 30 bp, Artificial Sequence
  Synthetic oligonucleotide
gggtagaataaaatcataatctaatgctta

SEQ ID NO: 287228 - DNA, 30 bp, Artificial Sequence
  Synthetic oligonucleotide
gaaccgtacaacgcacaattgctatgctta

SEQ ID NO: 287229 - DNA, 30 bp, Artificial Sequence
  Synthetic oligonucleotide
ggtagttagcatggattggtggggtgctta

SEQ ID NO: 287230 - DNA, 30 bp, Artificial Sequence
  Synthetic oligonucleotide
agagcaccctagtgtcctgtactgtgctta

SEQ ID NO: 287231 - DNA, 30 bp, Artificial Sequence
  Synthetic oligonucleotide
tacatgaggatccccctcaaccattgctta

SEQ ID NO: 287232 - DNA, 30 bp, Artificial Sequence
  Synthetic oligonucleotide
ctgaacatctcgtgtaaaattaaaatctta

SEQ ID NO: 287233 - DNA, 30 bp, Artificial Sequence
  Synthetic oligonucleotide
ctcgacaatgaccatgtgaataacatctta

SEQ ID NO: 287234 - DNA, 30 bp, Artificial Sequence
  Synthetic oligonucleotide
actcagtgttgtttcgtgggatacatctta

SEQ ID NO: 287235 - DNA, 30 bp, Artificial Sequence
  Synthetic oligonucleotide
ggcgatctaggggaaggacagtacatctta

SEQ ID NO: 287236 - DNA, 30 bp, Artificial Sequence
  Synthetic oligonucleotide
gccagtcctggtaagttatgtagactctta

SEQ ID NO: 287237 - DNA, 30 bp, Artificial Sequence
  Synthetic oligonucleotide
tcaatggaaagagtctgtgaacccctctta

SEQ ID NO: 287238 - DNA, 30 bp, Artificial Sequence
  Synthetic oligonucleotide
gaaaccagccgagactaggtggtgctctta

SEQ ID NO: 287239 - DNA, 30 bp, Artificial Sequence
  Synthetic oligonucleotide
agacggatgggaccccctcatgtgctctta

SEQ ID NO: 287240 - DNA, 30 bp, Artificial Sequence
  Synthetic oligonucleotide
acgcgaaccgggattcaataggatctctta

SEQ ID NO: 287241 - DNA, 30 bp, Artificial Sequence
  Synthetic oligonucleotide
acgatccctgggggattttaacgtctctta

SEQ ID NO: 287242 - DNA, 30 bp, Artificial Sequence
  Synthetic oligonucleotide
agggcaaatcgcgccccaggtcttctctta

SEQ ID NO: 287243 - DNA, 30 bp, Artificial Sequence
  Synthetic oligonucleotide
cggtgggagggctcggaccgatgagtctta

SEQ ID NO: 287244 - DNA, 30 bp, Artificial Sequence
  Synthetic oligonucleotide
ttttcgcaattgaaatgcggcttagtctta

SEQ ID NO: 287245 - DNA, 30 bp, Artificial Sequence
  Synthetic oligonucleotide
ttggagctgatttgtatacgaacggtctta

SEQ ID NO: 287246 - DNA, 30 bp, Artificial Sequence
  Synthetic oligonucleotide
agatggtctactcgccaagatagtgtctta

SEQ ID NO: 287247 - DNA, 29 bp, Artificial Sequence
  Synthetic oligonucleotide
gaatgtccgaacagttttaaagattctta

SEQ ID NO: 287248 - DNA, 30 bp, Artificial Sequence
  Synthetic oligonucleotide
tgtattgtatgtccgtagtgtcgcttctta

SEQ ID NO: 287249 - DNA, 30 bp, Artificial Sequence
  Synthetic oligonucleotide
atgttgtggttggtacacaaaaggttctta

SEQ ID NO: 287250 - DNA, 30 bp, Artificial Sequence
  Synthetic oligonucleotide
tttgaagaaataggacgtagttggttctta

SEQ ID NO: 287251 - DNA, 30 bp, Artificial Sequence
  Synthetic oligonucleotide
atagacgggactcggaatgcaatgttctta

SEQ ID NO: 287252 - DNA, 30 bp, Artificial Sequence
  Synthetic oligonucleotide
ccaatccagggtcggtcgggcggtttctta

SEQ ID NO: 287253 - DNA, 30 bp, Artificial Sequence
  Synthetic oligonucleotide
ccgactattacggtacttcagggtttctta

SEQ ID NO: 287254 - DNA, 30 bp, Artificial Sequence
  Synthetic oligonucleotide
tttgaggtcaagtacgctgagggaaagtta

SEQ ID NO: 287255 - DNA, 30 bp, Artificial Sequence
  Synthetic oligonucleotide
acccaaaagaagccgctttacataaagtta

SEQ ID NO: 287256 - DNA, 30 bp, Artificial Sequence
  Synthetic oligonucleotide
ttgtcgtcacagaactgcacccccaagtta

SEQ ID NO: 287257 - DNA, 30 bp, Artificial Sequence
  Synthetic oligonucleotide
tcatacgatgtgcgctatataacgaagtta

SEQ ID NO: 287258 - DNA, 30 bp, Artificial Sequence
  Synthetic oligonucleotide
gtgagtctctgcaaaggttagtggaagtta

SEQ ID NO: 287259 - DNA, 30 bp, Artificial Sequence
  Synthetic oligonucleotide
tctgaactacttaaaggtttgactaagtta

SEQ ID NO: 287260 - DNA, 30 bp, Artificial Sequence
  Synthetic oligonucleotide
catagtgactctgaaggcagcggacagtta

SEQ ID NO: 287261 - DNA, 30 bp, Artificial Sequence
  Synthetic oligonucleotide
ggatatagtcgaggcacatctcaccagtta

SEQ ID NO: 287262 - DNA, 30 bp, Artificial Sequence
  Synthetic oligonucleotide
tatatacctagcgacttacgtgaccagtta

SEQ ID NO: 287263 - DNA, 30 bp, Artificial Sequence
  Synthetic oligonucleotide
tagtaccaccagggactatccaagcagtta

SEQ ID NO: 287264 - DNA, 30 bp, Artificial Sequence
  Synthetic oligonucleotide
ctgcccgcccttgcaccgatataagagtta

SEQ ID NO: 287265 - DNA, 30 bp, Artificial Sequence
  Synthetic oligonucleotide
ctggctcgttaagggagttaaggcgagtta

SEQ ID NO: 287266 - DNA, 30 bp, Artificial Sequence
  Synthetic oligonucleotide
aaacgtatatcattggtcgttgcggagtta

SEQ ID NO: 287267 - DNA, 30 bp, Artificial Sequence
  Synthetic oligonucleotide
gtactgccaggtttgatcaaacgggagtta

SEQ ID NO: 287268 - DNA, 30 bp, Artificial Sequence
  Synthetic oligonucleotide
gcgctatagccttctcgtgtacgtgagtta

SEQ ID NO: 287269 - DNA, 30 bp, Artificial Sequence
  Synthetic oligonucleotide
agggagaccctactcaggcttcgctagtta

SEQ ID NO: 287270 - DNA, 30 bp, Artificial Sequence
  Synthetic oligonucleotide
cacactcattaacgatgctggggctagtta

SEQ ID NO: 287271 - DNA, 30 bp, Artificial Sequence
  Synthetic oligonucleotide
tcccgactcaccgatccagatttgtagtta

SEQ ID NO: 287272 - DNA, 30 bp, Artificial Sequence
  Synthetic oligonucleotide
gagcaagtggaagcgctgcgcatttagtta

SEQ ID NO: 287273 - DNA, 30 bp, Artificial Sequence
  Synthetic oligonucleotide
atagcagactacatgctgaaatgcacgtta

SEQ ID NO: 287274 - DNA, 30 bp, Artificial Sequence
  Synthetic oligonucleotide
cacgcgcaatcgtgaccagcaatgacgtta

SEQ ID NO: 287275 - DNA, 30 bp, Artificial Sequence
  Synthetic oligonucleotide
cacgcctatccttaaactgttggtacgtta

SEQ ID NO: 287276 - DNA, 30 bp, Artificial Sequence
  Synthetic oligonucleotide
atgatagcgatgcgacttttagcaccgtta

SEQ ID NO: 287277 - DNA, 29 bp, Artificial Sequence
  Synthetic oligonucleotide
ttgcgctcattgaggggtgcgtaccgtta

SEQ ID NO: 287278 - DNA, 30 bp, Artificial Sequence
  Synthetic oligonucleotide
attgaaacttcgtgtagtattgtcccgtta

SEQ ID NO: 287279 - DNA, 30 bp, Artificial Sequence
  Synthetic oligonucleotide
caattaagtgaaagtgtgctgaaagcgtta

SEQ ID NO: 287280 - DNA, 30 bp, Artificial Sequence
  Synthetic oligonucleotide
cggtaatctcaatccccgcaaatagcgtta

SEQ ID NO: 287281 - DNA, 30 bp, Artificial Sequence
  Synthetic oligonucleotide
taaagcacaggcaggaatgatgccgcgtta

SEQ ID NO: 287282 - DNA, 30 bp, Artificial Sequence
  Synthetic oligonucleotide
atattccaaggaaagggcgaaatcgcgtta

SEQ ID NO: 287283 - DNA, 30 bp, Artificial Sequence
  Synthetic oligonucleotide
tgatacagttatgtgttcgagttggcgtta

SEQ ID NO: 287284 - DNA, 30 bp, Artificial Sequence
  Synthetic oligonucleotide
gtgatgacacagaaggcttaggtatcgtta

SEQ ID NO: 287285 - DNA, 30 bp, Artificial Sequence
  Synthetic oligonucleotide
tttggaaaactacccatagcgggctcgtta

SEQ ID NO: 287286 - DNA, 30 bp, Artificial Sequence
  Synthetic oligonucleotide
catgcgtaaaccttccagtataggtcgtta

SEQ ID NO: 287287 - DNA, 30 bp, Artificial Sequence
  Synthetic oligonucleotide
agtcttgcggatggaaaggcgtggtcgtta

SEQ ID NO: 287288 - DNA, 30 bp, Artificial Sequence
  Synthetic oligonucleotide
gaccgccacccgatcgtagccctgtcgtta

SEQ ID NO: 287289 - DNA, 30 bp, Artificial Sequence
  Synthetic oligonucleotide
gtatcccgagtactacccgaagaaaggtta

SEQ ID NO: 287290 - DNA, 30 bp, Artificial Sequence
  Synthetic oligonucleotide
caactgggctatacgcgttgcgaaaggtta

SEQ ID NO: 287291 - DNA, 30 bp, Artificial Sequence
  Synthetic oligonucleotide
tgatatggcagtattagttttaataggtta

SEQ ID NO: 287292 - DNA, 30 bp, Artificial Sequence
  Synthetic oligonucleotide
cgcggaaactacaagctttactataggtta

SEQ ID NO: 287293 - DNA, 30 bp, Artificial Sequence
  Synthetic oligonucleotide
gtgggggattaaggcacgaccagtaggtta

SEQ ID NO: 287294 - DNA, 30 bp, Artificial Sequence
  Synthetic oligonucleotide
aaacgatgcatggtcaagccgcgtaggtta

SEQ ID NO: 287295 - DNA, 30 bp, Artificial Sequence
  Synthetic oligonucleotide
atgcgatttagcaaaaatatgtgtaggtta

SEQ ID NO: 287296 - DNA, 30 bp, Artificial Sequence
  Synthetic oligonucleotide
gtgtgttttagaaaagaaccacaacggtta

SEQ ID NO: 287297 - DNA, 30 bp, Artificial Sequence
  Synthetic oligonucleotide
tatttaggggggattcagctgctacggtta

SEQ ID NO: 287298 - DNA, 30 bp, Artificial Sequence
  Synthetic oligonucleotide
catactgacatacccctaggattacggtta

SEQ ID NO: 287299 - DNA, 30 bp, Artificial Sequence
  Synthetic oligonucleotide
cgtgcgtatatggtcatactttaccggtta

SEQ ID NO: 287300 - DNA, 30 bp, Artificial Sequence
  Synthetic oligonucleotide
tttcatcaggagaataaagcctagcggtta

SEQ ID NO: 287301 - DNA, 30 bp, Artificial Sequence
  Synthetic oligonucleotide
ttttcactagagggcattcgcaatcggtta

SEQ ID NO: 287302 - DNA, 30 bp, Artificial Sequence
  Synthetic oligonucleotide
gtagttgagcagaaattgatctaagggtta

SEQ ID NO: 287303 - DNA, 30 bp, Artificial Sequence
  Synthetic oligonucleotide
aatcgattcataaagtgtttttaagggtta

SEQ ID NO: 287304 - DNA, 30 bp, Artificial Sequence
  Synthetic oligonucleotide
ttgggactgaatcagagtcttggagggtta

SEQ ID NO: 287305 - DNA, 30 bp, Artificial Sequence
  Synthetic oligonucleotide
gtcatagaagctataaaggttatagggtta

SEQ ID NO: 287306 - DNA, 31 bp, Artificial Sequence
  Synthetic oligonucleotide
ttgtgcagtccagcgttatcacaacgggtta

SEQ ID NO: 287307 - DNA, 30 bp, Artificial Sequence
  Synthetic oligonucleotide
ttcgctataagaacgttatacgacgggtta

SEQ ID NO: 287308 - DNA, 30 bp, Artificial Sequence
  Synthetic oligonucleotide
tcagacctgagtgcggctcatttcgggtta

SEQ ID NO: 287309 - DNA, 30 bp, Artificial Sequence
  Synthetic oligonucleotide
gctttcgtcaagatcgtaagtcaggggtta

SEQ ID NO: 287310 - DNA, 30 bp, Artificial Sequence
  Synthetic oligonucleotide
agtaaagtaggcttataaatttgggggtta

SEQ ID NO: 287311 - DNA, 30 bp, Artificial Sequence
  Synthetic oligonucleotide
agttctcgtggtcaacagatggatgggtta

SEQ ID NO: 287312 - DNA, 30 bp, Artificial Sequence
  Synthetic oligonucleotide
gatgggcgtcaaataatttacagtgggtta

SEQ ID NO: 287313 - DNA, 30 bp, Artificial Sequence
  Synthetic oligonucleotide
tcaagaataactatgctatatattgggtta

SEQ ID NO: 287314 - DNA, 30 bp, Artificial Sequence
  Synthetic oligonucleotide
aataatgacgcattgtaacaaaaatggtta

SEQ ID NO: 287315 - DNA, 30 bp, Artificial Sequence
  Synthetic oligonucleotide
ctcattgagaagccaccgtagaactggtta

SEQ ID NO: 287316 - DNA, 30 bp, Artificial Sequence
  Synthetic oligonucleotide
gacctgggcaggagttttccgcactggtta

SEQ ID NO: 287317 - DNA, 30 bp, Artificial Sequence
  Synthetic oligonucleotide
tctacggcgccggccatcgtgatctggtta

SEQ ID NO: 287318 - DNA, 31 bp, Artificial Sequence
  Synthetic oligonucleotide
ttaatggggcaccacgttgtccgtctggtta

SEQ ID NO: 287319 - DNA, 30 bp, Artificial Sequence
  Synthetic oligonucleotide
atccacagtctggctatgctaaagtggtta

SEQ ID NO: 287320 - DNA, 30 bp, Artificial Sequence
  Synthetic oligonucleotide
atgggacgctcattcacgatcgcgtggtta

SEQ ID NO: 287321 - DNA, 30 bp, Artificial Sequence
  Synthetic oligonucleotide
ccgttatctccgattaatagctggtggtta

SEQ ID NO: 287322 - DNA, 30 bp, Artificial Sequence
  Synthetic oligonucleotide
caaaggatatctggcataactgcttggtta

SEQ ID NO: 287323 - DNA, 30 bp, Artificial Sequence
  Synthetic oligonucleotide
tccgttagggcgcgcacgcagggttggtta

SEQ ID NO: 287324 - DNA, 30 bp, Artificial Sequence
  Synthetic oligonucleotide
catggattaaagctgtggtagggttggtta

SEQ ID NO: 287325 - DNA, 30 bp, Artificial Sequence
  Synthetic oligonucleotide
gttaagtgccatttctggccgttttggtta

SEQ ID NO: 287326 - DNA, 30 bp, Artificial Sequence
  Synthetic oligonucleotide
acaaacgtaggaaccaccatgtcaatgtta

SEQ ID NO: 287327 - DNA, 31 bp, Artificial Sequence
  Synthetic oligonucleotide
tctttgccgccggcgaaaatgaaacatgtta

SEQ ID NO: 287328 - DNA, 30 bp, Artificial Sequence
  Synthetic oligonucleotide
gtataaaggggaatccgtcgtttcatgtta

SEQ ID NO: 287329 - DNA, 30 bp, Artificial Sequence
  Synthetic oligonucleotide
gccaatgtggcagtaaattggctgatgtta

SEQ ID NO: 287330 - DNA, 30 bp, Artificial Sequence
  Synthetic oligonucleotide
gggagtaaggttggttggatacgtatgtta

SEQ ID NO: 287331 - DNA, 30 bp, Artificial Sequence
  Synthetic oligonucleotide
acagaaaggactcgataactctgtatgtta

SEQ ID NO: 287332 - DNA, 30 bp, Artificial Sequence
  Synthetic oligonucleotide
taaaacgtgtggctttacgtcggactgtta

SEQ ID NO: 287333 - DNA, 30 bp, Artificial Sequence
  Synthetic oligonucleotide
ggcaggccacacagcggcctgggcctgtta

SEQ ID NO: 287334 - DNA, 30 bp, Artificial Sequence
  Synthetic oligonucleotide
ctgccagggataggacaccctcttctgtta

SEQ ID NO: 287335 - DNA, 30 bp, Artificial Sequence
  Synthetic oligonucleotide
ggggaattgttactgagactagaggtgtta

SEQ ID NO: 287336 - DNA, 30 bp, Artificial Sequence
  Synthetic oligonucleotide
ggttccagcagtctgtcgtatagattgtta

SEQ ID NO: 287337 - DNA, 30 bp, Artificial Sequence
  Synthetic oligonucleotide
tacaagcggatctcccctactgacttgtta

SEQ ID NO: 287338 - DNA, 30 bp, Artificial Sequence
  Synthetic oligonucleotide
taccgtggccttaagcacttcaccttgtta

SEQ ID NO: 287339 - DNA, 30 bp, Artificial Sequence
  Synthetic oligonucleotide
atggtgaaatacgtagaggcaggcttgtta

SEQ ID NO: 287340 - DNA, 30 bp, Artificial Sequence
  Synthetic oligonucleotide
ccgtcccgaaaggacgtagtcgtcttgtta

SEQ ID NO: 287341 - DNA, 30 bp, Artificial Sequence
  Synthetic oligonucleotide
tcttatagacaataaatcgtgaatttgtta

SEQ ID NO: 287342 - DNA, 30 bp, Artificial Sequence
  Synthetic oligonucleotide
agcttgctaaggttgctgtcaagtttgtta

SEQ ID NO: 287343 - DNA, 30 bp, Artificial Sequence
  Synthetic oligonucleotide
aataggttaagcgaatgaccaattttgtta

SEQ ID NO: 287344 - DNA, 30 bp, Artificial Sequence
  Synthetic oligonucleotide
caatgcacatcaccatatgaagtaaattta

SEQ ID NO: 287345 - DNA, 30 bp, Artificial Sequence
  Synthetic oligonucleotide
actctaggcgaaaaagaactacacaattta

SEQ ID NO: 287346 - DNA, 30 bp, Artificial Sequence
  Synthetic oligonucleotide
tactctgcggctgtacatcgtcacaattta

SEQ ID NO: 287347 - DNA, 30 bp, Artificial Sequence
  Synthetic oligonucleotide
gtctggatatacatcggtgcgaccaattta

SEQ ID NO: 287348 - DNA, 30 bp, Artificial Sequence
  Synthetic oligonucleotide
ataagaaaaccgagattcgggagcaattta

SEQ ID NO: 287349 - DNA, 30 bp, Artificial Sequence
  Synthetic oligonucleotide
cctactacaaggtgaacatgcttcaattta

SEQ ID NO: 287350 - DNA, 30 bp, Artificial Sequence
  Synthetic oligonucleotide
ctgggccagcagtctcagttcgagaattta

SEQ ID NO: 287351 - DNA, 30 bp, Artificial Sequence
  Synthetic oligonucleotide
aagtgttgcgagaatcggttagataattta

SEQ ID NO: 287352 - DNA, 30 bp, Artificial Sequence
  Synthetic oligonucleotide
taagtacgcttgtatgaatgggctaattta

SEQ ID NO: 287353 - DNA, 30 bp, Artificial Sequence
  Synthetic oligonucleotide
acaagctctactgaagtttaacgacattta

SEQ ID NO: 287354 - DNA, 30 bp, Artificial Sequence
  Synthetic oligonucleotide
cataccattacacttactgctctccattta

SEQ ID NO: 287355 - DNA, 30 bp, Artificial Sequence
  Synthetic oligonucleotide
gtcccataggaaacggcgtaggtccattta

SEQ ID NO: 287356 - DNA, 30 bp, Artificial Sequence
  Synthetic oligonucleotide
tttgtaacgaatagttggaaagagcattta

SEQ ID NO: 287357 - DNA, 30 bp, Artificial Sequence
  Synthetic oligonucleotide
gggtacgaagtgatacaccacagtcattta

SEQ ID NO: 287358 - DNA, 30 bp, Artificial Sequence
  Synthetic oligonucleotide
agcacgatcgtttgggctaggggtcattta

SEQ ID NO: 287359 - DNA, 30 bp, Artificial Sequence
  Synthetic oligonucleotide
ctcaacacacgatggttatgggttcattta

SEQ ID NO: 287360 - DNA, 30 bp, Artificial Sequence
  Synthetic oligonucleotide
gtatagggtgacggtaggtgccgagattta

SEQ ID NO: 287361 - DNA, 30 bp, Artificial Sequence
  Synthetic oligonucleotide
taactacttaaccaaaacccctaggattta

SEQ ID NO: 287362 - DNA, 30 bp, Artificial Sequence
  Synthetic oligonucleotide
gatgcttaaacagatgaattaagggattta

SEQ ID NO: 287363 - DNA, 30 bp, Artificial Sequence
  Synthetic oligonucleotide
agttactgatgcatggtcatcgtggattta

SEQ ID NO: 287364 - DNA, 30 bp, Artificial Sequence
  Synthetic oligonucleotide
taaggttcctatcgatagctcgtggattta

SEQ ID NO: 287365 - DNA, 30 bp, Artificial Sequence
  Synthetic oligonucleotide
aagaacaagcgttggatgatggtggattta

SEQ ID NO: 287366 - DNA, 30 bp, Artificial Sequence
  Synthetic oligonucleotide
cctgagttgtaggaaggcaggactgattta

SEQ ID NO: 287367 - DNA, 30 bp, Artificial Sequence
  Synthetic oligonucleotide
gccgatttcatagcatccgggcactattta

SEQ ID NO: 287368 - DNA, 30 bp, Artificial Sequence
  Synthetic oligonucleotide
caggtgtatacttccgcttaagagtattta

SEQ ID NO: 287369 - DNA, 30 bp, Artificial Sequence
  Synthetic oligonucleotide
gcctttccgtcaatcctggatacgtattta

SEQ ID NO: 287370 - DNA, 30 bp, Artificial Sequence
  Synthetic oligonucleotide
agcacaagtaggccagtgcggcattattta

SEQ ID NO: 287371 - DNA, 30 bp, Artificial Sequence
  Synthetic oligonucleotide
ttgagttgttagatgaacagagattattta

SEQ ID NO: 287372 - DNA, 30 bp, Artificial Sequence
  Synthetic oligonucleotide
aaaacggtccgcaagacgtaggcttattta

SEQ ID NO: 287373 - DNA, 30 bp, Artificial Sequence
  Synthetic oligonucleotide
gttatacacaccctcccacagaaaacttta

SEQ ID NO: 287374 - DNA, 30 bp, Artificial Sequence
  Synthetic oligonucleotide
gcgtcactgtcttgttcagtggcaacttta

SEQ ID NO: 287375 - DNA, 30 bp, Artificial Sequence
  Synthetic oligonucleotide
cgacggaggggactaggtcccagaacttta

SEQ ID NO: 287376 - DNA, 30 bp, Artificial Sequence
  Synthetic oligonucleotide
gaaaatatccggaaaaaattaggaacttta

SEQ ID NO: 287377 - DNA, 30 bp, Artificial Sequence
  Synthetic oligonucleotide
cgagcccccattatcatgcgatagacttta

SEQ ID NO: 287378 - DNA, 30 bp, Artificial Sequence
  Synthetic oligonucleotide
taccgcaaaagggtagtctaagatacttta

SEQ ID NO: 287379 - DNA, 30 bp, Artificial Sequence
  Synthetic oligonucleotide
ccggatcagcctcttgattcggttacttta

SEQ ID NO: 287380 - DNA, 30 bp, Artificial Sequence
  Synthetic oligonucleotide
accaggcaacaaacaaccactctcccttta

SEQ ID NO: 287381 - DNA, 29 bp, Artificial Sequence
  Synthetic oligonucleotide
agctaagatcgctcgcaaataggccttta

SEQ ID NO: 287382 - DNA, 30 bp, Artificial Sequence
  Synthetic oligonucleotide
gagcgtaccggaaagaccttccggccttta

SEQ ID NO: 287383 - DNA, 30 bp, Artificial Sequence
  Synthetic oligonucleotide
agaaaactgttgttagcaacacatccttta

SEQ ID NO: 287384 - DNA, 30 bp, Artificial Sequence
  Synthetic oligonucleotide
caaagtcccgggggttgctcgcctccttta

SEQ ID NO: 287385 - DNA, 30 bp, Artificial Sequence
  Synthetic oligonucleotide
tgtggacatcgcgttatgtgctccgcttta

SEQ ID NO: 287386 - DNA, 30 bp, Artificial Sequence
  Synthetic oligonucleotide
aatgtaggcaagtccccaggttaggcttta

SEQ ID NO: 287387 - DNA, 30 bp, Artificial Sequence
  Synthetic oligonucleotide
atcggcgccatcagttatgaatcggcttta

SEQ ID NO: 287388 - DNA, 30 bp, Artificial Sequence
  Synthetic oligonucleotide
ggagtaaaataactccagggcctggcttta

SEQ ID NO: 287389 - DNA, 30 bp, Artificial Sequence
  Synthetic oligonucleotide
cgtagaactacgggtgtgggctatgcttta

SEQ ID NO: 287390 - DNA, 30 bp, Artificial Sequence
  Synthetic oligonucleotide
ggaagctaggtattataaaccccatcttta

SEQ ID NO: 287391 - DNA, 30 bp, Artificial Sequence
  Synthetic oligonucleotide
ctcatagccttatggaccggaaggtcttta

SEQ ID NO: 287392 - DNA, 30 bp, Artificial Sequence
  Synthetic oligonucleotide
agacgacggatagaaatgagggcttcttta

SEQ ID NO: 287393 - DNA, 30 bp, Artificial Sequence
  Synthetic oligonucleotide
ggtaaatgcaaccggtacccgttttcttta

SEQ ID NO: 287394 - DNA, 30 bp, Artificial Sequence
  Synthetic oligonucleotide
acgcttagcatgagtacgaaccaaagttta

SEQ ID NO: 287395 - DNA, 30 bp, Artificial Sequence
  Synthetic oligonucleotide
cttatggtcttcggaactcggcgaagttta

SEQ ID NO: 287396 - DNA, 30 bp, Artificial Sequence
  Synthetic oligonucleotide
cctcctaagcatatgactgggtacagttta

SEQ ID NO: 287397 - DNA, 30 bp, Artificial Sequence
  Synthetic oligonucleotide
cgtctgagccgtactcgttctaccagttta

SEQ ID NO: 287398 - DNA, 30 bp, Artificial Sequence
  Synthetic oligonucleotide
agaatcagatttgataagccccgcagttta

SEQ ID NO: 287399 - DNA, 30 bp, Artificial Sequence
  Synthetic oligonucleotide
gtaattcggacttcacgtgacctcagttta

SEQ ID NO: 287400 - DNA, 30 bp, Artificial Sequence
  Synthetic oligonucleotide
tagaaagatttaggacatacaaatagttta

SEQ ID NO: 287401 - DNA, 30 bp, Artificial Sequence
  Synthetic oligonucleotide
tgaggttgggctcaatttgcatgtagttta

SEQ ID NO: 287402 - DNA, 30 bp, Artificial Sequence
  Synthetic oligonucleotide
gccaggggtacggctccatcgaaacgttta

SEQ ID NO: 287403 - DNA, 30 bp, Artificial Sequence
  Synthetic oligonucleotide
atcgttttgtgtttatgggattgacgttta

SEQ ID NO: 287404 - DNA, 30 bp, Artificial Sequence
  Synthetic oligonucleotide
acgacggtggttaatgtcctataccgttta

SEQ ID NO: 287405 - DNA, 31 bp, Artificial Sequence
  Synthetic oligonucleotide
cgcttgccggacacttcgcttatcgcgttta

SEQ ID NO: 287406 - DNA, 31 bp, Artificial Sequence
  Synthetic oligonucleotide
gacgctgatagtattttgacggaggcgttta

SEQ ID NO: 287407 - DNA, 30 bp, Artificial Sequence
  Synthetic oligonucleotide
gagggccccataactgaatgcatgcgttta

SEQ ID NO: 287408 - DNA, 30 bp, Artificial Sequence
  Synthetic oligonucleotide
atagtgcggcttcgaagtcacttgcgttta

SEQ ID NO: 287409 - DNA, 30 bp, Artificial Sequence
  Synthetic oligonucleotide
gaagcagtgttcaggctcctaggaggttta

SEQ ID NO: 287410 - DNA, 30 bp, Artificial Sequence
  Synthetic oligonucleotide
atcgggtccatccgtgtttagtacggttta

SEQ ID NO: 287411 - DNA, 30 bp, Artificial Sequence
  Synthetic oligonucleotide
gtgcgtaaatggaacggcgtttacggttta

SEQ ID NO: 287412 - DNA, 30 bp, Artificial Sequence
  Synthetic oligonucleotide
gcggcgttaagtatgttattaaccggttta

SEQ ID NO: 287413 - DNA, 30 bp, Artificial Sequence
  Synthetic oligonucleotide
aaacggaacagctggcgacggatcggttta

SEQ ID NO: 287414 - DNA, 30 bp, Artificial Sequence
  Synthetic oligonucleotide
gtacatatggattgtggcaacgtgggttta

SEQ ID NO: 287415 - DNA, 30 bp, Artificial Sequence
  Synthetic oligonucleotide
gaacgtccttggcccaggactggtggttta

SEQ ID NO: 287416 - DNA, 30 bp, Artificial Sequence
  Synthetic oligonucleotide
tggaagtgcttcatctcgggagcatgttta

SEQ ID NO: 287417 - DNA, 30 bp, Artificial Sequence
  Synthetic oligonucleotide
gctagtaaaatttaatgtcacagctgttta

SEQ ID NO: 287418 - DNA, 30 bp, Artificial Sequence
  Synthetic oligonucleotide
ttaggcgagacgtcaggttctagctgttta

SEQ ID NO: 287419 - DNA, 30 bp, Artificial Sequence
  Synthetic oligonucleotide
agttcatgttacttccagcacaggtgttta

SEQ ID NO: 287420 - DNA, 30 bp, Artificial Sequence
  Synthetic oligonucleotide
gcttttaaagcatgagtaggcctgtgttta

SEQ ID NO: 287421 - DNA, 30 bp, Artificial Sequence
  Synthetic oligonucleotide
tgtatgggcgcaattctcctgctgtgttta

SEQ ID NO: 287422 - DNA, 30 bp, Artificial Sequence
  Synthetic oligonucleotide
cggtatctcaaatcacctaggacttgttta

SEQ ID NO: 287423 - DNA, 28 bp, Artificial Sequence
  Synthetic oligonucleotide
tctacttattaagaggaaggcaatttta

SEQ ID NO: 287424 - DNA, 30 bp, Artificial Sequence
  Synthetic oligonucleotide
acttgcagtggtcaatctcgctgaatttta

SEQ ID NO: 287425 - DNA, 30 bp, Artificial Sequence
  Synthetic oligonucleotide
gaacatcgtgacacggccttctgaatttta

SEQ ID NO: 287426 - DNA, 30 bp, Artificial Sequence
  Synthetic oligonucleotide
agtatgagaagctcttaaactttaatttta

SEQ ID NO: 287427 - DNA, 30 bp, Artificial Sequence
  Synthetic oligonucleotide
cagcagctatggatgagtattttaatttta

SEQ ID NO: 287428 - DNA, 30 bp, Artificial Sequence
  Synthetic oligonucleotide
gcagagatgatgagttatgattgcatttta

SEQ ID NO: 287429 - DNA, 30 bp, Artificial Sequence
  Synthetic oligonucleotide
ggcaagcgatatatcttaccaacgatttta

SEQ ID NO: 287430 - DNA, 30 bp, Artificial Sequence
  Synthetic oligonucleotide
actttggtaagctgataggaacttatttta

SEQ ID NO: 287431 - DNA, 30 bp, Artificial Sequence
  Synthetic oligonucleotide
cctaactattcccaatcagatgggctttta

SEQ ID NO: 287432 - DNA, 30 bp, Artificial Sequence
  Synthetic oligonucleotide
atagcgacaaaacagtacaaggatctttta

SEQ ID NO: 287433 - DNA, 30 bp, Artificial Sequence
  Synthetic oligonucleotide
tacgacttgacagtgaaacggattctttta

SEQ ID NO: 287434 - DNA, 30 bp, Artificial Sequence
  Synthetic oligonucleotide
atggcgtactaccgaagtcagtgagtttta

SEQ ID NO: 287435 - DNA, 30 bp, Artificial Sequence
  Synthetic oligonucleotide
gtaaaggcggcggatgatccaatagtttta

SEQ ID NO: 287436 - DNA, 30 bp, Artificial Sequence
  Synthetic oligonucleotide
tttcccgcgcagaggatcgttaccgtttta

SEQ ID NO: 287437 - DNA, 30 bp, Artificial Sequence
  Synthetic oligonucleotide
taagccatccgccgtgcatggcccgtttta

SEQ ID NO: 287438 - DNA, 30 bp, Artificial Sequence
  Synthetic oligonucleotide
gtttgcatagcaaagcttccaggcgtttta

SEQ ID NO: 287439 - DNA, 30 bp, Artificial Sequence
  Synthetic oligonucleotide
cggcacgaaaaaaaactagcgatcgtttta

SEQ ID NO: 287440 - DNA, 30 bp, Artificial Sequence
  Synthetic oligonucleotide
cggtgaacagggctgtcaaggagtgtttta

SEQ ID NO: 287441 - DNA, 30 bp, Artificial Sequence
  Synthetic oligonucleotide
gtgcagtatctcatggataatgttgtttta

SEQ ID NO: 287442 - DNA, 30 bp, Artificial Sequence
  Synthetic oligonucleotide
gcgcatggactacgctatgggttattttta

SEQ ID NO: 287443 - DNA, 30 bp, Artificial Sequence
  Synthetic oligonucleotide
aatgatggaatggaaccccaaaacttttta

SEQ ID NO: 287444 - DNA, 30 bp, Artificial Sequence
  Synthetic oligonucleotide
gcacgatagactcgggcgggccccttttta

SEQ ID NO: 287445 - DNA, 30 bp, Artificial Sequence
  Synthetic oligonucleotide
gcgcgcgttgactacactacccagttttta

SEQ ID NO: 287446 - DNA, 30 bp, Artificial Sequence
  Synthetic oligonucleotide
cctccacggtataacaccatgccgttttta

SEQ ID NO: 287447 - DNA, 30 bp, Artificial Sequence
  Synthetic oligonucleotide
tcggaatgggccgggtactcagctttttta

SEQ ID NO: 287448 - DNA, 30 bp, Artificial Sequence
  Synthetic oligonucleotide
cgtaaccaccgtccgcaaatgcgaaaaaac

SEQ ID NO: 287449 - DNA, 30 bp, Artificial Sequence
  Synthetic oligonucleotide
actaccctggaaatcctcgactgaaaaaac

SEQ ID NO: 287450 - DNA, 30 bp, Artificial Sequence
  Synthetic oligonucleotide
tgcaaaataaagcgatagtcgtgaaaaaac

SEQ ID NO: 287451 - DNA, 30 bp, Artificial Sequence
  Synthetic oligonucleotide
tcaggccgattgttgtacccgctaaaaaac

SEQ ID NO: 287452 - DNA, 30 bp, Artificial Sequence
  Synthetic oligonucleotide
gccctaattgaatgtgcttaagtaaaaaac

SEQ ID NO: 287453 - DNA, 30 bp, Artificial Sequence
  Synthetic oligonucleotide
catctccccccgttttgcactgagaaaaac

SEQ ID NO: 287454 - DNA, 30 bp, Artificial Sequence
  Synthetic oligonucleotide
gcagacatcagacccaaagagccgaaaaac

SEQ ID NO: 287455 - DNA, 30 bp, Artificial Sequence
  Synthetic oligonucleotide
aagctaaccatcaccttcagctcgaaaaac

SEQ ID NO: 287456 - DNA, 30 bp, Artificial Sequence
  Synthetic oligonucleotide
cctcttaggcctggcgatctcctgaaaaac

SEQ ID NO: 287457 - DNA, 30 bp, Artificial Sequence
  Synthetic oligonucleotide
tcaagccaagaaccaagattgtctaaaaac

SEQ ID NO: 287458 - DNA, 30 bp, Artificial Sequence
  Synthetic oligonucleotide
cggagtgtatcgtgtttcccttttaaaaac

SEQ ID NO: 287459 - DNA, 30 bp, Artificial Sequence
  Synthetic oligonucleotide
ggttccaacatatctccaactcaacaaaac

SEQ ID NO: 287460 - DNA, 30 bp, Artificial Sequence
  Synthetic oligonucleotide
caggttgtagatacggcgagagaacaaaac

SEQ ID NO: 287461 - DNA, 30 bp, Artificial Sequence
  Synthetic oligonucleotide
gcctgccggctgcggacaaggaagcaaaac

SEQ ID NO: 287462 - DNA, 30 bp, Artificial Sequence
  Synthetic oligonucleotide
cgtgggttcagaccggtcgaatgtcaaaac

SEQ ID NO: 287463 - DNA, 30 bp, Artificial Sequence
  Synthetic oligonucleotide
tgacttccaagccagtgtggaacagaaaac

SEQ ID NO: 287464 - DNA, 30 bp, Artificial Sequence
  Synthetic oligonucleotide
ggcaaagtgaatataatcagacgagaaaac

SEQ ID NO: 287465 - DNA, 30 bp, Artificial Sequence
  Synthetic oligonucleotide
atgttatgtgttgcgatcattcacgaaaac

SEQ ID NO: 287466 - DNA, 30 bp, Artificial Sequence
  Synthetic oligonucleotide
cgcgttgcctttagctagtagaccgaaaac

SEQ ID NO: 287467 - DNA, 30 bp, Artificial Sequence
  Synthetic oligonucleotide
gtccccaccgatggcatcgccaaggaaaac

SEQ ID NO: 287468 - DNA, 30 bp, Artificial Sequence
  Synthetic oligonucleotide
tgaataatcaaaccttataagacggaaaac

SEQ ID NO: 287469 - DNA, 30 bp, Artificial Sequence
  Synthetic oligonucleotide
cctccacaagagagacttgcgctggaaaac

SEQ ID NO: 287470 - DNA, 30 bp, Artificial Sequence
  Synthetic oligonucleotide
ggttgcccgaaaggatgataaaatgaaaac

SEQ ID NO: 287471 - DNA, 30 bp, Artificial Sequence
  Synthetic oligonucleotide
gcgtcgttatcacatggttttcatgaaaac

SEQ ID NO: 287472 - DNA, 30 bp, Artificial Sequence
  Synthetic oligonucleotide
gaaacactggcattatcaagatctgaaaac

SEQ ID NO: 287473 - DNA, 30 bp, Artificial Sequence
  Synthetic oligonucleotide
atcgagacatacgctaatctgccataaaac

SEQ ID NO: 287474 - DNA, 30 bp, Artificial Sequence
  Synthetic oligonucleotide
cctccgacccttagggtacggacctaaaac

SEQ ID NO: 287475 - DNA, 30 bp, Artificial Sequence
  Synthetic oligonucleotide
gtcacaccatggagtccacgctcctaaaac

SEQ ID NO: 287476 - DNA, 30 bp, Artificial Sequence
  Synthetic oligonucleotide
gggagtatgagattcgtgttaagctaaaac

SEQ ID NO: 287477 - DNA, 30 bp, Artificial Sequence
  Synthetic oligonucleotide
ttggaggcaaagcctagttacgtgtaaaac

SEQ ID NO: 287478 - DNA, 30 bp, Artificial Sequence
  Synthetic oligonucleotide
cgttaccaacggcagttttgaagtacaaac

SEQ ID NO: 287479 - DNA, 30 bp, Artificial Sequence
  Synthetic oligonucleotide
gtgaaaccacatactcactcgcgaccaaac

SEQ ID NO: 287480 - DNA, 30 bp, Artificial Sequence
  Synthetic oligonucleotide
gagccttaagatgcggaaccctgaccaaac

SEQ ID NO: 287481 - DNA, 30 bp, Artificial Sequence
  Synthetic oligonucleotide
agagctagaattacgtctgcggccccaaac

SEQ ID NO: 287482 - DNA, 30 bp, Artificial Sequence
  Synthetic oligonucleotide
actgttggcgttgtggccgtatagccaaac

SEQ ID NO: 287483 - DNA, 30 bp, Artificial Sequence
  Synthetic oligonucleotide
tgcaagcggcgctataccgaaacgccaaac

SEQ ID NO: 287484 - DNA, 30 bp, Artificial Sequence
  Synthetic oligonucleotide
aactttctgggatgaagataccctccaaac

SEQ ID NO: 287485 - DNA, 30 bp, Artificial Sequence
  Synthetic oligonucleotide
gactcagaccgaaattacgtacgagcaaac

SEQ ID NO: 287486 - DNA, 30 bp, Artificial Sequence
  Synthetic oligonucleotide
aacactggggtggacggcatgatcgcaaac

SEQ ID NO: 287487 - DNA, 30 bp, Artificial Sequence
  Synthetic oligonucleotide
gctttagctctacctggggcaaaggcaaac

SEQ ID NO: 287488 - DNA, 30 bp, Artificial Sequence
  Synthetic oligonucleotide
gaggatagttattagcatgtacgggcaaac

SEQ ID NO: 287489 - DNA, 30 bp, Artificial Sequence
  Synthetic oligonucleotide
tctgtagaaattgcatgagttttggcaaac

SEQ ID NO: 287490 - DNA, 30 bp, Artificial Sequence
  Synthetic oligonucleotide
gaagagctagaaagtataactgctgcaaac

SEQ ID NO: 287491 - DNA, 30 bp, Artificial Sequence
  Synthetic oligonucleotide
tgaacgatcccatgtgaggtaagtgcaaac

SEQ ID NO: 287492 - DNA, 30 bp, Artificial Sequence
  Synthetic oligonucleotide
tgtcgagtgctatgagttagcacgtcaaac

SEQ ID NO: 287493 - DNA, 30 bp, Artificial Sequence
  Synthetic oligonucleotide
atgtgagtaggccactagagatgaagaaac

SEQ ID NO: 287494 - DNA, 30 bp, Artificial Sequence
  Synthetic oligonucleotide
atgtagcaacaactgggtgggataagaaac

SEQ ID NO: 287495 - DNA, 30 bp, Artificial Sequence
  Synthetic oligonucleotide
atgccggaacgttaggacctgggcagaaac

SEQ ID NO: 287496 - DNA, 30 bp, Artificial Sequence
  Synthetic oligonucleotide
gcttggtatccaaaaaatcggccgagaaac

SEQ ID NO: 287497 - DNA, 30 bp, Artificial Sequence
  Synthetic oligonucleotide
gtatgattttaagacaatagcgggagaaac

SEQ ID NO: 287498 - DNA, 30 bp, Artificial Sequence
  Synthetic oligonucleotide
atatgatacaacggagaatctagtagaaac

SEQ ID NO: 287499 - DNA, 30 bp, Artificial Sequence
  Synthetic oligonucleotide
cacactccactcaatacacctggtagaaac

SEQ ID NO: 287500 - DNA, 30 bp, Artificial Sequence
  Synthetic oligonucleotide
ttggcgacacttcttaccatgtgtagaaac

SEQ ID NO: 287501 - DNA, 30 bp, Artificial Sequence
  Synthetic oligonucleotide
aacaatgttgaaagataagtatcgcgaaac

SEQ ID NO: 287502 - DNA, 30 bp, Artificial Sequence
  Synthetic oligonucleotide
ttagagacgcacccactagacaggcgaaac

SEQ ID NO: 287503 - DNA, 30 bp, Artificial Sequence
  Synthetic oligonucleotide
acttacagcgtagcctggctccatcgaaac

SEQ ID NO: 287504 - DNA, 30 bp, Artificial Sequence
  Synthetic oligonucleotide
tcacgcccgatggaccctgctgatcgaaac

SEQ ID NO: 287505 - DNA, 30 bp, Artificial Sequence
  Synthetic oligonucleotide
agaaacaatttattaggagtcctaggaaac

SEQ ID NO: 287506 - DNA, 30 bp, Artificial Sequence
  Synthetic oligonucleotide
tattcgcctgcgcaaattctgcgcggaaac

SEQ ID NO: 287507 - DNA, 30 bp, Artificial Sequence
  Synthetic oligonucleotide
catatggatgcatggatgtgttgcggaaac

SEQ ID NO: 287508 - DNA, 30 bp, Artificial Sequence
  Synthetic oligonucleotide
ccacgccgtgcggattaaaacgtcggaaac

SEQ ID NO: 287509 - DNA, 30 bp, Artificial Sequence
  Synthetic oligonucleotide
gacccacaagccagcgaagatgtgggaaac

SEQ ID NO: 287510 - DNA, 30 bp, Artificial Sequence
  Synthetic oligonucleotide
aacacggaactcattaagggttctggaaac

SEQ ID NO: 287511 - DNA, 30 bp, Artificial Sequence
  Synthetic oligonucleotide
tatacatgggtgatgttaagacaatgaaac

SEQ ID NO: 287512 - DNA, 30 bp, Artificial Sequence
  Synthetic oligonucleotide
cgattgttattcggccaggtatcatgaaac

SEQ ID NO: 287513 - DNA, 30 bp, Artificial Sequence
  Synthetic oligonucleotide
gccacaggtgccttggggcacatatgaaac

SEQ ID NO: 287514 - DNA, 30 bp, Artificial Sequence
  Synthetic oligonucleotide
gtcgtacatttaacggactctccctgaaac

SEQ ID NO: 287515 - DNA, 30 bp, Artificial Sequence
  Synthetic oligonucleotide
ggcagaggtaaaactctacgaatgtgaaac

SEQ ID NO: 287516 - DNA, 30 bp, Artificial Sequence
  Synthetic oligonucleotide
caggccgccgaccgttgcgtgagttgaaac

SEQ ID NO: 287517 - DNA, 30 bp, Artificial Sequence
  Synthetic oligonucleotide
ccgtgggtgacaacgctgtaacgttgaaac

SEQ ID NO: 287518 - DNA, 30 bp, Artificial Sequence
  Synthetic oligonucleotide
gataagatctccgtggcacgtgaaataaac

SEQ ID NO: 287519 - DNA, 30 bp, Artificial Sequence
  Synthetic oligonucleotide
cgcctacaaggtaggcgtaattcaataaac

SEQ ID NO: 287520 - DNA, 30 bp, Artificial Sequence
  Synthetic oligonucleotide
agtactcatgtacaatcggactgaataaac

SEQ ID NO: 287521 - DNA, 29 bp, Artificial Sequence
  Synthetic oligonucleotide
gcaggtgttgcgacccactattaataaac

SEQ ID NO: 287522 - DNA, 30 bp, Artificial Sequence
  Synthetic oligonucleotide
atcaatgctgtcatacatttacgcataaac

SEQ ID NO: 287523 - DNA, 30 bp, Artificial Sequence
  Synthetic oligonucleotide
gcagagaggctgtcaactcagcgcataaac

SEQ ID NO: 287524 - DNA, 30 bp, Artificial Sequence
  Synthetic oligonucleotide
tggaaccgattagtttctgttatcataaac

SEQ ID NO: 287525 - DNA, 30 bp, Artificial Sequence
  Synthetic oligonucleotide
agttgagtctatgatcacccggggataaac

SEQ ID NO: 287526 - DNA, 30 bp, Artificial Sequence
  Synthetic oligonucleotide
taggcagctatcatcgtttgccatataaac

SEQ ID NO: 287527 - DNA, 30 bp, Artificial Sequence
  Synthetic oligonucleotide
acggggggtgggttagcccttcgtataaac

SEQ ID NO: 287528 - DNA, 30 bp, Artificial Sequence
  Synthetic oligonucleotide
aagcggaccaatttcaagtgggacctaaac

SEQ ID NO: 287529 - DNA, 30 bp, Artificial Sequence
  Synthetic oligonucleotide
ctggctcggagtgcctcagctcccctaaac

SEQ ID NO: 287530 - DNA, 30 bp, Artificial Sequence
  Synthetic oligonucleotide
gctccggcgatattaaacgtagtgctaaac

SEQ ID NO: 287531 - DNA, 30 bp, Artificial Sequence
  Synthetic oligonucleotide
catatactgcaccaggatcgaagcgtaaac

SEQ ID NO: 287532 - DNA, 30 bp, Artificial Sequence
  Synthetic oligonucleotide
agtgtaggctgcgagacatactatgtaaac

SEQ ID NO: 287533 - DNA, 30 bp, Artificial Sequence
  Synthetic oligonucleotide
ctgatggtggaggtgaacgtttctgtaaac

SEQ ID NO: 287534 - DNA, 30 bp, Artificial Sequence
  Synthetic oligonucleotide
accgtaggagcatatggtactattgtaaac

SEQ ID NO: 287535 - DNA, 30 bp, Artificial Sequence
  Synthetic oligonucleotide
gaaacatctcgggtgaaaagtcgattaaac

SEQ ID NO: 287536 - DNA, 30 bp, Artificial Sequence
  Synthetic oligonucleotide
ggggttccgaggagtaacggcctattaaac

SEQ ID NO: 287537 - DNA, 30 bp, Artificial Sequence
  Synthetic oligonucleotide
cggtcgcggattgaagtttcccagttaaac

SEQ ID NO: 287538 - DNA, 30 bp, Artificial Sequence
  Synthetic oligonucleotide
ttagcctatcggtggagggctgggttaaac

SEQ ID NO: 287539 - DNA, 30 bp, Artificial Sequence
  Synthetic oligonucleotide
gtgcgtcgtcgtcgaggtacatggttaaac

SEQ ID NO: 287540 - DNA, 30 bp, Artificial Sequence
  Synthetic oligonucleotide
ggctgccaggcatcattcaaatctttaaac

SEQ ID NO: 287541 - DNA, 30 bp, Artificial Sequence
  Synthetic oligonucleotide
tcatgatctagttgccgatctggaaacaac

SEQ ID NO: 287542 - DNA, 30 bp, Artificial Sequence
  Synthetic oligonucleotide
atctcagacggttggtttaaccgcaacaac

SEQ ID NO: 287543 - DNA, 30 bp, Artificial Sequence
  Synthetic oligonucleotide
cagagttagatcgtatgatgggggaacaac

SEQ ID NO: 287544 - DNA, 30 bp, Artificial Sequence
  Synthetic oligonucleotide
tatatcataagtacaaaatcatggaacaac

SEQ ID NO: 287545 - DNA, 30 bp, Artificial Sequence
  Synthetic oligonucleotide
gtacgtcggattggtcaacgttggaacaac

SEQ ID NO: 287546 - DNA, 30 bp, Artificial Sequence
  Synthetic oligonucleotide
tggtctacgggtgtttcgagcgataacaac

SEQ ID NO: 287547 - DNA, 30 bp, Artificial Sequence
  Synthetic oligonucleotide
attcattgaaggacatccaaaactaacaac

SEQ ID NO: 287548 - DNA, 30 bp, Artificial Sequence
  Synthetic oligonucleotide
cgctcttgcttgagagtcaagagtaacaac

SEQ ID NO: 287549 - DNA, 30 bp, Artificial Sequence
  Synthetic oligonucleotide
ccgacgaatattttaattgaggtccacaac

SEQ ID NO: 287550 - DNA, 30 bp, Artificial Sequence
  Synthetic oligonucleotide
tgtatctgaatacgctccaacaagcacaac

SEQ ID NO: 287551 - DNA, 30 bp, Artificial Sequence
  Synthetic oligonucleotide
gagtaacgagtcgagttatagtatcacaac

SEQ ID NO: 287552 - DNA, 30 bp, Artificial Sequence
  Synthetic oligonucleotide
tgggactttacactgcaatgcgaagacaac

SEQ ID NO: 287553 - DNA, 30 bp, Artificial Sequence
  Synthetic oligonucleotide
gatgtgtaatagtcatggccttgagacaac

SEQ ID NO: 287554 - DNA, 30 bp, Artificial Sequence
  Synthetic oligonucleotide
gatctggtggtgggccctatgaccgacaac

SEQ ID NO: 287555 - DNA, 30 bp, Artificial Sequence
  Synthetic oligonucleotide
gttgcaaatatccgaccgaattgcgacaac

SEQ ID NO: 287556 - DNA, 30 bp, Artificial Sequence
  Synthetic oligonucleotide
ggtgattagggtggtaatggcctcgacaac

SEQ ID NO: 287557 - DNA, 30 bp, Artificial Sequence
  Synthetic oligonucleotide
taagatccggataatatgagtagggacaac

SEQ ID NO: 287558 - DNA, 30 bp, Artificial Sequence
  Synthetic oligonucleotide
gcgcttgcagcgcttgaaggtgaatacaac

SEQ ID NO: 287559 - DNA, 30 bp, Artificial Sequence
  Synthetic oligonucleotide
ggataacatgagattgtatcctcctacaac

SEQ ID NO: 287560 - DNA, 30 bp, Artificial Sequence
  Synthetic oligonucleotide
atgttgttgagagctgcaaagccgtacaac

SEQ ID NO: 287561 - DNA, 30 bp, Artificial Sequence
  Synthetic oligonucleotide
taggtaaaattcgagctttctccgtacaac

SEQ ID NO: 287562 - DNA, 30 bp, Artificial Sequence
  Synthetic oligonucleotide
tcataacggtcctaccgaacggtgtacaac

SEQ ID NO: 287563 - DNA, 30 bp, Artificial Sequence
  Synthetic oligonucleotide
tacccttctctcgatgatactctttacaac

SEQ ID NO: 287564 - DNA, 30 bp, Artificial Sequence
  Synthetic oligonucleotide
tcctcattgtaacagattttagcaaccaac

SEQ ID NO: 287565 - DNA, 30 bp, Artificial Sequence
  Synthetic oligonucleotide
cggtccgtgttcgtgggtgtacgaaccaac

SEQ ID NO: 287566 - DNA, 30 bp, Artificial Sequence
  Synthetic oligonucleotide
agatattcgtgacacgtggccgagaccaac

SEQ ID NO: 287567 - DNA, 30 bp, Artificial Sequence
  Synthetic oligonucleotide
gttgtccaataaataatagaggagaccaac

SEQ ID NO: 287568 - DNA, 30 bp, Artificial Sequence
  Synthetic oligonucleotide
atcgtttagccggggacttgaatgaccaac

SEQ ID NO: 287569 - DNA, 30 bp, Artificial Sequence
  Synthetic oligonucleotide
gcattcatggcccccgttaacattaccaac

SEQ ID NO: 287570 - DNA, 30 bp, Artificial Sequence
  Synthetic oligonucleotide
taaacgaccggacatggactcccacccaac

SEQ ID NO: 287571 - DNA, 30 bp, Artificial Sequence
  Synthetic oligonucleotide
caatgccaggatattggttggatacccaac

SEQ ID NO: 287572 - DNA, 30 bp, Artificial Sequence
  Synthetic oligonucleotide
aggttacaatgtggtaagggataccccaac

SEQ ID NO: 287573 - DNA, 30 bp, Artificial Sequence
  Synthetic oligonucleotide
aaactactagtcagacgagttccccccaac

SEQ ID NO: 287574 - DNA, 30 bp, Artificial Sequence
  Synthetic oligonucleotide
tgttgggtgctgtttcttggagggcccaac

SEQ ID NO: 287575 - DNA, 30 bp, Artificial Sequence
  Synthetic oligonucleotide
gcgtcggagcgacaaaatcaacatcccaac

SEQ ID NO: 287576 - DNA, 30 bp, Artificial Sequence
  Synthetic oligonucleotide
gatccccaaaaagctataataagtcccaac

SEQ ID NO: 287577 - DNA, 30 bp, Artificial Sequence
  Synthetic oligonucleotide
gacctgactgtaagcacatcgtccgccaac

SEQ ID NO: 287578 - DNA, 30 bp, Artificial Sequence
  Synthetic oligonucleotide
gtagcacggtccgatggtattttcgccaac

SEQ ID NO: 287579 - DNA, 30 bp, Artificial Sequence
  Synthetic oligonucleotide
aatggcttacttggaccaacttagtccaac

SEQ ID NO: 287580 - DNA, 30 bp, Artificial Sequence
  Synthetic oligonucleotide
ctccccagcttagcaagcaaagaaagcaac

SEQ ID NO: 287581 - DNA, 30 bp, Artificial Sequence
  Synthetic oligonucleotide
agcgtcgatgggagcttagtaggaagcaac

SEQ ID NO: 287582 - DNA, 30 bp, Artificial Sequence
  Synthetic oligonucleotide
aatcacttaagtcagagcccggtaagcaac

SEQ ID NO: 287583 - DNA, 30 bp, Artificial Sequence
  Synthetic oligonucleotide
caggatgcttgtctttaagaaaggagcaac

SEQ ID NO: 287584 - DNA, 30 bp, Artificial Sequence
  Synthetic oligonucleotide
ttaattaaaagggcatggcatattagcaac

SEQ ID NO: 287585 - DNA, 30 bp, Artificial Sequence
  Synthetic oligonucleotide
tagcacggaggcattaccgcagaacgcaac

SEQ ID NO: 287586 - DNA, 30 bp, Artificial Sequence
  Synthetic oligonucleotide
ccgggggagccagtacgcacatgacgcaac

SEQ ID NO: 287587 - DNA, 30 bp, Artificial Sequence
  Synthetic oligonucleotide
acctacctggtttttcgtacctgccgcaac

SEQ ID NO: 287588 - DNA, 30 bp, Artificial Sequence
  Synthetic oligonucleotide
caactttcagtcctcagcgggatccgcaac

SEQ ID NO: 287589 - DNA, 30 bp, Artificial Sequence
  Synthetic oligonucleotide
gctggacgagcattttagaataagcgcaac

SEQ ID NO: 287590 - DNA, 30 bp, Artificial Sequence
  Synthetic oligonucleotide
agttgacctcaatgcattccctctcgcaac

SEQ ID NO: 287591 - DNA, 30 bp, Artificial Sequence
  Synthetic oligonucleotide
gaatggctggatgcacccttttctcgcaac

SEQ ID NO: 287592 - DNA, 30 bp, Artificial Sequence
  Synthetic oligonucleotide
tttttggacggatcatgtgtcaaaggcaac

SEQ ID NO: 287593 - DNA, 30 bp, Artificial Sequence
  Synthetic oligonucleotide
aagtccacatgtactctggcggcaggcaac

SEQ ID NO: 287594 - DNA, 30 bp, Artificial Sequence
  Synthetic oligonucleotide
ccacggttggcatcttatctccgaggcaac

SEQ ID NO: 287595 - DNA, 30 bp, Artificial Sequence
  Synthetic oligonucleotide
gaaattggacaatcactcgacataggcaac

SEQ ID NO: 287596 - DNA, 27 bp, Artificial Sequence
  Synthetic oligonucleotide
ggaaccaactcggcctggttcggcaac

SEQ ID NO: 287597 - DNA, 30 bp, Artificial Sequence
  Synthetic oligonucleotide
aaatacttaatagaaattcgagagggcaac

SEQ ID NO: 287598 - DNA, 30 bp, Artificial Sequence
  Synthetic oligonucleotide
taactgaggttggttctgccgaggggcaac

SEQ ID NO: 287599 - DNA, 30 bp, Artificial Sequence
  Synthetic oligonucleotide
taaattgtaagggtcattttgcggggcaac

SEQ ID NO: 287600 - DNA, 30 bp, Artificial Sequence
  Synthetic oligonucleotide
ggagggagttactttttcgccgggggcaac

SEQ ID NO: 287601 - DNA, 30 bp, Artificial Sequence
  Synthetic oligonucleotide
ttcaagaagcgtcggtatcgggatggcaac

SEQ ID NO: 287602 - DNA, 30 bp, Artificial Sequence
  Synthetic oligonucleotide
aagtctaatgagactcgtgccgctggcaac

SEQ ID NO: 287603 - DNA, 30 bp, Artificial Sequence
  Synthetic oligonucleotide
tagtgggggaagcagaaggaaaaatgcaac

SEQ ID NO: 287604 - DNA, 30 bp, Artificial Sequence
  Synthetic oligonucleotide
tcggttctagcttgagaacgggcatgcaac

SEQ ID NO: 287605 - DNA, 30 bp, Artificial Sequence
  Synthetic oligonucleotide
gctatggtcgttttcaactcagcgtgcaac

SEQ ID NO: 287606 - DNA, 30 bp, Artificial Sequence
  Synthetic oligonucleotide
gcgctacaaagacagtggaactggtgcaac

SEQ ID NO: 287607 - DNA, 30 bp, Artificial Sequence
  Synthetic oligonucleotide
atgtggtgggttgcttcttgatcaatcaac

SEQ ID NO: 287608 - DNA, 30 bp, Artificial Sequence
  Synthetic oligonucleotide
gtttatattgagtacagtccaggaatcaac

SEQ ID NO: 287609 - DNA, 30 bp, Artificial Sequence
  Synthetic oligonucleotide
ccggcgtgatcctgcattgtaataatcaac

SEQ ID NO: 287610 - DNA, 30 bp, Artificial Sequence
  Synthetic oligonucleotide
gggtaatcttggccaccagcatacatcaac

SEQ ID NO: 287611 - DNA, 30 bp, Artificial Sequence
  Synthetic oligonucleotide
ctacgtaaccagatgtcacgttgcatcaac

SEQ ID NO: 287612 - DNA, 30 bp, Artificial Sequence
  Synthetic oligonucleotide
aattacggcgtattcaagcattcgatcaac

SEQ ID NO: 287613 - DNA, 30 bp, Artificial Sequence
  Synthetic oligonucleotide
gtgttagcctctaaaattccgtggatcaac

SEQ ID NO: 287614 - DNA, 30 bp, Artificial Sequence
  Synthetic oligonucleotide
atgtcgttactcattgagggttggatcaac

SEQ ID NO: 287615 - DNA, 30 bp, Artificial Sequence
  Synthetic oligonucleotide
ctgttgaccggcattccaaaaaatatcaac

SEQ ID NO: 287616 - DNA, 30 bp, Artificial Sequence
  Synthetic oligonucleotide
ccgtagggacaccagatgacttatatcaac

SEQ ID NO: 287617 - DNA, 30 bp, Artificial Sequence
  Synthetic oligonucleotide
tcaacttccttaatcgtactgcgcctcaac

SEQ ID NO: 287618 - DNA, 30 bp, Artificial Sequence
  Synthetic oligonucleotide
tcgtttagactaatcatagattgcctcaac

SEQ ID NO: 287619 - DNA, 30 bp, Artificial Sequence
  Synthetic oligonucleotide
aggaggatggagtacgtaaccttcgtcaac

SEQ ID NO: 287620 - DNA, 30 bp, Artificial Sequence
  Synthetic oligonucleotide
gaccgagcacagcgttcagcatcggtcaac

SEQ ID NO: 287621 - DNA, 30 bp, Artificial Sequence
  Synthetic oligonucleotide
ctacgttctgtcatcgcctaaagggtcaac

SEQ ID NO: 287622 - DNA, 30 bp, Artificial Sequence
  Synthetic oligonucleotide
gtcacgggattttcctgatgacgggtcaac

SEQ ID NO: 287623 - DNA, 30 bp, Artificial Sequence
  Synthetic oligonucleotide
cgccatacgtgctccggcctacgggtcaac

SEQ ID NO: 287624 - DNA, 30 bp, Artificial Sequence
  Synthetic oligonucleotide
tcaatttaatggcgctcagtggtggtcaac

SEQ ID NO: 287625 - DNA, 30 bp, Artificial Sequence
  Synthetic oligonucleotide
aaagactaaaggactatcttagttgtcaac

SEQ ID NO: 287626 - DNA, 30 bp, Artificial Sequence
  Synthetic oligonucleotide
ctttagaaagattcggcggtccgtttcaac

SEQ ID NO: 287627 - DNA, 30 bp, Artificial Sequence
  Synthetic oligonucleotide
tgacggtgataatacactgcggaaaagaac

SEQ ID NO: 287628 - DNA, 30 bp, Artificial Sequence
  Synthetic oligonucleotide
gagccgtagcttagttcaggttaaaagaac

SEQ ID NO: 287629 - DNA, 30 bp, Artificial Sequence
  Synthetic oligonucleotide
attaaattcaagggggattgaccaaagaac

SEQ ID NO: 287630 - DNA, 30 bp, Artificial Sequence
  Synthetic oligonucleotide
tgtcatcattagcgtcaaaacgcaaagaac

SEQ ID NO: 287631 - DNA, 30 bp, Artificial Sequence
  Synthetic oligonucleotide
agtaaattcagggtctaaaaggtcaagaac

SEQ ID NO: 287632 - DNA, 30 bp, Artificial Sequence
  Synthetic oligonucleotide
taagttccattgcttttttagaggaagaac

SEQ ID NO: 287633 - DNA, 30 bp, Artificial Sequence
  Synthetic oligonucleotide
tttcaacgtcctgaacccgcattgaagaac

SEQ ID NO: 287634 - DNA, 30 bp, Artificial Sequence
  Synthetic oligonucleotide
tgcggattgggcggagaatcatataagaac

SEQ ID NO: 287635 - DNA, 30 bp, Artificial Sequence
  Synthetic oligonucleotide
aggtcgctcgcagtatactgcagtaagaac

SEQ ID NO: 287636 - DNA, 30 bp, Artificial Sequence
  Synthetic oligonucleotide
gccggcggtaagtcagacgctattaagaac

SEQ ID NO: 287637 - DNA, 30 bp, Artificial Sequence
  Synthetic oligonucleotide
agagggcccctttacatcaacggacagaac

SEQ ID NO: 287638 - DNA, 30 bp, Artificial Sequence
  Synthetic oligonucleotide
agcatgtcactttaaaggggcatgcagaac

SEQ ID NO: 287639 - DNA, 30 bp, Artificial Sequence
  Synthetic oligonucleotide
gtacgagaaggccgctctggacccgagaac

SEQ ID NO: 287640 - DNA, 30 bp, Artificial Sequence
  Synthetic oligonucleotide
cgcattcgggttgcgacgcctcaggagaac

SEQ ID NO: 287641 - DNA, 30 bp, Artificial Sequence
  Synthetic oligonucleotide
ccaaaggatcatatgatggttacggagaac

SEQ ID NO: 287642 - DNA, 30 bp, Artificial Sequence
  Synthetic oligonucleotide
ggcatcctcgtgtcggtaaccgttgagaac

SEQ ID NO: 287643 - DNA, 30 bp, Artificial Sequence
  Synthetic oligonucleotide
gcaccaattttagatagccattaatagaac

SEQ ID NO: 287644 - DNA, 30 bp, Artificial Sequence
  Synthetic oligonucleotide
gcaacctacatggacaccgcaaactagaac

SEQ ID NO: 287645 - DNA, 30 bp, Artificial Sequence
  Synthetic oligonucleotide
cgcagaaaggtcctaacaaaagcctagaac

SEQ ID NO: 287646 - DNA, 30 bp, Artificial Sequence
  Synthetic oligonucleotide
cggtatgtggataggtgtgtgtgctagaac

SEQ ID NO: 287647 - DNA, 30 bp, Artificial Sequence
  Synthetic oligonucleotide
gatttccggactcctgcgaattgctagaac

SEQ ID NO: 287648 - DNA, 30 bp, Artificial Sequence
  Synthetic oligonucleotide
gtacaagctcccctacactgctcttagaac

SEQ ID NO: 287649 - DNA, 30 bp, Artificial Sequence
  Synthetic oligonucleotide
tcgcggctgattactcatattccgacgaac

SEQ ID NO: 287650 - DNA, 30 bp, Artificial Sequence
  Synthetic oligonucleotide
ggatctccggtggtgggctgcaatacgaac

SEQ ID NO: 287651 - DNA, 30 bp, Artificial Sequence
  Synthetic oligonucleotide
tgagcagcagattatgtcattgctacgaac

SEQ ID NO: 287652 - DNA, 30 bp, Artificial Sequence
  Synthetic oligonucleotide
ctgtaggaccgatatgctgggcgtacgaac

SEQ ID NO: 287653 - DNA, 30 bp, Artificial Sequence
  Synthetic oligonucleotide
gaatgaggcagaacgtgtaagacaccgaac

SEQ ID NO: 287654 - DNA, 30 bp, Artificial Sequence
  Synthetic oligonucleotide
gagagggtcctacggagaatgacaccgaac

SEQ ID NO: 287655 - DNA, 30 bp, Artificial Sequence
  Synthetic oligonucleotide
gtgaacaataagtaggcttccgtaccgaac

SEQ ID NO: 287656 - DNA, 30 bp, Artificial Sequence
  Synthetic oligonucleotide
agataagttgatttagcaagggccccgaac

SEQ ID NO: 287657 - DNA, 30 bp, Artificial Sequence
  Synthetic oligonucleotide
ggtccagaccggcgcgcctagtccccgaac

SEQ ID NO: 287658 - DNA, 30 bp, Artificial Sequence
  Synthetic oligonucleotide
aataatcgttggtctggaaattgcccgaac

SEQ ID NO: 287659 - DNA, 30 bp, Artificial Sequence
  Synthetic oligonucleotide
gggcatggggtggcccctttatctccgaac

SEQ ID NO: 287660 - DNA, 30 bp, Artificial Sequence
  Synthetic oligonucleotide
gagatccgacacgctgagttatgtccgaac

SEQ ID NO: 287661 - DNA, 31 bp, Artificial Sequence
  Synthetic oligonucleotide
cacttgtaacgagccgttgaccctcgcgaac

SEQ ID NO: 287662 - DNA, 30 bp, Artificial Sequence
  Synthetic oligonucleotide
gtagttgctccaggaacgagccctgcgaac

SEQ ID NO: 287663 - DNA, 30 bp, Artificial Sequence
  Synthetic oligonucleotide
actcacgaggccctgtctccgtctgcgaac

SEQ ID NO: 287664 - DNA, 30 bp, Artificial Sequence
  Synthetic oligonucleotide
agcgacattcagcaccgtagatcctcgaac

SEQ ID NO: 287665 - DNA, 30 bp, Artificial Sequence
  Synthetic oligonucleotide
gtcccataagaatacgcgtgggggtcgaac

SEQ ID NO: 287666 - DNA, 30 bp, Artificial Sequence
  Synthetic oligonucleotide
cgtctattccttcgtcgtctcatgtcgaac

SEQ ID NO: 287667 - DNA, 30 bp, Artificial Sequence
  Synthetic oligonucleotide
agatcaggaaggattcggtggctgtcgaac

SEQ ID NO: 287668 - DNA, 30 bp, Artificial Sequence
  Synthetic oligonucleotide
ttgataggataatctgccctttgttcgaac

SEQ ID NO: 287669 - DNA, 30 bp, Artificial Sequence
  Synthetic oligonucleotide
agttgagtctatcatgcgagcttttcgaac

SEQ ID NO: 287670 - DNA, 30 bp, Artificial Sequence
  Synthetic oligonucleotide
ggacctactataatcgggtactaaaggaac

SEQ ID NO: 287671 - DNA, 30 bp, Artificial Sequence
  Synthetic oligonucleotide
gctatcccatagtagtttattccaaggaac

SEQ ID NO: 287672 - DNA, 30 bp, Artificial Sequence
  Synthetic oligonucleotide
gacgtactgggttgcttaggaagaaggaac

SEQ ID NO: 287673 - DNA, 30 bp, Artificial Sequence
  Synthetic oligonucleotide
gcttttcggtggtgctgggcagggaggaac

SEQ ID NO: 287674 - DNA, 30 bp, Artificial Sequence
  Synthetic oligonucleotide
acgcttaactccgtccagagaatgaggaac

SEQ ID NO: 287675 - DNA, 30 bp, Artificial Sequence
  Synthetic oligonucleotide
tgtatgaccagggtagcctgaactaggaac

SEQ ID NO: 287676 - DNA, 30 bp, Artificial Sequence
  Synthetic oligonucleotide
tgaatcgtcaaaggaagcgtcggtaggaac

SEQ ID NO: 287677 - DNA, 30 bp, Artificial Sequence
  Synthetic oligonucleotide
caaccagcagccgctaacgacggccggaac

SEQ ID NO: 287678 - DNA, 30 bp, Artificial Sequence
  Synthetic oligonucleotide
agtagtcgtaggtgtaatcacctccggaac

SEQ ID NO: 287679 - DNA, 30 bp, Artificial Sequence
  Synthetic oligonucleotide
tagcggcggtcggcggtgattggtcggaac

SEQ ID NO: 287680 - DNA, 30 bp, Artificial Sequence
  Synthetic oligonucleotide
aagactcacaagacttacatgattcggaac

SEQ ID NO: 287681 - DNA, 30 bp, Artificial Sequence
  Synthetic oligonucleotide
tctaccgagccagcgcgcccatgcgggaac

SEQ ID NO: 287682 - DNA, 30 bp, Artificial Sequence
  Synthetic oligonucleotide
ggttaggtattccggcctgggcgatggaac

SEQ ID NO: 287683 - DNA, 30 bp, Artificial Sequence
  Synthetic oligonucleotide
tcaggtgagatgcccttcgataactggaac

SEQ ID NO: 287684 - DNA, 30 bp, Artificial Sequence
  Synthetic oligonucleotide
acagtacgttatactcattatgactggaac

SEQ ID NO: 287685 - DNA, 30 bp, Artificial Sequence
  Synthetic oligonucleotide
tagtatgccatcaacgtaggcgtctggaac

SEQ ID NO: 287686 - DNA, 30 bp, Artificial Sequence
  Synthetic oligonucleotide
gcccaagactgtactctccacaaaatgaac

SEQ ID NO: 287687 - DNA, 30 bp, Artificial Sequence
  Synthetic oligonucleotide
tattcaacatgcgttcatgttaaaatgaac

SEQ ID NO: 287688 - DNA, 30 bp, Artificial Sequence
  Synthetic oligonucleotide
taacagcagtagtaagattgcgtaatgaac

SEQ ID NO: 287689 - DNA, 30 bp, Artificial Sequence
  Synthetic oligonucleotide
actcaccgataagatatggcattcatgaac

SEQ ID NO: 287690 - DNA, 30 bp, Artificial Sequence
  Synthetic oligonucleotide
aaacctcccgtctaacgtcggaagatgaac

SEQ ID NO: 287691 - DNA, 30 bp, Artificial Sequence
  Synthetic oligonucleotide
tgctggtgcaacccagtcgaattgatgaac

SEQ ID NO: 287692 - DNA, 30 bp, Artificial Sequence
  Synthetic oligonucleotide
tcgccatgacgttttgatccgattatgaac

SEQ ID NO: 287693 - DNA, 30 bp, Artificial Sequence
  Synthetic oligonucleotide
aatccaacgatccgaaccatcttcctgaac

SEQ ID NO: 287694 - DNA, 30 bp, Artificial Sequence
  Synthetic oligonucleotide
tacgttgtaagaatttgggttgagctgaac

SEQ ID NO: 287695 - DNA, 30 bp, Artificial Sequence
  Synthetic oligonucleotide
tggacgaaaggctcaatatttgatctgaac

SEQ ID NO: 287696 - DNA, 29 bp, Artificial Sequence
  Synthetic oligonucleotide
tgagcactgggcctacagtcaaagtgaac

SEQ ID NO: 287697 - DNA, 30 bp, Artificial Sequence
  Synthetic oligonucleotide
gagccaactaatttggacccgtacgtgaac

SEQ ID NO: 287698 - DNA, 30 bp, Artificial Sequence
  Synthetic oligonucleotide
gaaggaaggttacttggggtgtacgtgaac

SEQ ID NO: 287699 - DNA, 30 bp, Artificial Sequence
  Synthetic oligonucleotide
gtggcagaattgcgatgctaactcgtgaac

SEQ ID NO: 287700 - DNA, 30 bp, Artificial Sequence
  Synthetic oligonucleotide
ctgttaagaggtcaggaaatgcaggtgaac

SEQ ID NO: 287701 - DNA, 30 bp, Artificial Sequence
  Synthetic oligonucleotide
agcaaaagggtgatggatatccgggtgaac

SEQ ID NO: 287702 - DNA, 30 bp, Artificial Sequence
  Synthetic oligonucleotide
gggaaacaaatacagagaagacatgtgaac

SEQ ID NO: 287703 - DNA, 30 bp, Artificial Sequence
  Synthetic oligonucleotide
tggcacctacagaactgacagcatgtgaac

SEQ ID NO: 287704 - DNA, 30 bp, Artificial Sequence
  Synthetic oligonucleotide
gcacccaataccgacgattcggatgtgaac

SEQ ID NO: 287705 - DNA, 30 bp, Artificial Sequence
  Synthetic oligonucleotide
agttggctacctgtgaatgtgagcttgaac

SEQ ID NO: 287706 - DNA, 30 bp, Artificial Sequence
  Synthetic oligonucleotide
actatctgtaccttttagtctgagttgaac

SEQ ID NO: 287707 - DNA, 30 bp, Artificial Sequence
  Synthetic oligonucleotide
ggtgttgccagtaagaattagacgttgaac

SEQ ID NO: 287708 - DNA, 30 bp, Artificial Sequence
  Synthetic oligonucleotide
agttaacgagcatgaaaatgatatttgaac

SEQ ID NO: 287709 - DNA, 30 bp, Artificial Sequence
  Synthetic oligonucleotide
caacttcgaacgtatttctttgttttgaac

SEQ ID NO: 287710 - DNA, 30 bp, Artificial Sequence
  Synthetic oligonucleotide
gggcctcaaccccctttcttcggcaataac

SEQ ID NO: 287711 - DNA, 30 bp, Artificial Sequence
  Synthetic oligonucleotide
agagcttcgtggattagtcgaggtaataac

SEQ ID NO: 287712 - DNA, 30 bp, Artificial Sequence
  Synthetic oligonucleotide
agggctagaaattaggttgcgcaacataac

SEQ ID NO: 287713 - DNA, 30 bp, Artificial Sequence
  Synthetic oligonucleotide
ggcatactccgtctaaaccagtcacataac

SEQ ID NO: 287714 - DNA, 30 bp, Artificial Sequence
  Synthetic oligonucleotide
cgacaacgcgcgcaaagcgtttgacataac

SEQ ID NO: 287715 - DNA, 30 bp, Artificial Sequence
  Synthetic oligonucleotide
taccaatagggcctctcgggatatcataac

SEQ ID NO: 287716 - DNA, 30 bp, Artificial Sequence
  Synthetic oligonucleotide
cacaggcaaaggtgagtcgcagctcataac

SEQ ID NO: 287717 - DNA, 30 bp, Artificial Sequence
  Synthetic oligonucleotide
actgacaccggcataggcaaacgagataac

SEQ ID NO: 287718 - DNA, 30 bp, Artificial Sequence
  Synthetic oligonucleotide
atcatgcgctggtgggcgacttctgataac

SEQ ID NO: 287719 - DNA, 30 bp, Artificial Sequence
  Synthetic oligonucleotide
aggattttgacagcccatgcacgtgataac

SEQ ID NO: 287720 - DNA, 30 bp, Artificial Sequence
  Synthetic oligonucleotide
ccgtagaaggctatgataatgggtgataac

SEQ ID NO: 287721 - DNA, 30 bp, Artificial Sequence
  Synthetic oligonucleotide
tgccattcccgatcataccagtcatataac

SEQ ID NO: 287722 - DNA, 30 bp, Artificial Sequence
  Synthetic oligonucleotide
tgcaacactaaggtctgataaggatataac

SEQ ID NO: 287723 - DNA, 30 bp, Artificial Sequence
  Synthetic oligonucleotide
gcatatgtcaccatgtgggcttgctataac

SEQ ID NO: 287724 - DNA, 30 bp, Artificial Sequence
  Synthetic oligonucleotide
ttagagcaccgtctgccaatttgctataac

SEQ ID NO: 287725 - DNA, 30 bp, Artificial Sequence
  Synthetic oligonucleotide
agtgatccaaacacagatgcgacttataac

SEQ ID NO: 287726 - DNA, 30 bp, Artificial Sequence
  Synthetic oligonucleotide
taagtactgcgggatgcgtcacaaactaac

SEQ ID NO: 287727 - DNA, 30 bp, Artificial Sequence
  Synthetic oligonucleotide
ggttgatttggctgaatattacatactaac

SEQ ID NO: 287728 - DNA, 30 bp, Artificial Sequence
  Synthetic oligonucleotide
atttaatatcgagggccacaggatactaac

SEQ ID NO: 287729 - DNA, 30 bp, Artificial Sequence
  Synthetic oligonucleotide
tgatagttgcagccatccgagagtactaac

SEQ ID NO: 287730 - DNA, 30 bp, Artificial Sequence
  Synthetic oligonucleotide
agaaggtcgctcatattgttagcacctaac

SEQ ID NO: 287731 - DNA, 30 bp, Artificial Sequence
  Synthetic oligonucleotide
ttaagtactacgaccacagttatacctaac

SEQ ID NO: 287732 - DNA, 30 bp, Artificial Sequence
  Synthetic oligonucleotide
atcgtggtaaagtaacacccgaagcctaac

SEQ ID NO: 287733 - DNA, 30 bp, Artificial Sequence
  Synthetic oligonucleotide
gaaaagaaatataactagtctgaagctaac

SEQ ID NO: 287734 - DNA, 30 bp, Artificial Sequence
  Synthetic oligonucleotide
tagattctcttatgaaaccactaagctaac

SEQ ID NO: 287735 - DNA, 30 bp, Artificial Sequence
  Synthetic oligonucleotide
tagctacgcgggtgctccctctaagctaac

SEQ ID NO: 287736 - DNA, 30 bp, Artificial Sequence
  Synthetic oligonucleotide
gttatcatgagcacgggggtttacgctaac

SEQ ID NO: 287737 - DNA, 30 bp, Artificial Sequence
  Synthetic oligonucleotide
ggactatcggatagcagttctcatgctaac

SEQ ID NO: 287738 - DNA, 30 bp, Artificial Sequence
  Synthetic oligonucleotide
cggcatgggcaccgatttatcgctgctaac

SEQ ID NO: 287739 - DNA, 30 bp, Artificial Sequence
  Synthetic oligonucleotide
aactggatcggtcagataggaacctctaac

SEQ ID NO: 287740 - DNA, 30 bp, Artificial Sequence
  Synthetic oligonucleotide
cgtactgccaagtccatagctcagtctaac

SEQ ID NO: 287741 - DNA, 30 bp, Artificial Sequence
  Synthetic oligonucleotide
cggctatttgaggcacaatgcgagtctaac

SEQ ID NO: 287742 - DNA, 30 bp, Artificial Sequence
  Synthetic oligonucleotide
gtctacgtaaagaacaggcattcgtctaac

SEQ ID NO: 287743 - DNA, 30 bp, Artificial Sequence
  Synthetic oligonucleotide
agattcgtcggtgccgcctcaacttctaac

SEQ ID NO: 287744 - DNA, 30 bp, Artificial Sequence
  Synthetic oligonucleotide
taccgagcatgttccaggggtctaagtaac

SEQ ID NO: 287745 - DNA, 30 bp, Artificial Sequence
  Synthetic oligonucleotide
tgagtggtcatgtccagggggcccagtaac

SEQ ID NO: 287746 - DNA, 30 bp, Artificial Sequence
  Synthetic oligonucleotide
gacgctcaaccaaaactacgcatcagtaac

SEQ ID NO: 287747 - DNA, 30 bp, Artificial Sequence
  Synthetic oligonucleotide
tatggatccatgtcccttgccttgagtaac

SEQ ID NO: 287748 - DNA, 30 bp, Artificial Sequence
  Synthetic oligonucleotide
catgctttgatactagacatatatagtaac

SEQ ID NO: 287749 - DNA, 30 bp, Artificial Sequence
  Synthetic oligonucleotide
ctcgacgggcaataacacagaactagtaac

SEQ ID NO: 287750 - DNA, 30 bp, Artificial Sequence
  Synthetic oligonucleotide
tgtgcgaaatccgaacttggcttgcgtaac

SEQ ID NO: 287751 - DNA, 30 bp, Artificial Sequence
  Synthetic oligonucleotide
gaattgcgaaagaaagtggggtatcgtaac

SEQ ID NO: 287752 - DNA, 30 bp, Artificial Sequence
  Synthetic oligonucleotide
aaagtggaagaaggatgttaaaaaggtaac

SEQ ID NO: 287753 - DNA, 30 bp, Artificial Sequence
  Synthetic oligonucleotide
caatattctgccccctgactgcaaggtaac

SEQ ID NO: 287754 - DNA, 30 bp, Artificial Sequence
  Synthetic oligonucleotide
gtgtcccggtttcactacgttgaaggtaac

SEQ ID NO: 287755 - DNA, 30 bp, Artificial Sequence
  Synthetic oligonucleotide
ttcgctatatggatgtactacaacggtaac

SEQ ID NO: 287756 - DNA, 30 bp, Artificial Sequence
  Synthetic oligonucleotide
gctggtagatggaccagataacccggtaac

SEQ ID NO: 287757 - DNA, 30 bp, Artificial Sequence
  Synthetic oligonucleotide
ttatagtaattctgagggagacccggtaac

SEQ ID NO: 287758 - DNA, 30 bp, Artificial Sequence
  Synthetic oligonucleotide
tacttgatgaccatgtgctcgcgcggtaac

SEQ ID NO: 287759 - DNA, 30 bp, Artificial Sequence
  Synthetic oligonucleotide
acatgcgtatcctgcgcgagagtcggtaac

SEQ ID NO: 287760 - DNA, 30 bp, Artificial Sequence
  Synthetic oligonucleotide
tgtcgggttcaaagcaaccgcgggggtaac

SEQ ID NO: 287761 - DNA, 30 bp, Artificial Sequence
  Synthetic oligonucleotide
taatctcatctcataggcttgttgggtaac

SEQ ID NO: 287762 - DNA, 30 bp, Artificial Sequence
  Synthetic oligonucleotide
tctttggcagtgcgttaccgctatggtaac

SEQ ID NO: 287763 - DNA, 30 bp, Artificial Sequence
  Synthetic oligonucleotide
gctggtcaggagttctgaggtattggtaac

SEQ ID NO: 287764 - DNA, 30 bp, Artificial Sequence
  Synthetic oligonucleotide
ggaatgtccgtgagggttataacatgtaac

SEQ ID NO: 287765 - DNA, 30 bp, Artificial Sequence
  Synthetic oligonucleotide
ggaacaggctgaaaggcggggtgatgtaac

SEQ ID NO: 287766 - DNA, 30 bp, Artificial Sequence
  Synthetic oligonucleotide
attgcggtgctgctttcaactttctgtaac

SEQ ID NO: 287767 - DNA, 30 bp, Artificial Sequence
  Synthetic oligonucleotide
aggcagcgccgtagtcccttgtcgtgtaac

SEQ ID NO: 287768 - DNA, 30 bp, Artificial Sequence
  Synthetic oligonucleotide
gggtacgttacccccggggcactttgtaac

SEQ ID NO: 287769 - DNA, 30 bp, Artificial Sequence
  Synthetic oligonucleotide
gatgtgataggaatatccggatccattaac

SEQ ID NO: 287770 - DNA, 30 bp, Artificial Sequence
  Synthetic oligonucleotide
aggatttgactaatttctaactccattaac

SEQ ID NO: 287771 - DNA, 30 bp, Artificial Sequence
  Synthetic oligonucleotide
accaaagagttctttgtgacgctgattaac

SEQ ID NO: 287772 - DNA, 30 bp, Artificial Sequence
  Synthetic oligonucleotide
aataaagcagagatccactctctgattaac

SEQ ID NO: 287773 - DNA, 31 bp, Artificial Sequence
  Synthetic oligonucleotide
gaaatagctcatctgacatatggatattaac

SEQ ID NO: 287774 - DNA, 30 bp, Artificial Sequence
  Synthetic oligonucleotide
gagtacctatcagataaaggttaccttaac

SEQ ID NO: 287775 - DNA, 30 bp, Artificial Sequence
  Synthetic oligonucleotide
acaggaagatttacaataggagatcttaac

SEQ ID NO: 287776 - DNA, 30 bp, Artificial Sequence
  Synthetic oligonucleotide
cagtagactcgggccacgtgggatcttaac

SEQ ID NO: 287777 - DNA, 30 bp, Artificial Sequence
  Synthetic oligonucleotide
gcataagtaatgcggcgaagtcctcttaac

SEQ ID NO: 287778 - DNA, 30 bp, Artificial Sequence
  Synthetic oligonucleotide
atgcagttaaagcttaaacctaaagttaac

SEQ ID NO: 287779 - DNA, 30 bp, Artificial Sequence
  Synthetic oligonucleotide
taacccggaggacttgccaaagtagttaac

SEQ ID NO: 287780 - DNA, 30 bp, Artificial Sequence
  Synthetic oligonucleotide
acgtcctcgggatcagcggtaaccgttaac

SEQ ID NO: 287781 - DNA, 30 bp, Artificial Sequence
  Synthetic oligonucleotide
tcgctaggaagcatgcttctgtgcgttaac

SEQ ID NO: 287782 - DNA, 30 bp, Artificial Sequence
  Synthetic oligonucleotide
aagccgtgagcattcttgtttgtcgttaac

SEQ ID NO: 287783 - DNA, 30 bp, Artificial Sequence
  Synthetic oligonucleotide
tcatcggctatttaggtagcttaggttaac

SEQ ID NO: 287784 - DNA, 30 bp, Artificial Sequence
  Synthetic oligonucleotide
catgtccctccgaacgtgcatcgtgttaac

SEQ ID NO: 287785 - DNA, 30 bp, Artificial Sequence
  Synthetic oligonucleotide
ggtagaaggataagggtgctatgtgttaac

SEQ ID NO: 287786 - DNA, 30 bp, Artificial Sequence
  Synthetic oligonucleotide
ccactacaccttgcatgatacacatttaac

SEQ ID NO: 287787 - DNA, 30 bp, Artificial Sequence
  Synthetic oligonucleotide
catcgggaggtctcacttgttaagtttaac

SEQ ID NO: 287788 - DNA, 30 bp, Artificial Sequence
  Synthetic oligonucleotide
gcacgaatcttttctttttacggttttaac

SEQ ID NO: 287789 - DNA, 27 bp, Artificial Sequence
  Synthetic oligonucleotide
gccaattagtggagcgattcaaaacac

SEQ ID NO: 287790 - DNA, 30 bp, Artificial Sequence
  Synthetic oligonucleotide
cagatcttactacaattaactataaaacac

SEQ ID NO: 287791 - DNA, 30 bp, Artificial Sequence
  Synthetic oligonucleotide
gcatgcgtaggtgataaggagagcaaacac

SEQ ID NO: 287792 - DNA, 30 bp, Artificial Sequence
  Synthetic oligonucleotide
gcgattcagtgtaaggtaagactgaaacac

SEQ ID NO: 287793 - DNA, 30 bp, Artificial Sequence
  Synthetic oligonucleotide
actctaacagcaggtgacggcgataaacac

SEQ ID NO: 287794 - DNA, 30 bp, Artificial Sequence
  Synthetic oligonucleotide
acctccttttatcacctaagtaaccaacac

SEQ ID NO: 287795 - DNA, 31 bp, Artificial Sequence
  Synthetic oligonucleotide
cttcgtgtggtaattataggggccccaacac

SEQ ID NO: 287796 - DNA, 30 bp, Artificial Sequence
  Synthetic oligonucleotide
gagaggctgatccgaattgccagtcaacac

SEQ ID NO: 287797 - DNA, 30 bp, Artificial Sequence
  Synthetic oligonucleotide
ctctgggctggacggcgaaaagtcgaacac

SEQ ID NO: 287798 - DNA, 30 bp, Artificial Sequence
  Synthetic oligonucleotide
ctctcggcaaattatgtccgggtcgaacac

SEQ ID NO: 287799 - DNA, 30 bp, Artificial Sequence
  Synthetic oligonucleotide
tcacccatcaatttagatagtcaggaacac

SEQ ID NO: 287800 - DNA, 30 bp, Artificial Sequence
  Synthetic oligonucleotide
aatagtgaactatatgtcgatgaggaacac

SEQ ID NO: 287801 - DNA, 30 bp, Artificial Sequence
  Synthetic oligonucleotide
cagtcctacgctgcgacctagtaggaacac

SEQ ID NO: 287802 - DNA, 30 bp, Artificial Sequence
  Synthetic oligonucleotide
taaatggggcgacttttgtgcggtgaacac

SEQ ID NO: 287803 - DNA, 30 bp, Artificial Sequence
  Synthetic oligonucleotide
ggagtattcccgataagccacgaataacac

SEQ ID NO: 287804 - DNA, 30 bp, Artificial Sequence
  Synthetic oligonucleotide
cagtactggatatatgccaaaaactaacac

SEQ ID NO: 287805 - DNA, 30 bp, Artificial Sequence
  Synthetic oligonucleotide
tagaattatctagcgtctccggcgtaacac

SEQ ID NO: 287806 - DNA, 30 bp, Artificial Sequence
  Synthetic oligonucleotide
gcgcgcaattgttttaatggtaggtaacac

SEQ ID NO: 287807 - DNA, 30 bp, Artificial Sequence
  Synthetic oligonucleotide
gggctgcggggatcgcttataatgtaacac

SEQ ID NO: 287808 - DNA, 30 bp, Artificial Sequence
  Synthetic oligonucleotide
accaaacaatcattgtttaaattgtaacac

SEQ ID NO: 287809 - DNA, 31 bp, Artificial Sequence
  Synthetic oligonucleotide
atagatcgttcgacgtacaagcaattaacac

SEQ ID NO: 287810 - DNA, 30 bp, Artificial Sequence
  Synthetic oligonucleotide
acacgtcgggtctgcagtgcacaaacacac

SEQ ID NO: 287811 - DNA, 30 bp, Artificial Sequence
  Synthetic oligonucleotide
tgaggttttgtgcgagcatgtaggacacac

SEQ ID NO: 287812 - DNA, 30 bp, Artificial Sequence
  Synthetic oligonucleotide
ttgacatatccgcgggtctagttgacacac

SEQ ID NO: 287813 - DNA, 30 bp, Artificial Sequence
  Synthetic oligonucleotide
aagtcagggtaaaagggcccgcgtacacac

SEQ ID NO: 287814 - DNA, 30 bp, Artificial Sequence
  Synthetic oligonucleotide
cccttgccttttttggtaacaggtacacac

SEQ ID NO: 287815 - DNA, 30 bp, Artificial Sequence
  Synthetic oligonucleotide
gcgctcaatctgtactattagcaaccacac

SEQ ID NO: 287816 - DNA, 30 bp, Artificial Sequence
  Synthetic oligonucleotide
ccgccaggtggttcaggcggtttaccacac

SEQ ID NO: 287817 - DNA, 30 bp, Artificial Sequence
  Synthetic oligonucleotide
tagacggttcggttcacatcaaacccacac

SEQ ID NO: 287818 - DNA, 30 bp, Artificial Sequence
  Synthetic oligonucleotide
cgtgccgggtgatgtgggatcattccacac

SEQ ID NO: 287819 - DNA, 30 bp, Artificial Sequence
  Synthetic oligonucleotide
actgagcccggaggtccttagtttccacac

SEQ ID NO: 287820 - DNA, 30 bp, Artificial Sequence
  Synthetic oligonucleotide
gagctccgccaagtcacgggttttccacac

SEQ ID NO: 287821 - DNA, 30 bp, Artificial Sequence
  Synthetic oligonucleotide
caattccaggtttccaccgtcagagcacac

SEQ ID NO: 287822 - DNA, 30 bp, Artificial Sequence
  Synthetic oligonucleotide
aacgcttgggtctctggcgatagcgcacac

SEQ ID NO: 287823 - DNA, 30 bp, Artificial Sequence
  Synthetic oligonucleotide
cggggcctcccgtgttcatcaaaggcacac

SEQ ID NO: 287824 - DNA, 30 bp, Artificial Sequence
  Synthetic oligonucleotide
ccgtggatataggcaccggttaaggcacac

SEQ ID NO: 287825 - DNA, 30 bp, Artificial Sequence
  Synthetic oligonucleotide
ggtaccagaaatgtttaattagtggcacac

SEQ ID NO: 287826 - DNA, 30 bp, Artificial Sequence
  Synthetic oligonucleotide
ttgagtataggctagtcgtcgatatcacac

SEQ ID NO: 287827 - DNA, 30 bp, Artificial Sequence
  Synthetic oligonucleotide
gtgagtactatatcttttacggtatcacac

SEQ ID NO: 287828 - DNA, 31 bp, Artificial Sequence
  Synthetic oligonucleotide
tggttgtgtgtaaacagctcaccaaagacac

SEQ ID NO: 287829 - DNA, 30 bp, Artificial Sequence
  Synthetic oligonucleotide
ccaaatgagtcggcataattgtcaagacac

SEQ ID NO: 287830 - DNA, 30 bp, Artificial Sequence
  Synthetic oligonucleotide
tattgttgaccatgttattgagacagacac

SEQ ID NO: 287831 - DNA, 30 bp, Artificial Sequence
  Synthetic oligonucleotide
tcttacggtgacgtacagggtatcagacac

SEQ ID NO: 287832 - DNA, 30 bp, Artificial Sequence
  Synthetic oligonucleotide
caggcgtgtcccatgtacaacactagacac

SEQ ID NO: 287833 - DNA, 30 bp, Artificial Sequence
  Synthetic oligonucleotide
gcctaaaattcttttgtcctgtctagacac

SEQ ID NO: 287834 - DNA, 30 bp, Artificial Sequence
  Synthetic oligonucleotide
ggagagacccctccagaattgagtagacac

SEQ ID NO: 287835 - DNA, 30 bp, Artificial Sequence
  Synthetic oligonucleotide
agccctcatgagtgagattccggtagacac

SEQ ID NO: 287836 - DNA, 30 bp, Artificial Sequence
  Synthetic oligonucleotide
ttggtggacagtggtaccagagaacgacac

SEQ ID NO: 287837 - DNA, 30 bp, Artificial Sequence
  Synthetic oligonucleotide
agatgagcattaaagggttttgcacgacac

SEQ ID NO: 287838 - DNA, 30 bp, Artificial Sequence
  Synthetic oligonucleotide
gggggaaacgcgtagtgcgtgggacgacac

SEQ ID NO: 287839 - DNA, 30 bp, Artificial Sequence
  Synthetic oligonucleotide
tgttctcgatcgcgaataaaactacgacac

SEQ ID NO: 287840 - DNA, 30 bp, Artificial Sequence
  Synthetic oligonucleotide
gcagatgatacggcttgtttggtacgacac

SEQ ID NO: 287841 - DNA, 30 bp, Artificial Sequence
  Synthetic oligonucleotide
ctatcaatccggtgtccaagaggccgacac

SEQ ID NO: 287842 - DNA, 30 bp, Artificial Sequence
  Synthetic oligonucleotide
gccgcgaggaacaaccgtcacggccgacac

SEQ ID NO: 287843 - DNA, 30 bp, Artificial Sequence
  Synthetic oligonucleotide
agaggtacgcaggaatttactatccgacac

SEQ ID NO: 287844 - DNA, 30 bp, Artificial Sequence
  Synthetic oligonucleotide
atcatcaagagtggcttttaactccgacac

SEQ ID NO: 287845 - DNA, 30 bp, Artificial Sequence
  Synthetic oligonucleotide
cgaattctgtcaatattgcacgcgcgacac

SEQ ID NO: 287846 - DNA, 30 bp, Artificial Sequence
  Synthetic oligonucleotide
attatgggtcatctactagggagaggacac

SEQ ID NO: 287847 - DNA, 30 bp, Artificial Sequence
  Synthetic oligonucleotide
accgcctggtaggccgacattgtcggacac

SEQ ID NO: 287848 - DNA, 30 bp, Artificial Sequence
  Synthetic oligonucleotide
tcagctccatcgcagatcgctcggggacac

SEQ ID NO: 287849 - DNA, 30 bp, Artificial Sequence
  Synthetic oligonucleotide
agttggaggtaagtaatagtaactggacac

SEQ ID NO: 287850 - DNA, 30 bp, Artificial Sequence
  Synthetic oligonucleotide
aggtaaataatctggacctcaaactgacac

SEQ ID NO: 287851 - DNA, 30 bp, Artificial Sequence
  Synthetic oligonucleotide
taaagggacatagtgggttttccgtgacac

SEQ ID NO: 287852 - DNA, 30 bp, Artificial Sequence
  Synthetic oligonucleotide
acacgggtatggggagcaggatcttgacac

SEQ ID NO: 287853 - DNA, 30 bp, Artificial Sequence
  Synthetic oligonucleotide
agcttgggacgctaaatcataagaatacac

SEQ ID NO: 287854 - DNA, 30 bp, Artificial Sequence
  Synthetic oligonucleotide
gtaaacggcctgtcgtgtgagttaatacac

SEQ ID NO: 287855 - DNA, 30 bp, Artificial Sequence
  Synthetic oligonucleotide
tcagcggtatgtataaaaatagtcatacac

SEQ ID NO: 287856 - DNA, 30 bp, Artificial Sequence
  Synthetic oligonucleotide
ggttagtaccgttagactgacgggatacac

SEQ ID NO: 287857 - DNA, 30 bp, Artificial Sequence
  Synthetic oligonucleotide
ccaaaaatccgcgagcaccataatatacac

SEQ ID NO: 287858 - DNA, 30 bp, Artificial Sequence
  Synthetic oligonucleotide
aaaggtgttgtttggaaaaactatatacac

SEQ ID NO: 287859 - DNA, 30 bp, Artificial Sequence
  Synthetic oligonucleotide
gtttcttcaacttgttaccaggacctacac

SEQ ID NO: 287860 - DNA, 30 bp, Artificial Sequence
  Synthetic oligonucleotide
tgtgataccacgtacaggatactcctacac

SEQ ID NO: 287861 - DNA, 30 bp, Artificial Sequence
  Synthetic oligonucleotide
gctgatccttgtaaactacacacgctacac

SEQ ID NO: 287862 - DNA, 30 bp, Artificial Sequence
  Synthetic oligonucleotide
atacttcgcggagcgattggaccgctacac

SEQ ID NO: 287863 - DNA, 30 bp, Artificial Sequence
  Synthetic oligonucleotide
tgggccgtctgattcgtcactgtgctacac

SEQ ID NO: 287864 - DNA, 30 bp, Artificial Sequence
  Synthetic oligonucleotide
ggaaccgacttcaattcctgggtagtacac

SEQ ID NO: 287865 - DNA, 30 bp, Artificial Sequence
  Synthetic oligonucleotide
gctggaaacgctttatcagcacctgtacac

SEQ ID NO: 287866 - DNA, 30 bp, Artificial Sequence
  Synthetic oligonucleotide
ccctgacatgaatgctcgccggttgtacac

SEQ ID NO: 287867 - DNA, 30 bp, Artificial Sequence
  Synthetic oligonucleotide
gtgggaggtaatgtcgacatcgaattacac

SEQ ID NO: 287868 - DNA, 30 bp, Artificial Sequence
  Synthetic oligonucleotide
cccacatccacacaggtaaggcgattacac

SEQ ID NO: 287869 - DNA, 30 bp, Artificial Sequence
  Synthetic oligonucleotide
acatttatgctgtttttttcaggattacac

SEQ ID NO: 287870 - DNA, 30 bp, Artificial Sequence
  Synthetic oligonucleotide
accaactagctagatattttcgtattacac

SEQ ID NO: 287871 - DNA, 30 bp, Artificial Sequence
  Synthetic oligonucleotide
ggtgaatctcgcccaacgggacagttacac

SEQ ID NO: 287872 - DNA, 30 bp, Artificial Sequence
  Synthetic oligonucleotide
aatcagagggagcttattcggcatttacac

SEQ ID NO: 287873 - DNA, 30 bp, Artificial Sequence
  Synthetic oligonucleotide
tggaggcccttgacacgatgaactttacac

SEQ ID NO: 287874 - DNA, 30 bp, Artificial Sequence
  Synthetic oligonucleotide
cataaggtttcacgaagcgcaagtttacac

SEQ ID NO: 287875 - DNA, 30 bp, Artificial Sequence
  Synthetic oligonucleotide
gcgggggtcgatgttaggtgtatcaaccac

SEQ ID NO: 287876 - DNA, 30 bp, Artificial Sequence
  Synthetic oligonucleotide
agacataggggttgtagaagagtcaaccac

SEQ ID NO: 287877 - DNA, 30 bp, Artificial Sequence
  Synthetic oligonucleotide
agcttcaccctaaacccggaagggaaccac

SEQ ID NO: 287878 - DNA, 30 bp, Artificial Sequence
  Synthetic oligonucleotide
tggtaatagactaaatgtttgaataaccac

SEQ ID NO: 287879 - DNA, 30 bp, Artificial Sequence
  Synthetic oligonucleotide
aaagggtcatccggtgtcaatgaccaccac

SEQ ID NO: 287880 - DNA, 30 bp, Artificial Sequence
  Synthetic oligonucleotide
tggaggcagaacttgcgagagagtgaccac

SEQ ID NO: 287881 - DNA, 31 bp, Artificial Sequence
  Synthetic oligonucleotide
tgtatgttgaggacaggggatggaataccac

SEQ ID NO: 287882 - DNA, 30 bp, Artificial Sequence
  Synthetic oligonucleotide
gtttagaccggctaacgaaacttctaccac

SEQ ID NO: 287883 - DNA, 30 bp, Artificial Sequence
  Synthetic oligonucleotide
gtcagtaacttaaaaatccaaatgtaccac

SEQ ID NO: 287884 - DNA, 30 bp, Artificial Sequence
  Synthetic oligonucleotide
tgtcttttcaacaggcacctagattaccac

SEQ ID NO: 287885 - DNA, 30 bp, Artificial Sequence
  Synthetic oligonucleotide
gcaaaagaatacgttgttaaatattaccac

SEQ ID NO: 287886 - DNA, 30 bp, Artificial Sequence
  Synthetic oligonucleotide
gcgtatggatctgttaacggaccttaccac

SEQ ID NO: 287887 - DNA, 30 bp, Artificial Sequence
  Synthetic oligonucleotide
atgtggtagactacgacgggaaagacccac

SEQ ID NO: 287888 - DNA, 30 bp, Artificial Sequence
  Synthetic oligonucleotide
tagggatctgtcgccgttgctcgtacccac

SEQ ID NO: 287889 - DNA, 30 bp, Artificial Sequence
  Synthetic oligonucleotide
ctcaactacggccccgttcccccaccccac

SEQ ID NO: 287890 - DNA, 30 bp, Artificial Sequence
  Synthetic oligonucleotide
ccgaatacacatgtagatgtaacgccccac

SEQ ID NO: 287891 - DNA, 30 bp, Artificial Sequence
  Synthetic oligonucleotide
ggtccttacaacgtagtcagctggccccac

SEQ ID NO: 287892 - DNA, 30 bp, Artificial Sequence
  Synthetic oligonucleotide
aattaaatagccggaagaaaaagcgcccac

SEQ ID NO: 287893 - DNA, 30 bp, Artificial Sequence
  Synthetic oligonucleotide
ttctaggcaaagggctatgcacaggcccac

SEQ ID NO: 287894 - DNA, 30 bp, Artificial Sequence
  Synthetic oligonucleotide
aggtgtacattaagtccttgcggggcccac

SEQ ID NO: 287895 - DNA, 30 bp, Artificial Sequence
  Synthetic oligonucleotide
agttgtatgagtgttgtgataattgcccac

SEQ ID NO: 287896 - DNA, 30 bp, Artificial Sequence
  Synthetic oligonucleotide
atggctagaagcagtcacataacatcccac

SEQ ID NO: 287897 - DNA, 30 bp, Artificial Sequence
  Synthetic oligonucleotide
ttccagactggtttagtaatgacatcccac

SEQ ID NO: 287898 - DNA, 30 bp, Artificial Sequence
  Synthetic oligonucleotide
aggatgatggacctctaatcaatatcccac

SEQ ID NO: 287899 - DNA, 30 bp, Artificial Sequence
  Synthetic oligonucleotide
cggatgggttgcggatgactgccttcccac

SEQ ID NO: 287900 - DNA, 30 bp, Artificial Sequence
  Synthetic oligonucleotide
cactcgcgccaggttgtcggaataagccac

SEQ ID NO: 287901 - DNA, 30 bp, Artificial Sequence
  Synthetic oligonucleotide
gaggggtggcgtgttaggggcatgagccac

SEQ ID NO: 287902 - DNA, 30 bp, Artificial Sequence
  Synthetic oligonucleotide
accagattatacgctcggctagatagccac

SEQ ID NO: 287903 - DNA, 30 bp, Artificial Sequence
  Synthetic oligonucleotide
atagtacgtgtcgaccactcgtcccgccac

SEQ ID NO: 287904 - DNA, 30 bp, Artificial Sequence
  Synthetic oligonucleotide
atcctttttataagaatacgttggcgccac

SEQ ID NO: 287905 - DNA, 30 bp, Artificial Sequence
  Synthetic oligonucleotide
atgtcagcaggcatggccaaaagtcgccac

SEQ ID NO: 287906 - DNA, 30 bp, Artificial Sequence
  Synthetic oligonucleotide
ggcggggaagatcccgttagctcaggccac

SEQ ID NO: 287907 - DNA, 30 bp, Artificial Sequence
  Synthetic oligonucleotide
gacttaaaatgcgtcgatcagcgaggccac

SEQ ID NO: 287908 - DNA, 30 bp, Artificial Sequence
  Synthetic oligonucleotide
gacggggccgactactgaaccgagggccac

SEQ ID NO: 287909 - DNA, 30 bp, Artificial Sequence
  Synthetic oligonucleotide
agaagctaccttgagacgacaaggggccac

SEQ ID NO: 287910 - DNA, 30 bp, Artificial Sequence
  Synthetic oligonucleotide
acccttgatcgtcaagactaacatggccac

SEQ ID NO: 287911 - DNA, 30 bp, Artificial Sequence
  Synthetic oligonucleotide
gtgccgagggtaaatatttgtcttggccac

SEQ ID NO: 287912 - DNA, 30 bp, Artificial Sequence
  Synthetic oligonucleotide
aaaacaaaaagaatgatcctacgatgccac

SEQ ID NO: 287913 - DNA, 30 bp, Artificial Sequence
  Synthetic oligonucleotide
aggtagttcggtcctgatgccttatgccac

SEQ ID NO: 287914 - DNA, 30 bp, Artificial Sequence
  Synthetic oligonucleotide
tatagtggatcatgagaaatcatctgccac

SEQ ID NO: 287915 - DNA, 30 bp, Artificial Sequence
  Synthetic oligonucleotide
taacatgtaactagcgccttcaattgccac

SEQ ID NO: 287916 - DNA, 31 bp, Artificial Sequence
  Synthetic oligonucleotide
acgtgtcaaacgagcggatggtttttgccac

SEQ ID NO: 287917 - DNA, 30 bp, Artificial Sequence
  Synthetic oligonucleotide
caaccgtggacaaatgacaccgacatccac

SEQ ID NO: 287918 - DNA, 30 bp, Artificial Sequence
  Synthetic oligonucleotide
tgccgcgaagagcggatggggggtatccac

SEQ ID NO: 287919 - DNA, 30 bp, Artificial Sequence
  Synthetic oligonucleotide
tcatataacctagcctaggggtttatccac

SEQ ID NO: 287920 - DNA, 30 bp, Artificial Sequence
  Synthetic oligonucleotide
ggaagcttagacctgtgccagacactccac

SEQ ID NO: 287921 - DNA, 29 bp, Artificial Sequence
  Synthetic oligonucleotide
attgtggcaacggaaattatgcactccac

SEQ ID NO: 287922 - DNA, 30 bp, Artificial Sequence
  Synthetic oligonucleotide
agtgacaattgacactaggcagacctccac

SEQ ID NO: 287923 - DNA, 30 bp, Artificial Sequence
  Synthetic oligonucleotide
aaaagatcaggggaaattatcgatctccac

SEQ ID NO: 287924 - DNA, 30 bp, Artificial Sequence
  Synthetic oligonucleotide
cacccaataacccaggaacgtcgtctccac

SEQ ID NO: 287925 - DNA, 30 bp, Artificial Sequence
  Synthetic oligonucleotide
gaatgataaatagtgcctgtaaaagtccac

SEQ ID NO: 287926 - DNA, 30 bp, Artificial Sequence
  Synthetic oligonucleotide
acagtaaatctggaaacacttgcagtccac

SEQ ID NO: 287927 - DNA, 30 bp, Artificial Sequence
  Synthetic oligonucleotide
gagtgaagaatgggctgaaacagagtccac

SEQ ID NO: 287928 - DNA, 30 bp, Artificial Sequence
  Synthetic oligonucleotide
ctctatagccatcagacggcgaccgtccac

SEQ ID NO: 287929 - DNA, 30 bp, Artificial Sequence
  Synthetic oligonucleotide
atccgttggaacctggtggtaagcgtccac

SEQ ID NO: 287930 - DNA, 30 bp, Artificial Sequence
  Synthetic oligonucleotide
tcttagacagtggcaaattattgcgtccac

SEQ ID NO: 287931 - DNA, 30 bp, Artificial Sequence
  Synthetic oligonucleotide
actgatagacaaatggtctaattggtccac

SEQ ID NO: 287932 - DNA, 30 bp, Artificial Sequence
  Synthetic oligonucleotide
aacttatgtttggctattgcgcgattccac

SEQ ID NO: 287933 - DNA, 30 bp, Artificial Sequence
  Synthetic oligonucleotide
taggcgctacgcctacgtccgttattccac

SEQ ID NO: 287934 - DNA, 30 bp, Artificial Sequence
  Synthetic oligonucleotide
acacagcctgtcaagtagacgacgttccac

SEQ ID NO: 287935 - DNA, 30 bp, Artificial Sequence
  Synthetic oligonucleotide
gtcaagtactgttacacgctgtggttccac

SEQ ID NO: 287936 - DNA, 30 bp, Artificial Sequence
  Synthetic oligonucleotide
cggcgctccgtgtaccggggttaaaagcac

SEQ ID NO: 287937 - DNA, 30 bp, Artificial Sequence
  Synthetic oligonucleotide
ttggattaatgcagcataattacaaagcac

SEQ ID NO: 287938 - DNA, 30 bp, Artificial Sequence
  Synthetic oligonucleotide
gtaccattacggtcagatcctcgaaagcac

SEQ ID NO: 287939 - DNA, 30 bp, Artificial Sequence
  Synthetic oligonucleotide
tagatcgatgattgtacgatgccgaagcac

SEQ ID NO: 287940 - DNA, 30 bp, Artificial Sequence
  Synthetic oligonucleotide
ccatgggagcctaatgccctccataagcac

SEQ ID NO: 287941 - DNA, 30 bp, Artificial Sequence
  Synthetic oligonucleotide
ggtatagctgggctatgcacgcataagcac

SEQ ID NO: 287942 - DNA, 30 bp, Artificial Sequence
  Synthetic oligonucleotide
gtaagccgtttgtacctagtggaacagcac

SEQ ID NO: 287943 - DNA, 30 bp, Artificial Sequence
  Synthetic oligonucleotide
ggataccgaatttgaacgaactgacagcac

SEQ ID NO: 287944 - DNA, 30 bp, Artificial Sequence
  Synthetic oligonucleotide
gacgaatctggaccccaattaggccagcac

SEQ ID NO: 287945 - DNA, 30 bp, Artificial Sequence
  Synthetic oligonucleotide
ttacctaactctgtcacaagggagcagcac

SEQ ID NO: 287946 - DNA, 30 bp, Artificial Sequence
  Synthetic oligonucleotide
cgaccaaatagaagtgatattgcgcagcac

SEQ ID NO: 287947 - DNA, 30 bp, Artificial Sequence
  Synthetic oligonucleotide
gggcacactgataccagctgaggtcagcac

SEQ ID NO: 287948 - DNA, 30 bp, Artificial Sequence
  Synthetic oligonucleotide
aagtgctgaccgcatctataatgtcagcac

SEQ ID NO: 287949 - DNA, 30 bp, Artificial Sequence
  Synthetic oligonucleotide
cggggccactgaatgtacttgcgcgagcac

SEQ ID NO: 287950 - DNA, 30 bp, Artificial Sequence
  Synthetic oligonucleotide
ctgttgtggaacgaggtccaactcgagcac

SEQ ID NO: 287951 - DNA, 30 bp, Artificial Sequence
  Synthetic oligonucleotide
tagggaacagccattaatactgttgagcac

SEQ ID NO: 287952 - DNA, 30 bp, Artificial Sequence
  Synthetic oligonucleotide
ttgcgagcattctcggatctagtctagcac

SEQ ID NO: 287953 - DNA, 30 bp, Artificial Sequence
  Synthetic oligonucleotide
ggagttgcatggtacagaaataggtagcac

SEQ ID NO: 287954 - DNA, 30 bp, Artificial Sequence
  Synthetic oligonucleotide
tcaccggcccttaacggctaattgtagcac

SEQ ID NO: 287955 - DNA, 30 bp, Artificial Sequence
  Synthetic oligonucleotide
aggtagaagttcacgcaggcggattagcac

SEQ ID NO: 287956 - DNA, 30 bp, Artificial Sequence
  Synthetic oligonucleotide
agtagtgctggaaggggaaagggttagcac

SEQ ID NO: 287957 - DNA, 30 bp, Artificial Sequence
  Synthetic oligonucleotide
tcgggacccgtcgtaatgttcataacgcac

SEQ ID NO: 287958 - DNA, 30 bp, Artificial Sequence
  Synthetic oligonucleotide
tgtgtgggttggtggctgttgagcacgcac

SEQ ID NO: 287959 - DNA, 30 bp, Artificial Sequence
  Synthetic oligonucleotide
tttgtcataatccgagcaccggagacgcac

SEQ ID NO: 287960 - DNA, 30 bp, Artificial Sequence
  Synthetic oligonucleotide
cgtatcctagctccaatttggtcaccgcac

SEQ ID NO: 287961 - DNA, 30 bp, Artificial Sequence
  Synthetic oligonucleotide
ggaagtagtgatcggtgggtgcacccgcac

SEQ ID NO: 287962 - DNA, 30 bp, Artificial Sequence
  Synthetic oligonucleotide
gttttgaaaggtcgggtacgtgacccgcac

SEQ ID NO: 287963 - DNA, 30 bp, Artificial Sequence
  Synthetic oligonucleotide
gagtccatgtcgttattccgcgccccgcac

SEQ ID NO: 287964 - DNA, 30 bp, Artificial Sequence
  Synthetic oligonucleotide
gtagaaggcgttatggcgtataagccgcac

SEQ ID NO: 287965 - DNA, 30 bp, Artificial Sequence
  Synthetic oligonucleotide
cggagcgttaaaactccgtcagagccgcac

SEQ ID NO: 287966 - DNA, 30 bp, Artificial Sequence
  Synthetic oligonucleotide
gtttggtttcgatgacaacaccccgcgcac

SEQ ID NO: 287967 - DNA, 30 bp, Artificial Sequence
  Synthetic oligonucleotide
cggctctaacgagagtggccgtaggcgcac

SEQ ID NO: 287968 - DNA, 30 bp, Artificial Sequence
  Synthetic oligonucleotide
caacctttagggcggacatcaaatgcgcac

SEQ ID NO: 287969 - DNA, 30 bp, Artificial Sequence
  Synthetic oligonucleotide
tgtttaaggttatcgttttctagtgcgcac

SEQ ID NO: 287970 - DNA, 30 bp, Artificial Sequence
  Synthetic oligonucleotide
ataggcagtcgggttgtactgtttgcgcac

SEQ ID NO: 287971 - DNA, 30 bp, Artificial Sequence
  Synthetic oligonucleotide
ctcggggattaaacggagggtctatcgcac

SEQ ID NO: 287972 - DNA, 30 bp, Artificial Sequence
  Synthetic oligonucleotide
ggtgtataagattacccctcccgctcgcac

SEQ ID NO: 287973 - DNA, 30 bp, Artificial Sequence
  Synthetic oligonucleotide
ttctccagcttggccgagggggattcgcac

SEQ ID NO: 287974 - DNA, 30 bp, Artificial Sequence
  Synthetic oligonucleotide
acgaaacttaaaaagttcagtgcttcgcac

SEQ ID NO: 287975 - DNA, 30 bp, Artificial Sequence
  Synthetic oligonucleotide
ggtccttgatcgtaaacttagtgttcgcac

SEQ ID NO: 287976 - DNA, 30 bp, Artificial Sequence
  Synthetic oligonucleotide
gcattaagtgatccaaaatcgttttcgcac

SEQ ID NO: 287977 - DNA, 30 bp, Artificial Sequence
  Synthetic oligonucleotide
gcgaaaacgttctgctcgcacctaaggcac

SEQ ID NO: 287978 - DNA, 30 bp, Artificial Sequence
  Synthetic oligonucleotide
aagcatggatgatctgcagttagcaggcac

SEQ ID NO: 287979 - DNA, 30 bp, Artificial Sequence
  Synthetic oligonucleotide
gggggtcagcctcatgggatgaataggcac

SEQ ID NO: 287980 - DNA, 30 bp, Artificial Sequence
  Synthetic oligonucleotide
acaattataaacaatcaaattgataggcac

SEQ ID NO: 287981 - DNA, 30 bp, Artificial Sequence
  Synthetic oligonucleotide
gatttaaggagaggagtcatttataggcac

SEQ ID NO: 287982 - DNA, 30 bp, Artificial Sequence
  Synthetic oligonucleotide
tcacgcgatatgatgtgggaaccacggcac

SEQ ID NO: 287983 - DNA, 30 bp, Artificial Sequence
  Synthetic oligonucleotide
tcgtcctggctgggcagggtagcacggcac

SEQ ID NO: 287984 - DNA, 30 bp, Artificial Sequence
  Synthetic oligonucleotide
gtatgttccaaatttgttatcacccggcac

SEQ ID NO: 287985 - DNA, 30 bp, Artificial Sequence
  Synthetic oligonucleotide
tgtagtctcgtcgtccgttttagccggcac

SEQ ID NO: 287986 - DNA, 30 bp, Artificial Sequence
  Synthetic oligonucleotide
cagagatctagtgaagcctaggtccggcac

SEQ ID NO: 287987 - DNA, 30 bp, Artificial Sequence
  Synthetic oligonucleotide
cccgcagtcaagcctgaaggtctagggcac

SEQ ID NO: 287988 - DNA, 30 bp, Artificial Sequence
  Synthetic oligonucleotide
gcaaagcgcgagtttgtggacgtagggcac

SEQ ID NO: 287989 - DNA, 30 bp, Artificial Sequence
  Synthetic oligonucleotide
ccagatggcgcacgattcagcagcgggcac

SEQ ID NO: 287990 - DNA, 30 bp, Artificial Sequence
  Synthetic oligonucleotide
gcatcggcggttccgcggaatacggggcac

SEQ ID NO: 287991 - DNA, 30 bp, Artificial Sequence
  Synthetic oligonucleotide
acgctcgcaagagtcttaacgttggggcac

SEQ ID NO: 287992 - DNA, 30 bp, Artificial Sequence
  Synthetic oligonucleotide
aagtcgttccgattcacggattcatggcac

SEQ ID NO: 287993 - DNA, 30 bp, Artificial Sequence
  Synthetic oligonucleotide
taaggtcgcgactgttactgaaactggcac

SEQ ID NO: 287994 - DNA, 30 bp, Artificial Sequence
  Synthetic oligonucleotide
atcaatatgctagcaataataaactggcac

SEQ ID NO: 287995 - DNA, 30 bp, Artificial Sequence
  Synthetic oligonucleotide
taccaaagagcgaggttcggcgtctggcac

SEQ ID NO: 287996 - DNA, 30 bp, Artificial Sequence
  Synthetic oligonucleotide
aagctcagtcagctgatctttaattggcac

SEQ ID NO: 287997 - DNA, 30 bp, Artificial Sequence
  Synthetic oligonucleotide
cgtattgggggtatagaggtggtttggcac

SEQ ID NO: 287998 - DNA, 30 bp, Artificial Sequence
  Synthetic oligonucleotide
tcaaggaaggatgtgggcgagttttggcac

SEQ ID NO: 287999 - DNA, 30 bp, Artificial Sequence
  Synthetic oligonucleotide
gggagtgctaatcccaccgattacatgcac

SEQ ID NO: 288000 - DNA, 30 bp, Artificial Sequence
  Synthetic oligonucleotide
ggaacgcgaataaagcactgaatcatgcac

SEQ ID NO: 288001 - DNA, 30 bp, Artificial Sequence
  Synthetic oligonucleotide
caaacgttgcggatatcccccccgatgcac

SEQ ID NO: 288002 - DNA, 30 bp, Artificial Sequence
  Synthetic oligonucleotide
agatacactagggtgtacaaaattatgcac

SEQ ID NO: 288003 - DNA, 30 bp, Artificial Sequence
  Synthetic oligonucleotide
ctaataacagtaacatctgtaaaactgcac

SEQ ID NO: 288004 - DNA, 30 bp, Artificial Sequence
  Synthetic oligonucleotide
gaaatcgtaatcttgccttagtagctgcac

SEQ ID NO: 288005 - DNA, 30 bp, Artificial Sequence
  Synthetic oligonucleotide
ctggaaagttgatatgactgtcatctgcac

SEQ ID NO: 288006 - DNA, 30 bp, Artificial Sequence
  Synthetic oligonucleotide
ctatagggcggttttctacagtgtctgcac

SEQ ID NO: 288007 - DNA, 30 bp, Artificial Sequence
  Synthetic oligonucleotide
tggccccatccacccgggaaagttctgcac

SEQ ID NO: 288008 - DNA, 30 bp, Artificial Sequence
  Synthetic oligonucleotide
ccatccaattgagtggttgtttccgtgcac

SEQ ID NO: 288009 - DNA, 30 bp, Artificial Sequence
  Synthetic oligonucleotide
ggcctattgcgctggggtcgggaggtgcac

SEQ ID NO: 288010 - DNA, 30 bp, Artificial Sequence
  Synthetic oligonucleotide
gtgcattgctgtcaataattaactgtgcac

SEQ ID NO: 288011 - DNA, 30 bp, Artificial Sequence
  Synthetic oligonucleotide
atgtatagcaagtcaagcgttgctgtgcac

SEQ ID NO: 288012 - DNA, 30 bp, Artificial Sequence
  Synthetic oligonucleotide
gcagtcttgacaaaggtccgcgtgttgcac

SEQ ID NO: 288013 - DNA, 30 bp, Artificial Sequence
  Synthetic oligonucleotide
agaggcaagaaattaagacaccgtttgcac

SEQ ID NO: 288014 - DNA, 30 bp, Artificial Sequence
  Synthetic oligonucleotide
gctgaacacctgcgattgtctggcaatcac

SEQ ID NO: 288015 - DNA, 30 bp, Artificial Sequence
  Synthetic oligonucleotide
cttacgtcaattagaccctcactcaatcac

SEQ ID NO: 288016 - DNA, 30 bp, Artificial Sequence
  Synthetic oligonucleotide
aaatgagcgagattgataaacgtcaatcac

SEQ ID NO: 288017 - DNA, 30 bp, Artificial Sequence
  Synthetic oligonucleotide
gtggagggtttgggtggcaccttcaatcac

SEQ ID NO: 288018 - DNA, 30 bp, Artificial Sequence
  Synthetic oligonucleotide
caatgtccaaggagcaaagacgcgaatcac

SEQ ID NO: 288019 - DNA, 30 bp, Artificial Sequence
  Synthetic oligonucleotide
ccataaagtgtacgtcgaaaccataatcac

SEQ ID NO: 288020 - DNA, 30 bp, Artificial Sequence
  Synthetic oligonucleotide
aatagcaacttcaccaaggcacgtaatcac

SEQ ID NO: 288021 - DNA, 30 bp, Artificial Sequence
  Synthetic oligonucleotide
cctaggcggcaacagccgcacggccatcac

SEQ ID NO: 288022 - DNA, 30 bp, Artificial Sequence
  Synthetic oligonucleotide
atatctttccgtggacgtcctggccatcac

SEQ ID NO: 288023 - DNA, 30 bp, Artificial Sequence
  Synthetic oligonucleotide
aatgacatttggccttctggcgagcatcac

SEQ ID NO: 288024 - DNA, 30 bp, Artificial Sequence
  Synthetic oligonucleotide
ttcgggaacacacgagtatcaagtcatcac

SEQ ID NO: 288025 - DNA, 30 bp, Artificial Sequence
  Synthetic oligonucleotide
gtgcgtaaacctcgagctctatcagatcac

SEQ ID NO: 288026 - DNA, 30 bp, Artificial Sequence
  Synthetic oligonucleotide
aaataaaccgtagacagcggtcccgatcac

SEQ ID NO: 288027 - DNA, 30 bp, Artificial Sequence
  Synthetic oligonucleotide
tctcaggggcgactgtcgttcaaatatcac

SEQ ID NO: 288028 - DNA, 30 bp, Artificial Sequence
  Synthetic oligonucleotide
atcagggaacgttctggggccccatatcac

SEQ ID NO: 288029 - DNA, 29 bp, Artificial Sequence
  Synthetic oligonucleotide
ataagagtcaccatgacacaataactcac

SEQ ID NO: 288030 - DNA, 30 bp, Artificial Sequence
  Synthetic oligonucleotide
aggattacacacaataatgaggacactcac

SEQ ID NO: 288031 - DNA, 30 bp, Artificial Sequence
  Synthetic oligonucleotide
gccataatggtccattttcgggttactcac

SEQ ID NO: 288032 - DNA, 25 bp, Artificial Sequence
  Synthetic oligonucleotide
ggcctcaagtataatggaacctcac

SEQ ID NO: 288033 - DNA, 30 bp, Artificial Sequence
  Synthetic oligonucleotide
cgaaaagaaggcctgtactgaccacctcac

SEQ ID NO: 288034 - DNA, 30 bp, Artificial Sequence
  Synthetic oligonucleotide
agaataaagaggttactgctataccctcac

SEQ ID NO: 288035 - DNA, 30 bp, Artificial Sequence
  Synthetic oligonucleotide
gagctggggctcgtccccttgacccctcac

SEQ ID NO: 288036 - DNA, 30 bp, Artificial Sequence
  Synthetic oligonucleotide
atctccgtactgacccgtaacgagcctcac

SEQ ID NO: 288037 - DNA, 30 bp, Artificial Sequence
  Synthetic oligonucleotide
gcctatgtatattcagatttgagatctcac

SEQ ID NO: 288038 - DNA, 30 bp, Artificial Sequence
  Synthetic oligonucleotide
tcgtatattattgacgtgtggaactctcac

SEQ ID NO: 288039 - DNA, 30 bp, Artificial Sequence
  Synthetic oligonucleotide
tagccccgttctcaaatctcgtcgtctcac

SEQ ID NO: 288040 - DNA, 30 bp, Artificial Sequence
  Synthetic oligonucleotide
gtccccgcccggaggtgttccatgtctcac

SEQ ID NO: 288041 - DNA, 30 bp, Artificial Sequence
  Synthetic oligonucleotide
tatacgcaatgtgcgacaacaagaagtcac

SEQ ID NO: 288042 - DNA, 30 bp, Artificial Sequence
  Synthetic oligonucleotide
ccgaacctagcgcaggatagtgacagtcac

SEQ ID NO: 288043 - DNA, 30 bp, Artificial Sequence
  Synthetic oligonucleotide
catagcttgtagtacaacctagtgagtcac

SEQ ID NO: 288044 - DNA, 30 bp, Artificial Sequence
  Synthetic oligonucleotide
cagtcattttagtagatacccagacgtcac

SEQ ID NO: 288045 - DNA, 30 bp, Artificial Sequence
  Synthetic oligonucleotide
ttcgacgattatgactgatcgtgacgtcac

SEQ ID NO: 288046 - DNA, 30 bp, Artificial Sequence
  Synthetic oligonucleotide
aatgctaacagaaagcaggtttagcgtcac

SEQ ID NO: 288047 - DNA, 30 bp, Artificial Sequence
  Synthetic oligonucleotide
gattagtaaagcagtgtaacctggcgtcac

SEQ ID NO: 288048 - DNA, 30 bp, Artificial Sequence
  Synthetic oligonucleotide
aaaaatatggcagcgaggtattttcgtcac

SEQ ID NO: 288049 - DNA, 30 bp, Artificial Sequence
  Synthetic oligonucleotide
accaatgacttttggtactatgtaggtcac

SEQ ID NO: 288050 - DNA, 30 bp, Artificial Sequence
  Synthetic oligonucleotide
ggctgcaacgggatcgagcaatgcggtcac

SEQ ID NO: 288051 - DNA, 30 bp, Artificial Sequence
  Synthetic oligonucleotide
ttgacttcctttgtgactggggtcggtcac

SEQ ID NO: 288052 - DNA, 30 bp, Artificial Sequence
  Synthetic oligonucleotide
ttacggggtaactctcagggtctgggtcac

SEQ ID NO: 288053 - DNA, 30 bp, Artificial Sequence
  Synthetic oligonucleotide
gccctatcgtcagaaacgtccacctgtcac

SEQ ID NO: 288054 - DNA, 30 bp, Artificial Sequence
  Synthetic oligonucleotide
gagatagattatcccagggggcagtgtcac

SEQ ID NO: 288055 - DNA, 30 bp, Artificial Sequence
  Synthetic oligonucleotide
ctacatgtcacaatggaccgtatgtgtcac

SEQ ID NO: 288056 - DNA, 30 bp, Artificial Sequence
  Synthetic oligonucleotide
gcttttttataagggcaagtattgtgtcac

SEQ ID NO: 288057 - DNA, 30 bp, Artificial Sequence
  Synthetic oligonucleotide
ccctaaagatgtgctgtgaacacttgtcac

SEQ ID NO: 288058 - DNA, 30 bp, Artificial Sequence
  Synthetic oligonucleotide
ttgggggctggacttacaaaatgttgtcac

SEQ ID NO: 288059 - DNA, 30 bp, Artificial Sequence
  Synthetic oligonucleotide
ttggcatctatttcacgaacttcaattcac

SEQ ID NO: 288060 - DNA, 30 bp, Artificial Sequence
  Synthetic oligonucleotide
ggaacagatccttagaagcagcgaattcac

SEQ ID NO: 288061 - DNA, 30 bp, Artificial Sequence
  Synthetic oligonucleotide
acaaccatgactcgaaggagattgattcac

SEQ ID NO: 288062 - DNA, 30 bp, Artificial Sequence
  Synthetic oligonucleotide
gctgagtagacatatggtacctctattcac

SEQ ID NO: 288063 - DNA, 30 bp, Artificial Sequence
  Synthetic oligonucleotide
agaccagtcgtgacaactagggaacttcac

SEQ ID NO: 288064 - DNA, 30 bp, Artificial Sequence
  Synthetic oligonucleotide
agcattacacaccatggatcatcacttcac

SEQ ID NO: 288065 - DNA, 30 bp, Artificial Sequence
  Synthetic oligonucleotide
gctcgcctacgtgctgtactctaccttcac

SEQ ID NO: 288066 - DNA, 30 bp, Artificial Sequence
  Synthetic oligonucleotide
caagtctaggaaacatcttccctgcttcac

SEQ ID NO: 288067 - DNA, 30 bp, Artificial Sequence
  Synthetic oligonucleotide
cacgctcttctgatatgtggtctgcttcac

SEQ ID NO: 288068 - DNA, 30 bp, Artificial Sequence
  Synthetic oligonucleotide
atgggcatccaagccattatcactcttcac

SEQ ID NO: 288069 - DNA, 30 bp, Artificial Sequence
  Synthetic oligonucleotide
cgacgcaacagtacaagcagttcagttcac

SEQ ID NO: 288070 - DNA, 30 bp, Artificial Sequence
  Synthetic oligonucleotide
acgttattaggcaactcccatgacgttcac

SEQ ID NO: 288071 - DNA, 30 bp, Artificial Sequence
  Synthetic oligonucleotide
tagaattacgatctgaagagaaaggttcac

SEQ ID NO: 288072 - DNA, 30 bp, Artificial Sequence
  Synthetic oligonucleotide
ggatttcgtgtagaagtccctccggttcac

SEQ ID NO: 288073 - DNA, 30 bp, Artificial Sequence
  Synthetic oligonucleotide
gctggtccaacgaataatccatcggttcac

SEQ ID NO: 288074 - DNA, 30 bp, Artificial Sequence
  Synthetic oligonucleotide
gtggttgaagcactacctggaggggttcac

SEQ ID NO: 288075 - DNA, 30 bp, Artificial Sequence
  Synthetic oligonucleotide
gcataacgatatatataaactgctgttcac

SEQ ID NO: 288076 - DNA, 30 bp, Artificial Sequence
  Synthetic oligonucleotide
cgacatccagtccagacgctgtaatttcac

SEQ ID NO: 288077 - DNA, 30 bp, Artificial Sequence
  Synthetic oligonucleotide
ttggcgaggtataagcgggcatcatttcac

SEQ ID NO: 288078 - DNA, 30 bp, Artificial Sequence
  Synthetic oligonucleotide
caagtaataaaagaaatccattgatttcac

SEQ ID NO: 288079 - DNA, 30 bp, Artificial Sequence
  Synthetic oligonucleotide
gcgtataggaaacagtgaagatcctttcac

SEQ ID NO: 288080 - DNA, 30 bp, Artificial Sequence
  Synthetic oligonucleotide
atcgccgcaacaactagagtgggctttcac

SEQ ID NO: 288081 - DNA, 30 bp, Artificial Sequence
  Synthetic oligonucleotide
agcgggatgtaagcccctcccaagtttcac

SEQ ID NO: 288082 - DNA, 30 bp, Artificial Sequence
  Synthetic oligonucleotide
tctctcatggctggtaatggcatgtttcac

SEQ ID NO: 288083 - DNA, 30 bp, Artificial Sequence
  Synthetic oligonucleotide
aatagcgctaatcacttaggtttgtttcac

SEQ ID NO: 288084 - DNA, 30 bp, Artificial Sequence
  Synthetic oligonucleotide
gcgagtcgtatgttgcagtggtaaaaagac

SEQ ID NO: 288085 - DNA, 34 bp, Artificial Sequence
  Synthetic oligonucleotide
gatactagaccaccacgtgtccagcagaaaagac

SEQ ID NO: 288086 - DNA, 30 bp, Artificial Sequence
  Synthetic oligonucleotide
ataggcgccttgaccatgggaccgaaagac

SEQ ID NO: 288087 - DNA, 30 bp, Artificial Sequence
  Synthetic oligonucleotide
gggagttctaaacctggacattataaagac

SEQ ID NO: 288088 - DNA, 30 bp, Artificial Sequence
  Synthetic oligonucleotide
cggctgtagtaatctatattgcctaaagac

SEQ ID NO: 288089 - DNA, 30 bp, Artificial Sequence
  Synthetic oligonucleotide
cccggggttttcgtggcaggtcaacaagac

SEQ ID NO: 288090 - DNA, 30 bp, Artificial Sequence
  Synthetic oligonucleotide
ggaaggaggggagggctagggtaacaagac

SEQ ID NO: 288091 - DNA, 30 bp, Artificial Sequence
  Synthetic oligonucleotide
gaatatttaaggcaccggggaaagcaagac

SEQ ID NO: 288092 - DNA, 30 bp, Artificial Sequence
  Synthetic oligonucleotide
gctgaagagttggtaaccccgcatcaagac

SEQ ID NO: 288093 - DNA, 30 bp, Artificial Sequence
  Synthetic oligonucleotide
ttccggtacgtactggtaataagagaagac

SEQ ID NO: 288094 - DNA, 30 bp, Artificial Sequence
  Synthetic oligonucleotide
actcacatatgagccgtttccagcgaagac

SEQ ID NO: 288095 - DNA, 30 bp, Artificial Sequence
  Synthetic oligonucleotide
agtatggtacaggctcacgtcgaggaagac

SEQ ID NO: 288096 - DNA, 30 bp, Artificial Sequence
  Synthetic oligonucleotide
tggttgaatgctagtcccttgggggaagac

SEQ ID NO: 288097 - DNA, 30 bp, Artificial Sequence
  Synthetic oligonucleotide
aagttagcgttaacgtccataatggaagac

SEQ ID NO: 288098 - DNA, 30 bp, Artificial Sequence
  Synthetic oligonucleotide
aacgctgtccgggtctgacacaatgaagac

SEQ ID NO: 288099 - DNA, 30 bp, Artificial Sequence
  Synthetic oligonucleotide
acattacccgccaaaacagggaatgaagac

SEQ ID NO: 288100 - DNA, 30 bp, Artificial Sequence
  Synthetic oligonucleotide
gccaattactttttaccccaggctgaagac

SEQ ID NO: 288101 - DNA, 31 bp, Artificial Sequence
  Synthetic oligonucleotide
gtcggcctcgtttaacatgccaaaataagac

SEQ ID NO: 288102 - DNA, 30 bp, Artificial Sequence
  Synthetic oligonucleotide
gtggagtcattcggaactccatactaagac

SEQ ID NO: 288103 - DNA, 30 bp, Artificial Sequence
  Synthetic oligonucleotide
gggagtcatcgaccatgcttcacctaagac

SEQ ID NO: 288104 - DNA, 30 bp, Artificial Sequence
  Synthetic oligonucleotide
caggttgccgaaccgagacgaagctaagac

SEQ ID NO: 288105 - DNA, 30 bp, Artificial Sequence
  Synthetic oligonucleotide
ggtgacactcttaactcaaagcgctaagac

SEQ ID NO: 288106 - DNA, 30 bp, Artificial Sequence
  Synthetic oligonucleotide
tagatgaatatcaggggcaagtattaagac

SEQ ID NO: 288107 - DNA, 30 bp, Artificial Sequence
  Synthetic oligonucleotide
aggaacatagacgatatgcagtattaagac

SEQ ID NO: 288108 - DNA, 30 bp, Artificial Sequence
  Synthetic oligonucleotide
attgatggggacaaaagtcatctttaagac

SEQ ID NO: 288109 - DNA, 30 bp, Artificial Sequence
  Synthetic oligonucleotide
tgcacgaacacgcttgtagtagtttaagac

SEQ ID NO: 288110 - DNA, 30 bp, Artificial Sequence
  Synthetic oligonucleotide
acatgtcatttgacgcctttatgcacagac

SEQ ID NO: 288111 - DNA, 30 bp, Artificial Sequence
  Synthetic oligonucleotide
aaagacgggcaactgagtctcctcacagac

SEQ ID NO: 288112 - DNA, 30 bp, Artificial Sequence
  Synthetic oligonucleotide
aaaaccggtatttgaccggcatcgacagac

SEQ ID NO: 288113 - DNA, 30 bp, Artificial Sequence
  Synthetic oligonucleotide
gcagtatgtgataggtttcgtgttacagac

SEQ ID NO: 288114 - DNA, 30 bp, Artificial Sequence
  Synthetic oligonucleotide
cgcgctataaatagtcaatgctcagcagac

SEQ ID NO: 288115 - DNA, 30 bp, Artificial Sequence
  Synthetic oligonucleotide
gacatggacatactttttcgccacgcagac

SEQ ID NO: 288116 - DNA, 30 bp, Artificial Sequence
  Synthetic oligonucleotide
aagcatagactgaaaggcaattcatcagac

SEQ ID NO: 288117 - DNA, 30 bp, Artificial Sequence
  Synthetic oligonucleotide
gatagcgagttcgacgtacattcatcagac

SEQ ID NO: 288118 - DNA, 30 bp, Artificial Sequence
  Synthetic oligonucleotide
acggggcgtaatgttttatcctgatcagac

SEQ ID NO: 288119 - DNA, 30 bp, Artificial Sequence
  Synthetic oligonucleotide
aaaacgttgcataagttactcatatcagac

SEQ ID NO: 288120 - DNA, 30 bp, Artificial Sequence
  Synthetic oligonucleotide
aagagtaggtcctacggagttgtgtcagac

SEQ ID NO: 288121 - DNA, 30 bp, Artificial Sequence
  Synthetic oligonucleotide
tacagaaatgtataacggtaaaattcagac

SEQ ID NO: 288122 - DNA, 30 bp, Artificial Sequence
  Synthetic oligonucleotide
tagcaactagccatgtgatgaaaaagagac

SEQ ID NO: 288123 - DNA, 30 bp, Artificial Sequence
  Synthetic oligonucleotide
cgtgggtgtggaggaggtcgactaagagac

SEQ ID NO: 288124 - DNA, 30 bp, Artificial Sequence
  Synthetic oligonucleotide
ccgtactagtcccgctagtaatccagagac

SEQ ID NO: 288125 - DNA, 31 bp, Artificial Sequence
  Synthetic oligonucleotide
tcagggggatatgttaagctagcgcagagac

SEQ ID NO: 288126 - DNA, 30 bp, Artificial Sequence
  Synthetic oligonucleotide
cattgcttgtaccgacgaacgatgagagac

SEQ ID NO: 288127 - DNA, 30 bp, Artificial Sequence
  Synthetic oligonucleotide
catagtctagtggtggttttgatgagagac

SEQ ID NO: 288128 - DNA, 30 bp, Artificial Sequence
  Synthetic oligonucleotide
gctttaagtcaacagccgggatatagagac

SEQ ID NO: 288129 - DNA, 30 bp, Artificial Sequence
  Synthetic oligonucleotide
ccacgaaagacttatcgggactatagagac

SEQ ID NO: 288130 - DNA, 30 bp, Artificial Sequence
  Synthetic oligonucleotide
tatacttcagtcgtagtcattgctcgagac

SEQ ID NO: 288131 - DNA, 30 bp, Artificial Sequence
  Synthetic oligonucleotide
gggccacattgggaatcatgggcaggagac

SEQ ID NO: 288132 - DNA, 30 bp, Artificial Sequence
  Synthetic oligonucleotide
gagtttcgatgatgaacatagataggagac

SEQ ID NO: 288133 - DNA, 30 bp, Artificial Sequence
  Synthetic oligonucleotide
actttacaggggtagtataaatacggagac

SEQ ID NO: 288134 - DNA, 30 bp, Artificial Sequence
  Synthetic oligonucleotide
gacgacttgaagcgaaactaccccggagac

SEQ ID NO: 288135 - DNA, 30 bp, Artificial Sequence
  Synthetic oligonucleotide
gggtagcaaaagaattgcgggcgcggagac

SEQ ID NO: 288136 - DNA, 30 bp, Artificial Sequence
  Synthetic oligonucleotide
gggacatgtaaatgttactcggaatgagac

SEQ ID NO: 288137 - DNA, 30 bp, Artificial Sequence
  Synthetic oligonucleotide
agtttagtgggctactggtgtgcatgagac

SEQ ID NO: 288138 - DNA, 30 bp, Artificial Sequence
  Synthetic oligonucleotide
aaatcgtcgacaatacgcgaaggatgagac

SEQ ID NO: 288139 - DNA, 30 bp, Artificial Sequence
  Synthetic oligonucleotide
gcgtcttggcctatgtggacttgctgagac

SEQ ID NO: 288140 - DNA, 30 bp, Artificial Sequence
  Synthetic oligonucleotide
gggatactctcttcataatccgggtgagac

SEQ ID NO: 288141 - DNA, 30 bp, Artificial Sequence
  Synthetic oligonucleotide
gggggaaatacaccctcaagtcattgagac

SEQ ID NO: 288142 - DNA, 30 bp, Artificial Sequence
  Synthetic oligonucleotide
acagttccgtggaatatgacgacaatagac

SEQ ID NO: 288143 - DNA, 30 bp, Artificial Sequence
  Synthetic oligonucleotide
acatacggagacagcatgtgtggtatagac

SEQ ID NO: 288144 - DNA, 30 bp, Artificial Sequence
  Synthetic oligonucleotide
ctccgtcgtccccccttgtcggttatagac

SEQ ID NO: 288145 - DNA, 30 bp, Artificial Sequence
  Synthetic oligonucleotide
gtttggatctgttgcacgggcttgctagac

SEQ ID NO: 288146 - DNA, 30 bp, Artificial Sequence
  Synthetic oligonucleotide
atccaagttatggagtccaatgtagtagac

SEQ ID NO: 288147 - DNA, 30 bp, Artificial Sequence
  Synthetic oligonucleotide
tacgtatagtgttgttagcgcagcgtagac

SEQ ID NO: 288148 - DNA, 30 bp, Artificial Sequence
  Synthetic oligonucleotide
tccaggtgacggaatgtgctgtcggtagac

SEQ ID NO: 288149 - DNA, 30 bp, Artificial Sequence
  Synthetic oligonucleotide
aggacaggatggggccccggggatgtagac

SEQ ID NO: 288150 - DNA, 30 bp, Artificial Sequence
  Synthetic oligonucleotide
cagccaccaatctacactcggcgattagac

SEQ ID NO: 288151 - DNA, 30 bp, Artificial Sequence
  Synthetic oligonucleotide
aatgtgatagcatcggaatggtacttagac

SEQ ID NO: 288152 - DNA, 30 bp, Artificial Sequence
  Synthetic oligonucleotide
gcctggttagtcaccagaagcgtgttagac

SEQ ID NO: 288153 - DNA, 30 bp, Artificial Sequence
  Synthetic oligonucleotide
tgtggtcattgatgtgcttagaccaacgac

SEQ ID NO: 288154 - DNA, 30 bp, Artificial Sequence
  Synthetic oligonucleotide
gtcatggggagagtatcgggttccaacgac

SEQ ID NO: 288155 - DNA, 30 bp, Artificial Sequence
  Synthetic oligonucleotide
ggattctcaagaggactcgagcataacgac

SEQ ID NO: 288156 - DNA, 30 bp, Artificial Sequence
  Synthetic oligonucleotide
gcctaaaccgtggtattctttgataacgac

SEQ ID NO: 288157 - DNA, 30 bp, Artificial Sequence
  Synthetic oligonucleotide
atagcttttgtacacgagcgagtacacgac

SEQ ID NO: 288158 - DNA, 30 bp, Artificial Sequence
  Synthetic oligonucleotide
aatgcaaggatggtatttcgtagccacgac

SEQ ID NO: 288159 - DNA, 30 bp, Artificial Sequence
  Synthetic oligonucleotide
taaagtgggtgcgtgttcagagatcacgac

SEQ ID NO: 288160 - DNA, 30 bp, Artificial Sequence
  Synthetic oligonucleotide
aaagcggtcggtgctagactatgagacgac

SEQ ID NO: 288161 - DNA, 30 bp, Artificial Sequence
  Synthetic oligonucleotide
agtgtaagataccttttcaatcatgacgac

SEQ ID NO: 288162 - DNA, 30 bp, Artificial Sequence
  Synthetic oligonucleotide
gctcaatctggcgttcttgcgaaatacgac

SEQ ID NO: 288163 - DNA, 30 bp, Artificial Sequence
  Synthetic oligonucleotide
gtaaacaggcgagggatagttaactacgac

SEQ ID NO: 288164 - DNA, 30 bp, Artificial Sequence
  Synthetic oligonucleotide
ttagacagagacaagccggccacctacgac

SEQ ID NO: 288165 - DNA, 30 bp, Artificial Sequence
  Synthetic oligonucleotide
cagaagatgtccgctgatgccctgtacgac

SEQ ID NO: 288166 - DNA, 30 bp, Artificial Sequence
  Synthetic oligonucleotide
atatagaagatagtagtatttgtgtacgac

SEQ ID NO: 288167 - DNA, 30 bp, Artificial Sequence
  Synthetic oligonucleotide
tgtggacccgtctaaaggctttgaaccgac

SEQ ID NO: 288168 - DNA, 30 bp, Artificial Sequence
  Synthetic oligonucleotide
gggtgcttagctccacgtaatataaccgac

SEQ ID NO: 288169 - DNA, 30 bp, Artificial Sequence
  Synthetic oligonucleotide
tgcggcaatcgtaaacgagcacagaccgac

SEQ ID NO: 288170 - DNA, 30 bp, Artificial Sequence
  Synthetic oligonucleotide
aagtcaaactggggggtataatgtcccgac

SEQ ID NO: 288171 - DNA, 30 bp, Artificial Sequence
  Synthetic oligonucleotide
aagatgggacataacgaaaactgtcccgac

SEQ ID NO: 288172 - DNA, 30 bp, Artificial Sequence
  Synthetic oligonucleotide
tggggatctgtatttcaaattaatgccgac

SEQ ID NO: 288173 - DNA, 30 bp, Artificial Sequence
  Synthetic oligonucleotide
gtcatattactctgattgtcgcgtgccgac

SEQ ID NO: 288174 - DNA, 30 bp, Artificial Sequence
  Synthetic oligonucleotide
tacgggcagagcgatgcttcgtcatccgac

SEQ ID NO: 288175 - DNA, 30 bp, Artificial Sequence
  Synthetic oligonucleotide
attgatagcgttgaacaagggatctccgac

SEQ ID NO: 288176 - DNA, 30 bp, Artificial Sequence
  Synthetic oligonucleotide
cattatactccgccatacaccacgtccgac

SEQ ID NO: 288177 - DNA, 30 bp, Artificial Sequence
  Synthetic oligonucleotide
actggttgctcttcgcaactagcgtccgac

SEQ ID NO: 288178 - DNA, 30 bp, Artificial Sequence
  Synthetic oligonucleotide
gagagctacgatcatgaacgtacaagcgac

SEQ ID NO: 288179 - DNA, 31 bp, Artificial Sequence
  Synthetic oligonucleotide
gctagattattaagttgctttagcaagcgac

SEQ ID NO: 288180 - DNA, 30 bp, Artificial Sequence
  Synthetic oligonucleotide
acccaaaatactacaagactgtcaagcgac

SEQ ID NO: 288181 - DNA, 30 bp, Artificial Sequence
  Synthetic oligonucleotide
agccaatcgctagctttaaacggaagcgac

SEQ ID NO: 288182 - DNA, 30 bp, Artificial Sequence
  Synthetic oligonucleotide
tcgggaataggagacgctccggacagcgac

SEQ ID NO: 288183 - DNA, 30 bp, Artificial Sequence
  Synthetic oligonucleotide
tacgcacaaccgagacgagcctcacgcgac

SEQ ID NO: 288184 - DNA, 30 bp, Artificial Sequence
  Synthetic oligonucleotide
tcaaagtcgagtcattacgtaggacgcgac

SEQ ID NO: 288185 - DNA, 30 bp, Artificial Sequence
  Synthetic oligonucleotide
cacgcgtgtttagcatggccgggacgcgac

SEQ ID NO: 288186 - DNA, 30 bp, Artificial Sequence
  Synthetic oligonucleotide
gggtctatgcagcatggaaagcagcgcgac

SEQ ID NO: 288187 - DNA, 30 bp, Artificial Sequence
  Synthetic oligonucleotide
ggcattattgaatggataaagcggcgcgac

SEQ ID NO: 288188 - DNA, 30 bp, Artificial Sequence
  Synthetic oligonucleotide
gaagaattcatttcttttccggtcggcgac

SEQ ID NO: 288189 - DNA, 30 bp, Artificial Sequence
  Synthetic oligonucleotide
tttgcggatcccgcatatactttcggcgac

SEQ ID NO: 288190 - DNA, 30 bp, Artificial Sequence
  Synthetic oligonucleotide
ccggtacttcattcattaacgtgtggcgac

SEQ ID NO: 288191 - DNA, 30 bp, Artificial Sequence
  Synthetic oligonucleotide
tggggttgcctgggaaatttgattggcgac

SEQ ID NO: 288192 - DNA, 30 bp, Artificial Sequence
  Synthetic oligonucleotide
cgcttacctagacaatgctgtcttggcgac

SEQ ID NO: 288193 - DNA, 30 bp, Artificial Sequence
  Synthetic oligonucleotide
gtcgggaaggatgatgctcggagatgcgac

SEQ ID NO: 288194 - DNA, 30 bp, Artificial Sequence
  Synthetic oligonucleotide
ggggaccctaatggaatctgcagctgcgac

SEQ ID NO: 288195 - DNA, 30 bp, Artificial Sequence
  Synthetic oligonucleotide
ctaggtccggggatgtaagggcagtgcgac

SEQ ID NO: 288196 - DNA, 30 bp, Artificial Sequence
  Synthetic oligonucleotide
gtcgttagtctaggattggccgagtgcgac

SEQ ID NO: 288197 - DNA, 30 bp, Artificial Sequence
  Synthetic oligonucleotide
gccccgttccacttacctcaactgtgcgac

SEQ ID NO: 288198 - DNA, 31 bp, Artificial Sequence
  Synthetic oligonucleotide
gacggcccttctggctgagatggattgcgac

SEQ ID NO: 288199 - DNA, 30 bp, Artificial Sequence
  Synthetic oligonucleotide
agtgctaagaagccagctttcgtttgcgac

SEQ ID NO: 288200 - DNA, 30 bp, Artificial Sequence
  Synthetic oligonucleotide
gtatggattcgagtcgaaagtagaatcgac

SEQ ID NO: 288201 - DNA, 30 bp, Artificial Sequence
  Synthetic oligonucleotide
taacgatgacatggctgtcattccatcgac

SEQ ID NO: 288202 - DNA, 30 bp, Artificial Sequence
  Synthetic oligonucleotide
gcggcgctgggaaccgatcacggcatcgac

SEQ ID NO: 288203 - DNA, 30 bp, Artificial Sequence
  Synthetic oligonucleotide
gactgaattgcaatgctacgtgagatcgac

SEQ ID NO: 288204 - DNA, 30 bp, Artificial Sequence
  Synthetic oligonucleotide
aggttgtgggtatatcggacgaacctcgac

SEQ ID NO: 288205 - DNA, 30 bp, Artificial Sequence
  Synthetic oligonucleotide
aaggattcatggttagtatttgatctcgac

SEQ ID NO: 288206 - DNA, 31 bp, Artificial Sequence
  Synthetic oligonucleotide
tcggggtaatgggggtggcgcggtagtcgac

SEQ ID NO: 288207 - DNA, 30 bp, Artificial Sequence
  Synthetic oligonucleotide
gacgaaggcgggtctaggccattagtcgac

SEQ ID NO: 288208 - DNA, 30 bp, Artificial Sequence
  Synthetic oligonucleotide
gggtagccgaatgggtgttcccccgtcgac

SEQ ID NO: 288209 - DNA, 30 bp, Artificial Sequence
  Synthetic oligonucleotide
gactcgatatcagcgcactgagatgtcgac

SEQ ID NO: 288210 - DNA, 30 bp, Artificial Sequence
  Synthetic oligonucleotide
gcgtatggaaatagactcgtttgtgtcgac

SEQ ID NO: 288211 - DNA, 30 bp, Artificial Sequence
  Synthetic oligonucleotide
gcagaacaccagtggggtcgagaattcgac

SEQ ID NO: 288212 - DNA, 30 bp, Artificial Sequence
  Synthetic oligonucleotide
aggcgatcggatgcgtaacacgaattcgac

SEQ ID NO: 288213 - DNA, 30 bp, Artificial Sequence
  Synthetic oligonucleotide
tagctatccgctggaacgactacattcgac

SEQ ID NO: 288214 - DNA, 30 bp, Artificial Sequence
  Synthetic oligonucleotide
gagaaggcatattgactacgaatgttcgac

SEQ ID NO: 288215 - DNA, 30 bp, Artificial Sequence
  Synthetic oligonucleotide
atagtctgagcattgacaactactttcgac

SEQ ID NO: 288216 - DNA, 30 bp, Artificial Sequence
  Synthetic oligonucleotide
gtcggcttagcggacaaataagctttcgac

SEQ ID NO: 288217 - DNA, 30 bp, Artificial Sequence
  Synthetic oligonucleotide
agatcgatgtacattaactggtaaaaggac

SEQ ID NO: 288218 - DNA, 30 bp, Artificial Sequence
  Synthetic oligonucleotide
ataatcccagtacgtgagactgccaaggac

SEQ ID NO: 288219 - DNA, 30 bp, Artificial Sequence
  Synthetic oligonucleotide
atgcaacctcgtgttcacaaagcgaaggac

SEQ ID NO: 288220 - DNA, 30 bp, Artificial Sequence
  Synthetic oligonucleotide
gtatgtggcggagcgcagtaaaataaggac

SEQ ID NO: 288221 - DNA, 30 bp, Artificial Sequence
  Synthetic oligonucleotide
caggcatgtaagccgcgtaatcctaaggac

SEQ ID NO: 288222 - DNA, 30 bp, Artificial Sequence
  Synthetic oligonucleotide
tctggtcactgatggtaaataagtaaggac

SEQ ID NO: 288223 - DNA, 30 bp, Artificial Sequence
  Synthetic oligonucleotide
atgctaaactagggaagagtacgtaaggac

SEQ ID NO: 288224 - DNA, 30 bp, Artificial Sequence
  Synthetic oligonucleotide
tacccatatactatgagtgcttgtaaggac

SEQ ID NO: 288225 - DNA, 30 bp, Artificial Sequence
  Synthetic oligonucleotide
gagctctgaggatattattcgtaacaggac

SEQ ID NO: 288226 - DNA, 30 bp, Artificial Sequence
  Synthetic oligonucleotide
ttggtatattattggttgggggaccaggac

SEQ ID NO: 288227 - DNA, 30 bp, Artificial Sequence
  Synthetic oligonucleotide
ttttaaggtttgcaagtggcgtcgcaggac

SEQ ID NO: 288228 - DNA, 30 bp, Artificial Sequence
  Synthetic oligonucleotide
tatcgtgagcggtgcaatcacaaagaggac

SEQ ID NO: 288229 - DNA, 30 bp, Artificial Sequence
  Synthetic oligonucleotide
gccgttctgtttaaagctacgaaagaggac

SEQ ID NO: 288230 - DNA, 30 bp, Artificial Sequence
  Synthetic oligonucleotide
ctcgccctagacttagcatgtagcgaggac

SEQ ID NO: 288231 - DNA, 30 bp, Artificial Sequence
  Synthetic oligonucleotide
gaatgaacgtcggaggttcattgggaggac

SEQ ID NO: 288232 - DNA, 30 bp, Artificial Sequence
  Synthetic oligonucleotide
aactaattcggaacaccgttccatgaggac

SEQ ID NO: 288233 - DNA, 30 bp, Artificial Sequence
  Synthetic oligonucleotide
ctcgccgcaggatacggagtcgctgaggac

SEQ ID NO: 288234 - DNA, 30 bp, Artificial Sequence
  Synthetic oligonucleotide
cattgctagatgggaacactgtaataggac

SEQ ID NO: 288235 - DNA, 30 bp, Artificial Sequence
  Synthetic oligonucleotide
cccattcgcaaataggtcagaatataggac

SEQ ID NO: 288236 - DNA, 30 bp, Artificial Sequence
  Synthetic oligonucleotide
taaactcgacattccgtctagccctaggac

SEQ ID NO: 288237 - DNA, 30 bp, Artificial Sequence
  Synthetic oligonucleotide
ttagagcggctctgcacttgatggtaggac

SEQ ID NO: 288238 - DNA, 30 bp, Artificial Sequence
  Synthetic oligonucleotide
cgtagggaaagcttatgatactcaacggac

SEQ ID NO: 288239 - DNA, 30 bp, Artificial Sequence
  Synthetic oligonucleotide
atcaaggtcgaaggccaggaacatacggac

SEQ ID NO: 288240 - DNA, 30 bp, Artificial Sequence
  Synthetic oligonucleotide
gcgtataaggattcataggaggctacggac

SEQ ID NO: 288241 - DNA, 30 bp, Artificial Sequence
  Synthetic oligonucleotide
tacagtcggccaaattacacgattacggac

SEQ ID NO: 288242 - DNA, 30 bp, Artificial Sequence
  Synthetic oligonucleotide
ggcatggacaaattttattagcttacggac

SEQ ID NO: 288243 - DNA, 30 bp, Artificial Sequence
  Synthetic oligonucleotide
tccgaaacaataggttgcacctttacggac

SEQ ID NO: 288244 - DNA, 30 bp, Artificial Sequence
  Synthetic oligonucleotide
ggacgtatctagactctccctaagccggac

SEQ ID NO: 288245 - DNA, 30 bp, Artificial Sequence
  Synthetic oligonucleotide
ttatgtcctatgcataactgccggccggac

SEQ ID NO: 288246 - DNA, 30 bp, Artificial Sequence
  Synthetic oligonucleotide
ttaagatacgagggtataatgcatccggac

SEQ ID NO: 288247 - DNA, 30 bp, Artificial Sequence
  Synthetic oligonucleotide
tcactatgtttcgttcccccctatccggac

SEQ ID NO: 288248 - DNA, 30 bp, Artificial Sequence
  Synthetic oligonucleotide
ttaaggtaaatgagttgtatactcgcggac

SEQ ID NO: 288249 - DNA, 30 bp, Artificial Sequence
  Synthetic oligonucleotide
atattagggtgatagtatggtagggcggac

SEQ ID NO: 288250 - DNA, 30 bp, Artificial Sequence
  Synthetic oligonucleotide
accggaccataatacgttgtccgggcggac

SEQ ID NO: 288251 - DNA, 30 bp, Artificial Sequence
  Synthetic oligonucleotide
tgtgagaacggtaagtcactcttggcggac

SEQ ID NO: 288252 - DNA, 30 bp, Artificial Sequence
  Synthetic oligonucleotide
ggcgtgaggagctctaaacatgatgcggac

SEQ ID NO: 288253 - DNA, 30 bp, Artificial Sequence
  Synthetic oligonucleotide
aaaattaccgaataaacagcacactcggac

SEQ ID NO: 288254 - DNA, 30 bp, Artificial Sequence
  Synthetic oligonucleotide
ggactatcgggtgtttgccggcattcggac

SEQ ID NO: 288255 - DNA, 30 bp, Artificial Sequence
  Synthetic oligonucleotide
ggactgggagaacagttgccatattcggac

SEQ ID NO: 288256 - DNA, 30 bp, Artificial Sequence
  Synthetic oligonucleotide
caacaaattggccgcatcctcacttcggac

SEQ ID NO: 288257 - DNA, 30 bp, Artificial Sequence
  Synthetic oligonucleotide
gcggcggaacttcccgttagatgttcggac

SEQ ID NO: 288258 - DNA, 30 bp, Artificial Sequence
  Synthetic oligonucleotide
ggaagccgcacggccaaagagctttcggac

SEQ ID NO: 288259 - DNA, 30 bp, Artificial Sequence
  Synthetic oligonucleotide
cagcgtttggtgatcagcgagtaaagggac

SEQ ID NO: 288260 - DNA, 30 bp, Artificial Sequence
  Synthetic oligonucleotide
tcaggatatttgcgcaattatataagggac

SEQ ID NO: 288261 - DNA, 30 bp, Artificial Sequence
  Synthetic oligonucleotide
agtttccagtcccaaaggcattgcagggac

SEQ ID NO: 288262 - DNA, 30 bp, Artificial Sequence
  Synthetic oligonucleotide
gcattgaaggccggtatgggttgcagggac

SEQ ID NO: 288263 - DNA, 30 bp, Artificial Sequence
  Synthetic oligonucleotide
agacatcttgaaaaaaggctacagagggac

SEQ ID NO: 288264 - DNA, 30 bp, Artificial Sequence
  Synthetic oligonucleotide
taacagtacttggtgtaattcagacgggac

SEQ ID NO: 288265 - DNA, 30 bp, Artificial Sequence
  Synthetic oligonucleotide
agctgcctttcacctcaggaacgacgggac

SEQ ID NO: 288266 - DNA, 30 bp, Artificial Sequence
  Synthetic oligonucleotide
cttgacggcggcggtggtgaattccgggac

SEQ ID NO: 288267 - DNA, 30 bp, Artificial Sequence
  Synthetic oligonucleotide
ggaattcgggcggcaaaagaatggcgggac

SEQ ID NO: 288268 - DNA, 30 bp, Artificial Sequence
  Synthetic oligonucleotide
atattcctactcctaataatctggcgggac

SEQ ID NO: 288269 - DNA, 30 bp, Artificial Sequence
  Synthetic oligonucleotide
tacaccctactaatttggttagatcgggac

SEQ ID NO: 288270 - DNA, 30 bp, Artificial Sequence
  Synthetic oligonucleotide
acattctgtagatagcggcactatcgggac

SEQ ID NO: 288271 - DNA, 30 bp, Artificial Sequence
  Synthetic oligonucleotide
tcatttacgcggccacggcgaacaggggac

SEQ ID NO: 288272 - DNA, 30 bp, Artificial Sequence
  Synthetic oligonucleotide
gtgtcatagagcgtcaggagatacggggac

SEQ ID NO: 288273 - DNA, 30 bp, Artificial Sequence
  Synthetic oligonucleotide
tcccaccgagagcccacggttgccggggac

SEQ ID NO: 288274 - DNA, 30 bp, Artificial Sequence
  Synthetic oligonucleotide
ttaaagcgaagacttataggaagcggggac

SEQ ID NO: 288275 - DNA, 30 bp, Artificial Sequence
  Synthetic oligonucleotide
catcaatactgtaacggccctagcggggac

SEQ ID NO: 288276 - DNA, 30 bp, Artificial Sequence
  Synthetic oligonucleotide
ctaatgttgatgtatgttagatgcggggac

SEQ ID NO: 288277 - DNA, 30 bp, Artificial Sequence
  Synthetic oligonucleotide
ctattctgtgaacagtaactccctggggac

SEQ ID NO: 288278 - DNA, 30 bp, Artificial Sequence
  Synthetic oligonucleotide
aagagtgtcggaaagctttccgctggggac

SEQ ID NO: 288279 - DNA, 30 bp, Artificial Sequence
  Synthetic oligonucleotide
acgttcgtatttaaagtcaaaagtggggac

SEQ ID NO: 288280 - DNA, 30 bp, Artificial Sequence
  Synthetic oligonucleotide
cacggcatcttaaagatcccagttggggac

SEQ ID NO: 288281 - DNA, 30 bp, Artificial Sequence
  Synthetic oligonucleotide
aaggtaatcagatgaaatcaaaaatgggac

SEQ ID NO: 288282 - DNA, 30 bp, Artificial Sequence
  Synthetic oligonucleotide
cctctaaacgacagccttgaataatgggac

SEQ ID NO: 288283 - DNA, 30 bp, Artificial Sequence
  Synthetic oligonucleotide
tctcccatccatgttcagtatcactgggac

SEQ ID NO: 288284 - DNA, 30 bp, Artificial Sequence
  Synthetic oligonucleotide
acggaggctctaatattattttcctgggac

SEQ ID NO: 288285 - DNA, 30 bp, Artificial Sequence
  Synthetic oligonucleotide
cgttaggaccttggcgaagcctcgtgggac

SEQ ID NO: 288286 - DNA, 30 bp, Artificial Sequence
  Synthetic oligonucleotide
tgcgtttcggtgtgacgtctgatgtgggac

SEQ ID NO: 288287 - DNA, 30 bp, Artificial Sequence
  Synthetic oligonucleotide
caaagcattccaactggatgaagttgggac

SEQ ID NO: 288288 - DNA, 30 bp, Artificial Sequence
  Synthetic oligonucleotide
ggacttccgctccagggtaagctttgggac

SEQ ID NO: 288289 - DNA, 28 bp, Artificial Sequence
  Synthetic oligonucleotide
cgggggacggagttcattgcaaatggac

SEQ ID NO: 288290 - DNA, 30 bp, Artificial Sequence
  Synthetic oligonucleotide
aaaagggatcccaagcacttaccaatggac

SEQ ID NO: 288291 - DNA, 30 bp, Artificial Sequence
  Synthetic oligonucleotide
ggacaagctaccgcaacccagcctatggac

SEQ ID NO: 288292 - DNA, 30 bp, Artificial Sequence
  Synthetic oligonucleotide
aggaaaggaccagcttccggaaacctggac

SEQ ID NO: 288293 - DNA, 30 bp, Artificial Sequence
  Synthetic oligonucleotide
aaatggagtgtgtgcctgacacgtctggac

SEQ ID NO: 288294 - DNA, 30 bp, Artificial Sequence
  Synthetic oligonucleotide
tctcagaactgcttatgcatcattctggac

SEQ ID NO: 288295 - DNA, 30 bp, Artificial Sequence
  Synthetic oligonucleotide
tcggcgccaacaatactgacccttctggac

SEQ ID NO: 288296 - DNA, 30 bp, Artificial Sequence
  Synthetic oligonucleotide
cgcacatgcttccttaatcccaaagtggac

SEQ ID NO: 288297 - DNA, 30 bp, Artificial Sequence
  Synthetic oligonucleotide
caattcctgatacaaaccggcgaagtggac

SEQ ID NO: 288298 - DNA, 30 bp, Artificial Sequence
  Synthetic oligonucleotide
agaatccgacggcattacatgttagtggac

SEQ ID NO: 288299 - DNA, 30 bp, Artificial Sequence
  Synthetic oligonucleotide
ggcaaacggacgggagtacctaacgtggac

SEQ ID NO: 288300 - DNA, 30 bp, Artificial Sequence
  Synthetic oligonucleotide
tacacataaccctttaggaagttggtggac

SEQ ID NO: 288301 - DNA, 30 bp, Artificial Sequence
  Synthetic oligonucleotide
gaccaccatcataaccttcagcgcttggac

SEQ ID NO: 288302 - DNA, 30 bp, Artificial Sequence
  Synthetic oligonucleotide
aatctggtgtttggccagaccgagttggac

SEQ ID NO: 288303 - DNA, 30 bp, Artificial Sequence
  Synthetic oligonucleotide
ataacttcagagagttcagatagaaatgac

SEQ ID NO: 288304 - DNA, 30 bp, Artificial Sequence
  Synthetic oligonucleotide
agtataccgtaccagtggactagcaatgac

SEQ ID NO: 288305 - DNA, 30 bp, Artificial Sequence
  Synthetic oligonucleotide
taaatgaaggaggaagcaatttgcaatgac

SEQ ID NO: 288306 - DNA, 30 bp, Artificial Sequence
  Synthetic oligonucleotide
ttccataccacttaagaatgcactaatgac

SEQ ID NO: 288307 - DNA, 30 bp, Artificial Sequence
  Synthetic oligonucleotide
agagcgaggcctacactaggacctaatgac

SEQ ID NO: 288308 - DNA, 30 bp, Artificial Sequence
  Synthetic oligonucleotide
tttgtggctgaggagcaggttacacatgac

SEQ ID NO: 288309 - DNA, 30 bp, Artificial Sequence
  Synthetic oligonucleotide
tagagataatctatggctgaatcacatgac

SEQ ID NO: 288310 - DNA, 30 bp, Artificial Sequence
  Synthetic oligonucleotide
aggaaaaacgttggtgaaaacttacatgac

SEQ ID NO: 288311 - DNA, 30 bp, Artificial Sequence
  Synthetic oligonucleotide
tgcattaagaagactggagccatagatgac

SEQ ID NO: 288312 - DNA, 30 bp, Artificial Sequence
  Synthetic oligonucleotide
gttgcatggtaccgtgcccggctagatgac

SEQ ID NO: 288313 - DNA, 30 bp, Artificial Sequence
  Synthetic oligonucleotide
ctgctcgcctcccaataaccgtacgatgac

SEQ ID NO: 288314 - DNA, 30 bp, Artificial Sequence
  Synthetic oligonucleotide
cagcattttcagaaacgaccttcatatgac

SEQ ID NO: 288315 - DNA, 30 bp, Artificial Sequence
  Synthetic oligonucleotide
ggtggataaatttttgtttaccactatgac

SEQ ID NO: 288316 - DNA, 30 bp, Artificial Sequence
  Synthetic oligonucleotide
gagacagggagtaaaccccatacctatgac

SEQ ID NO: 288317 - DNA, 30 bp, Artificial Sequence
  Synthetic oligonucleotide
cgatggcattcttagtgagatttgtatgac

SEQ ID NO: 288318 - DNA, 30 bp, Artificial Sequence
  Synthetic oligonucleotide
tcgggcataggcagccccccacgttatgac

SEQ ID NO: 288319 - DNA, 30 bp, Artificial Sequence
  Synthetic oligonucleotide
acttaatttaccgtagggttgacaactgac

SEQ ID NO: 288320 - DNA, 30 bp, Artificial Sequence
  Synthetic oligonucleotide
gaaccggggttaattatgccgaacactgac

SEQ ID NO: 288321 - DNA, 30 bp, Artificial Sequence
  Synthetic oligonucleotide
ggacacaaggctgtaggcttagctactgac

SEQ ID NO: 288322 - DNA, 30 bp, Artificial Sequence
  Synthetic oligonucleotide
ttcgaggcgaaggacccgtgcggtactgac

SEQ ID NO: 288323 - DNA, 30 bp, Artificial Sequence
  Synthetic oligonucleotide
attagggcgaggacgagagatggtactgac

SEQ ID NO: 288324 - DNA, 30 bp, Artificial Sequence
  Synthetic oligonucleotide
cgtcagtaaccgctggctgaaaaccctgac

SEQ ID NO: 288325 - DNA, 30 bp, Artificial Sequence
  Synthetic oligonucleotide
acgcccagttcgcatctgcatctgcctgac

SEQ ID NO: 288326 - DNA, 30 bp, Artificial Sequence
  Synthetic oligonucleotide
ggatacaggggttctgggattgtggctgac

SEQ ID NO: 288327 - DNA, 30 bp, Artificial Sequence
  Synthetic oligonucleotide
cgtatgccagcacatctcaagcactctgac

SEQ ID NO: 288328 - DNA, 30 bp, Artificial Sequence
  Synthetic oligonucleotide
agactgagatgcaagtgttgcacctctgac

SEQ ID NO: 288329 - DNA, 30 bp, Artificial Sequence
  Synthetic oligonucleotide
tatgcacatgcatactacatagtgtctgac

SEQ ID NO: 288330 - DNA, 30 bp, Artificial Sequence
  Synthetic oligonucleotide
gttcacggcaggcaatcacttagttctgac

SEQ ID NO: 288331 - DNA, 30 bp, Artificial Sequence
  Synthetic oligonucleotide
aggaaccgtacaggcgggatgaagagtgac

SEQ ID NO: 288332 - DNA, 30 bp, Artificial Sequence
  Synthetic oligonucleotide
aaactacactttagatcattgggacgtgac

SEQ ID NO: 288333 - DNA, 30 bp, Artificial Sequence
  Synthetic oligonucleotide
gggatctccgggtatgcgcagcaccgtgac

SEQ ID NO: 288334 - DNA, 30 bp, Artificial Sequence
  Synthetic oligonucleotide
gggacctaccccttttcaagggtgcgtgac

SEQ ID NO: 288335 - DNA, 30 bp, Artificial Sequence
  Synthetic oligonucleotide
agacaatgccactattttattagtcgtgac

SEQ ID NO: 288336 - DNA, 30 bp, Artificial Sequence
  Synthetic oligonucleotide
ggtatctggagacggatatgtgttcgtgac

SEQ ID NO: 288337 - DNA, 30 bp, Artificial Sequence
  Synthetic oligonucleotide
tgcaacatctcgagtcgagtcaacggtgac

SEQ ID NO: 288338 - DNA, 30 bp, Artificial Sequence
  Synthetic oligonucleotide
catcgtgatgatcggggtcaggacggtgac

SEQ ID NO: 288339 - DNA, 30 bp, Artificial Sequence
  Synthetic oligonucleotide
ggtcgtgatgacggaacatagtacggtgac

SEQ ID NO: 288340 - DNA, 30 bp, Artificial Sequence
  Synthetic oligonucleotide
caggggttgccggtatcattggccggtgac

SEQ ID NO: 288341 - DNA, 30 bp, Artificial Sequence
  Synthetic oligonucleotide
aagagttagtcgtgaacaacccaatgtgac

SEQ ID NO: 288342 - DNA, 30 bp, Artificial Sequence
  Synthetic oligonucleotide
tgtcatgatatgtattgtttgtcctgtgac

SEQ ID NO: 288343 - DNA, 30 bp, Artificial Sequence
  Synthetic oligonucleotide
ctagtttaggattaaaggctagtgtgtgac

SEQ ID NO: 288344 - DNA, 30 bp, Artificial Sequence
  Synthetic oligonucleotide
agcgaaagcgtgggcccgggtaaaattgac

SEQ ID NO: 288345 - DNA, 30 bp, Artificial Sequence
  Synthetic oligonucleotide
cattaagaatgtaaagtcaatcaaattgac

SEQ ID NO: 288346 - DNA, 30 bp, Artificial Sequence
  Synthetic oligonucleotide
ggtagtaccgatttctgctgcctcattgac

SEQ ID NO: 288347 - DNA, 30 bp, Artificial Sequence
  Synthetic oligonucleotide
accctgcgtttaaagcgtgaagatattgac

SEQ ID NO: 288348 - DNA, 30 bp, Artificial Sequence
  Synthetic oligonucleotide
attgcgcaaagcacgtacactactattgac

SEQ ID NO: 288349 - DNA, 30 bp, Artificial Sequence
  Synthetic oligonucleotide
tactaccgtattcaacaggaaggtattgac

SEQ ID NO: 288350 - DNA, 30 bp, Artificial Sequence
  Synthetic oligonucleotide
ggtattgacatcgagggatctgcacttgac

SEQ ID NO: 288351 - DNA, 30 bp, Artificial Sequence
  Synthetic oligonucleotide
aaagtacctcatactgatagacgacttgac

SEQ ID NO: 288352 - DNA, 30 bp, Artificial Sequence
  Synthetic oligonucleotide
tccttgactggtctgcctactatccttgac

SEQ ID NO: 288353 - DNA, 30 bp, Artificial Sequence
  Synthetic oligonucleotide
agtcgtcgtattaagacttgcgagcttgac

SEQ ID NO: 288354 - DNA, 30 bp, Artificial Sequence
  Synthetic oligonucleotide
ttcaggtcagctacaccagtaaggcttgac

SEQ ID NO: 288355 - DNA, 30 bp, Artificial Sequence
  Synthetic oligonucleotide
gtcccagtctggaaatgataccatcttgac

SEQ ID NO: 288356 - DNA, 30 bp, Artificial Sequence
  Synthetic oligonucleotide
ctaattcctggctacctacgggctcttgac

SEQ ID NO: 288357 - DNA, 30 bp, Artificial Sequence
  Synthetic oligonucleotide
aacacaaccgaataagtgcctaaagttgac

SEQ ID NO: 288358 - DNA, 31 bp, Artificial Sequence
  Synthetic oligonucleotide
acaaattaaaacgctttcatccgtagttgac

SEQ ID NO: 288359 - DNA, 30 bp, Artificial Sequence
  Synthetic oligonucleotide
tgattaatttctactctgagcctcgttgac

SEQ ID NO: 288360 - DNA, 30 bp, Artificial Sequence
  Synthetic oligonucleotide
tgcagaataaagtttagggttgtcgttgac

SEQ ID NO: 288361 - DNA, 30 bp, Artificial Sequence
  Synthetic oligonucleotide
actagatctcttagtttactcccggttgac

SEQ ID NO: 288362 - DNA, 30 bp, Artificial Sequence
  Synthetic oligonucleotide
gggaatttgcaagtaaaacaccttgttgac

SEQ ID NO: 288363 - DNA, 30 bp, Artificial Sequence
  Synthetic oligonucleotide
gaaaacaaggaaccaattatacgatttgac

SEQ ID NO: 288364 - DNA, 30 bp, Artificial Sequence
  Synthetic oligonucleotide
gtaactaggtgtcgagcgagcgactttgac

SEQ ID NO: 288365 - DNA, 30 bp, Artificial Sequence
  Synthetic oligonucleotide
agctcctacttcatcatcgtgtcctttgac

SEQ ID NO: 288366 - DNA, 30 bp, Artificial Sequence
  Synthetic oligonucleotide
taaatcggctccaaaatgccagcgtttgac

SEQ ID NO: 288367 - DNA, 30 bp, Artificial Sequence
  Synthetic oligonucleotide
gctcaatcgtctatttatgttgcgtttgac

SEQ ID NO: 288368 - DNA, 30 bp, Artificial Sequence
  Synthetic oligonucleotide
tcaggtcatcaaagtaattttgcgtttgac

SEQ ID NO: 288369 - DNA, 30 bp, Artificial Sequence
  Synthetic oligonucleotide
cgggcaggcggcggttagcaggtgtttgac

SEQ ID NO: 288370 - DNA, 30 bp, Artificial Sequence
  Synthetic oligonucleotide
tcataaaagaagggttgctgaccaaaatac

SEQ ID NO: 288371 - DNA, 30 bp, Artificial Sequence
  Synthetic oligonucleotide
aacgattgtttgatcttgcatgcaaaatac

SEQ ID NO: 288372 - DNA, 30 bp, Artificial Sequence
  Synthetic oligonucleotide
ctggaatgacgagagaggtggataaaatac

SEQ ID NO: 288373 - DNA, 30 bp, Artificial Sequence
  Synthetic oligonucleotide
aatgcgtcttagttgggccacgtaaaatac

SEQ ID NO: 288374 - DNA, 30 bp, Artificial Sequence
  Synthetic oligonucleotide
tagggagatattggttgatgtaacaaatac

SEQ ID NO: 288375 - DNA, 30 bp, Artificial Sequence
  Synthetic oligonucleotide
ggggattaggttttgacgcgtgacaaatac

SEQ ID NO: 288376 - DNA, 30 bp, Artificial Sequence
  Synthetic oligonucleotide
atcaattgtgtgcgaacatagaccaaatac

SEQ ID NO: 288377 - DNA, 30 bp, Artificial Sequence
  Synthetic oligonucleotide
ccgccatatgctacacaagtaggcaaatac

SEQ ID NO: 288378 - DNA, 30 bp, Artificial Sequence
  Synthetic oligonucleotide
tgtctcgctgaagggctccagatcaaatac

SEQ ID NO: 288379 - DNA, 30 bp, Artificial Sequence
  Synthetic oligonucleotide
gacggcggtgcggcttgattgcagaaatac

SEQ ID NO: 288380 - DNA, 30 bp, Artificial Sequence
  Synthetic oligonucleotide
cgctatatatttatggcaatttaccaatac

SEQ ID NO: 288381 - DNA, 30 bp, Artificial Sequence
  Synthetic oligonucleotide
tgaagtccaggctcattacagagccaatac

SEQ ID NO: 288382 - DNA, 30 bp, Artificial Sequence
  Synthetic oligonucleotide
acactccacaattgaagcggtactcaatac

SEQ ID NO: 288383 - DNA, 30 bp, Artificial Sequence
  Synthetic oligonucleotide
tcaatcatccatgcccatggaagtcaatac

SEQ ID NO: 288384 - DNA, 30 bp, Artificial Sequence
  Synthetic oligonucleotide
ctgatcctgtttaacacatttgcagaatac

SEQ ID NO: 288385 - DNA, 30 bp, Artificial Sequence
  Synthetic oligonucleotide
cgtgaacggttaaagtgaacgtgagaatac

SEQ ID NO: 288386 - DNA, 30 bp, Artificial Sequence
  Synthetic oligonucleotide
gatggagcgattagtcgcggtcacgaatac

SEQ ID NO: 288387 - DNA, 30 bp, Artificial Sequence
  Synthetic oligonucleotide
gaaggaagctcgatgtttcggggcgaatac

SEQ ID NO: 288388 - DNA, 30 bp, Artificial Sequence
  Synthetic oligonucleotide
agcaacggaatcgtcaaatcctgcgaatac

SEQ ID NO: 288389 - DNA, 30 bp, Artificial Sequence
  Synthetic oligonucleotide
gttgagcgttgtcgtcatagttgcgaatac

SEQ ID NO: 288390 - DNA, 30 bp, Artificial Sequence
  Synthetic oligonucleotide
gacaggccgacgaccgaactggatgaatac

SEQ ID NO: 288391 - DNA, 30 bp, Artificial Sequence
  Synthetic oligonucleotide
gcaggttgagctgaatttcagcaataatac

SEQ ID NO: 288392 - DNA, 30 bp, Artificial Sequence
  Synthetic oligonucleotide
gggcaacgcatttcaatttaggagtaatac

SEQ ID NO: 288393 - DNA, 30 bp, Artificial Sequence
  Synthetic oligonucleotide
tactagtgtgccaaagcgaacccgtaatac

SEQ ID NO: 288394 - DNA, 30 bp, Artificial Sequence
  Synthetic oligonucleotide
tgaattgagagcccttgtgccccgtaatac

SEQ ID NO: 288395 - DNA, 30 bp, Artificial Sequence
  Synthetic oligonucleotide
aaaagtggtgtaagcacgtgtacttaatac

SEQ ID NO: 288396 - DNA, 30 bp, Artificial Sequence
  Synthetic oligonucleotide
tagggacacgtaggagcacatttttaatac

SEQ ID NO: 288397 - DNA, 30 bp, Artificial Sequence
  Synthetic oligonucleotide
cctccggtaaagacagttggaccaacatac

SEQ ID NO: 288398 - DNA, 30 bp, Artificial Sequence
  Synthetic oligonucleotide
cctgactccagcggggggtgctacacatac

SEQ ID NO: 288399 - DNA, 30 bp, Artificial Sequence
  Synthetic oligonucleotide
gtaccagaacatgtttcctccatcacatac

SEQ ID NO: 288400 - DNA, 30 bp, Artificial Sequence
  Synthetic oligonucleotide
gacttgcaatatatgcatgcccttacatac

SEQ ID NO: 288401 - DNA, 30 bp, Artificial Sequence
  Synthetic oligonucleotide
aaggttccagggcgagaaacaatgccatac

SEQ ID NO: 288402 - DNA, 30 bp, Artificial Sequence
  Synthetic oligonucleotide
tacaagagagatggagtcgtgcatccatac

SEQ ID NO: 288403 - DNA, 30 bp, Artificial Sequence
  Synthetic oligonucleotide
tggagttcaacccttgcctgaagtccatac

SEQ ID NO: 288404 - DNA, 30 bp, Artificial Sequence
  Synthetic oligonucleotide
gcgtcttcatttaaatccacgaaagcatac

SEQ ID NO: 288405 - DNA, 30 bp, Artificial Sequence
  Synthetic oligonucleotide
cctccgccgtagtctagtctccgcgcatac

SEQ ID NO: 288406 - DNA, 30 bp, Artificial Sequence
  Synthetic oligonucleotide
gttgggtgccggctgtactgtcgcgcatac

SEQ ID NO: 288407 - DNA, 30 bp, Artificial Sequence
  Synthetic oligonucleotide
aagcacagacgtgattcagtctctgcatac

SEQ ID NO: 288408 - DNA, 30 bp, Artificial Sequence
  Synthetic oligonucleotide
agaaacgagtagtaaatcaatgcgtcatac

SEQ ID NO: 288409 - DNA, 30 bp, Artificial Sequence
  Synthetic oligonucleotide
taggcgcccatgtctggccctgtttcatac

SEQ ID NO: 288410 - DNA, 30 bp, Artificial Sequence
  Synthetic oligonucleotide
atctcgtggcgataacaaatgtcaagatac

SEQ ID NO: 288411 - DNA, 30 bp, Artificial Sequence
  Synthetic oligonucleotide
aaattcaggggtaggtcaagtctaagatac

SEQ ID NO: 288412 - DNA, 30 bp, Artificial Sequence
  Synthetic oligonucleotide
gggatatgggaacctgttcacgtaagatac

SEQ ID NO: 288413 - DNA, 30 bp, Artificial Sequence
  Synthetic oligonucleotide
gcgataacagtacgttcgggactgagatac

SEQ ID NO: 288414 - DNA, 30 bp, Artificial Sequence
  Synthetic oligonucleotide
tttgattacgttcatgctggaagtagatac

SEQ ID NO: 288415 - DNA, 30 bp, Artificial Sequence
  Synthetic oligonucleotide
aaggggtcagagcatgactcaacccgatac

SEQ ID NO: 288416 - DNA, 30 bp, Artificial Sequence
  Synthetic oligonucleotide
gaacctgaatcttacatacttgagcgatac

SEQ ID NO: 288417 - DNA, 30 bp, Artificial Sequence
  Synthetic oligonucleotide
ttataacaatggtttgcaagtgatcgatac

SEQ ID NO: 288418 - DNA, 30 bp, Artificial Sequence
  Synthetic oligonucleotide
tccggtagggatgcgattttgaacggatac

SEQ ID NO: 288419 - DNA, 30 bp, Artificial Sequence
  Synthetic oligonucleotide
ccgtcaagataacttgccatccgcggatac

SEQ ID NO: 288420 - DNA, 30 bp, Artificial Sequence
  Synthetic oligonucleotide
ctccatgggagacggaggtacatcggatac

SEQ ID NO: 288421 - DNA, 30 bp, Artificial Sequence
  Synthetic oligonucleotide
aagtaacgccacttcgtcaatcaatgatac

SEQ ID NO: 288422 - DNA, 30 bp, Artificial Sequence
  Synthetic oligonucleotide
gcgttaagtaaggtagtattagaatgatac

SEQ ID NO: 288423 - DNA, 30 bp, Artificial Sequence
  Synthetic oligonucleotide
ccgtgtctggcgagtcttgagtactgatac

SEQ ID NO: 288424 - DNA, 30 bp, Artificial Sequence
  Synthetic oligonucleotide
ccgaacgaagtagcatagtatcagtgatac

SEQ ID NO: 288425 - DNA, 30 bp, Artificial Sequence
  Synthetic oligonucleotide
cctcgaagattcacttcactttagtgatac

SEQ ID NO: 288426 - DNA, 30 bp, Artificial Sequence
  Synthetic oligonucleotide
ggcactgtagcggtgttacgacattgatac

SEQ ID NO: 288427 - DNA, 30 bp, Artificial Sequence
  Synthetic oligonucleotide
tgagtatggaatagataccagacttgatac

SEQ ID NO: 288428 - DNA, 30 bp, Artificial Sequence
  Synthetic oligonucleotide
cggtccactgggtcggacccgagttgatac

SEQ ID NO: 288429 - DNA, 30 bp, Artificial Sequence
  Synthetic oligonucleotide
gcaaaattccggaacaactattgttgatac

SEQ ID NO: 288430 - DNA, 30 bp, Artificial Sequence
  Synthetic oligonucleotide
cgaattccatctctatttagagcaatatac

SEQ ID NO: 288431 - DNA, 30 bp, Artificial Sequence
  Synthetic oligonucleotide
gtgtgtatatgaatagtcaccggaatatac

SEQ ID NO: 288432 - DNA, 30 bp, Artificial Sequence
  Synthetic oligonucleotide
caaaccccctcattgcgtcaccacatatac

SEQ ID NO: 288433 - DNA, 30 bp, Artificial Sequence
  Synthetic oligonucleotide
gtccgttaagcctccgggtttgctatatac

SEQ ID NO: 288434 - DNA, 30 bp, Artificial Sequence
  Synthetic oligonucleotide
ccagggtatgagggttaccggatactatac

SEQ ID NO: 288435 - DNA, 30 bp, Artificial Sequence
  Synthetic oligonucleotide
ggaacgccttggcgttaccataggctatac

SEQ ID NO: 288436 - DNA, 30 bp, Artificial Sequence
  Synthetic oligonucleotide
ccaaggtggagttgagacattatgctatac

SEQ ID NO: 288437 - DNA, 30 bp, Artificial Sequence
  Synthetic oligonucleotide
ttcagtggtgagcttccgcgagacgtatac

SEQ ID NO: 288438 - DNA, 30 bp, Artificial Sequence
  Synthetic oligonucleotide
ccgtagccatgctaatcggtcctcgtatac

SEQ ID NO: 288439 - DNA, 30 bp, Artificial Sequence
  Synthetic oligonucleotide
aagaggtcggtgtagttgtaagaggtatac

SEQ ID NO: 288440 - DNA, 30 bp, Artificial Sequence
  Synthetic oligonucleotide
gggaaatagacttgtactctcgtggtatac

SEQ ID NO: 288441 - DNA, 30 bp, Artificial Sequence
  Synthetic oligonucleotide
taacccaatgccccgatgtcgaatgtatac

SEQ ID NO: 288442 - DNA, 30 bp, Artificial Sequence
  Synthetic oligonucleotide
tcaggagctaatattagcaaacctgtatac

SEQ ID NO: 288443 - DNA, 30 bp, Artificial Sequence
  Synthetic oligonucleotide
ttctcgcgatggctcttttggcctgtatac

SEQ ID NO: 288444 - DNA, 30 bp, Artificial Sequence
  Synthetic oligonucleotide
gtcacgagcactatatcacaggctgtatac

SEQ ID NO: 288445 - DNA, 30 bp, Artificial Sequence
  Synthetic oligonucleotide
cagcggaacctattatgggcagccttatac

SEQ ID NO: 288446 - DNA, 30 bp, Artificial Sequence
  Synthetic oligonucleotide
agtatggataaaatacaaatgggcttatac

SEQ ID NO: 288447 - DNA, 30 bp, Artificial Sequence
  Synthetic oligonucleotide
tcacatgcattagtagtcacaacgttatac

SEQ ID NO: 288448 - DNA, 30 bp, Artificial Sequence
  Synthetic oligonucleotide
gtccacagttcacggctctgtcatttatac

SEQ ID NO: 288449 - DNA, 30 bp, Artificial Sequence
  Synthetic oligonucleotide
gagcacataagatgtactctcattttatac

SEQ ID NO: 288450 - DNA, 30 bp, Artificial Sequence
  Synthetic oligonucleotide
caatcgccgcgatccacaggcaaaaactac

SEQ ID NO: 288451 - DNA, 30 bp, Artificial Sequence
  Synthetic oligonucleotide
tctacgacagctcactggactggcaactac

SEQ ID NO: 288452 - DNA, 30 bp, Artificial Sequence
  Synthetic oligonucleotide
agcgcgcgtaccttcccacgtcgtaactac

SEQ ID NO: 288453 - DNA, 30 bp, Artificial Sequence
  Synthetic oligonucleotide
agttagttccggcaatgggaactacactac

SEQ ID NO: 288454 - DNA, 30 bp, Artificial Sequence
  Synthetic oligonucleotide
agtccggtgagtgtgagatataggcactac

SEQ ID NO: 288455 - DNA, 30 bp, Artificial Sequence
  Synthetic oligonucleotide
agaccgctcaataactaaggctctcactac

SEQ ID NO: 288456 - DNA, 30 bp, Artificial Sequence
  Synthetic oligonucleotide
gcagtatcattacaatgaaattgagactac

SEQ ID NO: 288457 - DNA, 30 bp, Artificial Sequence
  Synthetic oligonucleotide
gacggttgccgatcatacttgatcgactac

SEQ ID NO: 288458 - DNA, 30 bp, Artificial Sequence
  Synthetic oligonucleotide
taattatgcatgttatggaaccaggactac

SEQ ID NO: 288459 - DNA, 30 bp, Artificial Sequence
  Synthetic oligonucleotide
gcacttctgaatacaagacgtatatactac

SEQ ID NO: 288460 - DNA, 30 bp, Artificial Sequence
  Synthetic oligonucleotide
cgggtggcagtacacgccctagcctactac

SEQ ID NO: 288461 - DNA, 31 bp, Artificial Sequence
  Synthetic oligonucleotide
aatgaggattggacgttaagcgtcgtactac

SEQ ID NO: 288462 - DNA, 30 bp, Artificial Sequence
  Synthetic oligonucleotide
tagaatagtacggagggtaaaggaacctac

SEQ ID NO: 288463 - DNA, 30 bp, Artificial Sequence
  Synthetic oligonucleotide
ccaatttagtagttacatgtcggaacctac

SEQ ID NO: 288464 - DNA, 30 bp, Artificial Sequence
  Synthetic oligonucleotide
aataggaacagagcggggcgaataacctac

SEQ ID NO: 288465 - DNA, 30 bp, Artificial Sequence
  Synthetic oligonucleotide
gggtttgcgctctgcatcacgcacccctac

SEQ ID NO: 288466 - DNA, 30 bp, Artificial Sequence
  Synthetic oligonucleotide
cgtgcgaatggcagttgaggggccccctac

SEQ ID NO: 288467 - DNA, 30 bp, Artificial Sequence
  Synthetic oligonucleotide
ttcatctgcgggcaatcgaaaagagcctac

SEQ ID NO: 288468 - DNA, 30 bp, Artificial Sequence
  Synthetic oligonucleotide
agttatcggcttggatttcccgtagcctac

SEQ ID NO: 288469 - DNA, 30 bp, Artificial Sequence
  Synthetic oligonucleotide
aaggtcacgagaatgttttaattagcctac

SEQ ID NO: 288470 - DNA, 30 bp, Artificial Sequence
  Synthetic oligonucleotide
gcggggccgctgcatactgcatgcgcctac

SEQ ID NO: 288471 - DNA, 30 bp, Artificial Sequence
  Synthetic oligonucleotide
cgttgcaccaatctactagatttcgcctac

SEQ ID NO: 288472 - DNA, 30 bp, Artificial Sequence
  Synthetic oligonucleotide
ttgtgaccttgggtaactgccactgcctac

SEQ ID NO: 288473 - DNA, 30 bp, Artificial Sequence
  Synthetic oligonucleotide
tggcgagagcctccaaacgcacaatcctac

SEQ ID NO: 288474 - DNA, 30 bp, Artificial Sequence
  Synthetic oligonucleotide
ttgagtggtagtggcggttgacgctcctac

SEQ ID NO: 288475 - DNA, 30 bp, Artificial Sequence
  Synthetic oligonucleotide
acaccgatcaataagcaggggggctcctac

SEQ ID NO: 288476 - DNA, 30 bp, Artificial Sequence
  Synthetic oligonucleotide
cgcctgtagacttggggtaaggtgtcctac

SEQ ID NO: 288477 - DNA, 30 bp, Artificial Sequence
  Synthetic oligonucleotide
gtaacagataaccaggctgatggttcctac

SEQ ID NO: 288478 - DNA, 30 bp, Artificial Sequence
  Synthetic oligonucleotide
ctcggtgttctttagttggatttaagctac

SEQ ID NO: 288479 - DNA, 30 bp, Artificial Sequence
  Synthetic oligonucleotide
aacgggacacctggtttaatgatgagctac

SEQ ID NO: 288480 - DNA, 30 bp, Artificial Sequence
  Synthetic oligonucleotide
ctggtacttgacagaagagagtatagctac

SEQ ID NO: 288481 - DNA, 30 bp, Artificial Sequence
  Synthetic oligonucleotide
gttccgcgtaccgaagtgtcatgtagctac

SEQ ID NO: 288482 - DNA, 30 bp, Artificial Sequence
  Synthetic oligonucleotide
tatcggtatcgggaaaacccccaacgctac

SEQ ID NO: 288483 - DNA, 30 bp, Artificial Sequence
  Synthetic oligonucleotide
ctgtaggtaattccgctagttcaacgctac

SEQ ID NO: 288484 - DNA, 30 bp, Artificial Sequence
  Synthetic oligonucleotide
tgtaccaggatacgttatgaattacgctac

SEQ ID NO: 288485 - DNA, 30 bp, Artificial Sequence
  Synthetic oligonucleotide
aatcgaaggccgtgttacacgacccgctac

SEQ ID NO: 288486 - DNA, 30 bp, Artificial Sequence
  Synthetic oligonucleotide
agaccatggcgtagttccaagggtcgctac

SEQ ID NO: 288487 - DNA, 30 bp, Artificial Sequence
  Synthetic oligonucleotide
catgactgcggtgaggcgttggacggctac

SEQ ID NO: 288488 - DNA, 30 bp, Artificial Sequence
  Synthetic oligonucleotide
tagtggagcaacttccttatctggggctac

SEQ ID NO: 288489 - DNA, 30 bp, Artificial Sequence
  Synthetic oligonucleotide
catcactcgggttgtcagggtctgggctac

SEQ ID NO: 288490 - DNA, 30 bp, Artificial Sequence
  Synthetic oligonucleotide
taggctggagttaggcgtcccaattgctac

SEQ ID NO: 288491 - DNA, 30 bp, Artificial Sequence
  Synthetic oligonucleotide
gctcgaaaataccagtgggtgtattgctac

SEQ ID NO: 288492 - DNA, 30 bp, Artificial Sequence
  Synthetic oligonucleotide
ctgtcccatctgagtccacctgcttgctac

SEQ ID NO: 288493 - DNA, 30 bp, Artificial Sequence
  Synthetic oligonucleotide
cagtgcgtgctaccatcaacttccatctac

SEQ ID NO: 288494 - DNA, 31 bp, Artificial Sequence
  Synthetic oligonucleotide
cgttcgagaggtccgtcaaggtcagatctac

SEQ ID NO: 288495 - DNA, 30 bp, Artificial Sequence
  Synthetic oligonucleotide
actgctaggtagctttcgcgaatactctac

SEQ ID NO: 288496 - DNA, 30 bp, Artificial Sequence
  Synthetic oligonucleotide
atgaggcaaacgaacgcgttatccctctac

SEQ ID NO: 288497 - DNA, 30 bp, Artificial Sequence
  Synthetic oligonucleotide
tcatcgtctaatacttagtgtccgctctac

SEQ ID NO: 288498 - DNA, 30 bp, Artificial Sequence
  Synthetic oligonucleotide
atcaggttgcccaccgtagtggggctctac

SEQ ID NO: 288499 - DNA, 30 bp, Artificial Sequence
  Synthetic oligonucleotide
gggctcccctaatgaggttcacgagtctac

SEQ ID NO: 288500 - DNA, 30 bp, Artificial Sequence
  Synthetic oligonucleotide
cgaggttcgcacggtctggacggagtctac

SEQ ID NO: 288501 - DNA, 30 bp, Artificial Sequence
  Synthetic oligonucleotide
agtactggccgaagatcgatcatcgtctac

SEQ ID NO: 288502 - DNA, 30 bp, Artificial Sequence
  Synthetic oligonucleotide
cgctgagcttaaaggctgccccaggtctac

SEQ ID NO: 288503 - DNA, 30 bp, Artificial Sequence
  Synthetic oligonucleotide
aagtacacgaacgcaatgacttaggtctac

SEQ ID NO: 288504 - DNA, 30 bp, Artificial Sequence
  Synthetic oligonucleotide
acgtggcatctgtgccagacgacggtctac

SEQ ID NO: 288505 - DNA, 30 bp, Artificial Sequence
  Synthetic oligonucleotide
gtgaaagcgcaaactacaggttatgtctac

SEQ ID NO: 288506 - DNA, 30 bp, Artificial Sequence
  Synthetic oligonucleotide
taggatatgaacggacaattatcattctac

SEQ ID NO: 288507 - DNA, 30 bp, Artificial Sequence
  Synthetic oligonucleotide
caattacttgaagacgaaggcagattctac

SEQ ID NO: 288508 - DNA, 30 bp, Artificial Sequence
  Synthetic oligonucleotide
tacatttctcaagggatgtggatattctac

SEQ ID NO: 288509 - DNA, 30 bp, Artificial Sequence
  Synthetic oligonucleotide
tgctctacggttcgtattcaaacgttctac

SEQ ID NO: 288510 - DNA, 30 bp, Artificial Sequence
  Synthetic oligonucleotide
acgtcaggcaaagagataaatcaaaagtac

SEQ ID NO: 288511 - DNA, 30 bp, Artificial Sequence
  Synthetic oligonucleotide
gcaggcctcccttagtatcgggtaaagtac

SEQ ID NO: 288512 - DNA, 30 bp, Artificial Sequence
  Synthetic oligonucleotide
agaactcttggcttggtaagcaacaagtac

SEQ ID NO: 288513 - DNA, 30 bp, Artificial Sequence
  Synthetic oligonucleotide
agttagacctatatcaatgtgaacaagtac

SEQ ID NO: 288514 - DNA, 30 bp, Artificial Sequence
  Synthetic oligonucleotide
gccgaatccacatatacaactggcaagtac

SEQ ID NO: 288515 - DNA, 30 bp, Artificial Sequence
  Synthetic oligonucleotide
caggactcaagcgcatgctttatgaagtac

SEQ ID NO: 288516 - DNA, 31 bp, Artificial Sequence
  Synthetic oligonucleotide
ggctttcgtgctggttgtttctgataagtac

SEQ ID NO: 288517 - DNA, 30 bp, Artificial Sequence
  Synthetic oligonucleotide
gctggtctagtattaaatgcggctaagtac

SEQ ID NO: 288518 - DNA, 30 bp, Artificial Sequence
  Synthetic oligonucleotide
atcatgtgaacggatcaaaaaagtaagtac

SEQ ID NO: 288519 - DNA, 30 bp, Artificial Sequence
  Synthetic oligonucleotide
gtttggctcaaccggcctcggcgtaagtac

SEQ ID NO: 288520 - DNA, 30 bp, Artificial Sequence
  Synthetic oligonucleotide
tccaaaattactcttacgtcttgtaagtac

SEQ ID NO: 288521 - DNA, 30 bp, Artificial Sequence
  Synthetic oligonucleotide
gattagaagagcattagattttaacagtac

SEQ ID NO: 288522 - DNA, 30 bp, Artificial Sequence
  Synthetic oligonucleotide
gcgtctttggttagtgggagacgacagtac

SEQ ID NO: 288523 - DNA, 30 bp, Artificial Sequence
  Synthetic oligonucleotide
tactcgcgtgattgctatggccagcagtac

SEQ ID NO: 288524 - DNA, 30 bp, Artificial Sequence
  Synthetic oligonucleotide
gtaacgcacctttaagttagtcctcagtac

SEQ ID NO: 288525 - DNA, 30 bp, Artificial Sequence
  Synthetic oligonucleotide
gtcacgcatctagggattacggttcagtac

SEQ ID NO: 288526 - DNA, 30 bp, Artificial Sequence
  Synthetic oligonucleotide
tttgacgaaacagtcttgcactgagagtac

SEQ ID NO: 288527 - DNA, 30 bp, Artificial Sequence
  Synthetic oligonucleotide
agttttggaagcacattagtcatagagtac

SEQ ID NO: 288528 - DNA, 30 bp, Artificial Sequence
  Synthetic oligonucleotide
acacggggagggacgggcccaccggagtac

SEQ ID NO: 288529 - DNA, 30 bp, Artificial Sequence
  Synthetic oligonucleotide
agattgattctcaagccatctagggagtac

SEQ ID NO: 288530 - DNA, 30 bp, Artificial Sequence
  Synthetic oligonucleotide
gtcctatgtatggccttcaccatggagtac

SEQ ID NO: 288531 - DNA, 30 bp, Artificial Sequence
  Synthetic oligonucleotide
tcactccgaggatagtgagccgaatagtac

SEQ ID NO: 288532 - DNA, 30 bp, Artificial Sequence
  Synthetic oligonucleotide
gggcgtaagaatattgcaactttatagtac

SEQ ID NO: 288533 - DNA, 30 bp, Artificial Sequence
  Synthetic oligonucleotide
agaaatgcagtttacaactcggcctagtac

SEQ ID NO: 288534 - DNA, 30 bp, Artificial Sequence
  Synthetic oligonucleotide
gtggagagaatcgtacggttcaagtagtac

SEQ ID NO: 288535 - DNA, 30 bp, Artificial Sequence
  Synthetic oligonucleotide
gccatgatcatttcccgggcggagtagtac

SEQ ID NO: 288536 - DNA, 30 bp, Artificial Sequence
  Synthetic oligonucleotide
gcacttacccctttatcgaacagttagtac

SEQ ID NO: 288537 - DNA, 30 bp, Artificial Sequence
  Synthetic oligonucleotide
cacatcctattaatcacaatcagttagtac

SEQ ID NO: 288538 - DNA, 30 bp, Artificial Sequence
  Synthetic oligonucleotide
tactgagccccttcacattatccaacgtac

SEQ ID NO: 288539 - DNA, 31 bp, Artificial Sequence
  Synthetic oligonucleotide
tgaagctaacttgcaccttacacccacgtac

SEQ ID NO: 288540 - DNA, 30 bp, Artificial Sequence
  Synthetic oligonucleotide
agcggtttcgctaacggattaactacgtac

SEQ ID NO: 288541 - DNA, 29 bp, Artificial Sequence
  Synthetic oligonucleotide
gattaatgaaggaggattaagttacgtac

SEQ ID NO: 288542 - DNA, 30 bp, Artificial Sequence
  Synthetic oligonucleotide
ggtacagcaagggaaattgcggtcccgtac

SEQ ID NO: 288543 - DNA, 30 bp, Artificial Sequence
  Synthetic oligonucleotide
tcatccaaacgcattaaggtccggccgtac

SEQ ID NO: 288544 - DNA, 30 bp, Artificial Sequence
  Synthetic oligonucleotide
gaacttccttgatggtgacaagtgccgtac

SEQ ID NO: 288545 - DNA, 30 bp, Artificial Sequence
  Synthetic oligonucleotide
tacagggtggaataaagcctttatccgtac

SEQ ID NO: 288546 - DNA, 30 bp, Artificial Sequence
  Synthetic oligonucleotide
tagcctcgcagggaatgtgtgaaagcgtac

SEQ ID NO: 288547 - DNA, 30 bp, Artificial Sequence
  Synthetic oligonucleotide
cgaaggccgaagggctttagttgagcgtac

SEQ ID NO: 288548 - DNA, 30 bp, Artificial Sequence
  Synthetic oligonucleotide
cgttcactaaagagttagctatcggcgtac

SEQ ID NO: 288549 - DNA, 30 bp, Artificial Sequence
  Synthetic oligonucleotide
tccgtgcgtgttatttgcgtgatggcgtac

SEQ ID NO: 288550 - DNA, 30 bp, Artificial Sequence
  Synthetic oligonucleotide
cataaaagtaactttgctaaactggcgtac

SEQ ID NO: 288551 - DNA, 30 bp, Artificial Sequence
  Synthetic oligonucleotide
attgtagctcgtctaagcaccattgcgtac

SEQ ID NO: 288552 - DNA, 30 bp, Artificial Sequence
  Synthetic oligonucleotide
tcaaagcgcttatagtactaatcctcgtac

SEQ ID NO: 288553 - DNA, 30 bp, Artificial Sequence
  Synthetic oligonucleotide
actcggacttgcccacccccggggtcgtac

SEQ ID NO: 288554 - DNA, 30 bp, Artificial Sequence
  Synthetic oligonucleotide
taccaacaccgaaaatgaccaatgtcgtac

SEQ ID NO: 288555 - DNA, 30 bp, Artificial Sequence
  Synthetic oligonucleotide
gctattatttatctcccgtttgtgtcgtac

SEQ ID NO: 288556 - DNA, 30 bp, Artificial Sequence
  Synthetic oligonucleotide
taaaagtcacttcttcctattagttcgtac

SEQ ID NO: 288557 - DNA, 30 bp, Artificial Sequence
  Synthetic oligonucleotide
cctctgtagtttctcaggacggtaaggtac

SEQ ID NO: 288558 - DNA, 30 bp, Artificial Sequence
  Synthetic oligonucleotide
aagtagctgtcaggcatactaaacaggtac

SEQ ID NO: 288559 - DNA, 30 bp, Artificial Sequence
  Synthetic oligonucleotide
attgaacgccggaccacaggctacaggtac

SEQ ID NO: 288560 - DNA, 30 bp, Artificial Sequence
  Synthetic oligonucleotide
ccgcattataggtgagacgtgttcaggtac

SEQ ID NO: 288561 - DNA, 30 bp, Artificial Sequence
  Synthetic oligonucleotide
caggggactaattggcattccgggaggtac

SEQ ID NO: 288562 - DNA, 30 bp, Artificial Sequence
  Synthetic oligonucleotide
ttaaagcagaatgcatatcatactaggtac

SEQ ID NO: 288563 - DNA, 30 bp, Artificial Sequence
  Synthetic oligonucleotide
gtaagtccagattggtaacagcttaggtac

SEQ ID NO: 288564 - DNA, 30 bp, Artificial Sequence
  Synthetic oligonucleotide
tacttcggcatgaatgtccgacaacggtac

SEQ ID NO: 288565 - DNA, 30 bp, Artificial Sequence
  Synthetic oligonucleotide
ccaaatgcacatgttcctagattccggtac

SEQ ID NO: 288566 - DNA, 30 bp, Artificial Sequence
  Synthetic oligonucleotide
caacatgaccaagaccgctaaggcgggtac

SEQ ID NO: 288567 - DNA, 30 bp, Artificial Sequence
  Synthetic oligonucleotide
ttgagtcgagggactcttccaattgggtac

SEQ ID NO: 288568 - DNA, 30 bp, Artificial Sequence
  Synthetic oligonucleotide
tggcggtgcgtaatttccgttccatggtac

SEQ ID NO: 288569 - DNA, 30 bp, Artificial Sequence
  Synthetic oligonucleotide
agtccgacgtgatggatatttatatggtac

SEQ ID NO: 288570 - DNA, 31 bp, Artificial Sequence
  Synthetic oligonucleotide
gaacgtcttaaggacgttaaggaagtggtac

SEQ ID NO: 288571 - DNA, 30 bp, Artificial Sequence
  Synthetic oligonucleotide
tgagaagaattggtgtaaactccttggtac

SEQ ID NO: 288572 - DNA, 30 bp, Artificial Sequence
  Synthetic oligonucleotide
ctttaggagtaggaccaccgcagttggtac

SEQ ID NO: 288573 - DNA, 30 bp, Artificial Sequence
  Synthetic oligonucleotide
cagctatagtgtagcgcgaccatttggtac

SEQ ID NO: 288574 - DNA, 30 bp, Artificial Sequence
  Synthetic oligonucleotide
accttcgggcttcgataccaattttggtac

SEQ ID NO: 288575 - DNA, 30 bp, Artificial Sequence
  Synthetic oligonucleotide
ctaactcattgacatatagtctacatgtac

SEQ ID NO: 288576 - DNA, 30 bp, Artificial Sequence
  Synthetic oligonucleotide
tgatcggtcgaacgtattagtaccatgtac

SEQ ID NO: 288577 - DNA, 30 bp, Artificial Sequence
  Synthetic oligonucleotide
gtctggagtccgaattacgagaggatgtac

SEQ ID NO: 288578 - DNA, 30 bp, Artificial Sequence
  Synthetic oligonucleotide
agtgacccaatacgaacggcactgatgtac

SEQ ID NO: 288579 - DNA, 30 bp, Artificial Sequence
  Synthetic oligonucleotide
atttgaaggcctaacggagtaggactgtac

SEQ ID NO: 288580 - DNA, 30 bp, Artificial Sequence
  Synthetic oligonucleotide
accatgaagaattgcctggtcatactgtac

SEQ ID NO: 288581 - DNA, 30 bp, Artificial Sequence
  Synthetic oligonucleotide
ctgaagtccaagtaaaacggatggctgtac

SEQ ID NO: 288582 - DNA, 30 bp, Artificial Sequence
  Synthetic oligonucleotide
taaactagtcgatgtgatgagatgctgtac

SEQ ID NO: 288583 - DNA, 30 bp, Artificial Sequence
  Synthetic oligonucleotide
aactacgaactgtcaatctggctgctgtac

SEQ ID NO: 288584 - DNA, 30 bp, Artificial Sequence
  Synthetic oligonucleotide
tagagtgtgacaggattatcactagtgtac

SEQ ID NO: 288585 - DNA, 30 bp, Artificial Sequence
  Synthetic oligonucleotide
cgccctttgcgtcatctcggaatcgtgtac

SEQ ID NO: 288586 - DNA, 30 bp, Artificial Sequence
  Synthetic oligonucleotide
cacagaaatcgggcagctaggctcgtgtac

SEQ ID NO: 288587 - DNA, 31 bp, Artificial Sequence
  Synthetic oligonucleotide
tatctagtattccataggtgaactggtgtac

SEQ ID NO: 288588 - DNA, 30 bp, Artificial Sequence
  Synthetic oligonucleotide
aacaatcacatagtgcaagcgcatgtgtac

SEQ ID NO: 288589 - DNA, 30 bp, Artificial Sequence
  Synthetic oligonucleotide
cgtgtcatattgactcccaacacattgtac

SEQ ID NO: 288590 - DNA, 30 bp, Artificial Sequence
  Synthetic oligonucleotide
ccgaattcgggattcgcacctggattgtac

SEQ ID NO: 288591 - DNA, 30 bp, Artificial Sequence
  Synthetic oligonucleotide
tgggtaaagggattcgaagactgcttgtac

SEQ ID NO: 288592 - DNA, 30 bp, Artificial Sequence
  Synthetic oligonucleotide
aggaagggtcgcatccggcctccgttgtac

SEQ ID NO: 288593 - DNA, 30 bp, Artificial Sequence
  Synthetic oligonucleotide
gtcctctctgctttacaccccctgttgtac

SEQ ID NO: 288594 - DNA, 30 bp, Artificial Sequence
  Synthetic oligonucleotide
tcggttgccccttttcgtggatgaaattac

SEQ ID NO: 288595 - DNA, 30 bp, Artificial Sequence
  Synthetic oligonucleotide
ccatccatacacgctggttcggacaattac

SEQ ID NO: 288596 - DNA, 30 bp, Artificial Sequence
  Synthetic oligonucleotide
cagtggagggcagaagtttccatcaattac

SEQ ID NO: 288597 - DNA, 30 bp, Artificial Sequence
  Synthetic oligonucleotide
cgcaatctcctggaccaatgttataattac

SEQ ID NO: 288598 - DNA, 30 bp, Artificial Sequence
  Synthetic oligonucleotide
catggcgcaggtcttgacctacaacattac

SEQ ID NO: 288599 - DNA, 30 bp, Artificial Sequence
  Synthetic oligonucleotide
atggagaccgtttgatatacagtacattac

SEQ ID NO: 288600 - DNA, 30 bp, Artificial Sequence
  Synthetic oligonucleotide
gtgcactacatcgtcttccagagccattac

SEQ ID NO: 288601 - DNA, 30 bp, Artificial Sequence
  Synthetic oligonucleotide
gccagctcggataaggcaggatagcattac

SEQ ID NO: 288602 - DNA, 30 bp, Artificial Sequence
  Synthetic oligonucleotide
ctccagctgttagctgaggcggcgcattac

SEQ ID NO: 288603 - DNA, 30 bp, Artificial Sequence
  Synthetic oligonucleotide
tccatgggtaaaatgaaagcgctgcattac

SEQ ID NO: 288604 - DNA, 30 bp, Artificial Sequence
  Synthetic oligonucleotide
tgacattacgagtatgttggacatcattac

SEQ ID NO: 288605 - DNA, 30 bp, Artificial Sequence
  Synthetic oligonucleotide
ttacggtcatagaagcttagtgtagattac

SEQ ID NO: 288606 - DNA, 30 bp, Artificial Sequence
  Synthetic oligonucleotide
ctacttattccctttaaataagtcgattac

SEQ ID NO: 288607 - DNA, 30 bp, Artificial Sequence
  Synthetic oligonucleotide
gcaagtaagcaaccaacagtttcggattac

SEQ ID NO: 288608 - DNA, 30 bp, Artificial Sequence
  Synthetic oligonucleotide
atatagtgccgccgatgtagtcatgattac

SEQ ID NO: 288609 - DNA, 30 bp, Artificial Sequence
  Synthetic oligonucleotide
taccggttaggaacacgaggaaaatattac

SEQ ID NO: 288610 - DNA, 30 bp, Artificial Sequence
  Synthetic oligonucleotide
cataacctatgaggtaaaaactaatattac

SEQ ID NO: 288611 - DNA, 30 bp, Artificial Sequence
  Synthetic oligonucleotide
taagaggatgcgttaaatatgtaatattac

SEQ ID NO: 288612 - DNA, 30 bp, Artificial Sequence
  Synthetic oligonucleotide
taaaagagaactaaacaagcttcatattac

SEQ ID NO: 288613 - DNA, 30 bp, Artificial Sequence
  Synthetic oligonucleotide
tgagctattctcaacttacaaatatattac

SEQ ID NO: 288614 - DNA, 30 bp, Artificial Sequence
  Synthetic oligonucleotide
gcaagccaacttcactaacggggctattac

SEQ ID NO: 288615 - DNA, 30 bp, Artificial Sequence
  Synthetic oligonucleotide
ctgcccagacgggcaatatgaaggtattac

SEQ ID NO: 288616 - DNA, 30 bp, Artificial Sequence
  Synthetic oligonucleotide
cgaggggtagctatagtcgccagcacttac

SEQ ID NO: 288617 - DNA, 30 bp, Artificial Sequence
  Synthetic oligonucleotide
tacgctgtagccaacagccgacgcacttac

SEQ ID NO: 288618 - DNA, 30 bp, Artificial Sequence
  Synthetic oligonucleotide
aggaatcattctgaattttattagacttac

SEQ ID NO: 288619 - DNA, 30 bp, Artificial Sequence
  Synthetic oligonucleotide
ataataactgtgacaaagtctactacttac

SEQ ID NO: 288620 - DNA, 30 bp, Artificial Sequence
  Synthetic oligonucleotide
taaagtatgaccaccggagtgtctacttac

SEQ ID NO: 288621 - DNA, 30 bp, Artificial Sequence
  Synthetic oligonucleotide
ttaaaatgaactttgaaggttggtacttac

SEQ ID NO: 288622 - DNA, 30 bp, Artificial Sequence
  Synthetic oligonucleotide
tgtgttaaataagtcgtaaacgttacttac

SEQ ID NO: 288623 - DNA, 30 bp, Artificial Sequence
  Synthetic oligonucleotide
atcaagagcaatctgcttacacaaccttac

SEQ ID NO: 288624 - DNA, 30 bp, Artificial Sequence
  Synthetic oligonucleotide
gctcgcttttatgtcgagctcgagccttac

SEQ ID NO: 288625 - DNA, 30 bp, Artificial Sequence
  Synthetic oligonucleotide
gtcccgcggtgtatatgacattggccttac

SEQ ID NO: 288626 - DNA, 30 bp, Artificial Sequence
  Synthetic oligonucleotide
aatgttataccatttagctcgcgtccttac

SEQ ID NO: 288627 - DNA, 30 bp, Artificial Sequence
  Synthetic oligonucleotide
aattagggcggtaatgagctatccgcttac

SEQ ID NO: 288628 - DNA, 30 bp, Artificial Sequence
  Synthetic oligonucleotide
gctccaacaacagccatgggaggcgcttac

SEQ ID NO: 288629 - DNA, 30 bp, Artificial Sequence
  Synthetic oligonucleotide
tggacccgcgagggtattggacaggcttac

SEQ ID NO: 288630 - DNA, 30 bp, Artificial Sequence
  Synthetic oligonucleotide
gccatcttgtccagagaagctcatgcttac

SEQ ID NO: 288631 - DNA, 30 bp, Artificial Sequence
  Synthetic oligonucleotide
gggagtagggacatggcggggtatgcttac

SEQ ID NO: 288632 - DNA, 30 bp, Artificial Sequence
  Synthetic oligonucleotide
ataggctctatctctttgcgatactcttac

SEQ ID NO: 288633 - DNA, 30 bp, Artificial Sequence
  Synthetic oligonucleotide
acatgggtggtagtataacgaagctcttac

SEQ ID NO: 288634 - DNA, 30 bp, Artificial Sequence
  Synthetic oligonucleotide
gcaagcgaagatatttctgagcgctcttac

SEQ ID NO: 288635 - DNA, 30 bp, Artificial Sequence
  Synthetic oligonucleotide
gtggcgctagaagattaagtactctcttac

SEQ ID NO: 288636 - DNA, 30 bp, Artificial Sequence
  Synthetic oligonucleotide
tgtggtgcgttcccggtacctagaagttac

SEQ ID NO: 288637 - DNA, 30 bp, Artificial Sequence
  Synthetic oligonucleotide
cgcgaggagtaggtcggcgggcccagttac

SEQ ID NO: 288638 - DNA, 30 bp, Artificial Sequence
  Synthetic oligonucleotide
ttctaaaatatgacatttggactgagttac

SEQ ID NO: 288639 - DNA, 30 bp, Artificial Sequence
  Synthetic oligonucleotide
ctgaagcgtattcggcgccgccaacgttac

SEQ ID NO: 288640 - DNA, 30 bp, Artificial Sequence
  Synthetic oligonucleotide
cgaggaagaaagcagtattaagcacgttac

SEQ ID NO: 288641 - DNA, 30 bp, Artificial Sequence
  Synthetic oligonucleotide
cggggcttattaagctcctaggcacgttac

SEQ ID NO: 288642 - DNA, 30 bp, Artificial Sequence
  Synthetic oligonucleotide
gtgtctagttcaccgcaaggaacccgttac

SEQ ID NO: 288643 - DNA, 30 bp, Artificial Sequence
  Synthetic oligonucleotide
gtggggtttataatccgctcagtgcgttac

SEQ ID NO: 288644 - DNA, 30 bp, Artificial Sequence
  Synthetic oligonucleotide
tcggggccaagtggtgtatttcgtcgttac

SEQ ID NO: 288645 - DNA, 30 bp, Artificial Sequence
  Synthetic oligonucleotide
gacaagacctcgtggtgggccataggttac

SEQ ID NO: 288646 - DNA, 30 bp, Artificial Sequence
  Synthetic oligonucleotide
acctatcgttggattctacctctaggttac

SEQ ID NO: 288647 - DNA, 30 bp, Artificial Sequence
  Synthetic oligonucleotide
catttgtgcgagaacgaaagttacggttac

SEQ ID NO: 288648 - DNA, 31 bp, Artificial Sequence
  Synthetic oligonucleotide
ggaatgttaaagcgcaaacaacaccggttac

SEQ ID NO: 288649 - DNA, 30 bp, Artificial Sequence
  Synthetic oligonucleotide
cgatactcccgtgtggaatctgccggttac

SEQ ID NO: 288650 - DNA, 30 bp, Artificial Sequence
  Synthetic oligonucleotide
tttaaacgaaaccgtggacggcattgttac

SEQ ID NO: 288651 - DNA, 30 bp, Artificial Sequence
  Synthetic oligonucleotide
accgctacacaaggaattacatgttgttac

SEQ ID NO: 288652 - DNA, 30 bp, Artificial Sequence
  Synthetic oligonucleotide
aggcacgttggagcgacgcttataatttac

SEQ ID NO: 288653 - DNA, 30 bp, Artificial Sequence
  Synthetic oligonucleotide
aatcaagagtgcatctaaggtcacatttac

SEQ ID NO: 288654 - DNA, 30 bp, Artificial Sequence
  Synthetic oligonucleotide
gggccggtttatgcatgacagaagatttac

SEQ ID NO: 288655 - DNA, 30 bp, Artificial Sequence
  Synthetic oligonucleotide
gaggggtggtgcgctgtccaggtgatttac

SEQ ID NO: 288656 - DNA, 31 bp, Artificial Sequence
  Synthetic oligonucleotide
ccaaatagatgtgatttctatgattatttac

SEQ ID NO: 288657 - DNA, 30 bp, Artificial Sequence
  Synthetic oligonucleotide
tgattcgaaaccagtcgagcctaactttac

SEQ ID NO: 288658 - DNA, 30 bp, Artificial Sequence
  Synthetic oligonucleotide
tgcgctgaggagttgcatgcgtcactttac

SEQ ID NO: 288659 - DNA, 30 bp, Artificial Sequence
  Synthetic oligonucleotide
cgatggttttgaatggtttgcctactttac

SEQ ID NO: 288660 - DNA, 30 bp, Artificial Sequence
  Synthetic oligonucleotide
gttcagggacggcttaagaaagagctttac

SEQ ID NO: 288661 - DNA, 30 bp, Artificial Sequence
  Synthetic oligonucleotide
cgggcgggctgactcgtggttaggctttac

SEQ ID NO: 288662 - DNA, 30 bp, Artificial Sequence
  Synthetic oligonucleotide
tggttcgcgaaaacaaaactactgctttac

SEQ ID NO: 288663 - DNA, 30 bp, Artificial Sequence
  Synthetic oligonucleotide
gctgtccattaagggtgctgagttctttac

SEQ ID NO: 288664 - DNA, 30 bp, Artificial Sequence
  Synthetic oligonucleotide
gcaaactactcggcacaaatagcagtttac

SEQ ID NO: 288665 - DNA, 30 bp, Artificial Sequence
  Synthetic oligonucleotide
cagaagacctagcttagctacaaggtttac

SEQ ID NO: 288666 - DNA, 30 bp, Artificial Sequence
  Synthetic oligonucleotide
ggatccaccaaaaacgaagaccaggtttac

SEQ ID NO: 288667 - DNA, 30 bp, Artificial Sequence
  Synthetic oligonucleotide
gccatgaatggaagaatatgcacggtttac

SEQ ID NO: 288668 - DNA, 30 bp, Artificial Sequence
  Synthetic oligonucleotide
gctcacctcgataggtatattatggtttac

SEQ ID NO: 288669 - DNA, 30 bp, Artificial Sequence
  Synthetic oligonucleotide
ggagggcagtaggaccagccggtggtttac

SEQ ID NO: 288670 - DNA, 30 bp, Artificial Sequence
  Synthetic oligonucleotide
ataaaagcgttcgcgatatcggttgtttac

SEQ ID NO: 288671 - DNA, 30 bp, Artificial Sequence
  Synthetic oligonucleotide
ctggaaatactatgccaattaaacttttac

SEQ ID NO: 288672 - DNA, 30 bp, Artificial Sequence
  Synthetic oligonucleotide
aacggcgctgcgaatatcgcacgcttttac

SEQ ID NO: 288673 - DNA, 30 bp, Artificial Sequence
  Synthetic oligonucleotide
actcatatgtggtcgatcacgccaaaaacc

SEQ ID NO: 288674 - DNA, 30 bp, Artificial Sequence
  Synthetic oligonucleotide
aagcgcgtgctctggcgccaactaaaaacc

SEQ ID NO: 288675 - DNA, 30 bp, Artificial Sequence
  Synthetic oligonucleotide
atctgcgcgtgcatatccccgtgcaaaacc

SEQ ID NO: 288676 - DNA, 30 bp, Artificial Sequence
  Synthetic oligonucleotide
gttgtacttacaagaggaaaactcaaaacc

SEQ ID NO: 288677 - DNA, 30 bp, Artificial Sequence
  Synthetic oligonucleotide
aactgtgatgagctagccgcgctcaaaacc

SEQ ID NO: 288678 - DNA, 30 bp, Artificial Sequence
  Synthetic oligonucleotide
actcgggtggttcaaacacgagcgaaaacc

SEQ ID NO: 288679 - DNA, 30 bp, Artificial Sequence
  Synthetic oligonucleotide
ttctgacatccgcgagcctataggaaaacc

SEQ ID NO: 288680 - DNA, 30 bp, Artificial Sequence
  Synthetic oligonucleotide
gtagtaaagagcccgagatacgtgaaaacc

SEQ ID NO: 288681 - DNA, 30 bp, Artificial Sequence
  Synthetic oligonucleotide
actcgcggggccttagtcgttattaaaacc

SEQ ID NO: 288682 - DNA, 30 bp, Artificial Sequence
  Synthetic oligonucleotide
aacaagtgtgtcgtttcatcaacacaaacc

SEQ ID NO: 288683 - DNA, 30 bp, Artificial Sequence
  Synthetic oligonucleotide
accagtgaaggactgcattccccacaaacc

SEQ ID NO: 288684 - DNA, 30 bp, Artificial Sequence
  Synthetic oligonucleotide
agaagcgagctcgtgactaacatacaaacc

SEQ ID NO: 288685 - DNA, 30 bp, Artificial Sequence
  Synthetic oligonucleotide
actgctgcgccggaatgtagcggccaaacc

SEQ ID NO: 288686 - DNA, 30 bp, Artificial Sequence
  Synthetic oligonucleotide
tgttagttcaatgtcgggctcaagcaaacc

SEQ ID NO: 288687 - DNA, 30 bp, Artificial Sequence
  Synthetic oligonucleotide
tgcctactcaagttgtcgaatgggcaaacc

SEQ ID NO: 288688 - DNA, 30 bp, Artificial Sequence
  Synthetic oligonucleotide
cgcgtgtcgggtgcgtccaccgttcaaacc

SEQ ID NO: 288689 - DNA, 30 bp, Artificial Sequence
  Synthetic oligonucleotide
ctgatcgtccacgtctaaccgtaagaaacc

SEQ ID NO: 288690 - DNA, 30 bp, Artificial Sequence
  Synthetic oligonucleotide
tggtgtgcgtggacgcggggtgtagaaacc

SEQ ID NO: 288691 - DNA, 30 bp, Artificial Sequence
  Synthetic oligonucleotide
gaagtatcatatcggtaggccatcgaaacc

SEQ ID NO: 288692 - DNA, 30 bp, Artificial Sequence
  Synthetic oligonucleotide
aagcggaaatggggtttcgctctcgaaacc

SEQ ID NO: 288693 - DNA, 30 bp, Artificial Sequence
  Synthetic oligonucleotide
gtagttccatgtaaacaatccagggaaacc

SEQ ID NO: 288694 - DNA, 30 bp, Artificial Sequence
  Synthetic oligonucleotide
ttgagccaggaggtctgtaggagtgaaacc

SEQ ID NO: 288695 - DNA, 30 bp, Artificial Sequence
  Synthetic oligonucleotide
tgaacccgcctcaagcatgcgcattaaacc

SEQ ID NO: 288696 - DNA, 30 bp, Artificial Sequence
  Synthetic oligonucleotide
cagagtttagagcttccttttcccacaacc

SEQ ID NO: 288697 - DNA, 30 bp, Artificial Sequence
  Synthetic oligonucleotide
gttgcgacagccgcgggtccagtcacaacc

SEQ ID NO: 288698 - DNA, 30 bp, Artificial Sequence
  Synthetic oligonucleotide
ttctcaacgggtggattgcttgtcacaacc

SEQ ID NO: 288699 - DNA, 30 bp, Artificial Sequence
  Synthetic oligonucleotide
ggcctttgtagaagcttttaggcgacaacc

SEQ ID NO: 288700 - DNA, 30 bp, Artificial Sequence
  Synthetic oligonucleotide
ccggaccgtgagaatcacgttaatacaacc

SEQ ID NO: 288701 - DNA, 30 bp, Artificial Sequence
  Synthetic oligonucleotide
cattcagaatactgtcgcacgactacaacc

SEQ ID NO: 288702 - DNA, 30 bp, Artificial Sequence
  Synthetic oligonucleotide
gaaactggttcacagctaatagctacaacc

SEQ ID NO: 288703 - DNA, 30 bp, Artificial Sequence
  Synthetic oligonucleotide
gtcagagcgagtgcgttgtttaacccaacc

SEQ ID NO: 288704 - DNA, 30 bp, Artificial Sequence
  Synthetic oligonucleotide
gtaccggggggactctaaaagagcccaacc

SEQ ID NO: 288705 - DNA, 30 bp, Artificial Sequence
  Synthetic oligonucleotide
cattacaatatcatatctggtatcccaacc

SEQ ID NO: 288706 - DNA, 30 bp, Artificial Sequence
  Synthetic oligonucleotide
atgaaacaggcccagtccgcgggcgcaacc

SEQ ID NO: 288707 - DNA, 30 bp, Artificial Sequence
  Synthetic oligonucleotide
tccacttggagaccggcctgaaaggcaacc

SEQ ID NO: 288708 - DNA, 30 bp, Artificial Sequence
  Synthetic oligonucleotide
caaggtctcaaattagttcgctgggcaacc

SEQ ID NO: 288709 - DNA, 30 bp, Artificial Sequence
  Synthetic oligonucleotide
tttgcccaacccgggaaaaagaaatcaacc

SEQ ID NO: 288710 - DNA, 30 bp, Artificial Sequence
  Synthetic oligonucleotide
gcaggtgtaacacacctggttgcatcaacc

SEQ ID NO: 288711 - DNA, 30 bp, Artificial Sequence
  Synthetic oligonucleotide
ttgactgtcactttggtggtggcgtcaacc

SEQ ID NO: 288712 - DNA, 30 bp, Artificial Sequence
  Synthetic oligonucleotide
gtcaacaaagtgcagcttataatgtcaacc

SEQ ID NO: 288713 - DNA, 30 bp, Artificial Sequence
  Synthetic oligonucleotide
taaaggaaacaaaccccgatattgtcaacc

SEQ ID NO: 288714 - DNA, 30 bp, Artificial Sequence
  Synthetic oligonucleotide
cgcgcatgcacgagaactacccattcaacc

SEQ ID NO: 288715 - DNA, 30 bp, Artificial Sequence
  Synthetic oligonucleotide
tgacatcgttacagcatacagagttcaacc

SEQ ID NO: 288716 - DNA, 30 bp, Artificial Sequence
  Synthetic oligonucleotide
aaggacgtcaaagatttgaagctaagaacc

SEQ ID NO: 288717 - DNA, 30 bp, Artificial Sequence
  Synthetic oligonucleotide
ttggcaggccttcagacaaggcagagaacc

SEQ ID NO: 288718 - DNA, 31 bp, Artificial Sequence
  Synthetic oligonucleotide
tagaagggcaccacaggtgcaatagagaacc

SEQ ID NO: 288719 - DNA, 30 bp, Artificial Sequence
  Synthetic oligonucleotide
atcaatgaaatgtgaaccaccgatagaacc

SEQ ID NO: 288720 - DNA, 30 bp, Artificial Sequence
  Synthetic oligonucleotide
accaccggggtttactggaatatacgaacc

SEQ ID NO: 288721 - DNA, 30 bp, Artificial Sequence
  Synthetic oligonucleotide
gggaattgtcgtttacccgccggccgaacc

SEQ ID NO: 288722 - DNA, 30 bp, Artificial Sequence
  Synthetic oligonucleotide
ccacaagtcctgattcagatgtggcgaacc

SEQ ID NO: 288723 - DNA, 30 bp, Artificial Sequence
  Synthetic oligonucleotide
tgtgccgaatggttacttcgacctcgaacc

SEQ ID NO: 288724 - DNA, 30 bp, Artificial Sequence
  Synthetic oligonucleotide
gcctttgcggggaactgtcgcgctcgaacc

SEQ ID NO: 288725 - DNA, 30 bp, Artificial Sequence
  Synthetic oligonucleotide
gctatccagtagtcctattatcgtcgaacc

SEQ ID NO: 288726 - DNA, 30 bp, Artificial Sequence
  Synthetic oligonucleotide
atgtcggcttggagcagatagtgtcgaacc

SEQ ID NO: 288727 - DNA, 30 bp, Artificial Sequence
  Synthetic oligonucleotide
ttgactgtgacactatgtccgcaaggaacc

SEQ ID NO: 288728 - DNA, 30 bp, Artificial Sequence
  Synthetic oligonucleotide
gcgtgggcaagtttgaatcccgcgggaacc

SEQ ID NO: 288729 - DNA, 30 bp, Artificial Sequence
  Synthetic oligonucleotide
agtgcattggcgaagcgctatgggggaacc

SEQ ID NO: 288730 - DNA, 30 bp, Artificial Sequence
  Synthetic oligonucleotide
accagcaaagacaacccatgactgggaacc

SEQ ID NO: 288731 - DNA, 30 bp, Artificial Sequence
  Synthetic oligonucleotide
ttttaatcccacaaataaacagctggaacc

SEQ ID NO: 288732 - DNA, 30 bp, Artificial Sequence
  Synthetic oligonucleotide
gtgtctacgggccgtcagaacattggaacc

SEQ ID NO: 288733 - DNA, 30 bp, Artificial Sequence
  Synthetic oligonucleotide
ggagtgctattactttttgcgtttggaacc

SEQ ID NO: 288734 - DNA, 30 bp, Artificial Sequence
  Synthetic oligonucleotide
agtcaattactgattcgtcctggatgaacc

SEQ ID NO: 288735 - DNA, 30 bp, Artificial Sequence
  Synthetic oligonucleotide
gaattcattacatatcaacgtgactgaacc

SEQ ID NO: 288736 - DNA, 30 bp, Artificial Sequence
  Synthetic oligonucleotide
tgaattcgatattggggttaaacctgaacc

SEQ ID NO: 288737 - DNA, 30 bp, Artificial Sequence
  Synthetic oligonucleotide
cgaaattaatctgctctgagtggctgaacc

SEQ ID NO: 288738 - DNA, 30 bp, Artificial Sequence
  Synthetic oligonucleotide
ggggatagcgtttgaaagcctgcttgaacc

SEQ ID NO: 288739 - DNA, 30 bp, Artificial Sequence
  Synthetic oligonucleotide
taaacttaagcacagctattagcaataacc

SEQ ID NO: 288740 - DNA, 30 bp, Artificial Sequence
  Synthetic oligonucleotide
tctgcctaaatagcagattcgataataacc

SEQ ID NO: 288741 - DNA, 30 bp, Artificial Sequence
  Synthetic oligonucleotide
atagacgaactctacaataaggtaataacc

SEQ ID NO: 288742 - DNA, 30 bp, Artificial Sequence
  Synthetic oligonucleotide
gccgaagtaccgagggcatcgaccataacc

SEQ ID NO: 288743 - DNA, 30 bp, Artificial Sequence
  Synthetic oligonucleotide
caggttacgtgcgcggcttatcagataacc

SEQ ID NO: 288744 - DNA, 30 bp, Artificial Sequence
  Synthetic oligonucleotide
aagggcgcatgtaacaatacgtcgataacc

SEQ ID NO: 288745 - DNA, 30 bp, Artificial Sequence
  Synthetic oligonucleotide
ttggcgtcggctcaacgagttacactaacc

SEQ ID NO: 288746 - DNA, 30 bp, Artificial Sequence
  Synthetic oligonucleotide
ttaaaagtggcgagcaggagacggctaacc

SEQ ID NO: 288747 - DNA, 30 bp, Artificial Sequence
  Synthetic oligonucleotide
gcaacgtcagcaactttgatcgtgctaacc

SEQ ID NO: 288748 - DNA, 30 bp, Artificial Sequence
  Synthetic oligonucleotide
tcctgtgaagtttcgtcgacggaagtaacc

SEQ ID NO: 288749 - DNA, 30 bp, Artificial Sequence
  Synthetic oligonucleotide
ggagatgttcagcaaagcgttctagtaacc

SEQ ID NO: 288750 - DNA, 30 bp, Artificial Sequence
  Synthetic oligonucleotide
cattattataaaaccgaaaatgccgtaacc

SEQ ID NO: 288751 - DNA, 30 bp, Artificial Sequence
  Synthetic oligonucleotide
gtacacctttatgtccaagtactcgtaacc

SEQ ID NO: 288752 - DNA, 30 bp, Artificial Sequence
  Synthetic oligonucleotide
aagggccgatggcttgacgcgagggtaacc

SEQ ID NO: 288753 - DNA, 30 bp, Artificial Sequence
  Synthetic oligonucleotide
aaagagggacaatctttttcccgggtaacc

SEQ ID NO: 288754 - DNA, 30 bp, Artificial Sequence
  Synthetic oligonucleotide
gttgaaatccatggcttaaacgtggtaacc

SEQ ID NO: 288755 - DNA, 30 bp, Artificial Sequence
  Synthetic oligonucleotide
ggaatgcaggggcttcttaggtatgtaacc

SEQ ID NO: 288756 - DNA, 30 bp, Artificial Sequence
  Synthetic oligonucleotide
agatactttgccaggctacttcttgtaacc

SEQ ID NO: 288757 - DNA, 30 bp, Artificial Sequence
  Synthetic oligonucleotide
ccacggcgactccaagggcttagaaacacc

SEQ ID NO: 288758 - DNA, 30 bp, Artificial Sequence
  Synthetic oligonucleotide
gattcgcaatcaaaaggctgtgtgaacacc

SEQ ID NO: 288759 - DNA, 30 bp, Artificial Sequence
  Synthetic oligonucleotide
gaggtaacaaagggtcggatgtcccacacc

SEQ ID NO: 288760 - DNA, 30 bp, Artificial Sequence
  Synthetic oligonucleotide
tcaactaaacggcacggcctgtgccacacc

SEQ ID NO: 288761 - DNA, 30 bp, Artificial Sequence
  Synthetic oligonucleotide
taagttgccaggtactctcaacctcacacc

SEQ ID NO: 288762 - DNA, 30 bp, Artificial Sequence
  Synthetic oligonucleotide
tagcattatagcggttaacgggaagacacc

SEQ ID NO: 288763 - DNA, 30 bp, Artificial Sequence
  Synthetic oligonucleotide
ttgatcataggcgtccaggtctccgacacc

SEQ ID NO: 288764 - DNA, 30 bp, Artificial Sequence
  Synthetic oligonucleotide
ttaccgaccatatgcgggtgctcggacacc

SEQ ID NO: 288765 - DNA, 30 bp, Artificial Sequence
  Synthetic oligonucleotide
tctagcggcggcgctcggacgactgacacc

SEQ ID NO: 288766 - DNA, 30 bp, Artificial Sequence
  Synthetic oligonucleotide
agatcaagcaatccttgaggatctgacacc

SEQ ID NO: 288767 - DNA, 30 bp, Artificial Sequence
  Synthetic oligonucleotide
tatatagcgggttgatgtacgaaatacacc

SEQ ID NO: 288768 - DNA, 30 bp, Artificial Sequence
  Synthetic oligonucleotide
atcggggttgattagagtaaacgatacacc

SEQ ID NO: 288769 - DNA, 30 bp, Artificial Sequence
  Synthetic oligonucleotide
tattcagccaccttaagatcctgctacacc

SEQ ID NO: 288770 - DNA, 30 bp, Artificial Sequence
  Synthetic oligonucleotide
agggttccgtacggttacaggacgtacacc

SEQ ID NO: 288771 - DNA, 30 bp, Artificial Sequence
  Synthetic oligonucleotide
cttaagaactaacccaatcaaatgtacacc

SEQ ID NO: 288772 - DNA, 30 bp, Artificial Sequence
  Synthetic oligonucleotide
agtatcactccatttaatctaggaaccacc

SEQ ID NO: 288773 - DNA, 30 bp, Artificial Sequence
  Synthetic oligonucleotide
atgacatgcttaaccgaattgagcaccacc

SEQ ID NO: 288774 - DNA, 30 bp, Artificial Sequence
  Synthetic oligonucleotide
aaggccccgcgattctagtcctagaccacc

SEQ ID NO: 288775 - DNA, 30 bp, Artificial Sequence
  Synthetic oligonucleotide
agtggtgcgtaaatcacgtaatcgaccacc

SEQ ID NO: 288776 - DNA, 30 bp, Artificial Sequence
  Synthetic oligonucleotide
acatgcaggcttgatcccacctaacccacc

SEQ ID NO: 288777 - DNA, 30 bp, Artificial Sequence
  Synthetic oligonucleotide
gataagcggtgaccgttcggcgtacccacc

SEQ ID NO: 288778 - DNA, 30 bp, Artificial Sequence
  Synthetic oligonucleotide
ttacttatccacaattagggttagcccacc

SEQ ID NO: 288779 - DNA, 30 bp, Artificial Sequence
  Synthetic oligonucleotide
ttctaagggctcaggcacattgcgcccacc

SEQ ID NO: 288780 - DNA, 30 bp, Artificial Sequence
  Synthetic oligonucleotide
aagggatcatccaggtcgctttcgcccacc

SEQ ID NO: 288781 - DNA, 30 bp, Artificial Sequence
  Synthetic oligonucleotide
gagtcaaatgtagcccttacagggcccacc

SEQ ID NO: 288782 - DNA, 30 bp, Artificial Sequence
  Synthetic oligonucleotide
gcaggatcatgtgatcagtttctgcccacc

SEQ ID NO: 288783 - DNA, 30 bp, Artificial Sequence
  Synthetic oligonucleotide
aacgtgaactttatcggacggcctcccacc

SEQ ID NO: 288784 - DNA, 30 bp, Artificial Sequence
  Synthetic oligonucleotide
gggtgagtctgctgacgtagtgttcccacc

SEQ ID NO: 288785 - DNA, 30 bp, Artificial Sequence
  Synthetic oligonucleotide
gtcgaaaaatactttgcctcgccagccacc

SEQ ID NO: 288786 - DNA, 30 bp, Artificial Sequence
  Synthetic oligonucleotide
agaagcttaaatcactaaaacttagccacc

SEQ ID NO: 288787 - DNA, 30 bp, Artificial Sequence
  Synthetic oligonucleotide
ataggagtccgtcggcggtagcccgccacc

SEQ ID NO: 288788 - DNA, 30 bp, Artificial Sequence
  Synthetic oligonucleotide
aaaagagcgtcctatattagacaggccacc

SEQ ID NO: 288789 - DNA, 30 bp, Artificial Sequence
  Synthetic oligonucleotide
agcgtactactgttgggcacaccggccacc

SEQ ID NO: 288790 - DNA, 30 bp, Artificial Sequence
  Synthetic oligonucleotide
gttgaaagttggccggataggcaatccacc

SEQ ID NO: 288791 - DNA, 30 bp, Artificial Sequence
  Synthetic oligonucleotide
gagacactataagacgtgtcagaatccacc

SEQ ID NO: 288792 - DNA, 30 bp, Artificial Sequence
  Synthetic oligonucleotide
cccttcaacctcgatgcccttcgttccacc

SEQ ID NO: 288793 - DNA, 30 bp, Artificial Sequence
  Synthetic oligonucleotide
acggcagcaaccacaaacgacataagcacc

SEQ ID NO: 288794 - DNA, 30 bp, Artificial Sequence
  Synthetic oligonucleotide
agaaacaaactcttacgaagaggcagcacc

SEQ ID NO: 288795 - DNA, 30 bp, Artificial Sequence
  Synthetic oligonucleotide
gaagggggagtttatcaaacaactagcacc

SEQ ID NO: 288796 - DNA, 30 bp, Artificial Sequence
  Synthetic oligonucleotide
accgaacacctcaacatgccccgtagcacc

SEQ ID NO: 288797 - DNA, 30 bp, Artificial Sequence
  Synthetic oligonucleotide
agaaaggtttaaggcaccccaattagcacc

SEQ ID NO: 288798 - DNA, 30 bp, Artificial Sequence
  Synthetic oligonucleotide
aagtagcatgtcatcaatgcattccgcacc

SEQ ID NO: 288799 - DNA, 30 bp, Artificial Sequence
  Synthetic oligonucleotide
catgagaagtcagcttgcaggaatcgcacc

SEQ ID NO: 288800 - DNA, 30 bp, Artificial Sequence
  Synthetic oligonucleotide
tgcctctggaattacacgtgaaaaggcacc

SEQ ID NO: 288801 - DNA, 30 bp, Artificial Sequence
  Synthetic oligonucleotide
ataagtatggtgcttaaggtatcaggcacc

SEQ ID NO: 288802 - DNA, 30 bp, Artificial Sequence
  Synthetic oligonucleotide
ctgggctcatccaacttacctggaggcacc

SEQ ID NO: 288803 - DNA, 30 bp, Artificial Sequence
  Synthetic oligonucleotide
cagcagagacgcttgaacttagtgggcacc

SEQ ID NO: 288804 - DNA, 30 bp, Artificial Sequence
  Synthetic oligonucleotide
aagagatgtacttacctaatacatggcacc

SEQ ID NO: 288805 - DNA, 30 bp, Artificial Sequence
  Synthetic oligonucleotide
atagtaccagggttcagataaactggcacc

SEQ ID NO: 288806 - DNA, 31 bp, Artificial Sequence
  Synthetic oligonucleotide
atgaggctcagggaggccactccgtggcacc

SEQ ID NO: 288807 - DNA, 30 bp, Artificial Sequence
  Synthetic oligonucleotide
atctgtacttttggcagtgtctgtggcacc

SEQ ID NO: 288808 - DNA, 30 bp, Artificial Sequence
  Synthetic oligonucleotide
actgagcgcataattctatttcgatgcacc

SEQ ID NO: 288809 - DNA, 30 bp, Artificial Sequence
  Synthetic oligonucleotide
tggttattctgaagtatgcgaccctgcacc

SEQ ID NO: 288810 - DNA, 30 bp, Artificial Sequence
  Synthetic oligonucleotide
ctgagcccgtacctcggcaaggtgtgcacc

SEQ ID NO: 288811 - DNA, 30 bp, Artificial Sequence
  Synthetic oligonucleotide
ccccaatgcgatataagtgattgttgcacc

SEQ ID NO: 288812 - DNA, 30 bp, Artificial Sequence
  Synthetic oligonucleotide
gtatagggaggggtccaaaaacgaatcacc

SEQ ID NO: 288813 - DNA, 30 bp, Artificial Sequence
  Synthetic oligonucleotide
taattaccatggaatacacgggtaatcacc

SEQ ID NO: 288814 - DNA, 30 bp, Artificial Sequence
  Synthetic oligonucleotide
gtgtacataactcttttgaaaaggatcacc

SEQ ID NO: 288815 - DNA, 30 bp, Artificial Sequence
  Synthetic oligonucleotide
ccgtacaagtcgagagtagcaggactcacc

SEQ ID NO: 288816 - DNA, 30 bp, Artificial Sequence
  Synthetic oligonucleotide
atattgaaccgagtccgaatgcagctcacc

SEQ ID NO: 288817 - DNA, 30 bp, Artificial Sequence
  Synthetic oligonucleotide
ttggtggaggtcctcggtgcggagctcacc

SEQ ID NO: 288818 - DNA, 30 bp, Artificial Sequence
  Synthetic oligonucleotide
tgatacaagcattcttcaatgttagtcacc

SEQ ID NO: 288819 - DNA, 30 bp, Artificial Sequence
  Synthetic oligonucleotide
gggggtctacgcggagacccttccgtcacc

SEQ ID NO: 288820 - DNA, 30 bp, Artificial Sequence
  Synthetic oligonucleotide
gccattaatggaatatcgcaaaaggtcacc

SEQ ID NO: 288821 - DNA, 30 bp, Artificial Sequence
  Synthetic oligonucleotide
tgtcggaaaggagtatgccggtaggtcacc

SEQ ID NO: 288822 - DNA, 30 bp, Artificial Sequence
  Synthetic oligonucleotide
gtgaggccaccctctgcccggtatgtcacc

SEQ ID NO: 288823 - DNA, 30 bp, Artificial Sequence
  Synthetic oligonucleotide
agtaggcgctccatggattcctttgtcacc

SEQ ID NO: 288824 - DNA, 30 bp, Artificial Sequence
  Synthetic oligonucleotide
caatagaaaatactcgatatacaattcacc

SEQ ID NO: 288825 - DNA, 30 bp, Artificial Sequence
  Synthetic oligonucleotide
caaagtgggtgagtacaggatagattcacc

SEQ ID NO: 288826 - DNA, 30 bp, Artificial Sequence
  Synthetic oligonucleotide
tgttctacgttacacctactcctcttcacc

SEQ ID NO: 288827 - DNA, 30 bp, Artificial Sequence
  Synthetic oligonucleotide
aaagcggtcttttcaagggaggagttcacc

SEQ ID NO: 288828 - DNA, 30 bp, Artificial Sequence
  Synthetic oligonucleotide
cttatgaacacttccgcgcccgggttcacc

SEQ ID NO: 288829 - DNA, 30 bp, Artificial Sequence
  Synthetic oligonucleotide
gaccacggtgattgataatctcaaaagacc

SEQ ID NO: 288830 - DNA, 30 bp, Artificial Sequence
  Synthetic oligonucleotide
tcccagccaacgacacaatatcgcaagacc

SEQ ID NO: 288831 - DNA, 30 bp, Artificial Sequence
  Synthetic oligonucleotide
tctccacaacgggtattgacgggcaagacc

SEQ ID NO: 288832 - DNA, 30 bp, Artificial Sequence
  Synthetic oligonucleotide
catgacattatcgtagaggaatggaagacc

SEQ ID NO: 288833 - DNA, 30 bp, Artificial Sequence
  Synthetic oligonucleotide
gggcgatgtactggtgcattaaataagacc

SEQ ID NO: 288834 - DNA, 30 bp, Artificial Sequence
  Synthetic oligonucleotide
gagcgttgcgggttgtcccggtctaagacc

SEQ ID NO: 288835 - DNA, 30 bp, Artificial Sequence
  Synthetic oligonucleotide
ggagggaggaagagagtccggggccagacc

SEQ ID NO: 288836 - DNA, 30 bp, Artificial Sequence
  Synthetic oligonucleotide
gcttttatctccaagcagcataagcagacc

SEQ ID NO: 288837 - DNA, 30 bp, Artificial Sequence
  Synthetic oligonucleotide
tccaggcgcgtgggatgctaatagcagacc

SEQ ID NO: 288838 - DNA, 30 bp, Artificial Sequence
  Synthetic oligonucleotide
aatgtaaggaaccagtaatttgttcagacc

SEQ ID NO: 288839 - DNA, 30 bp, Artificial Sequence
  Synthetic oligonucleotide
tcgaacccgtatggctctcttgaagagacc

SEQ ID NO: 288840 - DNA, 30 bp, Artificial Sequence
  Synthetic oligonucleotide
tatgcccttaccagagcttcttaagagacc

SEQ ID NO: 288841 - DNA, 30 bp, Artificial Sequence
  Synthetic oligonucleotide
gctatagctcggtaacgctgggtagagacc

SEQ ID NO: 288842 - DNA, 30 bp, Artificial Sequence
  Synthetic oligonucleotide
cggagttgtggtgccggcgataccgagacc

SEQ ID NO: 288843 - DNA, 30 bp, Artificial Sequence
  Synthetic oligonucleotide
gtaaatcgcgtcttaggtaaactcgagacc

SEQ ID NO: 288844 - DNA, 30 bp, Artificial Sequence
  Synthetic oligonucleotide
gtaagtgacactggtctaaagcgggagacc

SEQ ID NO: 288845 - DNA, 30 bp, Artificial Sequence
  Synthetic oligonucleotide
tcatcttggtttaagtgtgttaatgagacc

SEQ ID NO: 288846 - DNA, 30 bp, Artificial Sequence
  Synthetic oligonucleotide
tgttgaaagacgttgtttataggtgagacc

SEQ ID NO: 288847 - DNA, 30 bp, Artificial Sequence
  Synthetic oligonucleotide
gagatatcttcggcacggataagatagacc

SEQ ID NO: 288848 - DNA, 30 bp, Artificial Sequence
  Synthetic oligonucleotide
gattggcaacccttgtaggcgcattagacc

SEQ ID NO: 288849 - DNA, 30 bp, Artificial Sequence
  Synthetic oligonucleotide
acatctggagtcgtaaggattagttagacc

SEQ ID NO: 288850 - DNA, 30 bp, Artificial Sequence
  Synthetic oligonucleotide
ctgttgctagcgaagaccagaggttagacc

SEQ ID NO: 288851 - DNA, 30 bp, Artificial Sequence
  Synthetic oligonucleotide
atggtttgggtgagaccgatagtttagacc

SEQ ID NO: 288852 - DNA, 30 bp, Artificial Sequence
  Synthetic oligonucleotide
gtaacggcgcatcactaacagttttagacc

SEQ ID NO: 288853 - DNA, 30 bp, Artificial Sequence
  Synthetic oligonucleotide
taatggtcgtcaactgcacctacaacgacc

SEQ ID NO: 288854 - DNA, 30 bp, Artificial Sequence
  Synthetic oligonucleotide
tggggtctaggttcgggcagtattacgacc

SEQ ID NO: 288855 - DNA, 30 bp, Artificial Sequence
  Synthetic oligonucleotide
tgagtagtagcttcgccagggataccgacc

SEQ ID NO: 288856 - DNA, 30 bp, Artificial Sequence
  Synthetic oligonucleotide
gggcggcgcagagattttcggatcgcgacc

SEQ ID NO: 288857 - DNA, 30 bp, Artificial Sequence
  Synthetic oligonucleotide
acttatagagcccttcagcaggaggcgacc

SEQ ID NO: 288858 - DNA, 30 bp, Artificial Sequence
  Synthetic oligonucleotide
gccgggccctctcaaagagagtctgcgacc

SEQ ID NO: 288859 - DNA, 30 bp, Artificial Sequence
  Synthetic oligonucleotide
ctgtgatcaatctcatgcgtacactcgacc

SEQ ID NO: 288860 - DNA, 30 bp, Artificial Sequence
  Synthetic oligonucleotide
ttggctagaagactgaagcagaattcgacc

SEQ ID NO: 288861 - DNA, 30 bp, Artificial Sequence
  Synthetic oligonucleotide
ggtgctgttcggaacctgcggaattcgacc

SEQ ID NO: 288862 - DNA, 30 bp, Artificial Sequence
  Synthetic oligonucleotide
ccggagggatatatcctcgtgtagaggacc

SEQ ID NO: 288863 - DNA, 30 bp, Artificial Sequence
  Synthetic oligonucleotide
cttactagataggcaggaccgccgaggacc

SEQ ID NO: 288864 - DNA, 30 bp, Artificial Sequence
  Synthetic oligonucleotide
cgaaaccggttattagtatgacaacggacc

SEQ ID NO: 288865 - DNA, 30 bp, Artificial Sequence
  Synthetic oligonucleotide
agagggacccgcacactgtatcaacggacc

SEQ ID NO: 288866 - DNA, 30 bp, Artificial Sequence
  Synthetic oligonucleotide
tgggaaaacttaatggttgtaccacggacc

SEQ ID NO: 288867 - DNA, 30 bp, Artificial Sequence
  Synthetic oligonucleotide
cttgttgattgccctaccaaaatacggacc

SEQ ID NO: 288868 - DNA, 30 bp, Artificial Sequence
  Synthetic oligonucleotide
tcatgtgtaaagtgatgctagaagcggacc

SEQ ID NO: 288869 - DNA, 30 bp, Artificial Sequence
  Synthetic oligonucleotide
ggcgcggatatgatacacatgggtcggacc

SEQ ID NO: 288870 - DNA, 30 bp, Artificial Sequence
  Synthetic oligonucleotide
gctaaagatacaacctattggttagggacc

SEQ ID NO: 288871 - DNA, 30 bp, Artificial Sequence
  Synthetic oligonucleotide
gacagctacgcaaggaggctgcacgggacc

SEQ ID NO: 288872 - DNA, 30 bp, Artificial Sequence
  Synthetic oligonucleotide
cgaattattactcacgtgctgcccgggacc

SEQ ID NO: 288873 - DNA, 30 bp, Artificial Sequence
  Synthetic oligonucleotide
gtgaaatgcagcatacgccggcttgggacc

SEQ ID NO: 288874 - DNA, 30 bp, Artificial Sequence
  Synthetic oligonucleotide
cgggggattaaggtacaaaccgcctggacc

SEQ ID NO: 288875 - DNA, 30 bp, Artificial Sequence
  Synthetic oligonucleotide
tcctcgtcaaacctggcaagggtttggacc

SEQ ID NO: 288876 - DNA, 30 bp, Artificial Sequence
  Synthetic oligonucleotide
ggaggtaaccactgtcggttgtgcatgacc

SEQ ID NO: 288877 - DNA, 30 bp, Artificial Sequence
  Synthetic oligonucleotide
cggtagacaagggcgtactttcttatgacc

SEQ ID NO: 288878 - DNA, 30 bp, Artificial Sequence
  Synthetic oligonucleotide
cgcgtggcgtttctcatgtcgaaactgacc

SEQ ID NO: 288879 - DNA, 30 bp, Artificial Sequence
  Synthetic oligonucleotide
caatcgatgcaacgcttcgtagtactgacc

SEQ ID NO: 288880 - DNA, 30 bp, Artificial Sequence
  Synthetic oligonucleotide
gcgaaggatttggtaggatttttcctgacc

SEQ ID NO: 288881 - DNA, 30 bp, Artificial Sequence
  Synthetic oligonucleotide
cttgtacgtatagaatttcaagagctgacc

SEQ ID NO: 288882 - DNA, 30 bp, Artificial Sequence
  Synthetic oligonucleotide
cggcccccgtttgtgggatgcctcgtgacc

SEQ ID NO: 288883 - DNA, 30 bp, Artificial Sequence
  Synthetic oligonucleotide
gtagatagaaagtcccctggtagggtgacc

SEQ ID NO: 288884 - DNA, 30 bp, Artificial Sequence
  Synthetic oligonucleotide
ctcaattctgataatcgcctcacattgacc

SEQ ID NO: 288885 - DNA, 30 bp, Artificial Sequence
  Synthetic oligonucleotide
ggaggctaggtaattaggctgcccttgacc

SEQ ID NO: 288886 - DNA, 30 bp, Artificial Sequence
  Synthetic oligonucleotide
cagcctttcgagagttacaactcgttgacc

SEQ ID NO: 288887 - DNA, 30 bp, Artificial Sequence
  Synthetic oligonucleotide
cttgtcgaataaccggcccttggaaatacc

SEQ ID NO: 288888 - DNA, 30 bp, Artificial Sequence
  Synthetic oligonucleotide
taaattagccccagttatgcaacgaatacc

SEQ ID NO: 288889 - DNA, 30 bp, Artificial Sequence
  Synthetic oligonucleotide
gcataagtctaaaggaatgtgtaacatacc

SEQ ID NO: 288890 - DNA, 30 bp, Artificial Sequence
  Synthetic oligonucleotide
tgatcacaggggcataccccacgacatacc

SEQ ID NO: 288891 - DNA, 30 bp, Artificial Sequence
  Synthetic oligonucleotide
atcaccggttactgacaaggagtacatacc

SEQ ID NO: 288892 - DNA, 30 bp, Artificial Sequence
  Synthetic oligonucleotide
taagtcaagcgttgccatccaaggcatacc

SEQ ID NO: 288893 - DNA, 30 bp, Artificial Sequence
  Synthetic oligonucleotide
tggctaaagcttgccgctatggggcatacc

SEQ ID NO: 288894 - DNA, 30 bp, Artificial Sequence
  Synthetic oligonucleotide
gacggcagtcttgaaaggaagatgcatacc

SEQ ID NO: 288895 - DNA, 30 bp, Artificial Sequence
  Synthetic oligonucleotide
taagtaagcatttaaaaggccggtcatacc

SEQ ID NO: 288896 - DNA, 30 bp, Artificial Sequence
  Synthetic oligonucleotide
caacctaccgaacgcgtatgctgagatacc

SEQ ID NO: 288897 - DNA, 30 bp, Artificial Sequence
  Synthetic oligonucleotide
aagttcaggtaacgtccccgatccgatacc

SEQ ID NO: 288898 - DNA, 30 bp, Artificial Sequence
  Synthetic oligonucleotide
agcttcagggcagatgcaaactaatatacc

SEQ ID NO: 288899 - DNA, 30 bp, Artificial Sequence
  Synthetic oligonucleotide
ttgtctactgactcacatatcccatatacc

SEQ ID NO: 288900 - DNA, 30 bp, Artificial Sequence
  Synthetic oligonucleotide
gcaagggtgtcgaaacagcccttatatacc

SEQ ID NO: 288901 - DNA, 30 bp, Artificial Sequence
  Synthetic oligonucleotide
ccgggattccagatatgaacgtgctatacc

SEQ ID NO: 288902 - DNA, 30 bp, Artificial Sequence
  Synthetic oligonucleotide
ccatccggtaattcgctatggcagtatacc

SEQ ID NO: 288903 - DNA, 30 bp, Artificial Sequence
  Synthetic oligonucleotide
tgtagcggtcgggcgattattatttatacc

SEQ ID NO: 288904 - DNA, 30 bp, Artificial Sequence
  Synthetic oligonucleotide
agccaatagcataccaggtgtcaaactacc

SEQ ID NO: 288905 - DNA, 30 bp, Artificial Sequence
  Synthetic oligonucleotide
atgctagtttactggactatgggaactacc

SEQ ID NO: 288906 - DNA, 30 bp, Artificial Sequence
  Synthetic oligonucleotide
atcttgcccccggctactgcttccactacc

SEQ ID NO: 288907 - DNA, 30 bp, Artificial Sequence
  Synthetic oligonucleotide
gcctaaaagcatttcgacctgcgcactacc

SEQ ID NO: 288908 - DNA, 30 bp, Artificial Sequence
  Synthetic oligonucleotide
aatgtcggtggggtacaatataagactacc

SEQ ID NO: 288909 - DNA, 30 bp, Artificial Sequence
  Synthetic oligonucleotide
ctgccactcgggcaagataagtcgactacc

SEQ ID NO: 288910 - DNA, 30 bp, Artificial Sequence
  Synthetic oligonucleotide
gctgttaagatatacgaacgtgggcctacc

SEQ ID NO: 288911 - DNA, 30 bp, Artificial Sequence
  Synthetic oligonucleotide
tgccccccacatgtaataccgcgtcctacc

SEQ ID NO: 288912 - DNA, 30 bp, Artificial Sequence
  Synthetic oligonucleotide
gagcgcatataatcgcgcgtaaacgctacc

SEQ ID NO: 288913 - DNA, 30 bp, Artificial Sequence
  Synthetic oligonucleotide
tcaaccaaccatgaatagctctaggctacc

SEQ ID NO: 288914 - DNA, 30 bp, Artificial Sequence
  Synthetic oligonucleotide
acgatattaagtagttatgagactgctacc

SEQ ID NO: 288915 - DNA, 30 bp, Artificial Sequence
  Synthetic oligonucleotide
gtaggtgagaacgatagcccaaaatctacc

SEQ ID NO: 288916 - DNA, 30 bp, Artificial Sequence
  Synthetic oligonucleotide
ttctaacatagaaagcggtgttagtctacc

SEQ ID NO: 288917 - DNA, 30 bp, Artificial Sequence
  Synthetic oligonucleotide
gacatagccgccttcaagtgaacgtctacc

SEQ ID NO: 288918 - DNA, 30 bp, Artificial Sequence
  Synthetic oligonucleotide
gggacagtcttcgtgtaccgcggttctacc

SEQ ID NO: 288919 - DNA, 30 bp, Artificial Sequence
  Synthetic oligonucleotide
cgatatttaagttgtggatattgttctacc

SEQ ID NO: 288920 - DNA, 30 bp, Artificial Sequence
  Synthetic oligonucleotide
tgtccatagggactcgacggattcagtacc

SEQ ID NO: 288921 - DNA, 30 bp, Artificial Sequence
  Synthetic oligonucleotide
agcacgagcccgagtgactcccctagtacc

SEQ ID NO: 288922 - DNA, 30 bp, Artificial Sequence
  Synthetic oligonucleotide
tgggacaaccatcataggcatggtagtacc

SEQ ID NO: 288923 - DNA, 30 bp, Artificial Sequence
  Synthetic oligonucleotide
tgttgtcccgggcaacggatcggacgtacc

SEQ ID NO: 288924 - DNA, 30 bp, Artificial Sequence
  Synthetic oligonucleotide
tagcggctattgttgcctgtcgtacgtacc

SEQ ID NO: 288925 - DNA, 30 bp, Artificial Sequence
  Synthetic oligonucleotide
ggaagaggctcggttcgaggtatccgtacc

SEQ ID NO: 288926 - DNA, 30 bp, Artificial Sequence
  Synthetic oligonucleotide
agggaataagcggacgcttagcatcgtacc

SEQ ID NO: 288927 - DNA, 30 bp, Artificial Sequence
  Synthetic oligonucleotide
aggttaagcctagatataaaattaggtacc

SEQ ID NO: 288928 - DNA, 30 bp, Artificial Sequence
  Synthetic oligonucleotide
cagcaataggcttccttattgagcggtacc

SEQ ID NO: 288929 - DNA, 30 bp, Artificial Sequence
  Synthetic oligonucleotide
ttacggccagttatagctctcgtcggtacc

SEQ ID NO: 288930 - DNA, 30 bp, Artificial Sequence
  Synthetic oligonucleotide
gggtgccgtctgctgggccgattgggtacc

SEQ ID NO: 288931 - DNA, 30 bp, Artificial Sequence
  Synthetic oligonucleotide
tagccatttcgaatgagtatacatggtacc

SEQ ID NO: 288932 - DNA, 30 bp, Artificial Sequence
  Synthetic oligonucleotide
ataggtgtattgcctttaagaccatgtacc

SEQ ID NO: 288933 - DNA, 30 bp, Artificial Sequence
  Synthetic oligonucleotide
tgagccctcatagtacccgaatgatgtacc

SEQ ID NO: 288934 - DNA, 30 bp, Artificial Sequence
  Synthetic oligonucleotide
gccttaccgatactgagaatggcgtgtacc

SEQ ID NO: 288935 - DNA, 30 bp, Artificial Sequence
  Synthetic oligonucleotide
ccgttccgagcaaggtaatttgtgtgtacc

SEQ ID NO: 288936 - DNA, 30 bp, Artificial Sequence
  Synthetic oligonucleotide
cacatttagatttatcgaaggaattgtacc

SEQ ID NO: 288937 - DNA, 30 bp, Artificial Sequence
  Synthetic oligonucleotide
cgcaatccggatgtgtaaggcataattacc

SEQ ID NO: 288938 - DNA, 30 bp, Artificial Sequence
  Synthetic oligonucleotide
taatcacgaaatacagattgtgccattacc

SEQ ID NO: 288939 - DNA, 30 bp, Artificial Sequence
  Synthetic oligonucleotide
aaggggcgaattttagggggcgatattacc

SEQ ID NO: 288940 - DNA, 30 bp, Artificial Sequence
  Synthetic oligonucleotide
cagatatcctatgggtaatgtccacttacc

SEQ ID NO: 288941 - DNA, 30 bp, Artificial Sequence
  Synthetic oligonucleotide
caataccatggttggttgccaggccttacc

SEQ ID NO: 288942 - DNA, 30 bp, Artificial Sequence
  Synthetic oligonucleotide
atttgtccatcggtttcggcgttccttacc

SEQ ID NO: 288943 - DNA, 30 bp, Artificial Sequence
  Synthetic oligonucleotide
tggcctcagaaaatatttcaaaggcttacc

SEQ ID NO: 288944 - DNA, 30 bp, Artificial Sequence
  Synthetic oligonucleotide
aagcaacgcttggttatccgcatgcttacc

SEQ ID NO: 288945 - DNA, 30 bp, Artificial Sequence
  Synthetic oligonucleotide
gaaatcaggatccggaccagagtgcttacc

SEQ ID NO: 288946 - DNA, 30 bp, Artificial Sequence
  Synthetic oligonucleotide
tgcggtcagtcagtttatcagaatcttacc

SEQ ID NO: 288947 - DNA, 30 bp, Artificial Sequence
  Synthetic oligonucleotide
tatggcggcatctgtcgtacaatagttacc

SEQ ID NO: 288948 - DNA, 30 bp, Artificial Sequence
  Synthetic oligonucleotide
tgattagaatggggtcaaggtctagttacc

SEQ ID NO: 288949 - DNA, 30 bp, Artificial Sequence
  Synthetic oligonucleotide
ggattatgtaagaatcacgtaagcgttacc

SEQ ID NO: 288950 - DNA, 30 bp, Artificial Sequence
  Synthetic oligonucleotide
gtcacctttgacaacggcacagtggttacc

SEQ ID NO: 288951 - DNA, 31 bp, Artificial Sequence
  Synthetic oligonucleotide
ctcgagtctatgtcggatacgtaatgttacc

SEQ ID NO: 288952 - DNA, 30 bp, Artificial Sequence
  Synthetic oligonucleotide
ttatataacagagcgaggtcacatgttacc

SEQ ID NO: 288953 - DNA, 30 bp, Artificial Sequence
  Synthetic oligonucleotide
gatgtaatagatacgatagagggttttacc

SEQ ID NO: 288954 - DNA, 30 bp, Artificial Sequence
  Synthetic oligonucleotide
gaggatcaaccgccgagcgcactttttacc

SEQ ID NO: 288955 - DNA, 30 bp, Artificial Sequence
  Synthetic oligonucleotide
tgggttcgcatccacagaccacaaaaaccc

SEQ ID NO: 288956 - DNA, 30 bp, Artificial Sequence
  Synthetic oligonucleotide
gtcgcgtagtggtagtgccaaagaaaaccc

SEQ ID NO: 288957 - DNA, 30 bp, Artificial Sequence
  Synthetic oligonucleotide
gagagacatctgacaaggtgcggcaaaccc

SEQ ID NO: 288958 - DNA, 30 bp, Artificial Sequence
  Synthetic oligonucleotide
cacatgttaaatcccggcacctgtaaaccc

SEQ ID NO: 288959 - DNA, 30 bp, Artificial Sequence
  Synthetic oligonucleotide
tatcgcgacggaattcatgcggaacaaccc

SEQ ID NO: 288960 - DNA, 29 bp, Artificial Sequence
  Synthetic oligonucleotide
cgcggagacgggatgtacaaccacaaccc

SEQ ID NO: 288961 - DNA, 30 bp, Artificial Sequence
  Synthetic oligonucleotide
gcatcaaaacgttccagccgaagccaaccc

SEQ ID NO: 288962 - DNA, 30 bp, Artificial Sequence
  Synthetic oligonucleotide
cagtgttcgtctgttcgtgatagccaaccc

SEQ ID NO: 288963 - DNA, 30 bp, Artificial Sequence
  Synthetic oligonucleotide
ccgttcccgtaagggccggatacgcaaccc

SEQ ID NO: 288964 - DNA, 30 bp, Artificial Sequence
  Synthetic oligonucleotide
agcgcaccagcgcctgaactctaagaaccc

SEQ ID NO: 288965 - DNA, 30 bp, Artificial Sequence
  Synthetic oligonucleotide
attaggaccactgttagtgaaccagaaccc

SEQ ID NO: 288966 - DNA, 30 bp, Artificial Sequence
  Synthetic oligonucleotide
tatggagccctcatgcgttcttcagaaccc

SEQ ID NO: 288967 - DNA, 30 bp, Artificial Sequence
  Synthetic oligonucleotide
ccggtcctcgccagcgctgggagagaaccc

SEQ ID NO: 288968 - DNA, 30 bp, Artificial Sequence
  Synthetic oligonucleotide
ctggcccgtgggatgagcacaacggaaccc

SEQ ID NO: 288969 - DNA, 30 bp, Artificial Sequence
  Synthetic oligonucleotide
ggggaaaggctacgttgaggttcctaaccc

SEQ ID NO: 288970 - DNA, 26 bp, Artificial Sequence
  Synthetic oligonucleotide
ggaaacacaaatcaaagatgtaaccc

SEQ ID NO: 288971 - DNA, 30 bp, Artificial Sequence
  Synthetic oligonucleotide
ggaggtcactagtctgacgggtcttaaccc

SEQ ID NO: 288972 - DNA, 30 bp, Artificial Sequence
  Synthetic oligonucleotide
tattggcccgcacttcgaatgtgttaaccc

SEQ ID NO: 288973 - DNA, 30 bp, Artificial Sequence
  Synthetic oligonucleotide
cgtgctgcataacttaggtttgaaacaccc

SEQ ID NO: 288974 - DNA, 30 bp, Artificial Sequence
  Synthetic oligonucleotide
tcgtctgtcagttcgatttaaggaacaccc

SEQ ID NO: 288975 - DNA, 30 bp, Artificial Sequence
  Synthetic oligonucleotide
cacctttggttcatccggatttgaacaccc

SEQ ID NO: 288976 - DNA, 30 bp, Artificial Sequence
  Synthetic oligonucleotide
gaaggccatgacgtattcagcatgacaccc

SEQ ID NO: 288977 - DNA, 30 bp, Artificial Sequence
  Synthetic oligonucleotide
gttaaattcaacacccacctgtatacaccc

SEQ ID NO: 288978 - DNA, 30 bp, Artificial Sequence
  Synthetic oligonucleotide
tctaacaaaactgactctacacgtacaccc

SEQ ID NO: 288979 - DNA, 30 bp, Artificial Sequence
  Synthetic oligonucleotide
gtagcgggtgtggcgcccatgattacaccc

SEQ ID NO: 288980 - DNA, 30 bp, Artificial Sequence
  Synthetic oligonucleotide
gtcgtaacgtatgcgggctcatctccaccc

SEQ ID NO: 288981 - DNA, 30 bp, Artificial Sequence
  Synthetic oligonucleotide
atgacgcatgatttacagtgcatcgcaccc

SEQ ID NO: 288982 - DNA, 30 bp, Artificial Sequence
  Synthetic oligonucleotide
atatgggatttcctttgagacacctcaccc

SEQ ID NO: 288983 - DNA, 30 bp, Artificial Sequence
  Synthetic oligonucleotide
gtcgtacgggtccagccccttacttcaccc

SEQ ID NO: 288984 - DNA, 30 bp, Artificial Sequence
  Synthetic oligonucleotide
aaagttgattcaactagtgcctcaagaccc

SEQ ID NO: 288985 - DNA, 30 bp, Artificial Sequence
  Synthetic oligonucleotide
tggacccgtttgggggggtgcttaagaccc

SEQ ID NO: 288986 - DNA, 30 bp, Artificial Sequence
  Synthetic oligonucleotide
cctcggtagtggacgggggggagcagaccc

SEQ ID NO: 288987 - DNA, 30 bp, Artificial Sequence
  Synthetic oligonucleotide
tcggtgaagaaaatggctgcgttcagaccc

SEQ ID NO: 288988 - DNA, 30 bp, Artificial Sequence
  Synthetic oligonucleotide
cgcatgcttattcgacgtcggattagaccc

SEQ ID NO: 288989 - DNA, 30 bp, Artificial Sequence
  Synthetic oligonucleotide
actggaggataaggagacttacaacgaccc

SEQ ID NO: 288990 - DNA, 30 bp, Artificial Sequence
  Synthetic oligonucleotide
tagataatagtgcacggttcgccacgaccc

SEQ ID NO: 288991 - DNA, 30 bp, Artificial Sequence
  Synthetic oligonucleotide
atggttattcgggttggggtccgacgaccc

SEQ ID NO: 288992 - DNA, 30 bp, Artificial Sequence
  Synthetic oligonucleotide
ccggatacaaggtccgatagtaaccgaccc

SEQ ID NO: 288993 - DNA, 30 bp, Artificial Sequence
  Synthetic oligonucleotide
cacggtagttcgtatgagagggaccgaccc

SEQ ID NO: 288994 - DNA, 30 bp, Artificial Sequence
  Synthetic oligonucleotide
cagcgatgtctttcaaaagtaaagcgaccc

SEQ ID NO: 288995 - DNA, 30 bp, Artificial Sequence
  Synthetic oligonucleotide
tatatcgtaagcttcaggaacaagggaccc

SEQ ID NO: 288996 - DNA, 25 bp, Artificial Sequence
  Synthetic oligonucleotide
aaagtgagagcataacccgggaccc

SEQ ID NO: 288997 - DNA, 30 bp, Artificial Sequence
  Synthetic oligonucleotide
tctggggcgagaggacagggccgtggaccc

SEQ ID NO: 288998 - DNA, 30 bp, Artificial Sequence
  Synthetic oligonucleotide
tacgtatgttacataagtaaaaaatgaccc

SEQ ID NO: 288999 - DNA, 30 bp, Artificial Sequence
  Synthetic oligonucleotide
actacaaactctgcgtaagttcaatgaccc

SEQ ID NO: 289000 - DNA, 30 bp, Artificial Sequence
  Synthetic oligonucleotide
tcagagtatcgcgagggttacacatgaccc

SEQ ID NO: 289001 - DNA, 30 bp, Artificial Sequence
  Synthetic oligonucleotide
gtaaatggtagaacatctcggacatgaccc

SEQ ID NO: 289002 - DNA, 30 bp, Artificial Sequence
  Synthetic oligonucleotide
ctgaccctagtaagttcctgtatatgaccc

SEQ ID NO: 289003 - DNA, 30 bp, Artificial Sequence
  Synthetic oligonucleotide
tggggacagacaaactccgtctcctgaccc

SEQ ID NO: 289004 - DNA, 30 bp, Artificial Sequence
  Synthetic oligonucleotide
aatctccgaccactatacctgataataccc

SEQ ID NO: 289005 - DNA, 30 bp, Artificial Sequence
  Synthetic oligonucleotide
gctttacggagtcatcttctcctaataccc

SEQ ID NO: 289006 - DNA, 30 bp, Artificial Sequence
  Synthetic oligonucleotide
cctccggtgcaggggtagaggggcataccc

SEQ ID NO: 289007 - DNA, 30 bp, Artificial Sequence
  Synthetic oligonucleotide
ctgtcgtccccgccttacagttctataccc

SEQ ID NO: 289008 - DNA, 30 bp, Artificial Sequence
  Synthetic oligonucleotide
tagcatggactctcatctatccgactaccc

SEQ ID NO: 289009 - DNA, 30 bp, Artificial Sequence
  Synthetic oligonucleotide
tggtagctaccgaaaagtcatgtactaccc

SEQ ID NO: 289010 - DNA, 30 bp, Artificial Sequence
  Synthetic oligonucleotide
tcgggccccatactcaggcccgccctaccc

SEQ ID NO: 289011 - DNA, 30 bp, Artificial Sequence
  Synthetic oligonucleotide
ggctctcatcacaaagggtgggccctaccc

SEQ ID NO: 289012 - DNA, 30 bp, Artificial Sequence
  Synthetic oligonucleotide
acgtccacagatcgagctgcttccctaccc

SEQ ID NO: 289013 - DNA, 30 bp, Artificial Sequence
  Synthetic oligonucleotide
aagcatggcttatcgggggtccgcctaccc

SEQ ID NO: 289014 - DNA, 30 bp, Artificial Sequence
  Synthetic oligonucleotide
tcccatgcaggagccggccaaacgctaccc

SEQ ID NO: 289015 - DNA, 30 bp, Artificial Sequence
  Synthetic oligonucleotide
aagatccgactatatagatgcgggctaccc

SEQ ID NO: 289016 - DNA, 30 bp, Artificial Sequence
  Synthetic oligonucleotide
ccattatcgagcccgctaaccaaagtaccc

SEQ ID NO: 289017 - DNA, 30 bp, Artificial Sequence
  Synthetic oligonucleotide
acggtttactgggttaaacttgtcgtaccc

SEQ ID NO: 289018 - DNA, 30 bp, Artificial Sequence
  Synthetic oligonucleotide
caagagaggaagctggatccgtcggtaccc

SEQ ID NO: 289019 - DNA, 30 bp, Artificial Sequence
  Synthetic oligonucleotide
tagaacgttcaattttagatgtcggtaccc

SEQ ID NO: 289020 - DNA, 30 bp, Artificial Sequence
  Synthetic oligonucleotide
agatggttgagctcaaaaaatagtgtaccc

SEQ ID NO: 289021 - DNA, 30 bp, Artificial Sequence
  Synthetic oligonucleotide
gtccgaaggtcctgttgaggttgattaccc

SEQ ID NO: 289022 - DNA, 30 bp, Artificial Sequence
  Synthetic oligonucleotide
ggaaacttgctccaaaagtccttattaccc

SEQ ID NO: 289023 - DNA, 30 bp, Artificial Sequence
  Synthetic oligonucleotide
gtgcacttcacacaccacacaccgttaccc

SEQ ID NO: 289024 - DNA, 30 bp, Artificial Sequence
  Synthetic oligonucleotide
tgcttccagctgtgtgtgtatgctttaccc

SEQ ID NO: 289025 - DNA, 30 bp, Artificial Sequence
  Synthetic oligonucleotide
gacgcgcgcttatccggaaagcacaacccc

SEQ ID NO: 289026 - DNA, 30 bp, Artificial Sequence
  Synthetic oligonucleotide
gacaactagggtatcagtaaggacaacccc

SEQ ID NO: 289027 - DNA, 30 bp, Artificial Sequence
  Synthetic oligonucleotide
ttccttcccatgttataaacggccaacccc

SEQ ID NO: 289028 - DNA, 30 bp, Artificial Sequence
  Synthetic oligonucleotide
ggtaataaccgagttcgtcgcactaacccc

SEQ ID NO: 289029 - DNA, 30 bp, Artificial Sequence
  Synthetic oligonucleotide
agcaggagcgaatcaccggatagtaacccc

SEQ ID NO: 289030 - DNA, 30 bp, Artificial Sequence
  Synthetic oligonucleotide
tacctctacgctaatatcagtcttaacccc

SEQ ID NO: 289031 - DNA, 30 bp, Artificial Sequence
  Synthetic oligonucleotide
agatatccagactttgcactcggacacccc

SEQ ID NO: 289032 - DNA, 30 bp, Artificial Sequence
  Synthetic oligonucleotide
tgtcgctccgagcaagttataacgcacccc

SEQ ID NO: 289033 - DNA, 30 bp, Artificial Sequence
  Synthetic oligonucleotide
ccttaacacgcgggctggcacactcacccc

SEQ ID NO: 289034 - DNA, 30 bp, Artificial Sequence
  Synthetic oligonucleotide
tcagctacgggccgtcaattcgaagacccc

SEQ ID NO: 289035 - DNA, 30 bp, Artificial Sequence
  Synthetic oligonucleotide
aaagtgactgtcggtataaatacagacccc

SEQ ID NO: 289036 - DNA, 30 bp, Artificial Sequence
  Synthetic oligonucleotide
tcatcttgctgatcgaaggactgcgacccc

SEQ ID NO: 289037 - DNA, 30 bp, Artificial Sequence
  Synthetic oligonucleotide
gcctggcccgaatattagcaatttgacccc

SEQ ID NO: 289038 - DNA, 30 bp, Artificial Sequence
  Synthetic oligonucleotide
acaggcttcgatctcttcgcgatctacccc

SEQ ID NO: 289039 - DNA, 30 bp, Artificial Sequence
  Synthetic oligonucleotide
ttcgaagtgctgagagggtaagacaccccc

SEQ ID NO: 289040 - DNA, 30 bp, Artificial Sequence
  Synthetic oligonucleotide
acgacgggacggaacgtatgtcttaccccc

SEQ ID NO: 289041 - DNA, 30 bp, Artificial Sequence
  Synthetic oligonucleotide
acccactacacgtgggggagtgttaccccc

SEQ ID NO: 289042 - DNA, 30 bp, Artificial Sequence
  Synthetic oligonucleotide
cggtccaggtaataatgatagaaccccccc

SEQ ID NO: 289043 - DNA, 30 bp, Artificial Sequence
  Synthetic oligonucleotide
tttgcgcggtttggggtttcctcccccccc

SEQ ID NO: 289044 - DNA, 30 bp, Artificial Sequence
  Synthetic oligonucleotide
agctaatgttgggagtctatagatcccccc

SEQ ID NO: 289045 - DNA, 30 bp, Artificial Sequence
  Synthetic oligonucleotide
taagttatcggtaccgacacgtgcgccccc

SEQ ID NO: 289046 - DNA, 30 bp, Artificial Sequence
  Synthetic oligonucleotide
ggcagtggactgagacagcatatcgccccc

SEQ ID NO: 289047 - DNA, 30 bp, Artificial Sequence
  Synthetic oligonucleotide
acattgtaatgccaaagccacgcggccccc

SEQ ID NO: 289048 - DNA, 30 bp, Artificial Sequence
  Synthetic oligonucleotide
gccacatgggatctatgttggttggccccc

SEQ ID NO: 289049 - DNA, 30 bp, Artificial Sequence
  Synthetic oligonucleotide
aaaacgtcctgaaattagtgaaatgccccc

SEQ ID NO: 289050 - DNA, 30 bp, Artificial Sequence
  Synthetic oligonucleotide
cgtcctttcggatctgactcaaactccccc

SEQ ID NO: 289051 - DNA, 30 bp, Artificial Sequence
  Synthetic oligonucleotide
acgcgatgcaaacgggtacggaagtccccc

SEQ ID NO: 289052 - DNA, 30 bp, Artificial Sequence
  Synthetic oligonucleotide
ggattcaggctgtctctgtgtgggtccccc

SEQ ID NO: 289053 - DNA, 30 bp, Artificial Sequence
  Synthetic oligonucleotide
tccagcggctgactggtaggctcaagcccc

SEQ ID NO: 289054 - DNA, 30 bp, Artificial Sequence
  Synthetic oligonucleotide
cagacacatgggcgtctggagacgagcccc

SEQ ID NO: 289055 - DNA, 30 bp, Artificial Sequence
  Synthetic oligonucleotide
aagttataaagtgacgctaatcaacgcccc

SEQ ID NO: 289056 - DNA, 30 bp, Artificial Sequence
  Synthetic oligonucleotide
gcccgttgtgaaagcgacagcgcacgcccc

SEQ ID NO: 289057 - DNA, 30 bp, Artificial Sequence
  Synthetic oligonucleotide
tccgtaatggtgacggcaggcctacgcccc

SEQ ID NO: 289058 - DNA, 30 bp, Artificial Sequence
  Synthetic oligonucleotide
gaaaaggccgtatcgttccgaagccgcccc

SEQ ID NO: 289059 - DNA, 30 bp, Artificial Sequence
  Synthetic oligonucleotide
cgatgtcatcattagaacccgagccgcccc

SEQ ID NO: 289060 - DNA, 30 bp, Artificial Sequence
  Synthetic oligonucleotide
gctacataccaggcggtgaataagcgcccc

SEQ ID NO: 289061 - DNA, 30 bp, Artificial Sequence
  Synthetic oligonucleotide
ttagcgctagttatcactcagcggcgcccc

SEQ ID NO: 289062 - DNA, 30 bp, Artificial Sequence
  Synthetic oligonucleotide
gcgtatatctgccccttacgcctgcgcccc

SEQ ID NO: 289063 - DNA, 30 bp, Artificial Sequence
  Synthetic oligonucleotide
tcgtgaagaatgtcaagaagaaaaggcccc

SEQ ID NO: 289064 - DNA, 30 bp, Artificial Sequence
  Synthetic oligonucleotide
tcaggttgagcctagttgcgcaaaggcccc

SEQ ID NO: 289065 - DNA, 30 bp, Artificial Sequence
  Synthetic oligonucleotide
ctggggattcattaagtcggccggtgcccc

SEQ ID NO: 289066 - DNA, 30 bp, Artificial Sequence
  Synthetic oligonucleotide
ccgttgctgcgcactcttcctccaatcccc

SEQ ID NO: 289067 - DNA, 30 bp, Artificial Sequence
  Synthetic oligonucleotide
caacgaaccgatagaatcctgctgatcccc

SEQ ID NO: 289068 - DNA, 30 bp, Artificial Sequence
  Synthetic oligonucleotide
agtcaagtttcagccctccctaacctcccc

SEQ ID NO: 289069 - DNA, 30 bp, Artificial Sequence
  Synthetic oligonucleotide
cagttatatctgctatcagagtggctcccc

SEQ ID NO: 289070 - DNA, 30 bp, Artificial Sequence
  Synthetic oligonucleotide
atgcacttgtggtgccgcaagtcggtcccc

SEQ ID NO: 289071 - DNA, 30 bp, Artificial Sequence
  Synthetic oligonucleotide
agccgaatgtacaacagttacggtgtcccc

SEQ ID NO: 289072 - DNA, 30 bp, Artificial Sequence
  Synthetic oligonucleotide
cctcttttaggcgattaggatgccttcccc

SEQ ID NO: 289073 - DNA, 30 bp, Artificial Sequence
  Synthetic oligonucleotide
agttagcctacgcgtctcttccgcttcccc

SEQ ID NO: 289074 - DNA, 30 bp, Artificial Sequence
  Synthetic oligonucleotide
actgcagggttaagacaacgagagttcccc

SEQ ID NO: 289075 - DNA, 30 bp, Artificial Sequence
  Synthetic oligonucleotide
ggagaatccatgcttgcggacgggttcccc

SEQ ID NO: 289076 - DNA, 30 bp, Artificial Sequence
  Synthetic oligonucleotide
ttcgttccgtagagacaacgctggttcccc

SEQ ID NO: 289077 - DNA, 30 bp, Artificial Sequence
  Synthetic oligonucleotide
atcaaatgcctaaataggccgatgttcccc

SEQ ID NO: 289078 - DNA, 30 bp, Artificial Sequence
  Synthetic oligonucleotide
gacctaatgcatgaacggttcaatttcccc

SEQ ID NO: 289079 - DNA, 30 bp, Artificial Sequence
  Synthetic oligonucleotide
ctggaggcaaagggacggtgtcatttcccc

SEQ ID NO: 289080 - DNA, 30 bp, Artificial Sequence
  Synthetic oligonucleotide
gatcggggcgcgtcgaagtaaggaaagccc

SEQ ID NO: 289081 - DNA, 30 bp, Artificial Sequence
  Synthetic oligonucleotide
gtaagtaatggatcttctaaaaccaagccc

SEQ ID NO: 289082 - DNA, 30 bp, Artificial Sequence
  Synthetic oligonucleotide
gtgggcctccctcacagacccatcaagccc

SEQ ID NO: 289083 - DNA, 30 bp, Artificial Sequence
  Synthetic oligonucleotide
tacagagtttaggggctaagcttcaagccc

SEQ ID NO: 289084 - DNA, 30 bp, Artificial Sequence
  Synthetic oligonucleotide
aagcgagggcgcctacccttatcgaagccc

SEQ ID NO: 289085 - DNA, 30 bp, Artificial Sequence
  Synthetic oligonucleotide
acggagggagctgaacgtgtttctaagccc

SEQ ID NO: 289086 - DNA, 30 bp, Artificial Sequence
  Synthetic oligonucleotide
ttctctatggccattgaagattgtaagccc

SEQ ID NO: 289087 - DNA, 30 bp, Artificial Sequence
  Synthetic oligonucleotide
gtacgcgcacaaaaaagcaggtaacagccc

SEQ ID NO: 289088 - DNA, 30 bp, Artificial Sequence
  Synthetic oligonucleotide
tcctaatggtgaagacacgaaagccagccc

SEQ ID NO: 289089 - DNA, 30 bp, Artificial Sequence
  Synthetic oligonucleotide
aagcccattgtttctttctactagcagccc

SEQ ID NO: 289090 - DNA, 30 bp, Artificial Sequence
  Synthetic oligonucleotide
tggatccgctgcgtacaaacattgcagccc

SEQ ID NO: 289091 - DNA, 30 bp, Artificial Sequence
  Synthetic oligonucleotide
gattgtgtacgccaactgccacctcagccc

SEQ ID NO: 289092 - DNA, 30 bp, Artificial Sequence
  Synthetic oligonucleotide
tcacctagttgcacgcagtgacgagagccc

SEQ ID NO: 289093 - DNA, 30 bp, Artificial Sequence
  Synthetic oligonucleotide
cattgttgagcagtagaaagcgtagagccc

SEQ ID NO: 289094 - DNA, 30 bp, Artificial Sequence
  Synthetic oligonucleotide
ccttaaaggcttacaatccctggcgagccc

SEQ ID NO: 289095 - DNA, 30 bp, Artificial Sequence
  Synthetic oligonucleotide
tgggtgaagtggtagggtgtcatcgagccc

SEQ ID NO: 289096 - DNA, 30 bp, Artificial Sequence
  Synthetic oligonucleotide
attcatttatcatcgccttccagggagccc

SEQ ID NO: 289097 - DNA, 30 bp, Artificial Sequence
  Synthetic oligonucleotide
cagtgaggcactggcttggtttgggagccc

SEQ ID NO: 289098 - DNA, 30 bp, Artificial Sequence
  Synthetic oligonucleotide
gcggcgttcgtcctcagtgatgatgagccc

SEQ ID NO: 289099 - DNA, 30 bp, Artificial Sequence
  Synthetic oligonucleotide
agaaaaggcacgctccgtgagttatagccc

SEQ ID NO: 289100 - DNA, 30 bp, Artificial Sequence
  Synthetic oligonucleotide
gtacgggggtttgaaagattaagctagccc

SEQ ID NO: 289101 - DNA, 30 bp, Artificial Sequence
  Synthetic oligonucleotide
gtgactcgggtcaccagtcccacgtagccc

SEQ ID NO: 289102 - DNA, 30 bp, Artificial Sequence
  Synthetic oligonucleotide
gatccaggcacgacaagcgggaattagccc

SEQ ID NO: 289103 - DNA, 30 bp, Artificial Sequence
  Synthetic oligonucleotide
aacctggcgtatgtatcagagtattagccc

SEQ ID NO: 289104 - DNA, 30 bp, Artificial Sequence
  Synthetic oligonucleotide
gtgagaattgtgagtcacaggtattagccc

SEQ ID NO: 289105 - DNA, 30 bp, Artificial Sequence
  Synthetic oligonucleotide
aacaaggccaatagttcacagatcacgccc

SEQ ID NO: 289106 - DNA, 30 bp, Artificial Sequence
  Synthetic oligonucleotide
gggggccctttatggagtgcaacgacgccc

SEQ ID NO: 289107 - DNA, 30 bp, Artificial Sequence
  Synthetic oligonucleotide
tccgttggagagggagccggtcatacgccc

SEQ ID NO: 289108 - DNA, 30 bp, Artificial Sequence
  Synthetic oligonucleotide
agtgcaatcaccacctccgcatcaccgccc

SEQ ID NO: 289109 - DNA, 30 bp, Artificial Sequence
  Synthetic oligonucleotide
gctggcaacatggcaactcatggaccgccc

SEQ ID NO: 289110 - DNA, 30 bp, Artificial Sequence
  Synthetic oligonucleotide
agcgtatcaccgggccaatgtagcccgccc

SEQ ID NO: 289111 - DNA, 30 bp, Artificial Sequence
  Synthetic oligonucleotide
tgaaggacatgacaggctcgcttgccgccc

SEQ ID NO: 289112 - DNA, 30 bp, Artificial Sequence
  Synthetic oligonucleotide
gaagaaatgaaaggggtgcccaatccgccc

SEQ ID NO: 289113 - DNA, 30 bp, Artificial Sequence
  Synthetic oligonucleotide
cgctgacttggctgccccaatgcagcgccc

SEQ ID NO: 289114 - DNA, 30 bp, Artificial Sequence
  Synthetic oligonucleotide
aggcaacggggacaagctcctcgctcgccc

SEQ ID NO: 289115 - DNA, 30 bp, Artificial Sequence
  Synthetic oligonucleotide
tcacgacgctcataataggaggtgtcgccc

SEQ ID NO: 289116 - DNA, 30 bp, Artificial Sequence
  Synthetic oligonucleotide
gcaacagcacgtaggaggacgggttcgccc

SEQ ID NO: 289117 - DNA, 30 bp, Artificial Sequence
  Synthetic oligonucleotide
ggaggagaaccactttgtgtctgttcgccc

SEQ ID NO: 289118 - DNA, 30 bp, Artificial Sequence
  Synthetic oligonucleotide
tagcaatggccggctacgcgattttcgccc

SEQ ID NO: 289119 - DNA, 30 bp, Artificial Sequence
  Synthetic oligonucleotide
ccgtatgaaagtcaaagcttgacaaggccc

SEQ ID NO: 289120 - DNA, 30 bp, Artificial Sequence
  Synthetic oligonucleotide
gcgccttcctaaaattatttgtccaggccc

SEQ ID NO: 289121 - DNA, 30 bp, Artificial Sequence
  Synthetic oligonucleotide
tctgttacaagacacgggcattgcaggccc

SEQ ID NO: 289122 - DNA, 30 bp, Artificial Sequence
  Synthetic oligonucleotide
aagtggcatgctgagatcttgtcgaggccc

SEQ ID NO: 289123 - DNA, 30 bp, Artificial Sequence
  Synthetic oligonucleotide
tccgtgcgtccagattagtcaattaggccc

SEQ ID NO: 289124 - DNA, 30 bp, Artificial Sequence
  Synthetic oligonucleotide
ggtaaaggttctatcccttatccccggccc

SEQ ID NO: 289125 - DNA, 30 bp, Artificial Sequence
  Synthetic oligonucleotide
gatggtgggtggtgaaggcgggtgcggccc

SEQ ID NO: 289126 - DNA, 30 bp, Artificial Sequence
  Synthetic oligonucleotide
agaggagctaaaggggtgtgggtgcggccc

SEQ ID NO: 289127 - DNA, 30 bp, Artificial Sequence
  Synthetic oligonucleotide
atcacattgttttcaggacttgatcggccc

SEQ ID NO: 289128 - DNA, 30 bp, Artificial Sequence
  Synthetic oligonucleotide
taaagcactgggcgatataattctcggccc

SEQ ID NO: 289129 - DNA, 30 bp, Artificial Sequence
  Synthetic oligonucleotide
aggataatagctgttggttagtgtcggccc

SEQ ID NO: 289130 - DNA, 30 bp, Artificial Sequence
  Synthetic oligonucleotide
gtaagtctcgccaagactatgggcgggccc

SEQ ID NO: 289131 - DNA, 30 bp, Artificial Sequence
  Synthetic oligonucleotide
acgcgagacgcagaatttcgataggggccc

SEQ ID NO: 289132 - DNA, 30 bp, Artificial Sequence
  Synthetic oligonucleotide
taggtcctcaggtataatggaatctggccc

SEQ ID NO: 289133 - DNA, 30 bp, Artificial Sequence
  Synthetic oligonucleotide
gagtatccaacggtgagtgctgcgtggccc

SEQ ID NO: 289134 - DNA, 30 bp, Artificial Sequence
  Synthetic oligonucleotide
ataaagcgagccgctagtgcgtcttggccc

SEQ ID NO: 289135 - DNA, 30 bp, Artificial Sequence
  Synthetic oligonucleotide
gctttatccacatagtacaagctttggccc

SEQ ID NO: 289136 - DNA, 30 bp, Artificial Sequence
  Synthetic oligonucleotide
acagcccatcagcgggcaaaagtttggccc

SEQ ID NO: 289137 - DNA, 30 bp, Artificial Sequence
  Synthetic oligonucleotide
acatggatctgcgctgagtccagaatgccc

SEQ ID NO: 289138 - DNA, 30 bp, Artificial Sequence
  Synthetic oligonucleotide
ctagggcgacccttaaattgcatcatgccc

SEQ ID NO: 289139 - DNA, 30 bp, Artificial Sequence
  Synthetic oligonucleotide
ttccaagcaggttctaatatcccgatgccc

SEQ ID NO: 289140 - DNA, 30 bp, Artificial Sequence
  Synthetic oligonucleotide
gttctaaataaccttaacggtgctatgccc

SEQ ID NO: 289141 - DNA, 30 bp, Artificial Sequence
  Synthetic oligonucleotide
taaagaacaaagatatagtccaacctgccc

SEQ ID NO: 289142 - DNA, 30 bp, Artificial Sequence
  Synthetic oligonucleotide
agcgtcttctcacgcgcgattctcctgccc

SEQ ID NO: 289143 - DNA, 30 bp, Artificial Sequence
  Synthetic oligonucleotide
ggcaggcagaggtgcaaccaggtcctgccc

SEQ ID NO: 289144 - DNA, 30 bp, Artificial Sequence
  Synthetic oligonucleotide
taaatagcaaaacgtaaggtctcgctgccc

SEQ ID NO: 289145 - DNA, 30 bp, Artificial Sequence
  Synthetic oligonucleotide
cgctcaggagggggcatcaggcctctgccc

SEQ ID NO: 289146 - DNA, 30 bp, Artificial Sequence
  Synthetic oligonucleotide
aaggaacatgttcctgggaacagagtgccc

SEQ ID NO: 289147 - DNA, 30 bp, Artificial Sequence
  Synthetic oligonucleotide
tagaccgtgttgatctatgggtgagtgccc

SEQ ID NO: 289148 - DNA, 30 bp, Artificial Sequence
  Synthetic oligonucleotide
gcaggtaaaaacgcctaaggggtagtgccc

SEQ ID NO: 289149 - DNA, 30 bp, Artificial Sequence
  Synthetic oligonucleotide
ttggactatagctgtggcctataggtgccc

SEQ ID NO: 289150 - DNA, 30 bp, Artificial Sequence
  Synthetic oligonucleotide
cggagcagacggtagattacttatgtgccc

SEQ ID NO: 289151 - DNA, 30 bp, Artificial Sequence
  Synthetic oligonucleotide
cgaaagcaggtggccacaagcttcttgccc

SEQ ID NO: 289152 - DNA, 30 bp, Artificial Sequence
  Synthetic oligonucleotide
ctgcgttgagaacgcgctaaggaaaatccc

SEQ ID NO: 289153 - DNA, 30 bp, Artificial Sequence
  Synthetic oligonucleotide
cgcaccgcagtagtacaagcgtgaaatccc

SEQ ID NO: 289154 - DNA, 30 bp, Artificial Sequence
  Synthetic oligonucleotide
gttaagggccccaactacgaccacaatccc

SEQ ID NO: 289155 - DNA, 30 bp, Artificial Sequence
  Synthetic oligonucleotide
gatatatctgttgttcgattagcgaatccc

SEQ ID NO: 289156 - DNA, 30 bp, Artificial Sequence
  Synthetic oligonucleotide
acgtctgccgggtttggatgtacacatccc

SEQ ID NO: 289157 - DNA, 31 bp, Artificial Sequence
  Synthetic oligonucleotide
ctaatgcacagtgtgcttggcaatccatccc

SEQ ID NO: 289158 - DNA, 30 bp, Artificial Sequence
  Synthetic oligonucleotide
cagtcttggagctacagtgcgacgcatccc

SEQ ID NO: 289159 - DNA, 30 bp, Artificial Sequence
  Synthetic oligonucleotide
atctgtcaatattctaaacgcagtcatccc

SEQ ID NO: 289160 - DNA, 30 bp, Artificial Sequence
  Synthetic oligonucleotide
ctaaaaggcgcccccttgtattcggatccc

SEQ ID NO: 289161 - DNA, 30 bp, Artificial Sequence
  Synthetic oligonucleotide
tatagaagtaaggggaaacaaggggatccc

SEQ ID NO: 289162 - DNA, 30 bp, Artificial Sequence
  Synthetic oligonucleotide
aatagagcgtaagaataacctggatatccc

SEQ ID NO: 289163 - DNA, 30 bp, Artificial Sequence
  Synthetic oligonucleotide
cgcagttgtaatctgtggcaggtctatccc

SEQ ID NO: 289164 - DNA, 30 bp, Artificial Sequence
  Synthetic oligonucleotide
gtaaacttaagaccattctttgggtatccc

SEQ ID NO: 289165 - DNA, 30 bp, Artificial Sequence
  Synthetic oligonucleotide
cacatcttaaaaagtaaagatagttatccc

SEQ ID NO: 289166 - DNA, 30 bp, Artificial Sequence
  Synthetic oligonucleotide
tggcgcaaggccggagtggcatcaactccc

SEQ ID NO: 289167 - DNA, 30 bp, Artificial Sequence
  Synthetic oligonucleotide
cggctgttaattctgccaactgtaactccc

SEQ ID NO: 289168 - DNA, 30 bp, Artificial Sequence
  Synthetic oligonucleotide
caactaaactgtcgcatccagccacctccc

SEQ ID NO: 289169 - DNA, 30 bp, Artificial Sequence
  Synthetic oligonucleotide
gtcgtaacctcaatataagcagatcctccc

SEQ ID NO: 289170 - DNA, 30 bp, Artificial Sequence
  Synthetic oligonucleotide
acggagatggcccgtggtacccctcctccc

SEQ ID NO: 289171 - DNA, 30 bp, Artificial Sequence
  Synthetic oligonucleotide
cgctcagtcaccgaggctgcacccgctccc

SEQ ID NO: 289172 - DNA, 30 bp, Artificial Sequence
  Synthetic oligonucleotide
accagaagtgagaccaataaccccgctccc

SEQ ID NO: 289173 - DNA, 30 bp, Artificial Sequence
  Synthetic oligonucleotide
gtcgtatgtgtagctgttactgaggctccc

SEQ ID NO: 289174 - DNA, 30 bp, Artificial Sequence
  Synthetic oligonucleotide
cgaccagctacgtaaagatagccttctccc

SEQ ID NO: 289175 - DNA, 30 bp, Artificial Sequence
  Synthetic oligonucleotide
atgtgttccaatcgaatgagacgaagtccc

SEQ ID NO: 289176 - DNA, 30 bp, Artificial Sequence
  Synthetic oligonucleotide
tatggcgtggaacaccatgcaggaagtccc

SEQ ID NO: 289177 - DNA, 30 bp, Artificial Sequence
  Synthetic oligonucleotide
tatagcaccggtccacaggcacatagtccc

SEQ ID NO: 289178 - DNA, 30 bp, Artificial Sequence
  Synthetic oligonucleotide
cacctttcctacatcggcttcagacgtccc

SEQ ID NO: 289179 - DNA, 30 bp, Artificial Sequence
  Synthetic oligonucleotide
ttaatcgggaaagtggagttcttacgtccc

SEQ ID NO: 289180 - DNA, 30 bp, Artificial Sequence
  Synthetic oligonucleotide
gcttactgagaacatttggtcgcccgtccc

SEQ ID NO: 289181 - DNA, 31 bp, Artificial Sequence
  Synthetic oligonucleotide
acgaagtgtagtgatgcggatactgcgtccc

SEQ ID NO: 289182 - DNA, 30 bp, Artificial Sequence
  Synthetic oligonucleotide
tttgaccagaaattcggttagtacggtccc

SEQ ID NO: 289183 - DNA, 30 bp, Artificial Sequence
  Synthetic oligonucleotide
ataagctaccgaagccttgtacccggtccc

SEQ ID NO: 289184 - DNA, 30 bp, Artificial Sequence
  Synthetic oligonucleotide
cctcaccgcaacaggcaatatctcggtccc

SEQ ID NO: 289185 - DNA, 30 bp, Artificial Sequence
  Synthetic oligonucleotide
ctccaagtttaataagtgtaattcggtccc

SEQ ID NO: 289186 - DNA, 30 bp, Artificial Sequence
  Synthetic oligonucleotide
atcgatataggtccgcggaataatggtccc

SEQ ID NO: 289187 - DNA, 30 bp, Artificial Sequence
  Synthetic oligonucleotide
cttactaatgctttgactctatcgtgtccc

SEQ ID NO: 289188 - DNA, 30 bp, Artificial Sequence
  Synthetic oligonucleotide
taacttgcgtatgtgcgcacgatgtgtccc

SEQ ID NO: 289189 - DNA, 30 bp, Artificial Sequence
  Synthetic oligonucleotide
aagaagctgtacgaaaccgcgcattgtccc

SEQ ID NO: 289190 - DNA, 30 bp, Artificial Sequence
  Synthetic oligonucleotide
gggagataagagagtcttgcggcttgtccc

SEQ ID NO: 289191 - DNA, 30 bp, Artificial Sequence
  Synthetic oligonucleotide
ctcttctcccaatccaagactaagattccc

SEQ ID NO: 289192 - DNA, 30 bp, Artificial Sequence
  Synthetic oligonucleotide
cctatgtgtttttcctgggcagggattccc

SEQ ID NO: 289193 - DNA, 30 bp, Artificial Sequence
  Synthetic oligonucleotide
cttgctgctttggtaactagtggccttccc

SEQ ID NO: 289194 - DNA, 30 bp, Artificial Sequence
  Synthetic oligonucleotide
gtaactacttattagatggtgcgagttccc

SEQ ID NO: 289195 - DNA, 30 bp, Artificial Sequence
  Synthetic oligonucleotide
gtacaaacgaagatccgatagatagttccc

SEQ ID NO: 289196 - DNA, 30 bp, Artificial Sequence
  Synthetic oligonucleotide
gtgactgactgcatgttctgaatcgttccc

SEQ ID NO: 289197 - DNA, 31 bp, Artificial Sequence
  Synthetic oligonucleotide
agcacgggaaaacacgcgtttcacggttccc

SEQ ID NO: 289198 - DNA, 30 bp, Artificial Sequence
  Synthetic oligonucleotide
tcgccccatgcattgtgtgtcaactttccc

SEQ ID NO: 289199 - DNA, 30 bp, Artificial Sequence
  Synthetic oligonucleotide
aacctgcacggctcgtcatccttgtttccc

SEQ ID NO: 289200 - DNA, 30 bp, Artificial Sequence
  Synthetic oligonucleotide
atgacttaaaacgattattggtgttttccc

SEQ ID NO: 289201 - DNA, 31 bp, Artificial Sequence
  Synthetic oligonucleotide
gatcgttcaaacagacaggggcatttttccc

SEQ ID NO: 289202 - DNA, 30 bp, Artificial Sequence
  Synthetic oligonucleotide
ctattgtcagtcttggacaagtaaaaagcc

SEQ ID NO: 289203 - DNA, 30 bp, Artificial Sequence
  Synthetic oligonucleotide
gcgacctgtcaggtaaagtaaacaaaagcc

SEQ ID NO: 289204 - DNA, 30 bp, Artificial Sequence
  Synthetic oligonucleotide
ctccagtcggatagtgagcacccaaaagcc

SEQ ID NO: 289205 - DNA, 30 bp, Artificial Sequence
  Synthetic oligonucleotide
gcgaaaatcacaagcgagtgcaccaaagcc

SEQ ID NO: 289206 - DNA, 30 bp, Artificial Sequence
  Synthetic oligonucleotide
gcggtgtccacactttgtcaggagaaagcc

SEQ ID NO: 289207 - DNA, 30 bp, Artificial Sequence
  Synthetic oligonucleotide
ccgggctgacgtagctctatcgggaaagcc

SEQ ID NO: 289208 - DNA, 30 bp, Artificial Sequence
  Synthetic oligonucleotide
ggggtggaccgaccgcgagttttgaaagcc

SEQ ID NO: 289209 - DNA, 30 bp, Artificial Sequence
  Synthetic oligonucleotide
ttgctccggtctgaccaggtaggtaaagcc

SEQ ID NO: 289210 - DNA, 30 bp, Artificial Sequence
  Synthetic oligonucleotide
ggcccactggatcggaatgccgtccaagcc

SEQ ID NO: 289211 - DNA, 30 bp, Artificial Sequence
  Synthetic oligonucleotide
gaaggtattgggcatggattctcgcaagcc

SEQ ID NO: 289212 - DNA, 30 bp, Artificial Sequence
  Synthetic oligonucleotide
actacatgtataaaggcaggaatgcaagcc

SEQ ID NO: 289213 - DNA, 30 bp, Artificial Sequence
  Synthetic oligonucleotide
ccagtggcgcccagactccgataggaagcc

SEQ ID NO: 289214 - DNA, 30 bp, Artificial Sequence
  Synthetic oligonucleotide
cctatcgccaggtgccagctattggaagcc

SEQ ID NO: 289215 - DNA, 30 bp, Artificial Sequence
  Synthetic oligonucleotide
cagtacgggctggagcgtgagcctgaagcc

SEQ ID NO: 289216 - DNA, 30 bp, Artificial Sequence
  Synthetic oligonucleotide
atggcggattatgtttaaaaaagtgaagcc

SEQ ID NO: 289217 - DNA, 30 bp, Artificial Sequence
  Synthetic oligonucleotide
caaaattgcgatgccatcacgcgtgaagcc

SEQ ID NO: 289218 - DNA, 30 bp, Artificial Sequence
  Synthetic oligonucleotide
gagcagggcccattctccagtggtgaagcc

SEQ ID NO: 289219 - DNA, 30 bp, Artificial Sequence
  Synthetic oligonucleotide
ggaggtcattatacttaggggaaataagcc

SEQ ID NO: 289220 - DNA, 30 bp, Artificial Sequence
  Synthetic oligonucleotide
gttcccaaacttcgaagtggtccataagcc

SEQ ID NO: 289221 - DNA, 30 bp, Artificial Sequence
  Synthetic oligonucleotide
ggacacggcaattagataattcggtaagcc

SEQ ID NO: 289222 - DNA, 30 bp, Artificial Sequence
  Synthetic oligonucleotide
agccagtcaatcttaattaagttgtaagcc

SEQ ID NO: 289223 - DNA, 30 bp, Artificial Sequence
  Synthetic oligonucleotide
tggcagtaattaattagtgcgttgtaagcc

SEQ ID NO: 289224 - DNA, 30 bp, Artificial Sequence
  Synthetic oligonucleotide
ttaagggaggttaggactaacatgacagcc

SEQ ID NO: 289225 - DNA, 30 bp, Artificial Sequence
  Synthetic oligonucleotide
tcccgtcatctgagcgggtgcaatacagcc

SEQ ID NO: 289226 - DNA, 30 bp, Artificial Sequence
  Synthetic oligonucleotide
ttgcagacggtgtgtataataattacagcc

SEQ ID NO: 289227 - DNA, 30 bp, Artificial Sequence
  Synthetic oligonucleotide
ttcgcggaacccgaaagatatagaccagcc

SEQ ID NO: 289228 - DNA, 30 bp, Artificial Sequence
  Synthetic oligonucleotide
tgctttgatcccgtaggggagtccccagcc

SEQ ID NO: 289229 - DNA, 30 bp, Artificial Sequence
  Synthetic oligonucleotide
ggggccagaaccgagcagactcagccagcc

SEQ ID NO: 289230 - DNA, 30 bp, Artificial Sequence
  Synthetic oligonucleotide
aatgaattgtctgccactgacttgccagcc

SEQ ID NO: 289231 - DNA, 30 bp, Artificial Sequence
  Synthetic oligonucleotide
ggttgtcattagagttcaagtactccagcc

SEQ ID NO: 289232 - DNA, 30 bp, Artificial Sequence
  Synthetic oligonucleotide
tacggtgaataagcgttatggcctccagcc

SEQ ID NO: 289233 - DNA, 30 bp, Artificial Sequence
  Synthetic oligonucleotide
gattaatggagaggagatagatctccagcc

SEQ ID NO: 289234 - DNA, 30 bp, Artificial Sequence
  Synthetic oligonucleotide
agccgtctcaacaaggtcttgcaagcagcc

SEQ ID NO: 289235 - DNA, 30 bp, Artificial Sequence
  Synthetic oligonucleotide
tactccctcgcccaagatcccggagcagcc

SEQ ID NO: 289236 - DNA, 30 bp, Artificial Sequence
  Synthetic oligonucleotide
tagaacctgctagtaagcacattagcagcc

SEQ ID NO: 289237 - DNA, 30 bp, Artificial Sequence
  Synthetic oligonucleotide
tacgtcggccagcggcacaagtacgcagcc

SEQ ID NO: 289238 - DNA, 30 bp, Artificial Sequence
  Synthetic oligonucleotide
aagcgggtacttaaacagccaactgcagcc

SEQ ID NO: 289239 - DNA, 30 bp, Artificial Sequence
  Synthetic oligonucleotide
ttattgcctgattacaccttacttgcagcc

SEQ ID NO: 289240 - DNA, 30 bp, Artificial Sequence
  Synthetic oligonucleotide
acagagaaaaataagcgcaatgcaagagcc

SEQ ID NO: 289241 - DNA, 30 bp, Artificial Sequence
  Synthetic oligonucleotide
gttcaacgattatttaaggatcggagagcc

SEQ ID NO: 289242 - DNA, 30 bp, Artificial Sequence
  Synthetic oligonucleotide
cggcaaaaaaactcgtctgttttgagagcc

SEQ ID NO: 289243 - DNA, 30 bp, Artificial Sequence
  Synthetic oligonucleotide
ccacgaatgacagcgtcagcagcccgagcc

SEQ ID NO: 289244 - DNA, 30 bp, Artificial Sequence
  Synthetic oligonucleotide
atattaaaccactgaccaatcgcccgagcc

SEQ ID NO: 289245 - DNA, 30 bp, Artificial Sequence
  Synthetic oligonucleotide
aacttgagtcatccagcatttcaaggagcc

SEQ ID NO: 289246 - DNA, 30 bp, Artificial Sequence
  Synthetic oligonucleotide
gtgattcatgcaacaacaggctaaggagcc

SEQ ID NO: 289247 - DNA, 30 bp, Artificial Sequence
  Synthetic oligonucleotide
aattcaactggggaagagaccggcggagcc

SEQ ID NO: 289248 - DNA, 30 bp, Artificial Sequence
  Synthetic oligonucleotide
aatgttatgtgggccgagacgttatgagcc

SEQ ID NO: 289249 - DNA, 30 bp, Artificial Sequence
  Synthetic oligonucleotide
ctttgtccagctctcggaccttagtgagcc

SEQ ID NO: 289250 - DNA, 30 bp, Artificial Sequence
  Synthetic oligonucleotide
gagatgtgatccaagttcggatggtgagcc

SEQ ID NO: 289251 - DNA, 30 bp, Artificial Sequence
  Synthetic oligonucleotide
ccgagtggtgctgatgcacccgattgagcc

SEQ ID NO: 289252 - DNA, 30 bp, Artificial Sequence
  Synthetic oligonucleotide
ggattcaggtcgatatcgcccagttgagcc

SEQ ID NO: 289253 - DNA, 30 bp, Artificial Sequence
  Synthetic oligonucleotide
tcataaaaggtgcgattggcacgttgagcc

SEQ ID NO: 289254 - DNA, 31 bp, Artificial Sequence
  Synthetic oligonucleotide
tggtctcccctataaaggccctgaaatagcc

SEQ ID NO: 289255 - DNA, 30 bp, Artificial Sequence
  Synthetic oligonucleotide
tcctgtctcacaaggtgagcgttaatagcc

SEQ ID NO: 289256 - DNA, 30 bp, Artificial Sequence
  Synthetic oligonucleotide
gggccacgtagattggacggccccatagcc

SEQ ID NO: 289257 - DNA, 30 bp, Artificial Sequence
  Synthetic oligonucleotide
tataggtagataacatctgagcccatagcc

SEQ ID NO: 289258 - DNA, 30 bp, Artificial Sequence
  Synthetic oligonucleotide
agcgcacggttatccgtgcttggcatagcc

SEQ ID NO: 289259 - DNA, 30 bp, Artificial Sequence
  Synthetic oligonucleotide
gttctggacatacgcatgtctatcatagcc

SEQ ID NO: 289260 - DNA, 30 bp, Artificial Sequence
  Synthetic oligonucleotide
gggtcttatcgcttaaacgtagtcatagcc

SEQ ID NO: 289261 - DNA, 30 bp, Artificial Sequence
  Synthetic oligonucleotide
atatctcaacaatctgctgcaaagatagcc

SEQ ID NO: 289262 - DNA, 30 bp, Artificial Sequence
  Synthetic oligonucleotide
gtcaataacatagactatccgttgatagcc

SEQ ID NO: 289263 - DNA, 30 bp, Artificial Sequence
  Synthetic oligonucleotide
gctgagtaaataagggcactaggtatagcc

SEQ ID NO: 289264 - DNA, 30 bp, Artificial Sequence
  Synthetic oligonucleotide
tgtaaatttgcagggtatagggttatagcc

SEQ ID NO: 289265 - DNA, 30 bp, Artificial Sequence
  Synthetic oligonucleotide
gtgcggacctaaggccagtattttatagcc

SEQ ID NO: 289266 - DNA, 30 bp, Artificial Sequence
  Synthetic oligonucleotide
agcttaataggcatcccattataactagcc

SEQ ID NO: 289267 - DNA, 30 bp, Artificial Sequence
  Synthetic oligonucleotide
tcatctgcaccgcccttttggcgactagcc

SEQ ID NO: 289268 - DNA, 30 bp, Artificial Sequence
  Synthetic oligonucleotide
cttcgtagcagcataaaacttaagctagcc

SEQ ID NO: 289269 - DNA, 30 bp, Artificial Sequence
  Synthetic oligonucleotide
taagcgggcaaggcgtgataggttctagcc

SEQ ID NO: 289270 - DNA, 30 bp, Artificial Sequence
  Synthetic oligonucleotide
acacaccgcctttcgcaggacaacgtagcc

SEQ ID NO: 289271 - DNA, 30 bp, Artificial Sequence
  Synthetic oligonucleotide
tttaagtgcgtagctgatgaaaccgtagcc

SEQ ID NO: 289272 - DNA, 30 bp, Artificial Sequence
  Synthetic oligonucleotide
tattatcgacctgtaccacagcgcgtagcc

SEQ ID NO: 289273 - DNA, 30 bp, Artificial Sequence
  Synthetic oligonucleotide
taaaatacctgcctaggattggcggtagcc

SEQ ID NO: 289274 - DNA, 30 bp, Artificial Sequence
  Synthetic oligonucleotide
tacacctcgtaagatcaagggcttgtagcc

SEQ ID NO: 289275 - DNA, 30 bp, Artificial Sequence
  Synthetic oligonucleotide
gatcgactaatattttaagtgaacttagcc

SEQ ID NO: 289276 - DNA, 30 bp, Artificial Sequence
  Synthetic oligonucleotide
ttcattaacagtagcatgtatcgcttagcc

SEQ ID NO: 289277 - DNA, 30 bp, Artificial Sequence
  Synthetic oligonucleotide
aagcatcgaacctagaccgcggagttagcc

SEQ ID NO: 289278 - DNA, 30 bp, Artificial Sequence
  Synthetic oligonucleotide
cgttgccaagtacaggtgttacttttagcc

SEQ ID NO: 289279 - DNA, 30 bp, Artificial Sequence
  Synthetic oligonucleotide
agcaagatatatacctgatatcttttagcc

SEQ ID NO: 289280 - DNA, 30 bp, Artificial Sequence
  Synthetic oligonucleotide
gaagggagcaggaatgaaagatcaaacgcc

SEQ ID NO: 289281 - DNA, 30 bp, Artificial Sequence
  Synthetic oligonucleotide
cgctagaccgcatcatggactgccaacgcc

SEQ ID NO: 289282 - DNA, 30 bp, Artificial Sequence
  Synthetic oligonucleotide
tgtattgtaaggacatccctggagaacgcc

SEQ ID NO: 289283 - DNA, 30 bp, Artificial Sequence
  Synthetic oligonucleotide
aaacgattctgcgtaccgcacgcgaacgcc

SEQ ID NO: 289284 - DNA, 30 bp, Artificial Sequence
  Synthetic oligonucleotide
ttaacgaagacccgttacatggggaacgcc

SEQ ID NO: 289285 - DNA, 30 bp, Artificial Sequence
  Synthetic oligonucleotide
ctacgtttagtcctattggcatctaacgcc

SEQ ID NO: 289286 - DNA, 30 bp, Artificial Sequence
  Synthetic oligonucleotide
aggcaggctgtctgaagtcggcgtaacgcc

SEQ ID NO: 289287 - DNA, 30 bp, Artificial Sequence
  Synthetic oligonucleotide
gaaccgaaacgcaactgctcttaacacgcc

SEQ ID NO: 289288 - DNA, 30 bp, Artificial Sequence
  Synthetic oligonucleotide
gtaggggaagagaggtatgcggcacacgcc

SEQ ID NO: 289289 - DNA, 30 bp, Artificial Sequence
  Synthetic oligonucleotide
tacaatgtatgcacgtggtcccgacacgcc

SEQ ID NO: 289290 - DNA, 30 bp, Artificial Sequence
  Synthetic oligonucleotide
acgaagtcagctaagttatccggacacgcc

SEQ ID NO: 289291 - DNA, 30 bp, Artificial Sequence
  Synthetic oligonucleotide
tgagcatacccgacaattaaggtacacgcc

SEQ ID NO: 289292 - DNA, 30 bp, Artificial Sequence
  Synthetic oligonucleotide
tagcgtcagcggtaggcgatcgtccacgcc

SEQ ID NO: 289293 - DNA, 30 bp, Artificial Sequence
  Synthetic oligonucleotide
agcgccaaattggagtaacggccgcacgcc

SEQ ID NO: 289294 - DNA, 30 bp, Artificial Sequence
  Synthetic oligonucleotide
ataactggctacggatttttcaggcacgcc

SEQ ID NO: 289295 - DNA, 30 bp, Artificial Sequence
  Synthetic oligonucleotide
attgggatacacatcacgtccgtgcacgcc

SEQ ID NO: 289296 - DNA, 30 bp, Artificial Sequence
  Synthetic oligonucleotide
aatactaagcttaacagacgggtgcacgcc

SEQ ID NO: 289297 - DNA, 30 bp, Artificial Sequence
  Synthetic oligonucleotide
cctcaaagtggctcagatcatagtcacgcc

SEQ ID NO: 289298 - DNA, 30 bp, Artificial Sequence
  Synthetic oligonucleotide
ttgaacgacagatggcaaacaagagacgcc

SEQ ID NO: 289299 - DNA, 30 bp, Artificial Sequence
  Synthetic oligonucleotide
cagtaacgaaaatggttagcaggagacgcc

SEQ ID NO: 289300 - DNA, 30 bp, Artificial Sequence
  Synthetic oligonucleotide
gccaagggcgtgtaatgataagtagacgcc

SEQ ID NO: 289301 - DNA, 30 bp, Artificial Sequence
  Synthetic oligonucleotide
aactcagatccaaaccggtaggtggacgcc

SEQ ID NO: 289302 - DNA, 30 bp, Artificial Sequence
  Synthetic oligonucleotide
cattgggctcgactcatgtgagcctacgcc

SEQ ID NO: 289303 - DNA, 30 bp, Artificial Sequence
  Synthetic oligonucleotide
gagaccattgagtcacgtatgcacaccgcc

SEQ ID NO: 289304 - DNA, 30 bp, Artificial Sequence
  Synthetic oligonucleotide
ttgattccagtagtggacagtaagaccgcc

SEQ ID NO: 289305 - DNA, 30 bp, Artificial Sequence
  Synthetic oligonucleotide
tcacttttgaggcgcgccccccggaccgcc

SEQ ID NO: 289306 - DNA, 30 bp, Artificial Sequence
  Synthetic oligonucleotide
attctcataagaatagtttgaaataccgcc

SEQ ID NO: 289307 - DNA, 30 bp, Artificial Sequence
  Synthetic oligonucleotide
ccaaatcggtaaggactaccctaccccgcc

SEQ ID NO: 289308 - DNA, 30 bp, Artificial Sequence
  Synthetic oligonucleotide
atgagggagataaactaatcttctcccgcc

SEQ ID NO: 289309 - DNA, 30 bp, Artificial Sequence
  Synthetic oligonucleotide
ggatggacatccgggtcagggcaagccgcc

SEQ ID NO: 289310 - DNA, 30 bp, Artificial Sequence
  Synthetic oligonucleotide
gggatgacctcgacggcaaagacagccgcc

SEQ ID NO: 289311 - DNA, 30 bp, Artificial Sequence
  Synthetic oligonucleotide
taccgccgcgttgtaaaatcttacgccgcc

SEQ ID NO: 289312 - DNA, 30 bp, Artificial Sequence
  Synthetic oligonucleotide
gcgcgtccgatgtatgcttttttcgccgcc

SEQ ID NO: 289313 - DNA, 30 bp, Artificial Sequence
  Synthetic oligonucleotide
ggtaggaaattgtgaacacgctaatccgcc

SEQ ID NO: 289314 - DNA, 30 bp, Artificial Sequence
  Synthetic oligonucleotide
tacacataaaggagttacgtaatctccgcc

SEQ ID NO: 289315 - DNA, 30 bp, Artificial Sequence
  Synthetic oligonucleotide
atctgccctcgtactatacacgattccgcc

SEQ ID NO: 289316 - DNA, 30 bp, Artificial Sequence
  Synthetic oligonucleotide
agtaaaggaactgtactacagacttccgcc

SEQ ID NO: 289317 - DNA, 30 bp, Artificial Sequence
  Synthetic oligonucleotide
cagggtgagctgatggatgaattttccgcc

SEQ ID NO: 289318 - DNA, 30 bp, Artificial Sequence
  Synthetic oligonucleotide
ggaggacaagccattagccgtctaagcgcc

SEQ ID NO: 289319 - DNA, 30 bp, Artificial Sequence
  Synthetic oligonucleotide
atggctctcggaggggaggcctccagcgcc

SEQ ID NO: 289320 - DNA, 30 bp, Artificial Sequence
  Synthetic oligonucleotide
tgatttagttcggtgggaagtggcagcgcc

SEQ ID NO: 289321 - DNA, 30 bp, Artificial Sequence
  Synthetic oligonucleotide
aatcggctcattgacctttagctcagcgcc

SEQ ID NO: 289322 - DNA, 30 bp, Artificial Sequence
  Synthetic oligonucleotide
accgtaaataacctcctgggtttcagcgcc

SEQ ID NO: 289323 - DNA, 30 bp, Artificial Sequence
  Synthetic oligonucleotide
acggtcacgtgtacgcacgtatggagcgcc

SEQ ID NO: 289324 - DNA, 30 bp, Artificial Sequence
  Synthetic oligonucleotide
ggaagacgtagggcggtagtaaatagcgcc

SEQ ID NO: 289325 - DNA, 30 bp, Artificial Sequence
  Synthetic oligonucleotide
catgacaccaggtcgtaagcgtctagcgcc

SEQ ID NO: 289326 - DNA, 30 bp, Artificial Sequence
  Synthetic oligonucleotide
gagaacgctccatccgcggccagtagcgcc

SEQ ID NO: 289327 - DNA, 30 bp, Artificial Sequence
  Synthetic oligonucleotide
cggtgcggttgacatggcatcatccgcgcc

SEQ ID NO: 289328 - DNA, 30 bp, Artificial Sequence
  Synthetic oligonucleotide
acaaaggtgtccgctcgtttcccgggcgcc

SEQ ID NO: 289329 - DNA, 30 bp, Artificial Sequence
  Synthetic oligonucleotide
aaagtgcgacaaggatgttgactgggcgcc

SEQ ID NO: 289330 - DNA, 30 bp, Artificial Sequence
  Synthetic oligonucleotide
tcctacatatattgtctgcgtaaatgcgcc

SEQ ID NO: 289331 - DNA, 30 bp, Artificial Sequence
  Synthetic oligonucleotide
tacggctcgctaggcgacgaacggtgcgcc

SEQ ID NO: 289332 - DNA, 30 bp, Artificial Sequence
  Synthetic oligonucleotide
aaaactcgcgtgatattgcctgggtgcgcc

SEQ ID NO: 289333 - DNA, 30 bp, Artificial Sequence
  Synthetic oligonucleotide
ttgtcgcacggaaagaagctgttgtgcgcc

SEQ ID NO: 289334 - DNA, 30 bp, Artificial Sequence
  Synthetic oligonucleotide
actcgaaaatacagttaatcgcaaatcgcc

SEQ ID NO: 289335 - DNA, 30 bp, Artificial Sequence
  Synthetic oligonucleotide
acttttatcggacaaaaatcaataatcgcc

SEQ ID NO: 289336 - DNA, 30 bp, Artificial Sequence
  Synthetic oligonucleotide
tctcttgaatagcctaagaaatcgatcgcc

SEQ ID NO: 289337 - DNA, 30 bp, Artificial Sequence
  Synthetic oligonucleotide
ccgtttgacatactctcggtctatatcgcc

SEQ ID NO: 289338 - DNA, 30 bp, Artificial Sequence
  Synthetic oligonucleotide
actgaacgaggtggaaacatccaactcgcc

SEQ ID NO: 289339 - DNA, 30 bp, Artificial Sequence
  Synthetic oligonucleotide
gacccagacaaagacgtggagctactcgcc

SEQ ID NO: 289340 - DNA, 31 bp, Artificial Sequence
  Synthetic oligonucleotide
gtaagtaagctctacctcgaggcacctcgcc

SEQ ID NO: 289341 - DNA, 30 bp, Artificial Sequence
  Synthetic oligonucleotide
cggttgagtatagctccattgtgtctcgcc

SEQ ID NO: 289342 - DNA, 30 bp, Artificial Sequence
  Synthetic oligonucleotide
gccataaaagtgactgcacatgttctcgcc

SEQ ID NO: 289343 - DNA, 30 bp, Artificial Sequence
  Synthetic oligonucleotide
ctaacacgagtagtgacgattgaagtcgcc

SEQ ID NO: 289344 - DNA, 30 bp, Artificial Sequence
  Synthetic oligonucleotide
aggtgtagaatcgggttgtttctagtcgcc

SEQ ID NO: 289345 - DNA, 30 bp, Artificial Sequence
  Synthetic oligonucleotide
taccggcaaaccgaagccgtttacgtcgcc

SEQ ID NO: 289346 - DNA, 30 bp, Artificial Sequence
  Synthetic oligonucleotide
aataaggagcacgactaccatggcgtcgcc

SEQ ID NO: 289347 - DNA, 30 bp, Artificial Sequence
  Synthetic oligonucleotide
gcactgtaacggaatcagtgcctcgtcgcc

SEQ ID NO: 289348 - DNA, 30 bp, Artificial Sequence
  Synthetic oligonucleotide
aaggggcggatagcagagttttaggtcgcc

SEQ ID NO: 289349 - DNA, 30 bp, Artificial Sequence
  Synthetic oligonucleotide
cgtttgcccgcagtttcatctaaattcgcc

SEQ ID NO: 289350 - DNA, 29 bp, Artificial Sequence
  Synthetic oligonucleotide
atcgcgactatcagtacctggtattcgcc

SEQ ID NO: 289351 - DNA, 30 bp, Artificial Sequence
  Synthetic oligonucleotide
ggccagacatgtccgagttgccccttcgcc

SEQ ID NO: 289352 - DNA, 30 bp, Artificial Sequence
  Synthetic oligonucleotide
atttacaggtttatcagcgtgggcttcgcc

SEQ ID NO: 289353 - DNA, 30 bp, Artificial Sequence
  Synthetic oligonucleotide
agcagcccaggttgctgttaatttttcgcc

SEQ ID NO: 289354 - DNA, 30 bp, Artificial Sequence
  Synthetic oligonucleotide
gcatgaccgcgtcaaactatgcaaaaggcc

SEQ ID NO: 289355 - DNA, 30 bp, Artificial Sequence
  Synthetic oligonucleotide
cagggggtgcctgcagaggcaataaaggcc

SEQ ID NO: 289356 - DNA, 30 bp, Artificial Sequence
  Synthetic oligonucleotide
tggaccacacagcgtgtagttctaaaggcc

SEQ ID NO: 289357 - DNA, 30 bp, Artificial Sequence
  Synthetic oligonucleotide
gatgccaatgaagcatgaaattaccaggcc

SEQ ID NO: 289358 - DNA, 30 bp, Artificial Sequence
  Synthetic oligonucleotide
tcaggtttattttaccccattcagcaggcc

SEQ ID NO: 289359 - DNA, 30 bp, Artificial Sequence
  Synthetic oligonucleotide
cgcagtgattacaccgggattcatcaggcc

SEQ ID NO: 289360 - DNA, 30 bp, Artificial Sequence
  Synthetic oligonucleotide
acaagaaagttcggtaagcggcctcaggcc

SEQ ID NO: 289361 - DNA, 30 bp, Artificial Sequence
  Synthetic oligonucleotide
tcgagaaaccttttacggcggtgtcaggcc

SEQ ID NO: 289362 - DNA, 30 bp, Artificial Sequence
  Synthetic oligonucleotide
cttgatacgacctacaagggtgcagaggcc

SEQ ID NO: 289363 - DNA, 30 bp, Artificial Sequence
  Synthetic oligonucleotide
tcccgagatgtagggggaatttcagaggcc

SEQ ID NO: 289364 - DNA, 30 bp, Artificial Sequence
  Synthetic oligonucleotide
ttagacacatttctctttgtgggcgaggcc

SEQ ID NO: 289365 - DNA, 30 bp, Artificial Sequence
  Synthetic oligonucleotide
tcttctgccactcggtttacctcggaggcc

SEQ ID NO: 289366 - DNA, 30 bp, Artificial Sequence
  Synthetic oligonucleotide
gtcattgagagattgtccacttgggaggcc

SEQ ID NO: 289367 - DNA, 30 bp, Artificial Sequence
  Synthetic oligonucleotide
tttacgtgctcgtatggtaattatgaggcc

SEQ ID NO: 289368 - DNA, 30 bp, Artificial Sequence
  Synthetic oligonucleotide
ggaaccgttaaaaaaggtcggcctgaggcc

SEQ ID NO: 289369 - DNA, 30 bp, Artificial Sequence
  Synthetic oligonucleotide
cttgcgtcagtcagcggcatattataggcc

SEQ ID NO: 289370 - DNA, 30 bp, Artificial Sequence
  Synthetic oligonucleotide
ggcagactgaccagaccagatcgttaggcc

SEQ ID NO: 289371 - DNA, 30 bp, Artificial Sequence
  Synthetic oligonucleotide
gtggaattaccaggtaaaagcatttaggcc

SEQ ID NO: 289372 - DNA, 30 bp, Artificial Sequence
  Synthetic oligonucleotide
attgacgtgaagacttgaacatttacggcc

SEQ ID NO: 289373 - DNA, 30 bp, Artificial Sequence
  Synthetic oligonucleotide
atttaccccatctcaaagagtaacccggcc

SEQ ID NO: 289374 - DNA, 30 bp, Artificial Sequence
  Synthetic oligonucleotide
gaagggcaacaaggctggctacccccggcc

SEQ ID NO: 289375 - DNA, 30 bp, Artificial Sequence
  Synthetic oligonucleotide
ctgagagctttcaattagctgcctccggcc

SEQ ID NO: 289376 - DNA, 30 bp, Artificial Sequence
  Synthetic oligonucleotide
tgacaccgtgctgctgtaccggctccggcc

SEQ ID NO: 289377 - DNA, 30 bp, Artificial Sequence
  Synthetic oligonucleotide
attcgccgtacatcctactctctcgcggcc

SEQ ID NO: 289378 - DNA, 30 bp, Artificial Sequence
  Synthetic oligonucleotide
tgttgtgggtagttgttgtgggaggcggcc

SEQ ID NO: 289379 - DNA, 30 bp, Artificial Sequence
  Synthetic oligonucleotide
tatccaatctgcaacctatccagatcggcc

SEQ ID NO: 289380 - DNA, 30 bp, Artificial Sequence
  Synthetic oligonucleotide
atcatagaatctgtactgatttcctcggcc

SEQ ID NO: 289381 - DNA, 30 bp, Artificial Sequence
  Synthetic oligonucleotide
gaagtggtgtgtcatttaaaccggtcggcc

SEQ ID NO: 289382 - DNA, 30 bp, Artificial Sequence
  Synthetic oligonucleotide
gggccatctactatagtgcatgcttcggcc

SEQ ID NO: 289383 - DNA, 30 bp, Artificial Sequence
  Synthetic oligonucleotide
agcttatggaagcacataccatgttcggcc

SEQ ID NO: 289384 - DNA, 30 bp, Artificial Sequence
  Synthetic oligonucleotide
tcccaattttatcggtttaggctttcggcc

SEQ ID NO: 289385 - DNA, 30 bp, Artificial Sequence
  Synthetic oligonucleotide
ttgaaatgcacgagtaggcactaaagggcc

SEQ ID NO: 289386 - DNA, 30 bp, Artificial Sequence
  Synthetic oligonucleotide
atcaagtcgagcgccccaggggcaagggcc

SEQ ID NO: 289387 - DNA, 30 bp, Artificial Sequence
  Synthetic oligonucleotide
tatatggaatgtaccgtgtgttgaagggcc

SEQ ID NO: 289388 - DNA, 30 bp, Artificial Sequence
  Synthetic oligonucleotide
agggcacgatgggtttcaggacacagggcc

SEQ ID NO: 289389 - DNA, 30 bp, Artificial Sequence
  Synthetic oligonucleotide
tgctacttggggggacggctggtcagggcc

SEQ ID NO: 289390 - DNA, 30 bp, Artificial Sequence
  Synthetic oligonucleotide
atagacgaattgaagtcggccttcagggcc

SEQ ID NO: 289391 - DNA, 30 bp, Artificial Sequence
  Synthetic oligonucleotide
aggtaccctctttactccttatatagggcc

SEQ ID NO: 289392 - DNA, 30 bp, Artificial Sequence
  Synthetic oligonucleotide
cagagccgattcatggaacatgctagggcc

SEQ ID NO: 289393 - DNA, 30 bp, Artificial Sequence
  Synthetic oligonucleotide
tttgtcggccgactgaataacgagcgggcc

SEQ ID NO: 289394 - DNA, 30 bp, Artificial Sequence
  Synthetic oligonucleotide
gtaataaacatgagccgtagcgtgcgggcc

SEQ ID NO: 289395 - DNA, 30 bp, Artificial Sequence
  Synthetic oligonucleotide
cacagtgttactgtctcggatgctcgggcc

SEQ ID NO: 289396 - DNA, 30 bp, Artificial Sequence
  Synthetic oligonucleotide
tgggactagtagaagaagcaatctcgggcc

SEQ ID NO: 289397 - DNA, 30 bp, Artificial Sequence
  Synthetic oligonucleotide
ccaaagtgacaatgcatgttttaaggggcc

SEQ ID NO: 289398 - DNA, 29 bp, Artificial Sequence
  Synthetic oligonucleotide
gacctaccacgattgaaaagacaggggcc

SEQ ID NO: 289399 - DNA, 30 bp, Artificial Sequence
  Synthetic oligonucleotide
atggaacgacccgagatgtagacaggggcc

SEQ ID NO: 289400 - DNA, 30 bp, Artificial Sequence
  Synthetic oligonucleotide
tggcatttggagaaaccctaatgaggggcc

SEQ ID NO: 289401 - DNA, 30 bp, Artificial Sequence
  Synthetic oligonucleotide
cctgagccctcatcctaatgcgcgggggcc

SEQ ID NO: 289402 - DNA, 30 bp, Artificial Sequence
  Synthetic oligonucleotide
tccaattattattcaggagaacctggggcc

SEQ ID NO: 289403 - DNA, 30 bp, Artificial Sequence
  Synthetic oligonucleotide
gttaaaagttgtaacccgtctcgatgggcc

SEQ ID NO: 289404 - DNA, 30 bp, Artificial Sequence
  Synthetic oligonucleotide
atacgtgggatccttcattgcgtatgggcc

SEQ ID NO: 289405 - DNA, 30 bp, Artificial Sequence
  Synthetic oligonucleotide
gacggtaccaatagtgtaccaaactgggcc

SEQ ID NO: 289406 - DNA, 30 bp, Artificial Sequence
  Synthetic oligonucleotide
gtttccggcgatgtcaatagaggctgggcc

SEQ ID NO: 289407 - DNA, 30 bp, Artificial Sequence
  Synthetic oligonucleotide
acaagtccatcgctagcgagtatctgggcc

SEQ ID NO: 289408 - DNA, 30 bp, Artificial Sequence
  Synthetic oligonucleotide
tatcaacaaggcgggcgaagcctctgggcc

SEQ ID NO: 289409 - DNA, 30 bp, Artificial Sequence
  Synthetic oligonucleotide
tcctggattgagggggtggtacagtgggcc

SEQ ID NO: 289410 - DNA, 30 bp, Artificial Sequence
  Synthetic oligonucleotide
ctgtatggataggacgcaaccaacatggcc

SEQ ID NO: 289411 - DNA, 30 bp, Artificial Sequence
  Synthetic oligonucleotide
tcttagtaatgagtctagaggtccatggcc

SEQ ID NO: 289412 - DNA, 30 bp, Artificial Sequence
  Synthetic oligonucleotide
ccatgcaggaacttcccaggaggcatggcc

SEQ ID NO: 289413 - DNA, 30 bp, Artificial Sequence
  Synthetic oligonucleotide
gctggtgaattacgttaacgcttcatggcc

SEQ ID NO: 289414 - DNA, 30 bp, Artificial Sequence
  Synthetic oligonucleotide
ttgtagatcagcttgcttctcgtgatggcc

SEQ ID NO: 289415 - DNA, 30 bp, Artificial Sequence
  Synthetic oligonucleotide
gttttgatacattaatagatcggtatggcc

SEQ ID NO: 289416 - DNA, 30 bp, Artificial Sequence
  Synthetic oligonucleotide
caggggctgacaaggacatctattatggcc

SEQ ID NO: 289417 - DNA, 30 bp, Artificial Sequence
  Synthetic oligonucleotide
taggatggtaagacctccttagacctggcc

SEQ ID NO: 289418 - DNA, 30 bp, Artificial Sequence
  Synthetic oligonucleotide
ttgagtaactgtctcaactacgcgctggcc

SEQ ID NO: 289419 - DNA, 30 bp, Artificial Sequence
  Synthetic oligonucleotide
cattaagccggatcatttggctctctggcc

SEQ ID NO: 289420 - DNA, 30 bp, Artificial Sequence
  Synthetic oligonucleotide
tgatacgtgccaggtctcactggtctggcc

SEQ ID NO: 289421 - DNA, 30 bp, Artificial Sequence
  Synthetic oligonucleotide
gccggcactatcgtcccataccttctggcc

SEQ ID NO: 289422 - DNA, 30 bp, Artificial Sequence
  Synthetic oligonucleotide
atcaataaaaaaacaggtatgggagtggcc

SEQ ID NO: 289423 - DNA, 30 bp, Artificial Sequence
  Synthetic oligonucleotide
gtggttatctgggattggtacaccgtggcc

SEQ ID NO: 289424 - DNA, 30 bp, Artificial Sequence
  Synthetic oligonucleotide
tcaaccatgtagtagaaagactctgtggcc

SEQ ID NO: 289425 - DNA, 30 bp, Artificial Sequence
  Synthetic oligonucleotide
agtgaccggttagcactcccaagtgtggcc

SEQ ID NO: 289426 - DNA, 30 bp, Artificial Sequence
  Synthetic oligonucleotide
tggtgcctttagtcgaaaaaaattgtggcc

SEQ ID NO: 289427 - DNA, 30 bp, Artificial Sequence
  Synthetic oligonucleotide
actcgagtgcacgtgcgccacgcattggcc

SEQ ID NO: 289428 - DNA, 30 bp, Artificial Sequence
  Synthetic oligonucleotide
gctagtggaaaattgtatcttgcattggcc

SEQ ID NO: 289429 - DNA, 30 bp, Artificial Sequence
  Synthetic oligonucleotide
tagtaagcgtagagtcgtactacgttggcc

SEQ ID NO: 289430 - DNA, 30 bp, Artificial Sequence
  Synthetic oligonucleotide
agagtctggcgactagttcctatgttggcc

SEQ ID NO: 289431 - DNA, 30 bp, Artificial Sequence
  Synthetic oligonucleotide
gcaattggacaggacaggaaagtgttggcc

SEQ ID NO: 289432 - DNA, 30 bp, Artificial Sequence
  Synthetic oligonucleotide
gcgtgaggagtatccaggcagactttggcc

SEQ ID NO: 289433 - DNA, 30 bp, Artificial Sequence
  Synthetic oligonucleotide
tgataagttgagatcaaatgagttttggcc

SEQ ID NO: 289434 - DNA, 30 bp, Artificial Sequence
  Synthetic oligonucleotide
gtagttacccattctcttgtctttttggcc

SEQ ID NO: 289435 - DNA, 30 bp, Artificial Sequence
  Synthetic oligonucleotide
gcgaatcatggttgtacggttaaaaatgcc

SEQ ID NO: 289436 - DNA, 30 bp, Artificial Sequence
  Synthetic oligonucleotide
cgccggttcatatataagcccgacaatgcc

SEQ ID NO: 289437 - DNA, 30 bp, Artificial Sequence
  Synthetic oligonucleotide
tggtagtggacaggccgttatcgcaatgcc

SEQ ID NO: 289438 - DNA, 30 bp, Artificial Sequence
  Synthetic oligonucleotide
tgccgtgtaaatccaggcccggataatgcc

SEQ ID NO: 289439 - DNA, 30 bp, Artificial Sequence
  Synthetic oligonucleotide
aagagtgcgacatataaacttactaatgcc

SEQ ID NO: 289440 - DNA, 30 bp, Artificial Sequence
  Synthetic oligonucleotide
gtgctcggataattgctaaaaagacatgcc

SEQ ID NO: 289441 - DNA, 30 bp, Artificial Sequence
  Synthetic oligonucleotide
tagcaatatagtctagcaatggtccatgcc

SEQ ID NO: 289442 - DNA, 30 bp, Artificial Sequence
  Synthetic oligonucleotide
tgtttggtgccactccagcttgcgcatgcc

SEQ ID NO: 289443 - DNA, 30 bp, Artificial Sequence
  Synthetic oligonucleotide
gatgatagattttgggcctaaatgcatgcc

SEQ ID NO: 289444 - DNA, 29 bp, Artificial Sequence
  Synthetic oligonucleotide
atcaatagcaatattcaacttcagatgcc

SEQ ID NO: 289445 - DNA, 30 bp, Artificial Sequence
  Synthetic oligonucleotide
gcgccacagcctgcttaccaagaatatgcc

SEQ ID NO: 289446 - DNA, 30 bp, Artificial Sequence
  Synthetic oligonucleotide
aacccggttgagtcgcgagagacgtatgcc

SEQ ID NO: 289447 - DNA, 30 bp, Artificial Sequence
  Synthetic oligonucleotide
aggatgggttaccacttatcgccttatgcc

SEQ ID NO: 289448 - DNA, 30 bp, Artificial Sequence
  Synthetic oligonucleotide
gctgacaggctccactatcgtagaactgcc

SEQ ID NO: 289449 - DNA, 30 bp, Artificial Sequence
  Synthetic oligonucleotide
caatgggttgaacgaagcgacagcactgcc

SEQ ID NO: 289450 - DNA, 30 bp, Artificial Sequence
  Synthetic oligonucleotide
caaagttatagccttccagatcggactgcc

SEQ ID NO: 289451 - DNA, 30 bp, Artificial Sequence
  Synthetic oligonucleotide
acatcggctctgtcgagcagagatactgcc

SEQ ID NO: 289452 - DNA, 30 bp, Artificial Sequence
  Synthetic oligonucleotide
aggcagtccacccgctcttgtcaacctgcc

SEQ ID NO: 289453 - DNA, 30 bp, Artificial Sequence
  Synthetic oligonucleotide
cgggttgatcgtagtcacccgaaccctgcc

SEQ ID NO: 289454 - DNA, 30 bp, Artificial Sequence
  Synthetic oligonucleotide
attacaaacctggcctgtaaaacccctgcc

SEQ ID NO: 289455 - DNA, 30 bp, Artificial Sequence
  Synthetic oligonucleotide
aggatagctggctaaacaactgtccctgcc

SEQ ID NO: 289456 - DNA, 30 bp, Artificial Sequence
  Synthetic oligonucleotide
ccgtcgtacggacatactggttgagctgcc

SEQ ID NO: 289457 - DNA, 30 bp, Artificial Sequence
  Synthetic oligonucleotide
tggatcaagataggctttggtagggctgcc

SEQ ID NO: 289458 - DNA, 30 bp, Artificial Sequence
  Synthetic oligonucleotide
tacatcctaccaggggactgactggctgcc

SEQ ID NO: 289459 - DNA, 30 bp, Artificial Sequence
  Synthetic oligonucleotide
aagtgatcccggacatcggttctcagtgcc

SEQ ID NO: 289460 - DNA, 30 bp, Artificial Sequence
  Synthetic oligonucleotide
ccggttctgctcttttgggccgggagtgcc

SEQ ID NO: 289461 - DNA, 30 bp, Artificial Sequence
  Synthetic oligonucleotide
tgacgttggatacatagccgctctagtgcc

SEQ ID NO: 289462 - DNA, 30 bp, Artificial Sequence
  Synthetic oligonucleotide
tagctagagcgtatggtacgaagacgtgcc

SEQ ID NO: 289463 - DNA, 30 bp, Artificial Sequence
  Synthetic oligonucleotide
cggcattgggcaagcagcattggtcgtgcc

SEQ ID NO: 289464 - DNA, 30 bp, Artificial Sequence
  Synthetic oligonucleotide
gaatcatgcggccttgcaagccttcgtgcc

SEQ ID NO: 289465 - DNA, 30 bp, Artificial Sequence
  Synthetic oligonucleotide
cgcgacagcgtctttacggcggttcgtgcc

SEQ ID NO: 289466 - DNA, 30 bp, Artificial Sequence
  Synthetic oligonucleotide
gcggccgagcctcgggcccttgaaggtgcc

SEQ ID NO: 289467 - DNA, 30 bp, Artificial Sequence
  Synthetic oligonucleotide
tcgtgactactagcataggcaccgggtgcc

SEQ ID NO: 289468 - DNA, 30 bp, Artificial Sequence
  Synthetic oligonucleotide
aggcggctttgtactttgttgaactgtgcc

SEQ ID NO: 289469 - DNA, 30 bp, Artificial Sequence
  Synthetic oligonucleotide
tcatggatcgaattgagatcgcggtgtgcc

SEQ ID NO: 289470 - DNA, 30 bp, Artificial Sequence
  Synthetic oligonucleotide
agcaggcctccaagggttcatgattgtgcc

SEQ ID NO: 289471 - DNA, 30 bp, Artificial Sequence
  Synthetic oligonucleotide
cgttggccgcgacatttgcggacaattgcc

SEQ ID NO: 289472 - DNA, 30 bp, Artificial Sequence
  Synthetic oligonucleotide
cgccaatgtgaaatgatttaacacattgcc

SEQ ID NO: 289473 - DNA, 30 bp, Artificial Sequence
  Synthetic oligonucleotide
catgacatagttcggtgtttaagcattgcc

SEQ ID NO: 289474 - DNA, 30 bp, Artificial Sequence
  Synthetic oligonucleotide
acacctccggatgttacgggtgcgattgcc

SEQ ID NO: 289475 - DNA, 30 bp, Artificial Sequence
  Synthetic oligonucleotide
gactggattccggattacagatctattgcc

SEQ ID NO: 289476 - DNA, 30 bp, Artificial Sequence
  Synthetic oligonucleotide
tctaaatttggcagcccctggtaacttgcc

SEQ ID NO: 289477 - DNA, 30 bp, Artificial Sequence
  Synthetic oligonucleotide
ggggactgtagtgtaacggggcaccttgcc

SEQ ID NO: 289478 - DNA, 30 bp, Artificial Sequence
  Synthetic oligonucleotide
ccgacggcataagccctacgccgccttgcc

SEQ ID NO: 289479 - DNA, 30 bp, Artificial Sequence
  Synthetic oligonucleotide
aagtaaatttagaattccactactcttgcc

SEQ ID NO: 289480 - DNA, 30 bp, Artificial Sequence
  Synthetic oligonucleotide
gagatggactaagttcggacgattcttgcc

SEQ ID NO: 289481 - DNA, 30 bp, Artificial Sequence
  Synthetic oligonucleotide
aacgggggtaggctatatgacacagttgcc

SEQ ID NO: 289482 - DNA, 30 bp, Artificial Sequence
  Synthetic oligonucleotide
tgtgcaactgctgtaagctaagaggttgcc

SEQ ID NO: 289483 - DNA, 30 bp, Artificial Sequence
  Synthetic oligonucleotide
atatctatctctgatagcaacgaggttgcc

SEQ ID NO: 289484 - DNA, 30 bp, Artificial Sequence
  Synthetic oligonucleotide
cgtgcggacctttgtcgaaactaggttgcc

SEQ ID NO: 289485 - DNA, 30 bp, Artificial Sequence
  Synthetic oligonucleotide
ggcgaaatctaggtccaggtgacggttgcc

SEQ ID NO: 289486 - DNA, 30 bp, Artificial Sequence
  Synthetic oligonucleotide
caactatctatagctggcgaaagggttgcc

SEQ ID NO: 289487 - DNA, 30 bp, Artificial Sequence
  Synthetic oligonucleotide
ggtgatcgaaatcggttgcgaactgttgcc

SEQ ID NO: 289488 - DNA, 30 bp, Artificial Sequence
  Synthetic oligonucleotide
gatccaagaccttacaccctcgtatttgcc

SEQ ID NO: 289489 - DNA, 30 bp, Artificial Sequence
  Synthetic oligonucleotide
ttcagttgaatggcaggagtgcagtttgcc

SEQ ID NO: 289490 - DNA, 30 bp, Artificial Sequence
  Synthetic oligonucleotide
taacgaaagaggccaggagattagtttgcc

SEQ ID NO: 289491 - DNA, 30 bp, Artificial Sequence
  Synthetic oligonucleotide
aaagctggggcaaagactatctggtttgcc

SEQ ID NO: 289492 - DNA, 30 bp, Artificial Sequence
  Synthetic oligonucleotide
tgccttagcaatttgtcaatagtttttgcc

SEQ ID NO: 289493 - DNA, 30 bp, Artificial Sequence
  Synthetic oligonucleotide
acggtacattaatctatcatatccaaatcc

SEQ ID NO: 289494 - DNA, 30 bp, Artificial Sequence
  Synthetic oligonucleotide
acgccctccaccatgtggaacaataaatcc

SEQ ID NO: 289495 - DNA, 30 bp, Artificial Sequence
  Synthetic oligonucleotide
ggtttactcgttcttgactactcacaatcc

SEQ ID NO: 289496 - DNA, 30 bp, Artificial Sequence
  Synthetic oligonucleotide
gtgattattaatctgctggatcgccaatcc

SEQ ID NO: 289497 - DNA, 30 bp, Artificial Sequence
  Synthetic oligonucleotide
ccaaatagtttttggaacaaaaggcaatcc

SEQ ID NO: 289498 - DNA, 30 bp, Artificial Sequence
  Synthetic oligonucleotide
gctaaggttactggctcatatttgcaatcc

SEQ ID NO: 289499 - DNA, 30 bp, Artificial Sequence
  Synthetic oligonucleotide
catggtagctaacgagtgtgtctagaatcc

SEQ ID NO: 289500 - DNA, 30 bp, Artificial Sequence
  Synthetic oligonucleotide
acatgcgtatgtggtccctcggaggaatcc

SEQ ID NO: 289501 - DNA, 30 bp, Artificial Sequence
  Synthetic oligonucleotide
atctcgttagccgttgcgggtccataatcc

SEQ ID NO: 289502 - DNA, 30 bp, Artificial Sequence
  Synthetic oligonucleotide
tggttcttcgcgatgggtttaagctaatcc

SEQ ID NO: 289503 - DNA, 30 bp, Artificial Sequence
  Synthetic oligonucleotide
gctactacggcactttataggagctaatcc

SEQ ID NO: 289504 - DNA, 30 bp, Artificial Sequence
  Synthetic oligonucleotide
ttgtcggacatgccacggagggggtaatcc

SEQ ID NO: 289505 - DNA, 30 bp, Artificial Sequence
  Synthetic oligonucleotide
ttacaccgcatcatatctaaactgtaatcc

SEQ ID NO: 289506 - DNA, 30 bp, Artificial Sequence
  Synthetic oligonucleotide
agacttgggattaactcggaaggttaatcc

SEQ ID NO: 289507 - DNA, 30 bp, Artificial Sequence
  Synthetic oligonucleotide
gccctcatccggtcgagtttgtcaacatcc

SEQ ID NO: 289508 - DNA, 30 bp, Artificial Sequence
  Synthetic oligonucleotide
cctccctgatgtctggcaagtctcacatcc

SEQ ID NO: 289509 - DNA, 30 bp, Artificial Sequence
  Synthetic oligonucleotide
gttaagcgttgataggtcaagaagacatcc

SEQ ID NO: 289510 - DNA, 30 bp, Artificial Sequence
  Synthetic oligonucleotide
ctaccaagatatctggatggtttgacatcc

SEQ ID NO: 289511 - DNA, 30 bp, Artificial Sequence
  Synthetic oligonucleotide
agccccttaggctccaagaccgctacatcc

SEQ ID NO: 289512 - DNA, 30 bp, Artificial Sequence
  Synthetic oligonucleotide
acagatgagaacctgtttcaaggtacatcc

SEQ ID NO: 289513 - DNA, 30 bp, Artificial Sequence
  Synthetic oligonucleotide
ttgagtccatgcgaacggcgagccccatcc

SEQ ID NO: 289514 - DNA, 30 bp, Artificial Sequence
  Synthetic oligonucleotide
ccaaccgaacctggcaccggtcatccatcc

SEQ ID NO: 289515 - DNA, 30 bp, Artificial Sequence
  Synthetic oligonucleotide
cgaacactacttttgatactatatccatcc

SEQ ID NO: 289516 - DNA, 30 bp, Artificial Sequence
  Synthetic oligonucleotide
ggcacaacccgtcagatgacaaaagcatcc

SEQ ID NO: 289517 - DNA, 30 bp, Artificial Sequence
  Synthetic oligonucleotide
tcgcggcatcacattcagtccccggcatcc

SEQ ID NO: 289518 - DNA, 30 bp, Artificial Sequence
  Synthetic oligonucleotide
caccgacgaagccgttacgattgggcatcc

SEQ ID NO: 289519 - DNA, 30 bp, Artificial Sequence
  Synthetic oligonucleotide
tattccggcgattgttcgcgttgatcatcc

SEQ ID NO: 289520 - DNA, 30 bp, Artificial Sequence
  Synthetic oligonucleotide
gcgggtttaatggcggaacgaggctcatcc

SEQ ID NO: 289521 - DNA, 30 bp, Artificial Sequence
  Synthetic oligonucleotide
aaatgacaaccgtgtttgggtttctcatcc

SEQ ID NO: 289522 - DNA, 30 bp, Artificial Sequence
  Synthetic oligonucleotide
gcgtgtggcggccgcaagaagaagtcatcc

SEQ ID NO: 289523 - DNA, 30 bp, Artificial Sequence
  Synthetic oligonucleotide
tggacttttgctgcatgatcatggtcatcc

SEQ ID NO: 289524 - DNA, 30 bp, Artificial Sequence
  Synthetic oligonucleotide
tgttagtaccgccgaccatgcctgtcatcc

SEQ ID NO: 289525 - DNA, 30 bp, Artificial Sequence
  Synthetic oligonucleotide
tctcgcctgcaacgcatttatcgttcatcc

SEQ ID NO: 289526 - DNA, 30 bp, Artificial Sequence
  Synthetic oligonucleotide
cgggataacgtggctctgctgtcaagatcc

SEQ ID NO: 289527 - DNA, 30 bp, Artificial Sequence
  Synthetic oligonucleotide
gaaagcttagtcctgtgttgttacagatcc

SEQ ID NO: 289528 - DNA, 30 bp, Artificial Sequence
  Synthetic oligonucleotide
caataatatttacgggtggtattcagatcc

SEQ ID NO: 289529 - DNA, 30 bp, Artificial Sequence
  Synthetic oligonucleotide
tctcgagcgttgagctactcggggagatcc

SEQ ID NO: 289530 - DNA, 30 bp, Artificial Sequence
  Synthetic oligonucleotide
gtgatttaccaacaccaacgggtgagatcc

SEQ ID NO: 289531 - DNA, 30 bp, Artificial Sequence
  Synthetic oligonucleotide
gggaacagtcacgaagtaacgactagatcc

SEQ ID NO: 289532 - DNA, 30 bp, Artificial Sequence
  Synthetic oligonucleotide
tctgaaaatctggtccgtcatactagatcc

SEQ ID NO: 289533 - DNA, 30 bp, Artificial Sequence
  Synthetic oligonucleotide
ccattaacttttcacaaacgttgacgatcc

SEQ ID NO: 289534 - DNA, 30 bp, Artificial Sequence
  Synthetic oligonucleotide
agcggacgactttgtgttctcagcggatcc

SEQ ID NO: 289535 - DNA, 30 bp, Artificial Sequence
  Synthetic oligonucleotide
ctcctgacataggccaagaagaagggatcc

SEQ ID NO: 289536 - DNA, 29 bp, Artificial Sequence
  Synthetic oligonucleotide
ttccagaaagtgatgagagcgggggatcc

SEQ ID NO: 289537 - DNA, 30 bp, Artificial Sequence
  Synthetic oligonucleotide
gtacggtcctggcatgcgccatatggatcc

SEQ ID NO: 289538 - DNA, 30 bp, Artificial Sequence
  Synthetic oligonucleotide
tgacgagcattctccgacaacatatgatcc

SEQ ID NO: 289539 - DNA, 30 bp, Artificial Sequence
  Synthetic oligonucleotide
agtcatttacgattagagggatactgatcc

SEQ ID NO: 289540 - DNA, 30 bp, Artificial Sequence
  Synthetic oligonucleotide
ggaagctctcaacttcccaattgctgatcc

SEQ ID NO: 289541 - DNA, 30 bp, Artificial Sequence
  Synthetic oligonucleotide
ggatggtcattagcttttccttgaatatcc

SEQ ID NO: 289542 - DNA, 30 bp, Artificial Sequence
  Synthetic oligonucleotide
aacgatcaacgttcttcggtttgaatatcc

SEQ ID NO: 289543 - DNA, 30 bp, Artificial Sequence
  Synthetic oligonucleotide
cgctgaacccggggtagtggtatcatatcc

SEQ ID NO: 289544 - DNA, 30 bp, Artificial Sequence
  Synthetic oligonucleotide
atttggagggtatcggtacggctcatatcc

SEQ ID NO: 289545 - DNA, 30 bp, Artificial Sequence
  Synthetic oligonucleotide
cgtctagtgattaaatcatgatcgatatcc

SEQ ID NO: 289546 - DNA, 30 bp, Artificial Sequence
  Synthetic oligonucleotide
cctggtattgagtctggagggatgatatcc

SEQ ID NO: 289547 - DNA, 30 bp, Artificial Sequence
  Synthetic oligonucleotide
gaggaatacccagaaatgatgtctatatcc

SEQ ID NO: 289548 - DNA, 30 bp, Artificial Sequence
  Synthetic oligonucleotide
tatatggagaagatcggccatgttatatcc

SEQ ID NO: 289549 - DNA, 30 bp, Artificial Sequence
  Synthetic oligonucleotide
aaagcattccggttgcgaatgccactatcc

SEQ ID NO: 289550 - DNA, 30 bp, Artificial Sequence
  Synthetic oligonucleotide
cttattgatctaataagtcgtttactatcc

SEQ ID NO: 289551 - DNA, 30 bp, Artificial Sequence
  Synthetic oligonucleotide
gatggtcaccaaggacgcaataaagtatcc

SEQ ID NO: 289552 - DNA, 30 bp, Artificial Sequence
  Synthetic oligonucleotide
aaaagttcccaaaggcgtataacagtatcc

SEQ ID NO: 289553 - DNA, 30 bp, Artificial Sequence
  Synthetic oligonucleotide
ggcgtccggtctacaggctaagacgtatcc

SEQ ID NO: 289554 - DNA, 30 bp, Artificial Sequence
  Synthetic oligonucleotide
caattggttgttaagggtgcgggcgtatcc

SEQ ID NO: 289555 - DNA, 30 bp, Artificial Sequence
  Synthetic oligonucleotide
gggagggcttagcggagcaaaagggtatcc

SEQ ID NO: 289556 - DNA, 30 bp, Artificial Sequence
  Synthetic oligonucleotide
tcgagaattgataccatggtaggggtatcc

SEQ ID NO: 289557 - DNA, 30 bp, Artificial Sequence
  Synthetic oligonucleotide
agccgtcggaagtctagagggggggtatcc

SEQ ID NO: 289558 - DNA, 30 bp, Artificial Sequence
  Synthetic oligonucleotide
tgtaatgtaaccgaatactagactgtatcc

SEQ ID NO: 289559 - DNA, 30 bp, Artificial Sequence
  Synthetic oligonucleotide
attagattcacccagtaatgaattgtatcc

SEQ ID NO: 289560 - DNA, 30 bp, Artificial Sequence
  Synthetic oligonucleotide
cggccggtagaaaacaacaatgttgtatcc

SEQ ID NO: 289561 - DNA, 30 bp, Artificial Sequence
  Synthetic oligonucleotide
atagcgcattagccatgatggtcattatcc

SEQ ID NO: 289562 - DNA, 30 bp, Artificial Sequence
  Synthetic oligonucleotide
gcttccaatgtccctaggtgaaggttatcc

SEQ ID NO: 289563 - DNA, 30 bp, Artificial Sequence
  Synthetic oligonucleotide
tagaaacggctcacttcggggtggttatcc

SEQ ID NO: 289564 - DNA, 30 bp, Artificial Sequence
  Synthetic oligonucleotide
gtgcccgacgagtattggcaaaatttatcc

SEQ ID NO: 289565 - DNA, 30 bp, Artificial Sequence
  Synthetic oligonucleotide
gaggccactgggatgatcaagactttatcc

SEQ ID NO: 289566 - DNA, 30 bp, Artificial Sequence
  Synthetic oligonucleotide
cactaaggaaccacagcaaaagttttatcc

SEQ ID NO: 289567 - DNA, 30 bp, Artificial Sequence
  Synthetic oligonucleotide
tatcaatttgtgttcataaggatcaactcc

SEQ ID NO: 289568 - DNA, 30 bp, Artificial Sequence
  Synthetic oligonucleotide
acccgtctgtcacaggccctagctaactcc

SEQ ID NO: 289569 - DNA, 30 bp, Artificial Sequence
  Synthetic oligonucleotide
tatggtacatacctaagtacattccactcc

SEQ ID NO: 289570 - DNA, 30 bp, Artificial Sequence
  Synthetic oligonucleotide
tggtttataatggggaaaattttgcactcc

SEQ ID NO: 289571 - DNA, 30 bp, Artificial Sequence
  Synthetic oligonucleotide
acattgagtgttacatgatttttgcactcc

SEQ ID NO: 289572 - DNA, 30 bp, Artificial Sequence
  Synthetic oligonucleotide
gttatgataagaccagctatcgatcactcc

SEQ ID NO: 289573 - DNA, 30 bp, Artificial Sequence
  Synthetic oligonucleotide
tattacgtaccctcaacgtcgggtcactcc

SEQ ID NO: 289574 - DNA, 29 bp, Artificial Sequence
  Synthetic oligonucleotide
agttgaggcaatatgtacctctagactcc

SEQ ID NO: 289575 - DNA, 30 bp, Artificial Sequence
  Synthetic oligonucleotide
ggcctgagctaagggagtacgaaggactcc

SEQ ID NO: 289576 - DNA, 30 bp, Artificial Sequence
  Synthetic oligonucleotide
ctgtttcgaagtagtagacaataatactcc

SEQ ID NO: 289577 - DNA, 30 bp, Artificial Sequence
  Synthetic oligonucleotide
acctggcattaagatgtatccggatactcc

SEQ ID NO: 289578 - DNA, 30 bp, Artificial Sequence
  Synthetic oligonucleotide
tacattatgtaactggcttcgtactactcc

SEQ ID NO: 289579 - DNA, 30 bp, Artificial Sequence
  Synthetic oligonucleotide
cggattctcagtgtggatgtctcgtactcc

SEQ ID NO: 289580 - DNA, 30 bp, Artificial Sequence
  Synthetic oligonucleotide
atatcgaacatggacatcttgcattactcc

SEQ ID NO: 289581 - DNA, 30 bp, Artificial Sequence
  Synthetic oligonucleotide
gggatcaacggcattcaccagtcttactcc

SEQ ID NO: 289582 - DNA, 30 bp, Artificial Sequence
  Synthetic oligonucleotide
ggctcgaagcatgaggtataccacacctcc

SEQ ID NO: 289583 - DNA, 30 bp, Artificial Sequence
  Synthetic oligonucleotide
gggaacacaaccgccgattctgacacctcc

SEQ ID NO: 289584 - DNA, 30 bp, Artificial Sequence
  Synthetic oligonucleotide
ttctcaggatgtgggttagttaatacctcc

SEQ ID NO: 289585 - DNA, 30 bp, Artificial Sequence
  Synthetic oligonucleotide
gaagggtaatcgctcatgttacgaccctcc

SEQ ID NO: 289586 - DNA, 30 bp, Artificial Sequence
  Synthetic oligonucleotide
attcatcaaaacattttataaagagcctcc

SEQ ID NO: 289587 - DNA, 30 bp, Artificial Sequence
  Synthetic oligonucleotide
cagaactcaatctctgtggtaggagcctcc

SEQ ID NO: 289588 - DNA, 30 bp, Artificial Sequence
  Synthetic oligonucleotide
cacggcttaaagaagggtgcggtcgcctcc

SEQ ID NO: 289589 - DNA, 30 bp, Artificial Sequence
  Synthetic oligonucleotide
tccatgatggcttataaaccaatctcctcc

SEQ ID NO: 289590 - DNA, 30 bp, Artificial Sequence
  Synthetic oligonucleotide
tcctggtgatgatgtcctgtccaaagctcc

SEQ ID NO: 289591 - DNA, 30 bp, Artificial Sequence
  Synthetic oligonucleotide
gaaggcacctcagtgggcacaccaagctcc

SEQ ID NO: 289592 - DNA, 30 bp, Artificial Sequence
  Synthetic oligonucleotide
gttggagcagaattatagaaaccgagctcc

SEQ ID NO: 289593 - DNA, 30 bp, Artificial Sequence
  Synthetic oligonucleotide
gccaacctcatgttacagcattttagctcc

SEQ ID NO: 289594 - DNA, 30 bp, Artificial Sequence
  Synthetic oligonucleotide
tctggggttttagggcgatgcgtacgctcc

SEQ ID NO: 289595 - DNA, 30 bp, Artificial Sequence
  Synthetic oligonucleotide
gcgaagcgtcgaagtaattaacgccgctcc

SEQ ID NO: 289596 - DNA, 30 bp, Artificial Sequence
  Synthetic oligonucleotide
actgcgactgaactatatcgggcgcgctcc

SEQ ID NO: 289597 - DNA, 30 bp, Artificial Sequence
  Synthetic oligonucleotide
tttagcgtctacagtcggtagcttcgctcc

SEQ ID NO: 289598 - DNA, 30 bp, Artificial Sequence
  Synthetic oligonucleotide
taagaactttaagaggactggcttcgctcc

SEQ ID NO: 289599 - DNA, 30 bp, Artificial Sequence
  Synthetic oligonucleotide
aagtggaccgagccctcctcttgaggctcc

SEQ ID NO: 289600 - DNA, 30 bp, Artificial Sequence
  Synthetic oligonucleotide
gcgagctcgggataatgcccctccggctcc

SEQ ID NO: 289601 - DNA, 30 bp, Artificial Sequence
  Synthetic oligonucleotide
ttgccggcgttcgtctgggactgctgctcc

SEQ ID NO: 289602 - DNA, 30 bp, Artificial Sequence
  Synthetic oligonucleotide
aacatcagaagatgcatcgagtggtgctcc

SEQ ID NO: 289603 - DNA, 30 bp, Artificial Sequence
  Synthetic oligonucleotide
aagttggataaacgataatcactgtgctcc

SEQ ID NO: 289604 - DNA, 30 bp, Artificial Sequence
  Synthetic oligonucleotide
gggctcctgaattcaagaccttaaatctcc

SEQ ID NO: 289605 - DNA, 30 bp, Artificial Sequence
  Synthetic oligonucleotide
gtggtctgcgcgacgttaataagaatctcc

SEQ ID NO: 289606 - DNA, 30 bp, Artificial Sequence
  Synthetic oligonucleotide
cagttccttctcgtataagaagacatctcc

SEQ ID NO: 289607 - DNA, 30 bp, Artificial Sequence
  Synthetic oligonucleotide
caataccgcttctctttgcaatccatctcc

SEQ ID NO: 289608 - DNA, 30 bp, Artificial Sequence
  Synthetic oligonucleotide
gctccccatgttgcaggacaaatcatctcc

SEQ ID NO: 289609 - DNA, 30 bp, Artificial Sequence
  Synthetic oligonucleotide
gcgattcgcgggatcgggaaggagatctcc

SEQ ID NO: 289610 - DNA, 30 bp, Artificial Sequence
  Synthetic oligonucleotide
gaagcttaagtagcacgccggaggatctcc

SEQ ID NO: 289611 - DNA, 30 bp, Artificial Sequence
  Synthetic oligonucleotide
ctattagagcattgtacccctcggatctcc

SEQ ID NO: 289612 - DNA, 30 bp, Artificial Sequence
  Synthetic oligonucleotide
aataggaaatagtagagtggtggtatctcc

SEQ ID NO: 289613 - DNA, 30 bp, Artificial Sequence
  Synthetic oligonucleotide
gtgatttataaagataggtgggtactctcc

SEQ ID NO: 289614 - DNA, 30 bp, Artificial Sequence
  Synthetic oligonucleotide
aataggggcaatttgctattgtggctctcc

SEQ ID NO: 289615 - DNA, 30 bp, Artificial Sequence
  Synthetic oligonucleotide
ggttaccagtagagggcttcattgctctcc

SEQ ID NO: 289616 - DNA, 30 bp, Artificial Sequence
  Synthetic oligonucleotide
catcggacagacaatgagacccgggtctcc

SEQ ID NO: 289617 - DNA, 30 bp, Artificial Sequence
  Synthetic oligonucleotide
ggcgaggttgtctgttatgaaattgtctcc

SEQ ID NO: 289618 - DNA, 30 bp, Artificial Sequence
  Synthetic oligonucleotide
gatgtacgttgacctagaattaagttctcc

SEQ ID NO: 289619 - DNA, 30 bp, Artificial Sequence
  Synthetic oligonucleotide
gtgcaacaccaaaagcaggtgctgttctcc

SEQ ID NO: 289620 - DNA, 30 bp, Artificial Sequence
  Synthetic oligonucleotide
cagggcggccggccagtagaaactttctcc

SEQ ID NO: 289621 - DNA, 30 bp, Artificial Sequence
  Synthetic oligonucleotide
tggcggctatccaactcacttggcaagtcc

SEQ ID NO: 289622 - DNA, 30 bp, Artificial Sequence
  Synthetic oligonucleotide
taacccgaccacccagtgaaattgaagtcc

SEQ ID NO: 289623 - DNA, 30 bp, Artificial Sequence
  Synthetic oligonucleotide
cggcaaatacctcagtggcggtataagtcc

SEQ ID NO: 289624 - DNA, 30 bp, Artificial Sequence
  Synthetic oligonucleotide
ggcgcgtgcggagcatgtttcggtaagtcc

SEQ ID NO: 289625 - DNA, 30 bp, Artificial Sequence
  Synthetic oligonucleotide
tttcagggtgtccggtccgacagacagtcc

SEQ ID NO: 289626 - DNA, 30 bp, Artificial Sequence
  Synthetic oligonucleotide
acctgaccagacccggtaaatctacagtcc

SEQ ID NO: 289627 - DNA, 30 bp, Artificial Sequence
  Synthetic oligonucleotide
ccacagctatgaatacgtacacagcagtcc

SEQ ID NO: 289628 - DNA, 30 bp, Artificial Sequence
  Synthetic oligonucleotide
ggacttgttcgggtatagtatctgcagtcc

SEQ ID NO: 289629 - DNA, 30 bp, Artificial Sequence
  Synthetic oligonucleotide
atgactcccctcaatacttactcagagtcc

SEQ ID NO: 289630 - DNA, 30 bp, Artificial Sequence
  Synthetic oligonucleotide
attatagcccgtaatgtgctttgagagtcc

SEQ ID NO: 289631 - DNA, 30 bp, Artificial Sequence
  Synthetic oligonucleotide
gcatcaactttgagccgacgcaaggagtcc

SEQ ID NO: 289632 - DNA, 30 bp, Artificial Sequence
  Synthetic oligonucleotide
attgggccgtgatgctcaggcggctagtcc

SEQ ID NO: 289633 - DNA, 30 bp, Artificial Sequence
  Synthetic oligonucleotide
tgttgtattgactatggcaataggtagtcc

SEQ ID NO: 289634 - DNA, 30 bp, Artificial Sequence
  Synthetic oligonucleotide
atgtcttaagtatacatgctactgtagtcc

SEQ ID NO: 289635 - DNA, 30 bp, Artificial Sequence
  Synthetic oligonucleotide
aagccatctaaatgccgtaccgcaacgtcc

SEQ ID NO: 289636 - DNA, 30 bp, Artificial Sequence
  Synthetic oligonucleotide
agccggtaggcccgggagttaacaccgtcc

SEQ ID NO: 289637 - DNA, 30 bp, Artificial Sequence
  Synthetic oligonucleotide
ctaggtggaatcaaggtttggcacccgtcc

SEQ ID NO: 289638 - DNA, 30 bp, Artificial Sequence
  Synthetic oligonucleotide
actgtgttggatattcggattcccccgtcc

SEQ ID NO: 289639 - DNA, 30 bp, Artificial Sequence
  Synthetic oligonucleotide
tttaaaacacgcaaggcaaagagcccgtcc

SEQ ID NO: 289640 - DNA, 30 bp, Artificial Sequence
  Synthetic oligonucleotide
atgccaaggcccagcgtagattagccgtcc

SEQ ID NO: 289641 - DNA, 30 bp, Artificial Sequence
  Synthetic oligonucleotide
aggtcaggagtaatcttgatataagcgtcc

SEQ ID NO: 289642 - DNA, 30 bp, Artificial Sequence
  Synthetic oligonucleotide
cagtgctgatgaggtgaatgtcacgcgtcc

SEQ ID NO: 289643 - DNA, 30 bp, Artificial Sequence
  Synthetic oligonucleotide
caaacgtcggcgaacgactagtacgcgtcc

SEQ ID NO: 289644 - DNA, 30 bp, Artificial Sequence
  Synthetic oligonucleotide
acaagtgtttcctccaaagatttatcgtcc

SEQ ID NO: 289645 - DNA, 30 bp, Artificial Sequence
  Synthetic oligonucleotide
gcgatctttaggtttattggtcgctcgtcc

SEQ ID NO: 289646 - DNA, 30 bp, Artificial Sequence
  Synthetic oligonucleotide
cggaggttgtcaatatcagacaggtcgtcc

SEQ ID NO: 289647 - DNA, 30 bp, Artificial Sequence
  Synthetic oligonucleotide
tgtgactcacgaagtaaggatagaaggtcc

SEQ ID NO: 289648 - DNA, 30 bp, Artificial Sequence
  Synthetic oligonucleotide
gcggtatccgacgcggatcacgtcaggtcc

SEQ ID NO: 289649 - DNA, 30 bp, Artificial Sequence
  Synthetic oligonucleotide
gaaatattggggagtctaaatgagaggtcc

SEQ ID NO: 289650 - DNA, 30 bp, Artificial Sequence
  Synthetic oligonucleotide
ttgcgcctaaggtgactgcactcgaggtcc

SEQ ID NO: 289651 - DNA, 30 bp, Artificial Sequence
  Synthetic oligonucleotide
cctcgcaaaaagcgtaacaggaataggtcc

SEQ ID NO: 289652 - DNA, 30 bp, Artificial Sequence
  Synthetic oligonucleotide
aactagagtatgtgtgggaatcttaggtcc

SEQ ID NO: 289653 - DNA, 30 bp, Artificial Sequence
  Synthetic oligonucleotide
aggcgcgaaggcaatggggggaggcggtcc

SEQ ID NO: 289654 - DNA, 30 bp, Artificial Sequence
  Synthetic oligonucleotide
cgtagcttgattttcgtggacggtcggtcc

SEQ ID NO: 289655 - DNA, 30 bp, Artificial Sequence
  Synthetic oligonucleotide
agagcatggcaggccacaggacgggggtcc

SEQ ID NO: 289656 - DNA, 30 bp, Artificial Sequence
  Synthetic oligonucleotide
gcatccggaagtcacacgagggactggtcc

SEQ ID NO: 289657 - DNA, 30 bp, Artificial Sequence
  Synthetic oligonucleotide
gcctaaggagcatgcaaggggatctggtcc

SEQ ID NO: 289658 - DNA, 30 bp, Artificial Sequence
  Synthetic oligonucleotide
ccaagtagcattagaaacttcttctggtcc

SEQ ID NO: 289659 - DNA, 30 bp, Artificial Sequence
  Synthetic oligonucleotide
aggtcatccggagtgatctgcgattggtcc

SEQ ID NO: 289660 - DNA, 30 bp, Artificial Sequence
  Synthetic oligonucleotide
ggtaacggattgttctaggcccgttggtcc

SEQ ID NO: 289661 - DNA, 30 bp, Artificial Sequence
  Synthetic oligonucleotide
caacgatagtagacagatagtataatgtcc

SEQ ID NO: 289662 - DNA, 30 bp, Artificial Sequence
  Synthetic oligonucleotide
tggccaaggacgtggcaagaatacatgtcc

SEQ ID NO: 289663 - DNA, 30 bp, Artificial Sequence
  Synthetic oligonucleotide
tggtggcgagaatttaacctcgttatgtcc

SEQ ID NO: 289664 - DNA, 30 bp, Artificial Sequence
  Synthetic oligonucleotide
tcaacgtggcagacttgtatgttactgtcc

SEQ ID NO: 289665 - DNA, 30 bp, Artificial Sequence
  Synthetic oligonucleotide
gtactgcgggaattatgaggggatctgtcc

SEQ ID NO: 289666 - DNA, 30 bp, Artificial Sequence
  Synthetic oligonucleotide
gcggctgaataagttattctttctctgtcc

SEQ ID NO: 289667 - DNA, 30 bp, Artificial Sequence
  Synthetic oligonucleotide
tttgcacccgacctggcgatgagcttgtcc

SEQ ID NO: 289668 - DNA, 30 bp, Artificial Sequence
  Synthetic oligonucleotide
catatgtctctgtgaagaggtgcgttgtcc

SEQ ID NO: 289669 - DNA, 30 bp, Artificial Sequence
  Synthetic oligonucleotide
gttgtaatgtacatacgggaaatgttgtcc

SEQ ID NO: 289670 - DNA, 30 bp, Artificial Sequence
  Synthetic oligonucleotide
aagttgaggcgtataaaaggcattttgtcc

SEQ ID NO: 289671 - DNA, 30 bp, Artificial Sequence
  Synthetic oligonucleotide
cctcaattatggtaaaactggtttttgtcc

SEQ ID NO: 289672 - DNA, 30 bp, Artificial Sequence
  Synthetic oligonucleotide
gcagagcgtagatcttcctgtgaaaattcc

SEQ ID NO: 289673 - DNA, 30 bp, Artificial Sequence
  Synthetic oligonucleotide
gccaatcggactctgcactactacaattcc

SEQ ID NO: 289674 - DNA, 30 bp, Artificial Sequence
  Synthetic oligonucleotide
gaatgaaggctttgcgaattccccaattcc

SEQ ID NO: 289675 - DNA, 30 bp, Artificial Sequence
  Synthetic oligonucleotide
ggatcagttcgcccaagtgctgtcaattcc

SEQ ID NO: 289676 - DNA, 30 bp, Artificial Sequence
  Synthetic oligonucleotide
agcttcgtaagcgtgtccaactataattcc

SEQ ID NO: 289677 - DNA, 30 bp, Artificial Sequence
  Synthetic oligonucleotide
aggcctgggtgtcccggctgaattaattcc

SEQ ID NO: 289678 - DNA, 30 bp, Artificial Sequence
  Synthetic oligonucleotide
gtctaaccatttctggcccgccaacattcc

SEQ ID NO: 289679 - DNA, 30 bp, Artificial Sequence
  Synthetic oligonucleotide
cgggtagggctacaatgaacgggacattcc

SEQ ID NO: 289680 - DNA, 30 bp, Artificial Sequence
  Synthetic oligonucleotide
ggtggttgtgcttaaatgtcggagcattcc

SEQ ID NO: 289681 - DNA, 30 bp, Artificial Sequence
  Synthetic oligonucleotide
aagagggccaatggcacatgcattcattcc

SEQ ID NO: 289682 - DNA, 30 bp, Artificial Sequence
  Synthetic oligonucleotide
taactgaaaggagtcaagtacggagattcc

SEQ ID NO: 289683 - DNA, 30 bp, Artificial Sequence
  Synthetic oligonucleotide
gcttagcacggtcaccagggtgtagattcc

SEQ ID NO: 289684 - DNA, 30 bp, Artificial Sequence
  Synthetic oligonucleotide
tggactcgttaacggacggcgggcgattcc

SEQ ID NO: 289685 - DNA, 30 bp, Artificial Sequence
  Synthetic oligonucleotide
ataccgccgttccaagcaggctgggattcc

SEQ ID NO: 289686 - DNA, 30 bp, Artificial Sequence
  Synthetic oligonucleotide
gcgtatgcacttcttttgggttgggattcc

SEQ ID NO: 289687 - DNA, 30 bp, Artificial Sequence
  Synthetic oligonucleotide
acggacttttgctttaccagggtggattcc

SEQ ID NO: 289688 - DNA, 30 bp, Artificial Sequence
  Synthetic oligonucleotide
ctcggccgttacttacgggggcatgattcc

SEQ ID NO: 289689 - DNA, 30 bp, Artificial Sequence
  Synthetic oligonucleotide
aatgaaacggtgtcaagcgtcgaatattcc

SEQ ID NO: 289690 - DNA, 30 bp, Artificial Sequence
  Synthetic oligonucleotide
tgttcgggtgcacgcgtatatggatattcc

SEQ ID NO: 289691 - DNA, 30 bp, Artificial Sequence
  Synthetic oligonucleotide
cgctgggccgcctgttctggggcctattcc

SEQ ID NO: 289692 - DNA, 30 bp, Artificial Sequence
  Synthetic oligonucleotide
ggaatggaaacctaaagatccacgtattcc

SEQ ID NO: 289693 - DNA, 30 bp, Artificial Sequence
  Synthetic oligonucleotide
tcggactagcatcagccctgaatttattcc

SEQ ID NO: 289694 - DNA, 30 bp, Artificial Sequence
  Synthetic oligonucleotide
acggaagctcgtgcgtgaaaatgaacttcc

SEQ ID NO: 289695 - DNA, 30 bp, Artificial Sequence
  Synthetic oligonucleotide
cgcgattccggaacgtcaagtcggacttcc

SEQ ID NO: 289696 - DNA, 30 bp, Artificial Sequence
  Synthetic oligonucleotide
gctgtcttataataatgggcagctacttcc

SEQ ID NO: 289697 - DNA, 30 bp, Artificial Sequence
  Synthetic oligonucleotide
cgcctaggataaatagtgggtattacttcc

SEQ ID NO: 289698 - DNA, 30 bp, Artificial Sequence
  Synthetic oligonucleotide
ggtaatggggttaggaatgcctaaccttcc

SEQ ID NO: 289699 - DNA, 30 bp, Artificial Sequence
  Synthetic oligonucleotide
attagggcctggtcttaaacccgaccttcc

SEQ ID NO: 289700 - DNA, 30 bp, Artificial Sequence
  Synthetic oligonucleotide
gataagtctcgtggataaatggagccttcc

SEQ ID NO: 289701 - DNA, 30 bp, Artificial Sequence
  Synthetic oligonucleotide
ctcgttcgtcaccgacggacgtatccttcc

SEQ ID NO: 289702 - DNA, 30 bp, Artificial Sequence
  Synthetic oligonucleotide
gcgccgtcacgtcctgaactgggtccttcc

SEQ ID NO: 289703 - DNA, 30 bp, Artificial Sequence
  Synthetic oligonucleotide
cgcaacagattagtgactaaggaagcttcc

SEQ ID NO: 289704 - DNA, 30 bp, Artificial Sequence
  Synthetic oligonucleotide
tcccgtgtattgctgacgatgcacgcttcc

SEQ ID NO: 289705 - DNA, 30 bp, Artificial Sequence
  Synthetic oligonucleotide
tgtccttctaagaaggatggaggtgcttcc

SEQ ID NO: 289706 - DNA, 30 bp, Artificial Sequence
  Synthetic oligonucleotide
ggccagtttttgtcaatctacaagtcttcc

SEQ ID NO: 289707 - DNA, 30 bp, Artificial Sequence
  Synthetic oligonucleotide
gccgggtcgatacagggtcgaatgtcttcc

SEQ ID NO: 289708 - DNA, 30 bp, Artificial Sequence
  Synthetic oligonucleotide
cccaaatcgattgggctaatatgttcttcc

SEQ ID NO: 289709 - DNA, 30 bp, Artificial Sequence
  Synthetic oligonucleotide
cgcgctacatgaagatcagaaagcagttcc

SEQ ID NO: 289710 - DNA, 30 bp, Artificial Sequence
  Synthetic oligonucleotide
ggcaagtgctgaacatctctaaggagttcc

SEQ ID NO: 289711 - DNA, 30 bp, Artificial Sequence
  Synthetic oligonucleotide
caagtaagtgtatacttcgtgatgagttcc

SEQ ID NO: 289712 - DNA, 30 bp, Artificial Sequence
  Synthetic oligonucleotide
tttggacagcaaacggacgtatatagttcc

SEQ ID NO: 289713 - DNA, 30 bp, Artificial Sequence
  Synthetic oligonucleotide
tacccgtatgttaagtacatcctacgttcc

SEQ ID NO: 289714 - DNA, 30 bp, Artificial Sequence
  Synthetic oligonucleotide
ccctccccatcaacagatataagccgttcc

SEQ ID NO: 289715 - DNA, 30 bp, Artificial Sequence
  Synthetic oligonucleotide
gcgcttgcgaattcgggaacaatccgttcc

SEQ ID NO: 289716 - DNA, 30 bp, Artificial Sequence
  Synthetic oligonucleotide
ttccctaaacagttctcgaatccgcgttcc

SEQ ID NO: 289717 - DNA, 30 bp, Artificial Sequence
  Synthetic oligonucleotide
tgtcattccgcgaagtattgttcgcgttcc

SEQ ID NO: 289718 - DNA, 30 bp, Artificial Sequence
  Synthetic oligonucleotide
gcacaccgtctacacgcccttcctcgttcc

SEQ ID NO: 289719 - DNA, 30 bp, Artificial Sequence
  Synthetic oligonucleotide
gacgacttgggcgggcaattatctcgttcc

SEQ ID NO: 289720 - DNA, 30 bp, Artificial Sequence
  Synthetic oligonucleotide
cctatctgtcaaccttggcgcctaggttcc

SEQ ID NO: 289721 - DNA, 30 bp, Artificial Sequence
  Synthetic oligonucleotide
atcctctccgaccccggaacaaccggttcc

SEQ ID NO: 289722 - DNA, 30 bp, Artificial Sequence
  Synthetic oligonucleotide
tacaaacaaccgcaggtagagccgggttcc

SEQ ID NO: 289723 - DNA, 30 bp, Artificial Sequence
  Synthetic oligonucleotide
gtgatgcttgagggtgctggtttgggttcc

SEQ ID NO: 289724 - DNA, 30 bp, Artificial Sequence
  Synthetic oligonucleotide
gctaggtacaggttcctatcccttggttcc

SEQ ID NO: 289725 - DNA, 29 bp, Artificial Sequence
  Synthetic oligonucleotide
caccggcccgagccttggaggaatgttcc

SEQ ID NO: 289726 - DNA, 30 bp, Artificial Sequence
  Synthetic oligonucleotide
gccagtccacccgtaggcccaaactgttcc

SEQ ID NO: 289727 - DNA, 30 bp, Artificial Sequence
  Synthetic oligonucleotide
ctgcggtaatgttatggcttcatctgttcc

SEQ ID NO: 289728 - DNA, 30 bp, Artificial Sequence
  Synthetic oligonucleotide
aacataagggagaatgacaggtagtgttcc

SEQ ID NO: 289729 - DNA, 30 bp, Artificial Sequence
  Synthetic oligonucleotide
gattcgatttacgcattcgtccattgttcc

SEQ ID NO: 289730 - DNA, 30 bp, Artificial Sequence
  Synthetic oligonucleotide
aggctcgagcctactgattgtcgttgttcc

SEQ ID NO: 289731 - DNA, 30 bp, Artificial Sequence
  Synthetic oligonucleotide
tcttgtgtgttatcggggtggataatttcc

SEQ ID NO: 289732 - DNA, 30 bp, Artificial Sequence
  Synthetic oligonucleotide
gcggccagtgacgaatgacgaggcatttcc

SEQ ID NO: 289733 - DNA, 30 bp, Artificial Sequence
  Synthetic oligonucleotide
tcccaagcctgtgaaagggattggatttcc

SEQ ID NO: 289734 - DNA, 31 bp, Artificial Sequence
  Synthetic oligonucleotide
ccccttaactaacgcccgaggagtactttcc

SEQ ID NO: 289735 - DNA, 30 bp, Artificial Sequence
  Synthetic oligonucleotide
gagacatactcctggcaaccatccctttcc

SEQ ID NO: 289736 - DNA, 30 bp, Artificial Sequence
  Synthetic oligonucleotide
gtaacttcaggactatgtgcgaggctttcc

SEQ ID NO: 289737 - DNA, 30 bp, Artificial Sequence
  Synthetic oligonucleotide
gcaaaggtgaatcagactagcttgctttcc

SEQ ID NO: 289738 - DNA, 30 bp, Artificial Sequence
  Synthetic oligonucleotide
aagaaggtgtgtggtatcggtagtctttcc

SEQ ID NO: 289739 - DNA, 30 bp, Artificial Sequence
  Synthetic oligonucleotide
agggtggatctgggggtcacccaagtttcc

SEQ ID NO: 289740 - DNA, 30 bp, Artificial Sequence
  Synthetic oligonucleotide
tttagctgaatgtcggtgctcgtagtttcc

SEQ ID NO: 289741 - DNA, 30 bp, Artificial Sequence
  Synthetic oligonucleotide
catagcggcgtttcagggaccgacgtttcc

SEQ ID NO: 289742 - DNA, 30 bp, Artificial Sequence
  Synthetic oligonucleotide
acccgagctataacctccaacatcgtttcc

SEQ ID NO: 289743 - DNA, 30 bp, Artificial Sequence
  Synthetic oligonucleotide
aaatcacattcgtcttagagtctcgtttcc

SEQ ID NO: 289744 - DNA, 30 bp, Artificial Sequence
  Synthetic oligonucleotide
gcgttgaaaatagggcaggttcaggtttcc

SEQ ID NO: 289745 - DNA, 30 bp, Artificial Sequence
  Synthetic oligonucleotide
tgaaggacgaggggggccgtctaggtttcc

SEQ ID NO: 289746 - DNA, 30 bp, Artificial Sequence
  Synthetic oligonucleotide
atatttgtcctccccccaggggcattttcc

SEQ ID NO: 289747 - DNA, 30 bp, Artificial Sequence
  Synthetic oligonucleotide
tggttctggtgacttaaaggctcaaaaagc

SEQ ID NO: 289748 - DNA, 30 bp, Artificial Sequence
  Synthetic oligonucleotide
tccagaagtggctaatcgggtgtaaaaagc

SEQ ID NO: 289749 - DNA, 30 bp, Artificial Sequence
  Synthetic oligonucleotide
taaggctgtgtatgacgacaacacaaaagc

SEQ ID NO: 289750 - DNA, 30 bp, Artificial Sequence
  Synthetic oligonucleotide
atggcccactatgacagcgcgtgcaaaagc

SEQ ID NO: 289751 - DNA, 30 bp, Artificial Sequence
  Synthetic oligonucleotide
gggaacatgttggtgaatatggggaaaagc

SEQ ID NO: 289752 - DNA, 30 bp, Artificial Sequence
  Synthetic oligonucleotide
tgatacttcgccgtggtaacccctaaaagc

SEQ ID NO: 289753 - DNA, 30 bp, Artificial Sequence
  Synthetic oligonucleotide
tgaagggaagcaagagctaaatctaaaagc

SEQ ID NO: 289754 - DNA, 30 bp, Artificial Sequence
  Synthetic oligonucleotide
cttggttaatcgtctcacgaggatcaaagc

SEQ ID NO: 289755 - DNA, 30 bp, Artificial Sequence
  Synthetic oligonucleotide
caaatgagggcggaatatagaaaagaaagc

SEQ ID NO: 289756 - DNA, 30 bp, Artificial Sequence
  Synthetic oligonucleotide
caaggacacacgagatagcacgcagaaagc

SEQ ID NO: 289757 - DNA, 30 bp, Artificial Sequence
  Synthetic oligonucleotide
ctattttactatgaacggaagtgagaaagc

SEQ ID NO: 289758 - DNA, 30 bp, Artificial Sequence
  Synthetic oligonucleotide
agaggcctcggtccacgggaattagaaagc

SEQ ID NO: 289759 - DNA, 30 bp, Artificial Sequence
  Synthetic oligonucleotide
aaaggttggtctttaacgtctaaggaaagc

SEQ ID NO: 289760 - DNA, 30 bp, Artificial Sequence
  Synthetic oligonucleotide
atagtttttcgtttacgggaggtggaaagc

SEQ ID NO: 289761 - DNA, 30 bp, Artificial Sequence
  Synthetic oligonucleotide
gagggattcagaagacttattgatgaaagc

SEQ ID NO: 289762 - DNA, 30 bp, Artificial Sequence
  Synthetic oligonucleotide
tgacatccgagcaaaatccgaagtgaaagc

SEQ ID NO: 289763 - DNA, 30 bp, Artificial Sequence
  Synthetic oligonucleotide
acatgatacatatggtggtccggtgaaagc

SEQ ID NO: 289764 - DNA, 30 bp, Artificial Sequence
  Synthetic oligonucleotide
tgtagcggggcacccggatcctgtgaaagc

SEQ ID NO: 289765 - DNA, 30 bp, Artificial Sequence
  Synthetic oligonucleotide
cagatgtctgagtgtagcactacataaagc

SEQ ID NO: 289766 - DNA, 30 bp, Artificial Sequence
  Synthetic oligonucleotide
cagacgcataggagtttcacagcataaagc

SEQ ID NO: 289767 - DNA, 30 bp, Artificial Sequence
  Synthetic oligonucleotide
gcaatacgacacgacctatagctataaagc

SEQ ID NO: 289768 - DNA, 30 bp, Artificial Sequence
  Synthetic oligonucleotide
gtttatatagaggtccttaaagcgtaaagc

SEQ ID NO: 289769 - DNA, 30 bp, Artificial Sequence
  Synthetic oligonucleotide
ctatcactgcaaactgaaatcatgtaaagc

SEQ ID NO: 289770 - DNA, 30 bp, Artificial Sequence
  Synthetic oligonucleotide
cttggacatggcactaaataagattaaagc

SEQ ID NO: 289771 - DNA, 30 bp, Artificial Sequence
  Synthetic oligonucleotide
ggtcaaaagtgtagcggctcttattaaagc

SEQ ID NO: 289772 - DNA, 31 bp, Artificial Sequence
  Synthetic oligonucleotide
tcacggagagtaatcctccaccgcttaaagc

SEQ ID NO: 289773 - DNA, 30 bp, Artificial Sequence
  Synthetic oligonucleotide
tctatgcacaccaggtacaagggttaaagc

SEQ ID NO: 289774 - DNA, 30 bp, Artificial Sequence
  Synthetic oligonucleotide
ggtccttctcggtggcatcagtccacaagc

SEQ ID NO: 289775 - DNA, 30 bp, Artificial Sequence
  Synthetic oligonucleotide
ggatcaaacatatccacttgttgcacaagc

SEQ ID NO: 289776 - DNA, 30 bp, Artificial Sequence
  Synthetic oligonucleotide
gtttcgcttacgtgtaatacaaagacaagc

SEQ ID NO: 289777 - DNA, 30 bp, Artificial Sequence
  Synthetic oligonucleotide
tcgggcctgggaagttccttatcgacaagc

SEQ ID NO: 289778 - DNA, 30 bp, Artificial Sequence
  Synthetic oligonucleotide
atccgtgcagagtctcctgttgtgacaagc

SEQ ID NO: 289779 - DNA, 30 bp, Artificial Sequence
  Synthetic oligonucleotide
gtcccaagctcattcgggagtggaccaagc

SEQ ID NO: 289780 - DNA, 30 bp, Artificial Sequence
  Synthetic oligonucleotide
attacttagcttgttaaggcatggccaagc

SEQ ID NO: 289781 - DNA, 30 bp, Artificial Sequence
  Synthetic oligonucleotide
tcttccggtatcaggaaactactgccaagc

SEQ ID NO: 289782 - DNA, 30 bp, Artificial Sequence
  Synthetic oligonucleotide
cagggccttgtatcaatatactatccaagc

SEQ ID NO: 289783 - DNA, 30 bp, Artificial Sequence
  Synthetic oligonucleotide
ggagccgcgggtcggtcgggtgctccaagc

SEQ ID NO: 289784 - DNA, 28 bp, Artificial Sequence
  Synthetic oligonucleotide
gataggtattgtattgaaccaagcaagc

SEQ ID NO: 289785 - DNA, 30 bp, Artificial Sequence
  Synthetic oligonucleotide
agagcagtggttttcattctatcagcaagc

SEQ ID NO: 289786 - DNA, 30 bp, Artificial Sequence
  Synthetic oligonucleotide
aagtccgattcacaattcctgtcagcaagc

SEQ ID NO: 289787 - DNA, 30 bp, Artificial Sequence
  Synthetic oligonucleotide
tcaaggggctcttaaatcctatacgcaagc

SEQ ID NO: 289788 - DNA, 30 bp, Artificial Sequence
  Synthetic oligonucleotide
gcgctatagtctagatgttggctcgcaagc

SEQ ID NO: 289789 - DNA, 30 bp, Artificial Sequence
  Synthetic oligonucleotide
gtacctccagtcggttgcgagtcggcaagc

SEQ ID NO: 289790 - DNA, 30 bp, Artificial Sequence
  Synthetic oligonucleotide
tacgtgctttattataagcacatggcaagc

SEQ ID NO: 289791 - DNA, 30 bp, Artificial Sequence
  Synthetic oligonucleotide
gcggcgacggtcattatatgaggatcaagc

SEQ ID NO: 289792 - DNA, 30 bp, Artificial Sequence
  Synthetic oligonucleotide
gcagactagaattaattttacttgtcaagc

SEQ ID NO: 289793 - DNA, 30 bp, Artificial Sequence
  Synthetic oligonucleotide
gaatgtaaatgttacatatcgtgttcaagc

SEQ ID NO: 289794 - DNA, 30 bp, Artificial Sequence
  Synthetic oligonucleotide
acgtggcaacatctgagatactcaagaagc

SEQ ID NO: 289795 - DNA, 30 bp, Artificial Sequence
  Synthetic oligonucleotide
aaatggttgtgcacggccctccagagaagc

SEQ ID NO: 289796 - DNA, 30 bp, Artificial Sequence
  Synthetic oligonucleotide
ttaccgacaaatggtttgaggtagagaagc

SEQ ID NO: 289797 - DNA, 30 bp, Artificial Sequence
  Synthetic oligonucleotide
gttatcgaaaacccttcatgtaggagaagc

SEQ ID NO: 289798 - DNA, 30 bp, Artificial Sequence
  Synthetic oligonucleotide
tgtgtcgactagatctagaaaattagaagc

SEQ ID NO: 289799 - DNA, 30 bp, Artificial Sequence
  Synthetic oligonucleotide
aatagcaactcggttcatcgagaccgaagc

SEQ ID NO: 289800 - DNA, 30 bp, Artificial Sequence
  Synthetic oligonucleotide
gagctttctggcaattggggaacccgaagc

SEQ ID NO: 289801 - DNA, 30 bp, Artificial Sequence
  Synthetic oligonucleotide
tttggaaactggtcttgggccgggcgaagc

SEQ ID NO: 289802 - DNA, 30 bp, Artificial Sequence
  Synthetic oligonucleotide
cagagggcgctttgaacgtgtggcggaagc

SEQ ID NO: 289803 - DNA, 30 bp, Artificial Sequence
  Synthetic oligonucleotide
aaatccgccccatcgggcactatcggaagc

SEQ ID NO: 289804 - DNA, 30 bp, Artificial Sequence
  Synthetic oligonucleotide
gacatacttgcaggaggctccgcgggaagc

SEQ ID NO: 289805 - DNA, 30 bp, Artificial Sequence
  Synthetic oligonucleotide
agattaataatcgaaatcaaatcgggaagc

SEQ ID NO: 289806 - DNA, 30 bp, Artificial Sequence
  Synthetic oligonucleotide
gcacttacgttctggaatctatcgggaagc

SEQ ID NO: 289807 - DNA, 30 bp, Artificial Sequence
  Synthetic oligonucleotide
gtcttacggtctaaaggagtttcgggaagc

SEQ ID NO: 289808 - DNA, 30 bp, Artificial Sequence
  Synthetic oligonucleotide
agttccgttgtgagcatcagcaggggaagc

SEQ ID NO: 289809 - DNA, 31 bp, Artificial Sequence
  Synthetic oligonucleotide
atgaaattaagcttgaatttaacggggaagc

SEQ ID NO: 289810 - DNA, 30 bp, Artificial Sequence
  Synthetic oligonucleotide
tctccatcttttcggtagtgctactgaagc

SEQ ID NO: 289811 - DNA, 30 bp, Artificial Sequence
  Synthetic oligonucleotide
caacgggtttcgtacggtttagcctgaagc

SEQ ID NO: 289812 - DNA, 30 bp, Artificial Sequence
  Synthetic oligonucleotide
gtggttatcgaaattccccacagctgaagc

SEQ ID NO: 289813 - DNA, 30 bp, Artificial Sequence
  Synthetic oligonucleotide
gtcacgcttagttttcgccgagcgtgaagc

SEQ ID NO: 289814 - DNA, 30 bp, Artificial Sequence
  Synthetic oligonucleotide
gtaacgccgggtacgatttgaacaataagc

SEQ ID NO: 289815 - DNA, 30 bp, Artificial Sequence
  Synthetic oligonucleotide
agacggagatatttaagtttcctaataagc

SEQ ID NO: 289816 - DNA, 30 bp, Artificial Sequence
  Synthetic oligonucleotide
ctcccgacgggggacatatctggcataagc

SEQ ID NO: 289817 - DNA, 30 bp, Artificial Sequence
  Synthetic oligonucleotide
gttagacgaccgaacctactggtcataagc

SEQ ID NO: 289818 - DNA, 30 bp, Artificial Sequence
  Synthetic oligonucleotide
tagaagactcgtcttccgggctcgataagc

SEQ ID NO: 289819 - DNA, 31 bp, Artificial Sequence
  Synthetic oligonucleotide
cgtctgtgttggtcgagcggcgaaactaagc

SEQ ID NO: 289820 - DNA, 30 bp, Artificial Sequence
  Synthetic oligonucleotide
cattcgtaggagcgcctggcaaacgtaagc

SEQ ID NO: 289821 - DNA, 30 bp, Artificial Sequence
  Synthetic oligonucleotide
ctagatcaaagacgtcgggcatccgtaagc

SEQ ID NO: 289822 - DNA, 30 bp, Artificial Sequence
  Synthetic oligonucleotide
tagtctcctaacagcaatgaactggtaagc

SEQ ID NO: 289823 - DNA, 30 bp, Artificial Sequence
  Synthetic oligonucleotide
gaagtcgtgaagcccgtcctatcattaagc

SEQ ID NO: 289824 - DNA, 30 bp, Artificial Sequence
  Synthetic oligonucleotide
gggaggtaggagggggcgttaagcttaagc

SEQ ID NO: 289825 - DNA, 30 bp, Artificial Sequence
  Synthetic oligonucleotide
cgcaacgcccctcggtgatataagttaagc

SEQ ID NO: 289826 - DNA, 30 bp, Artificial Sequence
  Synthetic oligonucleotide
tcatccattaaagtaaaaaatgggttaagc

SEQ ID NO: 289827 - DNA, 30 bp, Artificial Sequence
  Synthetic oligonucleotide
atccgtttgcgggtaaaccttcctttaagc

SEQ ID NO: 289828 - DNA, 30 bp, Artificial Sequence
  Synthetic oligonucleotide
atcaaaggaaatcaaatgaattacaacagc

SEQ ID NO: 289829 - DNA, 30 bp, Artificial Sequence
  Synthetic oligonucleotide
ttaacgtgtggaaaggtgtcctagaacagc

SEQ ID NO: 289830 - DNA, 30 bp, Artificial Sequence
  Synthetic oligonucleotide
gaaggattagacttggagcgttaacacagc

SEQ ID NO: 289831 - DNA, 30 bp, Artificial Sequence
  Synthetic oligonucleotide
cctgtgttcgaacaggattgaagacacagc

SEQ ID NO: 289832 - DNA, 30 bp, Artificial Sequence
  Synthetic oligonucleotide
ccggtgttagttgatatgcgctaccacagc

SEQ ID NO: 289833 - DNA, 30 bp, Artificial Sequence
  Synthetic oligonucleotide
ggcttctttaactgtattcgtgggcacagc

SEQ ID NO: 289834 - DNA, 30 bp, Artificial Sequence
  Synthetic oligonucleotide
atcgacttatcggattccttgtatcacagc

SEQ ID NO: 289835 - DNA, 30 bp, Artificial Sequence
  Synthetic oligonucleotide
gtgtctagcgtcttggccggtagagacagc

SEQ ID NO: 289836 - DNA, 30 bp, Artificial Sequence
  Synthetic oligonucleotide
tacaacaatgcgggagtagggttagacagc

SEQ ID NO: 289837 - DNA, 31 bp, Artificial Sequence
  Synthetic oligonucleotide
tcaactttaggtgactaagtggtgtgacagc

SEQ ID NO: 289838 - DNA, 30 bp, Artificial Sequence
  Synthetic oligonucleotide
agcaaagggaatttggcttcaatatacagc

SEQ ID NO: 289839 - DNA, 30 bp, Artificial Sequence
  Synthetic oligonucleotide
agtgtgagaaaatcagtgtatttatacagc

SEQ ID NO: 289840 - DNA, 30 bp, Artificial Sequence
  Synthetic oligonucleotide
gaccggagcgactacacaagcgtgtacagc

SEQ ID NO: 289841 - DNA, 30 bp, Artificial Sequence
  Synthetic oligonucleotide
tctccatcgaagcgaatggttggcaccagc

SEQ ID NO: 289842 - DNA, 30 bp, Artificial Sequence
  Synthetic oligonucleotide
gggttaatgtgacaaggctaagtcaccagc

SEQ ID NO: 289843 - DNA, 30 bp, Artificial Sequence
  Synthetic oligonucleotide
taaagttggcggccgttttccacgaccagc

SEQ ID NO: 289844 - DNA, 30 bp, Artificial Sequence
  Synthetic oligonucleotide
tacatagggtctggaagattgcgccccagc

SEQ ID NO: 289845 - DNA, 30 bp, Artificial Sequence
  Synthetic oligonucleotide
cgccccgtaatcacctaccctccagccagc

SEQ ID NO: 289846 - DNA, 30 bp, Artificial Sequence
  Synthetic oligonucleotide
caatttccgaaaccctaaattacggccagc

SEQ ID NO: 289847 - DNA, 30 bp, Artificial Sequence
  Synthetic oligonucleotide
ttccgtgggttcctaacttgggtggccagc

SEQ ID NO: 289848 - DNA, 30 bp, Artificial Sequence
  Synthetic oligonucleotide
ttgggaggaggttacggactttactccagc

SEQ ID NO: 289849 - DNA, 30 bp, Artificial Sequence
  Synthetic oligonucleotide
tgagcattttttaggggcggggtctccagc

SEQ ID NO: 289850 - DNA, 30 bp, Artificial Sequence
  Synthetic oligonucleotide
tgcagtttggaattaccaacgcattccagc

SEQ ID NO: 289851 - DNA, 30 bp, Artificial Sequence
  Synthetic oligonucleotide
tttgccaatgtagagaaatagtgaagcagc

SEQ ID NO: 289852 - DNA, 30 bp, Artificial Sequence
  Synthetic oligonucleotide
aattgatcaacgatcgtcatactaagcagc

SEQ ID NO: 289853 - DNA, 29 bp, Artificial Sequence
  Synthetic oligonucleotide
atggtttcatggtcgcgcggttaagcagc

SEQ ID NO: 289854 - DNA, 30 bp, Artificial Sequence
  Synthetic oligonucleotide
gcttcccccaaccttaccggttacagcagc

SEQ ID NO: 289855 - DNA, 30 bp, Artificial Sequence
  Synthetic oligonucleotide
ttgacatgtgagcaaccacatgggagcagc

SEQ ID NO: 289856 - DNA, 30 bp, Artificial Sequence
  Synthetic oligonucleotide
ttccttgttaaaagcgaggggtctagcagc

SEQ ID NO: 289857 - DNA, 30 bp, Artificial Sequence
  Synthetic oligonucleotide
tgtaccggcgggacgcaaccttttagcagc

SEQ ID NO: 289858 - DNA, 30 bp, Artificial Sequence
  Synthetic oligonucleotide
gggtcgtaagcttataggaaaacccgcagc

SEQ ID NO: 289859 - DNA, 30 bp, Artificial Sequence
  Synthetic oligonucleotide
ggcgtaggtcataaggggttctttcgcagc

SEQ ID NO: 289860 - DNA, 30 bp, Artificial Sequence
  Synthetic oligonucleotide
tccctcatcgcgtgagttattcggggcagc

SEQ ID NO: 289861 - DNA, 30 bp, Artificial Sequence
  Synthetic oligonucleotide
ccgtaagaccgcggtatagttgctggcagc

SEQ ID NO: 289862 - DNA, 30 bp, Artificial Sequence
  Synthetic oligonucleotide
tagggacgaaggcttaaaattatatgcagc

SEQ ID NO: 289863 - DNA, 30 bp, Artificial Sequence
  Synthetic oligonucleotide
cctggtgggtttacgctataagtatgcagc

SEQ ID NO: 289864 - DNA, 30 bp, Artificial Sequence
  Synthetic oligonucleotide
aggattaacggtacataacgaccgtgcagc

SEQ ID NO: 289865 - DNA, 30 bp, Artificial Sequence
  Synthetic oligonucleotide
gagttgtgtacatgtatctcgtcgtgcagc

SEQ ID NO: 289866 - DNA, 30 bp, Artificial Sequence
  Synthetic oligonucleotide
tgaggtacaaactacaagcgtagaatcagc

SEQ ID NO: 289867 - DNA, 30 bp, Artificial Sequence
  Synthetic oligonucleotide
tcgggccttcaatgcttgtgcgtgatcagc

SEQ ID NO: 289868 - DNA, 30 bp, Artificial Sequence
  Synthetic oligonucleotide
tatccgggaggaaggtccgaatctatcagc

SEQ ID NO: 289869 - DNA, 30 bp, Artificial Sequence
  Synthetic oligonucleotide
cgcagtctcgtgaatacctcctctatcagc

SEQ ID NO: 289870 - DNA, 30 bp, Artificial Sequence
  Synthetic oligonucleotide
ggtaaagctcgcttggcgatgtctctcagc

SEQ ID NO: 289871 - DNA, 30 bp, Artificial Sequence
  Synthetic oligonucleotide
cagaatctaatatagtgtgcaagagtcagc

SEQ ID NO: 289872 - DNA, 30 bp, Artificial Sequence
  Synthetic oligonucleotide
atgcattagtattgggtaaccgacgtcagc

SEQ ID NO: 289873 - DNA, 30 bp, Artificial Sequence
  Synthetic oligonucleotide
gaaccgtacctgccttgatcaagcgtcagc

SEQ ID NO: 289874 - DNA, 30 bp, Artificial Sequence
  Synthetic oligonucleotide
tacatcaagcggcgacaacccggggtcagc

SEQ ID NO: 289875 - DNA, 30 bp, Artificial Sequence
  Synthetic oligonucleotide
gaggccccataaagcgctggttgggtcagc

SEQ ID NO: 289876 - DNA, 30 bp, Artificial Sequence
  Synthetic oligonucleotide
gttcaagccacaacactttaggtattcagc

SEQ ID NO: 289877 - DNA, 30 bp, Artificial Sequence
  Synthetic oligonucleotide
gaaaaaacaaaagaaactgcattattcagc

SEQ ID NO: 289878 - DNA, 30 bp, Artificial Sequence
  Synthetic oligonucleotide
tcccaataggatggacaattgatcttcagc

SEQ ID NO: 289879 - DNA, 31 bp, Artificial Sequence
  Synthetic oligonucleotide
gtagactcggatccctttagcagagttcagc

SEQ ID NO: 289880 - DNA, 30 bp, Artificial Sequence
  Synthetic oligonucleotide
cgtagaggcctccttgcgaggcaaaagagc

SEQ ID NO: 289881 - DNA, 30 bp, Artificial Sequence
  Synthetic oligonucleotide
gaggcattttaggaataagttgaaaagagc

SEQ ID NO: 289882 - DNA, 30 bp, Artificial Sequence
  Synthetic oligonucleotide
tatggggtacggcctagggcagcaaagagc

SEQ ID NO: 289883 - DNA, 30 bp, Artificial Sequence
  Synthetic oligonucleotide
gggaactctcacagacttatctgcaagagc

SEQ ID NO: 289884 - DNA, 30 bp, Artificial Sequence
  Synthetic oligonucleotide
gcccggtgaccctaaggatgatcgaagagc

SEQ ID NO: 289885 - DNA, 30 bp, Artificial Sequence
  Synthetic oligonucleotide
catgcaagctatcgattacgcgataagagc

SEQ ID NO: 289886 - DNA, 30 bp, Artificial Sequence
  Synthetic oligonucleotide
aaacatacatgacgtaataagagtaagagc

SEQ ID NO: 289887 - DNA, 30 bp, Artificial Sequence
  Synthetic oligonucleotide
cttccgacatgaaacgggttcggacagagc

SEQ ID NO: 289888 - DNA, 30 bp, Artificial Sequence
  Synthetic oligonucleotide
acggtgacgatcctgtttctatatcagagc

SEQ ID NO: 289889 - DNA, 30 bp, Artificial Sequence
  Synthetic oligonucleotide
ggtgtcactaggaccgttgaatctcagagc

SEQ ID NO: 289890 - DNA, 30 bp, Artificial Sequence
  Synthetic oligonucleotide
gatttatcacggcacaaagctagtcagagc

SEQ ID NO: 289891 - DNA, 30 bp, Artificial Sequence
  Synthetic oligonucleotide
acattttatgttcagcggcgctgggagagc

SEQ ID NO: 289892 - DNA, 30 bp, Artificial Sequence
  Synthetic oligonucleotide
cgatgttaatggttgtggatccctgagagc

SEQ ID NO: 289893 - DNA, 30 bp, Artificial Sequence
  Synthetic oligonucleotide
gtagtatataggtatacgggccgtgagagc

SEQ ID NO: 289894 - DNA, 30 bp, Artificial Sequence
  Synthetic oligonucleotide
gtatgggaggactctaccataggtgagagc

SEQ ID NO: 289895 - DNA, 30 bp, Artificial Sequence
  Synthetic oligonucleotide
agtatattcggcaagtgatgttgtgagagc

SEQ ID NO: 289896 - DNA, 30 bp, Artificial Sequence
  Synthetic oligonucleotide
accatacgtttaagcggcatgcttgagagc

SEQ ID NO: 289897 - DNA, 30 bp, Artificial Sequence
  Synthetic oligonucleotide
gcataaatcctaggccacggtcttgagagc

SEQ ID NO: 289898 - DNA, 30 bp, Artificial Sequence
  Synthetic oligonucleotide
tggaagattcggcctacagcaatatagagc

SEQ ID NO: 289899 - DNA, 30 bp, Artificial Sequence
  Synthetic oligonucleotide
acaataagcagtatagggtaggcctagagc

SEQ ID NO: 289900 - DNA, 30 bp, Artificial Sequence
  Synthetic oligonucleotide
taactagaggcaactgtgaagtgctagagc

SEQ ID NO: 289901 - DNA, 30 bp, Artificial Sequence
  Synthetic oligonucleotide
atgtaaaattacgtgtactactggtagagc

SEQ ID NO: 289902 - DNA, 31 bp, Artificial Sequence
  Synthetic oligonucleotide
aatgctccgaagctgcggtagaacttagagc

SEQ ID NO: 289903 - DNA, 30 bp, Artificial Sequence
  Synthetic oligonucleotide
ccactcatatagagatgaacatcaacgagc

SEQ ID NO: 289904 - DNA, 30 bp, Artificial Sequence
  Synthetic oligonucleotide
gttttgagggacgaaattggtgtaacgagc

SEQ ID NO: 289905 - DNA, 30 bp, Artificial Sequence
  Synthetic oligonucleotide
aggcctacccagtgaggcggtttcacgagc

SEQ ID NO: 289906 - DNA, 30 bp, Artificial Sequence
  Synthetic oligonucleotide
tggggtccattcagtcagaagtaaccgagc

SEQ ID NO: 289907 - DNA, 30 bp, Artificial Sequence
  Synthetic oligonucleotide
tgattcctgcagtaaattccgcgaccgagc

SEQ ID NO: 289908 - DNA, 30 bp, Artificial Sequence
  Synthetic oligonucleotide
cctatcgagtgtaacagcctcttaccgagc

SEQ ID NO: 289909 - DNA, 30 bp, Artificial Sequence
  Synthetic oligonucleotide
gttggcagcaacgcgagatactacccgagc

SEQ ID NO: 289910 - DNA, 31 bp, Artificial Sequence
  Synthetic oligonucleotide
tagcacggttaggtgagtcaaccagccgagc

SEQ ID NO: 289911 - DNA, 30 bp, Artificial Sequence
  Synthetic oligonucleotide
taatcgtgcattgcgtccgcaaggccgagc

SEQ ID NO: 289912 - DNA, 30 bp, Artificial Sequence
  Synthetic oligonucleotide
ggctcctctgtttgaggctaaatgccgagc

SEQ ID NO: 289913 - DNA, 30 bp, Artificial Sequence
  Synthetic oligonucleotide
aatggagcggtgctgtggtttgatccgagc

SEQ ID NO: 289914 - DNA, 30 bp, Artificial Sequence
  Synthetic oligonucleotide
caatgtgtctgactatctcgataagcgagc

SEQ ID NO: 289915 - DNA, 30 bp, Artificial Sequence
  Synthetic oligonucleotide
acaaatcatgtcaagagtatgttcgcgagc

SEQ ID NO: 289916 - DNA, 30 bp, Artificial Sequence
  Synthetic oligonucleotide
tgagactcgcaaccgttcggaagggcgagc

SEQ ID NO: 289917 - DNA, 30 bp, Artificial Sequence
  Synthetic oligonucleotide
actcaggttctcttaaagcctcactcgagc

SEQ ID NO: 289918 - DNA, 30 bp, Artificial Sequence
  Synthetic oligonucleotide
ctaggaaacggataggtcgagtattcgagc

SEQ ID NO: 289919 - DNA, 30 bp, Artificial Sequence
  Synthetic oligonucleotide
tgagcgtgtttcgcattcgcttcttcgagc

SEQ ID NO: 289920 - DNA, 30 bp, Artificial Sequence
  Synthetic oligonucleotide
ttacatgaagtgaaactcgctggaaggagc

SEQ ID NO: 289921 - DNA, 30 bp, Artificial Sequence
  Synthetic oligonucleotide
tcgctctaactggaaaggggccacaggagc

SEQ ID NO: 289922 - DNA, 30 bp, Artificial Sequence
  Synthetic oligonucleotide
ggaagcaactgtcagcgactggggaggagc

SEQ ID NO: 289923 - DNA, 30 bp, Artificial Sequence
  Synthetic oligonucleotide
tcattttcgcaatcgggatacgataggagc

SEQ ID NO: 289924 - DNA, 30 bp, Artificial Sequence
  Synthetic oligonucleotide
tggtgtctgtgtctcgtaacaagtaggagc

SEQ ID NO: 289925 - DNA, 30 bp, Artificial Sequence
  Synthetic oligonucleotide
aagatgcactctctacacaatagtaggagc

SEQ ID NO: 289926 - DNA, 30 bp, Artificial Sequence
  Synthetic oligonucleotide
agccaagattctttagcaaatcgtaggagc

SEQ ID NO: 289927 - DNA, 31 bp, Artificial Sequence
  Synthetic oligonucleotide
ttggcaaaagttggacacggaccttaggagc

SEQ ID NO: 289928 - DNA, 30 bp, Artificial Sequence
  Synthetic oligonucleotide
acctgcctgacgactgaaaagttacggagc

SEQ ID NO: 289929 - DNA, 30 bp, Artificial Sequence
  Synthetic oligonucleotide
gtgcacccgctggcaacagtgttacggagc

SEQ ID NO: 289930 - DNA, 30 bp, Artificial Sequence
  Synthetic oligonucleotide
catgggacttagcagcgttccacccggagc

SEQ ID NO: 289931 - DNA, 30 bp, Artificial Sequence
  Synthetic oligonucleotide
taataagttgttgggtcaccggtccggagc

SEQ ID NO: 289932 - DNA, 30 bp, Artificial Sequence
  Synthetic oligonucleotide
cccgacctttgcgggttgctaacgcggagc

SEQ ID NO: 289933 - DNA, 25 bp, Artificial Sequence
  Synthetic oligonucleotide
ctgtagtatggtagcacgtcggagc

SEQ ID NO: 289934 - DNA, 30 bp, Artificial Sequence
  Synthetic oligonucleotide
gcattaaccacttataaccatgaagggagc

SEQ ID NO: 289935 - DNA, 30 bp, Artificial Sequence
  Synthetic oligonucleotide
accgcgaattgagtatgtaggctagggagc

SEQ ID NO: 289936 - DNA, 30 bp, Artificial Sequence
  Synthetic oligonucleotide
acgggtccggtggtacgacaggtagggagc

SEQ ID NO: 289937 - DNA, 30 bp, Artificial Sequence
  Synthetic oligonucleotide
cagacgtgcctagatacactcgccgggagc

SEQ ID NO: 289938 - DNA, 30 bp, Artificial Sequence
  Synthetic oligonucleotide
ccgagagccgcctctgctactctcgggagc

SEQ ID NO: 289939 - DNA, 30 bp, Artificial Sequence
  Synthetic oligonucleotide
gtggggcaggtgcgggtgaagcaggggagc

SEQ ID NO: 289940 - DNA, 30 bp, Artificial Sequence
  Synthetic oligonucleotide
taacgcctacaattcacgattacggggagc

SEQ ID NO: 289941 - DNA, 30 bp, Artificial Sequence
  Synthetic oligonucleotide
caatgcttaatggccttggttacatggagc

SEQ ID NO: 289942 - DNA, 30 bp, Artificial Sequence
  Synthetic oligonucleotide
ctcgcatttagaaaggtccgtgtatggagc

SEQ ID NO: 289943 - DNA, 30 bp, Artificial Sequence
  Synthetic oligonucleotide
gtatcgtatttgatcagtcgttactggagc

SEQ ID NO: 289944 - DNA, 30 bp, Artificial Sequence
  Synthetic oligonucleotide
actgcggcattctcatagggacgctggagc

SEQ ID NO: 289945 - DNA, 30 bp, Artificial Sequence
  Synthetic oligonucleotide
cactgggttagactggtggagacttggagc

SEQ ID NO: 289946 - DNA, 30 bp, Artificial Sequence
  Synthetic oligonucleotide
tccattggacaagcccgctgcgcttggagc

SEQ ID NO: 289947 - DNA, 30 bp, Artificial Sequence
  Synthetic oligonucleotide
gaatatagagaatctctagtctaaatgagc

SEQ ID NO: 289948 - DNA, 30 bp, Artificial Sequence
  Synthetic oligonucleotide
acgtacacatgctgggctctgagcatgagc

SEQ ID NO: 289949 - DNA, 30 bp, Artificial Sequence
  Synthetic oligonucleotide
gcggtatctatctcataacacttcatgagc

SEQ ID NO: 289950 - DNA, 30 bp, Artificial Sequence
  Synthetic oligonucleotide
ggattgcaagatatgggtaggccgatgagc

SEQ ID NO: 289951 - DNA, 30 bp, Artificial Sequence
  Synthetic oligonucleotide
acgcggcgcatcgtacggcatgggatgagc

SEQ ID NO: 289952 - DNA, 30 bp, Artificial Sequence
  Synthetic oligonucleotide
ccgcacacgggcagttgggtgagtatgagc

SEQ ID NO: 289953 - DNA, 30 bp, Artificial Sequence
  Synthetic oligonucleotide
ctttttacccgagagggtcagcttatgagc

SEQ ID NO: 289954 - DNA, 30 bp, Artificial Sequence
  Synthetic oligonucleotide
tgcacggtagttatccggtatcacctgagc

SEQ ID NO: 289955 - DNA, 30 bp, Artificial Sequence
  Synthetic oligonucleotide
aaccaactttcagatcttgtttgcctgagc

SEQ ID NO: 289956 - DNA, 30 bp, Artificial Sequence
  Synthetic oligonucleotide
caccctggctgtcgatacagctctctgagc

SEQ ID NO: 289957 - DNA, 30 bp, Artificial Sequence
  Synthetic oligonucleotide
cttgaaccaccacactaatgcatcgtgagc

SEQ ID NO: 289958 - DNA, 30 bp, Artificial Sequence
  Synthetic oligonucleotide
aaaggccctgtacatcccgttaaattgagc

SEQ ID NO: 289959 - DNA, 30 bp, Artificial Sequence
  Synthetic oligonucleotide
tgctacgttttgtacctcgatacattgagc

SEQ ID NO: 289960 - DNA, 30 bp, Artificial Sequence
  Synthetic oligonucleotide
tctgatttgggtagaagttggagattgagc

SEQ ID NO: 289961 - DNA, 30 bp, Artificial Sequence
  Synthetic oligonucleotide
tcttggcgttccctgaagcatgccttgagc

SEQ ID NO: 289962 - DNA, 30 bp, Artificial Sequence
  Synthetic oligonucleotide
ccgcgtcctgacggcattcgatgcttgagc

SEQ ID NO: 289963 - DNA, 30 bp, Artificial Sequence
  Synthetic oligonucleotide
ttatgccaatgctgacctgcgctcttgagc

SEQ ID NO: 289964 - DNA, 30 bp, Artificial Sequence
  Synthetic oligonucleotide
acagccaatcgtactcataattagttgagc

SEQ ID NO: 289965 - DNA, 28 bp, Artificial Sequence
  Synthetic oligonucleotide
cgtgagcgccggttaaaaaaatttgagc

SEQ ID NO: 289966 - DNA, 30 bp, Artificial Sequence
  Synthetic oligonucleotide
gggtctttatatctgggaggacgtttgagc

SEQ ID NO: 289967 - DNA, 30 bp, Artificial Sequence
  Synthetic oligonucleotide
tggtcttgcccacccgggtggcaaaatagc

SEQ ID NO: 289968 - DNA, 30 bp, Artificial Sequence
  Synthetic oligonucleotide
accaagggaatagatgctatctgcaatagc

SEQ ID NO: 289969 - DNA, 30 bp, Artificial Sequence
  Synthetic oligonucleotide
cgtcgtcgcccacaaaacctgcgacatagc

SEQ ID NO: 289970 - DNA, 30 bp, Artificial Sequence
  Synthetic oligonucleotide
attccatacaaccggtcggtggtccatagc

SEQ ID NO: 289971 - DNA, 30 bp, Artificial Sequence
  Synthetic oligonucleotide
acccgttaatatttttacgatagtcatagc

SEQ ID NO: 289972 - DNA, 30 bp, Artificial Sequence
  Synthetic oligonucleotide
caaaggtccaattaagggtgtagagatagc

SEQ ID NO: 289973 - DNA, 30 bp, Artificial Sequence
  Synthetic oligonucleotide
acgtataaggatatggctattgccgatagc

SEQ ID NO: 289974 - DNA, 30 bp, Artificial Sequence
  Synthetic oligonucleotide
gattagcacccacctaaacgagctgatagc

SEQ ID NO: 289975 - DNA, 30 bp, Artificial Sequence
  Synthetic oligonucleotide
ggcctaagattgtttctgtccagtgatagc

SEQ ID NO: 289976 - DNA, 30 bp, Artificial Sequence
  Synthetic oligonucleotide
ttgtttggccggaattctagtaaatatagc

SEQ ID NO: 289977 - DNA, 30 bp, Artificial Sequence
  Synthetic oligonucleotide
ttcgccccgctttggctgagagtatatagc

SEQ ID NO: 289978 - DNA, 30 bp, Artificial Sequence
  Synthetic oligonucleotide
taaggtgttgaatctactcctggctatagc

SEQ ID NO: 289979 - DNA, 30 bp, Artificial Sequence
  Synthetic oligonucleotide
gcactagacgtgtcaatgaaaaagtatagc

SEQ ID NO: 289980 - DNA, 30 bp, Artificial Sequence
  Synthetic oligonucleotide
cgtccatgggtcgcttgcgagtagtatagc

SEQ ID NO: 289981 - DNA, 30 bp, Artificial Sequence
  Synthetic oligonucleotide
cggctgtcaactgatcacgctttaactagc

SEQ ID NO: 289982 - DNA, 30 bp, Artificial Sequence
  Synthetic oligonucleotide
caagccaaacgcatatggagatgcactagc

SEQ ID NO: 289983 - DNA, 30 bp, Artificial Sequence
  Synthetic oligonucleotide
accttttatagtacgggcggcgtcactagc

SEQ ID NO: 289984 - DNA, 30 bp, Artificial Sequence
  Synthetic oligonucleotide
cccaataggtacggacgatctgcgactagc

SEQ ID NO: 289985 - DNA, 30 bp, Artificial Sequence
  Synthetic oligonucleotide
agtcagtggattctaaggcaagagcctagc

SEQ ID NO: 289986 - DNA, 30 bp, Artificial Sequence
  Synthetic oligonucleotide
gtgtcaggtacggtcaatagttgtcctagc

SEQ ID NO: 289987 - DNA, 30 bp, Artificial Sequence
  Synthetic oligonucleotide
ttagcgagcatgcggctggttacagctagc

SEQ ID NO: 289988 - DNA, 30 bp, Artificial Sequence
  Synthetic oligonucleotide
taattctgaaggacaccgactgtggctagc

SEQ ID NO: 289989 - DNA, 30 bp, Artificial Sequence
  Synthetic oligonucleotide
ctcagccggacgcgtgtattaagtgctagc

SEQ ID NO: 289990 - DNA, 30 bp, Artificial Sequence
  Synthetic oligonucleotide
aaggaatgggcttaccgccaacttgctagc

SEQ ID NO: 289991 - DNA, 30 bp, Artificial Sequence
  Synthetic oligonucleotide
ataggtaaactggctacgctcagctctagc

SEQ ID NO: 289992 - DNA, 30 bp, Artificial Sequence
  Synthetic oligonucleotide
gcaactagaagacaatcggttagctctagc

SEQ ID NO: 289993 - DNA, 30 bp, Artificial Sequence
  Synthetic oligonucleotide
gtatctcaggacagccccccatagtctagc

SEQ ID NO: 289994 - DNA, 30 bp, Artificial Sequence
  Synthetic oligonucleotide
aggtaatcgtgtgtcccgcttggaagtagc

SEQ ID NO: 289995 - DNA, 30 bp, Artificial Sequence
  Synthetic oligonucleotide
ggtatgtccccgtattccgaggtaagtagc

SEQ ID NO: 289996 - DNA, 30 bp, Artificial Sequence
  Synthetic oligonucleotide
aacgcgataagtagacaacccagcagtagc

SEQ ID NO: 289997 - DNA, 30 bp, Artificial Sequence
  Synthetic oligonucleotide
cgcgtggctgtgaggaaggaatgcagtagc

SEQ ID NO: 289998 - DNA, 30 bp, Artificial Sequence
  Synthetic oligonucleotide
gtcagaagagtgtagcccgtgacgagtagc

SEQ ID NO: 289999 - DNA, 30 bp, Artificial Sequence
  Synthetic oligonucleotide
tacctcggaattaaaatgcagaaacgtagc

SEQ ID NO: 290000 - DNA, 30 bp, Artificial Sequence
  Synthetic oligonucleotide
ctgtgggcatggatatccccatgacgtagc

SEQ ID NO: 290001 - DNA, 30 bp, Artificial Sequence
  Synthetic oligonucleotide
tgttttaagaaatggcgaaacggccgtagc

SEQ ID NO: 290002 - DNA, 30 bp, Artificial Sequence
  Synthetic oligonucleotide
ttcgaaggactgttgggagagtgccgtagc

SEQ ID NO: 290003 - DNA, 30 bp, Artificial Sequence
  Synthetic oligonucleotide
tagcgatgaaaaaataggcgactgcgtagc

SEQ ID NO: 290004 - DNA, 30 bp, Artificial Sequence
  Synthetic oligonucleotide
cgaacctcgctacttcaaaatcgaggtagc

SEQ ID NO: 290005 - DNA, 30 bp, Artificial Sequence
  Synthetic oligonucleotide
tttctcaggttgttgccagatggaggtagc

SEQ ID NO: 290006 - DNA, 30 bp, Artificial Sequence
  Synthetic oligonucleotide
taaatgttaatcagggggaggtgaggtagc

SEQ ID NO: 290007 - DNA, 30 bp, Artificial Sequence
  Synthetic oligonucleotide
tatcggtgcggaaaaatggccggcggtagc

SEQ ID NO: 290008 - DNA, 30 bp, Artificial Sequence
  Synthetic oligonucleotide
gtgatacgtttgaagtatcgagcgggtagc

SEQ ID NO: 290009 - DNA, 30 bp, Artificial Sequence
  Synthetic oligonucleotide
aatatggttggattgtgagggtatggtagc

SEQ ID NO: 290010 - DNA, 30 bp, Artificial Sequence
  Synthetic oligonucleotide
agtaacttatgttagttcctcagtggtagc

SEQ ID NO: 290011 - DNA, 30 bp, Artificial Sequence
  Synthetic oligonucleotide
cgatcgcccggggttgggggctgtggtagc

SEQ ID NO: 290012 - DNA, 30 bp, Artificial Sequence
  Synthetic oligonucleotide
aagaatcatcttcgttataaaaaatgtagc

SEQ ID NO: 290013 - DNA, 30 bp, Artificial Sequence
  Synthetic oligonucleotide
ataggtgtggaatgcgatatctactgtagc

SEQ ID NO: 290014 - DNA, 30 bp, Artificial Sequence
  Synthetic oligonucleotide
ctcctctgtcggccaaaagggcggtgtagc

SEQ ID NO: 290015 - DNA, 30 bp, Artificial Sequence
  Synthetic oligonucleotide
cacaagtatactggggcccatatgtgtagc

SEQ ID NO: 290016 - DNA, 30 bp, Artificial Sequence
  Synthetic oligonucleotide
gcggtttcgtagcctgaagccgcttgtagc

SEQ ID NO: 290017 - DNA, 30 bp, Artificial Sequence
  Synthetic oligonucleotide
aataagttaaagttcgatgatagttgtagc

SEQ ID NO: 290018 - DNA, 30 bp, Artificial Sequence
  Synthetic oligonucleotide
ctcgtcagactccgcaaagaagacattagc

SEQ ID NO: 290019 - DNA, 30 bp, Artificial Sequence
  Synthetic oligonucleotide
gggtcatccgacctggggtctttcattagc

SEQ ID NO: 290020 - DNA, 30 bp, Artificial Sequence
  Synthetic oligonucleotide
agaccgagttacgtcagaggtttgattagc

SEQ ID NO: 290021 - DNA, 30 bp, Artificial Sequence
  Synthetic oligonucleotide
gcagtagtacgagactcgcttcatattagc

SEQ ID NO: 290022 - DNA, 30 bp, Artificial Sequence
  Synthetic oligonucleotide
aatcggaaaccctagatcttttggcttagc

SEQ ID NO: 290023 - DNA, 30 bp, Artificial Sequence
  Synthetic oligonucleotide
agactgatgcgtctgatttatcgtcttagc

SEQ ID NO: 290024 - DNA, 30 bp, Artificial Sequence
  Synthetic oligonucleotide
gcaaccttatcagcccaatcgatagttagc

SEQ ID NO: 290025 - DNA, 30 bp, Artificial Sequence
  Synthetic oligonucleotide
taactccggctgttatgaaggttagttagc

SEQ ID NO: 290026 - DNA, 30 bp, Artificial Sequence
  Synthetic oligonucleotide
aatcttaggagccaggccctgtgcgttagc

SEQ ID NO: 290027 - DNA, 30 bp, Artificial Sequence
  Synthetic oligonucleotide
ccgggctcctctaaaaatttcgcggttagc

SEQ ID NO: 290028 - DNA, 30 bp, Artificial Sequence
  Synthetic oligonucleotide
agagtgacacatgcgcaagcttatgttagc

SEQ ID NO: 290029 - DNA, 30 bp, Artificial Sequence
  Synthetic oligonucleotide
aacgaaaacagtttacctgctcgtgttagc

SEQ ID NO: 290030 - DNA, 30 bp, Artificial Sequence
  Synthetic oligonucleotide
gagggagtgtattcgagtcaatgtgttagc

SEQ ID NO: 290031 - DNA, 30 bp, Artificial Sequence
  Synthetic oligonucleotide
acccacaggacttattgtaaacttgttagc

SEQ ID NO: 290032 - DNA, 30 bp, Artificial Sequence
  Synthetic oligonucleotide
gcctgttttggtatggggaaagcatttagc

SEQ ID NO: 290033 - DNA, 30 bp, Artificial Sequence
  Synthetic oligonucleotide
agccaatgacaaatagttgcgtgatttagc

SEQ ID NO: 290034 - DNA, 30 bp, Artificial Sequence
  Synthetic oligonucleotide
taaccaattttatcagtaaagtcctttagc

SEQ ID NO: 290035 - DNA, 30 bp, Artificial Sequence
  Synthetic oligonucleotide
cgtgcacacgaagtgtcacgatcgtttagc

SEQ ID NO: 290036 - DNA, 30 bp, Artificial Sequence
  Synthetic oligonucleotide
tctgtctggaagcgtatggtagcttttagc

SEQ ID NO: 290037 - DNA, 30 bp, Artificial Sequence
  Synthetic oligonucleotide
gatatcttaaggctgccgttcgaaaaacgc

SEQ ID NO: 290038 - DNA, 30 bp, Artificial Sequence
  Synthetic oligonucleotide
agtcatacgaattgcaggtcccgaaaacgc

SEQ ID NO: 290039 - DNA, 30 bp, Artificial Sequence
  Synthetic oligonucleotide
ttgatgaagtacaagtcagcgctaaaacgc

SEQ ID NO: 290040 - DNA, 30 bp, Artificial Sequence
  Synthetic oligonucleotide
ggcactgtcaggtcagcttaatacaaacgc

SEQ ID NO: 290041 - DNA, 30 bp, Artificial Sequence
  Synthetic oligonucleotide
tcctatgttggacctggtagtttcaaacgc

SEQ ID NO: 290042 - DNA, 30 bp, Artificial Sequence
  Synthetic oligonucleotide
gctggatcatgtcgattacttaggaaacgc

SEQ ID NO: 290043 - DNA, 30 bp, Artificial Sequence
  Synthetic oligonucleotide
gtggcggccaacgagatcaacgggaaacgc

SEQ ID NO: 290044 - DNA, 30 bp, Artificial Sequence
  Synthetic oligonucleotide
ggaatctggccaagagtcaccaataaacgc

SEQ ID NO: 290045 - DNA, 30 bp, Artificial Sequence
  Synthetic oligonucleotide
ttgtccaccaatcattatgagcataaacgc

SEQ ID NO: 290046 - DNA, 30 bp, Artificial Sequence
  Synthetic oligonucleotide
ataggaataaaacccggttgtgataaacgc

SEQ ID NO: 290047 - DNA, 30 bp, Artificial Sequence
  Synthetic oligonucleotide
gtgaccatgtggtattagaggactaaacgc

SEQ ID NO: 290048 - DNA, 30 bp, Artificial Sequence
  Synthetic oligonucleotide
ctctaagtggccaaaacttactttaaacgc

SEQ ID NO: 290049 - DNA, 30 bp, Artificial Sequence
  Synthetic oligonucleotide
gaacagcggtgtcagcatcgaaaacaacgc

SEQ ID NO: 290050 - DNA, 30 bp, Artificial Sequence
  Synthetic oligonucleotide
tgtgtttgatcgacgatacgtgaacaacgc

SEQ ID NO: 290051 - DNA, 30 bp, Artificial Sequence
  Synthetic oligonucleotide
gtttgccctgtgacgttagggacacaacgc

SEQ ID NO: 290052 - DNA, 30 bp, Artificial Sequence
  Synthetic oligonucleotide
acgagccctgggaactttgcttgacaacgc

SEQ ID NO: 290053 - DNA, 30 bp, Artificial Sequence
  Synthetic oligonucleotide
agtgtcagtatcgttcttggccaccaacgc

SEQ ID NO: 290054 - DNA, 30 bp, Artificial Sequence
  Synthetic oligonucleotide
tcatttggaataaagacagcctgtcaacgc

SEQ ID NO: 290055 - DNA, 30 bp, Artificial Sequence
  Synthetic oligonucleotide
ctcagctatcgaatagagaactttcaacgc

SEQ ID NO: 290056 - DNA, 30 bp, Artificial Sequence
  Synthetic oligonucleotide
aaggtcataattctgcaccattcagaacgc

SEQ ID NO: 290057 - DNA, 30 bp, Artificial Sequence
  Synthetic oligonucleotide
tatgtgataatgaaaagagtcgctgaacgc

SEQ ID NO: 290058 - DNA, 30 bp, Artificial Sequence
  Synthetic oligonucleotide
acttaggaacgttccgcgctcggtgaacgc

SEQ ID NO: 290059 - DNA, 30 bp, Artificial Sequence
  Synthetic oligonucleotide
gatgacctcaatagataatctgtataacgc

SEQ ID NO: 290060 - DNA, 30 bp, Artificial Sequence
  Synthetic oligonucleotide
acgaaccactttaggcgtcggcactaacgc

SEQ ID NO: 290061 - DNA, 30 bp, Artificial Sequence
  Synthetic oligonucleotide
aatggacgttgaggggagacgggttaacgc

SEQ ID NO: 290062 - DNA, 29 bp, Artificial Sequence
  Synthetic oligonucleotide
tgatcacctccataacatactgaacacgc

SEQ ID NO: 290063 - DNA, 30 bp, Artificial Sequence
  Synthetic oligonucleotide
gtacttatgcgagtgtgaggctgaacacgc

SEQ ID NO: 290064 - DNA, 30 bp, Artificial Sequence
  Synthetic oligonucleotide
tccaatcataaggactaacggttaacacgc

SEQ ID NO: 290065 - DNA, 30 bp, Artificial Sequence
  Synthetic oligonucleotide
taatcttaaactgtggaagtgcacacacgc

SEQ ID NO: 290066 - DNA, 30 bp, Artificial Sequence
  Synthetic oligonucleotide
atatataacccgggctgcgcgggcacacgc

SEQ ID NO: 290067 - DNA, 30 bp, Artificial Sequence
  Synthetic oligonucleotide
gccatacaatcatcttcggcgcctacacgc

SEQ ID NO: 290068 - DNA, 30 bp, Artificial Sequence
  Synthetic oligonucleotide
cggggttaaattggcctatgttctacacgc

SEQ ID NO: 290069 - DNA, 30 bp, Artificial Sequence
  Synthetic oligonucleotide
cagataacttatgttactgtttctacacgc

SEQ ID NO: 290070 - DNA, 30 bp, Artificial Sequence
  Synthetic oligonucleotide
cactaagcgattcagtgaaaggttacacgc

SEQ ID NO: 290071 - DNA, 30 bp, Artificial Sequence
  Synthetic oligonucleotide
atcaggccccgacacataaaagcgccacgc

SEQ ID NO: 290072 - DNA, 30 bp, Artificial Sequence
  Synthetic oligonucleotide
cgttgtcagaaactctgaacggtgccacgc

SEQ ID NO: 290073 - DNA, 30 bp, Artificial Sequence
  Synthetic oligonucleotide
ccgatgataacattctatcggaatccacgc

SEQ ID NO: 290074 - DNA, 30 bp, Artificial Sequence
  Synthetic oligonucleotide
tgtcggtcatgtaagatctacggtccacgc

SEQ ID NO: 290075 - DNA, 30 bp, Artificial Sequence
  Synthetic oligonucleotide
tgcaggaggcgtatgccaggttcggcacgc

SEQ ID NO: 290076 - DNA, 30 bp, Artificial Sequence
  Synthetic oligonucleotide
agatcccccgacgagcatgacatggcacgc

SEQ ID NO: 290077 - DNA, 30 bp, Artificial Sequence
  Synthetic oligonucleotide
taagcagacaatagtcaggatgaatcacgc

SEQ ID NO: 290078 - DNA, 30 bp, Artificial Sequence
  Synthetic oligonucleotide
gctgtgtcaagcctatgttagccatcacgc

SEQ ID NO: 290079 - DNA, 30 bp, Artificial Sequence
  Synthetic oligonucleotide
agggtaacagcgttaactggtttatcacgc

SEQ ID NO: 290080 - DNA, 30 bp, Artificial Sequence
  Synthetic oligonucleotide
tgggatttgaatctacagttaccgtcacgc

SEQ ID NO: 290081 - DNA, 30 bp, Artificial Sequence
  Synthetic oligonucleotide
gtggacgcttcgggagatgtacggtcacgc

SEQ ID NO: 290082 - DNA, 30 bp, Artificial Sequence
  Synthetic oligonucleotide
aatcgagcaaatcgtattcgtctaagacgc

SEQ ID NO: 290083 - DNA, 30 bp, Artificial Sequence
  Synthetic oligonucleotide
atcatcaaaggtagagcacgtatcagacgc

SEQ ID NO: 290084 - DNA, 30 bp, Artificial Sequence
  Synthetic oligonucleotide
cgactggcagtgtaaatagaagtacgacgc

SEQ ID NO: 290085 - DNA, 30 bp, Artificial Sequence
  Synthetic oligonucleotide
aactatacgtcagttgagaagaatcgacgc

SEQ ID NO: 290086 - DNA, 30 bp, Artificial Sequence
  Synthetic oligonucleotide
tcgcttgtaagctgaagacctgatcgacgc

SEQ ID NO: 290087 - DNA, 30 bp, Artificial Sequence
  Synthetic oligonucleotide
gaaaggagacccgagaagttgggtcgacgc

SEQ ID NO: 290088 - DNA, 30 bp, Artificial Sequence
  Synthetic oligonucleotide
atagatggaagaatggagcagtgaggacgc

SEQ ID NO: 290089 - DNA, 30 bp, Artificial Sequence
  Synthetic oligonucleotide
cactgtgctggtctcggaatacacggacgc

SEQ ID NO: 290090 - DNA, 30 bp, Artificial Sequence
  Synthetic oligonucleotide
cggataatccgaaatcgaagcagcggacgc

SEQ ID NO: 290091 - DNA, 30 bp, Artificial Sequence
  Synthetic oligonucleotide
catcgacagaatctctgactgataatacgc

SEQ ID NO: 290092 - DNA, 30 bp, Artificial Sequence
  Synthetic oligonucleotide
cattttatagatgcgtatctagcgatacgc

SEQ ID NO: 290093 - DNA, 30 bp, Artificial Sequence
  Synthetic oligonucleotide
atgtgttagcagatagatttgctcctacgc

SEQ ID NO: 290094 - DNA, 30 bp, Artificial Sequence
  Synthetic oligonucleotide
gtgtaagctgcagatccctgctagctacgc

SEQ ID NO: 290095 - DNA, 30 bp, Artificial Sequence
  Synthetic oligonucleotide
cacggatggaggtgcgaaccgacagtacgc

SEQ ID NO: 290096 - DNA, 30 bp, Artificial Sequence
  Synthetic oligonucleotide
atcaaaagcactatgttaacgtaggtacgc

SEQ ID NO: 290097 - DNA, 30 bp, Artificial Sequence
  Synthetic oligonucleotide
gttataaacagcaacgccgatacggtacgc

SEQ ID NO: 290098 - DNA, 30 bp, Artificial Sequence
  Synthetic oligonucleotide
ccttagccgaatcatgtttcctatgtacgc

SEQ ID NO: 290099 - DNA, 30 bp, Artificial Sequence
  Synthetic oligonucleotide
ggcgttgttcggcctcatggtgctgtacgc

SEQ ID NO: 290100 - DNA, 30 bp, Artificial Sequence
  Synthetic oligonucleotide
taacccatttatttacacacgtgattacgc

SEQ ID NO: 290101 - DNA, 30 bp, Artificial Sequence
  Synthetic oligonucleotide
atgtattaaggtggggcgtacaggttacgc

SEQ ID NO: 290102 - DNA, 30 bp, Artificial Sequence
  Synthetic oligonucleotide
agattttgttcacacgagactcttttacgc

SEQ ID NO: 290103 - DNA, 30 bp, Artificial Sequence
  Synthetic oligonucleotide
tcttgccttataacgtccttttgaaaccgc

SEQ ID NO: 290104 - DNA, 30 bp, Artificial Sequence
  Synthetic oligonucleotide
tcaacggttgcgttgtctagcatcaaccgc

SEQ ID NO: 290105 - DNA, 30 bp, Artificial Sequence
  Synthetic oligonucleotide
acaatcagactgcaggaaaaatttaaccgc

SEQ ID NO: 290106 - DNA, 30 bp, Artificial Sequence
  Synthetic oligonucleotide
gctaagtcttccgggccgttggaacaccgc

SEQ ID NO: 290107 - DNA, 30 bp, Artificial Sequence
  Synthetic oligonucleotide
ccggggactgggaatggcatgggacaccgc

SEQ ID NO: 290108 - DNA, 30 bp, Artificial Sequence
  Synthetic oligonucleotide
gctgcacttgtatgataggtatttcaccgc

SEQ ID NO: 290109 - DNA, 30 bp, Artificial Sequence
  Synthetic oligonucleotide
ttatcacgtggggcatcgtgtggagaccgc

SEQ ID NO: 290110 - DNA, 30 bp, Artificial Sequence
  Synthetic oligonucleotide
gctgcctaacagactaatggcatcgaccgc

SEQ ID NO: 290111 - DNA, 30 bp, Artificial Sequence
  Synthetic oligonucleotide
gttcgaccgaattatcgggccccggaccgc

SEQ ID NO: 290112 - DNA, 30 bp, Artificial Sequence
  Synthetic oligonucleotide
tacatgtcgttgtgacaacaaactgaccgc

SEQ ID NO: 290113 - DNA, 30 bp, Artificial Sequence
  Synthetic oligonucleotide
ctccagaaacaatacattccaagtgaccgc

SEQ ID NO: 290114 - DNA, 30 bp, Artificial Sequence
  Synthetic oligonucleotide
agaacggtctatgatatgtccggtgaccgc

SEQ ID NO: 290115 - DNA, 30 bp, Artificial Sequence
  Synthetic oligonucleotide
ctcgatgtaaaaattgagttcccctaccgc

SEQ ID NO: 290116 - DNA, 30 bp, Artificial Sequence
  Synthetic oligonucleotide
catgattatcttttcgatcagatctaccgc

SEQ ID NO: 290117 - DNA, 30 bp, Artificial Sequence
  Synthetic oligonucleotide
gtggctatccacgggcagccccggtaccgc

SEQ ID NO: 290118 - DNA, 30 bp, Artificial Sequence
  Synthetic oligonucleotide
cgttgtacttagtgagttaaaataacccgc

SEQ ID NO: 290119 - DNA, 30 bp, Artificial Sequence
  Synthetic oligonucleotide
gtgtgttccgtctaaggtcgggtgacccgc

SEQ ID NO: 290120 - DNA, 30 bp, Artificial Sequence
  Synthetic oligonucleotide
agatcttgcggaagtttcctgagtacccgc

SEQ ID NO: 290121 - DNA, 30 bp, Artificial Sequence
  Synthetic oligonucleotide
gagacatacttctgtcatatgtgtacccgc

SEQ ID NO: 290122 - DNA, 30 bp, Artificial Sequence
  Synthetic oligonucleotide
atctgctagtcagcgtagagtaaaccccgc

SEQ ID NO: 290123 - DNA, 30 bp, Artificial Sequence
  Synthetic oligonucleotide
ggctggggtgttggaaaagctattccccgc

SEQ ID NO: 290124 - DNA, 30 bp, Artificial Sequence
  Synthetic oligonucleotide
ccaagtcagtaggtgatgtgagcagcccgc

SEQ ID NO: 290125 - DNA, 30 bp, Artificial Sequence
  Synthetic oligonucleotide
gcacttggcacgtagtccggttgagcccgc

SEQ ID NO: 290126 - DNA, 30 bp, Artificial Sequence
  Synthetic oligonucleotide
agcattaaaatgagcgacatgggggcccgc

SEQ ID NO: 290127 - DNA, 30 bp, Artificial Sequence
  Synthetic oligonucleotide
actcccggagtattcgaattcgatgcccgc

SEQ ID NO: 290128 - DNA, 30 bp, Artificial Sequence
  Synthetic oligonucleotide
aagctagataaatcgcttggtgttgcccgc

SEQ ID NO: 290129 - DNA, 30 bp, Artificial Sequence
  Synthetic oligonucleotide
cgggtaactgctcccgccttttgctcccgc

SEQ ID NO: 290130 - DNA, 30 bp, Artificial Sequence
  Synthetic oligonucleotide
caatcaggattgccgagggggtattcccgc

SEQ ID NO: 290131 - DNA, 30 bp, Artificial Sequence
  Synthetic oligonucleotide
ttcagtcgttaagttaagtacaaaagccgc

SEQ ID NO: 290132 - DNA, 30 bp, Artificial Sequence
  Synthetic oligonucleotide
gtcctccttacaaaagcgattggcagccgc

SEQ ID NO: 290133 - DNA, 30 bp, Artificial Sequence
  Synthetic oligonucleotide
ggcacctgagatatgactactcggagccgc

SEQ ID NO: 290134 - DNA, 30 bp, Artificial Sequence
  Synthetic oligonucleotide
gaacggggttactccttggatatgagccgc

SEQ ID NO: 290135 - DNA, 30 bp, Artificial Sequence
  Synthetic oligonucleotide
ccgataggacagtggtgtatgaatagccgc

SEQ ID NO: 290136 - DNA, 30 bp, Artificial Sequence
  Synthetic oligonucleotide
accggtgcctcaatggttgggcttagccgc

SEQ ID NO: 290137 - DNA, 30 bp, Artificial Sequence
  Synthetic oligonucleotide
cggtttcgtggccagttacctaaacgccgc

SEQ ID NO: 290138 - DNA, 30 bp, Artificial Sequence
  Synthetic oligonucleotide
ggaagtaaacacaatcgtgtttcacgccgc

SEQ ID NO: 290139 - DNA, 30 bp, Artificial Sequence
  Synthetic oligonucleotide
gcttggcgatacacaagatatgagcgccgc

SEQ ID NO: 290140 - DNA, 30 bp, Artificial Sequence
  Synthetic oligonucleotide
tctacggatgcgaatgggtgacgaggccgc

SEQ ID NO: 290141 - DNA, 30 bp, Artificial Sequence
  Synthetic oligonucleotide
tagtaagtataggacggttggtcgggccgc

SEQ ID NO: 290142 - DNA, 30 bp, Artificial Sequence
  Synthetic oligonucleotide
tagaaacgcttcgatagaccgtggggccgc

SEQ ID NO: 290143 - DNA, 30 bp, Artificial Sequence
  Synthetic oligonucleotide
gagcatcaggtcatcgtatgatctggccgc

SEQ ID NO: 290144 - DNA, 30 bp, Artificial Sequence
  Synthetic oligonucleotide
agttgcgggacaactactatctgtggccgc

SEQ ID NO: 290145 - DNA, 30 bp, Artificial Sequence
  Synthetic oligonucleotide
agaagaaaattacggccgatccaatgccgc

SEQ ID NO: 290146 - DNA, 30 bp, Artificial Sequence
  Synthetic oligonucleotide
gtatcagaaatgctacgttgattatgccgc

SEQ ID NO: 290147 - DNA, 30 bp, Artificial Sequence
  Synthetic oligonucleotide
acggatacggcgaatgtgtcacactgccgc

SEQ ID NO: 290148 - DNA, 30 bp, Artificial Sequence
  Synthetic oligonucleotide
catgaactgcaagtgggatgcctgtgccgc

SEQ ID NO: 290149 - DNA, 30 bp, Artificial Sequence
  Synthetic oligonucleotide
tgtgacgtctggtatatcattgattgccgc

SEQ ID NO: 290150 - DNA, 30 bp, Artificial Sequence
  Synthetic oligonucleotide
acaatgcgacttgagcgcttagtttgccgc

SEQ ID NO: 290151 - DNA, 30 bp, Artificial Sequence
  Synthetic oligonucleotide
ctagactcaatgatgtcccagttaatccgc

SEQ ID NO: 290152 - DNA, 30 bp, Artificial Sequence
  Synthetic oligonucleotide
caagttgttaacacgtagctctctatccgc

SEQ ID NO: 290153 - DNA, 30 bp, Artificial Sequence
  Synthetic oligonucleotide
tcaactacccgggtgcaagtgtgtatccgc

SEQ ID NO: 290154 - DNA, 30 bp, Artificial Sequence
  Synthetic oligonucleotide
ggcgggcgtggtcatgaaagtccgctccgc

SEQ ID NO: 290155 - DNA, 31 bp, Artificial Sequence
  Synthetic oligonucleotide
tttgtcaacgtcccataaatcaaggctccgc

SEQ ID NO: 290156 - DNA, 30 bp, Artificial Sequence
  Synthetic oligonucleotide
ttcctaagggttatcgctttaaatctccgc

SEQ ID NO: 290157 - DNA, 30 bp, Artificial Sequence
  Synthetic oligonucleotide
gaggtccggaccagagccatatttctccgc

SEQ ID NO: 290158 - DNA, 30 bp, Artificial Sequence
  Synthetic oligonucleotide
gggtaagttagtaaagaatccgtagtccgc

SEQ ID NO: 290159 - DNA, 30 bp, Artificial Sequence
  Synthetic oligonucleotide
gcgggccgatcaagtgaaactatggtccgc

SEQ ID NO: 290160 - DNA, 30 bp, Artificial Sequence
  Synthetic oligonucleotide
ggtccccatcccaggcagacaggtgtccgc

SEQ ID NO: 290161 - DNA, 30 bp, Artificial Sequence
  Synthetic oligonucleotide
tagccttatcttttgcacagccgattccgc

SEQ ID NO: 290162 - DNA, 30 bp, Artificial Sequence
  Synthetic oligonucleotide
cggtttagggctaaggggggaaacttccgc

SEQ ID NO: 290163 - DNA, 30 bp, Artificial Sequence
  Synthetic oligonucleotide
ttaagtgtagaattttaatagaagttccgc

SEQ ID NO: 290164 - DNA, 30 bp, Artificial Sequence
  Synthetic oligonucleotide
aatgaacagcacaggtctaatttgttccgc

SEQ ID NO: 290165 - DNA, 30 bp, Artificial Sequence
  Synthetic oligonucleotide
gggtggagagttaaccccaatgatttccgc

SEQ ID NO: 290166 - DNA, 30 bp, Artificial Sequence
  Synthetic oligonucleotide
agtaacgtggttctggaaggtgatttccgc

SEQ ID NO: 290167 - DNA, 30 bp, Artificial Sequence
  Synthetic oligonucleotide
ggctaattagaagtaccgaattaaaagcgc

SEQ ID NO: 290168 - DNA, 30 bp, Artificial Sequence
  Synthetic oligonucleotide
gggcgttcaatccgcagcttaggaaagcgc

SEQ ID NO: 290169 - DNA, 30 bp, Artificial Sequence
  Synthetic oligonucleotide
agatagctccgtacgccacatgccaagcgc

SEQ ID NO: 290170 - DNA, 30 bp, Artificial Sequence
  Synthetic oligonucleotide
caaccttgattaagccgactgaataagcgc

SEQ ID NO: 290171 - DNA, 30 bp, Artificial Sequence
  Synthetic oligonucleotide
tggagttagccaatgttagttgttaagcgc

SEQ ID NO: 290172 - DNA, 30 bp, Artificial Sequence
  Synthetic oligonucleotide
gatgaggttctgaagcggcggttacagcgc

SEQ ID NO: 290173 - DNA, 30 bp, Artificial Sequence
  Synthetic oligonucleotide
accgtctgttttaggacaaagagtcagcgc

SEQ ID NO: 290174 - DNA, 30 bp, Artificial Sequence
  Synthetic oligonucleotide
gttccattaataaattacgatattcagcgc

SEQ ID NO: 290175 - DNA, 30 bp, Artificial Sequence
  Synthetic oligonucleotide
tacccgtcaggccttctatactaagagcgc

SEQ ID NO: 290176 - DNA, 30 bp, Artificial Sequence
  Synthetic oligonucleotide
tgaatttttgaaacggaggtaaacgagcgc

SEQ ID NO: 290177 - DNA, 30 bp, Artificial Sequence
  Synthetic oligonucleotide
tgcgggtgacgccgacttacttacgagcgc

SEQ ID NO: 290178 - DNA, 30 bp, Artificial Sequence
  Synthetic oligonucleotide
gcgcacaccaccggggtagaagccgagcgc

SEQ ID NO: 290179 - DNA, 31 bp, Artificial Sequence
  Synthetic oligonucleotide
ctagaggatagggatcatgggccaggagcgc

SEQ ID NO: 290180 - DNA, 30 bp, Artificial Sequence
  Synthetic oligonucleotide
ggcttcgatcatttgacacctgaggagcgc

SEQ ID NO: 290181 - DNA, 30 bp, Artificial Sequence
  Synthetic oligonucleotide
aagtacggagaaactcgctggccggagcgc

SEQ ID NO: 290182 - DNA, 30 bp, Artificial Sequence
  Synthetic oligonucleotide
gtagcaggatagaagcgcatgattgagcgc

SEQ ID NO: 290183 - DNA, 30 bp, Artificial Sequence
  Synthetic oligonucleotide
taagacggacccatgtctttcggatagcgc

SEQ ID NO: 290184 - DNA, 30 bp, Artificial Sequence
  Synthetic oligonucleotide
ctgccagaaacatgcctcacgttatagcgc

SEQ ID NO: 290185 - DNA, 30 bp, Artificial Sequence
  Synthetic oligonucleotide
ataatggtcttaaacagaagcggctagcgc

SEQ ID NO: 290186 - DNA, 30 bp, Artificial Sequence
  Synthetic oligonucleotide
ttgtaagcaaatgcagagaagttctagcgc

SEQ ID NO: 290187 - DNA, 30 bp, Artificial Sequence
  Synthetic oligonucleotide
gagttcaatagtggtctgtccgagtagcgc

SEQ ID NO: 290188 - DNA, 30 bp, Artificial Sequence
  Synthetic oligonucleotide
atccggaacttcttgagggagacaacgcgc

SEQ ID NO: 290189 - DNA, 30 bp, Artificial Sequence
  Synthetic oligonucleotide
aaatgataacagcttcgagcttcaacgcgc

SEQ ID NO: 290190 - DNA, 30 bp, Artificial Sequence
  Synthetic oligonucleotide
atatgactgggatgtgatagcagaacgcgc

SEQ ID NO: 290191 - DNA, 30 bp, Artificial Sequence
  Synthetic oligonucleotide
gctctaccgtgtgtcctagcacgaacgcgc

SEQ ID NO: 290192 - DNA, 30 bp, Artificial Sequence
  Synthetic oligonucleotide
gaacacggagtttaccgcaggtccacgcgc

SEQ ID NO: 290193 - DNA, 30 bp, Artificial Sequence
  Synthetic oligonucleotide
aagaatcacgagggacttctagatacgcgc

SEQ ID NO: 290194 - DNA, 30 bp, Artificial Sequence
  Synthetic oligonucleotide
tgtctcatgtaagaaatgggttacccgcgc

SEQ ID NO: 290195 - DNA, 30 bp, Artificial Sequence
  Synthetic oligonucleotide
cactatacggtttactaacaatgcccgcgc

SEQ ID NO: 290196 - DNA, 30 bp, Artificial Sequence
  Synthetic oligonucleotide
gcgccagaccagacatatgtttgcccgcgc

SEQ ID NO: 290197 - DNA, 30 bp, Artificial Sequence
  Synthetic oligonucleotide
agtgatgagtagactgctatgaagccgcgc

SEQ ID NO: 290198 - DNA, 30 bp, Artificial Sequence
  Synthetic oligonucleotide
aggcccggtgattcttattattatccgcgc

SEQ ID NO: 290199 - DNA, 30 bp, Artificial Sequence
  Synthetic oligonucleotide
gacacccagactctaccgctgacagcgcgc

SEQ ID NO: 290200 - DNA, 30 bp, Artificial Sequence
  Synthetic oligonucleotide
cgctcgaatcaggtagttccagcagcgcgc

SEQ ID NO: 290201 - DNA, 30 bp, Artificial Sequence
  Synthetic oligonucleotide
cgcagagtcttcgttggctgaatggcgcgc

SEQ ID NO: 290202 - DNA, 30 bp, Artificial Sequence
  Synthetic oligonucleotide
tagcctatgattggcgcaagagcatcgcgc

SEQ ID NO: 290203 - DNA, 30 bp, Artificial Sequence
  Synthetic oligonucleotide
tacgcaggtcatcacacggaaccctcgcgc

SEQ ID NO: 290204 - DNA, 30 bp, Artificial Sequence
  Synthetic oligonucleotide
aacggctatgtgagtagtagaaggtcgcgc

SEQ ID NO: 290205 - DNA, 30 bp, Artificial Sequence
  Synthetic oligonucleotide
gcatcttggctgaattggattgtgtcgcgc

SEQ ID NO: 290206 - DNA, 30 bp, Artificial Sequence
  Synthetic oligonucleotide
cggcaggaggcaacttttgtgcccaggcgc

SEQ ID NO: 290207 - DNA, 30 bp, Artificial Sequence
  Synthetic oligonucleotide
tagatagtagtactcaacgcagagaggcgc

SEQ ID NO: 290208 - DNA, 30 bp, Artificial Sequence
  Synthetic oligonucleotide
gctatctaaacgcagggaaaggagaggcgc

SEQ ID NO: 290209 - DNA, 30 bp, Artificial Sequence
  Synthetic oligonucleotide
atccttgctatcattttgatggataggcgc

SEQ ID NO: 290210 - DNA, 30 bp, Artificial Sequence
  Synthetic oligonucleotide
taggaaacgagagttcagtagtataggcgc

SEQ ID NO: 290211 - DNA, 30 bp, Artificial Sequence
  Synthetic oligonucleotide
acttgggtttatcgtcactaggcacggcgc

SEQ ID NO: 290212 - DNA, 30 bp, Artificial Sequence
  Synthetic oligonucleotide
gaaatctgaaagggcctatgactacggcgc

SEQ ID NO: 290213 - DNA, 30 bp, Artificial Sequence
  Synthetic oligonucleotide
ttcatttggagccaccgaaccggccggcgc

SEQ ID NO: 290214 - DNA, 30 bp, Artificial Sequence
  Synthetic oligonucleotide
attcatgtcgggcatgccagttttcggcgc

SEQ ID NO: 290215 - DNA, 30 bp, Artificial Sequence
  Synthetic oligonucleotide
ggcacaagccggtgggtctagtgagggcgc

SEQ ID NO: 290216 - DNA, 30 bp, Artificial Sequence
  Synthetic oligonucleotide
taaacggattggatgtcctctctagggcgc

SEQ ID NO: 290217 - DNA, 30 bp, Artificial Sequence
  Synthetic oligonucleotide
cctggagttcatgtagctaccaggtggcgc

SEQ ID NO: 290218 - DNA, 29 bp, Artificial Sequence
  Synthetic oligonucleotide
gcccaagcgaagcgcggggaaattggcgc

SEQ ID NO: 290219 - DNA, 30 bp, Artificial Sequence
  Synthetic oligonucleotide
agagtagaggaacagtgtctagcttggcgc

SEQ ID NO: 290220 - DNA, 30 bp, Artificial Sequence
  Synthetic oligonucleotide
gggacatagaggcgcaccgttcgttggcgc

SEQ ID NO: 290221 - DNA, 30 bp, Artificial Sequence
  Synthetic oligonucleotide
gagagggcattccggattaaggacatgcgc

SEQ ID NO: 290222 - DNA, 30 bp, Artificial Sequence
  Synthetic oligonucleotide
atttgtgggcgatgctaagcctagatgcgc

SEQ ID NO: 290223 - DNA, 30 bp, Artificial Sequence
  Synthetic oligonucleotide
gaatgtttgagcaggaggaagacgatgcgc

SEQ ID NO: 290224 - DNA, 30 bp, Artificial Sequence
  Synthetic oligonucleotide
cggttaagatcaatttaagacgttatgcgc

SEQ ID NO: 290225 - DNA, 30 bp, Artificial Sequence
  Synthetic oligonucleotide
agaagcagtacaaagcgcggcgcactgcgc

SEQ ID NO: 290226 - DNA, 30 bp, Artificial Sequence
  Synthetic oligonucleotide
gccctcgcgcaacgatcagagcacctgcgc

SEQ ID NO: 290227 - DNA, 30 bp, Artificial Sequence
  Synthetic oligonucleotide
gtgatttgtggttctactggccgcctgcgc

SEQ ID NO: 290228 - DNA, 30 bp, Artificial Sequence
  Synthetic oligonucleotide
agccgcgcgttaacggctatttatctgcgc

SEQ ID NO: 290229 - DNA, 30 bp, Artificial Sequence
  Synthetic oligonucleotide
aacactttcaagcatacacgtgttctgcgc

SEQ ID NO: 290230 - DNA, 30 bp, Artificial Sequence
  Synthetic oligonucleotide
ccaataagcctgcagggtctttaagtgcgc

SEQ ID NO: 290231 - DNA, 30 bp, Artificial Sequence
  Synthetic oligonucleotide
gcagagtctggacctacgggttcagtgcgc

SEQ ID NO: 290232 - DNA, 30 bp, Artificial Sequence
  Synthetic oligonucleotide
gtactgggctgtgtacacggaccggtgcgc

SEQ ID NO: 290233 - DNA, 30 bp, Artificial Sequence
  Synthetic oligonucleotide
attccaggggacactaagggagacttgcgc

SEQ ID NO: 290234 - DNA, 30 bp, Artificial Sequence
  Synthetic oligonucleotide
tacacgcaatagagccgaccaagcttgcgc

SEQ ID NO: 290235 - DNA, 30 bp, Artificial Sequence
  Synthetic oligonucleotide
aataaccagattcttctatgaaagttgcgc

SEQ ID NO: 290236 - DNA, 30 bp, Artificial Sequence
  Synthetic oligonucleotide
gaaagggtgagaacagttgacaatttgcgc

SEQ ID NO: 290237 - DNA, 30 bp, Artificial Sequence
  Synthetic oligonucleotide
tgacaccgtgaggttttacagtatttgcgc

SEQ ID NO: 290238 - DNA, 30 bp, Artificial Sequence
  Synthetic oligonucleotide
ctctcaccgtgatacggagaaattttgcgc

SEQ ID NO: 290239 - DNA, 30 bp, Artificial Sequence
  Synthetic oligonucleotide
agctaccatttaactactacaattttgcgc

SEQ ID NO: 290240 - DNA, 30 bp, Artificial Sequence
  Synthetic oligonucleotide
acattcggtatgaaaagagtgtaaaatcgc

SEQ ID NO: 290241 - DNA, 30 bp, Artificial Sequence
  Synthetic oligonucleotide
ctactgattaacaagattatgagcaatcgc

SEQ ID NO: 290242 - DNA, 30 bp, Artificial Sequence
  Synthetic oligonucleotide
ccggttaaaaacacgctggtattcaatcgc

SEQ ID NO: 290243 - DNA, 30 bp, Artificial Sequence
  Synthetic oligonucleotide
gacggcgtatcgagtctcgagcggaatcgc

SEQ ID NO: 290244 - DNA, 30 bp, Artificial Sequence
  Synthetic oligonucleotide
tatattacccaaagagaaattgggaatcgc

SEQ ID NO: 290245 - DNA, 30 bp, Artificial Sequence
  Synthetic oligonucleotide
taatgcttccgtacaccacaatgacatcgc

SEQ ID NO: 290246 - DNA, 30 bp, Artificial Sequence
  Synthetic oligonucleotide
gcgaatatgttatagataactgtacatcgc

SEQ ID NO: 290247 - DNA, 30 bp, Artificial Sequence
  Synthetic oligonucleotide
ccctgggacatcccagccttataccatcgc

SEQ ID NO: 290248 - DNA, 30 bp, Artificial Sequence
  Synthetic oligonucleotide
gataaggtcatctcatgtagcgccgatcgc

SEQ ID NO: 290249 - DNA, 30 bp, Artificial Sequence
  Synthetic oligonucleotide
ctgataaacgccatccgtgatcatgatcgc

SEQ ID NO: 290250 - DNA, 30 bp, Artificial Sequence
  Synthetic oligonucleotide
cgctagagtccctattccaatgcctatcgc

SEQ ID NO: 290251 - DNA, 30 bp, Artificial Sequence
  Synthetic oligonucleotide
gaaactctcgtgccctaggtatcttatcgc

SEQ ID NO: 290252 - DNA, 30 bp, Artificial Sequence
  Synthetic oligonucleotide
ggggcgttattagaaagcttgagcactcgc

SEQ ID NO: 290253 - DNA, 30 bp, Artificial Sequence
  Synthetic oligonucleotide
tgcggtagtttggcatgtcacatcactcgc

SEQ ID NO: 290254 - DNA, 30 bp, Artificial Sequence
  Synthetic oligonucleotide
gaaccttttgggatcgtggcatggactcgc

SEQ ID NO: 290255 - DNA, 30 bp, Artificial Sequence
  Synthetic oligonucleotide
taaaaatgtgacagaataggtattactcgc

SEQ ID NO: 290256 - DNA, 30 bp, Artificial Sequence
  Synthetic oligonucleotide
gagtagttggatgctaatgaaggacctcgc

SEQ ID NO: 290257 - DNA, 30 bp, Artificial Sequence
  Synthetic oligonucleotide
agtgagtaccgcggaccacctatccctcgc

SEQ ID NO: 290258 - DNA, 30 bp, Artificial Sequence
  Synthetic oligonucleotide
tccgcacatgttctattgctatctcctcgc

SEQ ID NO: 290259 - DNA, 30 bp, Artificial Sequence
  Synthetic oligonucleotide
gggtatctttttaaaggggcgaaagctcgc

SEQ ID NO: 290260 - DNA, 30 bp, Artificial Sequence
  Synthetic oligonucleotide
agcctgctagcttagtcattgcgggctcgc

SEQ ID NO: 290261 - DNA, 30 bp, Artificial Sequence
  Synthetic oligonucleotide
gctcctcagtcccacgactctctatctcgc

SEQ ID NO: 290262 - DNA, 30 bp, Artificial Sequence
  Synthetic oligonucleotide
gagtaaaaggaccagtgcgtcgcctctcgc

SEQ ID NO: 290263 - DNA, 30 bp, Artificial Sequence
  Synthetic oligonucleotide
tatcttcgggaaaacaggagggattctcgc

SEQ ID NO: 290264 - DNA, 30 bp, Artificial Sequence
  Synthetic oligonucleotide
caacgccaaactacggtcaaagtttctcgc

SEQ ID NO: 290265 - DNA, 30 bp, Artificial Sequence
  Synthetic oligonucleotide
ccttagttccctagatcaactgaaagtcgc

SEQ ID NO: 290266 - DNA, 30 bp, Artificial Sequence
  Synthetic oligonucleotide
ctggccaggattggtcgcgcatgaagtcgc

SEQ ID NO: 290267 - DNA, 30 bp, Artificial Sequence
  Synthetic oligonucleotide
tctctggcaattggaatagtgtgaagtcgc

SEQ ID NO: 290268 - DNA, 30 bp, Artificial Sequence
  Synthetic oligonucleotide
agaactcactatggccccagcaacagtcgc

SEQ ID NO: 290269 - DNA, 30 bp, Artificial Sequence
  Synthetic oligonucleotide
ttaatcatatgttgttcgtctaggagtcgc

SEQ ID NO: 290270 - DNA, 30 bp, Artificial Sequence
  Synthetic oligonucleotide
aggccttgcctcggcacacccattagtcgc

SEQ ID NO: 290271 - DNA, 30 bp, Artificial Sequence
  Synthetic oligonucleotide
actactatggttcaactaccttgacgtcgc

SEQ ID NO: 290272 - DNA, 30 bp, Artificial Sequence
  Synthetic oligonucleotide
taaacgagggtctgtgcgtgacgtcgtcgc

SEQ ID NO: 290273 - DNA, 31 bp, Artificial Sequence
  Synthetic oligonucleotide
cccgtaagagtggatcaataggtttcgtcgc

SEQ ID NO: 290274 - DNA, 30 bp, Artificial Sequence
  Synthetic oligonucleotide
acctaatcgcggggttcaaagctaggtcgc

SEQ ID NO: 290275 - DNA, 30 bp, Artificial Sequence
  Synthetic oligonucleotide
tggaatgatttatcttggtcaaacggtcgc

SEQ ID NO: 290276 - DNA, 30 bp, Artificial Sequence
  Synthetic oligonucleotide
tgcagggtcaggccgcgcagggagggtcgc

SEQ ID NO: 290277 - DNA, 30 bp, Artificial Sequence
  Synthetic oligonucleotide
cacagataagttagcacaccttggggtcgc

SEQ ID NO: 290278 - DNA, 30 bp, Artificial Sequence
  Synthetic oligonucleotide
tacgtttccgtaaaccccagggtgggtcgc

SEQ ID NO: 290279 - DNA, 30 bp, Artificial Sequence
  Synthetic oligonucleotide
taaaagtgagagggggatgtctctggtcgc

SEQ ID NO: 290280 - DNA, 30 bp, Artificial Sequence
  Synthetic oligonucleotide
ttccacggtcgggtaggcctagcttgtcgc

SEQ ID NO: 290281 - DNA, 30 bp, Artificial Sequence
  Synthetic oligonucleotide
gccatacaggttagacaatactgttgtcgc

SEQ ID NO: 290282 - DNA, 30 bp, Artificial Sequence
  Synthetic oligonucleotide
tgcagataccatcgttgccttttcattcgc

SEQ ID NO: 290283 - DNA, 30 bp, Artificial Sequence
  Synthetic oligonucleotide
agggcacttcgtggcgtaagtgtgattcgc

SEQ ID NO: 290284 - DNA, 30 bp, Artificial Sequence
  Synthetic oligonucleotide
actcagtagaaatgggccggtgtgattcgc

SEQ ID NO: 290285 - DNA, 30 bp, Artificial Sequence
  Synthetic oligonucleotide
catcgctaagtctattaataaggtattcgc

SEQ ID NO: 290286 - DNA, 30 bp, Artificial Sequence
  Synthetic oligonucleotide
taaatacactcacaagtcagcgttattcgc

SEQ ID NO: 290287 - DNA, 30 bp, Artificial Sequence
  Synthetic oligonucleotide
cgatcttattcatgctggttgtctcttcgc

SEQ ID NO: 290288 - DNA, 30 bp, Artificial Sequence
  Synthetic oligonucleotide
tataaggccacgcaaactatagaagttcgc

SEQ ID NO: 290289 - DNA, 30 bp, Artificial Sequence
  Synthetic oligonucleotide
tcaatgatccgtgtggtggggatagttcgc

SEQ ID NO: 290290 - DNA, 30 bp, Artificial Sequence
  Synthetic oligonucleotide
catcattaatcacgatcaagcgtagttcgc

SEQ ID NO: 290291 - DNA, 30 bp, Artificial Sequence
  Synthetic oligonucleotide
ataaaggatgaaatagtatcggaggttcgc

SEQ ID NO: 290292 - DNA, 30 bp, Artificial Sequence
  Synthetic oligonucleotide
attgaggtaaattataaggctacggttcgc

SEQ ID NO: 290293 - DNA, 30 bp, Artificial Sequence
  Synthetic oligonucleotide
tgaatgggtcttagtaagcttcgggttcgc

SEQ ID NO: 290294 - DNA, 30 bp, Artificial Sequence
  Synthetic oligonucleotide
tccctagacgtagctgtttcgcatgttcgc

SEQ ID NO: 290295 - DNA, 30 bp, Artificial Sequence
  Synthetic oligonucleotide
tgccaatgtccatgatacagcttatttcgc

SEQ ID NO: 290296 - DNA, 30 bp, Artificial Sequence
  Synthetic oligonucleotide
ttaatggagtcgccacggtgatggtttcgc

SEQ ID NO: 290297 - DNA, 30 bp, Artificial Sequence
  Synthetic oligonucleotide
tcggcatacggatctggtgcgctgtttcgc

SEQ ID NO: 290298 - DNA, 30 bp, Artificial Sequence
  Synthetic oligonucleotide
ccgctgccgagttgagtcacgcaaaaaggc

SEQ ID NO: 290299 - DNA, 30 bp, Artificial Sequence
  Synthetic oligonucleotide
atcatgtctctggacggacaagcaaaaggc

SEQ ID NO: 290300 - DNA, 30 bp, Artificial Sequence
  Synthetic oligonucleotide
ccattatcccttttagcgtatataaaaggc

SEQ ID NO: 290301 - DNA, 30 bp, Artificial Sequence
  Synthetic oligonucleotide
aaaaaagaggggcaaaatgagtacaaaggc

SEQ ID NO: 290302 - DNA, 30 bp, Artificial Sequence
  Synthetic oligonucleotide
cttcgagttttaccgggttgtagcaaaggc

SEQ ID NO: 290303 - DNA, 30 bp, Artificial Sequence
  Synthetic oligonucleotide
gcccacttgcgagatgagttgctcaaaggc

SEQ ID NO: 290304 - DNA, 30 bp, Artificial Sequence
  Synthetic oligonucleotide
cagatatctacgtggcggcagaagaaaggc

SEQ ID NO: 290305 - DNA, 30 bp, Artificial Sequence
  Synthetic oligonucleotide
cacactacctattcagcacggcagaaaggc

SEQ ID NO: 290306 - DNA, 30 bp, Artificial Sequence
  Synthetic oligonucleotide
gcaagtaatatatttaacgtgccgaaaggc

SEQ ID NO: 290307 - DNA, 30 bp, Artificial Sequence
  Synthetic oligonucleotide
atcaaatagtgatgtaagggtgataaaggc

SEQ ID NO: 290308 - DNA, 30 bp, Artificial Sequence
  Synthetic oligonucleotide
tctgatcagtgtccacctagatgtaaaggc

SEQ ID NO: 290309 - DNA, 30 bp, Artificial Sequence
  Synthetic oligonucleotide
tctacgtgttagtcgtgagggtaacaaggc

SEQ ID NO: 290310 - DNA, 30 bp, Artificial Sequence
  Synthetic oligonucleotide
taaaagagatgaagaaggtcttcacaaggc

SEQ ID NO: 290311 - DNA, 30 bp, Artificial Sequence
  Synthetic oligonucleotide
gggttagctactcttgccgacttacaaggc

SEQ ID NO: 290312 - DNA, 30 bp, Artificial Sequence
  Synthetic oligonucleotide
ctcacagttctgtggccgtgcagccaaggc

SEQ ID NO: 290313 - DNA, 30 bp, Artificial Sequence
  Synthetic oligonucleotide
cgtggggtttttatgggaccgtgccaaggc

SEQ ID NO: 290314 - DNA, 30 bp, Artificial Sequence
  Synthetic oligonucleotide
tatctacgggtctctctgagagagcaaggc

SEQ ID NO: 290315 - DNA, 30 bp, Artificial Sequence
  Synthetic oligonucleotide
cctcctggcataaccaatctccggcaaggc

SEQ ID NO: 290316 - DNA, 30 bp, Artificial Sequence
  Synthetic oligonucleotide
ccggctcggtgtaggcaaccatctcaaggc

SEQ ID NO: 290317 - DNA, 30 bp, Artificial Sequence
  Synthetic oligonucleotide
gatgttatgttatcttacggttctcaaggc

SEQ ID NO: 290318 - DNA, 30 bp, Artificial Sequence
  Synthetic oligonucleotide
ttgaagagtatgatctaagcgtttcaaggc

SEQ ID NO: 290319 - DNA, 31 bp, Artificial Sequence
  Synthetic oligonucleotide
gtcattacggagtagattattaaaggaaggc

SEQ ID NO: 290320 - DNA, 30 bp, Artificial Sequence
  Synthetic oligonucleotide
aaacatagagtcgctagtcacccggaaggc

SEQ ID NO: 290321 - DNA, 30 bp, Artificial Sequence
  Synthetic oligonucleotide
cacggccttaattcttccaaatctgaaggc

SEQ ID NO: 290322 - DNA, 30 bp, Artificial Sequence
  Synthetic oligonucleotide
atagctctctcacccgtatgattctaaggc

SEQ ID NO: 290323 - DNA, 30 bp, Artificial Sequence
  Synthetic oligonucleotide
ctttatgctttccagccgttcgagtaaggc

SEQ ID NO: 290324 - DNA, 30 bp, Artificial Sequence
  Synthetic oligonucleotide
ctctgccatgtttctgagaatcggtaaggc

SEQ ID NO: 290325 - DNA, 30 bp, Artificial Sequence
  Synthetic oligonucleotide
tccggcatttatgcacgccatcattaaggc

SEQ ID NO: 290326 - DNA, 30 bp, Artificial Sequence
  Synthetic oligonucleotide
tacttcaggtcctaatagcagacttaaggc

SEQ ID NO: 290327 - DNA, 30 bp, Artificial Sequence
  Synthetic oligonucleotide
acaaatggggcattacctatatcttaaggc

SEQ ID NO: 290328 - DNA, 30 bp, Artificial Sequence
  Synthetic oligonucleotide
acattgagtaaaactagcgctatttaaggc

SEQ ID NO: 290329 - DNA, 30 bp, Artificial Sequence
  Synthetic oligonucleotide
tatctgttgtttatgaggatagtttaaggc

SEQ ID NO: 290330 - DNA, 30 bp, Artificial Sequence
  Synthetic oligonucleotide
atgtgttcggtagcaggagtaagaacaggc

SEQ ID NO: 290331 - DNA, 30 bp, Artificial Sequence
  Synthetic oligonucleotide
ctaaaattcgtcgccagagtgtgaacaggc

SEQ ID NO: 290332 - DNA, 30 bp, Artificial Sequence
  Synthetic oligonucleotide
cccgtggagtcatgcgtcagaggcacaggc

SEQ ID NO: 290333 - DNA, 30 bp, Artificial Sequence
  Synthetic oligonucleotide
aacataggattaaatttcccattgacaggc

SEQ ID NO: 290334 - DNA, 30 bp, Artificial Sequence
  Synthetic oligonucleotide
cacggttccctctgagtcaggcttacaggc

SEQ ID NO: 290335 - DNA, 30 bp, Artificial Sequence
  Synthetic oligonucleotide
ccaacggatatcagattacagtctccaggc

SEQ ID NO: 290336 - DNA, 29 bp, Artificial Sequence
  Synthetic oligonucleotide
ggattgggcaatcgtgatgcaacgcaggc

SEQ ID NO: 290337 - DNA, 30 bp, Artificial Sequence
  Synthetic oligonucleotide
gaaacatggacatgattcaaagccgcaggc

SEQ ID NO: 290338 - DNA, 30 bp, Artificial Sequence
  Synthetic oligonucleotide
ggcgagtatttagaatgcgtacgcgcaggc

SEQ ID NO: 290339 - DNA, 30 bp, Artificial Sequence
  Synthetic oligonucleotide
aggacatgtgggtggtgcctacaggcaggc

SEQ ID NO: 290340 - DNA, 30 bp, Artificial Sequence
  Synthetic oligonucleotide
tagaaggatcgtgtgttgacgccctcaggc

SEQ ID NO: 290341 - DNA, 30 bp, Artificial Sequence
  Synthetic oligonucleotide
acattgaattccgcacgacgtggctcaggc

SEQ ID NO: 290342 - DNA, 30 bp, Artificial Sequence
  Synthetic oligonucleotide
agtgtgatatacacccgtttaatctcaggc

SEQ ID NO: 290343 - DNA, 30 bp, Artificial Sequence
  Synthetic oligonucleotide
ttattgttctcctaggaagctatctcaggc

SEQ ID NO: 290344 - DNA, 30 bp, Artificial Sequence
  Synthetic oligonucleotide
tggacagggcttttcccataattctcaggc

SEQ ID NO: 290345 - DNA, 30 bp, Artificial Sequence
  Synthetic oligonucleotide
attgcttgctgggagtacataacgtcaggc

SEQ ID NO: 290346 - DNA, 30 bp, Artificial Sequence
  Synthetic oligonucleotide
ttgaacttcggaagtacaacgaggtcaggc

SEQ ID NO: 290347 - DNA, 30 bp, Artificial Sequence
  Synthetic oligonucleotide
tttatttggttgaacagtggatggtcaggc

SEQ ID NO: 290348 - DNA, 30 bp, Artificial Sequence
  Synthetic oligonucleotide
ctatggtgttgctaagtatgtggttcaggc

SEQ ID NO: 290349 - DNA, 30 bp, Artificial Sequence
  Synthetic oligonucleotide
tcatacggacccaggtgtcactgttcaggc

SEQ ID NO: 290350 - DNA, 30 bp, Artificial Sequence
  Synthetic oligonucleotide
agctcagagaccccatgttgctgttcaggc

SEQ ID NO: 290351 - DNA, 30 bp, Artificial Sequence
  Synthetic oligonucleotide
gtagaacttagagaggcttcaatttcaggc

SEQ ID NO: 290352 - DNA, 30 bp, Artificial Sequence
  Synthetic oligonucleotide
gccaaggttgaattgtgacggccaagaggc

SEQ ID NO: 290353 - DNA, 30 bp, Artificial Sequence
  Synthetic oligonucleotide
gcgaaagccaccgatctggtcgcaagaggc

SEQ ID NO: 290354 - DNA, 30 bp, Artificial Sequence
  Synthetic oligonucleotide
tacatggggagtgctcttagttgcagaggc

SEQ ID NO: 290355 - DNA, 30 bp, Artificial Sequence
  Synthetic oligonucleotide
gggaacatggctatagcacggttcagaggc

SEQ ID NO: 290356 - DNA, 30 bp, Artificial Sequence
  Synthetic oligonucleotide
taactcaagactcgcaatgtccagagaggc

SEQ ID NO: 290357 - DNA, 30 bp, Artificial Sequence
  Synthetic oligonucleotide
aacggttgtgatagagggtagtagagaggc

SEQ ID NO: 290358 - DNA, 30 bp, Artificial Sequence
  Synthetic oligonucleotide
aggaaatggcgatctgggtccaggagaggc

SEQ ID NO: 290359 - DNA, 30 bp, Artificial Sequence
  Synthetic oligonucleotide
cggctggcttggcaactggtaaatagaggc

SEQ ID NO: 290360 - DNA, 30 bp, Artificial Sequence
  Synthetic oligonucleotide
gtagctacggaccggcatgtcgatagaggc

SEQ ID NO: 290361 - DNA, 30 bp, Artificial Sequence
  Synthetic oligonucleotide
cattaagccttcaggtttgtctgtagaggc

SEQ ID NO: 290362 - DNA, 30 bp, Artificial Sequence
  Synthetic oligonucleotide
gaggaggcataattgcaggttgaacgaggc

SEQ ID NO: 290363 - DNA, 30 bp, Artificial Sequence
  Synthetic oligonucleotide
caggacattaagtctcaaggctcccgaggc

SEQ ID NO: 290364 - DNA, 30 bp, Artificial Sequence
  Synthetic oligonucleotide
ggaccgaaagttctttaaacggagcgaggc

SEQ ID NO: 290365 - DNA, 30 bp, Artificial Sequence
  Synthetic oligonucleotide
gtctgtcgtatggcattcgtacatcgaggc

SEQ ID NO: 290366 - DNA, 30 bp, Artificial Sequence
  Synthetic oligonucleotide
gatacgtaagataagctcagcggtcgaggc

SEQ ID NO: 290367 - DNA, 30 bp, Artificial Sequence
  Synthetic oligonucleotide
actagctggctgataggcccagttcgaggc

SEQ ID NO: 290368 - DNA, 30 bp, Artificial Sequence
  Synthetic oligonucleotide
gcccaacctaaacatagatacgtaggaggc

SEQ ID NO: 290369 - DNA, 30 bp, Artificial Sequence
  Synthetic oligonucleotide
gaagtttctcagatcagacaatagggaggc

SEQ ID NO: 290370 - DNA, 30 bp, Artificial Sequence
  Synthetic oligonucleotide
ttaagggtaattcttcggcaaccgggaggc

SEQ ID NO: 290371 - DNA, 30 bp, Artificial Sequence
  Synthetic oligonucleotide
cacctaaagtcgggctatatggcgggaggc

SEQ ID NO: 290372 - DNA, 30 bp, Artificial Sequence
  Synthetic oligonucleotide
gggaatgctttaaaccaggcgaatggaggc

SEQ ID NO: 290373 - DNA, 29 bp, Artificial Sequence
  Synthetic oligonucleotide
caccaccgttgaacttcagagctggaggc

SEQ ID NO: 290374 - DNA, 30 bp, Artificial Sequence
  Synthetic oligonucleotide
ccgagcgtctttaaatacgttcgtggaggc

SEQ ID NO: 290375 - DNA, 30 bp, Artificial Sequence
  Synthetic oligonucleotide
ctgacgaatatatgggtcggagttggaggc

SEQ ID NO: 290376 - DNA, 30 bp, Artificial Sequence
  Synthetic oligonucleotide
aattcccagcaaaagggcaatgaatgaggc

SEQ ID NO: 290377 - DNA, 30 bp, Artificial Sequence
  Synthetic oligonucleotide
attacacagcggtgttaggtgacatgaggc

SEQ ID NO: 290378 - DNA, 30 bp, Artificial Sequence
  Synthetic oligonucleotide
cggtaaatcgcgacaaccataaactgaggc

SEQ ID NO: 290379 - DNA, 30 bp, Artificial Sequence
  Synthetic oligonucleotide
tgggtatatcaagttcccaagttctgaggc

SEQ ID NO: 290380 - DNA, 29 bp, Artificial Sequence
  Synthetic oligonucleotide
tgtcacggtattcagtatctaagtgaggc

SEQ ID NO: 290381 - DNA, 30 bp, Artificial Sequence
  Synthetic oligonucleotide
taggagctgacgtcgaccgttcattgaggc

SEQ ID NO: 290382 - DNA, 30 bp, Artificial Sequence
  Synthetic oligonucleotide
atgtattcaatgggaaagagcacttgaggc

SEQ ID NO: 290383 - DNA, 30 bp, Artificial Sequence
  Synthetic oligonucleotide
ggcactgggatttctatttggacttgaggc

SEQ ID NO: 290384 - DNA, 30 bp, Artificial Sequence
  Synthetic oligonucleotide
ggcgacttgctaaacaacatcgcaataggc

SEQ ID NO: 290385 - DNA, 31 bp, Artificial Sequence
  Synthetic oligonucleotide
aaggttgatttaggggctcatgcgcataggc

SEQ ID NO: 290386 - DNA, 30 bp, Artificial Sequence
  Synthetic oligonucleotide
ttgcattcgagcaggagacctccgataggc

SEQ ID NO: 290387 - DNA, 30 bp, Artificial Sequence
  Synthetic oligonucleotide
taggggacattagttaatccacaactaggc

SEQ ID NO: 290388 - DNA, 30 bp, Artificial Sequence
  Synthetic oligonucleotide
catagggtgccacgcaccgggggactaggc

SEQ ID NO: 290389 - DNA, 30 bp, Artificial Sequence
  Synthetic oligonucleotide
aaattgttactaacggttgtcaacctaggc

SEQ ID NO: 290390 - DNA, 30 bp, Artificial Sequence
  Synthetic oligonucleotide
gggttgagccaccgccaaatagccctaggc

SEQ ID NO: 290391 - DNA, 30 bp, Artificial Sequence
  Synthetic oligonucleotide
aaagctatgcaaccacactgcggcctaggc

SEQ ID NO: 290392 - DNA, 30 bp, Artificial Sequence
  Synthetic oligonucleotide
gccttgtagtatgtgcggatgttgctaggc

SEQ ID NO: 290393 - DNA, 30 bp, Artificial Sequence
  Synthetic oligonucleotide
tggttagggtgtcgacgggggggcgtaggc

SEQ ID NO: 290394 - DNA, 30 bp, Artificial Sequence
  Synthetic oligonucleotide
catatgagacgacagtccaattgggtaggc

SEQ ID NO: 290395 - DNA, 30 bp, Artificial Sequence
  Synthetic oligonucleotide
taactgatctaaacgaatccttgggtaggc

SEQ ID NO: 290396 - DNA, 30 bp, Artificial Sequence
  Synthetic oligonucleotide
gttcccagaagagtaaaaataatggtaggc

SEQ ID NO: 290397 - DNA, 30 bp, Artificial Sequence
  Synthetic oligonucleotide
aagtatgccgcggaattagcgaatgtaggc

SEQ ID NO: 290398 - DNA, 30 bp, Artificial Sequence
  Synthetic oligonucleotide
ctagaacggaaagaaaacgcaattgtaggc

SEQ ID NO: 290399 - DNA, 30 bp, Artificial Sequence
  Synthetic oligonucleotide
atagccaatccttgagcgaaccttgtaggc

SEQ ID NO: 290400 - DNA, 30 bp, Artificial Sequence
  Synthetic oligonucleotide
cgcatttgcgcaacactggaggccttaggc

SEQ ID NO: 290401 - DNA, 30 bp, Artificial Sequence
  Synthetic oligonucleotide
acgtctcgtcgattaataaaagtcttaggc

SEQ ID NO: 290402 - DNA, 30 bp, Artificial Sequence
  Synthetic oligonucleotide
gcaggggggtactgctcgtgtaagttaggc

SEQ ID NO: 290403 - DNA, 30 bp, Artificial Sequence
  Synthetic oligonucleotide
catctggatcaacgattctgctatttaggc

SEQ ID NO: 290404 - DNA, 30 bp, Artificial Sequence
  Synthetic oligonucleotide
ggacgcttcacttggcgagttgcaaacggc

SEQ ID NO: 290405 - DNA, 30 bp, Artificial Sequence
  Synthetic oligonucleotide
atccgcacgcgcaacgaaggggataacggc

SEQ ID NO: 290406 - DNA, 30 bp, Artificial Sequence
  Synthetic oligonucleotide
gaagcgctatacaagagcgcggttaacggc

SEQ ID NO: 290407 - DNA, 30 bp, Artificial Sequence
  Synthetic oligonucleotide
ggatcgatttctaaagctaagtaccacggc

SEQ ID NO: 290408 - DNA, 30 bp, Artificial Sequence
  Synthetic oligonucleotide
caatggggctctacaaggtgaaatcacggc

SEQ ID NO: 290409 - DNA, 30 bp, Artificial Sequence
  Synthetic oligonucleotide
cagggtcaacttatcactggaactcacggc

SEQ ID NO: 290410 - DNA, 30 bp, Artificial Sequence
  Synthetic oligonucleotide
aaacgcttaaatcttattccgctcgacggc

SEQ ID NO: 290411 - DNA, 30 bp, Artificial Sequence
  Synthetic oligonucleotide
gactgaacaccttcattttgaagggacggc

SEQ ID NO: 290412 - DNA, 30 bp, Artificial Sequence
  Synthetic oligonucleotide
aacgtaagataatgatgcgtatttgacggc

SEQ ID NO: 290413 - DNA, 30 bp, Artificial Sequence
  Synthetic oligonucleotide
gtaagatgcactagaatttatgcgtacggc

SEQ ID NO: 290414 - DNA, 30 bp, Artificial Sequence
  Synthetic oligonucleotide
cgcagatacatatcctatcacaggtacggc

SEQ ID NO: 290415 - DNA, 30 bp, Artificial Sequence
  Synthetic oligonucleotide
tacatttgagccacagaaaggcgttacggc

SEQ ID NO: 290416 - DNA, 30 bp, Artificial Sequence
  Synthetic oligonucleotide
gggaggagttagagtcgatcgggttacggc

SEQ ID NO: 290417 - DNA, 30 bp, Artificial Sequence
  Synthetic oligonucleotide
ttcggtgaagatcagaaagccataaccggc

SEQ ID NO: 290418 - DNA, 30 bp, Artificial Sequence
  Synthetic oligonucleotide
tcacgccctacggaactctaggtaaccggc

SEQ ID NO: 290419 - DNA, 30 bp, Artificial Sequence
  Synthetic oligonucleotide
ttagagtcccatgcacgtctgaccaccggc

SEQ ID NO: 290420 - DNA, 30 bp, Artificial Sequence
  Synthetic oligonucleotide
gtaaacggccaccgtgaagacgtcaccggc

SEQ ID NO: 290421 - DNA, 30 bp, Artificial Sequence
  Synthetic oligonucleotide
agtataataatacgaagtttgtggaccggc

SEQ ID NO: 290422 - DNA, 30 bp, Artificial Sequence
  Synthetic oligonucleotide
aggggcctctttaataatgctctgaccggc

SEQ ID NO: 290423 - DNA, 31 bp, Artificial Sequence
  Synthetic oligonucleotide
tctcgttgcactcggacggaacgtgaccggc

SEQ ID NO: 290424 - DNA, 30 bp, Artificial Sequence
  Synthetic oligonucleotide
ggtatgggcatcggcatccaccgtaccggc

SEQ ID NO: 290425 - DNA, 30 bp, Artificial Sequence
  Synthetic oligonucleotide
cattaggatgactgcaggctaatacccggc

SEQ ID NO: 290426 - DNA, 30 bp, Artificial Sequence
  Synthetic oligonucleotide
attagttgagcgatatctgaaatccccggc

SEQ ID NO: 290427 - DNA, 30 bp, Artificial Sequence
  Synthetic oligonucleotide
ataaggtatagttttaagtactagcccggc

SEQ ID NO: 290428 - DNA, 30 bp, Artificial Sequence
  Synthetic oligonucleotide
gcaaaagtgtaaccacgtaagtctcccggc

SEQ ID NO: 290429 - DNA, 30 bp, Artificial Sequence
  Synthetic oligonucleotide
ccagctcaagtttaacatgagcaagccggc

SEQ ID NO: 290430 - DNA, 30 bp, Artificial Sequence
  Synthetic oligonucleotide
cctatggtcattgcgatgctgccctccggc

SEQ ID NO: 290431 - DNA, 30 bp, Artificial Sequence
  Synthetic oligonucleotide
cactgcacgggaggcttcctggaaagcggc

SEQ ID NO: 290432 - DNA, 30 bp, Artificial Sequence
  Synthetic oligonucleotide
tggtcaagccagttagtttggtaaagcggc

SEQ ID NO: 290433 - DNA, 30 bp, Artificial Sequence
  Synthetic oligonucleotide
ttggtgccatatacagttctgcgaagcggc

SEQ ID NO: 290434 - DNA, 30 bp, Artificial Sequence
  Synthetic oligonucleotide
taaattatcggcctagggatgaacagcggc

SEQ ID NO: 290435 - DNA, 30 bp, Artificial Sequence
  Synthetic oligonucleotide
gttcgtcaaaccaagcctagtcggagcggc

SEQ ID NO: 290436 - DNA, 30 bp, Artificial Sequence
  Synthetic oligonucleotide
taacccgaagtagttcggggattgagcggc

SEQ ID NO: 290437 - DNA, 30 bp, Artificial Sequence
  Synthetic oligonucleotide
ttatattgcgtcagcggacatgcacgcggc

SEQ ID NO: 290438 - DNA, 30 bp, Artificial Sequence
  Synthetic oligonucleotide
ccagtggaggtctgcggcttgcaccgcggc

SEQ ID NO: 290439 - DNA, 30 bp, Artificial Sequence
  Synthetic oligonucleotide
ggaaaaagtattggaaggctgtggcgcggc

SEQ ID NO: 290440 - DNA, 30 bp, Artificial Sequence
  Synthetic oligonucleotide
acagccagcctctattacgttgatcgcggc

SEQ ID NO: 290441 - DNA, 30 bp, Artificial Sequence
  Synthetic oligonucleotide
atgggtcttttcacttcgaaaattcgcggc

SEQ ID NO: 290442 - DNA, 30 bp, Artificial Sequence
  Synthetic oligonucleotide
gccgatcaggcaccttcaccgcaaggcggc

SEQ ID NO: 290443 - DNA, 30 bp, Artificial Sequence
  Synthetic oligonucleotide
tagttacgctggtgggacggcgtaggcggc

SEQ ID NO: 290444 - DNA, 29 bp, Artificial Sequence
  Synthetic oligonucleotide
agctcaccgttcgatcacaccacggcggc

SEQ ID NO: 290445 - DNA, 30 bp, Artificial Sequence
  Synthetic oligonucleotide
cattgaggattcaggatatttcgcggcggc

SEQ ID NO: 290446 - DNA, 30 bp, Artificial Sequence
  Synthetic oligonucleotide
atatgtagggatccacaaaataagggcggc

SEQ ID NO: 290447 - DNA, 30 bp, Artificial Sequence
  Synthetic oligonucleotide
gtgggcataggtacccacagtcagggcggc

SEQ ID NO: 290448 - DNA, 30 bp, Artificial Sequence
  Synthetic oligonucleotide
actttggcgcttaagatggcctgtggcggc

SEQ ID NO: 290449 - DNA, 30 bp, Artificial Sequence
  Synthetic oligonucleotide
gaagtgtgccctcaatgcataccctgcggc

SEQ ID NO: 290450 - DNA, 30 bp, Artificial Sequence
  Synthetic oligonucleotide
ggcgcgaagctctagcctcaacggtgcggc

SEQ ID NO: 290451 - DNA, 30 bp, Artificial Sequence
  Synthetic oligonucleotide
gtacgtgtccggtgtcacccaatgtgcggc

SEQ ID NO: 290452 - DNA, 30 bp, Artificial Sequence
  Synthetic oligonucleotide
gcctgcgaactaaactaattgcattgcggc

SEQ ID NO: 290453 - DNA, 30 bp, Artificial Sequence
  Synthetic oligonucleotide
actggaacatgaccaaattcgagttgcggc

SEQ ID NO: 290454 - DNA, 30 bp, Artificial Sequence
  Synthetic oligonucleotide
gaagacgcggacaggtccaaactttgcggc

SEQ ID NO: 290455 - DNA, 30 bp, Artificial Sequence
  Synthetic oligonucleotide
ctgcttctatcggcgatctggggaatcggc

SEQ ID NO: 290456 - DNA, 30 bp, Artificial Sequence
  Synthetic oligonucleotide
cggtatgcgctaataataggtggaatcggc

SEQ ID NO: 290457 - DNA, 30 bp, Artificial Sequence
  Synthetic oligonucleotide
ctcgattaggccggaataagttcgatcggc

SEQ ID NO: 290458 - DNA, 30 bp, Artificial Sequence
  Synthetic oligonucleotide
actggggagaccgacaggcccctgatcggc

SEQ ID NO: 290459 - DNA, 30 bp, Artificial Sequence
  Synthetic oligonucleotide
gcgtaatggccgtccgggggaagtatcggc

SEQ ID NO: 290460 - DNA, 30 bp, Artificial Sequence
  Synthetic oligonucleotide
taggcgccgtccgatctgaatggtatcggc

SEQ ID NO: 290461 - DNA, 30 bp, Artificial Sequence
  Synthetic oligonucleotide
aaaggctaactagtcgaggattcactcggc

SEQ ID NO: 290462 - DNA, 30 bp, Artificial Sequence
  Synthetic oligonucleotide
taggttattgttcaattaacgtgactcggc

SEQ ID NO: 290463 - DNA, 29 bp, Artificial Sequence
  Synthetic oligonucleotide
acttcctgcgcgcgccgctaatactcggc

SEQ ID NO: 290464 - DNA, 30 bp, Artificial Sequence
  Synthetic oligonucleotide
aagccagagtaacttaccattaacctcggc

SEQ ID NO: 290465 - DNA, 30 bp, Artificial Sequence
  Synthetic oligonucleotide
tgtgcctctttagcggggaatcccctcggc

SEQ ID NO: 290466 - DNA, 30 bp, Artificial Sequence
  Synthetic oligonucleotide
tcgccgctatgtgcttaaacgactctcggc

SEQ ID NO: 290467 - DNA, 30 bp, Artificial Sequence
  Synthetic oligonucleotide
tagcactcgattggcactgacgctctcggc

SEQ ID NO: 290468 - DNA, 31 bp, Artificial Sequence
  Synthetic oligonucleotide
cctagtatacaaacatgaatctcttctcggc

SEQ ID NO: 290469 - DNA, 30 bp, Artificial Sequence
  Synthetic oligonucleotide
tgggtgagctgaaggtcctgacaagtcggc

SEQ ID NO: 290470 - DNA, 30 bp, Artificial Sequence
  Synthetic oligonucleotide
gatgccactgactgactacatcacgtcggc

SEQ ID NO: 290471 - DNA, 30 bp, Artificial Sequence
  Synthetic oligonucleotide
atagggcaggtgcatgctattgtcgtcggc

SEQ ID NO: 290472 - DNA, 30 bp, Artificial Sequence
  Synthetic oligonucleotide
gtctggagggaggccaagtcataggtcggc

SEQ ID NO: 290473 - DNA, 30 bp, Artificial Sequence
  Synthetic oligonucleotide
atcgaagcgattaggggattgtagttcggc

SEQ ID NO: 290474 - DNA, 30 bp, Artificial Sequence
  Synthetic oligonucleotide
gaataactgtcatcattcagggatttcggc

SEQ ID NO: 290475 - DNA, 30 bp, Artificial Sequence
  Synthetic oligonucleotide
cgtaatggtgtaactggttatgttttcggc

SEQ ID NO: 290476 - DNA, 30 bp, Artificial Sequence
  Synthetic oligonucleotide
caataggaggatgaaacgaccctcaagggc

SEQ ID NO: 290477 - DNA, 30 bp, Artificial Sequence
  Synthetic oligonucleotide
agctttgttatgacgtgcgtgttcaagggc

SEQ ID NO: 290478 - DNA, 30 bp, Artificial Sequence
  Synthetic oligonucleotide
ggaacccaggtcaaggttaatcggaagggc

SEQ ID NO: 290479 - DNA, 30 bp, Artificial Sequence
  Synthetic oligonucleotide
cgggagcaccggctatggcaacgtaagggc

SEQ ID NO: 290480 - DNA, 30 bp, Artificial Sequence
  Synthetic oligonucleotide
acgaggaagccacgtcaatctcttaagggc

SEQ ID NO: 290481 - DNA, 30 bp, Artificial Sequence
  Synthetic oligonucleotide
cgcagtgctagaaagcgacgttcacagggc

SEQ ID NO: 290482 - DNA, 30 bp, Artificial Sequence
  Synthetic oligonucleotide
aaacctgtcttcacaaggcctccccagggc

SEQ ID NO: 290483 - DNA, 30 bp, Artificial Sequence
  Synthetic oligonucleotide
gcactccaggccagggcggacccgcagggc

SEQ ID NO: 290484 - DNA, 30 bp, Artificial Sequence
  Synthetic oligonucleotide
ccgcaacccgtaaactgacgatggcagggc

SEQ ID NO: 290485 - DNA, 30 bp, Artificial Sequence
  Synthetic oligonucleotide
cctagattcgatcatataatacatcagggc

SEQ ID NO: 290486 - DNA, 30 bp, Artificial Sequence
  Synthetic oligonucleotide
gagccccagtcaatagatcaaactcagggc

SEQ ID NO: 290487 - DNA, 30 bp, Artificial Sequence
  Synthetic oligonucleotide
agtcacaccactgggtacaccgacgagggc

SEQ ID NO: 290488 - DNA, 30 bp, Artificial Sequence
  Synthetic oligonucleotide
ccgggctttcctgtctatcaagaggagggc

SEQ ID NO: 290489 - DNA, 30 bp, Artificial Sequence
  Synthetic oligonucleotide
atggtaatacagggcgcaagtgaatagggc

SEQ ID NO: 290490 - DNA, 30 bp, Artificial Sequence
  Synthetic oligonucleotide
cacgttctctacctgcggagatactagggc

SEQ ID NO: 290491 - DNA, 30 bp, Artificial Sequence
  Synthetic oligonucleotide
gtatatcatgcgagtgagtgtcattagggc

SEQ ID NO: 290492 - DNA, 30 bp, Artificial Sequence
  Synthetic oligonucleotide
gctgcatgacgcgatttgggatcaacgggc

SEQ ID NO: 290493 - DNA, 30 bp, Artificial Sequence
  Synthetic oligonucleotide
tacagagcggcggagtggaagataacgggc

SEQ ID NO: 290494 - DNA, 30 bp, Artificial Sequence
  Synthetic oligonucleotide
ctcggcaagaattcattccggaccacgggc

SEQ ID NO: 290495 - DNA, 30 bp, Artificial Sequence
  Synthetic oligonucleotide
gagttcgaacaggttgggtttaggacgggc

SEQ ID NO: 290496 - DNA, 30 bp, Artificial Sequence
  Synthetic oligonucleotide
gttccgaacaggagctagggatggacgggc

SEQ ID NO: 290497 - DNA, 30 bp, Artificial Sequence
  Synthetic oligonucleotide
agcctcaggcaatttagaatattgacgggc

SEQ ID NO: 290498 - DNA, 30 bp, Artificial Sequence
  Synthetic oligonucleotide
acaccggagagatcgcgcattcgaccgggc

SEQ ID NO: 290499 - DNA, 30 bp, Artificial Sequence
  Synthetic oligonucleotide
gcgttattccgtcacgtactaggcccgggc

SEQ ID NO: 290500 - DNA, 30 bp, Artificial Sequence
  Synthetic oligonucleotide
tatagagtaacggatctgtgtaacgcgggc

SEQ ID NO: 290501 - DNA, 30 bp, Artificial Sequence
  Synthetic oligonucleotide
agaactgtcagttgcgggccaaccgcgggc

SEQ ID NO: 290502 - DNA, 30 bp, Artificial Sequence
  Synthetic oligonucleotide
agataaagagtgatccggtatgaggcgggc

SEQ ID NO: 290503 - DNA, 30 bp, Artificial Sequence
  Synthetic oligonucleotide
catttcgggttcaactcgcatactgcgggc

SEQ ID NO: 290504 - DNA, 30 bp, Artificial Sequence
  Synthetic oligonucleotide
ttagcagtttgactttggtggattgcgggc

SEQ ID NO: 290505 - DNA, 30 bp, Artificial Sequence
  Synthetic oligonucleotide
taaaacgtgtacccagctacaatatcgggc

SEQ ID NO: 290506 - DNA, 30 bp, Artificial Sequence
  Synthetic oligonucleotide
ttattagtgcttacaggctatacctcgggc

SEQ ID NO: 290507 - DNA, 30 bp, Artificial Sequence
  Synthetic oligonucleotide
cccgtacttatacaggctgatgcctcgggc

SEQ ID NO: 290508 - DNA, 30 bp, Artificial Sequence
  Synthetic oligonucleotide
gtaggctattgaatttgtggcatctcgggc

SEQ ID NO: 290509 - DNA, 30 bp, Artificial Sequence
  Synthetic oligonucleotide
tcaagaacagtccccgactcaaagtcgggc

SEQ ID NO: 290510 - DNA, 30 bp, Artificial Sequence
  Synthetic oligonucleotide
gacggaagacgagtgtagtcgcagtcgggc

SEQ ID NO: 290511 - DNA, 30 bp, Artificial Sequence
  Synthetic oligonucleotide
tatggcaaaacattaattgcgaaaaggggc

SEQ ID NO: 290512 - DNA, 30 bp, Artificial Sequence
  Synthetic oligonucleotide
tgctccaaccgtatacctgaagaaaggggc

SEQ ID NO: 290513 - DNA, 30 bp, Artificial Sequence
  Synthetic oligonucleotide
agggttaatgtcgggaggtgtacaaggggc

SEQ ID NO: 290514 - DNA, 30 bp, Artificial Sequence
  Synthetic oligonucleotide
gacctcgtaacatcccatcatcacaggggc

SEQ ID NO: 290515 - DNA, 30 bp, Artificial Sequence
  Synthetic oligonucleotide
cgacgtgtagaggattgaagggacaggggc

SEQ ID NO: 290516 - DNA, 30 bp, Artificial Sequence
  Synthetic oligonucleotide
ttgattgaccgccgaaggaaacctaggggc

SEQ ID NO: 290517 - DNA, 30 bp, Artificial Sequence
  Synthetic oligonucleotide
acttgcgactgggccaccgcgcctaggggc

SEQ ID NO: 290518 - DNA, 30 bp, Artificial Sequence
  Synthetic oligonucleotide
gtagctaggaggtttacggagaaacggggc

SEQ ID NO: 290519 - DNA, 30 bp, Artificial Sequence
  Synthetic oligonucleotide
ggtgagattccatgagcaaattaacggggc

SEQ ID NO: 290520 - DNA, 30 bp, Artificial Sequence
  Synthetic oligonucleotide
cgtgatatagggcccaggctggtacggggc

SEQ ID NO: 290521 - DNA, 30 bp, Artificial Sequence
  Synthetic oligonucleotide
gctaaaactgattgctgcgtataccggggc

SEQ ID NO: 290522 - DNA, 30 bp, Artificial Sequence
  Synthetic oligonucleotide
tattggtggatccacaactcgggccggggc

SEQ ID NO: 290523 - DNA, 29 bp, Artificial Sequence
  Synthetic oligonucleotide
tacttcgaaccgaggttagagtccggggc

SEQ ID NO: 290524 - DNA, 30 bp, Artificial Sequence
  Synthetic oligonucleotide
agactattggacatttcgataaagcggggc

SEQ ID NO: 290525 - DNA, 30 bp, Artificial Sequence
  Synthetic oligonucleotide
ggaacagccaaaaatatactcaggcggggc

SEQ ID NO: 290526 - DNA, 30 bp, Artificial Sequence
  Synthetic oligonucleotide
cagggattttgcgacgacctgtgtcggggc

SEQ ID NO: 290527 - DNA, 30 bp, Artificial Sequence
  Synthetic oligonucleotide
aataagtgcaggcagggtttatccgggggc

SEQ ID NO: 290528 - DNA, 30 bp, Artificial Sequence
  Synthetic oligonucleotide
tataggctgcgttgtatggtccgcgggggc

SEQ ID NO: 290529 - DNA, 30 bp, Artificial Sequence
  Synthetic oligonucleotide
cgtacgctgtacgctaggtggatcgggggc

SEQ ID NO: 290530 - DNA, 30 bp, Artificial Sequence
  Synthetic oligonucleotide
gggttcttcccatgcccacttctcgggggc

SEQ ID NO: 290531 - DNA, 30 bp, Artificial Sequence
  Synthetic oligonucleotide
tatgagctgacaactgggggagaggggggc

SEQ ID NO: 290532 - DNA, 30 bp, Artificial Sequence
  Synthetic oligonucleotide
tgcaacccctactgagtattcattgggggc

SEQ ID NO: 290533 - DNA, 30 bp, Artificial Sequence
  Synthetic oligonucleotide
caggtcggtatacgactgtactttgggggc

SEQ ID NO: 290534 - DNA, 30 bp, Artificial Sequence
  Synthetic oligonucleotide
agcggagcaggttcatcggatgtatggggc

SEQ ID NO: 290535 - DNA, 30 bp, Artificial Sequence
  Synthetic oligonucleotide
gttataccgattggcaagtcccaaatgggc

SEQ ID NO: 290536 - DNA, 30 bp, Artificial Sequence
  Synthetic oligonucleotide
atgaagtggctcaataagaccaacatgggc

SEQ ID NO: 290537 - DNA, 30 bp, Artificial Sequence
  Synthetic oligonucleotide
agtatcacatgggcagattgcaacatgggc

SEQ ID NO: 290538 - DNA, 30 bp, Artificial Sequence
  Synthetic oligonucleotide
aacacagttgggtcagtgggagacatgggc

SEQ ID NO: 290539 - DNA, 30 bp, Artificial Sequence
  Synthetic oligonucleotide
gttaaatgagcttctcaatgcaccatgggc

SEQ ID NO: 290540 - DNA, 30 bp, Artificial Sequence
  Synthetic oligonucleotide
aattcgtcgagaatgaaagacgagatgggc

SEQ ID NO: 290541 - DNA, 30 bp, Artificial Sequence
  Synthetic oligonucleotide
cttacccgtgaatctatctttccgatgggc

SEQ ID NO: 290542 - DNA, 30 bp, Artificial Sequence
  Synthetic oligonucleotide
ttttggcgtgagatgttatcaaggatgggc

SEQ ID NO: 290543 - DNA, 30 bp, Artificial Sequence
  Synthetic oligonucleotide
cctgatagacgtaaggcctgggtgatgggc

SEQ ID NO: 290544 - DNA, 30 bp, Artificial Sequence
  Synthetic oligonucleotide
acatcgtgttattggataggccgtatgggc

SEQ ID NO: 290545 - DNA, 30 bp, Artificial Sequence
  Synthetic oligonucleotide
gcagctggatcgttcaaaacttttatgggc

SEQ ID NO: 290546 - DNA, 30 bp, Artificial Sequence
  Synthetic oligonucleotide
aacgctgtgatatctaggggaatactgggc

SEQ ID NO: 290547 - DNA, 30 bp, Artificial Sequence
  Synthetic oligonucleotide
gctcggaaatatttagtattcttcctgggc

SEQ ID NO: 290548 - DNA, 30 bp, Artificial Sequence
  Synthetic oligonucleotide
gccagctcctagacttgcacttaagtgggc

SEQ ID NO: 290549 - DNA, 30 bp, Artificial Sequence
  Synthetic oligonucleotide
ttatcttatccgttcgacaatttagtgggc

SEQ ID NO: 290550 - DNA, 30 bp, Artificial Sequence
  Synthetic oligonucleotide
ccgtcatactaactaagaaagaccgtgggc

SEQ ID NO: 290551 - DNA, 30 bp, Artificial Sequence
  Synthetic oligonucleotide
acgtgcgcatttgatctcgtacgcgtgggc

SEQ ID NO: 290552 - DNA, 30 bp, Artificial Sequence
  Synthetic oligonucleotide
cctggggcggtgctgagggtcggggtgggc

SEQ ID NO: 290553 - DNA, 30 bp, Artificial Sequence
  Synthetic oligonucleotide
ggcgacgcttcgggaatttacgttgtgggc

SEQ ID NO: 290554 - DNA, 30 bp, Artificial Sequence
  Synthetic oligonucleotide
gggacctaatcactatttggcgccttgggc

SEQ ID NO: 290555 - DNA, 30 bp, Artificial Sequence
  Synthetic oligonucleotide
actgcaggatggggcctatcgaagttgggc

SEQ ID NO: 290556 - DNA, 30 bp, Artificial Sequence
  Synthetic oligonucleotide
gcaaacccagctcttggaactcgaaatggc

SEQ ID NO: 290557 - DNA, 30 bp, Artificial Sequence
  Synthetic oligonucleotide
gcctagtggagagcgggcgcgcccaatggc

SEQ ID NO: 290558 - DNA, 30 bp, Artificial Sequence
  Synthetic oligonucleotide
gatctggtcaaatttaaggacctcaatggc

SEQ ID NO: 290559 - DNA, 30 bp, Artificial Sequence
  Synthetic oligonucleotide
ttacgttcttgggatgggggtctcaatggc

SEQ ID NO: 290560 - DNA, 30 bp, Artificial Sequence
  Synthetic oligonucleotide
cacttccgcggtattgcacgggtcaatggc

SEQ ID NO: 290561 - DNA, 30 bp, Artificial Sequence
  Synthetic oligonucleotide
aacttcactccccctgccgtggataatggc

SEQ ID NO: 290562 - DNA, 30 bp, Artificial Sequence
  Synthetic oligonucleotide
acgcgaaatcggtttctatcgattaatggc

SEQ ID NO: 290563 - DNA, 30 bp, Artificial Sequence
  Synthetic oligonucleotide
agaggactatgattggtggctcaccatggc

SEQ ID NO: 290564 - DNA, 30 bp, Artificial Sequence
  Synthetic oligonucleotide
tcttgctctagatgctttcaagtgcatggc

SEQ ID NO: 290565 - DNA, 30 bp, Artificial Sequence
  Synthetic oligonucleotide
tgaaagtcgagacacagttgtatcgatggc

SEQ ID NO: 290566 - DNA, 30 bp, Artificial Sequence
  Synthetic oligonucleotide
cacctgggggcagtgagcggtattgatggc

SEQ ID NO: 290567 - DNA, 30 bp, Artificial Sequence
  Synthetic oligonucleotide
gtcagggaaccaggtaagattgttgatggc

SEQ ID NO: 290568 - DNA, 30 bp, Artificial Sequence
  Synthetic oligonucleotide
atttcgctcattgtgtcagtctactatggc

SEQ ID NO: 290569 - DNA, 30 bp, Artificial Sequence
  Synthetic oligonucleotide
cgatgcggccgcaccgaatgatgctatggc

SEQ ID NO: 290570 - DNA, 30 bp, Artificial Sequence
  Synthetic oligonucleotide
ttcagaaagattaattaacacctgtatggc

SEQ ID NO: 290571 - DNA, 30 bp, Artificial Sequence
  Synthetic oligonucleotide
ttcggttcaccgagactttcggtgtatggc

SEQ ID NO: 290572 - DNA, 30 bp, Artificial Sequence
  Synthetic oligonucleotide
gaaattagcacacagggacgtggttatggc

SEQ ID NO: 290573 - DNA, 30 bp, Artificial Sequence
  Synthetic oligonucleotide
cgggagaacccgaggtaaatcttttatggc

SEQ ID NO: 290574 - DNA, 30 bp, Artificial Sequence
  Synthetic oligonucleotide
tcgatgacacacgcgatcttcgcaactggc

SEQ ID NO: 290575 - DNA, 30 bp, Artificial Sequence
  Synthetic oligonucleotide
caatcaccgttagactaggtttcaactggc

SEQ ID NO: 290576 - DNA, 30 bp, Artificial Sequence
  Synthetic oligonucleotide
gcaacacgctcgactgaaagtcagactggc

SEQ ID NO: 290577 - DNA, 30 bp, Artificial Sequence
  Synthetic oligonucleotide
gcgctgataggggaactttggatgactggc

SEQ ID NO: 290578 - DNA, 30 bp, Artificial Sequence
  Synthetic oligonucleotide
tagaacggtccagagatgagattgactggc

SEQ ID NO: 290579 - DNA, 30 bp, Artificial Sequence
  Synthetic oligonucleotide
acgatgcctcgaggaaccttcgctactggc

SEQ ID NO: 290580 - DNA, 30 bp, Artificial Sequence
  Synthetic oligonucleotide
ggtcacctgctgttcttatttacacctggc

SEQ ID NO: 290581 - DNA, 30 bp, Artificial Sequence
  Synthetic oligonucleotide
tagatcagtccatgcggactgaaccctggc

SEQ ID NO: 290582 - DNA, 30 bp, Artificial Sequence
  Synthetic oligonucleotide
tatatcgggttttatcgtactgatcctggc

SEQ ID NO: 290583 - DNA, 30 bp, Artificial Sequence
  Synthetic oligonucleotide
ggagtccgtccaaacaacgatgacgctggc

SEQ ID NO: 290584 - DNA, 30 bp, Artificial Sequence
  Synthetic oligonucleotide
agtttgatcgagaaggtctggtgcgctggc

SEQ ID NO: 290585 - DNA, 30 bp, Artificial Sequence
  Synthetic oligonucleotide
gttatcgttgtcgtggtagtaacggctggc

SEQ ID NO: 290586 - DNA, 30 bp, Artificial Sequence
  Synthetic oligonucleotide
gggagctcaacatgcatagtttgggctggc

SEQ ID NO: 290587 - DNA, 30 bp, Artificial Sequence
  Synthetic oligonucleotide
gcggatgggatgatacgcggcatggctggc

SEQ ID NO: 290588 - DNA, 30 bp, Artificial Sequence
  Synthetic oligonucleotide
gtaatctgaggtatgctgagattatctggc

SEQ ID NO: 290589 - DNA, 30 bp, Artificial Sequence
  Synthetic oligonucleotide
tgttacttacgggtatgaagtcactctggc

SEQ ID NO: 290590 - DNA, 30 bp, Artificial Sequence
  Synthetic oligonucleotide
acctgaaatacctgtagggttatctctggc

SEQ ID NO: 290591 - DNA, 30 bp, Artificial Sequence
  Synthetic oligonucleotide
tcctcatgacccgattgatatttaagtggc

SEQ ID NO: 290592 - DNA, 30 bp, Artificial Sequence
  Synthetic oligonucleotide
tcctcttggagggaggttattttcagtggc

SEQ ID NO: 290593 - DNA, 30 bp, Artificial Sequence
  Synthetic oligonucleotide
ggaacgtgtcgtctgtaacacacgagtggc

SEQ ID NO: 290594 - DNA, 30 bp, Artificial Sequence
  Synthetic oligonucleotide
gacttaacaacgtctcaatgtatgagtggc

SEQ ID NO: 290595 - DNA, 30 bp, Artificial Sequence
  Synthetic oligonucleotide
ttaaacctggattctcgatataatagtggc

SEQ ID NO: 290596 - DNA, 30 bp, Artificial Sequence
  Synthetic oligonucleotide
cgctttgctggcttacgttgcattagtggc

SEQ ID NO: 290597 - DNA, 30 bp, Artificial Sequence
  Synthetic oligonucleotide
ttaaatggtgggctaaggaccggacgtggc

SEQ ID NO: 290598 - DNA, 30 bp, Artificial Sequence
  Synthetic oligonucleotide
tcgacttaactcgtgtcgaggcagcgtggc

SEQ ID NO: 290599 - DNA, 30 bp, Artificial Sequence
  Synthetic oligonucleotide
caagggtctagttcaactgatacgcgtggc

SEQ ID NO: 290600 - DNA, 30 bp, Artificial Sequence
  Synthetic oligonucleotide
tttggactcgcggggactagtaggcgtggc

SEQ ID NO: 290601 - DNA, 30 bp, Artificial Sequence
  Synthetic oligonucleotide
taagaagttaaacggctgaatgatcgtggc

SEQ ID NO: 290602 - DNA, 30 bp, Artificial Sequence
  Synthetic oligonucleotide
atgaaaccggtgtaatcttgtaaaggtggc

SEQ ID NO: 290603 - DNA, 30 bp, Artificial Sequence
  Synthetic oligonucleotide
tcttcaatggcaagcataagcgcaggtggc

SEQ ID NO: 290604 - DNA, 30 bp, Artificial Sequence
  Synthetic oligonucleotide
agttcatgcgtggcggaattcagaggtggc

SEQ ID NO: 290605 - DNA, 30 bp, Artificial Sequence
  Synthetic oligonucleotide
tagcgctctcacggcatggccaaatgtggc

SEQ ID NO: 290606 - DNA, 30 bp, Artificial Sequence
  Synthetic oligonucleotide
ccgggatgtaggcatagctataaaattggc

SEQ ID NO: 290607 - DNA, 30 bp, Artificial Sequence
  Synthetic oligonucleotide
ggggtagacggtacctcaagaatcattggc

SEQ ID NO: 290608 - DNA, 30 bp, Artificial Sequence
  Synthetic oligonucleotide
gagttgggcacgatttctagaatgattggc

SEQ ID NO: 290609 - DNA, 30 bp, Artificial Sequence
  Synthetic oligonucleotide
gaatccatgctgcttgtatggatgattggc

SEQ ID NO: 290610 - DNA, 30 bp, Artificial Sequence
  Synthetic oligonucleotide
gtacgaatcgtgcttagctgatatattggc

SEQ ID NO: 290611 - DNA, 30 bp, Artificial Sequence
  Synthetic oligonucleotide
cgaccgtttcgagatacgaatactattggc

SEQ ID NO: 290612 - DNA, 30 bp, Artificial Sequence
  Synthetic oligonucleotide
agagacaattatatgtttcagtttattggc

SEQ ID NO: 290613 - DNA, 30 bp, Artificial Sequence
  Synthetic oligonucleotide
acaggaagcagcacttggctaatacttggc

SEQ ID NO: 290614 - DNA, 30 bp, Artificial Sequence
  Synthetic oligonucleotide
tggagaacagacaggttggctatacttggc

SEQ ID NO: 290615 - DNA, 30 bp, Artificial Sequence
  Synthetic oligonucleotide
ttcgtctagtttactctgcgttcgcttggc

SEQ ID NO: 290616 - DNA, 30 bp, Artificial Sequence
  Synthetic oligonucleotide
gcccgaccgatttatttattgattcttggc

SEQ ID NO: 290617 - DNA, 30 bp, Artificial Sequence
  Synthetic oligonucleotide
cctcgactaaaacaaatctgtatagttggc

SEQ ID NO: 290618 - DNA, 30 bp, Artificial Sequence
  Synthetic oligonucleotide
actctctgtgcagagatggtgctagttggc

SEQ ID NO: 290619 - DNA, 30 bp, Artificial Sequence
  Synthetic oligonucleotide
cacgtcagcatgagcagttcaatggttggc

SEQ ID NO: 290620 - DNA, 30 bp, Artificial Sequence
  Synthetic oligonucleotide
gaagtgtcagccgtattccggcgtgttggc

SEQ ID NO: 290621 - DNA, 30 bp, Artificial Sequence
  Synthetic oligonucleotide
gaaacgtgattgtggatatcgagatttggc

SEQ ID NO: 290622 - DNA, 30 bp, Artificial Sequence
  Synthetic oligonucleotide
taccgcgtacattagcgactgcgttttggc

SEQ ID NO: 290623 - DNA, 30 bp, Artificial Sequence
  Synthetic oligonucleotide
ccggccccaacctggattcgtggttttggc

SEQ ID NO: 290624 - DNA, 30 bp, Artificial Sequence
  Synthetic oligonucleotide
gctatatcatataaatgcttttaaaaatgc

SEQ ID NO: 290625 - DNA, 30 bp, Artificial Sequence
  Synthetic oligonucleotide
gaccgacacccatacgttcatgcaaaatgc

SEQ ID NO: 290626 - DNA, 30 bp, Artificial Sequence
  Synthetic oligonucleotide
cgctcgtaccgagtaaacttctacaaatgc

SEQ ID NO: 290627 - DNA, 30 bp, Artificial Sequence
  Synthetic oligonucleotide
gctcctttgttcacaggaaaattgaaatgc

SEQ ID NO: 290628 - DNA, 30 bp, Artificial Sequence
  Synthetic oligonucleotide
ttaagtacgaaccatgcgccttctaaatgc

SEQ ID NO: 290629 - DNA, 30 bp, Artificial Sequence
  Synthetic oligonucleotide
ccgcaatccgattccttgactattaaatgc

SEQ ID NO: 290630 - DNA, 29 bp, Artificial Sequence
  Synthetic oligonucleotide
agatggtggttcgcgagcaacttaaatgc

SEQ ID NO: 290631 - DNA, 30 bp, Artificial Sequence
  Synthetic oligonucleotide
gcaagcagtcaacgcgggacttgacaatgc

SEQ ID NO: 290632 - DNA, 30 bp, Artificial Sequence
  Synthetic oligonucleotide
cacttaatagtcctaagggtaccccaatgc

SEQ ID NO: 290633 - DNA, 30 bp, Artificial Sequence
  Synthetic oligonucleotide
tatctaggcgtgttaaaaacgtggcaatgc

SEQ ID NO: 290634 - DNA, 30 bp, Artificial Sequence
  Synthetic oligonucleotide
ctccgggagtgccggatatcactgcaatgc

SEQ ID NO: 290635 - DNA, 30 bp, Artificial Sequence
  Synthetic oligonucleotide
ataagccctggcaggaactgataagaatgc

SEQ ID NO: 290636 - DNA, 30 bp, Artificial Sequence
  Synthetic oligonucleotide
tatcgtaagcatgcaattgtgccagaatgc

SEQ ID NO: 290637 - DNA, 30 bp, Artificial Sequence
  Synthetic oligonucleotide
taggggtgtagatccgcttgaagcgaatgc

SEQ ID NO: 290638 - DNA, 30 bp, Artificial Sequence
  Synthetic oligonucleotide
accataggcggacccacatgatgggaatgc

SEQ ID NO: 290639 - DNA, 30 bp, Artificial Sequence
  Synthetic oligonucleotide
gtcgtaagcagaattagtcggttggaatgc

SEQ ID NO: 290640 - DNA, 30 bp, Artificial Sequence
  Synthetic oligonucleotide
tttgcaccacagccgaacactactgaatgc

SEQ ID NO: 290641 - DNA, 30 bp, Artificial Sequence
  Synthetic oligonucleotide
tacagcaggggccctacagggggtgaatgc

SEQ ID NO: 290642 - DNA, 30 bp, Artificial Sequence
  Synthetic oligonucleotide
acttccaggtgtctttaacaacttgaatgc

SEQ ID NO: 290643 - DNA, 30 bp, Artificial Sequence
  Synthetic oligonucleotide
ctgctagttggtactgggatttcttaatgc

SEQ ID NO: 290644 - DNA, 30 bp, Artificial Sequence
  Synthetic oligonucleotide
aactcgagggctgtcaaggagagttaatgc

SEQ ID NO: 290645 - DNA, 30 bp, Artificial Sequence
  Synthetic oligonucleotide
cgagcaccccctgaggtacttttttaatgc

SEQ ID NO: 290646 - DNA, 30 bp, Artificial Sequence
  Synthetic oligonucleotide
gatgcgaaattcgctatcatggtaacatgc

SEQ ID NO: 290647 - DNA, 30 bp, Artificial Sequence
  Synthetic oligonucleotide
tgctatgagcagcgctccgacgcgacatgc

SEQ ID NO: 290648 - DNA, 30 bp, Artificial Sequence
  Synthetic oligonucleotide
cctccagcgaagtttcatttgcatacatgc

SEQ ID NO: 290649 - DNA, 30 bp, Artificial Sequence
  Synthetic oligonucleotide
tgtatatcacgatctgttctggctacatgc

SEQ ID NO: 290650 - DNA, 30 bp, Artificial Sequence
  Synthetic oligonucleotide
cttcatactccaatgatacattttacatgc

SEQ ID NO: 290651 - DNA, 30 bp, Artificial Sequence
  Synthetic oligonucleotide
gcctggggaatccagccaggcaaaccatgc

SEQ ID NO: 290652 - DNA, 30 bp, Artificial Sequence
  Synthetic oligonucleotide
agttgtgcactccacgttacggatccatgc

SEQ ID NO: 290653 - DNA, 30 bp, Artificial Sequence
  Synthetic oligonucleotide
gcaatacgcctgagcactcatattccatgc

SEQ ID NO: 290654 - DNA, 30 bp, Artificial Sequence
  Synthetic oligonucleotide
agatgtgtgggttttgtggacaaagcatgc

SEQ ID NO: 290655 - DNA, 30 bp, Artificial Sequence
  Synthetic oligonucleotide
aacctgttgcagagaaataacggagcatgc

SEQ ID NO: 290656 - DNA, 30 bp, Artificial Sequence
  Synthetic oligonucleotide
gtggccgcaagacccttaattacggcatgc

SEQ ID NO: 290657 - DNA, 30 bp, Artificial Sequence
  Synthetic oligonucleotide
ggtacttagatatgtcacgataactcatgc

SEQ ID NO: 290658 - DNA, 30 bp, Artificial Sequence
  Synthetic oligonucleotide
gaactggacttagatccttctcagtcatgc

SEQ ID NO: 290659 - DNA, 30 bp, Artificial Sequence
  Synthetic oligonucleotide
accacgtaatcctcatttagggtttcatgc

SEQ ID NO: 290660 - DNA, 30 bp, Artificial Sequence
  Synthetic oligonucleotide
ggaaccccggttaaaacaattgaaagatgc

SEQ ID NO: 290661 - DNA, 30 bp, Artificial Sequence
  Synthetic oligonucleotide
acatactaagcgttagattatcgaagatgc

SEQ ID NO: 290662 - DNA, 30 bp, Artificial Sequence
  Synthetic oligonucleotide
aatgttgtccctcgggcgagcggaagatgc

SEQ ID NO: 290663 - DNA, 30 bp, Artificial Sequence
  Synthetic oligonucleotide
gcgagagagggttgatgaaggcgcagatgc

SEQ ID NO: 290664 - DNA, 30 bp, Artificial Sequence
  Synthetic oligonucleotide
acagagtccgtgactcggatggtcagatgc

SEQ ID NO: 290665 - DNA, 30 bp, Artificial Sequence
  Synthetic oligonucleotide
gtagatgcctgcaccgcggcgatacgatgc

SEQ ID NO: 290666 - DNA, 31 bp, Artificial Sequence
  Synthetic oligonucleotide
acatgggatgggcggagtcagtttacgatgc

SEQ ID NO: 290667 - DNA, 30 bp, Artificial Sequence
  Synthetic oligonucleotide
tgatcaactctgacgttcctggcccgatgc

SEQ ID NO: 290668 - DNA, 30 bp, Artificial Sequence
  Synthetic oligonucleotide
cgttattatatcgggccccacggccgatgc

SEQ ID NO: 290669 - DNA, 30 bp, Artificial Sequence
  Synthetic oligonucleotide
tcacatggcttctagacgtgtgcgcgatgc

SEQ ID NO: 290670 - DNA, 30 bp, Artificial Sequence
  Synthetic oligonucleotide
ggagttgttgcaaaaacctgtaaaggatgc

SEQ ID NO: 290671 - DNA, 30 bp, Artificial Sequence
  Synthetic oligonucleotide
aagggcctcaatcggtcgggtgaaggatgc

SEQ ID NO: 290672 - DNA, 30 bp, Artificial Sequence
  Synthetic oligonucleotide
aaacaactgcaagcctcatcggtaggatgc

SEQ ID NO: 290673 - DNA, 30 bp, Artificial Sequence
  Synthetic oligonucleotide
gatcctcttagcataccaaaatacggatgc

SEQ ID NO: 290674 - DNA, 30 bp, Artificial Sequence
  Synthetic oligonucleotide
ggttccgtgagccaatgcgagaccggatgc

SEQ ID NO: 290675 - DNA, 30 bp, Artificial Sequence
  Synthetic oligonucleotide
ctgagtagcaacgtccggcacctcggatgc

SEQ ID NO: 290676 - DNA, 30 bp, Artificial Sequence
  Synthetic oligonucleotide
gtgtgtgttcaggacgttccaactggatgc

SEQ ID NO: 290677 - DNA, 30 bp, Artificial Sequence
  Synthetic oligonucleotide
caacgttagtaggtgcgatacgaatgatgc

SEQ ID NO: 290678 - DNA, 30 bp, Artificial Sequence
  Synthetic oligonucleotide
atagacaacattcacctgattatatgatgc

SEQ ID NO: 290679 - DNA, 30 bp, Artificial Sequence
  Synthetic oligonucleotide
aggtcttagcaggtacctcgtaactgatgc

SEQ ID NO: 290680 - DNA, 30 bp, Artificial Sequence
  Synthetic oligonucleotide
tgtctactcatatcagcgggacagtgatgc

SEQ ID NO: 290681 - DNA, 28 bp, Artificial Sequence
  Synthetic oligonucleotide
ccaagtatatcactagttgcagtgatgc

SEQ ID NO: 290682 - DNA, 31 bp, Artificial Sequence
  Synthetic oligonucleotide
cggagggtcacaaacggatagatcgtgatgc

SEQ ID NO: 290683 - DNA, 30 bp, Artificial Sequence
  Synthetic oligonucleotide
ggatttcgagcagtgcatacaaggtgatgc

SEQ ID NO: 290684 - DNA, 30 bp, Artificial Sequence
  Synthetic oligonucleotide
ggcgaacggtttagattgttttggtgatgc

SEQ ID NO: 290685 - DNA, 30 bp, Artificial Sequence
  Synthetic oligonucleotide
cgatgttttcgtggttcatgcgtgtgatgc

SEQ ID NO: 290686 - DNA, 30 bp, Artificial Sequence
  Synthetic oligonucleotide
gaggacctacgcgtaacattagattgatgc

SEQ ID NO: 290687 - DNA, 30 bp, Artificial Sequence
  Synthetic oligonucleotide
agtcttggacgtactaattcaagttgatgc

SEQ ID NO: 290688 - DNA, 30 bp, Artificial Sequence
  Synthetic oligonucleotide
actcataatgagatataggggcaaatatgc

SEQ ID NO: 290689 - DNA, 30 bp, Artificial Sequence
  Synthetic oligonucleotide
aaagaattggtgggcgtcaacgacatatgc

SEQ ID NO: 290690 - DNA, 30 bp, Artificial Sequence
  Synthetic oligonucleotide
acgtatgactagacggcgctttccatatgc

SEQ ID NO: 290691 - DNA, 30 bp, Artificial Sequence
  Synthetic oligonucleotide
catgcagggctcgcaggatattggatatgc

SEQ ID NO: 290692 - DNA, 30 bp, Artificial Sequence
  Synthetic oligonucleotide
gcaaaataggtacattggcatttgatatgc

SEQ ID NO: 290693 - DNA, 30 bp, Artificial Sequence
  Synthetic oligonucleotide
gttcccctaggtgatgactaagatatatgc

SEQ ID NO: 290694 - DNA, 30 bp, Artificial Sequence
  Synthetic oligonucleotide
cgagcctcttgaggtgctttttatatatgc

SEQ ID NO: 290695 - DNA, 30 bp, Artificial Sequence
  Synthetic oligonucleotide
gccagtgcaggaaagttgtggtctatatgc

SEQ ID NO: 290696 - DNA, 30 bp, Artificial Sequence
  Synthetic oligonucleotide
atagaactagcagaggtttagtgtatatgc

SEQ ID NO: 290697 - DNA, 30 bp, Artificial Sequence
  Synthetic oligonucleotide
atgttgagttagcttagggcgatgctatgc

SEQ ID NO: 290698 - DNA, 30 bp, Artificial Sequence
  Synthetic oligonucleotide
agctaggagtacggtgccaccactctatgc

SEQ ID NO: 290699 - DNA, 30 bp, Artificial Sequence
  Synthetic oligonucleotide
ggcgttaggtaatttcgacgtcctctatgc

SEQ ID NO: 290700 - DNA, 30 bp, Artificial Sequence
  Synthetic oligonucleotide
cagaatcctccccgggagggataagtatgc

SEQ ID NO: 290701 - DNA, 30 bp, Artificial Sequence
  Synthetic oligonucleotide
aaataagtcttggagataatcagagtatgc

SEQ ID NO: 290702 - DNA, 30 bp, Artificial Sequence
  Synthetic oligonucleotide
tggtggtcgaatttgaggtgccgcgtatgc

SEQ ID NO: 290703 - DNA, 30 bp, Artificial Sequence
  Synthetic oligonucleotide
attcggtagattctctactcggtggtatgc

SEQ ID NO: 290704 - DNA, 30 bp, Artificial Sequence
  Synthetic oligonucleotide
agggcagaagcatttataacctgtgtatgc

SEQ ID NO: 290705 - DNA, 30 bp, Artificial Sequence
  Synthetic oligonucleotide
atgccggtaggcgtttggatagaattatgc

SEQ ID NO: 290706 - DNA, 30 bp, Artificial Sequence
  Synthetic oligonucleotide
atgcctgccttggcgggcccgtgattatgc

SEQ ID NO: 290707 - DNA, 30 bp, Artificial Sequence
  Synthetic oligonucleotide
cacggaaaccggcgctcttgcgcaaactgc

SEQ ID NO: 290708 - DNA, 30 bp, Artificial Sequence
  Synthetic oligonucleotide
aaatagttgttcgtatgttcagcacactgc

SEQ ID NO: 290709 - DNA, 30 bp, Artificial Sequence
  Synthetic oligonucleotide
acggctagcccgaagacgccattacactgc

SEQ ID NO: 290710 - DNA, 30 bp, Artificial Sequence
  Synthetic oligonucleotide
cgtcgtgcaaccatccactgtttgcactgc

SEQ ID NO: 290711 - DNA, 30 bp, Artificial Sequence
  Synthetic oligonucleotide
cggtatggggtttccttatcctatcactgc

SEQ ID NO: 290712 - DNA, 30 bp, Artificial Sequence
  Synthetic oligonucleotide
ctgctgcgaagattaataaggattcactgc

SEQ ID NO: 290713 - DNA, 30 bp, Artificial Sequence
  Synthetic oligonucleotide
cgtcttgcttgtttaatggctttagactgc

SEQ ID NO: 290714 - DNA, 30 bp, Artificial Sequence
  Synthetic oligonucleotide
tttttagtccgaatgttgcgagaggactgc

SEQ ID NO: 290715 - DNA, 30 bp, Artificial Sequence
  Synthetic oligonucleotide
actaatgaggtccgcgggagggcctactgc

SEQ ID NO: 290716 - DNA, 30 bp, Artificial Sequence
  Synthetic oligonucleotide
agtactgctggagacagctgagtctactgc

SEQ ID NO: 290717 - DNA, 30 bp, Artificial Sequence
  Synthetic oligonucleotide
gtaagtatggagttctctcgctcgtactgc

SEQ ID NO: 290718 - DNA, 30 bp, Artificial Sequence
  Synthetic oligonucleotide
acgtgaagggtaccagtacgtaggtactgc

SEQ ID NO: 290719 - DNA, 30 bp, Artificial Sequence
  Synthetic oligonucleotide
gtgccgcactggtggattagttagacctgc

SEQ ID NO: 290720 - DNA, 30 bp, Artificial Sequence
  Synthetic oligonucleotide
atgtggtctaatagccccaagagtacctgc

SEQ ID NO: 290721 - DNA, 30 bp, Artificial Sequence
  Synthetic oligonucleotide
atcaaaatgcttctactggtcgagccctgc

SEQ ID NO: 290722 - DNA, 30 bp, Artificial Sequence
  Synthetic oligonucleotide
aacgttatatgagtataacaaaggccctgc

SEQ ID NO: 290723 - DNA, 30 bp, Artificial Sequence
  Synthetic oligonucleotide
gaagttcacaaggttgggtgccaagcctgc

SEQ ID NO: 290724 - DNA, 30 bp, Artificial Sequence
  Synthetic oligonucleotide
actcgggcctgatgccatgggaaggcctgc

SEQ ID NO: 290725 - DNA, 30 bp, Artificial Sequence
  Synthetic oligonucleotide
gtatcgactaaatgacaagattaggcctgc

SEQ ID NO: 290726 - DNA, 30 bp, Artificial Sequence
  Synthetic oligonucleotide
attatatggcttagcctcagggttgcctgc

SEQ ID NO: 290727 - DNA, 30 bp, Artificial Sequence
  Synthetic oligonucleotide
tcctgagggtagaatagatttgtatcctgc

SEQ ID NO: 290728 - DNA, 30 bp, Artificial Sequence
  Synthetic oligonucleotide
ggaccaccgttggggaattgggggtcctgc

SEQ ID NO: 290729 - DNA, 30 bp, Artificial Sequence
  Synthetic oligonucleotide
tgaaagcggacactttatccactgtcctgc

SEQ ID NO: 290730 - DNA, 30 bp, Artificial Sequence
  Synthetic oligonucleotide
aatgtgagcgggtaactcgccgattcctgc

SEQ ID NO: 290731 - DNA, 30 bp, Artificial Sequence
  Synthetic oligonucleotide
tgaaactcgccgggtgtaaaactaagctgc

SEQ ID NO: 290732 - DNA, 30 bp, Artificial Sequence
  Synthetic oligonucleotide
acggtgagagcctgttgttgcagcagctgc

SEQ ID NO: 290733 - DNA, 30 bp, Artificial Sequence
  Synthetic oligonucleotide
gccaagtgcgacgctaaaagaatgagctgc

SEQ ID NO: 290734 - DNA, 30 bp, Artificial Sequence
  Synthetic oligonucleotide
cgcggttggatttactagaaaggtagctgc

SEQ ID NO: 290735 - DNA, 30 bp, Artificial Sequence
  Synthetic oligonucleotide
acaagacgctcagttatggggggtagctgc

SEQ ID NO: 290736 - DNA, 30 bp, Artificial Sequence
  Synthetic oligonucleotide
ttaaggatgcttagaatagatatacgctgc

SEQ ID NO: 290737 - DNA, 30 bp, Artificial Sequence
  Synthetic oligonucleotide
ggcggaactgtaccatcagacttgcgctgc

SEQ ID NO: 290738 - DNA, 30 bp, Artificial Sequence
  Synthetic oligonucleotide
cagcatagagtctggagttcgttgcgctgc

SEQ ID NO: 290739 - DNA, 30 bp, Artificial Sequence
  Synthetic oligonucleotide
gagggcgtgtgacaggtcatggccggctgc

SEQ ID NO: 290740 - DNA, 30 bp, Artificial Sequence
  Synthetic oligonucleotide
cgctccacgtgtctttacttaatcggctgc

SEQ ID NO: 290741 - DNA, 30 bp, Artificial Sequence
  Synthetic oligonucleotide
ctgagcgccaaccaattgatttatggctgc

SEQ ID NO: 290742 - DNA, 30 bp, Artificial Sequence
  Synthetic oligonucleotide
agagatcgcatcatcctatagattggctgc

SEQ ID NO: 290743 - DNA, 30 bp, Artificial Sequence
  Synthetic oligonucleotide
tgagaagcatatcacagagagaaatgctgc

SEQ ID NO: 290744 - DNA, 30 bp, Artificial Sequence
  Synthetic oligonucleotide
accccgctcgagccttgggattagtgctgc

SEQ ID NO: 290745 - DNA, 30 bp, Artificial Sequence
  Synthetic oligonucleotide
tttcccgtccttaaaggaagggggtgctgc

SEQ ID NO: 290746 - DNA, 30 bp, Artificial Sequence
  Synthetic oligonucleotide
gctgtgctgctgttattgactaggatctgc

SEQ ID NO: 290747 - DNA, 30 bp, Artificial Sequence
  Synthetic oligonucleotide
taccctacggcttggggccaagggatctgc

SEQ ID NO: 290748 - DNA, 30 bp, Artificial Sequence
  Synthetic oligonucleotide
aaaccactacgctgtctcccggaactctgc

SEQ ID NO: 290749 - DNA, 30 bp, Artificial Sequence
  Synthetic oligonucleotide
aactagatagctaaaacgccgcgactctgc

SEQ ID NO: 290750 - DNA, 30 bp, Artificial Sequence
  Synthetic oligonucleotide
ttaccgccgaaaattctcaccgtactctgc

SEQ ID NO: 290751 - DNA, 30 bp, Artificial Sequence
  Synthetic oligonucleotide
aagaaacgcaaatcggctatgagcctctgc

SEQ ID NO: 290752 - DNA, 30 bp, Artificial Sequence
  Synthetic oligonucleotide
gattctatcaacaggatgtaagggctctgc

SEQ ID NO: 290753 - DNA, 30 bp, Artificial Sequence
  Synthetic oligonucleotide
catgattacgtttacagtaaatgagtctgc

SEQ ID NO: 290754 - DNA, 30 bp, Artificial Sequence
  Synthetic oligonucleotide
ttgcatacgcataacgtttgcgtcgtctgc

SEQ ID NO: 290755 - DNA, 30 bp, Artificial Sequence
  Synthetic oligonucleotide
ttcagtggcctgctcgttagactggtctgc

SEQ ID NO: 290756 - DNA, 30 bp, Artificial Sequence
  Synthetic oligonucleotide
agggcatcaaacgcggtaaaattcttctgc

SEQ ID NO: 290757 - DNA, 30 bp, Artificial Sequence
  Synthetic oligonucleotide
aatggtggtcctgtacgcctgccgttctgc

SEQ ID NO: 290758 - DNA, 30 bp, Artificial Sequence
  Synthetic oligonucleotide
ccagggaccccggggaaaagtattttctgc

SEQ ID NO: 290759 - DNA, 30 bp, Artificial Sequence
  Synthetic oligonucleotide
ataacagggataaatgatcctgcaaagtgc

SEQ ID NO: 290760 - DNA, 30 bp, Artificial Sequence
  Synthetic oligonucleotide
cggagatcccccccgtaacccgccaagtgc

SEQ ID NO: 290761 - DNA, 30 bp, Artificial Sequence
  Synthetic oligonucleotide
cagcgtacacccataattgtcgtcaagtgc

SEQ ID NO: 290762 - DNA, 30 bp, Artificial Sequence
  Synthetic oligonucleotide
cagctgtgtaagccattggggttcaagtgc

SEQ ID NO: 290763 - DNA, 29 bp, Artificial Sequence
  Synthetic oligonucleotide
aatggtcgagataggtagatttcaagtgc

SEQ ID NO: 290764 - DNA, 30 bp, Artificial Sequence
  Synthetic oligonucleotide
acccgtgggtctctagccaaaaagaagtgc

SEQ ID NO: 290765 - DNA, 30 bp, Artificial Sequence
  Synthetic oligonucleotide
ggcactcctcagtgccgaggaaggaagtgc

SEQ ID NO: 290766 - DNA, 30 bp, Artificial Sequence
  Synthetic oligonucleotide
tcaatatgtgggatagaaaagtggaagtgc

SEQ ID NO: 290767 - DNA, 30 bp, Artificial Sequence
  Synthetic oligonucleotide
ggtggaccccacatctatgatgctaagtgc

SEQ ID NO: 290768 - DNA, 30 bp, Artificial Sequence
  Synthetic oligonucleotide
ccagacaacgtctggggaaatggtaagtgc

SEQ ID NO: 290769 - DNA, 30 bp, Artificial Sequence
  Synthetic oligonucleotide
cactgtctgaaaacttacgctattaagtgc

SEQ ID NO: 290770 - DNA, 30 bp, Artificial Sequence
  Synthetic oligonucleotide
ataaggaactaaccctattttctgcagtgc

SEQ ID NO: 290771 - DNA, 30 bp, Artificial Sequence
  Synthetic oligonucleotide
ctctactgatctctcctgctgggtcagtgc

SEQ ID NO: 290772 - DNA, 30 bp, Artificial Sequence
  Synthetic oligonucleotide
tatcagtaagcccgtggaaatggtcagtgc

SEQ ID NO: 290773 - DNA, 30 bp, Artificial Sequence
  Synthetic oligonucleotide
ctgaacgacggttgtcagacgggagagtgc

SEQ ID NO: 290774 - DNA, 30 bp, Artificial Sequence
  Synthetic oligonucleotide
gtattgtggactagggttcgatgagagtgc

SEQ ID NO: 290775 - DNA, 30 bp, Artificial Sequence
  Synthetic oligonucleotide
cccgcgggctattgggtccgtgtagagtgc

SEQ ID NO: 290776 - DNA, 30 bp, Artificial Sequence
  Synthetic oligonucleotide
ggttacaataagcagcgtagcaacgagtgc

SEQ ID NO: 290777 - DNA, 30 bp, Artificial Sequence
  Synthetic oligonucleotide
aggcctgctttgcctatcggcatcgagtgc

SEQ ID NO: 290778 - DNA, 30 bp, Artificial Sequence
  Synthetic oligonucleotide
aagggacttcactcgttataaagtgagtgc

SEQ ID NO: 290779 - DNA, 30 bp, Artificial Sequence
  Synthetic oligonucleotide
ctcccgctataaggaaagaatcttgagtgc

SEQ ID NO: 290780 - DNA, 31 bp, Artificial Sequence
  Synthetic oligonucleotide
ttgtgccaaaatgggcgcgccctaatagtgc

SEQ ID NO: 290781 - DNA, 30 bp, Artificial Sequence
  Synthetic oligonucleotide
cagagatttaggttggctaggatatagtgc

SEQ ID NO: 290782 - DNA, 30 bp, Artificial Sequence
  Synthetic oligonucleotide
gcactgatgacgtaatcccattattagtgc

SEQ ID NO: 290783 - DNA, 30 bp, Artificial Sequence
  Synthetic oligonucleotide
taacgctacctgcaaggcaactcttagtgc

SEQ ID NO: 290784 - DNA, 30 bp, Artificial Sequence
  Synthetic oligonucleotide
ccatagtcggaagactcacggttttagtgc

SEQ ID NO: 290785 - DNA, 30 bp, Artificial Sequence
  Synthetic oligonucleotide
gaactcacgcgatgggatgggtaaacgtgc

SEQ ID NO: 290786 - DNA, 30 bp, Artificial Sequence
  Synthetic oligonucleotide
tcaagttaacatcctggccagaacacgtgc

SEQ ID NO: 290787 - DNA, 30 bp, Artificial Sequence
  Synthetic oligonucleotide
tagacagcttaaggtcgctacatgacgtgc

SEQ ID NO: 290788 - DNA, 30 bp, Artificial Sequence
  Synthetic oligonucleotide
gggaagtgagccagctacgccttgacgtgc

SEQ ID NO: 290789 - DNA, 30 bp, Artificial Sequence
  Synthetic oligonucleotide
aggtgccaagttgccgcatagttgacgtgc

SEQ ID NO: 290790 - DNA, 30 bp, Artificial Sequence
  Synthetic oligonucleotide
atcagcgacgtgtaatgggaagctacgtgc

SEQ ID NO: 290791 - DNA, 30 bp, Artificial Sequence
  Synthetic oligonucleotide
tggctcaggcaaaacgtttggggcccgtgc

SEQ ID NO: 290792 - DNA, 30 bp, Artificial Sequence
  Synthetic oligonucleotide
gaacgtggttgctcaggtcattggccgtgc

SEQ ID NO: 290793 - DNA, 30 bp, Artificial Sequence
  Synthetic oligonucleotide
tgctcggaaagcactaatatggcagcgtgc

SEQ ID NO: 290794 - DNA, 30 bp, Artificial Sequence
  Synthetic oligonucleotide
cataaagtcatcgcctagatgcacgcgtgc

SEQ ID NO: 290795 - DNA, 30 bp, Artificial Sequence
  Synthetic oligonucleotide
aggtaatgcttcgacccgcttatggcgtgc

SEQ ID NO: 290796 - DNA, 30 bp, Artificial Sequence
  Synthetic oligonucleotide
tgtaacggaaggacgttcttttttgcgtgc

SEQ ID NO: 290797 - DNA, 30 bp, Artificial Sequence
  Synthetic oligonucleotide
ctcacggatggcagctcgtcgacatcgtgc

SEQ ID NO: 290798 - DNA, 30 bp, Artificial Sequence
  Synthetic oligonucleotide
acagagtacacgtctggctaaggttcgtgc

SEQ ID NO: 290799 - DNA, 30 bp, Artificial Sequence
  Synthetic oligonucleotide
atggtaggtcctcataagtatcaaaggtgc

SEQ ID NO: 290800 - DNA, 30 bp, Artificial Sequence
  Synthetic oligonucleotide
tcggccaacatgagagctcagatcaggtgc

SEQ ID NO: 290801 - DNA, 30 bp, Artificial Sequence
  Synthetic oligonucleotide
gtaaagcaagctcacaacagacaacggtgc

SEQ ID NO: 290802 - DNA, 30 bp, Artificial Sequence
  Synthetic oligonucleotide
cgactgttacagagtagggactcacggtgc

SEQ ID NO: 290803 - DNA, 30 bp, Artificial Sequence
  Synthetic oligonucleotide
ttgatgcagaagcggctgaactaccggtgc

SEQ ID NO: 290804 - DNA, 30 bp, Artificial Sequence
  Synthetic oligonucleotide
ggtgttctaaacgataggaagacgcggtgc

SEQ ID NO: 290805 - DNA, 30 bp, Artificial Sequence
  Synthetic oligonucleotide
ttggggccaactcacaattgattgcggtgc

SEQ ID NO: 290806 - DNA, 30 bp, Artificial Sequence
  Synthetic oligonucleotide
attaccgagccccatacgcacaacgggtgc

SEQ ID NO: 290807 - DNA, 30 bp, Artificial Sequence
  Synthetic oligonucleotide
tatttagaggaaaagcaggttaaggggtgc

SEQ ID NO: 290808 - DNA, 30 bp, Artificial Sequence
  Synthetic oligonucleotide
agcgtcgtcgaaagtgagcgtgctgggtgc

SEQ ID NO: 290809 - DNA, 30 bp, Artificial Sequence
  Synthetic oligonucleotide
gtgaaaggcacgagagtcggcagtgggtgc

SEQ ID NO: 290810 - DNA, 30 bp, Artificial Sequence
  Synthetic oligonucleotide
aaagaacgaagagattgtgactgtgggtgc

SEQ ID NO: 290811 - DNA, 30 bp, Artificial Sequence
  Synthetic oligonucleotide
tgtcgcactacaagacaattacttgggtgc

SEQ ID NO: 290812 - DNA, 30 bp, Artificial Sequence
  Synthetic oligonucleotide
gttataactcccccgaaggaagactggtgc

SEQ ID NO: 290813 - DNA, 30 bp, Artificial Sequence
  Synthetic oligonucleotide
ggctcgggggggctagacgtgatctggtgc

SEQ ID NO: 290814 - DNA, 30 bp, Artificial Sequence
  Synthetic oligonucleotide
tagcctcatgagactatgtcccagtggtgc

SEQ ID NO: 290815 - DNA, 30 bp, Artificial Sequence
  Synthetic oligonucleotide
caagctgattaattccttttatggtggtgc

SEQ ID NO: 290816 - DNA, 30 bp, Artificial Sequence
  Synthetic oligonucleotide
gtagtctccctaatggaagaaaatatgtgc

SEQ ID NO: 290817 - DNA, 30 bp, Artificial Sequence
  Synthetic oligonucleotide
aggacggttagttctccctcaattatgtgc

SEQ ID NO: 290818 - DNA, 30 bp, Artificial Sequence
  Synthetic oligonucleotide
cgattttgcggtgagggaaggcttatgtgc

SEQ ID NO: 290819 - DNA, 30 bp, Artificial Sequence
  Synthetic oligonucleotide
gcactattttcgagtttttggcttatgtgc

SEQ ID NO: 290820 - DNA, 30 bp, Artificial Sequence
  Synthetic oligonucleotide
caatttcggcctaattacttgtatctgtgc

SEQ ID NO: 290821 - DNA, 30 bp, Artificial Sequence
  Synthetic oligonucleotide
gtgtgtcaaaatattaagttcactctgtgc

SEQ ID NO: 290822 - DNA, 30 bp, Artificial Sequence
  Synthetic oligonucleotide
gtgcgcgcatgtagtatatagccagtgtgc

SEQ ID NO: 290823 - DNA, 30 bp, Artificial Sequence
  Synthetic oligonucleotide
attgagggggggcgggcggagacggtgtgc

SEQ ID NO: 290824 - DNA, 30 bp, Artificial Sequence
  Synthetic oligonucleotide
ctaataccctaagcacgttgttgggtgtgc

SEQ ID NO: 290825 - DNA, 30 bp, Artificial Sequence
  Synthetic oligonucleotide
gttgaccattgttacatgtttatggtgtgc

SEQ ID NO: 290826 - DNA, 30 bp, Artificial Sequence
  Synthetic oligonucleotide
tttcaaattcaccaatcgtaggctgtgtgc

SEQ ID NO: 290827 - DNA, 30 bp, Artificial Sequence
  Synthetic oligonucleotide
agcctctagggacgcgcacgatttgtgtgc

SEQ ID NO: 290828 - DNA, 30 bp, Artificial Sequence
  Synthetic oligonucleotide
atgaggggttataattgcatgcgattgtgc

SEQ ID NO: 290829 - DNA, 30 bp, Artificial Sequence
  Synthetic oligonucleotide
tccttggttccgtttctactccccttgtgc

SEQ ID NO: 290830 - DNA, 30 bp, Artificial Sequence
  Synthetic oligonucleotide
tcaacttcatgttcacacaggctcttgtgc

SEQ ID NO: 290831 - DNA, 30 bp, Artificial Sequence
  Synthetic oligonucleotide
agctgagtaggtgtacggagttcgttgtgc

SEQ ID NO: 290832 - DNA, 30 bp, Artificial Sequence
  Synthetic oligonucleotide
gtacttgggtattgtcgtttgtgcaattgc

SEQ ID NO: 290833 - DNA, 30 bp, Artificial Sequence
  Synthetic oligonucleotide
tgcgagctcagatacgtatagttcaattgc

SEQ ID NO: 290834 - DNA, 31 bp, Artificial Sequence
  Synthetic oligonucleotide
tattaccaatctcgctgaatgaaagaattgc

SEQ ID NO: 290835 - DNA, 30 bp, Artificial Sequence
  Synthetic oligonucleotide
gtcgcaaatagttggttgtttctacattgc

SEQ ID NO: 290836 - DNA, 30 bp, Artificial Sequence
  Synthetic oligonucleotide
gcgtgtgtctgcgacatccatacccattgc

SEQ ID NO: 290837 - DNA, 30 bp, Artificial Sequence
  Synthetic oligonucleotide
taagattttgagactagtcaagaggattgc

SEQ ID NO: 290838 - DNA, 30 bp, Artificial Sequence
  Synthetic oligonucleotide
attgttctcaatcgatcggacgaggattgc

SEQ ID NO: 290839 - DNA, 30 bp, Artificial Sequence
  Synthetic oligonucleotide
cattatttcggtatttccaaggcggattgc

SEQ ID NO: 290840 - DNA, 30 bp, Artificial Sequence
  Synthetic oligonucleotide
tggctccgtaggcaaccggctggggattgc

SEQ ID NO: 290841 - DNA, 30 bp, Artificial Sequence
  Synthetic oligonucleotide
gtgtatgaataatagtccgaggctgattgc

SEQ ID NO: 290842 - DNA, 30 bp, Artificial Sequence
  Synthetic oligonucleotide
gttgacgtgcctataattgcgcgtgattgc

SEQ ID NO: 290843 - DNA, 30 bp, Artificial Sequence
  Synthetic oligonucleotide
ttatgggtatatttgcggggaggatattgc

SEQ ID NO: 290844 - DNA, 30 bp, Artificial Sequence
  Synthetic oligonucleotide
tcttagatgatagcccagatctagtattgc

SEQ ID NO: 290845 - DNA, 30 bp, Artificial Sequence
  Synthetic oligonucleotide
ggatgtatttgattagatttgacgtattgc

SEQ ID NO: 290846 - DNA, 30 bp, Artificial Sequence
  Synthetic oligonucleotide
gtggtaggccttgcatcatagctgtattgc

SEQ ID NO: 290847 - DNA, 30 bp, Artificial Sequence
  Synthetic oligonucleotide
ttttggcttacgataatcatccattattgc

SEQ ID NO: 290848 - DNA, 30 bp, Artificial Sequence
  Synthetic oligonucleotide
ttctcccccccggtgccaatggattattgc

SEQ ID NO: 290849 - DNA, 30 bp, Artificial Sequence
  Synthetic oligonucleotide
atagaagcggggttacgctcattttattgc

SEQ ID NO: 290850 - DNA, 30 bp, Artificial Sequence
  Synthetic oligonucleotide
tgttttaaaagggagagaaagtcaacttgc

SEQ ID NO: 290851 - DNA, 30 bp, Artificial Sequence
  Synthetic oligonucleotide
aacaaaatctgatggaatcattcaacttgc

SEQ ID NO: 290852 - DNA, 30 bp, Artificial Sequence
  Synthetic oligonucleotide
gatatatgcgtttgcatcaaaggaacttgc

SEQ ID NO: 290853 - DNA, 30 bp, Artificial Sequence
  Synthetic oligonucleotide
ttggccctccgaggcatggacgtaacttgc

SEQ ID NO: 290854 - DNA, 30 bp, Artificial Sequence
  Synthetic oligonucleotide
aaacgaccacgtaggcattgagtgacttgc

SEQ ID NO: 290855 - DNA, 30 bp, Artificial Sequence
  Synthetic oligonucleotide
ggctgctactatccaaacgaggatacttgc

SEQ ID NO: 290856 - DNA, 30 bp, Artificial Sequence
  Synthetic oligonucleotide
tgctaccgttgtccggtgggaagtacttgc

SEQ ID NO: 290857 - DNA, 30 bp, Artificial Sequence
  Synthetic oligonucleotide
tggcccagtcataagtttatagcgccttgc

SEQ ID NO: 290858 - DNA, 30 bp, Artificial Sequence
  Synthetic oligonucleotide
atggtaaagctttaggtcgatgcgccttgc

SEQ ID NO: 290859 - DNA, 30 bp, Artificial Sequence
  Synthetic oligonucleotide
gtatgcataaataggttcggtagtccttgc

SEQ ID NO: 290860 - DNA, 30 bp, Artificial Sequence
  Synthetic oligonucleotide
gggtgcaaaggagcatgagtgttagcttgc

SEQ ID NO: 290861 - DNA, 30 bp, Artificial Sequence
  Synthetic oligonucleotide
attatgaccacgtccgagctcgccgcttgc

SEQ ID NO: 290862 - DNA, 30 bp, Artificial Sequence
  Synthetic oligonucleotide
atccacctagtagtggtactacaggcttgc

SEQ ID NO: 290863 - DNA, 30 bp, Artificial Sequence
  Synthetic oligonucleotide
actaaacagacctgaccggtccaggcttgc

SEQ ID NO: 290864 - DNA, 30 bp, Artificial Sequence
  Synthetic oligonucleotide
tgacctatcggtataaccagtaaatcttgc

SEQ ID NO: 290865 - DNA, 30 bp, Artificial Sequence
  Synthetic oligonucleotide
gactcaagttaagggttacgacaatcttgc

SEQ ID NO: 290866 - DNA, 30 bp, Artificial Sequence
  Synthetic oligonucleotide
acgcagttaacggccatgaggtcatcttgc

SEQ ID NO: 290867 - DNA, 30 bp, Artificial Sequence
  Synthetic oligonucleotide
aggtctcactcagaatcctaggattcttgc

SEQ ID NO: 290868 - DNA, 30 bp, Artificial Sequence
  Synthetic oligonucleotide
ccacaacgtgattctgccgggtgaagttgc

SEQ ID NO: 290869 - DNA, 30 bp, Artificial Sequence
  Synthetic oligonucleotide
tcccctctccaagaatgtaattgaagttgc

SEQ ID NO: 290870 - DNA, 30 bp, Artificial Sequence
  Synthetic oligonucleotide
ttaccggctcagtgactcggcgagagttgc

SEQ ID NO: 290871 - DNA, 30 bp, Artificial Sequence
  Synthetic oligonucleotide
tcgttgctcatagcccactccctgagttgc

SEQ ID NO: 290872 - DNA, 30 bp, Artificial Sequence
  Synthetic oligonucleotide
ttaatgtagcgtaaatttggttatagttgc

SEQ ID NO: 290873 - DNA, 30 bp, Artificial Sequence
  Synthetic oligonucleotide
catttgccagggggagcgtaaagtagttgc

SEQ ID NO: 290874 - DNA, 30 bp, Artificial Sequence
  Synthetic oligonucleotide
ggggtgcagagatcggtagacgttagttgc

SEQ ID NO: 290875 - DNA, 30 bp, Artificial Sequence
  Synthetic oligonucleotide
ctatcataatggcatgcagatcgacgttgc

SEQ ID NO: 290876 - DNA, 30 bp, Artificial Sequence
  Synthetic oligonucleotide
gaaacgttaatgcgcatgctgttccgttgc

SEQ ID NO: 290877 - DNA, 30 bp, Artificial Sequence
  Synthetic oligonucleotide
ggaaggtaatcaactacgtgtatgcgttgc

SEQ ID NO: 290878 - DNA, 30 bp, Artificial Sequence
  Synthetic oligonucleotide
tgaagatcagtaggtacttgtatgcgttgc

SEQ ID NO: 290879 - DNA, 30 bp, Artificial Sequence
  Synthetic oligonucleotide
cctactcggtatctggacgtcttgcgttgc

SEQ ID NO: 290880 - DNA, 30 bp, Artificial Sequence
  Synthetic oligonucleotide
tcctgtagtttattcaggggcgtaggttgc

SEQ ID NO: 290881 - DNA, 30 bp, Artificial Sequence
  Synthetic oligonucleotide
gagcgatcagtaagttctaatcacggttgc

SEQ ID NO: 290882 - DNA, 30 bp, Artificial Sequence
  Synthetic oligonucleotide
gagcactaaagacgccagatgtacggttgc

SEQ ID NO: 290883 - DNA, 30 bp, Artificial Sequence
  Synthetic oligonucleotide
cacctaggtccactgcagctcacgggttgc

SEQ ID NO: 290884 - DNA, 30 bp, Artificial Sequence
  Synthetic oligonucleotide
gaggttgaacggtgcgtgaagttgggttgc

SEQ ID NO: 290885 - DNA, 30 bp, Artificial Sequence
  Synthetic oligonucleotide
tagctcggacaagaatttgaacatggttgc

SEQ ID NO: 290886 - DNA, 30 bp, Artificial Sequence
  Synthetic oligonucleotide
gatacttacgagttcgggccctgatgttgc

SEQ ID NO: 290887 - DNA, 30 bp, Artificial Sequence
  Synthetic oligonucleotide
aggcagtcaacagtataagattgatgttgc

SEQ ID NO: 290888 - DNA, 30 bp, Artificial Sequence
  Synthetic oligonucleotide
gaaggcctgacttgccgcatactgtgttgc

SEQ ID NO: 290889 - DNA, 30 bp, Artificial Sequence
  Synthetic oligonucleotide
tatgcggacataaccacttctcgaatttgc

SEQ ID NO: 290890 - DNA, 30 bp, Artificial Sequence
  Synthetic oligonucleotide
ataagtacggatcaattttcagacatttgc

SEQ ID NO: 290891 - DNA, 30 bp, Artificial Sequence
  Synthetic oligonucleotide
tgaaggcttgcacacgtacgtggcatttgc

SEQ ID NO: 290892 - DNA, 30 bp, Artificial Sequence
  Synthetic oligonucleotide
acgcagcgcccccacaacacgacgatttgc

SEQ ID NO: 290893 - DNA, 30 bp, Artificial Sequence
  Synthetic oligonucleotide
caatctcggcaccgtttacaaggactttgc

SEQ ID NO: 290894 - DNA, 30 bp, Artificial Sequence
  Synthetic oligonucleotide
agcgccctggtctactccggactgctttgc

SEQ ID NO: 290895 - DNA, 30 bp, Artificial Sequence
  Synthetic oligonucleotide
aatctgcgccatacaggatagctgctttgc

SEQ ID NO: 290896 - DNA, 30 bp, Artificial Sequence
  Synthetic oligonucleotide
tatccatcaacctctcaccgcaatctttgc

SEQ ID NO: 290897 - DNA, 30 bp, Artificial Sequence
  Synthetic oligonucleotide
cacgtctatggaatcaaatcttccgtttgc

SEQ ID NO: 290898 - DNA, 30 bp, Artificial Sequence
  Synthetic oligonucleotide
atgtcctcaggcgggaccgtatgcgtttgc

SEQ ID NO: 290899 - DNA, 30 bp, Artificial Sequence
  Synthetic oligonucleotide
tatgctcaggcatttctataaggggtttgc

SEQ ID NO: 290900 - DNA, 30 bp, Artificial Sequence
  Synthetic oligonucleotide
tgtacttggggctcattattcatggtttgc

SEQ ID NO: 290901 - DNA, 30 bp, Artificial Sequence
  Synthetic oligonucleotide
agcgattgcaagcgactggcgtgtgtttgc

SEQ ID NO: 290902 - DNA, 30 bp, Artificial Sequence
  Synthetic oligonucleotide
ccaatcgactgggcatggttgtgattttgc

SEQ ID NO: 290903 - DNA, 30 bp, Artificial Sequence
  Synthetic oligonucleotide
agagtgcttgaagtattggagataaaaatc

SEQ ID NO: 290904 - DNA, 30 bp, Artificial Sequence
  Synthetic oligonucleotide
cgaaaagacttaaagcactctcccaaaatc

SEQ ID NO: 290905 - DNA, 30 bp, Artificial Sequence
  Synthetic oligonucleotide
gatgtcacgtcccctttcaggcgcaaaatc

SEQ ID NO: 290906 - DNA, 30 bp, Artificial Sequence
  Synthetic oligonucleotide
atccacgacagacatatccatttcaaaatc

SEQ ID NO: 290907 - DNA, 30 bp, Artificial Sequence
  Synthetic oligonucleotide
gaaagaaccgaggatccctcgaggaaaatc

SEQ ID NO: 290908 - DNA, 30 bp, Artificial Sequence
  Synthetic oligonucleotide
gttgaaactgtgtcctgatcatataaaatc

SEQ ID NO: 290909 - DNA, 30 bp, Artificial Sequence
  Synthetic oligonucleotide
gatgctcatgaattaaaaagtgctaaaatc

SEQ ID NO: 290910 - DNA, 30 bp, Artificial Sequence
  Synthetic oligonucleotide
cccaaaacttcataggtggggggtaaaatc

SEQ ID NO: 290911 - DNA, 31 bp, Artificial Sequence
  Synthetic oligonucleotide
tataacaaccagtgaggcgagcattaaaatc

SEQ ID NO: 290912 - DNA, 30 bp, Artificial Sequence
  Synthetic oligonucleotide
ataatacgaaccgcgaccccgattaaaatc

SEQ ID NO: 290913 - DNA, 30 bp, Artificial Sequence
  Synthetic oligonucleotide
cgggggaacgttacttatgttagacaaatc

SEQ ID NO: 290914 - DNA, 30 bp, Artificial Sequence
  Synthetic oligonucleotide
tagaggcaggcaacatagtgcgaccaaatc

SEQ ID NO: 290915 - DNA, 30 bp, Artificial Sequence
  Synthetic oligonucleotide
gcaataaacttccggagtggtggccaaatc

SEQ ID NO: 290916 - DNA, 30 bp, Artificial Sequence
  Synthetic oligonucleotide
tggagagcgcttgtcgtgtacaagcaaatc

SEQ ID NO: 290917 - DNA, 30 bp, Artificial Sequence
  Synthetic oligonucleotide
aacacgttctgaggccacctcaagcaaatc

SEQ ID NO: 290918 - DNA, 30 bp, Artificial Sequence
  Synthetic oligonucleotide
gacacggaattctcagtcatttggcaaatc

SEQ ID NO: 290919 - DNA, 30 bp, Artificial Sequence
  Synthetic oligonucleotide
gaggctgtagccgttgacttgcacgaaatc

SEQ ID NO: 290920 - DNA, 30 bp, Artificial Sequence
  Synthetic oligonucleotide
aagggtagagagatagctgtgaatgaaatc

SEQ ID NO: 290921 - DNA, 30 bp, Artificial Sequence
  Synthetic oligonucleotide
tcaggtagtaggaacattgacattgaaatc

SEQ ID NO: 290922 - DNA, 30 bp, Artificial Sequence
  Synthetic oligonucleotide
cgctttaaattattcgtttaaaaataaatc

SEQ ID NO: 290923 - DNA, 30 bp, Artificial Sequence
  Synthetic oligonucleotide
cttagagtcacctagtgacgacaataaatc

SEQ ID NO: 290924 - DNA, 30 bp, Artificial Sequence
  Synthetic oligonucleotide
caatgtcttatgggaggccggtgataaatc

SEQ ID NO: 290925 - DNA, 30 bp, Artificial Sequence
  Synthetic oligonucleotide
ttattctcgtcaataagacgacagtaaatc

SEQ ID NO: 290926 - DNA, 30 bp, Artificial Sequence
  Synthetic oligonucleotide
agcctcgagtgaatgactctggagtaaatc

SEQ ID NO: 290927 - DNA, 30 bp, Artificial Sequence
  Synthetic oligonucleotide
tgttacgtagatggcaacgggcattaaatc

SEQ ID NO: 290928 - DNA, 30 bp, Artificial Sequence
  Synthetic oligonucleotide
gagcgacgatcctggcggtaagcttaaatc

SEQ ID NO: 290929 - DNA, 30 bp, Artificial Sequence
  Synthetic oligonucleotide
gatcccgggttaaaatagctgagttaaatc

SEQ ID NO: 290930 - DNA, 30 bp, Artificial Sequence
  Synthetic oligonucleotide
tcgggcaggttcacgtacttgccaacaatc

SEQ ID NO: 290931 - DNA, 30 bp, Artificial Sequence
  Synthetic oligonucleotide
ggcgtgtattaattcctcgtcgtcacaatc

SEQ ID NO: 290932 - DNA, 30 bp, Artificial Sequence
  Synthetic oligonucleotide
cagccatatacaatggccctgtagacaatc

SEQ ID NO: 290933 - DNA, 30 bp, Artificial Sequence
  Synthetic oligonucleotide
aacgtagaggctggagatgaatcgacaatc

SEQ ID NO: 290934 - DNA, 30 bp, Artificial Sequence
  Synthetic oligonucleotide
ttgcggagcgaacatactggacggacaatc

SEQ ID NO: 290935 - DNA, 30 bp, Artificial Sequence
  Synthetic oligonucleotide
gcaccagccctagaatagggggggacaatc

SEQ ID NO: 290936 - DNA, 30 bp, Artificial Sequence
  Synthetic oligonucleotide
acctaacataacctgggcctccctacaatc

SEQ ID NO: 290937 - DNA, 30 bp, Artificial Sequence
  Synthetic oligonucleotide
tagcttgcggtaatccgacctggtacaatc

SEQ ID NO: 290938 - DNA, 30 bp, Artificial Sequence
  Synthetic oligonucleotide
cgcagtctcgtagatctcaggtgtacaatc

SEQ ID NO: 290939 - DNA, 30 bp, Artificial Sequence
  Synthetic oligonucleotide
catagttggtgggccaaatcaaaaccaatc

SEQ ID NO: 290940 - DNA, 30 bp, Artificial Sequence
  Synthetic oligonucleotide
catgggcttcactataggtttagaccaatc

SEQ ID NO: 290941 - DNA, 30 bp, Artificial Sequence
  Synthetic oligonucleotide
tcaactatcattagggatactgagccaatc

SEQ ID NO: 290942 - DNA, 30 bp, Artificial Sequence
  Synthetic oligonucleotide
catttcgtgcatgccacgggccggccaatc

SEQ ID NO: 290943 - DNA, 30 bp, Artificial Sequence
  Synthetic oligonucleotide
gtactggttgtgtaatttgactgtccaatc

SEQ ID NO: 290944 - DNA, 30 bp, Artificial Sequence
  Synthetic oligonucleotide
tgaatcaggccggtcagactgtcagcaatc

SEQ ID NO: 290945 - DNA, 30 bp, Artificial Sequence
  Synthetic oligonucleotide
agagattgcttacttgctgggttagcaatc

SEQ ID NO: 290946 - DNA, 30 bp, Artificial Sequence
  Synthetic oligonucleotide
ccactgcaccacggtactgttaccgcaatc

SEQ ID NO: 290947 - DNA, 30 bp, Artificial Sequence
  Synthetic oligonucleotide
taaaatactgctgtgtggtggtaggcaatc

SEQ ID NO: 290948 - DNA, 30 bp, Artificial Sequence
  Synthetic oligonucleotide
gtaagtgacgactagctgcacggggcaatc

SEQ ID NO: 290949 - DNA, 30 bp, Artificial Sequence
  Synthetic oligonucleotide
aaggcattttgccagacagggatggcaatc

SEQ ID NO: 290950 - DNA, 30 bp, Artificial Sequence
  Synthetic oligonucleotide
gtgcggtcatgtatcagcgggaatgcaatc

SEQ ID NO: 290951 - DNA, 30 bp, Artificial Sequence
  Synthetic oligonucleotide
atatcacctgaacaaaaaaccgatgcaatc

SEQ ID NO: 290952 - DNA, 30 bp, Artificial Sequence
  Synthetic oligonucleotide
ctcggctataatgcgacgggagttgcaatc

SEQ ID NO: 290953 - DNA, 30 bp, Artificial Sequence
  Synthetic oligonucleotide
ggaattcgaaccgtgcgacagccatcaatc

SEQ ID NO: 290954 - DNA, 30 bp, Artificial Sequence
  Synthetic oligonucleotide
tgttaagcgaggtttgggcatagatcaatc

SEQ ID NO: 290955 - DNA, 30 bp, Artificial Sequence
  Synthetic oligonucleotide
acgaggtaatgacccaggcccgagtcaatc

SEQ ID NO: 290956 - DNA, 30 bp, Artificial Sequence
  Synthetic oligonucleotide
tacgttcgagcccggggttctcggtcaatc

SEQ ID NO: 290957 - DNA, 30 bp, Artificial Sequence
  Synthetic oligonucleotide
aaaccagagcagattgtccggatgtcaatc

SEQ ID NO: 290958 - DNA, 30 bp, Artificial Sequence
  Synthetic oligonucleotide
atgtatttggatagtacctatcattcaatc

SEQ ID NO: 290959 - DNA, 30 bp, Artificial Sequence
  Synthetic oligonucleotide
tgtggattgaagctcgagacggattcaatc

SEQ ID NO: 290960 - DNA, 30 bp, Artificial Sequence
  Synthetic oligonucleotide
ggggcctgtgcagtccagacagtttcaatc

SEQ ID NO: 290961 - DNA, 30 bp, Artificial Sequence
  Synthetic oligonucleotide
tatacaaccgaatagctagcgttttcaatc

SEQ ID NO: 290962 - DNA, 31 bp, Artificial Sequence
  Synthetic oligonucleotide
aattggagggtaacagcggaccacaagaatc

SEQ ID NO: 290963 - DNA, 30 bp, Artificial Sequence
  Synthetic oligonucleotide
gtgcggtccgaggagaaactttcaagaatc

SEQ ID NO: 290964 - DNA, 30 bp, Artificial Sequence
  Synthetic oligonucleotide
tcagcaaacgagcctgcagatcacagaatc

SEQ ID NO: 290965 - DNA, 30 bp, Artificial Sequence
  Synthetic oligonucleotide
tatacactctactagactttccgacgaatc

SEQ ID NO: 290966 - DNA, 30 bp, Artificial Sequence
  Synthetic oligonucleotide
tggtatattcgtttcgagacgtgacgaatc

SEQ ID NO: 290967 - DNA, 30 bp, Artificial Sequence
  Synthetic oligonucleotide
cttaggtgcttcctgatcggacgccgaatc

SEQ ID NO: 290968 - DNA, 30 bp, Artificial Sequence
  Synthetic oligonucleotide
ggtgccgcgcaaaaagattaccatcgaatc

SEQ ID NO: 290969 - DNA, 30 bp, Artificial Sequence
  Synthetic oligonucleotide
gttaccgctggcaaagtctggccaggaatc

SEQ ID NO: 290970 - DNA, 30 bp, Artificial Sequence
  Synthetic oligonucleotide
tgacataccactcaccacttaaagggaatc

SEQ ID NO: 290971 - DNA, 30 bp, Artificial Sequence
  Synthetic oligonucleotide
aaagggatgaacggctggacgcgtggaatc

SEQ ID NO: 290972 - DNA, 30 bp, Artificial Sequence
  Synthetic oligonucleotide
gtaattcctaaacataaaatctgtggaatc

SEQ ID NO: 290973 - DNA, 30 bp, Artificial Sequence
  Synthetic oligonucleotide
tgttccggcgctaaggtagtcgcatgaatc

SEQ ID NO: 290974 - DNA, 30 bp, Artificial Sequence
  Synthetic oligonucleotide
tgtcagtgaccgtgcaaaatcgaaataatc

SEQ ID NO: 290975 - DNA, 30 bp, Artificial Sequence
  Synthetic oligonucleotide
cccgtccacgacccagcgcgtcccataatc

SEQ ID NO: 290976 - DNA, 30 bp, Artificial Sequence
  Synthetic oligonucleotide
atcgtctgacaagcaatgtggactataatc

SEQ ID NO: 290977 - DNA, 30 bp, Artificial Sequence
  Synthetic oligonucleotide
tcttaataggggcgcctactacgtataatc

SEQ ID NO: 290978 - DNA, 30 bp, Artificial Sequence
  Synthetic oligonucleotide
ggtatgatgaaagtaaagagtattataatc

SEQ ID NO: 290979 - DNA, 30 bp, Artificial Sequence
  Synthetic oligonucleotide
agtctcggtacgggggcaaggccactaatc

SEQ ID NO: 290980 - DNA, 30 bp, Artificial Sequence
  Synthetic oligonucleotide
gttcagggagaccagcacaggtcactaatc

SEQ ID NO: 290981 - DNA, 30 bp, Artificial Sequence
  Synthetic oligonucleotide
ggatatgcgatggatcatagttagctaatc

SEQ ID NO: 290982 - DNA, 30 bp, Artificial Sequence
  Synthetic oligonucleotide
tgctgccggatacagcaacgtcatctaatc

SEQ ID NO: 290983 - DNA, 30 bp, Artificial Sequence
  Synthetic oligonucleotide
acacctagattattaatttgtgctctaatc

SEQ ID NO: 290984 - DNA, 30 bp, Artificial Sequence
  Synthetic oligonucleotide
aagcttcaaggaagcgtcaagcaagtaatc

SEQ ID NO: 290985 - DNA, 30 bp, Artificial Sequence
  Synthetic oligonucleotide
gtacccccgcgaaagtcagactcagtaatc

SEQ ID NO: 290986 - DNA, 30 bp, Artificial Sequence
  Synthetic oligonucleotide
gtccaaggtgcatatcttagcttagtaatc

SEQ ID NO: 290987 - DNA, 30 bp, Artificial Sequence
  Synthetic oligonucleotide
gtgattaagcttgccatgcgtagcgtaatc

SEQ ID NO: 290988 - DNA, 30 bp, Artificial Sequence
  Synthetic oligonucleotide
ccatctttaccggtcatataagttgtaatc

SEQ ID NO: 290989 - DNA, 30 bp, Artificial Sequence
  Synthetic oligonucleotide
tcgataaggacttgtttggagatcttaatc

SEQ ID NO: 290990 - DNA, 30 bp, Artificial Sequence
  Synthetic oligonucleotide
accgaaggtaaataatgttcctagttaatc

SEQ ID NO: 290991 - DNA, 30 bp, Artificial Sequence
  Synthetic oligonucleotide
aatgacgcgcgtgggagatgatggttaatc

SEQ ID NO: 290992 - DNA, 30 bp, Artificial Sequence
  Synthetic oligonucleotide
tcagggctggatctctcggatttgttaatc

SEQ ID NO: 290993 - DNA, 30 bp, Artificial Sequence
  Synthetic oligonucleotide
gaggttccccaacgtgctgtgattttaatc

SEQ ID NO: 290994 - DNA, 30 bp, Artificial Sequence
  Synthetic oligonucleotide
tgagcgacctcggtttggctcaaaaacatc

SEQ ID NO: 290995 - DNA, 30 bp, Artificial Sequence
  Synthetic oligonucleotide
ataaaccagctggctccctagtaaaacatc

SEQ ID NO: 290996 - DNA, 30 bp, Artificial Sequence
  Synthetic oligonucleotide
gctccatattgtattacttatccaaacatc

SEQ ID NO: 290997 - DNA, 30 bp, Artificial Sequence
  Synthetic oligonucleotide
tgcttaaacgtttaacgcttaggaaacatc

SEQ ID NO: 290998 - DNA, 30 bp, Artificial Sequence
  Synthetic oligonucleotide
atcaagtactagttcgggtgagccaacatc

SEQ ID NO: 290999 - DNA, 30 bp, Artificial Sequence
  Synthetic oligonucleotide
aggggtgagtacgcgtgagacgcgaacatc

SEQ ID NO: 291000 - DNA, 30 bp, Artificial Sequence
  Synthetic oligonucleotide
ttcaaaccttttaacacattcctgaacatc

SEQ ID NO: 291001 - DNA, 30 bp, Artificial Sequence
  Synthetic oligonucleotide
acggattaccagtgataatgaattaacatc

SEQ ID NO: 291002 - DNA, 30 bp, Artificial Sequence
  Synthetic oligonucleotide
aatggcagtattccgaatgtaattaacatc

SEQ ID NO: 291003 - DNA, 30 bp, Artificial Sequence
  Synthetic oligonucleotide
aaatccggttagattcactagtaccacatc

SEQ ID NO: 291004 - DNA, 30 bp, Artificial Sequence
  Synthetic oligonucleotide
tgcaagaccatccgacgtacgttccacatc

SEQ ID NO: 291005 - DNA, 30 bp, Artificial Sequence
  Synthetic oligonucleotide
gacataggagttagcagcctcctgcacatc

SEQ ID NO: 291006 - DNA, 30 bp, Artificial Sequence
  Synthetic oligonucleotide
gggtctatgtagttccgggcacgtcacatc

SEQ ID NO: 291007 - DNA, 30 bp, Artificial Sequence
  Synthetic oligonucleotide
cccgaggtgacaatagaggctttagacatc

SEQ ID NO: 291008 - DNA, 30 bp, Artificial Sequence
  Synthetic oligonucleotide
ctgtctttaaatggcctggccgccgacatc

SEQ ID NO: 291009 - DNA, 30 bp, Artificial Sequence
  Synthetic oligonucleotide
cgcagaaaccagcgtaagtgttctgacatc

SEQ ID NO: 291010 - DNA, 30 bp, Artificial Sequence
  Synthetic oligonucleotide
gaaggcctcaccagcaggaagagtgacatc

SEQ ID NO: 291011 - DNA, 30 bp, Artificial Sequence
  Synthetic oligonucleotide
gcttattagttcgtcctggtataatacatc

SEQ ID NO: 291012 - DNA, 30 bp, Artificial Sequence
  Synthetic oligonucleotide
cgaggaactaaagagagttcttagtacatc

SEQ ID NO: 291013 - DNA, 30 bp, Artificial Sequence
  Synthetic oligonucleotide
catgtgatcaggcaagggcccatgtacatc

SEQ ID NO: 291014 - DNA, 30 bp, Artificial Sequence
  Synthetic oligonucleotide
ggcccgatcttgcaggaaaccgattacatc

SEQ ID NO: 291015 - DNA, 30 bp, Artificial Sequence
  Synthetic oligonucleotide
agttcccgtaaggggacagaatgttacatc

SEQ ID NO: 291016 - DNA, 30 bp, Artificial Sequence
  Synthetic oligonucleotide
taagatcatgtaatggaatatgaaaccatc

SEQ ID NO: 291017 - DNA, 30 bp, Artificial Sequence
  Synthetic oligonucleotide
tgtgagagggttacagtcaactacaccatc

SEQ ID NO: 291018 - DNA, 30 bp, Artificial Sequence
  Synthetic oligonucleotide
ggatatagccaaaaaaaatatggcaccatc

SEQ ID NO: 291019 - DNA, 30 bp, Artificial Sequence
  Synthetic oligonucleotide
gacgactcgggattcattcgatgcaccatc

SEQ ID NO: 291020 - DNA, 30 bp, Artificial Sequence
  Synthetic oligonucleotide
gcccgcgatgcggaatcagtttctaccatc

SEQ ID NO: 291021 - DNA, 30 bp, Artificial Sequence
  Synthetic oligonucleotide
gaaagcagaaaggtggtattaattaccatc

SEQ ID NO: 291022 - DNA, 30 bp, Artificial Sequence
  Synthetic oligonucleotide
ctcagcttcgcggataaggacagacccatc

SEQ ID NO: 291023 - DNA, 30 bp, Artificial Sequence
  Synthetic oligonucleotide
ttttcaacacaaacagtcgaaaaagccatc

SEQ ID NO: 291024 - DNA, 30 bp, Artificial Sequence
  Synthetic oligonucleotide
tgagcctcgcagtcgaacatggaagccatc

SEQ ID NO: 291025 - DNA, 30 bp, Artificial Sequence
  Synthetic oligonucleotide
tacaagtagagcatctgttaaacggccatc

SEQ ID NO: 291026 - DNA, 30 bp, Artificial Sequence
  Synthetic oligonucleotide
tatatcgcgtctcatcgccaaaatgccatc

SEQ ID NO: 291027 - DNA, 30 bp, Artificial Sequence
  Synthetic oligonucleotide
aagagcatgattggttttggcattgccatc

SEQ ID NO: 291028 - DNA, 30 bp, Artificial Sequence
  Synthetic oligonucleotide
cgatttgtgcgggtgacgcccatatccatc

SEQ ID NO: 291029 - DNA, 30 bp, Artificial Sequence
  Synthetic oligonucleotide
ttcggaacgcccaaattgtgcatatccatc

SEQ ID NO: 291030 - DNA, 30 bp, Artificial Sequence
  Synthetic oligonucleotide
ggccggtgcatatttacaccatactccatc

SEQ ID NO: 291031 - DNA, 30 bp, Artificial Sequence
  Synthetic oligonucleotide
caactgctagcacactgttgcggctccatc

SEQ ID NO: 291032 - DNA, 30 bp, Artificial Sequence
  Synthetic oligonucleotide
tatcgacaagcctgtgatgaaacaagcatc

SEQ ID NO: 291033 - DNA, 30 bp, Artificial Sequence
  Synthetic oligonucleotide
accaaaaacatacatcattttagaagcatc

SEQ ID NO: 291034 - DNA, 30 bp, Artificial Sequence
  Synthetic oligonucleotide
gctctggtcccgtggtagtaaaccagcatc

SEQ ID NO: 291035 - DNA, 30 bp, Artificial Sequence
  Synthetic oligonucleotide
atcttaacagtactttagtgcggcagcatc

SEQ ID NO: 291036 - DNA, 30 bp, Artificial Sequence
  Synthetic oligonucleotide
acgacaaataaagggctacctcgccgcatc

SEQ ID NO: 291037 - DNA, 30 bp, Artificial Sequence
  Synthetic oligonucleotide
agcctctgccccgctgaatgccagcgcatc

SEQ ID NO: 291038 - DNA, 30 bp, Artificial Sequence
  Synthetic oligonucleotide
ttgtgtcgctatttgatggtctttcgcatc

SEQ ID NO: 291039 - DNA, 30 bp, Artificial Sequence
  Synthetic oligonucleotide
gcttggccggtgtacttagcctaaggcatc

SEQ ID NO: 291040 - DNA, 30 bp, Artificial Sequence
  Synthetic oligonucleotide
gcgctatagcctctaaaggggtgaggcatc

SEQ ID NO: 291041 - DNA, 30 bp, Artificial Sequence
  Synthetic oligonucleotide
ggtggtaactgggatgggggatccggcatc

SEQ ID NO: 291042 - DNA, 30 bp, Artificial Sequence
  Synthetic oligonucleotide
ctaaatgacagacgggtatttgtcggcatc

SEQ ID NO: 291043 - DNA, 30 bp, Artificial Sequence
  Synthetic oligonucleotide
atgcttaggtcagggctggtaaagggcatc

SEQ ID NO: 291044 - DNA, 30 bp, Artificial Sequence
  Synthetic oligonucleotide
ctttctcacaggtctgccatggtgggcatc

SEQ ID NO: 291045 - DNA, 30 bp, Artificial Sequence
  Synthetic oligonucleotide
ggaatctggtgctacgctataaaatgcatc

SEQ ID NO: 291046 - DNA, 30 bp, Artificial Sequence
  Synthetic oligonucleotide
ccaattacgcaataagagtgacaatgcatc

SEQ ID NO: 291047 - DNA, 30 bp, Artificial Sequence
  Synthetic oligonucleotide
aatagatcggactccaaagcgtcatgcatc

SEQ ID NO: 291048 - DNA, 30 bp, Artificial Sequence
  Synthetic oligonucleotide
ccagccatcgtatgcatagtaacctgcatc

SEQ ID NO: 291049 - DNA, 30 bp, Artificial Sequence
  Synthetic oligonucleotide
gggaattaatccgacggggcgggttgcatc

SEQ ID NO: 291050 - DNA, 30 bp, Artificial Sequence
  Synthetic oligonucleotide
tgctcatgcgtgacatacgtcgcaatcatc

SEQ ID NO: 291051 - DNA, 30 bp, Artificial Sequence
  Synthetic oligonucleotide
agagtcctaaagtccgaactgataatcatc

SEQ ID NO: 291052 - DNA, 30 bp, Artificial Sequence
  Synthetic oligonucleotide
agatacccaagcttgctgggcgagatcatc

SEQ ID NO: 291053 - DNA, 30 bp, Artificial Sequence
  Synthetic oligonucleotide
gcggcggagaaatcatttttctggatcatc

SEQ ID NO: 291054 - DNA, 30 bp, Artificial Sequence
  Synthetic oligonucleotide
gtcgtaccaatctctggggaatgtatcatc

SEQ ID NO: 291055 - DNA, 30 bp, Artificial Sequence
  Synthetic oligonucleotide
cgtgcgattgtctggaaattgcttatcatc

SEQ ID NO: 291056 - DNA, 30 bp, Artificial Sequence
  Synthetic oligonucleotide
gaagaaccgtgatactacacatcactcatc

SEQ ID NO: 291057 - DNA, 30 bp, Artificial Sequence
  Synthetic oligonucleotide
aagagagaggttgacgatggatcactcatc

SEQ ID NO: 291058 - DNA, 30 bp, Artificial Sequence
  Synthetic oligonucleotide
cgtaccggtaagcagtttttgttactcatc

SEQ ID NO: 291059 - DNA, 30 bp, Artificial Sequence
  Synthetic oligonucleotide
ctgtccgccgtgcatataacgcccctcatc

SEQ ID NO: 291060 - DNA, 31 bp, Artificial Sequence
  Synthetic oligonucleotide
acttatctatcggtagagttttgtcctcatc

SEQ ID NO: 291061 - DNA, 30 bp, Artificial Sequence
  Synthetic oligonucleotide
gcaaaacaccaaccgcgaatattgctcatc

SEQ ID NO: 291062 - DNA, 30 bp, Artificial Sequence
  Synthetic oligonucleotide
ggatctcgtgaatcgttgatatttctcatc

SEQ ID NO: 291063 - DNA, 30 bp, Artificial Sequence
  Synthetic oligonucleotide
ggtttgaggcaagtaattgagcaagtcatc

SEQ ID NO: 291064 - DNA, 30 bp, Artificial Sequence
  Synthetic oligonucleotide
ttgagagtgggaaatgggacttacgtcatc

SEQ ID NO: 291065 - DNA, 30 bp, Artificial Sequence
  Synthetic oligonucleotide
caataattatacgggtataaacccgtcatc

SEQ ID NO: 291066 - DNA, 30 bp, Artificial Sequence
  Synthetic oligonucleotide
agtgatcctatacgtgtggcgctggtcatc

SEQ ID NO: 291067 - DNA, 30 bp, Artificial Sequence
  Synthetic oligonucleotide
gtaagctttatatgcgtaaatcaattcatc

SEQ ID NO: 291068 - DNA, 30 bp, Artificial Sequence
  Synthetic oligonucleotide
ttcggcatctcttgtagcacaagattcatc

SEQ ID NO: 291069 - DNA, 30 bp, Artificial Sequence
  Synthetic oligonucleotide
gcaacagagccgacagaatggctattcatc

SEQ ID NO: 291070 - DNA, 30 bp, Artificial Sequence
  Synthetic oligonucleotide
taggaacattattgccaccaggccttcatc

SEQ ID NO: 291071 - DNA, 30 bp, Artificial Sequence
  Synthetic oligonucleotide
gtatgcctgctgtagttttacaggttcatc

SEQ ID NO: 291072 - DNA, 30 bp, Artificial Sequence
  Synthetic oligonucleotide
ataatatttgagtactatgccgggttcatc

SEQ ID NO: 291073 - DNA, 30 bp, Artificial Sequence
  Synthetic oligonucleotide
cctgccgtctttcaacgtaagatgttcatc

SEQ ID NO: 291074 - DNA, 30 bp, Artificial Sequence
  Synthetic oligonucleotide
tcaccggcaacacggctctgttatttcatc

SEQ ID NO: 291075 - DNA, 30 bp, Artificial Sequence
  Synthetic oligonucleotide
tggctaacgcggataaatggtactttcatc

SEQ ID NO: 291076 - DNA, 30 bp, Artificial Sequence
  Synthetic oligonucleotide
gcgatggttggaatagacgacaaaaagatc

SEQ ID NO: 291077 - DNA, 30 bp, Artificial Sequence
  Synthetic oligonucleotide
catgaatctaagttggcagaagaaaagatc

SEQ ID NO: 291078 - DNA, 30 bp, Artificial Sequence
  Synthetic oligonucleotide
tcaagtcaagtgtctaacgatttaaagatc

SEQ ID NO: 291079 - DNA, 30 bp, Artificial Sequence
  Synthetic oligonucleotide
agcatgctagggcagcttgcgctgaagatc

SEQ ID NO: 291080 - DNA, 30 bp, Artificial Sequence
  Synthetic oligonucleotide
taaaagtatctacgtcggaaaaataagatc

SEQ ID NO: 291081 - DNA, 30 bp, Artificial Sequence
  Synthetic oligonucleotide
ttgaagcaattagtaaaaataggtaagatc

SEQ ID NO: 291082 - DNA, 30 bp, Artificial Sequence
  Synthetic oligonucleotide
catcctatactgcggctgtcacaacagatc

SEQ ID NO: 291083 - DNA, 30 bp, Artificial Sequence
  Synthetic oligonucleotide
caaggctctgagtcacaagatcaacagatc

SEQ ID NO: 291084 - DNA, 30 bp, Artificial Sequence
  Synthetic oligonucleotide
aacaatcaattatatcttcgagaccagatc

SEQ ID NO: 291085 - DNA, 30 bp, Artificial Sequence
  Synthetic oligonucleotide
ctcgggactcggcttactcaagcccagatc

SEQ ID NO: 291086 - DNA, 30 bp, Artificial Sequence
  Synthetic oligonucleotide
gtggatctcgctgtatggaagtcccagatc

SEQ ID NO: 291087 - DNA, 30 bp, Artificial Sequence
  Synthetic oligonucleotide
gtcaataaagctctctacgtggtccagatc

SEQ ID NO: 291088 - DNA, 30 bp, Artificial Sequence
  Synthetic oligonucleotide
tatgaagccacgcgggtcttaacgcagatc

SEQ ID NO: 291089 - DNA, 30 bp, Artificial Sequence
  Synthetic oligonucleotide
ggtgcaattgcggcttccgcccaagagatc

SEQ ID NO: 291090 - DNA, 30 bp, Artificial Sequence
  Synthetic oligonucleotide
gtacgcagtctgtctaccgagatagagatc

SEQ ID NO: 291091 - DNA, 30 bp, Artificial Sequence
  Synthetic oligonucleotide
gctacaagcaagtcgggttaacgcgagatc

SEQ ID NO: 291092 - DNA, 30 bp, Artificial Sequence
  Synthetic oligonucleotide
tagaggccactaagtcctaaagaggagatc

SEQ ID NO: 291093 - DNA, 30 bp, Artificial Sequence
  Synthetic oligonucleotide
gctgagaagtccgtataggttgatgagatc

SEQ ID NO: 291094 - DNA, 30 bp, Artificial Sequence
  Synthetic oligonucleotide
agtgatgccattaggatattgtatgagatc

SEQ ID NO: 291095 - DNA, 30 bp, Artificial Sequence
  Synthetic oligonucleotide
gcaccaatctatgcaagtccagctgagatc

SEQ ID NO: 291096 - DNA, 30 bp, Artificial Sequence
  Synthetic oligonucleotide
aaaaggcaggggtaatcctaacaatagatc

SEQ ID NO: 291097 - DNA, 30 bp, Artificial Sequence
  Synthetic oligonucleotide
tcaccagcgatgcgagactagggatagatc

SEQ ID NO: 291098 - DNA, 30 bp, Artificial Sequence
  Synthetic oligonucleotide
ggttaagggtagtttacggagatctagatc

SEQ ID NO: 291099 - DNA, 30 bp, Artificial Sequence
  Synthetic oligonucleotide
ctcgtaacaaatagaccttcgttctagatc

SEQ ID NO: 291100 - DNA, 30 bp, Artificial Sequence
  Synthetic oligonucleotide
aagtaaatgcgggtggcaccgtcgtagatc

SEQ ID NO: 291101 - DNA, 30 bp, Artificial Sequence
  Synthetic oligonucleotide
caggcagtctaacgcggagctaggtagatc

SEQ ID NO: 291102 - DNA, 30 bp, Artificial Sequence
  Synthetic oligonucleotide
ggcgccccctcagttcaaaaacggtagatc

SEQ ID NO: 291103 - DNA, 30 bp, Artificial Sequence
  Synthetic oligonucleotide
atgttggaaggcctttactcgagttagatc

SEQ ID NO: 291104 - DNA, 30 bp, Artificial Sequence
  Synthetic oligonucleotide
cccttcttcatacaacattgtagttagatc

SEQ ID NO: 291105 - DNA, 30 bp, Artificial Sequence
  Synthetic oligonucleotide
attcacatctggccgagaagtcgttagatc

SEQ ID NO: 291106 - DNA, 30 bp, Artificial Sequence
  Synthetic oligonucleotide
acctcggggcggtcactatgggtttagatc

SEQ ID NO: 291107 - DNA, 30 bp, Artificial Sequence
  Synthetic oligonucleotide
ggggacacgatctaagtcggtagcacgatc

SEQ ID NO: 291108 - DNA, 30 bp, Artificial Sequence
  Synthetic oligonucleotide
ttaaaacccgggctcgtcttaaagacgatc

SEQ ID NO: 291109 - DNA, 30 bp, Artificial Sequence
  Synthetic oligonucleotide
ggtgcctactgctgagtgtgaatgacgatc

SEQ ID NO: 291110 - DNA, 30 bp, Artificial Sequence
  Synthetic oligonucleotide
ccttagatacttatgggggcgaatacgatc

SEQ ID NO: 291111 - DNA, 30 bp, Artificial Sequence
  Synthetic oligonucleotide
tccgggtaaagttttgaaatccctacgatc

SEQ ID NO: 291112 - DNA, 30 bp, Artificial Sequence
  Synthetic oligonucleotide
cgaggaaaccagcatcgggtcgcaccgatc

SEQ ID NO: 291113 - DNA, 30 bp, Artificial Sequence
  Synthetic oligonucleotide
ttagcggcatgttgcctgaatggaccgatc

SEQ ID NO: 291114 - DNA, 30 bp, Artificial Sequence
  Synthetic oligonucleotide
tgggacattaatcgcagggtcctaccgatc

SEQ ID NO: 291115 - DNA, 30 bp, Artificial Sequence
  Synthetic oligonucleotide
gaagactaacagcggtccttgcgagcgatc

SEQ ID NO: 291116 - DNA, 29 bp, Artificial Sequence
  Synthetic oligonucleotide
ttatgagtcacgcactctgtatagcgatc

SEQ ID NO: 291117 - DNA, 30 bp, Artificial Sequence
  Synthetic oligonucleotide
gttatgaatagcaggatccagcgggcgatc

SEQ ID NO: 291118 - DNA, 30 bp, Artificial Sequence
  Synthetic oligonucleotide
ggctagcgtcggaattcttgtttggcgatc

SEQ ID NO: 291119 - DNA, 30 bp, Artificial Sequence
  Synthetic oligonucleotide
gacatccagaacttgagttgtgatgcgatc

SEQ ID NO: 291120 - DNA, 30 bp, Artificial Sequence
  Synthetic oligonucleotide
tcattgcacaggccgcgggcttatgcgatc

SEQ ID NO: 291121 - DNA, 30 bp, Artificial Sequence
  Synthetic oligonucleotide
gatagggatacctgcgaaattcctgcgatc

SEQ ID NO: 291122 - DNA, 30 bp, Artificial Sequence
  Synthetic oligonucleotide
tagtcaggtaaagcactgatcgactcgatc

SEQ ID NO: 291123 - DNA, 30 bp, Artificial Sequence
  Synthetic oligonucleotide
tacaccggccagagggtgcagtgctcgatc

SEQ ID NO: 291124 - DNA, 30 bp, Artificial Sequence
  Synthetic oligonucleotide
ccttcaagactataacaacccgagtcgatc

SEQ ID NO: 291125 - DNA, 30 bp, Artificial Sequence
  Synthetic oligonucleotide
ccgatgtcactcttattgctaatttcgatc

SEQ ID NO: 291126 - DNA, 30 bp, Artificial Sequence
  Synthetic oligonucleotide
ctgcctaagcgcggcgatatatcaaggatc

SEQ ID NO: 291127 - DNA, 30 bp, Artificial Sequence
  Synthetic oligonucleotide
gcagggctaacgtcctatactctaaggatc

SEQ ID NO: 291128 - DNA, 30 bp, Artificial Sequence
  Synthetic oligonucleotide
aacactccgcagtagggcgtcgagaggatc

SEQ ID NO: 291129 - DNA, 30 bp, Artificial Sequence
  Synthetic oligonucleotide
acgacgagtatactccgaaactctaggatc

SEQ ID NO: 291130 - DNA, 30 bp, Artificial Sequence
  Synthetic oligonucleotide
tcatggtaacagaggcttgcggttaggatc

SEQ ID NO: 291131 - DNA, 30 bp, Artificial Sequence
  Synthetic oligonucleotide
gttggtaagccggatcacaactttaggatc

SEQ ID NO: 291132 - DNA, 30 bp, Artificial Sequence
  Synthetic oligonucleotide
catcgatttcctttcgagtacgtacggatc

SEQ ID NO: 291133 - DNA, 30 bp, Artificial Sequence
  Synthetic oligonucleotide
aaacggttgaaggcatggggtgcccggatc

SEQ ID NO: 291134 - DNA, 30 bp, Artificial Sequence
  Synthetic oligonucleotide
cttgttgccctggccctaaaggtccggatc

SEQ ID NO: 291135 - DNA, 30 bp, Artificial Sequence
  Synthetic oligonucleotide
gggcgtgccagtgaacgcacgttccggatc

SEQ ID NO: 291136 - DNA, 30 bp, Artificial Sequence
  Synthetic oligonucleotide
ataatggacatatgaagactccagcggatc

SEQ ID NO: 291137 - DNA, 30 bp, Artificial Sequence
  Synthetic oligonucleotide
gtcgccaatcagccggcgtgggtgcggatc

SEQ ID NO: 291138 - DNA, 30 bp, Artificial Sequence
  Synthetic oligonucleotide
taacttcggattgggtgcactagtcggatc

SEQ ID NO: 291139 - DNA, 30 bp, Artificial Sequence
  Synthetic oligonucleotide
ctgcgtgtgcaggtaaacgcaaccgggatc

SEQ ID NO: 291140 - DNA, 30 bp, Artificial Sequence
  Synthetic oligonucleotide
ctgtgggatctgccctgattattcgggatc

SEQ ID NO: 291141 - DNA, 30 bp, Artificial Sequence
  Synthetic oligonucleotide
ttggggagtacagcttcatggaaggggatc

SEQ ID NO: 291142 - DNA, 30 bp, Artificial Sequence
  Synthetic oligonucleotide
gggtaggatacgaaccaatgtgaggggatc

SEQ ID NO: 291143 - DNA, 30 bp, Artificial Sequence
  Synthetic oligonucleotide
cttgtctgtagcttaacagtgcactggatc

SEQ ID NO: 291144 - DNA, 30 bp, Artificial Sequence
  Synthetic oligonucleotide
gtaagcatagtgcaaaattattgctggatc

SEQ ID NO: 291145 - DNA, 30 bp, Artificial Sequence
  Synthetic oligonucleotide
ggtctcttatgagagtgatgaaggtggatc

SEQ ID NO: 291146 - DNA, 30 bp, Artificial Sequence
  Synthetic oligonucleotide
ggcgctttgtggaacaaggaacggtggatc

SEQ ID NO: 291147 - DNA, 30 bp, Artificial Sequence
  Synthetic oligonucleotide
gacgaagtctgtctcttgtcactgtggatc

SEQ ID NO: 291148 - DNA, 30 bp, Artificial Sequence
  Synthetic oligonucleotide
catgcatcttagtggtgatgcatttggatc

SEQ ID NO: 291149 - DNA, 30 bp, Artificial Sequence
  Synthetic oligonucleotide
agagtgttactgtacgggttttaaatgatc

SEQ ID NO: 291150 - DNA, 30 bp, Artificial Sequence
  Synthetic oligonucleotide
ctttcggaatctttaatgcttgtgatgatc

SEQ ID NO: 291151 - DNA, 30 bp, Artificial Sequence
  Synthetic oligonucleotide
gggggccttaaatggccgtctgatatgatc

SEQ ID NO: 291152 - DNA, 30 bp, Artificial Sequence
  Synthetic oligonucleotide
aggcgtacagagtgcggttaaacactgatc

SEQ ID NO: 291153 - DNA, 30 bp, Artificial Sequence
  Synthetic oligonucleotide
gcttaagtgtatgttatctcagcactgatc

SEQ ID NO: 291154 - DNA, 30 bp, Artificial Sequence
  Synthetic oligonucleotide
tgcgtatgtaggatgttagttcgactgatc

SEQ ID NO: 291155 - DNA, 30 bp, Artificial Sequence
  Synthetic oligonucleotide
aactacgagaagatatgtccggtactgatc

SEQ ID NO: 291156 - DNA, 30 bp, Artificial Sequence
  Synthetic oligonucleotide
tggcgaagggaattcatatgagccctgatc

SEQ ID NO: 291157 - DNA, 30 bp, Artificial Sequence
  Synthetic oligonucleotide
ctccgcaagaaataggatgaaagcctgatc

SEQ ID NO: 291158 - DNA, 30 bp, Artificial Sequence
  Synthetic oligonucleotide
gaagcacacatacccagcttgagcctgatc

SEQ ID NO: 291159 - DNA, 30 bp, Artificial Sequence
  Synthetic oligonucleotide
ctccgtattgacggtccgaccggcctgatc

SEQ ID NO: 291160 - DNA, 30 bp, Artificial Sequence
  Synthetic oligonucleotide
ggttacacatgagcaagccgtccgctgatc

SEQ ID NO: 291161 - DNA, 30 bp, Artificial Sequence
  Synthetic oligonucleotide
catgccgcactgccattagccaggctgatc

SEQ ID NO: 291162 - DNA, 30 bp, Artificial Sequence
  Synthetic oligonucleotide
aggtcctacattccagctcggatagtgatc

SEQ ID NO: 291163 - DNA, 30 bp, Artificial Sequence
  Synthetic oligonucleotide
catcgagccctattataacgcgccgtgatc

SEQ ID NO: 291164 - DNA, 30 bp, Artificial Sequence
  Synthetic oligonucleotide
acgattattgaacggcccgtcttcgtgatc

SEQ ID NO: 291165 - DNA, 30 bp, Artificial Sequence
  Synthetic oligonucleotide
cagctgaggcttacaggcgcaggggtgatc

SEQ ID NO: 291166 - DNA, 30 bp, Artificial Sequence
  Synthetic oligonucleotide
ctatctctccagcgaaggcagctggtgatc

SEQ ID NO: 291167 - DNA, 30 bp, Artificial Sequence
  Synthetic oligonucleotide
gggatgtccaacgcacgtccgttggtgatc

SEQ ID NO: 291168 - DNA, 30 bp, Artificial Sequence
  Synthetic oligonucleotide
tcgtctgggtgtcaagggtatccattgatc

SEQ ID NO: 291169 - DNA, 30 bp, Artificial Sequence
  Synthetic oligonucleotide
aacagacagggtgtcgataaccgattgatc

SEQ ID NO: 291170 - DNA, 30 bp, Artificial Sequence
  Synthetic oligonucleotide
tggaagcaagtgccagggcgtcacttgatc

SEQ ID NO: 291171 - DNA, 30 bp, Artificial Sequence
  Synthetic oligonucleotide
gctctattatcagccagggtacggttgatc

SEQ ID NO: 291172 - DNA, 30 bp, Artificial Sequence
  Synthetic oligonucleotide
ctcaagggacgctagatgggtgggttgatc

SEQ ID NO: 291173 - DNA, 30 bp, Artificial Sequence
  Synthetic oligonucleotide
tgtagctgtccgcctacttggactttgatc

SEQ ID NO: 291174 - DNA, 30 bp, Artificial Sequence
  Synthetic oligonucleotide
agtacggaccatgccaccgttcctttgatc

SEQ ID NO: 291175 - DNA, 30 bp, Artificial Sequence
  Synthetic oligonucleotide
attcaaggtttcgaggcgtaaaagcatatc

SEQ ID NO: 291176 - DNA, 30 bp, Artificial Sequence
  Synthetic oligonucleotide
gggacgttagtaggaggtaacaggcatatc

SEQ ID NO: 291177 - DNA, 30 bp, Artificial Sequence
  Synthetic oligonucleotide
ggatgtctaccaatatcacggactcatatc

SEQ ID NO: 291178 - DNA, 30 bp, Artificial Sequence
  Synthetic oligonucleotide
ggtcccatagagttccatacatgcgatatc

SEQ ID NO: 291179 - DNA, 30 bp, Artificial Sequence
  Synthetic oligonucleotide
ttgggactagtacgctcttatctcgatatc

SEQ ID NO: 291180 - DNA, 30 bp, Artificial Sequence
  Synthetic oligonucleotide
gtcgggtaggcacatagaaggacggatatc

SEQ ID NO: 291181 - DNA, 30 bp, Artificial Sequence
  Synthetic oligonucleotide
cctataaatcctctgataatggtggatatc

SEQ ID NO: 291182 - DNA, 30 bp, Artificial Sequence
  Synthetic oligonucleotide
cgctctaagacatcaactaaacatgatatc

SEQ ID NO: 291183 - DNA, 30 bp, Artificial Sequence
  Synthetic oligonucleotide
tgtctcggtgggagtaacacgcatgatatc

SEQ ID NO: 291184 - DNA, 30 bp, Artificial Sequence
  Synthetic oligonucleotide
tcacaaaagttgcgggctccgaaatatatc

SEQ ID NO: 291185 - DNA, 30 bp, Artificial Sequence
  Synthetic oligonucleotide
ccgtccatgagacttctagggccatatatc

SEQ ID NO: 291186 - DNA, 30 bp, Artificial Sequence
  Synthetic oligonucleotide
acgattgctggaccgctccattcatatatc

SEQ ID NO: 291187 - DNA, 30 bp, Artificial Sequence
  Synthetic oligonucleotide
aacaaaatcgactccagtgcaggatatatc

SEQ ID NO: 291188 - DNA, 30 bp, Artificial Sequence
  Synthetic oligonucleotide
aaagagcaatccgatttgtagaactatatc

SEQ ID NO: 291189 - DNA, 30 bp, Artificial Sequence
  Synthetic oligonucleotide
atgattatgcgaacttagctcgagtatatc

SEQ ID NO: 291190 - DNA, 30 bp, Artificial Sequence
  Synthetic oligonucleotide
cgcccgtataggccttgtcgcttgtatatc

SEQ ID NO: 291191 - DNA, 30 bp, Artificial Sequence
  Synthetic oligonucleotide
caaggcatcggatgcgcgaattagactatc

SEQ ID NO: 291192 - DNA, 30 bp, Artificial Sequence
  Synthetic oligonucleotide
aactcatttgaaaactatccttctactatc

SEQ ID NO: 291193 - DNA, 30 bp, Artificial Sequence
  Synthetic oligonucleotide
acgggtgaacatgcccccccaggtactatc

SEQ ID NO: 291194 - DNA, 31 bp, Artificial Sequence
  Synthetic oligonucleotide
gatggcctggtaacgtatacgtagacctatc

SEQ ID NO: 291195 - DNA, 30 bp, Artificial Sequence
  Synthetic oligonucleotide
acttacaccgtcaaggtagtctggcctatc

SEQ ID NO: 291196 - DNA, 29 bp, Artificial Sequence
  Synthetic oligonucleotide
cctcggctattagtgttggtcttcctatc

SEQ ID NO: 291197 - DNA, 30 bp, Artificial Sequence
  Synthetic oligonucleotide
actggcgacggtctcttatgccgagctatc

SEQ ID NO: 291198 - DNA, 30 bp, Artificial Sequence
  Synthetic oligonucleotide
gtactattaggcggcaccggcaccgctatc

SEQ ID NO: 291199 - DNA, 30 bp, Artificial Sequence
  Synthetic oligonucleotide
gtgaacagacgcacgagctaaaaggctatc

SEQ ID NO: 291200 - DNA, 30 bp, Artificial Sequence
  Synthetic oligonucleotide
gggctccaatcacaccgatgagatgctatc

SEQ ID NO: 291201 - DNA, 30 bp, Artificial Sequence
  Synthetic oligonucleotide
tcatccacaaacgctaaggcttctgctatc

SEQ ID NO: 291202 - DNA, 30 bp, Artificial Sequence
  Synthetic oligonucleotide
gcccatgactcacatggcctacgtgctatc

SEQ ID NO: 291203 - DNA, 30 bp, Artificial Sequence
  Synthetic oligonucleotide
tcgacgtatgctgcgggcttagactctatc

SEQ ID NO: 291204 - DNA, 30 bp, Artificial Sequence
  Synthetic oligonucleotide
aggtggctggtcaggagaacattgtctatc

SEQ ID NO: 291205 - DNA, 30 bp, Artificial Sequence
  Synthetic oligonucleotide
caatatagagatgtgtgatttcgaagtatc

SEQ ID NO: 291206 - DNA, 30 bp, Artificial Sequence
  Synthetic oligonucleotide
acaggccatccgcccattacttatagtatc

SEQ ID NO: 291207 - DNA, 30 bp, Artificial Sequence
  Synthetic oligonucleotide
tgagtaggagatgaccccgattgtagtatc

SEQ ID NO: 291208 - DNA, 30 bp, Artificial Sequence
  Synthetic oligonucleotide
tttaaacacaagtattgcaagccacgtatc

SEQ ID NO: 291209 - DNA, 29 bp, Artificial Sequence
  Synthetic oligonucleotide
attgtgcgtggtcttctggaaagcgtatc

SEQ ID NO: 291210 - DNA, 30 bp, Artificial Sequence
  Synthetic oligonucleotide
aaaagagaatgaattttaacccagcgtatc

SEQ ID NO: 291211 - DNA, 30 bp, Artificial Sequence
  Synthetic oligonucleotide
aggtcgcggcgcaaaaacgactagcgtatc

SEQ ID NO: 291212 - DNA, 30 bp, Artificial Sequence
  Synthetic oligonucleotide
gagattggaaccccggtgtgtttgcgtatc

SEQ ID NO: 291213 - DNA, 30 bp, Artificial Sequence
  Synthetic oligonucleotide
ctaagtacgcattttccgcttcctcgtatc

SEQ ID NO: 291214 - DNA, 30 bp, Artificial Sequence
  Synthetic oligonucleotide
caccaggtttcggtcctgtaaggcggtatc

SEQ ID NO: 291215 - DNA, 30 bp, Artificial Sequence
  Synthetic oligonucleotide
cagggtccgtacgatcaagcactgggtatc

SEQ ID NO: 291216 - DNA, 30 bp, Artificial Sequence
  Synthetic oligonucleotide
taagtatttggccggagtggcactggtatc

SEQ ID NO: 291217 - DNA, 30 bp, Artificial Sequence
  Synthetic oligonucleotide
cgaggtaatgtcgggactctaccatgtatc

SEQ ID NO: 291218 - DNA, 30 bp, Artificial Sequence
  Synthetic oligonucleotide
ataatgtaacccctgagaagggcatgtatc

SEQ ID NO: 291219 - DNA, 30 bp, Artificial Sequence
  Synthetic oligonucleotide
taacgcaaggttaccactgggatctgtatc

SEQ ID NO: 291220 - DNA, 30 bp, Artificial Sequence
  Synthetic oligonucleotide
atgtcacaaagcgaaaggcgtatctgtatc

SEQ ID NO: 291221 - DNA, 30 bp, Artificial Sequence
  Synthetic oligonucleotide
ccattacatgttatcatggtgcagtgtatc

SEQ ID NO: 291222 - DNA, 30 bp, Artificial Sequence
  Synthetic oligonucleotide
aaccggcggcgccgtttgggtgggtgtatc

SEQ ID NO: 291223 - DNA, 30 bp, Artificial Sequence
  Synthetic oligonucleotide
gtggtaaacttggatgtgagagattgtatc

SEQ ID NO: 291224 - DNA, 30 bp, Artificial Sequence
  Synthetic oligonucleotide
ccatatgtttcaaaaagtatagattgtatc

SEQ ID NO: 291225 - DNA, 30 bp, Artificial Sequence
  Synthetic oligonucleotide
gtgaagttgccaaggaatatcagttgtatc

SEQ ID NO: 291226 - DNA, 30 bp, Artificial Sequence
  Synthetic oligonucleotide
caacgtgttgactccgacgcggaaattatc

SEQ ID NO: 291227 - DNA, 30 bp, Artificial Sequence
  Synthetic oligonucleotide
atgagccacaaaagcggcaggtaaattatc

SEQ ID NO: 291228 - DNA, 30 bp, Artificial Sequence
  Synthetic oligonucleotide
tcaggtaagaagcttggaacttaaattatc

SEQ ID NO: 291229 - DNA, 30 bp, Artificial Sequence
  Synthetic oligonucleotide
aactagaggcgccaataccagggaattatc

SEQ ID NO: 291230 - DNA, 30 bp, Artificial Sequence
  Synthetic oligonucleotide
tgtgctggagtaccctcatcattaattatc

SEQ ID NO: 291231 - DNA, 30 bp, Artificial Sequence
  Synthetic oligonucleotide
tgcacggaaaatatcgtaaattcgattatc

SEQ ID NO: 291232 - DNA, 30 bp, Artificial Sequence
  Synthetic oligonucleotide
aacacatcgaaaagtaggtaaaggattatc

SEQ ID NO: 291233 - DNA, 30 bp, Artificial Sequence
  Synthetic oligonucleotide
gcacagggtctcaaaatgtgagggattatc

SEQ ID NO: 291234 - DNA, 30 bp, Artificial Sequence
  Synthetic oligonucleotide
gcgacctgcatcttgaacagtatgattatc

SEQ ID NO: 291235 - DNA, 30 bp, Artificial Sequence
  Synthetic oligonucleotide
ttggacggttcacccagggtgactattatc

SEQ ID NO: 291236 - DNA, 30 bp, Artificial Sequence
  Synthetic oligonucleotide
tgtgagtgccttcgcatgatagaacttatc

SEQ ID NO: 291237 - DNA, 30 bp, Artificial Sequence
  Synthetic oligonucleotide
gaactctatcccgataacccaatacttatc

SEQ ID NO: 291238 - DNA, 30 bp, Artificial Sequence
  Synthetic oligonucleotide
accgttcctgtggcacagtgttaccttatc

SEQ ID NO: 291239 - DNA, 30 bp, Artificial Sequence
  Synthetic oligonucleotide
tgaactgctaaccttcgatctgcccttatc

SEQ ID NO: 291240 - DNA, 30 bp, Artificial Sequence
  Synthetic oligonucleotide
gatcaacatgatagaaccagttggcttatc

SEQ ID NO: 291241 - DNA, 30 bp, Artificial Sequence
  Synthetic oligonucleotide
tgggcccagccagtgaggaacatgcttatc

SEQ ID NO: 291242 - DNA, 30 bp, Artificial Sequence
  Synthetic oligonucleotide
agtgtcccgggagagcaaagaaccgttatc

SEQ ID NO: 291243 - DNA, 30 bp, Artificial Sequence
  Synthetic oligonucleotide
gccgtgcttcttgttgtaatcatcgttatc

SEQ ID NO: 291244 - DNA, 30 bp, Artificial Sequence
  Synthetic oligonucleotide
ctcgcaccgagaggctaatcataggttatc

SEQ ID NO: 291245 - DNA, 30 bp, Artificial Sequence
  Synthetic oligonucleotide
tggtagacaacgctgataacgcgggttatc

SEQ ID NO: 291246 - DNA, 30 bp, Artificial Sequence
  Synthetic oligonucleotide
gtccagacagtgattatggccggtgttatc

SEQ ID NO: 291247 - DNA, 30 bp, Artificial Sequence
  Synthetic oligonucleotide
acgatcaatggaggttgtcgtccatttatc

SEQ ID NO: 291248 - DNA, 30 bp, Artificial Sequence
  Synthetic oligonucleotide
taagcaacatcaaaggcttaagtatttatc

SEQ ID NO: 291249 - DNA, 30 bp, Artificial Sequence
  Synthetic oligonucleotide
tacagcaagtcagggggatctgactttatc

SEQ ID NO: 291250 - DNA, 30 bp, Artificial Sequence
  Synthetic oligonucleotide
attaggtgccgtaatccaatgggctttatc

SEQ ID NO: 291251 - DNA, 30 bp, Artificial Sequence
  Synthetic oligonucleotide
aagcacaccccaggcagggaccggtttatc

SEQ ID NO: 291252 - DNA, 30 bp, Artificial Sequence
  Synthetic oligonucleotide
gcggagggcctgtcaaggggtgggtttatc

SEQ ID NO: 291253 - DNA, 30 bp, Artificial Sequence
  Synthetic oligonucleotide
gtaccggttggtgaggaataagtttttatc

SEQ ID NO: 291254 - DNA, 30 bp, Artificial Sequence
  Synthetic oligonucleotide
ctcactgtaggcatgaacaatgtttttatc

SEQ ID NO: 291255 - DNA, 30 bp, Artificial Sequence
  Synthetic oligonucleotide
ttctcggggggtatagtaaacagaaaactc

SEQ ID NO: 291256 - DNA, 30 bp, Artificial Sequence
  Synthetic oligonucleotide
gggctcgacagctcaatatgcataaaactc

SEQ ID NO: 291257 - DNA, 30 bp, Artificial Sequence
  Synthetic oligonucleotide
cgcataaaagccttgtagtggataaaactc

SEQ ID NO: 291258 - DNA, 30 bp, Artificial Sequence
  Synthetic oligonucleotide
aatggtcagatgtattctggattaaaactc

SEQ ID NO: 291259 - DNA, 30 bp, Artificial Sequence
  Synthetic oligonucleotide
acataattcttatcatccaggggcaaactc

SEQ ID NO: 291260 - DNA, 30 bp, Artificial Sequence
  Synthetic oligonucleotide
tttacgggtctcgtactgtccctcaaactc

SEQ ID NO: 291261 - DNA, 30 bp, Artificial Sequence
  Synthetic oligonucleotide
tagtcaacatatacttacgctgagaaactc

SEQ ID NO: 291262 - DNA, 30 bp, Artificial Sequence
  Synthetic oligonucleotide
tggtcgataggggatcgtgagcggaaactc

SEQ ID NO: 291263 - DNA, 30 bp, Artificial Sequence
  Synthetic oligonucleotide
acctagatctaccgtgcatgggggaaactc

SEQ ID NO: 291264 - DNA, 30 bp, Artificial Sequence
  Synthetic oligonucleotide
taaatttcacagcatggtgttcaacaactc

SEQ ID NO: 291265 - DNA, 30 bp, Artificial Sequence
  Synthetic oligonucleotide
gctttagtttaaaatccaaagatacaactc

SEQ ID NO: 291266 - DNA, 30 bp, Artificial Sequence
  Synthetic oligonucleotide
cgcttaaaatattgccgcatactccaactc

SEQ ID NO: 291267 - DNA, 30 bp, Artificial Sequence
  Synthetic oligonucleotide
acattgtgggtctgggtaaagtttcaactc

SEQ ID NO: 291268 - DNA, 30 bp, Artificial Sequence
  Synthetic oligonucleotide
caaaaacgagctgcggataggagagaactc

SEQ ID NO: 291269 - DNA, 30 bp, Artificial Sequence
  Synthetic oligonucleotide
ttgctcctcacccgtgaaggtcccgaactc

SEQ ID NO: 291270 - DNA, 30 bp, Artificial Sequence
  Synthetic oligonucleotide
agatctgtttgtagtaatcagctcgaactc

SEQ ID NO: 291271 - DNA, 30 bp, Artificial Sequence
  Synthetic oligonucleotide
gctaggcaaaatcacagagagatataactc

SEQ ID NO: 291272 - DNA, 30 bp, Artificial Sequence
  Synthetic oligonucleotide
accacgttgtcgtcgtctttagtataactc

SEQ ID NO: 291273 - DNA, 30 bp, Artificial Sequence
  Synthetic oligonucleotide
cggaaatatgcgagggtcatgagctaactc

SEQ ID NO: 291274 - DNA, 30 bp, Artificial Sequence
  Synthetic oligonucleotide
tgcaaacggtcgatagctgctgtgtaactc

SEQ ID NO: 291275 - DNA, 30 bp, Artificial Sequence
  Synthetic oligonucleotide
atagcgatacgagaaagcattacttaactc

SEQ ID NO: 291276 - DNA, 30 bp, Artificial Sequence
  Synthetic oligonucleotide
ccgttctatgtccatggccccggcccactc

SEQ ID NO: 291277 - DNA, 30 bp, Artificial Sequence
  Synthetic oligonucleotide
ctatcgattccattaaggtcagtgccactc

SEQ ID NO: 291278 - DNA, 30 bp, Artificial Sequence
  Synthetic oligonucleotide
tgctgaatcaagtggaaatttttagcactc

SEQ ID NO: 291279 - DNA, 30 bp, Artificial Sequence
  Synthetic oligonucleotide
aacagtttcccatagatgcgctccgcactc

SEQ ID NO: 291280 - DNA, 30 bp, Artificial Sequence
  Synthetic oligonucleotide
cataaggcaaggaggggtgagctggcactc

SEQ ID NO: 291281 - DNA, 30 bp, Artificial Sequence
  Synthetic oligonucleotide
gagggggaaattcaggggtcagtggcactc

SEQ ID NO: 291282 - DNA, 30 bp, Artificial Sequence
  Synthetic oligonucleotide
acgagcgggctaccgccatgggctgcactc

SEQ ID NO: 291283 - DNA, 30 bp, Artificial Sequence
  Synthetic oligonucleotide
gggcaatcctttcagggataaggtgcactc

SEQ ID NO: 291284 - DNA, 30 bp, Artificial Sequence
  Synthetic oligonucleotide
tccgattattatttctactaaccatcactc

SEQ ID NO: 291285 - DNA, 30 bp, Artificial Sequence
  Synthetic oligonucleotide
atcaaggaagcagctgatgatacctcactc

SEQ ID NO: 291286 - DNA, 30 bp, Artificial Sequence
  Synthetic oligonucleotide
gcattcatgcgtctcctcggcggctcactc

SEQ ID NO: 291287 - DNA, 30 bp, Artificial Sequence
  Synthetic oligonucleotide
tcaaccgtcccgtctaatcatttgtcactc

SEQ ID NO: 291288 - DNA, 30 bp, Artificial Sequence
  Synthetic oligonucleotide
acacctcttatccaaagacttcattcactc

SEQ ID NO: 291289 - DNA, 30 bp, Artificial Sequence
  Synthetic oligonucleotide
gcaggtaccaatatgaatgggacttcactc

SEQ ID NO: 291290 - DNA, 30 bp, Artificial Sequence
  Synthetic oligonucleotide
gcacttcgaacgaaaaacggatgttcactc

SEQ ID NO: 291291 - DNA, 30 bp, Artificial Sequence
  Synthetic oligonucleotide
agtcagtctttcgaccactgttgaagactc

SEQ ID NO: 291292 - DNA, 30 bp, Artificial Sequence
  Synthetic oligonucleotide
gctgcctacagacctaatggatacagactc

SEQ ID NO: 291293 - DNA, 30 bp, Artificial Sequence
  Synthetic oligonucleotide
cattatagtaaaataatgtcggcacgactc

SEQ ID NO: 291294 - DNA, 30 bp, Artificial Sequence
  Synthetic oligonucleotide
gagacactgctctaagtttagcgacgactc

SEQ ID NO: 291295 - DNA, 31 bp, Artificial Sequence
  Synthetic oligonucleotide
ccaagcgcccgcagaggatcgacagcgactc

SEQ ID NO: 291296 - DNA, 30 bp, Artificial Sequence
  Synthetic oligonucleotide
ggtagtattaaagccgttaactggcgactc

SEQ ID NO: 291297 - DNA, 30 bp, Artificial Sequence
  Synthetic oligonucleotide
agatcagagtgtatgcaatccagcggactc

SEQ ID NO: 291298 - DNA, 30 bp, Artificial Sequence
  Synthetic oligonucleotide
gagtcgttgagcgtggagccccgcggactc

SEQ ID NO: 291299 - DNA, 30 bp, Artificial Sequence
  Synthetic oligonucleotide
ttattaaaaacattcccatacccgggactc

SEQ ID NO: 291300 - DNA, 30 bp, Artificial Sequence
  Synthetic oligonucleotide
acttaacgccggttggctcgtactggactc

SEQ ID NO: 291301 - DNA, 30 bp, Artificial Sequence
  Synthetic oligonucleotide
aaaaggatttgagacactaaggtgtgactc

SEQ ID NO: 291302 - DNA, 30 bp, Artificial Sequence
  Synthetic oligonucleotide
ccactagatgccactacaggcatttgactc

SEQ ID NO: 291303 - DNA, 30 bp, Artificial Sequence
  Synthetic oligonucleotide
agcaaaaatatgggattcgaatgcatactc

SEQ ID NO: 291304 - DNA, 30 bp, Artificial Sequence
  Synthetic oligonucleotide
aacgtgtgatccacacgtacttggatactc

SEQ ID NO: 291305 - DNA, 30 bp, Artificial Sequence
  Synthetic oligonucleotide
ctgactcgagcacatagaggccctatactc

SEQ ID NO: 291306 - DNA, 30 bp, Artificial Sequence
  Synthetic oligonucleotide
tgatcctgtactctcgtaaagcgtatactc

SEQ ID NO: 291307 - DNA, 30 bp, Artificial Sequence
  Synthetic oligonucleotide
ttgaatagggcgggccaggcacttatactc

SEQ ID NO: 291308 - DNA, 33 bp, Artificial Sequence
  Synthetic oligonucleotide
tactatacgtgatcgcacgaacggaaactactc

SEQ ID NO: 291309 - DNA, 30 bp, Artificial Sequence
  Synthetic oligonucleotide
caataagtagttgtgacgccgtgcctactc

SEQ ID NO: 291310 - DNA, 31 bp, Artificial Sequence
  Synthetic oligonucleotide
aaggataatcactgagaatagagtcctactc

SEQ ID NO: 291311 - DNA, 30 bp, Artificial Sequence
  Synthetic oligonucleotide
cgttagcgtggacagttatcatagctactc

SEQ ID NO: 291312 - DNA, 30 bp, Artificial Sequence
  Synthetic oligonucleotide
gcatgtcaatgcaaaaattactggctactc

SEQ ID NO: 291313 - DNA, 30 bp, Artificial Sequence
  Synthetic oligonucleotide
gctcgcaagttggttaggtgcagcgtactc

SEQ ID NO: 291314 - DNA, 30 bp, Artificial Sequence
  Synthetic oligonucleotide
catcggtttcacggtcccgcgaaggtactc

SEQ ID NO: 291315 - DNA, 30 bp, Artificial Sequence
  Synthetic oligonucleotide
gggacagaactatcgatgggctccttactc

SEQ ID NO: 291316 - DNA, 30 bp, Artificial Sequence
  Synthetic oligonucleotide
ttcaaagcaaaggctcctgagtgcttactc

SEQ ID NO: 291317 - DNA, 30 bp, Artificial Sequence
  Synthetic oligonucleotide
tgcgactacatgaacggcaagagtttactc

SEQ ID NO: 291318 - DNA, 30 bp, Artificial Sequence
  Synthetic oligonucleotide
actgtattatatgccttataaattttactc

SEQ ID NO: 291319 - DNA, 30 bp, Artificial Sequence
  Synthetic oligonucleotide
agctgcctgatgagctatatcaaaaacctc

SEQ ID NO: 291320 - DNA, 30 bp, Artificial Sequence
  Synthetic oligonucleotide
aggtagtgatatagccgggtgcggaacctc

SEQ ID NO: 291321 - DNA, 30 bp, Artificial Sequence
  Synthetic oligonucleotide
catggagggggttggttatttgctaacctc

SEQ ID NO: 291322 - DNA, 30 bp, Artificial Sequence
  Synthetic oligonucleotide
attctaggcgtgagagctgaagttaacctc

SEQ ID NO: 291323 - DNA, 30 bp, Artificial Sequence
  Synthetic oligonucleotide
gggaactggtctgctggtagcgcccacctc

SEQ ID NO: 291324 - DNA, 30 bp, Artificial Sequence
  Synthetic oligonucleotide
ggcatgtcgcagtgcccattgtcgcacctc

SEQ ID NO: 291325 - DNA, 30 bp, Artificial Sequence
  Synthetic oligonucleotide
gatctcccctaagaataagaacggcacctc

SEQ ID NO: 291326 - DNA, 30 bp, Artificial Sequence
  Synthetic oligonucleotide
atgggcgaatcataggacgtgtggcacctc

SEQ ID NO: 291327 - DNA, 30 bp, Artificial Sequence
  Synthetic oligonucleotide
gcaaaatattggttttttaaactgcacctc

SEQ ID NO: 291328 - DNA, 30 bp, Artificial Sequence
  Synthetic oligonucleotide
actcggtacttagtaagtcggtaagacctc

SEQ ID NO: 291329 - DNA, 30 bp, Artificial Sequence
  Synthetic oligonucleotide
caatagccgctaatcagaaatgcggacctc

SEQ ID NO: 291330 - DNA, 30 bp, Artificial Sequence
  Synthetic oligonucleotide
gcgaatcagcaataactgtttgatgacctc

SEQ ID NO: 291331 - DNA, 30 bp, Artificial Sequence
  Synthetic oligonucleotide
ccgcgtaaagtggccagagttactgacctc

SEQ ID NO: 291332 - DNA, 31 bp, Artificial Sequence
  Synthetic oligonucleotide
ggaggagaacttgctccgggttctatacctc

SEQ ID NO: 291333 - DNA, 30 bp, Artificial Sequence
  Synthetic oligonucleotide
accttccttcaaaagtctccggcctacctc

SEQ ID NO: 291334 - DNA, 30 bp, Artificial Sequence
  Synthetic oligonucleotide
gatctcattactcaacagacagtcaccctc

SEQ ID NO: 291335 - DNA, 30 bp, Artificial Sequence
  Synthetic oligonucleotide
agttatagaacagctgctaagaggaccctc

SEQ ID NO: 291336 - DNA, 30 bp, Artificial Sequence
  Synthetic oligonucleotide
cagtgtttgttgataaaacgctctaccctc

SEQ ID NO: 291337 - DNA, 30 bp, Artificial Sequence
  Synthetic oligonucleotide
ctggtaccacagttccaatggaaccccctc

SEQ ID NO: 291338 - DNA, 30 bp, Artificial Sequence
  Synthetic oligonucleotide
aagttaactgtgaatgcgcaacaccccctc

SEQ ID NO: 291339 - DNA, 30 bp, Artificial Sequence
  Synthetic oligonucleotide
ggatggttggatccatctgcttaccccctc

SEQ ID NO: 291340 - DNA, 30 bp, Artificial Sequence
  Synthetic oligonucleotide
gccggacatgacctgtatgctagccccctc

SEQ ID NO: 291341 - DNA, 30 bp, Artificial Sequence
  Synthetic oligonucleotide
tcggataagcgagttcttaaatagcccctc

SEQ ID NO: 291342 - DNA, 30 bp, Artificial Sequence
  Synthetic oligonucleotide
actatgattgtgattagtatctgagccctc

SEQ ID NO: 291343 - DNA, 30 bp, Artificial Sequence
  Synthetic oligonucleotide
acttgtcaccataaatagcccgaggccctc

SEQ ID NO: 291344 - DNA, 30 bp, Artificial Sequence
  Synthetic oligonucleotide
ttgctgagcagacattagtgactggccctc

SEQ ID NO: 291345 - DNA, 30 bp, Artificial Sequence
  Synthetic oligonucleotide
taatctggttacctagacgaacttgccctc

SEQ ID NO: 291346 - DNA, 30 bp, Artificial Sequence
  Synthetic oligonucleotide
gaggcctacgcgagactagtgttatccctc

SEQ ID NO: 291347 - DNA, 30 bp, Artificial Sequence
  Synthetic oligonucleotide
ttggttgtcacttagtgaaatttatccctc

SEQ ID NO: 291348 - DNA, 30 bp, Artificial Sequence
  Synthetic oligonucleotide
tgcgtttaaccgagcgccacaatctccctc

SEQ ID NO: 291349 - DNA, 30 bp, Artificial Sequence
  Synthetic oligonucleotide
attacacgtatcatcatgctcatgagcctc

SEQ ID NO: 291350 - DNA, 30 bp, Artificial Sequence
  Synthetic oligonucleotide
gaagaataaatcgcctcatatgtgagcctc

SEQ ID NO: 291351 - DNA, 30 bp, Artificial Sequence
  Synthetic oligonucleotide
gtcggcgaattccgcggtactgatagcctc

SEQ ID NO: 291352 - DNA, 30 bp, Artificial Sequence
  Synthetic oligonucleotide
cgctaagcaacataagtcaccagtagcctc

SEQ ID NO: 291353 - DNA, 30 bp, Artificial Sequence
  Synthetic oligonucleotide
acgcaagtcagggtcacacacgttagcctc

SEQ ID NO: 291354 - DNA, 30 bp, Artificial Sequence
  Synthetic oligonucleotide
aagctctagcaatcaactcctccaggcctc

SEQ ID NO: 291355 - DNA, 30 bp, Artificial Sequence
  Synthetic oligonucleotide
ccgggcgggctttcgacggcagccggcctc

SEQ ID NO: 291356 - DNA, 30 bp, Artificial Sequence
  Synthetic oligonucleotide
gcatcttgcatcacttccatcgccggcctc

SEQ ID NO: 291357 - DNA, 30 bp, Artificial Sequence
  Synthetic oligonucleotide
aagagcgagggggtagtctccgcgggcctc

SEQ ID NO: 291358 - DNA, 30 bp, Artificial Sequence
  Synthetic oligonucleotide
ctccatagttattcaacatcgtaatgcctc

SEQ ID NO: 291359 - DNA, 30 bp, Artificial Sequence
  Synthetic oligonucleotide
acgtattgccatcgagacgaaccatgcctc

SEQ ID NO: 291360 - DNA, 30 bp, Artificial Sequence
  Synthetic oligonucleotide
gtcgcctcctctttgttacttccatgcctc

SEQ ID NO: 291361 - DNA, 31 bp, Artificial Sequence
  Synthetic oligonucleotide
cacagcacagagactagcttcgtcatgcctc

SEQ ID NO: 291362 - DNA, 30 bp, Artificial Sequence
  Synthetic oligonucleotide
gccttcaaggtgaaaacaatttgatgcctc

SEQ ID NO: 291363 - DNA, 30 bp, Artificial Sequence
  Synthetic oligonucleotide
atgaaacggtaagctaatttatggtgcctc

SEQ ID NO: 291364 - DNA, 30 bp, Artificial Sequence
  Synthetic oligonucleotide
agcctaggatctataactgttagttgcctc

SEQ ID NO: 291365 - DNA, 30 bp, Artificial Sequence
  Synthetic oligonucleotide
ctcatgcgattcacaggcgagggaatcctc

SEQ ID NO: 291366 - DNA, 30 bp, Artificial Sequence
  Synthetic oligonucleotide
gatgcctaaatgtgttgcacatgcatcctc

SEQ ID NO: 291367 - DNA, 30 bp, Artificial Sequence
  Synthetic oligonucleotide
atcttggatatatagatacaggtcatcctc

SEQ ID NO: 291368 - DNA, 30 bp, Artificial Sequence
  Synthetic oligonucleotide
ggtaacgctgagtaattacgggagatcctc

SEQ ID NO: 291369 - DNA, 30 bp, Artificial Sequence
  Synthetic oligonucleotide
gagaaggggtagcgtgtcattcttatcctc

SEQ ID NO: 291370 - DNA, 30 bp, Artificial Sequence
  Synthetic oligonucleotide
tctacttacaattggagggactaactcctc

SEQ ID NO: 291371 - DNA, 30 bp, Artificial Sequence
  Synthetic oligonucleotide
ggttaagacctccttataatcacgctcctc

SEQ ID NO: 291372 - DNA, 30 bp, Artificial Sequence
  Synthetic oligonucleotide
aatcgtctttctgttcgggttgcgctcctc

SEQ ID NO: 291373 - DNA, 30 bp, Artificial Sequence
  Synthetic oligonucleotide
ctaatgtcgtcgtgagctccacggctcctc

SEQ ID NO: 291374 - DNA, 29 bp, Artificial Sequence
  Synthetic oligonucleotide
agggtcaggttagttctaaagctctcctc

SEQ ID NO: 291375 - DNA, 30 bp, Artificial Sequence
  Synthetic oligonucleotide
gtgacagcccggtaccatggttaagtcctc

SEQ ID NO: 291376 - DNA, 30 bp, Artificial Sequence
  Synthetic oligonucleotide
aattggcttttgttaagcgagccagtcctc

SEQ ID NO: 291377 - DNA, 30 bp, Artificial Sequence
  Synthetic oligonucleotide
aaacgccatacccgcttatcacctgtcctc

SEQ ID NO: 291378 - DNA, 30 bp, Artificial Sequence
  Synthetic oligonucleotide
tgtgaccgacacgacttaacctttgtcctc

SEQ ID NO: 291379 - DNA, 30 bp, Artificial Sequence
  Synthetic oligonucleotide
gtgtacgcaagcgccgttaacacattcctc

SEQ ID NO: 291380 - DNA, 30 bp, Artificial Sequence
  Synthetic oligonucleotide
gcgtgatttcacattagaggctcattcctc

SEQ ID NO: 291381 - DNA, 30 bp, Artificial Sequence
  Synthetic oligonucleotide
ctagaacctgacctaaatccaagattcctc

SEQ ID NO: 291382 - DNA, 30 bp, Artificial Sequence
  Synthetic oligonucleotide
gacaaccgacatgtggtccggcacttcctc

SEQ ID NO: 291383 - DNA, 30 bp, Artificial Sequence
  Synthetic oligonucleotide
tgtaggggggttatgcgcgaggtcttcctc

SEQ ID NO: 291384 - DNA, 30 bp, Artificial Sequence
  Synthetic oligonucleotide
cgttagagaagatccccaggaaggttcctc

SEQ ID NO: 291385 - DNA, 30 bp, Artificial Sequence
  Synthetic oligonucleotide
aaatgccatgtaacttccctgctaaagctc

SEQ ID NO: 291386 - DNA, 30 bp, Artificial Sequence
  Synthetic oligonucleotide
taatccccgcacactaaagccaacaagctc

SEQ ID NO: 291387 - DNA, 30 bp, Artificial Sequence
  Synthetic oligonucleotide
gaactggtggccaattagatcgtgaagctc

SEQ ID NO: 291388 - DNA, 30 bp, Artificial Sequence
  Synthetic oligonucleotide
aaagcctccccttggcacatgcgacagctc

SEQ ID NO: 291389 - DNA, 30 bp, Artificial Sequence
  Synthetic oligonucleotide
cacctcagggcttgtatgcaaacccagctc

SEQ ID NO: 291390 - DNA, 30 bp, Artificial Sequence
  Synthetic oligonucleotide
attctccggtcattggaaacgttgcagctc

SEQ ID NO: 291391 - DNA, 30 bp, Artificial Sequence
  Synthetic oligonucleotide
agctcctagatacgatatagtcctcagctc

SEQ ID NO: 291392 - DNA, 30 bp, Artificial Sequence
  Synthetic oligonucleotide
gcataatacatttacgtaccattagagctc

SEQ ID NO: 291393 - DNA, 30 bp, Artificial Sequence
  Synthetic oligonucleotide
ttgaggggcactctcggcgttgaggagctc

SEQ ID NO: 291394 - DNA, 30 bp, Artificial Sequence
  Synthetic oligonucleotide
cggttagttaacatcctgctaagatagctc

SEQ ID NO: 291395 - DNA, 30 bp, Artificial Sequence
  Synthetic oligonucleotide
cctggtttagacataggctacctatagctc

SEQ ID NO: 291396 - DNA, 30 bp, Artificial Sequence
  Synthetic oligonucleotide
aacagaagcgtggccttcagcgtatagctc

SEQ ID NO: 291397 - DNA, 30 bp, Artificial Sequence
  Synthetic oligonucleotide
acatgacgttgaacccatcctggaacgctc

SEQ ID NO: 291398 - DNA, 30 bp, Artificial Sequence
  Synthetic oligonucleotide
gtatgcgcctagtacctagtggtaacgctc

SEQ ID NO: 291399 - DNA, 30 bp, Artificial Sequence
  Synthetic oligonucleotide
cgcatgtctactaccgaacatcacacgctc

SEQ ID NO: 291400 - DNA, 30 bp, Artificial Sequence
  Synthetic oligonucleotide
gctgcgccgaacgaaagtatatcgacgctc

SEQ ID NO: 291401 - DNA, 29 bp, Artificial Sequence
  Synthetic oligonucleotide
tgacccgaagtagtggatacaatacgctc

SEQ ID NO: 291402 - DNA, 30 bp, Artificial Sequence
  Synthetic oligonucleotide
gcgggggttctatagttctagactacgctc

SEQ ID NO: 291403 - DNA, 30 bp, Artificial Sequence
  Synthetic oligonucleotide
atcccttcatcggaaggtatgtcaccgctc

SEQ ID NO: 291404 - DNA, 30 bp, Artificial Sequence
  Synthetic oligonucleotide
cccgatcaggtcggtgacctggggccgctc

SEQ ID NO: 291405 - DNA, 30 bp, Artificial Sequence
  Synthetic oligonucleotide
taggtctcagggcgcatcggttggccgctc

SEQ ID NO: 291406 - DNA, 30 bp, Artificial Sequence
  Synthetic oligonucleotide
aaacctggaagacagttgcaggtagcgctc

SEQ ID NO: 291407 - DNA, 30 bp, Artificial Sequence
  Synthetic oligonucleotide
gcccggaaggagacatcacactgggcgctc

SEQ ID NO: 291408 - DNA, 30 bp, Artificial Sequence
  Synthetic oligonucleotide
atagaccaacagtcaataagcgtatcgctc

SEQ ID NO: 291409 - DNA, 30 bp, Artificial Sequence
  Synthetic oligonucleotide
ctaggtcctaaaaaaggtaggtactcgctc

SEQ ID NO: 291410 - DNA, 30 bp, Artificial Sequence
  Synthetic oligonucleotide
tcgttcgccgtcactgtcgcggagtcgctc

SEQ ID NO: 291411 - DNA, 30 bp, Artificial Sequence
  Synthetic oligonucleotide
tgcgacccgtcaacacatcagacgtcgctc

SEQ ID NO: 291412 - DNA, 30 bp, Artificial Sequence
  Synthetic oligonucleotide
ttcccgccgcgtgggctcgtgatcaggctc

SEQ ID NO: 291413 - DNA, 30 bp, Artificial Sequence
  Synthetic oligonucleotide
atacctccaacaccaggtcacctcaggctc

SEQ ID NO: 291414 - DNA, 30 bp, Artificial Sequence
  Synthetic oligonucleotide
attagcgaacggtcgagactcctgaggctc

SEQ ID NO: 291415 - DNA, 30 bp, Artificial Sequence
  Synthetic oligonucleotide
gctggggcgtagtattaacaaggtaggctc

SEQ ID NO: 291416 - DNA, 30 bp, Artificial Sequence
  Synthetic oligonucleotide
ttgatctacagcgcatggcgttatcggctc

SEQ ID NO: 291417 - DNA, 30 bp, Artificial Sequence
  Synthetic oligonucleotide
atgacacactgacgcatgtctacagggctc

SEQ ID NO: 291418 - DNA, 30 bp, Artificial Sequence
  Synthetic oligonucleotide
tgtatagcctgcttcagctagagagggctc

SEQ ID NO: 291419 - DNA, 30 bp, Artificial Sequence
  Synthetic oligonucleotide
acacagtcacaagtaagacacgacgggctc

SEQ ID NO: 291420 - DNA, 30 bp, Artificial Sequence
  Synthetic oligonucleotide
cttaatccgcccgttcgcctgctcgggctc

SEQ ID NO: 291421 - DNA, 30 bp, Artificial Sequence
  Synthetic oligonucleotide
ttgcatctggtataatggctctaggggctc

SEQ ID NO: 291422 - DNA, 30 bp, Artificial Sequence
  Synthetic oligonucleotide
gaccatggggttggctcatgagtggggctc

SEQ ID NO: 291423 - DNA, 30 bp, Artificial Sequence
  Synthetic oligonucleotide
ttaaacccctgaacataaacgagtgggctc

SEQ ID NO: 291424 - DNA, 30 bp, Artificial Sequence
  Synthetic oligonucleotide
ctcctagcattcaacagcgaaaaatggctc

SEQ ID NO: 291425 - DNA, 30 bp, Artificial Sequence
  Synthetic oligonucleotide
agctagtcccgggtgtgtcgctaatggctc

SEQ ID NO: 291426 - DNA, 30 bp, Artificial Sequence
  Synthetic oligonucleotide
gatccgagagtgtttaggaacacttggctc

SEQ ID NO: 291427 - DNA, 30 bp, Artificial Sequence
  Synthetic oligonucleotide
ggattacagccattaaacggcataatgctc

SEQ ID NO: 291428 - DNA, 30 bp, Artificial Sequence
  Synthetic oligonucleotide
tgtaactcgtcgtccaacaatctaatgctc

SEQ ID NO: 291429 - DNA, 30 bp, Artificial Sequence
  Synthetic oligonucleotide
tactccgaaagcaaaggtaatcacatgctc

SEQ ID NO: 291430 - DNA, 30 bp, Artificial Sequence
  Synthetic oligonucleotide
actgctctatggaagtatatctgcatgctc

SEQ ID NO: 291431 - DNA, 30 bp, Artificial Sequence
  Synthetic oligonucleotide
gtgaactagcagggtatgctaattatgctc

SEQ ID NO: 291432 - DNA, 30 bp, Artificial Sequence
  Synthetic oligonucleotide
ttcaccagtgctgcctaagtgcaactgctc

SEQ ID NO: 291433 - DNA, 30 bp, Artificial Sequence
  Synthetic oligonucleotide
aacgggcagtgcgtatccaatcgactgctc

SEQ ID NO: 291434 - DNA, 30 bp, Artificial Sequence
  Synthetic oligonucleotide
aatggctgagacgcttaaatactactgctc

SEQ ID NO: 291435 - DNA, 30 bp, Artificial Sequence
  Synthetic oligonucleotide
ttcggtagggatctcatgtggtagctgctc

SEQ ID NO: 291436 - DNA, 30 bp, Artificial Sequence
  Synthetic oligonucleotide
aagtaattcgaaggagtgcatcgtctgctc

SEQ ID NO: 291437 - DNA, 30 bp, Artificial Sequence
  Synthetic oligonucleotide
gatttccaaggagcaggatggccagtgctc

SEQ ID NO: 291438 - DNA, 30 bp, Artificial Sequence
  Synthetic oligonucleotide
gctgcgcaacagatatatggtgcagtgctc

SEQ ID NO: 291439 - DNA, 30 bp, Artificial Sequence
  Synthetic oligonucleotide
gattgaggctaattgagtgtctcagtgctc

SEQ ID NO: 291440 - DNA, 30 bp, Artificial Sequence
  Synthetic oligonucleotide
atagggaggagatatgcgaccgtagtgctc

SEQ ID NO: 291441 - DNA, 30 bp, Artificial Sequence
  Synthetic oligonucleotide
acacacagaactttaattcgtcacgtgctc

SEQ ID NO: 291442 - DNA, 30 bp, Artificial Sequence
  Synthetic oligonucleotide
tctttgagctgtgtggaattccccgtgctc

SEQ ID NO: 291443 - DNA, 30 bp, Artificial Sequence
  Synthetic oligonucleotide
aaactagcggggggataagtgagcgtgctc

SEQ ID NO: 291444 - DNA, 30 bp, Artificial Sequence
  Synthetic oligonucleotide
cccgatatcaagtgatggaatggcgtgctc

SEQ ID NO: 291445 - DNA, 30 bp, Artificial Sequence
  Synthetic oligonucleotide
ctagcgtttggaacgagggagttcgtgctc

SEQ ID NO: 291446 - DNA, 30 bp, Artificial Sequence
  Synthetic oligonucleotide
cctcgttcgttcctctccggcccggtgctc

SEQ ID NO: 291447 - DNA, 30 bp, Artificial Sequence
  Synthetic oligonucleotide
gtcgtagactgagagccaagttcggtgctc

SEQ ID NO: 291448 - DNA, 30 bp, Artificial Sequence
  Synthetic oligonucleotide
atcagtatacactacattccctttgtgctc

SEQ ID NO: 291449 - DNA, 30 bp, Artificial Sequence
  Synthetic oligonucleotide
gcagttagcttgcaagactacggattgctc

SEQ ID NO: 291450 - DNA, 30 bp, Artificial Sequence
  Synthetic oligonucleotide
cgcaaattctgaatcattaacttattgctc

SEQ ID NO: 291451 - DNA, 30 bp, Artificial Sequence
  Synthetic oligonucleotide
ggtacagatccgggtctatcagggttgctc

SEQ ID NO: 291452 - DNA, 30 bp, Artificial Sequence
  Synthetic oligonucleotide
gggacatagataaaaagcaagctaaatctc

SEQ ID NO: 291453 - DNA, 30 bp, Artificial Sequence
  Synthetic oligonucleotide
gggctaattgagcgtgatcggggtaatctc

SEQ ID NO: 291454 - DNA, 30 bp, Artificial Sequence
  Synthetic oligonucleotide
gtcaggggtctcgttcgaatggtgcatctc

SEQ ID NO: 291455 - DNA, 30 bp, Artificial Sequence
  Synthetic oligonucleotide
gagacgaatgagcgttcgtgaaaagatctc

SEQ ID NO: 291456 - DNA, 30 bp, Artificial Sequence
  Synthetic oligonucleotide
acatgaccgatgccggtgtagccggatctc

SEQ ID NO: 291457 - DNA, 30 bp, Artificial Sequence
  Synthetic oligonucleotide
ataaagctgttaaggcaaactagggatctc

SEQ ID NO: 291458 - DNA, 30 bp, Artificial Sequence
  Synthetic oligonucleotide
agtcccggtactgaagcgggctgctatctc

SEQ ID NO: 291459 - DNA, 30 bp, Artificial Sequence
  Synthetic oligonucleotide
caaaaggatagcaaaggcgggaagtatctc

SEQ ID NO: 291460 - DNA, 30 bp, Artificial Sequence
  Synthetic oligonucleotide
gaacgttgagctgtccgcgttgggtatctc

SEQ ID NO: 291461 - DNA, 30 bp, Artificial Sequence
  Synthetic oligonucleotide
gtgacgagggagattaccctacccactctc

SEQ ID NO: 291462 - DNA, 30 bp, Artificial Sequence
  Synthetic oligonucleotide
tagggctctcggcccagacaggctactctc

SEQ ID NO: 291463 - DNA, 30 bp, Artificial Sequence
  Synthetic oligonucleotide
caggaaccaacgaccagggctattactctc

SEQ ID NO: 291464 - DNA, 30 bp, Artificial Sequence
  Synthetic oligonucleotide
cctcgacataggcagtacttcacacctctc

SEQ ID NO: 291465 - DNA, 30 bp, Artificial Sequence
  Synthetic oligonucleotide
gtacgaccctgaggttcacggatacctctc

SEQ ID NO: 291466 - DNA, 30 bp, Artificial Sequence
  Synthetic oligonucleotide
tggagtagttgacgctataggtgagctctc

SEQ ID NO: 291467 - DNA, 30 bp, Artificial Sequence
  Synthetic oligonucleotide
catgcatggggacggccccgcatagctctc

SEQ ID NO: 291468 - DNA, 30 bp, Artificial Sequence
  Synthetic oligonucleotide
accaacgacgtatgcgctttcgtagctctc

SEQ ID NO: 291469 - DNA, 30 bp, Artificial Sequence
  Synthetic oligonucleotide
cgttaggagagggggacccggaaggctctc

SEQ ID NO: 291470 - DNA, 30 bp, Artificial Sequence
  Synthetic oligonucleotide
gccccaccggggtaatacaacgcggctctc

SEQ ID NO: 291471 - DNA, 30 bp, Artificial Sequence
  Synthetic oligonucleotide
atatacgaataggtaaatggatctgctctc

SEQ ID NO: 291472 - DNA, 30 bp, Artificial Sequence
  Synthetic oligonucleotide
aatatgaaatgggaaacttaaacatctctc

SEQ ID NO: 291473 - DNA, 30 bp, Artificial Sequence
  Synthetic oligonucleotide
gtaagcctcagttccctcctatcgtctctc

SEQ ID NO: 291474 - DNA, 30 bp, Artificial Sequence
  Synthetic oligonucleotide
ttggtaaaatctacatgagtctattctctc

SEQ ID NO: 291475 - DNA, 30 bp, Artificial Sequence
  Synthetic oligonucleotide
atgtggggtcgctaagatgcataaagtctc

SEQ ID NO: 291476 - DNA, 30 bp, Artificial Sequence
  Synthetic oligonucleotide
gcatcttaaagatatttaatgtaaagtctc

SEQ ID NO: 291477 - DNA, 30 bp, Artificial Sequence
  Synthetic oligonucleotide
tatccctcaaattcaacagcaaccagtctc

SEQ ID NO: 291478 - DNA, 30 bp, Artificial Sequence
  Synthetic oligonucleotide
ttctcggtgggaataatgcagcatagtctc

SEQ ID NO: 291479 - DNA, 30 bp, Artificial Sequence
  Synthetic oligonucleotide
tacgagtcatgagacgcttactttagtctc

SEQ ID NO: 291480 - DNA, 30 bp, Artificial Sequence
  Synthetic oligonucleotide
tcactaagcagtaatcaacatacacgtctc

SEQ ID NO: 291481 - DNA, 30 bp, Artificial Sequence
  Synthetic oligonucleotide
gattcgcagtactatcagacgggccgtctc

SEQ ID NO: 291482 - DNA, 30 bp, Artificial Sequence
  Synthetic oligonucleotide
ccgtcacgtccattgtcacagtagcgtctc

SEQ ID NO: 291483 - DNA, 30 bp, Artificial Sequence
  Synthetic oligonucleotide
atccgtccgctatgacaagttcatcgtctc

SEQ ID NO: 291484 - DNA, 30 bp, Artificial Sequence
  Synthetic oligonucleotide
atgcttggtgaacggcgctcggcaggtctc

SEQ ID NO: 291485 - DNA, 30 bp, Artificial Sequence
  Synthetic oligonucleotide
gggaaatgaaccgggcatccgagaggtctc

SEQ ID NO: 291486 - DNA, 30 bp, Artificial Sequence
  Synthetic oligonucleotide
gcacgcaccgcacgggctacctacggtctc

SEQ ID NO: 291487 - DNA, 30 bp, Artificial Sequence
  Synthetic oligonucleotide
actcgtatgacaaacccgatcaccggtctc

SEQ ID NO: 291488 - DNA, 30 bp, Artificial Sequence
  Synthetic oligonucleotide
agtagcagatgcgattacacctgcggtctc

SEQ ID NO: 291489 - DNA, 30 bp, Artificial Sequence
  Synthetic oligonucleotide
gtacgagtattggataggcacaggggtctc

SEQ ID NO: 291490 - DNA, 30 bp, Artificial Sequence
  Synthetic oligonucleotide
cccatgagagtgttacattaaaaatgtctc

SEQ ID NO: 291491 - DNA, 30 bp, Artificial Sequence
  Synthetic oligonucleotide
aattacaagatgaccgatatatgatgtctc

SEQ ID NO: 291492 - DNA, 30 bp, Artificial Sequence
  Synthetic oligonucleotide
cgttagcgacgtagggaaaagatatgtctc

SEQ ID NO: 291493 - DNA, 30 bp, Artificial Sequence
  Synthetic oligonucleotide
taactccagcaactgacatgcgcctgtctc

SEQ ID NO: 291494 - DNA, 30 bp, Artificial Sequence
  Synthetic oligonucleotide
agctcgtggagcttaaaggagggctgtctc

SEQ ID NO: 291495 - DNA, 30 bp, Artificial Sequence
  Synthetic oligonucleotide
atattgacggattaatcgaactcgtgtctc

SEQ ID NO: 291496 - DNA, 30 bp, Artificial Sequence
  Synthetic oligonucleotide
tgcgatggcttaatcatcgggggttgtctc

SEQ ID NO: 291497 - DNA, 30 bp, Artificial Sequence
  Synthetic oligonucleotide
gagtaatgcaacctagggttctgttgtctc

SEQ ID NO: 291498 - DNA, 30 bp, Artificial Sequence
  Synthetic oligonucleotide
gggagtagtgagatccagaagatttgtctc

SEQ ID NO: 291499 - DNA, 29 bp, Artificial Sequence
  Synthetic oligonucleotide
gagatgtcattataagtgcatgcattctc

SEQ ID NO: 291500 - DNA, 30 bp, Artificial Sequence
  Synthetic oligonucleotide
ccgcatagatccagtgccatcgcgattctc

SEQ ID NO: 291501 - DNA, 29 bp, Artificial Sequence
  Synthetic oligonucleotide
tgccgtaaaggaaattcgcaggtattctc

SEQ ID NO: 291502 - DNA, 30 bp, Artificial Sequence
  Synthetic oligonucleotide
cttcgactaagttgaagtctttgccttctc

SEQ ID NO: 291503 - DNA, 30 bp, Artificial Sequence
  Synthetic oligonucleotide
catattcgtggatactccaagaacgttctc

SEQ ID NO: 291504 - DNA, 30 bp, Artificial Sequence
  Synthetic oligonucleotide
gaaagggcaaccgcgaccagtaccgttctc

SEQ ID NO: 291505 - DNA, 30 bp, Artificial Sequence
  Synthetic oligonucleotide
tagaacggattgcttggtacaacggttctc

SEQ ID NO: 291506 - DNA, 30 bp, Artificial Sequence
  Synthetic oligonucleotide
gcttatggggaagaatgcaggccatttctc

SEQ ID NO: 291507 - DNA, 30 bp, Artificial Sequence
  Synthetic oligonucleotide
aaaaaacacccacggaagccgtcctttctc

SEQ ID NO: 291508 - DNA, 30 bp, Artificial Sequence
  Synthetic oligonucleotide
ttgacgacttgtgtaacatcgggttttctc

SEQ ID NO: 291509 - DNA, 30 bp, Artificial Sequence
  Synthetic oligonucleotide
gcccaaacactacttggtagcgcaaaagtc

SEQ ID NO: 291510 - DNA, 30 bp, Artificial Sequence
  Synthetic oligonucleotide
gtgccgaagaatgcgcttaactgaaaagtc

SEQ ID NO: 291511 - DNA, 30 bp, Artificial Sequence
  Synthetic oligonucleotide
caccccgtattggcgattagatccaaagtc

SEQ ID NO: 291512 - DNA, 30 bp, Artificial Sequence
  Synthetic oligonucleotide
gatgtagtcgaacgattcgtagagaaagtc

SEQ ID NO: 291513 - DNA, 30 bp, Artificial Sequence
  Synthetic oligonucleotide
aagaatatattacatggcgatttgaaagtc

SEQ ID NO: 291514 - DNA, 30 bp, Artificial Sequence
  Synthetic oligonucleotide
gttggtgctgttctggcttaccctaaagtc

SEQ ID NO: 291515 - DNA, 30 bp, Artificial Sequence
  Synthetic oligonucleotide
gaactcaccaggcttgagcaacgtaaagtc

SEQ ID NO: 291516 - DNA, 30 bp, Artificial Sequence
  Synthetic oligonucleotide
caaggtatagtaagggactgctaacaagtc

SEQ ID NO: 291517 - DNA, 30 bp, Artificial Sequence
  Synthetic oligonucleotide
acaactcgaaaccttcctgtcagacaagtc

SEQ ID NO: 291518 - DNA, 30 bp, Artificial Sequence
  Synthetic oligonucleotide
tcgtagacaagttgcgttcttctacaagtc

SEQ ID NO: 291519 - DNA, 30 bp, Artificial Sequence
  Synthetic oligonucleotide
ttagactcggatgatgcgtcaaaccaagtc

SEQ ID NO: 291520 - DNA, 30 bp, Artificial Sequence
  Synthetic oligonucleotide
attgtaccatcggtctccataaaccaagtc

SEQ ID NO: 291521 - DNA, 30 bp, Artificial Sequence
  Synthetic oligonucleotide
aggcgtggcgtctgctgagacaaccaagtc

SEQ ID NO: 291522 - DNA, 30 bp, Artificial Sequence
  Synthetic oligonucleotide
cgggaggggattcatttgaaaccgcaagtc

SEQ ID NO: 291523 - DNA, 30 bp, Artificial Sequence
  Synthetic oligonucleotide
gtgggtaactaatggaattgggggcaagtc

SEQ ID NO: 291524 - DNA, 30 bp, Artificial Sequence
  Synthetic oligonucleotide
atcagcatagtatccacagtctggcaagtc

SEQ ID NO: 291525 - DNA, 30 bp, Artificial Sequence
  Synthetic oligonucleotide
gacatacctgggcccaccgcgtggcaagtc

SEQ ID NO: 291526 - DNA, 30 bp, Artificial Sequence
  Synthetic oligonucleotide
tatacggtgattccggaaagaatgcaagtc

SEQ ID NO: 291527 - DNA, 30 bp, Artificial Sequence
  Synthetic oligonucleotide
gaaggtaccagtcactatgatgttcaagtc

SEQ ID NO: 291528 - DNA, 30 bp, Artificial Sequence
  Synthetic oligonucleotide
acgtttcgccgaaacagttccggcgaagtc

SEQ ID NO: 291529 - DNA, 30 bp, Artificial Sequence
  Synthetic oligonucleotide
atgggtatctgctcagaccattgcgaagtc

SEQ ID NO: 291530 - DNA, 30 bp, Artificial Sequence
  Synthetic oligonucleotide
gccgacacgcgccacaatattgtcgaagtc

SEQ ID NO: 291531 - DNA, 30 bp, Artificial Sequence
  Synthetic oligonucleotide
cgtaactggggttggactgatgcggaagtc

SEQ ID NO: 291532 - DNA, 30 bp, Artificial Sequence
  Synthetic oligonucleotide
ccgttccggacgcgggcgcctgcggaagtc

SEQ ID NO: 291533 - DNA, 37 bp, Artificial Sequence
  Synthetic oligonucleotide
aaagtaggtttataacattagaccgggcagataagtc

SEQ ID NO: 291534 - DNA, 30 bp, Artificial Sequence
  Synthetic oligonucleotide
cgccagcgaccccgggtcatgagataagtc

SEQ ID NO: 291535 - DNA, 30 bp, Artificial Sequence
  Synthetic oligonucleotide
tcatgagctacttcgtactacccctaagtc

SEQ ID NO: 291536 - DNA, 30 bp, Artificial Sequence
  Synthetic oligonucleotide
tctcgcgtgctcaaaaatagcacgtaagtc

SEQ ID NO: 291537 - DNA, 30 bp, Artificial Sequence
  Synthetic oligonucleotide
ctaagacgtacctggatacagccaacagtc

SEQ ID NO: 291538 - DNA, 30 bp, Artificial Sequence
  Synthetic oligonucleotide
ttaaatctcaactgaagcgaatcaacagtc

SEQ ID NO: 291539 - DNA, 30 bp, Artificial Sequence
  Synthetic oligonucleotide
agttcgtctatttctcaatatgcgacagtc

SEQ ID NO: 291540 - DNA, 30 bp, Artificial Sequence
  Synthetic oligonucleotide
cgctactttatcaactgttaagggacagtc

SEQ ID NO: 291541 - DNA, 30 bp, Artificial Sequence
  Synthetic oligonucleotide
agaataggtagatgcaagtgggctacagtc

SEQ ID NO: 291542 - DNA, 30 bp, Artificial Sequence
  Synthetic oligonucleotide
ccgcaaaagaatttacgttacaaaccagtc

SEQ ID NO: 291543 - DNA, 30 bp, Artificial Sequence
  Synthetic oligonucleotide
gcatataagtttctccatgaaacaccagtc

SEQ ID NO: 291544 - DNA, 30 bp, Artificial Sequence
  Synthetic oligonucleotide
ggaccacaatgtggggatgcttcaccagtc

SEQ ID NO: 291545 - DNA, 28 bp, Artificial Sequence
  Synthetic oligonucleotide
aaggggcacgttcttataagtcccagtc

SEQ ID NO: 291546 - DNA, 30 bp, Artificial Sequence
  Synthetic oligonucleotide
aggtgtgacgatgtctctgagtctccagtc

SEQ ID NO: 291547 - DNA, 30 bp, Artificial Sequence
  Synthetic oligonucleotide
tctcccaggcgttacttgattaaagcagtc

SEQ ID NO: 291548 - DNA, 30 bp, Artificial Sequence
  Synthetic oligonucleotide
taatactcccgtggttagagattagcagtc

SEQ ID NO: 291549 - DNA, 30 bp, Artificial Sequence
  Synthetic oligonucleotide
gacatagtacagcacccgacaccggcagtc

SEQ ID NO: 291550 - DNA, 30 bp, Artificial Sequence
  Synthetic oligonucleotide
taaatgagtctaacgaattcaagggcagtc

SEQ ID NO: 291551 - DNA, 30 bp, Artificial Sequence
  Synthetic oligonucleotide
gtcctgatatgtcaacgatctggtgcagtc

SEQ ID NO: 291552 - DNA, 30 bp, Artificial Sequence
  Synthetic oligonucleotide
acgcacttaattgataacaattagtcagtc

SEQ ID NO: 291553 - DNA, 30 bp, Artificial Sequence
  Synthetic oligonucleotide
tcctgaattgcctcagtcgaaaggtcagtc

SEQ ID NO: 291554 - DNA, 30 bp, Artificial Sequence
  Synthetic oligonucleotide
agcatagatgtgcggaagtacgggtcagtc

SEQ ID NO: 291555 - DNA, 30 bp, Artificial Sequence
  Synthetic oligonucleotide
cttgccatctactcctattacagttcagtc

SEQ ID NO: 291556 - DNA, 30 bp, Artificial Sequence
  Synthetic oligonucleotide
tacttgagtagggagacgtttagaagagtc

SEQ ID NO: 291557 - DNA, 30 bp, Artificial Sequence
  Synthetic oligonucleotide
tggagttagcggtctataactatcagagtc

SEQ ID NO: 291558 - DNA, 30 bp, Artificial Sequence
  Synthetic oligonucleotide
cccaaagaaaatgttcgcaggaagagagtc

SEQ ID NO: 291559 - DNA, 30 bp, Artificial Sequence
  Synthetic oligonucleotide
tactggttccacttccatcgggtgagagtc

SEQ ID NO: 291560 - DNA, 30 bp, Artificial Sequence
  Synthetic oligonucleotide
taggatctagggtggggagcgacacgagtc

SEQ ID NO: 291561 - DNA, 30 bp, Artificial Sequence
  Synthetic oligonucleotide
tgcaaatatgtttctcttgattcccgagtc

SEQ ID NO: 291562 - DNA, 30 bp, Artificial Sequence
  Synthetic oligonucleotide
caccagtaagaaagttaacctttccgagtc

SEQ ID NO: 291563 - DNA, 31 bp, Artificial Sequence
  Synthetic oligonucleotide
caatcgttcgtttcttctacccatgcgagtc

SEQ ID NO: 291564 - DNA, 30 bp, Artificial Sequence
  Synthetic oligonucleotide
actcgtagacgcaccacaagccttcgagtc

SEQ ID NO: 291565 - DNA, 30 bp, Artificial Sequence
  Synthetic oligonucleotide
tagacaacttattcaagccgcaaaggagtc

SEQ ID NO: 291566 - DNA, 30 bp, Artificial Sequence
  Synthetic oligonucleotide
tacggacagaaaaggcattttgaaggagtc

SEQ ID NO: 291567 - DNA, 30 bp, Artificial Sequence
  Synthetic oligonucleotide
atatgttgcgaggttacactgcgaggagtc

SEQ ID NO: 291568 - DNA, 29 bp, Artificial Sequence
  Synthetic oligonucleotide
tagttctgtcgcggctcatgctaggagtc

SEQ ID NO: 291569 - DNA, 30 bp, Artificial Sequence
  Synthetic oligonucleotide
ccctggtaccatcagggacaaaccggagtc

SEQ ID NO: 291570 - DNA, 30 bp, Artificial Sequence
  Synthetic oligonucleotide
gaagcgcttctttgaacactgatcggagtc

SEQ ID NO: 291571 - DNA, 30 bp, Artificial Sequence
  Synthetic oligonucleotide
agtaatggctcggtgttagcttgtggagtc

SEQ ID NO: 291572 - DNA, 30 bp, Artificial Sequence
  Synthetic oligonucleotide
attcaagctcgataaggactcattggagtc

SEQ ID NO: 291573 - DNA, 30 bp, Artificial Sequence
  Synthetic oligonucleotide
ttgtgtttgggcgggggccatcactgagtc

SEQ ID NO: 291574 - DNA, 30 bp, Artificial Sequence
  Synthetic oligonucleotide
acaatcgtgttacatcaaggagactgagtc

SEQ ID NO: 291575 - DNA, 30 bp, Artificial Sequence
  Synthetic oligonucleotide
ttagatccagaaggtctggtcagctgagtc

SEQ ID NO: 291576 - DNA, 30 bp, Artificial Sequence
  Synthetic oligonucleotide
cctctctggagataaccgtgagggtgagtc

SEQ ID NO: 291577 - DNA, 30 bp, Artificial Sequence
  Synthetic oligonucleotide
cagggcctatagcagaaatctggaatagtc

SEQ ID NO: 291578 - DNA, 30 bp, Artificial Sequence
  Synthetic oligonucleotide
aatcagaagacacggcacggacacatagtc

SEQ ID NO: 291579 - DNA, 30 bp, Artificial Sequence
  Synthetic oligonucleotide
agtaagtgcggggcccccgttgacatagtc

SEQ ID NO: 291580 - DNA, 30 bp, Artificial Sequence
  Synthetic oligonucleotide
gcatcataatggatagcggtttgcatagtc

SEQ ID NO: 291581 - DNA, 30 bp, Artificial Sequence
  Synthetic oligonucleotide
tatagtcattcagtagtcatggccctagtc

SEQ ID NO: 291582 - DNA, 30 bp, Artificial Sequence
  Synthetic oligonucleotide
attctgagaagatatctgaacagcctagtc

SEQ ID NO: 291583 - DNA, 30 bp, Artificial Sequence
  Synthetic oligonucleotide
aagccagatctaggtgtttatgcgctagtc

SEQ ID NO: 291584 - DNA, 30 bp, Artificial Sequence
  Synthetic oligonucleotide
agcggtacggtctcaattaatcggctagtc

SEQ ID NO: 291585 - DNA, 30 bp, Artificial Sequence
  Synthetic oligonucleotide
aacgctgtaatcttcatgatagtgctagtc

SEQ ID NO: 291586 - DNA, 30 bp, Artificial Sequence
  Synthetic oligonucleotide
ggggccttcgaaaactgtggggctctagtc

SEQ ID NO: 291587 - DNA, 30 bp, Artificial Sequence
  Synthetic oligonucleotide
accggtaccacgcagtttgtcggagtagtc

SEQ ID NO: 291588 - DNA, 30 bp, Artificial Sequence
  Synthetic oligonucleotide
actgtctatgataatacgtcaaacgtagtc

SEQ ID NO: 291589 - DNA, 30 bp, Artificial Sequence
  Synthetic oligonucleotide
ttgggaaggtaaacgcattcatacgtagtc

SEQ ID NO: 291590 - DNA, 30 bp, Artificial Sequence
  Synthetic oligonucleotide
gtttctacgatggaacatcgcagcgtagtc

SEQ ID NO: 291591 - DNA, 30 bp, Artificial Sequence
  Synthetic oligonucleotide
ggctacttggtggattggatcctcgtagtc

SEQ ID NO: 291592 - DNA, 30 bp, Artificial Sequence
  Synthetic oligonucleotide
ttgagttctgttccctttaattgggtagtc

SEQ ID NO: 291593 - DNA, 30 bp, Artificial Sequence
  Synthetic oligonucleotide
tggcaaattattaagtatggtaatgtagtc

SEQ ID NO: 291594 - DNA, 30 bp, Artificial Sequence
  Synthetic oligonucleotide
gattttaaatccaggagaacggcattagtc

SEQ ID NO: 291595 - DNA, 29 bp, Artificial Sequence
  Synthetic oligonucleotide
gacttacacagactcgagcggtattagtc

SEQ ID NO: 291596 - DNA, 30 bp, Artificial Sequence
  Synthetic oligonucleotide
taggagattgtcgccgggacagccttagtc

SEQ ID NO: 291597 - DNA, 30 bp, Artificial Sequence
  Synthetic oligonucleotide
agtctttcaacaccaggaatatccttagtc

SEQ ID NO: 291598 - DNA, 30 bp, Artificial Sequence
  Synthetic oligonucleotide
agtatgcgatcttcgcgtaagtagttagtc

SEQ ID NO: 291599 - DNA, 30 bp, Artificial Sequence
  Synthetic oligonucleotide
gcggcttttagacaatccggtgggttagtc

SEQ ID NO: 291600 - DNA, 30 bp, Artificial Sequence
  Synthetic oligonucleotide
cgtaagcatccctgctacgggaaaaacgtc

SEQ ID NO: 291601 - DNA, 30 bp, Artificial Sequence
  Synthetic oligonucleotide
ttacgcggactacatgggtaaacaaacgtc

SEQ ID NO: 291602 - DNA, 30 bp, Artificial Sequence
  Synthetic oligonucleotide
cagcaggtacattcacggcccacaaacgtc

SEQ ID NO: 291603 - DNA, 30 bp, Artificial Sequence
  Synthetic oligonucleotide
atacttcaatggttagtaaagggaaacgtc

SEQ ID NO: 291604 - DNA, 30 bp, Artificial Sequence
  Synthetic oligonucleotide
ggtaaatgtaggtcatactcccgcaacgtc

SEQ ID NO: 291605 - DNA, 30 bp, Artificial Sequence
  Synthetic oligonucleotide
attggaaaaccgagcatattatgtaacgtc

SEQ ID NO: 291606 - DNA, 30 bp, Artificial Sequence
  Synthetic oligonucleotide
agccatatcgattatcacacctaccacgtc

SEQ ID NO: 291607 - DNA, 30 bp, Artificial Sequence
  Synthetic oligonucleotide
ggttcggtacaccgacttggcatccacgtc

SEQ ID NO: 291608 - DNA, 30 bp, Artificial Sequence
  Synthetic oligonucleotide
tcgtttactgtaacatacctgaacgacgtc

SEQ ID NO: 291609 - DNA, 30 bp, Artificial Sequence
  Synthetic oligonucleotide
cgcggctcagatcggaaatcaggcgacgtc

SEQ ID NO: 291610 - DNA, 30 bp, Artificial Sequence
  Synthetic oligonucleotide
caagggctgaacgtgtataccgatgacgtc

SEQ ID NO: 291611 - DNA, 30 bp, Artificial Sequence
  Synthetic oligonucleotide
ggaaccgggagtgtagaccactatgacgtc

SEQ ID NO: 291612 - DNA, 30 bp, Artificial Sequence
  Synthetic oligonucleotide
ccgtccgttgcgcaaatgcacattgacgtc

SEQ ID NO: 291613 - DNA, 30 bp, Artificial Sequence
  Synthetic oligonucleotide
cgcatataatcgccaacagcggttgacgtc

SEQ ID NO: 291614 - DNA, 30 bp, Artificial Sequence
  Synthetic oligonucleotide
ttggcgatattgtgtcgacaaccctacgtc

SEQ ID NO: 291615 - DNA, 30 bp, Artificial Sequence
  Synthetic oligonucleotide
tgcgttccagataacccatgtctaaccgtc

SEQ ID NO: 291616 - DNA, 30 bp, Artificial Sequence
  Synthetic oligonucleotide
gagtcatggggaacgcttcactacaccgtc

SEQ ID NO: 291617 - DNA, 30 bp, Artificial Sequence
  Synthetic oligonucleotide
ggcttgccgcgtatgccagaacgcaccgtc

SEQ ID NO: 291618 - DNA, 30 bp, Artificial Sequence
  Synthetic oligonucleotide
gagggcagtacggaaattaggtagaccgtc

SEQ ID NO: 291619 - DNA, 30 bp, Artificial Sequence
  Synthetic oligonucleotide
atggcggttgggtaggtaaggttgaccgtc

SEQ ID NO: 291620 - DNA, 30 bp, Artificial Sequence
  Synthetic oligonucleotide
ggtagacattcgtgacgatcagttaccgtc

SEQ ID NO: 291621 - DNA, 30 bp, Artificial Sequence
  Synthetic oligonucleotide
ccgactatggctactgtcatccgccccgtc

SEQ ID NO: 291622 - DNA, 30 bp, Artificial Sequence
  Synthetic oligonucleotide
tccatttgcagatgaggcaaggagcccgtc

SEQ ID NO: 291623 - DNA, 30 bp, Artificial Sequence
  Synthetic oligonucleotide
agtgttaccaccttcgcgcctgagcccgtc

SEQ ID NO: 291624 - DNA, 30 bp, Artificial Sequence
  Synthetic oligonucleotide
ttgaaatttactgaaggaactccgcccgtc

SEQ ID NO: 291625 - DNA, 30 bp, Artificial Sequence
  Synthetic oligonucleotide
gcgttggcgttgggcacatgcggagccgtc

SEQ ID NO: 291626 - DNA, 30 bp, Artificial Sequence
  Synthetic oligonucleotide
ttttttaaacgttccgggataatcgccgtc

SEQ ID NO: 291627 - DNA, 30 bp, Artificial Sequence
  Synthetic oligonucleotide
tagtcattccatccagcaatataggccgtc

SEQ ID NO: 291628 - DNA, 30 bp, Artificial Sequence
  Synthetic oligonucleotide
cgtggtatctcgcgcaacaagacaagcgtc

SEQ ID NO: 291629 - DNA, 30 bp, Artificial Sequence
  Synthetic oligonucleotide
ggtttatgtgccgatgtcactagaagcgtc

SEQ ID NO: 291630 - DNA, 30 bp, Artificial Sequence
  Synthetic oligonucleotide
tctagacattcactgcatatatacagcgtc

SEQ ID NO: 291631 - DNA, 30 bp, Artificial Sequence
  Synthetic oligonucleotide
agtgtatcggatcagtccggtcagagcgtc

SEQ ID NO: 291632 - DNA, 30 bp, Artificial Sequence
  Synthetic oligonucleotide
gtcctacagcgagggaactcgaaacgcgtc

SEQ ID NO: 291633 - DNA, 30 bp, Artificial Sequence
  Synthetic oligonucleotide
tagtgaccataaacacgacgcgggcgcgtc

SEQ ID NO: 291634 - DNA, 30 bp, Artificial Sequence
  Synthetic oligonucleotide
ggagcctctctcttgcggtctaatcgcgtc

SEQ ID NO: 291635 - DNA, 30 bp, Artificial Sequence
  Synthetic oligonucleotide
tatggatttgcttgtatggttactcgcgtc

SEQ ID NO: 291636 - DNA, 30 bp, Artificial Sequence
  Synthetic oligonucleotide
atctgcttccatgataatctaccgggcgtc

SEQ ID NO: 291637 - DNA, 30 bp, Artificial Sequence
  Synthetic oligonucleotide
cctgcgttcgtttaggcgcctgcgggcgtc

SEQ ID NO: 291638 - DNA, 30 bp, Artificial Sequence
  Synthetic oligonucleotide
agctagggacatggacatcgtgtgggcgtc

SEQ ID NO: 291639 - DNA, 30 bp, Artificial Sequence
  Synthetic oligonucleotide
ttcatcgcttctctaagcatcaactgcgtc

SEQ ID NO: 291640 - DNA, 30 bp, Artificial Sequence
  Synthetic oligonucleotide
actaaccgcagagaccgaagcacctgcgtc

SEQ ID NO: 291641 - DNA, 30 bp, Artificial Sequence
  Synthetic oligonucleotide
ttaagctaccctggccgtgttaggtgcgtc

SEQ ID NO: 291642 - DNA, 30 bp, Artificial Sequence
  Synthetic oligonucleotide
tgtgttttacgaacaccgggaagaatcgtc

SEQ ID NO: 291643 - DNA, 30 bp, Artificial Sequence
  Synthetic oligonucleotide
tgttctaaccactctcgcagtgtcatcgtc

SEQ ID NO: 291644 - DNA, 30 bp, Artificial Sequence
  Synthetic oligonucleotide
tgttttacctggtgagtattgtagatcgtc

SEQ ID NO: 291645 - DNA, 30 bp, Artificial Sequence
  Synthetic oligonucleotide
gtgacctatccaatggacaatgctatcgtc

SEQ ID NO: 291646 - DNA, 30 bp, Artificial Sequence
  Synthetic oligonucleotide
atagctcgaatccccggacgacgtatcgtc

SEQ ID NO: 291647 - DNA, 30 bp, Artificial Sequence
  Synthetic oligonucleotide
taagttgccccatttaggcatattatcgtc

SEQ ID NO: 291648 - DNA, 30 bp, Artificial Sequence
  Synthetic oligonucleotide
acaggcatagcctttacttgggtactcgtc

SEQ ID NO: 291649 - DNA, 30 bp, Artificial Sequence
  Synthetic oligonucleotide
gactaaatacggtgccatccctagctcgtc

SEQ ID NO: 291650 - DNA, 30 bp, Artificial Sequence
  Synthetic oligonucleotide
gactttggatcgaaacaccggacattcgtc

SEQ ID NO: 291651 - DNA, 30 bp, Artificial Sequence
  Synthetic oligonucleotide
atccagcgcaaagataagcgctgattcgtc

SEQ ID NO: 291652 - DNA, 30 bp, Artificial Sequence
  Synthetic oligonucleotide
gctggacacagagtatcagcaatattcgtc

SEQ ID NO: 291653 - DNA, 30 bp, Artificial Sequence
  Synthetic oligonucleotide
tttgacgttttgagggtaagcaagttcgtc

SEQ ID NO: 291654 - DNA, 30 bp, Artificial Sequence
  Synthetic oligonucleotide
tctagacaaaaagggcggtggcatttcgtc

SEQ ID NO: 291655 - DNA, 30 bp, Artificial Sequence
  Synthetic oligonucleotide
taaaatctcggggccccacacaaaaaggtc

SEQ ID NO: 291656 - DNA, 30 bp, Artificial Sequence
  Synthetic oligonucleotide
ggggcgcaactatcggtaaccttaaaggtc

SEQ ID NO: 291657 - DNA, 30 bp, Artificial Sequence
  Synthetic oligonucleotide
ctaatgagctaattacggggagacaaggtc

SEQ ID NO: 291658 - DNA, 30 bp, Artificial Sequence
  Synthetic oligonucleotide
gggttagcgggctttcatatctacaaggtc

SEQ ID NO: 291659 - DNA, 30 bp, Artificial Sequence
  Synthetic oligonucleotide
gcttacaggggttgcacgtaatgcaaggtc

SEQ ID NO: 291660 - DNA, 30 bp, Artificial Sequence
  Synthetic oligonucleotide
tcgtaaagaatccagataaactggaaggtc

SEQ ID NO: 291661 - DNA, 30 bp, Artificial Sequence
  Synthetic oligonucleotide
ccattgagtcagttttagagcgaacaggtc

SEQ ID NO: 291662 - DNA, 30 bp, Artificial Sequence
  Synthetic oligonucleotide
ttggcgggcacgctcccaactttacaggtc

SEQ ID NO: 291663 - DNA, 30 bp, Artificial Sequence
  Synthetic oligonucleotide
aactcctccgggcctaagtatcctcaggtc

SEQ ID NO: 291664 - DNA, 30 bp, Artificial Sequence
  Synthetic oligonucleotide
gggcagcaaggtgggatgtatagtcaggtc

SEQ ID NO: 291665 - DNA, 30 bp, Artificial Sequence
  Synthetic oligonucleotide
gagctcacgcgcgcgtggacaaacgaggtc

SEQ ID NO: 291666 - DNA, 30 bp, Artificial Sequence
  Synthetic oligonucleotide
tatcaggtaggaaccaaatatagggaggtc

SEQ ID NO: 291667 - DNA, 30 bp, Artificial Sequence
  Synthetic oligonucleotide
ttgttcggcacgactcacttttgtgaggtc

SEQ ID NO: 291668 - DNA, 30 bp, Artificial Sequence
  Synthetic oligonucleotide
cctcaagcctaccgtagaggttaataggtc

SEQ ID NO: 291669 - DNA, 30 bp, Artificial Sequence
  Synthetic oligonucleotide
aaaccaaatgtacgtgagaagtgataggtc

SEQ ID NO: 291670 - DNA, 30 bp, Artificial Sequence
  Synthetic oligonucleotide
gatagacgaccatagcatgcattataggtc

SEQ ID NO: 291671 - DNA, 30 bp, Artificial Sequence
  Synthetic oligonucleotide
gggcgtcgaatacgggtatgcagctaggtc

SEQ ID NO: 291672 - DNA, 29 bp, Artificial Sequence
  Synthetic oligonucleotide
tcctataattcgccaaaaaacagtaggtc

SEQ ID NO: 291673 - DNA, 30 bp, Artificial Sequence
  Synthetic oligonucleotide
tgcaaagggttctgcgataaaaggtaggtc

SEQ ID NO: 291674 - DNA, 30 bp, Artificial Sequence
  Synthetic oligonucleotide
attggctgtaatataaagtgaggttaggtc

SEQ ID NO: 291675 - DNA, 30 bp, Artificial Sequence
  Synthetic oligonucleotide
gagacttgcacagataagaggagaacggtc

SEQ ID NO: 291676 - DNA, 30 bp, Artificial Sequence
  Synthetic oligonucleotide
actcggcggcattatacaggaggaacggtc

SEQ ID NO: 291677 - DNA, 30 bp, Artificial Sequence
  Synthetic oligonucleotide
ataatcgagtgatgtcgcaagctaacggtc

SEQ ID NO: 291678 - DNA, 30 bp, Artificial Sequence
  Synthetic oligonucleotide
gcgtctccatgagcgatgagaatcacggtc

SEQ ID NO: 291679 - DNA, 30 bp, Artificial Sequence
  Synthetic oligonucleotide
ttaacaaactcatattcagatgtcacggtc

SEQ ID NO: 291680 - DNA, 30 bp, Artificial Sequence
  Synthetic oligonucleotide
ggttagtcaagatttcaggtataaccggtc

SEQ ID NO: 291681 - DNA, 30 bp, Artificial Sequence
  Synthetic oligonucleotide
ccgtagctgatcgttcatcggcagccggtc

SEQ ID NO: 291682 - DNA, 30 bp, Artificial Sequence
  Synthetic oligonucleotide
acgctgctttcgggggatgtcggtccggtc

SEQ ID NO: 291683 - DNA, 30 bp, Artificial Sequence
  Synthetic oligonucleotide
cagatcgtcatttcaagatcggcagcggtc

SEQ ID NO: 291684 - DNA, 30 bp, Artificial Sequence
  Synthetic oligonucleotide
ggggacgttcgggattgagctcgagcggtc

SEQ ID NO: 291685 - DNA, 30 bp, Artificial Sequence
  Synthetic oligonucleotide
tattctaaatgacagagaggaggcgcggtc

SEQ ID NO: 291686 - DNA, 30 bp, Artificial Sequence
  Synthetic oligonucleotide
aatgcttaaggttcaacgacgtatgcggtc

SEQ ID NO: 291687 - DNA, 30 bp, Artificial Sequence
  Synthetic oligonucleotide
ttggagcatacatcccgacctcgtgcggtc

SEQ ID NO: 291688 - DNA, 30 bp, Artificial Sequence
  Synthetic oligonucleotide
tactggtgggcctggctatggacatcggtc

SEQ ID NO: 291689 - DNA, 30 bp, Artificial Sequence
  Synthetic oligonucleotide
gtggtgcctaatgggatagtgacatcggtc

SEQ ID NO: 291690 - DNA, 30 bp, Artificial Sequence
  Synthetic oligonucleotide
ggatagccctatagtcgaatcccatcggtc

SEQ ID NO: 291691 - DNA, 30 bp, Artificial Sequence
  Synthetic oligonucleotide
accgttttatatcccgagtcatcatcggtc

SEQ ID NO: 291692 - DNA, 30 bp, Artificial Sequence
  Synthetic oligonucleotide
aaatggtccatctgagaaactcgatcggtc

SEQ ID NO: 291693 - DNA, 30 bp, Artificial Sequence
  Synthetic oligonucleotide
tctcatgtccccacgaaacatggatcggtc

SEQ ID NO: 291694 - DNA, 30 bp, Artificial Sequence
  Synthetic oligonucleotide
gcgattgcatggacgacgcgtttctcggtc

SEQ ID NO: 291695 - DNA, 30 bp, Artificial Sequence
  Synthetic oligonucleotide
aggaatgccagtcatgatgcatggtcggtc

SEQ ID NO: 291696 - DNA, 30 bp, Artificial Sequence
  Synthetic oligonucleotide
caggccccgtcaatagataaaaattcggtc

SEQ ID NO: 291697 - DNA, 30 bp, Artificial Sequence
  Synthetic oligonucleotide
attctggaaaaagtcaaaaggtccagggtc

SEQ ID NO: 291698 - DNA, 30 bp, Artificial Sequence
  Synthetic oligonucleotide
gaaagctcgtcaactaccagtaagagggtc

SEQ ID NO: 291699 - DNA, 30 bp, Artificial Sequence
  Synthetic oligonucleotide
agacctaaccgagaatctgtcaatagggtc

SEQ ID NO: 291700 - DNA, 30 bp, Artificial Sequence
  Synthetic oligonucleotide
ctgtcatagtgcttgtttaccgatagggtc

SEQ ID NO: 291701 - DNA, 30 bp, Artificial Sequence
  Synthetic oligonucleotide
gcatacggacacgagtgcgagggacgggtc

SEQ ID NO: 291702 - DNA, 30 bp, Artificial Sequence
  Synthetic oligonucleotide
gcacgtggtagtaggcgatggggccgggtc

SEQ ID NO: 291703 - DNA, 30 bp, Artificial Sequence
  Synthetic oligonucleotide
tactattgggtacttgtcaggtaaggggtc

SEQ ID NO: 291704 - DNA, 30 bp, Artificial Sequence
  Synthetic oligonucleotide
tgcacccgtggacgatgcctgacaggggtc

SEQ ID NO: 291705 - DNA, 30 bp, Artificial Sequence
  Synthetic oligonucleotide
ggtaagtggtgcctccgaccagacggggtc

SEQ ID NO: 291706 - DNA, 30 bp, Artificial Sequence
  Synthetic oligonucleotide
cgtgacgcattgcggctttgaatcggggtc

SEQ ID NO: 291707 - DNA, 30 bp, Artificial Sequence
  Synthetic oligonucleotide
cggcctacaagcggacaactattcggggtc

SEQ ID NO: 291708 - DNA, 30 bp, Artificial Sequence
  Synthetic oligonucleotide
ggcaacaaggtagtgtaactctagggggtc

SEQ ID NO: 291709 - DNA, 30 bp, Artificial Sequence
  Synthetic oligonucleotide
gacagtagcaggaaatatacgtagggggtc

SEQ ID NO: 291710 - DNA, 30 bp, Artificial Sequence
  Synthetic oligonucleotide
gattccagataagcgcaaaaagggggggtc

SEQ ID NO: 291711 - DNA, 30 bp, Artificial Sequence
  Synthetic oligonucleotide
cggccctgagtcaaccgcgaacgtggggtc

SEQ ID NO: 291712 - DNA, 30 bp, Artificial Sequence
  Synthetic oligonucleotide
ctaagagataccccttcctccggtggggtc

SEQ ID NO: 291713 - DNA, 30 bp, Artificial Sequence
  Synthetic oligonucleotide
gttgtatactagataaggtctccatgggtc

SEQ ID NO: 291714 - DNA, 30 bp, Artificial Sequence
  Synthetic oligonucleotide
tgtccttattttcggggaaggatgtgggtc

SEQ ID NO: 291715 - DNA, 30 bp, Artificial Sequence
  Synthetic oligonucleotide
ccgcggcgtctacaagaaaatataatggtc

SEQ ID NO: 291716 - DNA, 30 bp, Artificial Sequence
  Synthetic oligonucleotide
gcgatattgcctgtaaaaaccaccatggtc

SEQ ID NO: 291717 - DNA, 30 bp, Artificial Sequence
  Synthetic oligonucleotide
acaaccagagacttcatagtcagcatggtc

SEQ ID NO: 291718 - DNA, 30 bp, Artificial Sequence
  Synthetic oligonucleotide
cagatgcttgctgaacttagttagatggtc

SEQ ID NO: 291719 - DNA, 30 bp, Artificial Sequence
  Synthetic oligonucleotide
gtagtatcccgtgcgtagcgatccctggtc

SEQ ID NO: 291720 - DNA, 30 bp, Artificial Sequence
  Synthetic oligonucleotide
ttacaagtatggaagtatattgggctggtc

SEQ ID NO: 291721 - DNA, 30 bp, Artificial Sequence
  Synthetic oligonucleotide
ttgggaaagtatgtaacgtgtatgctggtc

SEQ ID NO: 291722 - DNA, 30 bp, Artificial Sequence
  Synthetic oligonucleotide
attgtctacagcgtatgtcaaaatctggtc

SEQ ID NO: 291723 - DNA, 30 bp, Artificial Sequence
  Synthetic oligonucleotide
ccgctttaatccgattaaaagaacgtggtc

SEQ ID NO: 291724 - DNA, 30 bp, Artificial Sequence
  Synthetic oligonucleotide
tggcacaattgcatctaaattcgggtggtc

SEQ ID NO: 291725 - DNA, 30 bp, Artificial Sequence
  Synthetic oligonucleotide
caaaccaagggaggacggattcgggtggtc

SEQ ID NO: 291726 - DNA, 30 bp, Artificial Sequence
  Synthetic oligonucleotide
gttcgtgtgtccaaaggaagttgggtggtc

SEQ ID NO: 291727 - DNA, 30 bp, Artificial Sequence
  Synthetic oligonucleotide
cggacagacgtagggaccggaagattggtc

SEQ ID NO: 291728 - DNA, 30 bp, Artificial Sequence
  Synthetic oligonucleotide
gttgacagccgtgacattacagacttggtc

SEQ ID NO: 291729 - DNA, 30 bp, Artificial Sequence
  Synthetic oligonucleotide
agcgagcaaggtccatgcatctccttggtc

SEQ ID NO: 291730 - DNA, 30 bp, Artificial Sequence
  Synthetic oligonucleotide
ttaactacactagcatcaaccttcttggtc

SEQ ID NO: 291731 - DNA, 30 bp, Artificial Sequence
  Synthetic oligonucleotide
tggtctcagggccgccaggtagaaaatgtc

SEQ ID NO: 291732 - DNA, 30 bp, Artificial Sequence
  Synthetic oligonucleotide
ggacataaagtcactgagaaaccaaatgtc

SEQ ID NO: 291733 - DNA, 30 bp, Artificial Sequence
  Synthetic oligonucleotide
gaacgagcggtgagcagcgtgggcaatgtc

SEQ ID NO: 291734 - DNA, 30 bp, Artificial Sequence
  Synthetic oligonucleotide
ggcccgacgttccacgtggggttcaatgtc

SEQ ID NO: 291735 - DNA, 30 bp, Artificial Sequence
  Synthetic oligonucleotide
tagaagccattggacatggtttcgaatgtc

SEQ ID NO: 291736 - DNA, 30 bp, Artificial Sequence
  Synthetic oligonucleotide
atactcattgaggggtacacgaggaatgtc

SEQ ID NO: 291737 - DNA, 30 bp, Artificial Sequence
  Synthetic oligonucleotide
gtataccttagtgtgcggagatgtaatgtc

SEQ ID NO: 291738 - DNA, 30 bp, Artificial Sequence
  Synthetic oligonucleotide
cgtgcgggacggcatactagctgtaatgtc

SEQ ID NO: 291739 - DNA, 30 bp, Artificial Sequence
  Synthetic oligonucleotide
ggacgaccacgggtctttactgttaatgtc

SEQ ID NO: 291740 - DNA, 30 bp, Artificial Sequence
  Synthetic oligonucleotide
tgagtgcatttcgtaatgactcgacatgtc

SEQ ID NO: 291741 - DNA, 30 bp, Artificial Sequence
  Synthetic oligonucleotide
tttattgtccctcggaacacattccatgtc

SEQ ID NO: 291742 - DNA, 30 bp, Artificial Sequence
  Synthetic oligonucleotide
tgttttaggaatcaattgaggacgcatgtc

SEQ ID NO: 291743 - DNA, 30 bp, Artificial Sequence
  Synthetic oligonucleotide
aagacaattacctgacccagggggcatgtc

SEQ ID NO: 291744 - DNA, 30 bp, Artificial Sequence
  Synthetic oligonucleotide
ccatgtcaactaccctggcagttgcatgtc

SEQ ID NO: 291745 - DNA, 30 bp, Artificial Sequence
  Synthetic oligonucleotide
acaaaattggtcatacacaaagaagatgtc

SEQ ID NO: 291746 - DNA, 30 bp, Artificial Sequence
  Synthetic oligonucleotide
tcacgtgggccatcgtcatcaccagatgtc

SEQ ID NO: 291747 - DNA, 30 bp, Artificial Sequence
  Synthetic oligonucleotide
tagttcaaggtgctctttactatggatgtc

SEQ ID NO: 291748 - DNA, 30 bp, Artificial Sequence
  Synthetic oligonucleotide
cagaatgtgaggtcaaaaggctctgatgtc

SEQ ID NO: 291749 - DNA, 30 bp, Artificial Sequence
  Synthetic oligonucleotide
gtgatttagattaaagcactgaaatatgtc

SEQ ID NO: 291750 - DNA, 30 bp, Artificial Sequence
  Synthetic oligonucleotide
ggacagaaaatggcatgagatgcctatgtc

SEQ ID NO: 291751 - DNA, 30 bp, Artificial Sequence
  Synthetic oligonucleotide
agtcttgtcggtaatagcggtaagtatgtc

SEQ ID NO: 291752 - DNA, 30 bp, Artificial Sequence
  Synthetic oligonucleotide
gaaacgctaaagcaattaagccagtatgtc

SEQ ID NO: 291753 - DNA, 30 bp, Artificial Sequence
  Synthetic oligonucleotide
ttcaatggtcgcatgtgcggcaggtatgtc

SEQ ID NO: 291754 - DNA, 30 bp, Artificial Sequence
  Synthetic oligonucleotide
cttgatgtaaatccctgcagcatgtatgtc

SEQ ID NO: 291755 - DNA, 30 bp, Artificial Sequence
  Synthetic oligonucleotide
ttagggaccccgtgtagcagccgttatgtc

SEQ ID NO: 291756 - DNA, 30 bp, Artificial Sequence
  Synthetic oligonucleotide
gtaccgtttttcgactaacacttttatgtc

SEQ ID NO: 291757 - DNA, 30 bp, Artificial Sequence
  Synthetic oligonucleotide
cggaatcaaagtctgtgattgtgaactgtc

SEQ ID NO: 291758 - DNA, 30 bp, Artificial Sequence
  Synthetic oligonucleotide
gggcaatgcctgctggttctcgacactgtc

SEQ ID NO: 291759 - DNA, 30 bp, Artificial Sequence
  Synthetic oligonucleotide
gatccacgagaatagatttatgagactgtc

SEQ ID NO: 291760 - DNA, 30 bp, Artificial Sequence
  Synthetic oligonucleotide
atgaaagcggccgagcaaaaggaacctgtc

SEQ ID NO: 291761 - DNA, 30 bp, Artificial Sequence
  Synthetic oligonucleotide
agccgacaacgatccatggtgaaccctgtc

SEQ ID NO: 291762 - DNA, 30 bp, Artificial Sequence
  Synthetic oligonucleotide
aacacaacttatggagctggggcgcctgtc

SEQ ID NO: 291763 - DNA, 30 bp, Artificial Sequence
  Synthetic oligonucleotide
gcaggaatataattgatagatatgcctgtc

SEQ ID NO: 291764 - DNA, 30 bp, Artificial Sequence
  Synthetic oligonucleotide
ggcccgcgcgcaaggacaaagccagctgtc

SEQ ID NO: 291765 - DNA, 30 bp, Artificial Sequence
  Synthetic oligonucleotide
agggtaaccgagcaaccactgaaggctgtc

SEQ ID NO: 291766 - DNA, 30 bp, Artificial Sequence
  Synthetic oligonucleotide
gaattcatctggaataatcattcggctgtc

SEQ ID NO: 291767 - DNA, 30 bp, Artificial Sequence
  Synthetic oligonucleotide
caaagcacagtgataaacgaaatatctgtc

SEQ ID NO: 291768 - DNA, 30 bp, Artificial Sequence
  Synthetic oligonucleotide
tgggacccagttttgctgactatctctgtc

SEQ ID NO: 291769 - DNA, 30 bp, Artificial Sequence
  Synthetic oligonucleotide
ggtggagtccacccaacacaccagtctgtc

SEQ ID NO: 291770 - DNA, 30 bp, Artificial Sequence
  Synthetic oligonucleotide
gttcagtaagtgaaactgttccagtctgtc

SEQ ID NO: 291771 - DNA, 30 bp, Artificial Sequence
  Synthetic oligonucleotide
cataggaaggtgtcgtcagcagagtctgtc

SEQ ID NO: 291772 - DNA, 30 bp, Artificial Sequence
  Synthetic oligonucleotide
gctgttttcgatggtagatctacgtctgtc

SEQ ID NO: 291773 - DNA, 30 bp, Artificial Sequence
  Synthetic oligonucleotide
gagttaggcaagggcttgcgcaggtctgtc

SEQ ID NO: 291774 - DNA, 30 bp, Artificial Sequence
  Synthetic oligonucleotide
atgtaagattttaatttaggaccttctgtc

SEQ ID NO: 291775 - DNA, 30 bp, Artificial Sequence
  Synthetic oligonucleotide
cttcttgactagggccgaaacagttctgtc

SEQ ID NO: 291776 - DNA, 30 bp, Artificial Sequence
  Synthetic oligonucleotide
ggagaatggtgtgaggttaatgtttctgtc

SEQ ID NO: 291777 - DNA, 30 bp, Artificial Sequence
  Synthetic oligonucleotide
gcatgtgacgtatgaaaattggaaagtgtc

SEQ ID NO: 291778 - DNA, 30 bp, Artificial Sequence
  Synthetic oligonucleotide
gaaatggctccggcacgttcataaagtgtc

SEQ ID NO: 291779 - DNA, 30 bp, Artificial Sequence
  Synthetic oligonucleotide
gttgacaagtgagatcaatggacaagtgtc

SEQ ID NO: 291780 - DNA, 30 bp, Artificial Sequence
  Synthetic oligonucleotide
tgcggcacctattaacaacgtctcagtgtc

SEQ ID NO: 291781 - DNA, 30 bp, Artificial Sequence
  Synthetic oligonucleotide
aaccatctcgaagacgagattttcagtgtc

SEQ ID NO: 291782 - DNA, 30 bp, Artificial Sequence
  Synthetic oligonucleotide
actcagcatattggtcggttttcgagtgtc

SEQ ID NO: 291783 - DNA, 30 bp, Artificial Sequence
  Synthetic oligonucleotide
gtgtagacagcgactagccatagtagtgtc

SEQ ID NO: 291784 - DNA, 30 bp, Artificial Sequence
  Synthetic oligonucleotide
ttaagattggtcagccgtaaatgtagtgtc

SEQ ID NO: 291785 - DNA, 30 bp, Artificial Sequence
  Synthetic oligonucleotide
ccccaacatacccgttgagtccttagtgtc

SEQ ID NO: 291786 - DNA, 30 bp, Artificial Sequence
  Synthetic oligonucleotide
gagatagtaatgctcagttaatttagtgtc

SEQ ID NO: 291787 - DNA, 30 bp, Artificial Sequence
  Synthetic oligonucleotide
cgtgcacctggcctccagacagggcgtgtc

SEQ ID NO: 291788 - DNA, 30 bp, Artificial Sequence
  Synthetic oligonucleotide
tagcgaaacataggatttcatcttcgtgtc

SEQ ID NO: 291789 - DNA, 30 bp, Artificial Sequence
  Synthetic oligonucleotide
cgatgagataggtaaacctctaacggtgtc

SEQ ID NO: 291790 - DNA, 30 bp, Artificial Sequence
  Synthetic oligonucleotide
agccagcctcgcatgatagggaccggtgtc

SEQ ID NO: 291791 - DNA, 30 bp, Artificial Sequence
  Synthetic oligonucleotide
tataaaacatttcgactaccgttcggtgtc

SEQ ID NO: 291792 - DNA, 30 bp, Artificial Sequence
  Synthetic oligonucleotide
tgtgaggacatgcttgcctaagcgggtgtc

SEQ ID NO: 291793 - DNA, 31 bp, Artificial Sequence
  Synthetic oligonucleotide
gtatagttaggacagctaccaggctggtgtc

SEQ ID NO: 291794 - DNA, 30 bp, Artificial Sequence
  Synthetic oligonucleotide
cgttccggggttgtggtggtcaaatgtgtc

SEQ ID NO: 291795 - DNA, 30 bp, Artificial Sequence
  Synthetic oligonucleotide
gaaaatgggacgagaaatacacgctgtgtc

SEQ ID NO: 291796 - DNA, 30 bp, Artificial Sequence
  Synthetic oligonucleotide
tgtccgtagtaaaccccgcccctctgtgtc

SEQ ID NO: 291797 - DNA, 30 bp, Artificial Sequence
  Synthetic oligonucleotide
cttgcagacaactgatagggtcggtgtgtc

SEQ ID NO: 291798 - DNA, 30 bp, Artificial Sequence
  Synthetic oligonucleotide
ctaaatgtcaagagaatctcataaattgtc

SEQ ID NO: 291799 - DNA, 30 bp, Artificial Sequence
  Synthetic oligonucleotide
ccaccgcattatcgaatagccggtattgtc

SEQ ID NO: 291800 - DNA, 30 bp, Artificial Sequence
  Synthetic oligonucleotide
aagcttaaaattgatactagaattattgtc

SEQ ID NO: 291801 - DNA, 30 bp, Artificial Sequence
  Synthetic oligonucleotide
cagatgaagggggtccaacgcacccttgtc

SEQ ID NO: 291802 - DNA, 31 bp, Artificial Sequence
  Synthetic oligonucleotide
taagatcatgccgcttcttccacgatttgtc

SEQ ID NO: 291803 - DNA, 30 bp, Artificial Sequence
  Synthetic oligonucleotide
acgcatacgtgttgcgagaaaatatttgtc

SEQ ID NO: 291804 - DNA, 30 bp, Artificial Sequence
  Synthetic oligonucleotide
tacggtggatgtgctacagttagctttgtc

SEQ ID NO: 291805 - DNA, 30 bp, Artificial Sequence
  Synthetic oligonucleotide
catagattcctgtgagaaccgcggtttgtc

SEQ ID NO: 291806 - DNA, 30 bp, Artificial Sequence
  Synthetic oligonucleotide
tccaatgaaaactatacggcatattttgtc

SEQ ID NO: 291807 - DNA, 30 bp, Artificial Sequence
  Synthetic oligonucleotide
agcatggggttcacgataacttgttttgtc

SEQ ID NO: 291808 - DNA, 30 bp, Artificial Sequence
  Synthetic oligonucleotide
tagcgatcgccagttaaattggaaaaattc

SEQ ID NO: 291809 - DNA, 30 bp, Artificial Sequence
  Synthetic oligonucleotide
tgttcgagagtaccgtgggtgtaaaaattc

SEQ ID NO: 291810 - DNA, 31 bp, Artificial Sequence
  Synthetic oligonucleotide
gggatccaacagtgactggttaacaaaattc

SEQ ID NO: 291811 - DNA, 30 bp, Artificial Sequence
  Synthetic oligonucleotide
cgagtgcagatggttagttaaataaaattc

SEQ ID NO: 291812 - DNA, 30 bp, Artificial Sequence
  Synthetic oligonucleotide
gttgaaaatgactaaaattctctaaaattc

SEQ ID NO: 291813 - DNA, 30 bp, Artificial Sequence
  Synthetic oligonucleotide
gcttattatcagtaggtgtggagcaaattc

SEQ ID NO: 291814 - DNA, 30 bp, Artificial Sequence
  Synthetic oligonucleotide
gcgagaaaaaagtcatcgacattcaaattc

SEQ ID NO: 291815 - DNA, 30 bp, Artificial Sequence
  Synthetic oligonucleotide
gtaattcgcgcataagactagtcgaaattc

SEQ ID NO: 291816 - DNA, 30 bp, Artificial Sequence
  Synthetic oligonucleotide
tagtgcgagttcaaacaatgagataaattc

SEQ ID NO: 291817 - DNA, 30 bp, Artificial Sequence
  Synthetic oligonucleotide
gcaggtgcgccactggggcccgctaaattc

SEQ ID NO: 291818 - DNA, 30 bp, Artificial Sequence
  Synthetic oligonucleotide
tgcgggccacatatgatgaattaacaattc

SEQ ID NO: 291819 - DNA, 30 bp, Artificial Sequence
  Synthetic oligonucleotide
tctaataatgatttccactcagcccaattc

SEQ ID NO: 291820 - DNA, 30 bp, Artificial Sequence
  Synthetic oligonucleotide
attccgacagaatgcaaaacattccaattc

SEQ ID NO: 291821 - DNA, 30 bp, Artificial Sequence
  Synthetic oligonucleotide
caggtgcgcatattaaaaagctgtcaattc

SEQ ID NO: 291822 - DNA, 30 bp, Artificial Sequence
  Synthetic oligonucleotide
cacaagtggtcagcttattatgaagaattc

SEQ ID NO: 291823 - DNA, 30 bp, Artificial Sequence
  Synthetic oligonucleotide
atctcaagctctatgctacacagagaattc

SEQ ID NO: 291824 - DNA, 30 bp, Artificial Sequence
  Synthetic oligonucleotide
agatgtccagaacgctatcggaacgaattc

SEQ ID NO: 291825 - DNA, 30 bp, Artificial Sequence
  Synthetic oligonucleotide
gccagaaaagaatgtaccacagaggaattc

SEQ ID NO: 291826 - DNA, 30 bp, Artificial Sequence
  Synthetic oligonucleotide
aagtgatcgcatactcaagcttgggaattc

SEQ ID NO: 291827 - DNA, 30 bp, Artificial Sequence
  Synthetic oligonucleotide
agagcaattcgagtgaacaaaagtgaattc

SEQ ID NO: 291828 - DNA, 30 bp, Artificial Sequence
  Synthetic oligonucleotide
cgctggattcctctgacgcgtgaataattc

SEQ ID NO: 291829 - DNA, 30 bp, Artificial Sequence
  Synthetic oligonucleotide
ataagtcaaatgatcccacgaacataattc

SEQ ID NO: 291830 - DNA, 30 bp, Artificial Sequence
  Synthetic oligonucleotide
ggatagtctgtgtggcgtgcgacataattc

SEQ ID NO: 291831 - DNA, 30 bp, Artificial Sequence
  Synthetic oligonucleotide
cacaaacggtgcctggtattaagataattc

SEQ ID NO: 291832 - DNA, 30 bp, Artificial Sequence
  Synthetic oligonucleotide
caccaatgaaaccacgtatcactataattc

SEQ ID NO: 291833 - DNA, 30 bp, Artificial Sequence
  Synthetic oligonucleotide
tctaggacggaaaatccgctaagctaattc

SEQ ID NO: 291834 - DNA, 30 bp, Artificial Sequence
  Synthetic oligonucleotide
ataaatacccaacgtgatagccgctaattc

SEQ ID NO: 291835 - DNA, 30 bp, Artificial Sequence
  Synthetic oligonucleotide
ggcagagcatacgtcgctacatgctaattc

SEQ ID NO: 291836 - DNA, 30 bp, Artificial Sequence
  Synthetic oligonucleotide
ggaagcgactcccttggtgcccggtaattc

SEQ ID NO: 291837 - DNA, 30 bp, Artificial Sequence
  Synthetic oligonucleotide
taccgcccaagtacgtccgttctgtaattc

SEQ ID NO: 291838 - DNA, 30 bp, Artificial Sequence
  Synthetic oligonucleotide
ctgccaggggtcagtacgtgagtgtaattc

SEQ ID NO: 291839 - DNA, 30 bp, Artificial Sequence
  Synthetic oligonucleotide
ctcgagcaacaccgaagcaccagttaattc

SEQ ID NO: 291840 - DNA, 30 bp, Artificial Sequence
  Synthetic oligonucleotide
tacacggatcaagtagatcagcgaacattc

SEQ ID NO: 291841 - DNA, 30 bp, Artificial Sequence
  Synthetic oligonucleotide
tggcgcggacgagcatcacttgtaacattc

SEQ ID NO: 291842 - DNA, 30 bp, Artificial Sequence
  Synthetic oligonucleotide
atttggaacaaacagggcacctacacattc

SEQ ID NO: 291843 - DNA, 30 bp, Artificial Sequence
  Synthetic oligonucleotide
gcttattcgtgtaggcaatcttacacattc

SEQ ID NO: 291844 - DNA, 30 bp, Artificial Sequence
  Synthetic oligonucleotide
ggagcgctcgctccgcctaggctgacattc

SEQ ID NO: 291845 - DNA, 30 bp, Artificial Sequence
  Synthetic oligonucleotide
ttgcaacttacaggttcggataatacattc

SEQ ID NO: 291846 - DNA, 30 bp, Artificial Sequence
  Synthetic oligonucleotide
gccatcataggtatagggaattgtacattc

SEQ ID NO: 291847 - DNA, 30 bp, Artificial Sequence
  Synthetic oligonucleotide
cctgagattcggattcaattgctaccattc

SEQ ID NO: 291848 - DNA, 30 bp, Artificial Sequence
  Synthetic oligonucleotide
ctgggcctattttatcatcacgtaccattc

SEQ ID NO: 291849 - DNA, 30 bp, Artificial Sequence
  Synthetic oligonucleotide
ttgtggaggtctaatcgagttcccccattc

SEQ ID NO: 291850 - DNA, 30 bp, Artificial Sequence
  Synthetic oligonucleotide
ctgcttgctgtggagaaatgtatgccattc

SEQ ID NO: 291851 - DNA, 30 bp, Artificial Sequence
  Synthetic oligonucleotide
gaggacataacccattgtggactgccattc

SEQ ID NO: 291852 - DNA, 30 bp, Artificial Sequence
  Synthetic oligonucleotide
catcagatgaagtattctgtgccagcattc

SEQ ID NO: 291853 - DNA, 30 bp, Artificial Sequence
  Synthetic oligonucleotide
cgtaatcagattgttatctccgtagcattc

SEQ ID NO: 291854 - DNA, 28 bp, Artificial Sequence
  Synthetic oligonucleotide
gcagtttatggcgtctgggtacgcattc

SEQ ID NO: 291855 - DNA, 30 bp, Artificial Sequence
  Synthetic oligonucleotide
agtgtccaccggtagggctaaagcgcattc

SEQ ID NO: 291856 - DNA, 30 bp, Artificial Sequence
  Synthetic oligonucleotide
ccgcagtggtaggttccattcgaggcattc

SEQ ID NO: 291857 - DNA, 30 bp, Artificial Sequence
  Synthetic oligonucleotide
ggccacgggcattcctcggagaatgcattc

SEQ ID NO: 291858 - DNA, 30 bp, Artificial Sequence
  Synthetic oligonucleotide
gtgcaaggcccttgattctgtcgtgcattc

SEQ ID NO: 291859 - DNA, 30 bp, Artificial Sequence
  Synthetic oligonucleotide
aaaaaaaagaaagatagcatacttgcattc

SEQ ID NO: 291860 - DNA, 30 bp, Artificial Sequence
  Synthetic oligonucleotide
gggaacaagcgtaggcttactcttgcattc

SEQ ID NO: 291861 - DNA, 30 bp, Artificial Sequence
  Synthetic oligonucleotide
gagattacacatcttattctacactcattc

SEQ ID NO: 291862 - DNA, 30 bp, Artificial Sequence
  Synthetic oligonucleotide
gtgtatctgtgcggggcaaccgcctcattc

SEQ ID NO: 291863 - DNA, 30 bp, Artificial Sequence
  Synthetic oligonucleotide
ctcgcataaattttacagaagttgtcattc

SEQ ID NO: 291864 - DNA, 30 bp, Artificial Sequence
  Synthetic oligonucleotide
ggtgtgaaccggcggggatgtgattcattc

SEQ ID NO: 291865 - DNA, 30 bp, Artificial Sequence
  Synthetic oligonucleotide
gggaattctttgtcgtgcaagggttcattc

SEQ ID NO: 291866 - DNA, 30 bp, Artificial Sequence
  Synthetic oligonucleotide
agagctacgcgattacggacggccagattc

SEQ ID NO: 291867 - DNA, 30 bp, Artificial Sequence
  Synthetic oligonucleotide
gcatatcagctcgtgagttcatagagattc

SEQ ID NO: 291868 - DNA, 30 bp, Artificial Sequence
  Synthetic oligonucleotide
gaatggcacacagaggctttgtagagattc

SEQ ID NO: 291869 - DNA, 30 bp, Artificial Sequence
  Synthetic oligonucleotide
tactgtcggttttgagtagtagcgagattc

SEQ ID NO: 291870 - DNA, 30 bp, Artificial Sequence
  Synthetic oligonucleotide
acccgggacgtaacctagagttgtagattc

SEQ ID NO: 291871 - DNA, 30 bp, Artificial Sequence
  Synthetic oligonucleotide
tgcataatttacccatcggaactccgattc

SEQ ID NO: 291872 - DNA, 30 bp, Artificial Sequence
  Synthetic oligonucleotide
atagcgtacagaactggactatagcgattc

SEQ ID NO: 291873 - DNA, 30 bp, Artificial Sequence
  Synthetic oligonucleotide
caaaacctgatggccccattcgctcgattc

SEQ ID NO: 291874 - DNA, 30 bp, Artificial Sequence
  Synthetic oligonucleotide
aacatcatacttgttttgtccgttcgattc

SEQ ID NO: 291875 - DNA, 31 bp, Artificial Sequence
  Synthetic oligonucleotide
gggcaacggcacggaatgcatccaaggattc

SEQ ID NO: 291876 - DNA, 30 bp, Artificial Sequence
  Synthetic oligonucleotide
tcctgacaaaaggcggcgtatacaggattc

SEQ ID NO: 291877 - DNA, 30 bp, Artificial Sequence
  Synthetic oligonucleotide
gggattttggactatgagtgcaacggattc

SEQ ID NO: 291878 - DNA, 30 bp, Artificial Sequence
  Synthetic oligonucleotide
gaagcagcataaacagattctcccggattc

SEQ ID NO: 291879 - DNA, 30 bp, Artificial Sequence
  Synthetic oligonucleotide
gtcgtaacacataatacggattgcggattc

SEQ ID NO: 291880 - DNA, 30 bp, Artificial Sequence
  Synthetic oligonucleotide
ctaggcgttcgagtggcagcgttcggattc

SEQ ID NO: 291881 - DNA, 30 bp, Artificial Sequence
  Synthetic oligonucleotide
agaactcgcggttatacaacagcgggattc

SEQ ID NO: 291882 - DNA, 30 bp, Artificial Sequence
  Synthetic oligonucleotide
agctatttatacgcgtgaatccatggattc

SEQ ID NO: 291883 - DNA, 30 bp, Artificial Sequence
  Synthetic oligonucleotide
atttggaataccagagcgggggctggattc

SEQ ID NO: 291884 - DNA, 30 bp, Artificial Sequence
  Synthetic oligonucleotide
cgccaggggacacgccatcatacatgattc

SEQ ID NO: 291885 - DNA, 30 bp, Artificial Sequence
  Synthetic oligonucleotide
gaacgatatcgctgtgcctatccctgattc

SEQ ID NO: 291886 - DNA, 30 bp, Artificial Sequence
  Synthetic oligonucleotide
aaatcagtttgatgtatgtctgagtgattc

SEQ ID NO: 291887 - DNA, 30 bp, Artificial Sequence
  Synthetic oligonucleotide
acgaagggaagtcccgagtctcggtgattc

SEQ ID NO: 291888 - DNA, 30 bp, Artificial Sequence
  Synthetic oligonucleotide
aaggatcacggtccaaattatcgttgattc

SEQ ID NO: 291889 - DNA, 30 bp, Artificial Sequence
  Synthetic oligonucleotide
tctactgcgtgtgttcgatttcaaatattc

SEQ ID NO: 291890 - DNA, 30 bp, Artificial Sequence
  Synthetic oligonucleotide
gaagaccgctggaccaattctagcatattc

SEQ ID NO: 291891 - DNA, 30 bp, Artificial Sequence
  Synthetic oligonucleotide
caacaaaatttataacttaagtgcatattc

SEQ ID NO: 291892 - DNA, 30 bp, Artificial Sequence
  Synthetic oligonucleotide
gtactttgtcgattcatacgatggatattc

SEQ ID NO: 291893 - DNA, 30 bp, Artificial Sequence
  Synthetic oligonucleotide
gaaaacctgtcttaggtactaaatatattc

SEQ ID NO: 291894 - DNA, 30 bp, Artificial Sequence
  Synthetic oligonucleotide
ggcagtcttttgggtcatgagaatatattc

SEQ ID NO: 291895 - DNA, 30 bp, Artificial Sequence
  Synthetic oligonucleotide
ccttcccttgtactatactcgggtatattc

SEQ ID NO: 291896 - DNA, 30 bp, Artificial Sequence
  Synthetic oligonucleotide
tagaccagcagggaggagcagtccctattc

SEQ ID NO: 291897 - DNA, 30 bp, Artificial Sequence
  Synthetic oligonucleotide
ccagcggcccagccatcgtgtatcctattc

SEQ ID NO: 291898 - DNA, 30 bp, Artificial Sequence
  Synthetic oligonucleotide
acttgcaaaagcccattgggaccgctattc

SEQ ID NO: 291899 - DNA, 30 bp, Artificial Sequence
  Synthetic oligonucleotide
gggtacttgtcataaaggaataacgtattc

SEQ ID NO: 291900 - DNA, 30 bp, Artificial Sequence
  Synthetic oligonucleotide
ccaacaggcttccacttcgtattcgtattc

SEQ ID NO: 291901 - DNA, 30 bp, Artificial Sequence
  Synthetic oligonucleotide
gttctaggtgtacaataataaaaggtattc

SEQ ID NO: 291902 - DNA, 30 bp, Artificial Sequence
  Synthetic oligonucleotide
gggcaactaggtaccatccagggtgtattc

SEQ ID NO: 291903 - DNA, 30 bp, Artificial Sequence
  Synthetic oligonucleotide
gtggtggtcccgcacgaactaaacttattc

SEQ ID NO: 291904 - DNA, 30 bp, Artificial Sequence
  Synthetic oligonucleotide
tcagttacgtagagaccggcaggcttattc

SEQ ID NO: 291905 - DNA, 30 bp, Artificial Sequence
  Synthetic oligonucleotide
tccggtataagctaagtgcagggcttattc

SEQ ID NO: 291906 - DNA, 30 bp, Artificial Sequence
  Synthetic oligonucleotide
cctcacccgaggcaagctcattgcttattc

SEQ ID NO: 291907 - DNA, 30 bp, Artificial Sequence
  Synthetic oligonucleotide
gctctcagcattaaaccacgcatcttattc

SEQ ID NO: 291908 - DNA, 30 bp, Artificial Sequence
  Synthetic oligonucleotide
ttggtcgtatctattgttgattggttattc

SEQ ID NO: 291909 - DNA, 30 bp, Artificial Sequence
  Synthetic oligonucleotide
ctgagtgctatattctaaatgaacaacttc

SEQ ID NO: 291910 - DNA, 30 bp, Artificial Sequence
  Synthetic oligonucleotide
tcacccgtaagacttagtcagatcaacttc

SEQ ID NO: 291911 - DNA, 30 bp, Artificial Sequence
  Synthetic oligonucleotide
tgtctcaatcgcgcgccattcttcaacttc

SEQ ID NO: 291912 - DNA, 30 bp, Artificial Sequence
  Synthetic oligonucleotide
aatgaaattaagctcgtggtctagaacttc

SEQ ID NO: 291913 - DNA, 30 bp, Artificial Sequence
  Synthetic oligonucleotide
tgccacattagagaacaccgtcggaacttc

SEQ ID NO: 291914 - DNA, 30 bp, Artificial Sequence
  Synthetic oligonucleotide
tttggaccttctgttatcgattggaacttc

SEQ ID NO: 291915 - DNA, 30 bp, Artificial Sequence
  Synthetic oligonucleotide
gtagaagaacgtaaagatcacgtacacttc

SEQ ID NO: 291916 - DNA, 30 bp, Artificial Sequence
  Synthetic oligonucleotide
accatctcaccaggatcgcctcaccacttc

SEQ ID NO: 291917 - DNA, 30 bp, Artificial Sequence
  Synthetic oligonucleotide
agttatagcgaagggatgcttcaccacttc

SEQ ID NO: 291918 - DNA, 30 bp, Artificial Sequence
  Synthetic oligonucleotide
ccgagtttggggtatctcagaaggcacttc

SEQ ID NO: 291919 - DNA, 30 bp, Artificial Sequence
  Synthetic oligonucleotide
atgtgtcgagggggtcgacagcggcacttc

SEQ ID NO: 291920 - DNA, 30 bp, Artificial Sequence
  Synthetic oligonucleotide
tagagcatataaagtctcgatcttcacttc

SEQ ID NO: 291921 - DNA, 30 bp, Artificial Sequence
  Synthetic oligonucleotide
agctcacagattagagactatcttcacttc

SEQ ID NO: 291922 - DNA, 30 bp, Artificial Sequence
  Synthetic oligonucleotide
taccggctcatttacacttttgaagacttc

SEQ ID NO: 291923 - DNA, 30 bp, Artificial Sequence
  Synthetic oligonucleotide
tattttgatccctatccatcgtcagacttc

SEQ ID NO: 291924 - DNA, 30 bp, Artificial Sequence
  Synthetic oligonucleotide
ttgtgtctctccttctcatcgttagacttc

SEQ ID NO: 291925 - DNA, 30 bp, Artificial Sequence
  Synthetic oligonucleotide
gcaagcgcgtattagctgttacccgacttc

SEQ ID NO: 291926 - DNA, 30 bp, Artificial Sequence
  Synthetic oligonucleotide
ttagtgtgcagtgtgtggaatgtcgacttc

SEQ ID NO: 291927 - DNA, 30 bp, Artificial Sequence
  Synthetic oligonucleotide
cctcagatattaataaattatgcggacttc

SEQ ID NO: 291928 - DNA, 30 bp, Artificial Sequence
  Synthetic oligonucleotide
acacttaatgtaaacatagccagggacttc

SEQ ID NO: 291929 - DNA, 30 bp, Artificial Sequence
  Synthetic oligonucleotide
ggcttggggggatattaccgggtggacttc

SEQ ID NO: 291930 - DNA, 30 bp, Artificial Sequence
  Synthetic oligonucleotide
aaatctcaattgcaagcccgataatacttc

SEQ ID NO: 291931 - DNA, 30 bp, Artificial Sequence
  Synthetic oligonucleotide
ccacaaggtagtatacggtatggatacttc

SEQ ID NO: 291932 - DNA, 30 bp, Artificial Sequence
  Synthetic oligonucleotide
agggtactggtcttcttaatgtagtacttc

SEQ ID NO: 291933 - DNA, 30 bp, Artificial Sequence
  Synthetic oligonucleotide
taatgtgtcgcggctgtcggaacgtacttc

SEQ ID NO: 291934 - DNA, 30 bp, Artificial Sequence
  Synthetic oligonucleotide
aaatgcggaattcgctgaatgacaaccttc

SEQ ID NO: 291935 - DNA, 30 bp, Artificial Sequence
  Synthetic oligonucleotide
gaggcagttttagcctcatctgcaaccttc

SEQ ID NO: 291936 - DNA, 30 bp, Artificial Sequence
  Synthetic oligonucleotide
caaggagccacttattttaaccgaaccttc

SEQ ID NO: 291937 - DNA, 30 bp, Artificial Sequence
  Synthetic oligonucleotide
gctgttccccgggttatgaaaatcaccttc

SEQ ID NO: 291938 - DNA, 30 bp, Artificial Sequence
  Synthetic oligonucleotide
ggcaatacgggaattaatggttagaccttc

SEQ ID NO: 291939 - DNA, 30 bp, Artificial Sequence
  Synthetic oligonucleotide
ggagtcccacgcttacgagtgaaacccttc

SEQ ID NO: 291940 - DNA, 30 bp, Artificial Sequence
  Synthetic oligonucleotide
acaccagagttgattattgtggcacccttc

SEQ ID NO: 291941 - DNA, 30 bp, Artificial Sequence
  Synthetic oligonucleotide
gtcatgtatagcctcatttataaccccttc

SEQ ID NO: 291942 - DNA, 30 bp, Artificial Sequence
  Synthetic oligonucleotide
aggacgttgtctatgttgggcttgcccttc

SEQ ID NO: 291943 - DNA, 30 bp, Artificial Sequence
  Synthetic oligonucleotide
agatgcatacggcgattgattctagccttc

SEQ ID NO: 291944 - DNA, 30 bp, Artificial Sequence
  Synthetic oligonucleotide
atgttgtaagactgattagagacggccttc

SEQ ID NO: 291945 - DNA, 30 bp, Artificial Sequence
  Synthetic oligonucleotide
aaaggtctattactgtcccgttatgccttc

SEQ ID NO: 291946 - DNA, 30 bp, Artificial Sequence
  Synthetic oligonucleotide
cgccgagtgctacgcccatttgaatccttc

SEQ ID NO: 291947 - DNA, 30 bp, Artificial Sequence
  Synthetic oligonucleotide
tgctggtaggggtaatgaaacatatccttc

SEQ ID NO: 291948 - DNA, 30 bp, Artificial Sequence
  Synthetic oligonucleotide
acttgaactaggggtacctgtttatccttc

SEQ ID NO: 291949 - DNA, 30 bp, Artificial Sequence
  Synthetic oligonucleotide
gtagggtccaacactgagcctttctccttc

SEQ ID NO: 291950 - DNA, 30 bp, Artificial Sequence
  Synthetic oligonucleotide
tgttgtcaacggtcgctcctgaggtccttc

SEQ ID NO: 291951 - DNA, 30 bp, Artificial Sequence
  Synthetic oligonucleotide
aacagtcccaacgaacaactttattccttc

SEQ ID NO: 291952 - DNA, 30 bp, Artificial Sequence
  Synthetic oligonucleotide
tatccgggtgcagtcctattgcaaagcttc

SEQ ID NO: 291953 - DNA, 30 bp, Artificial Sequence
  Synthetic oligonucleotide
gttttcaaaatgtcgctaaaagccagcttc

SEQ ID NO: 291954 - DNA, 30 bp, Artificial Sequence
  Synthetic oligonucleotide
gaagggtaactacctagtttgacgagcttc

SEQ ID NO: 291955 - DNA, 30 bp, Artificial Sequence
  Synthetic oligonucleotide
ccgtatgtaagcccgtaaagggcgagcttc

SEQ ID NO: 291956 - DNA, 30 bp, Artificial Sequence
  Synthetic oligonucleotide
tgaggggcattgtacagcgggctccgcttc

SEQ ID NO: 291957 - DNA, 30 bp, Artificial Sequence
  Synthetic oligonucleotide
gcgtaagatactgtgagggtcgcgcgcttc

SEQ ID NO: 291958 - DNA, 30 bp, Artificial Sequence
  Synthetic oligonucleotide
caagaatccgatagtgtggaaaatcgcttc

SEQ ID NO: 291959 - DNA, 30 bp, Artificial Sequence
  Synthetic oligonucleotide
gtccgtcttatctcggtaagattgggcttc

SEQ ID NO: 291960 - DNA, 30 bp, Artificial Sequence
  Synthetic oligonucleotide
gaataagcgatgcgattactaccatgcttc

SEQ ID NO: 291961 - DNA, 30 bp, Artificial Sequence
  Synthetic oligonucleotide
atttcgacaaacctttttaaattatgcttc

SEQ ID NO: 291962 - DNA, 30 bp, Artificial Sequence
  Synthetic oligonucleotide
cgtgcttcattttacaaacacaagtgcttc

SEQ ID NO: 291963 - DNA, 30 bp, Artificial Sequence
  Synthetic oligonucleotide
agacactcaagccgtccttaatagtgcttc

SEQ ID NO: 291964 - DNA, 30 bp, Artificial Sequence
  Synthetic oligonucleotide
ttagaggttatggggttaggacggtgcttc

SEQ ID NO: 291965 - DNA, 30 bp, Artificial Sequence
  Synthetic oligonucleotide
taaccggtacgaattttctgagcaatcttc

SEQ ID NO: 291966 - DNA, 30 bp, Artificial Sequence
  Synthetic oligonucleotide
catctgtaattggtagtggatgtaatcttc

SEQ ID NO: 291967 - DNA, 30 bp, Artificial Sequence
  Synthetic oligonucleotide
cagaagtcggcattggcgatttacatcttc

SEQ ID NO: 291968 - DNA, 30 bp, Artificial Sequence
  Synthetic oligonucleotide
tagtggtcttgaagtcaccgtggcatcttc

SEQ ID NO: 291969 - DNA, 30 bp, Artificial Sequence
  Synthetic oligonucleotide
ccagtgatacaattggggtcggtgatcttc

SEQ ID NO: 291970 - DNA, 30 bp, Artificial Sequence
  Synthetic oligonucleotide
atatcgatgtggccttcgacagatatcttc

SEQ ID NO: 291971 - DNA, 30 bp, Artificial Sequence
  Synthetic oligonucleotide
ggatgcggtggttacggcttgctactcttc

SEQ ID NO: 291972 - DNA, 30 bp, Artificial Sequence
  Synthetic oligonucleotide
agatagacggtccgttcataggaagtcttc

SEQ ID NO: 291973 - DNA, 30 bp, Artificial Sequence
  Synthetic oligonucleotide
aactttcctaacgtccttctattagtcttc

SEQ ID NO: 291974 - DNA, 30 bp, Artificial Sequence
  Synthetic oligonucleotide
ttattgacttagtcgtcttgcatcgtcttc

SEQ ID NO: 291975 - DNA, 30 bp, Artificial Sequence
  Synthetic oligonucleotide
agggctaaataggccgctacgaaggtcttc

SEQ ID NO: 291976 - DNA, 30 bp, Artificial Sequence
  Synthetic oligonucleotide
atatggtccaatacttgggggcctgtcttc

SEQ ID NO: 291977 - DNA, 30 bp, Artificial Sequence
  Synthetic oligonucleotide
cttgagcgtttgacaggcaagtcgttcttc

SEQ ID NO: 291978 - DNA, 30 bp, Artificial Sequence
  Synthetic oligonucleotide
tcgtgggagcttttacaatggaggttcttc

SEQ ID NO: 291979 - DNA, 30 bp, Artificial Sequence
  Synthetic oligonucleotide
taaggtggcaatagtgtttcgcgtttcttc

SEQ ID NO: 291980 - DNA, 30 bp, Artificial Sequence
  Synthetic oligonucleotide
atggtagactcaatatggaaataaaagttc

SEQ ID NO: 291981 - DNA, 30 bp, Artificial Sequence
  Synthetic oligonucleotide
caacggctaaaagggttacatttcaagttc

SEQ ID NO: 291982 - DNA, 30 bp, Artificial Sequence
  Synthetic oligonucleotide
aggcaagacgttctgagctatgagaagttc

SEQ ID NO: 291983 - DNA, 31 bp, Artificial Sequence
  Synthetic oligonucleotide
tccagcagtcaatgtgcgtgagccgaagttc

SEQ ID NO: 291984 - DNA, 30 bp, Artificial Sequence
  Synthetic oligonucleotide
agctcatgtgtacgaagtccagcgaagttc

SEQ ID NO: 291985 - DNA, 30 bp, Artificial Sequence
  Synthetic oligonucleotide
tgtgaacggctgtaaagtttacggaagttc

SEQ ID NO: 291986 - DNA, 30 bp, Artificial Sequence
  Synthetic oligonucleotide
tgcggccaaggtgaacagcagatgaagttc

SEQ ID NO: 291987 - DNA, 30 bp, Artificial Sequence
  Synthetic oligonucleotide
ctgcgaacactgtaccgagatcataagttc

SEQ ID NO: 291988 - DNA, 30 bp, Artificial Sequence
  Synthetic oligonucleotide
atgatgagggagaccgataagcaccagttc

SEQ ID NO: 291989 - DNA, 30 bp, Artificial Sequence
  Synthetic oligonucleotide
ctacgatgtcctatgagcgatggccagttc

SEQ ID NO: 291990 - DNA, 30 bp, Artificial Sequence
  Synthetic oligonucleotide
gcggaatggacatgagcccaactccagttc

SEQ ID NO: 291991 - DNA, 30 bp, Artificial Sequence
  Synthetic oligonucleotide
tactgggggtccgtatgactcgtccagttc

SEQ ID NO: 291992 - DNA, 30 bp, Artificial Sequence
  Synthetic oligonucleotide
ggcagactcccggccagcatactgcagttc

SEQ ID NO: 291993 - DNA, 30 bp, Artificial Sequence
  Synthetic oligonucleotide
caccagcacgggtaaatttacgttcagttc

SEQ ID NO: 291994 - DNA, 30 bp, Artificial Sequence
  Synthetic oligonucleotide
gttccgtgctgttcacgccctcatgagttc

SEQ ID NO: 291995 - DNA, 30 bp, Artificial Sequence
  Synthetic oligonucleotide
gtaggcattgattttttggtctaatagttc

SEQ ID NO: 291996 - DNA, 30 bp, Artificial Sequence
  Synthetic oligonucleotide
gccataaatacacttagctcggcatagttc

SEQ ID NO: 291997 - DNA, 30 bp, Artificial Sequence
  Synthetic oligonucleotide
ttggtaaactgcgggagtccctcatagttc

SEQ ID NO: 291998 - DNA, 30 bp, Artificial Sequence
  Synthetic oligonucleotide
gttcatcacgttaaatgttagcactagttc

SEQ ID NO: 291999 - DNA, 30 bp, Artificial Sequence
  Synthetic oligonucleotide
cgccaattgaggcccttcctcctctagttc

SEQ ID NO: 292000 - DNA, 30 bp, Artificial Sequence
  Synthetic oligonucleotide
cctcgtccgtgcttacacaaggtctagttc

SEQ ID NO: 292001 - DNA, 30 bp, Artificial Sequence
  Synthetic oligonucleotide
gtacttaacctccgtgagctgcattagttc

SEQ ID NO: 292002 - DNA, 30 bp, Artificial Sequence
  Synthetic oligonucleotide
ctcatagtgagaaactgtaaacaaacgttc

SEQ ID NO: 292003 - DNA, 30 bp, Artificial Sequence
  Synthetic oligonucleotide
ctcagtacgcgcgtcattatgttcacgttc

SEQ ID NO: 292004 - DNA, 30 bp, Artificial Sequence
  Synthetic oligonucleotide
gatgacctagtaccttttcaaacgacgttc

SEQ ID NO: 292005 - DNA, 30 bp, Artificial Sequence
  Synthetic oligonucleotide
caattcgtcgataaaaaggacggtacgttc

SEQ ID NO: 292006 - DNA, 30 bp, Artificial Sequence
  Synthetic oligonucleotide
cacacgcggcgggtcgggcatcaaccgttc

SEQ ID NO: 292007 - DNA, 30 bp, Artificial Sequence
  Synthetic oligonucleotide
taggccttggccgacttgggaagaccgttc

SEQ ID NO: 292008 - DNA, 30 bp, Artificial Sequence
  Synthetic oligonucleotide
ctccagataacatccacaacgtccccgttc

SEQ ID NO: 292009 - DNA, 30 bp, Artificial Sequence
  Synthetic oligonucleotide
tacgctttagagctgagaaggcgcccgttc

SEQ ID NO: 292010 - DNA, 30 bp, Artificial Sequence
  Synthetic oligonucleotide
tgaatgactaattgccaagtagggccgttc

SEQ ID NO: 292011 - DNA, 30 bp, Artificial Sequence
  Synthetic oligonucleotide
gtaccaatggcgggaatgaacgaagcgttc

SEQ ID NO: 292012 - DNA, 30 bp, Artificial Sequence
  Synthetic oligonucleotide
gagcggctcttgcaaggctaaggggcgttc

SEQ ID NO: 292013 - DNA, 30 bp, Artificial Sequence
  Synthetic oligonucleotide
agattcattgcgttagccttctgtgcgttc

SEQ ID NO: 292014 - DNA, 30 bp, Artificial Sequence
  Synthetic oligonucleotide
tgcacaaggttgtgtgcatttaagtcgttc

SEQ ID NO: 292015 - DNA, 30 bp, Artificial Sequence
  Synthetic oligonucleotide
tattaggcgttcgcaagggtgtgcaggttc

SEQ ID NO: 292016 - DNA, 30 bp, Artificial Sequence
  Synthetic oligonucleotide
gttaagttaggattattgaaaaagaggttc

SEQ ID NO: 292017 - DNA, 30 bp, Artificial Sequence
  Synthetic oligonucleotide
ggccaaatgcagttacaagttcataggttc

SEQ ID NO: 292018 - DNA, 30 bp, Artificial Sequence
  Synthetic oligonucleotide
caactggatggatctggcgagctacggttc

SEQ ID NO: 292019 - DNA, 30 bp, Artificial Sequence
  Synthetic oligonucleotide
ccttttggctgtggtttcgtattacggttc

SEQ ID NO: 292020 - DNA, 30 bp, Artificial Sequence
  Synthetic oligonucleotide
agtatatttgtatataaaggtaaccggttc

SEQ ID NO: 292021 - DNA, 30 bp, Artificial Sequence
  Synthetic oligonucleotide
ggaccggatccaatcgcgcgactccggttc

SEQ ID NO: 292022 - DNA, 30 bp, Artificial Sequence
  Synthetic oligonucleotide
cgcgatcatccgatccgagataagcggttc

SEQ ID NO: 292023 - DNA, 30 bp, Artificial Sequence
  Synthetic oligonucleotide
agtaaagggtgaaatgcagaaaccgggttc

SEQ ID NO: 292024 - DNA, 30 bp, Artificial Sequence
  Synthetic oligonucleotide
gggagaacaatgaccagtttggccgggttc

SEQ ID NO: 292025 - DNA, 30 bp, Artificial Sequence
  Synthetic oligonucleotide
gatcggaagacaagtcggtgatgcgggttc

SEQ ID NO: 292026 - DNA, 30 bp, Artificial Sequence
  Synthetic oligonucleotide
gtagacgctcacacgttgggtgaggggttc

SEQ ID NO: 292027 - DNA, 30 bp, Artificial Sequence
  Synthetic oligonucleotide
ggcggctccgtgcctaaggtgtcggggttc

SEQ ID NO: 292028 - DNA, 30 bp, Artificial Sequence
  Synthetic oligonucleotide
taaaatgagaaagctaatgtggaatggttc

SEQ ID NO: 292029 - DNA, 30 bp, Artificial Sequence
  Synthetic oligonucleotide
gcatgaagattacaaaagtaagactggttc

SEQ ID NO: 292030 - DNA, 30 bp, Artificial Sequence
  Synthetic oligonucleotide
tttggaggatctacaaccaaatcctggttc

SEQ ID NO: 292031 - DNA, 30 bp, Artificial Sequence
  Synthetic oligonucleotide
ccttgatggtcgtcttgatgttcgtggttc

SEQ ID NO: 292032 - DNA, 30 bp, Artificial Sequence
  Synthetic oligonucleotide
agagcattaaatctccaccgttgaatgttc

SEQ ID NO: 292033 - DNA, 30 bp, Artificial Sequence
  Synthetic oligonucleotide
caaaccacgttgaattctagtgtaatgttc

SEQ ID NO: 292034 - DNA, 30 bp, Artificial Sequence
  Synthetic oligonucleotide
actctcacaacaatacaacttaacatgttc

SEQ ID NO: 292035 - DNA, 30 bp, Artificial Sequence
  Synthetic oligonucleotide
ccatattcacaaaaaaggcgctatatgttc

SEQ ID NO: 292036 - DNA, 29 bp, Artificial Sequence
  Synthetic oligonucleotide
gatcttatgaccagttataggtactgttc

SEQ ID NO: 292037 - DNA, 30 bp, Artificial Sequence
  Synthetic oligonucleotide
atacacatgcatatgtgtgactccctgttc

SEQ ID NO: 292038 - DNA, 30 bp, Artificial Sequence
  Synthetic oligonucleotide
ctagcaatatttaggttggaggggctgttc

SEQ ID NO: 292039 - DNA, 30 bp, Artificial Sequence
  Synthetic oligonucleotide
tcccagtgggcgataagtatggatctgttc

SEQ ID NO: 292040 - DNA, 30 bp, Artificial Sequence
  Synthetic oligonucleotide
ataacgtttgcgactttgtcacctctgttc

SEQ ID NO: 292041 - DNA, 30 bp, Artificial Sequence
  Synthetic oligonucleotide
aaccaacgcctagatcgacaatgtctgttc

SEQ ID NO: 292042 - DNA, 30 bp, Artificial Sequence
  Synthetic oligonucleotide
ctgtgtgacatgcccccctatcaagtgttc

SEQ ID NO: 292043 - DNA, 30 bp, Artificial Sequence
  Synthetic oligonucleotide
acaagtagtcttgacccaagcgacgtgttc

SEQ ID NO: 292044 - DNA, 30 bp, Artificial Sequence
  Synthetic oligonucleotide
cattaaattggcaccccactaagcgtgttc

SEQ ID NO: 292045 - DNA, 30 bp, Artificial Sequence
  Synthetic oligonucleotide
ttatgcattatcaagagggtcagggtgttc

SEQ ID NO: 292046 - DNA, 30 bp, Artificial Sequence
  Synthetic oligonucleotide
cgaagtagcgacacagttccagaattgttc

SEQ ID NO: 292047 - DNA, 30 bp, Artificial Sequence
  Synthetic oligonucleotide
caatcatatcaatctcgttaattcttgttc

SEQ ID NO: 292048 - DNA, 30 bp, Artificial Sequence
  Synthetic oligonucleotide
cgaaagcgttacgacgacccgttcttgttc

SEQ ID NO: 292049 - DNA, 30 bp, Artificial Sequence
  Synthetic oligonucleotide
tgagtcagaagaataatcaacgagttgttc

SEQ ID NO: 292050 - DNA, 30 bp, Artificial Sequence
  Synthetic oligonucleotide
cggcaagtgtctagcgcatcgtagttgttc

SEQ ID NO: 292051 - DNA, 30 bp, Artificial Sequence
  Synthetic oligonucleotide
gtcaaatcttagagtcagaaagggttgttc

SEQ ID NO: 292052 - DNA, 30 bp, Artificial Sequence
  Synthetic oligonucleotide
acgcgatgcaactgctctattcgtttgttc

SEQ ID NO: 292053 - DNA, 30 bp, Artificial Sequence
  Synthetic oligonucleotide
ggactgaggtaattcaacacttaaaatttc

SEQ ID NO: 292054 - DNA, 30 bp, Artificial Sequence
  Synthetic oligonucleotide
accatggcgatggatccaccgggaaatttc

SEQ ID NO: 292055 - DNA, 30 bp, Artificial Sequence
  Synthetic oligonucleotide
ggtatggctcgagtctattgaatcaatttc

SEQ ID NO: 292056 - DNA, 30 bp, Artificial Sequence
  Synthetic oligonucleotide
cacgtctgttactcatctggcgagaatttc

SEQ ID NO: 292057 - DNA, 30 bp, Artificial Sequence
  Synthetic oligonucleotide
agcgtaaatttaaatttcaactagaatttc

SEQ ID NO: 292058 - DNA, 30 bp, Artificial Sequence
  Synthetic oligonucleotide
cgttctaggacttcgattaaccataatttc

SEQ ID NO: 292059 - DNA, 30 bp, Artificial Sequence
  Synthetic oligonucleotide
cgacggccaaattaatactaaaaacatttc

SEQ ID NO: 292060 - DNA, 30 bp, Artificial Sequence
  Synthetic oligonucleotide
atactagagcactacgttttacaacatttc

SEQ ID NO: 292061 - DNA, 30 bp, Artificial Sequence
  Synthetic oligonucleotide
tattagccgagaaagataatcgtccatttc

SEQ ID NO: 292062 - DNA, 30 bp, Artificial Sequence
  Synthetic oligonucleotide
tagtgactactataggactggctgcatttc

SEQ ID NO: 292063 - DNA, 30 bp, Artificial Sequence
  Synthetic oligonucleotide
catattagaggtgcaattagtttgcatttc

SEQ ID NO: 292064 - DNA, 30 bp, Artificial Sequence
  Synthetic oligonucleotide
tacgtaattgtgagaatctaatatcatttc

SEQ ID NO: 292065 - DNA, 30 bp, Artificial Sequence
  Synthetic oligonucleotide
ttgtaagtgttcaactgggtcagtcatttc

SEQ ID NO: 292066 - DNA, 30 bp, Artificial Sequence
  Synthetic oligonucleotide
ggtcagaagcagccgtagtgataagatttc

SEQ ID NO: 292067 - DNA, 30 bp, Artificial Sequence
  Synthetic oligonucleotide
gatagttcaatcccgaaaggaccagatttc

SEQ ID NO: 292068 - DNA, 30 bp, Artificial Sequence
  Synthetic oligonucleotide
gagctggcttgtgaatcctatttcgatttc

SEQ ID NO: 292069 - DNA, 30 bp, Artificial Sequence
  Synthetic oligonucleotide
gatcgccccttcagcagagtcggggatttc

SEQ ID NO: 292070 - DNA, 30 bp, Artificial Sequence
  Synthetic oligonucleotide
cacattagacgctttagagagatggatttc

SEQ ID NO: 292071 - DNA, 30 bp, Artificial Sequence
  Synthetic oligonucleotide
atcgggaattgatgtcgcgatctggatttc

SEQ ID NO: 292072 - DNA, 30 bp, Artificial Sequence
  Synthetic oligonucleotide
agtaacaacacgcatgcgtaaggtgatttc

SEQ ID NO: 292073 - DNA, 30 bp, Artificial Sequence
  Synthetic oligonucleotide
gagtatacaattttgagatggtgtgatttc

SEQ ID NO: 292074 - DNA, 30 bp, Artificial Sequence
  Synthetic oligonucleotide
aatagggagaaacgtatgctttaatatttc

SEQ ID NO: 292075 - DNA, 30 bp, Artificial Sequence
  Synthetic oligonucleotide
aacggggtcgatctctacacccactatttc

SEQ ID NO: 292076 - DNA, 30 bp, Artificial Sequence
  Synthetic oligonucleotide
gggaggagcagagtcgggtgaagctatttc

SEQ ID NO: 292077 - DNA, 30 bp, Artificial Sequence
  Synthetic oligonucleotide
acaggtatcataccttgggcaacgtatttc

SEQ ID NO: 292078 - DNA, 30 bp, Artificial Sequence
  Synthetic oligonucleotide
atttgtagtcatgtgcaacactggtatttc

SEQ ID NO: 292079 - DNA, 30 bp, Artificial Sequence
  Synthetic oligonucleotide
agatctggtacagcataggtcctgtatttc

SEQ ID NO: 292080 - DNA, 30 bp, Artificial Sequence
  Synthetic oligonucleotide
gcatcgccagatgcctaaaattcttatttc

SEQ ID NO: 292081 - DNA, 30 bp, Artificial Sequence
  Synthetic oligonucleotide
gtagtgggatctgtactcgctcggactttc

SEQ ID NO: 292082 - DNA, 30 bp, Artificial Sequence
  Synthetic oligonucleotide
ggtatagtacacaaagcgatttcccctttc

SEQ ID NO: 292083 - DNA, 30 bp, Artificial Sequence
  Synthetic oligonucleotide
tcctacaacttataggtacatcgccctttc

SEQ ID NO: 292084 - DNA, 30 bp, Artificial Sequence
  Synthetic oligonucleotide
gcaaagaggagtgcccattgtatgcctttc

SEQ ID NO: 292085 - DNA, 30 bp, Artificial Sequence
  Synthetic oligonucleotide
tcggtggatcgtcttcctggcaaagctttc

SEQ ID NO: 292086 - DNA, 30 bp, Artificial Sequence
  Synthetic oligonucleotide
gctgtctgatgtctcaagtggtcagctttc

SEQ ID NO: 292087 - DNA, 30 bp, Artificial Sequence
  Synthetic oligonucleotide
aaggcaggcgaaaggtatgacttagctttc

SEQ ID NO: 292088 - DNA, 30 bp, Artificial Sequence
  Synthetic oligonucleotide
gtagtccggtctatgtagatcgacgctttc

SEQ ID NO: 292089 - DNA, 30 bp, Artificial Sequence
  Synthetic oligonucleotide
tcaatccgcttttcctatccaaccgctttc

SEQ ID NO: 292090 - DNA, 30 bp, Artificial Sequence
  Synthetic oligonucleotide
gcggaactcgcagtattggaaagggctttc

SEQ ID NO: 292091 - DNA, 30 bp, Artificial Sequence
  Synthetic oligonucleotide
ggcagggagccatgggttatctgggctttc

SEQ ID NO: 292092 - DNA, 30 bp, Artificial Sequence
  Synthetic oligonucleotide
ggcaagctaaacaactaatttagtgctttc

SEQ ID NO: 292093 - DNA, 30 bp, Artificial Sequence
  Synthetic oligonucleotide
tcatgggtgctatctggctaacgtgctttc

SEQ ID NO: 292094 - DNA, 30 bp, Artificial Sequence
  Synthetic oligonucleotide
cagtggttaagccgcaggaggcttgctttc

SEQ ID NO: 292095 - DNA, 30 bp, Artificial Sequence
  Synthetic oligonucleotide
tatacactcctcgtattccgctttgctttc

SEQ ID NO: 292096 - DNA, 30 bp, Artificial Sequence
  Synthetic oligonucleotide
ttatagcgccaagtaacgccgtcatctttc

SEQ ID NO: 292097 - DNA, 30 bp, Artificial Sequence
  Synthetic oligonucleotide
gtcagtttgaaccaggtgcacagatctttc

SEQ ID NO: 292098 - DNA, 30 bp, Artificial Sequence
  Synthetic oligonucleotide
ggttaagagtttcgtcgagtgcagtctttc

SEQ ID NO: 292099 - DNA, 30 bp, Artificial Sequence
  Synthetic oligonucleotide
acagtcgaggctcttcacaggacttctttc

SEQ ID NO: 292100 - DNA, 30 bp, Artificial Sequence
  Synthetic oligonucleotide
agtaaataaacgcgacccgaaatttctttc

SEQ ID NO: 292101 - DNA, 30 bp, Artificial Sequence
  Synthetic oligonucleotide
gttctctacgtatcccttcggttttctttc

SEQ ID NO: 292102 - DNA, 30 bp, Artificial Sequence
  Synthetic oligonucleotide
gacgaggtggccaagtgtagcagaagtttc

SEQ ID NO: 292103 - DNA, 30 bp, Artificial Sequence
  Synthetic oligonucleotide
agacccactcttatgtctggggccagtttc

SEQ ID NO: 292104 - DNA, 30 bp, Artificial Sequence
  Synthetic oligonucleotide
gtcgtccatagagacctcatgggcagtttc

SEQ ID NO: 292105 - DNA, 30 bp, Artificial Sequence
  Synthetic oligonucleotide
taggcaaggtctaggagcataattagtttc

SEQ ID NO: 292106 - DNA, 30 bp, Artificial Sequence
  Synthetic oligonucleotide
cttaagccaaagagcttaaggcaacgtttc

SEQ ID NO: 292107 - DNA, 30 bp, Artificial Sequence
  Synthetic oligonucleotide
cgtgcaaaacggagacggctagtccgtttc

SEQ ID NO: 292108 - DNA, 30 bp, Artificial Sequence
  Synthetic oligonucleotide
agtagaatatacagtgtgcacacaggtttc

SEQ ID NO: 292109 - DNA, 30 bp, Artificial Sequence
  Synthetic oligonucleotide
gtctctgagtaacatctacccattggtttc

SEQ ID NO: 292110 - DNA, 30 bp, Artificial Sequence
  Synthetic oligonucleotide
gttggcttgctagcgacgaggtgatgtttc

SEQ ID NO: 292111 - DNA, 30 bp, Artificial Sequence
  Synthetic oligonucleotide
agttgggacgatctatcgcggctatgtttc

SEQ ID NO: 292112 - DNA, 30 bp, Artificial Sequence
  Synthetic oligonucleotide
gtacagcaggtacccatccctctatgtttc

SEQ ID NO: 292113 - DNA, 30 bp, Artificial Sequence
  Synthetic oligonucleotide
tacggaacatgccggcgcataaggtgtttc

SEQ ID NO: 292114 - DNA, 30 bp, Artificial Sequence
  Synthetic oligonucleotide
atgttaggcaacctatatcaagacattttc

SEQ ID NO: 292115 - DNA, 30 bp, Artificial Sequence
  Synthetic oligonucleotide
ccgcgccttggtcgtaaccctattattttc

SEQ ID NO: 292116 - DNA, 30 bp, Artificial Sequence
  Synthetic oligonucleotide
tcatatgtgctgtggaacgttgaccttttc

SEQ ID NO: 292117 - DNA, 30 bp, Artificial Sequence
  Synthetic oligonucleotide
tgtcaccaactcggcctcgtgacccttttc

SEQ ID NO: 292118 - DNA, 30 bp, Artificial Sequence
  Synthetic oligonucleotide
ccattgctagtgtatttcttcgatcttttc

SEQ ID NO: 292119 - DNA, 30 bp, Artificial Sequence
  Synthetic oligonucleotide
gcctaaagggatggtatcatcttagttttc

SEQ ID NO: 292120 - DNA, 30 bp, Artificial Sequence
  Synthetic oligonucleotide
ttcggaagtacccgcggatagactgttttc

SEQ ID NO: 292121 - DNA, 30 bp, Artificial Sequence
  Synthetic oligonucleotide
gcaaaccaggtctgaggcctagctgttttc

SEQ ID NO: 292122 - DNA, 30 bp, Artificial Sequence
  Synthetic oligonucleotide
atatctcaagccatggctgaacttgttttc

SEQ ID NO: 292123 - DNA, 30 bp, Artificial Sequence
  Synthetic oligonucleotide
aggacgacgaggcttcgggtcccatttttc

SEQ ID NO: 292124 - DNA, 30 bp, Artificial Sequence
  Synthetic oligonucleotide
atatgacaaaacggcagggatgcctttttc

SEQ ID NO: 292125 - DNA, 30 bp, Artificial Sequence
  Synthetic oligonucleotide
ctggggactgattttaagtccgcttttttc

SEQ ID NO: 292126 - DNA, 30 bp, Artificial Sequence
  Synthetic oligonucleotide
cttgccgctggctcggaactattaaaaaag

SEQ ID NO: 292127 - DNA, 30 bp, Artificial Sequence
  Synthetic oligonucleotide
atcgtgtccgctcgctagaactccaaaaag

SEQ ID NO: 292128 - DNA, 30 bp, Artificial Sequence
  Synthetic oligonucleotide
agccccgaatgtatacggttgttcaaaaag

SEQ ID NO: 292129 - DNA, 30 bp, Artificial Sequence
  Synthetic oligonucleotide
accggcacagagacctctgatcagaaaaag

SEQ ID NO: 292130 - DNA, 30 bp, Artificial Sequence
  Synthetic oligonucleotide
ttgtcgtaactctcgagcatgtcgaaaaag

SEQ ID NO: 292131 - DNA, 30 bp, Artificial Sequence
  Synthetic oligonucleotide
tgggcaatgaaaagtacacaaaataaaaag

SEQ ID NO: 292132 - DNA, 31 bp, Artificial Sequence
  Synthetic oligonucleotide
atcatataagtaattggcttggaataaaaag

SEQ ID NO: 292133 - DNA, 30 bp, Artificial Sequence
  Synthetic oligonucleotide
cgtctcagccattccggcagttataaaaag

SEQ ID NO: 292134 - DNA, 31 bp, Artificial Sequence
  Synthetic oligonucleotide
gcacgtgaggatctaaactaagcctaaaaag

SEQ ID NO: 292135 - DNA, 30 bp, Artificial Sequence
  Synthetic oligonucleotide
gctgacatgagcgaaggcccttctaaaaag

SEQ ID NO: 292136 - DNA, 30 bp, Artificial Sequence
  Synthetic oligonucleotide
gagggacccctgcgtcctcggacacaaaag

SEQ ID NO: 292137 - DNA, 30 bp, Artificial Sequence
  Synthetic oligonucleotide
gacgtgcgtcgggacctgcgttcacaaaag

SEQ ID NO: 292138 - DNA, 30 bp, Artificial Sequence
  Synthetic oligonucleotide
cattgtaatttagggtcggggcgacaaaag

SEQ ID NO: 292139 - DNA, 30 bp, Artificial Sequence
  Synthetic oligonucleotide
atgtctcaggggagttacattgggcaaaag

SEQ ID NO: 292140 - DNA, 30 bp, Artificial Sequence
  Synthetic oligonucleotide
tcgggatacagatcatttcattgtcaaaag

SEQ ID NO: 292141 - DNA, 30 bp, Artificial Sequence
  Synthetic oligonucleotide
tatgagaactcgcctccctctattcaaaag

SEQ ID NO: 292142 - DNA, 30 bp, Artificial Sequence
  Synthetic oligonucleotide
aaatagtttgcaggcgaaaatatagaaaag

SEQ ID NO: 292143 - DNA, 30 bp, Artificial Sequence
  Synthetic oligonucleotide
gagtagtgggagttgcttgcacacgaaaag

SEQ ID NO: 292144 - DNA, 30 bp, Artificial Sequence
  Synthetic oligonucleotide
gggtactttccttcgtacaacgacgaaaag

SEQ ID NO: 292145 - DNA, 30 bp, Artificial Sequence
  Synthetic oligonucleotide
gacttacccttgtgccaacaggacgaaaag

SEQ ID NO: 292146 - DNA, 30 bp, Artificial Sequence
  Synthetic oligonucleotide
tcccttgagtatatagcggaggtcgaaaag

SEQ ID NO: 292147 - DNA, 30 bp, Artificial Sequence
  Synthetic oligonucleotide
tgaggtcgtgtctcgtttagtcaggaaaag

SEQ ID NO: 292148 - DNA, 30 bp, Artificial Sequence
  Synthetic oligonucleotide
agaagtttacgttttcggaacgcggaaaag

SEQ ID NO: 292149 - DNA, 30 bp, Artificial Sequence
  Synthetic oligonucleotide
agacgttctggtaaaattatttatgaaaag

SEQ ID NO: 292150 - DNA, 30 bp, Artificial Sequence
  Synthetic oligonucleotide
cttatgcacccacttcggattactgaaaag

SEQ ID NO: 292151 - DNA, 30 bp, Artificial Sequence
  Synthetic oligonucleotide
gttcactcgaaacgcggtcttagtgaaaag

SEQ ID NO: 292152 - DNA, 30 bp, Artificial Sequence
  Synthetic oligonucleotide
cacccgtgacacgcagggagacgtgaaaag

SEQ ID NO: 292153 - DNA, 30 bp, Artificial Sequence
  Synthetic oligonucleotide
caggagcgattggtcaaaaattaataaaag

SEQ ID NO: 292154 - DNA, 30 bp, Artificial Sequence
  Synthetic oligonucleotide
agtccgaatcttgtgcctaaggcgtaaaag

SEQ ID NO: 292155 - DNA, 31 bp, Artificial Sequence
  Synthetic oligonucleotide
taagtgggggaatgaacttcgttcgtaaaag

SEQ ID NO: 292156 - DNA, 30 bp, Artificial Sequence
  Synthetic oligonucleotide
tattattaaggatgatgtcctgaaacaaag

SEQ ID NO: 292157 - DNA, 30 bp, Artificial Sequence
  Synthetic oligonucleotide
gtaggtttcacgcatgtctaatccacaaag

SEQ ID NO: 292158 - DNA, 30 bp, Artificial Sequence
  Synthetic oligonucleotide
tatacagacgtatctcgaaactccacaaag

SEQ ID NO: 292159 - DNA, 30 bp, Artificial Sequence
  Synthetic oligonucleotide
ggcctgcctaccgtgcgtaagagcacaaag

SEQ ID NO: 292160 - DNA, 30 bp, Artificial Sequence
  Synthetic oligonucleotide
gttagttgagtattctattcagagacaaag

SEQ ID NO: 292161 - DNA, 30 bp, Artificial Sequence
  Synthetic oligonucleotide
ctatcatagtaacccgtacattggacaaag

SEQ ID NO: 292162 - DNA, 30 bp, Artificial Sequence
  Synthetic oligonucleotide
tgcgggacccgaccgtctatgcatacaaag

SEQ ID NO: 292163 - DNA, 30 bp, Artificial Sequence
  Synthetic oligonucleotide
gccagtaaaaaggtccggaattatacaaag

SEQ ID NO: 292164 - DNA, 30 bp, Artificial Sequence
  Synthetic oligonucleotide
aggcgcagccgtgtgcgaaacacaccaaag

SEQ ID NO: 292165 - DNA, 30 bp, Artificial Sequence
  Synthetic oligonucleotide
ggctttcaaaccgactctaccggcccaaag

SEQ ID NO: 292166 - DNA, 30 bp, Artificial Sequence
  Synthetic oligonucleotide
ataaataggatccgttccaaggtgccaaag

SEQ ID NO: 292167 - DNA, 30 bp, Artificial Sequence
  Synthetic oligonucleotide
ctttatggtgcctcgcggacgattccaaag

SEQ ID NO: 292168 - DNA, 30 bp, Artificial Sequence
  Synthetic oligonucleotide
tcatagaagcggggctgttgtattccaaag

SEQ ID NO: 292169 - DNA, 30 bp, Artificial Sequence
  Synthetic oligonucleotide
ctggagtacgtgaagtggtagcttccaaag

SEQ ID NO: 292170 - DNA, 30 bp, Artificial Sequence
  Synthetic oligonucleotide
cgcagaccgcaaggtaccggggttccaaag

SEQ ID NO: 292171 - DNA, 30 bp, Artificial Sequence
  Synthetic oligonucleotide
ttcaaacgcgtgttggcgcacccagcaaag

SEQ ID NO: 292172 - DNA, 30 bp, Artificial Sequence
  Synthetic oligonucleotide
tctggtagaattaccaagatacccgcaaag

SEQ ID NO: 292173 - DNA, 30 bp, Artificial Sequence
  Synthetic oligonucleotide
gagcaatattagctgtgaaaaatggcaaag

SEQ ID NO: 292174 - DNA, 30 bp, Artificial Sequence
  Synthetic oligonucleotide
ttagcttagccacaacagggggtggcaaag

SEQ ID NO: 292175 - DNA, 30 bp, Artificial Sequence
  Synthetic oligonucleotide
cgaggtgaacgcacacaacagattgcaaag

SEQ ID NO: 292176 - DNA, 30 bp, Artificial Sequence
  Synthetic oligonucleotide
cttgtcttaagtagtttgggcacatcaaag

SEQ ID NO: 292177 - DNA, 30 bp, Artificial Sequence
  Synthetic oligonucleotide
attagcttggggcaaaagcttacatcaaag

SEQ ID NO: 292178 - DNA, 30 bp, Artificial Sequence
  Synthetic oligonucleotide
aggaccttttataacggcgggttctcaaag

SEQ ID NO: 292179 - DNA, 30 bp, Artificial Sequence
  Synthetic oligonucleotide
ggggcagccggtgactcagtggaaagaaag

SEQ ID NO: 292180 - DNA, 30 bp, Artificial Sequence
  Synthetic oligonucleotide
tatcaatagtccttgacggggataagaaag

SEQ ID NO: 292181 - DNA, 30 bp, Artificial Sequence
  Synthetic oligonucleotide
ccgttttaggtacaacgcatatccagaaag

SEQ ID NO: 292182 - DNA, 30 bp, Artificial Sequence
  Synthetic oligonucleotide
cttatgctgcaaaacgtgttcagcagaaag

SEQ ID NO: 292183 - DNA, 30 bp, Artificial Sequence
  Synthetic oligonucleotide
gttttgtaacttctcctagcggcgagaaag

SEQ ID NO: 292184 - DNA, 30 bp, Artificial Sequence
  Synthetic oligonucleotide
actggacgcagggccctagagcggagaaag

SEQ ID NO: 292185 - DNA, 30 bp, Artificial Sequence
  Synthetic oligonucleotide
gcctggcagcggacgggtagctggagaaag

SEQ ID NO: 292186 - DNA, 30 bp, Artificial Sequence
  Synthetic oligonucleotide
agtgaccaacgccattttgaagatagaaag

SEQ ID NO: 292187 - DNA, 30 bp, Artificial Sequence
  Synthetic oligonucleotide
acagttggagcgagtgagcgatatagaaag

SEQ ID NO: 292188 - DNA, 30 bp, Artificial Sequence
  Synthetic oligonucleotide
atagctttcattcataccacggctagaaag

SEQ ID NO: 292189 - DNA, 30 bp, Artificial Sequence
  Synthetic oligonucleotide
aatagacacagatgtcttctacaccgaaag

SEQ ID NO: 292190 - DNA, 30 bp, Artificial Sequence
  Synthetic oligonucleotide
gagcaaaccattttagtgattacgcgaaag

SEQ ID NO: 292191 - DNA, 30 bp, Artificial Sequence
  Synthetic oligonucleotide
agtgttatgctgactcagtgaaatcgaaag

SEQ ID NO: 292192 - DNA, 30 bp, Artificial Sequence
  Synthetic oligonucleotide
agcttggttgccgggtttactcctcgaaag

SEQ ID NO: 292193 - DNA, 30 bp, Artificial Sequence
  Synthetic oligonucleotide
cgcctctgaggactcggttcgagtcgaaag

SEQ ID NO: 292194 - DNA, 30 bp, Artificial Sequence
  Synthetic oligonucleotide
taagggttattcgaattaacagcaggaaag

SEQ ID NO: 292195 - DNA, 30 bp, Artificial Sequence
  Synthetic oligonucleotide
tcctaatggatggaatataaggtaggaaag

SEQ ID NO: 292196 - DNA, 30 bp, Artificial Sequence
  Synthetic oligonucleotide
agccactcgttccctaattaatgcggaaag

SEQ ID NO: 292197 - DNA, 30 bp, Artificial Sequence
  Synthetic oligonucleotide
aaagtccctgagctctgaaccaagggaaag

SEQ ID NO: 292198 - DNA, 30 bp, Artificial Sequence
  Synthetic oligonucleotide
tatgtacgaaatgagggtggcgcgggaaag

SEQ ID NO: 292199 - DNA, 30 bp, Artificial Sequence
  Synthetic oligonucleotide
aatctaagtcattggtatagggctggaaag

SEQ ID NO: 292200 - DNA, 30 bp, Artificial Sequence
  Synthetic oligonucleotide
gggccccagttctagtctgtagttggaaag

SEQ ID NO: 292201 - DNA, 30 bp, Artificial Sequence
  Synthetic oligonucleotide
aagtctgggcaatttgggctgggatgaaag

SEQ ID NO: 292202 - DNA, 30 bp, Artificial Sequence
  Synthetic oligonucleotide
gcgtatcatttcggtggataccactgaaag

SEQ ID NO: 292203 - DNA, 30 bp, Artificial Sequence
  Synthetic oligonucleotide
agggcagccttacagtatgcgtggtgaaag

SEQ ID NO: 292204 - DNA, 30 bp, Artificial Sequence
  Synthetic oligonucleotide
accatatatatgggtaacattctgtgaaag

SEQ ID NO: 292205 - DNA, 30 bp, Artificial Sequence
  Synthetic oligonucleotide
ggagaacagagaggatggagctcttgaaag

SEQ ID NO: 292206 - DNA, 30 bp, Artificial Sequence
  Synthetic oligonucleotide
atcgtgcgagcactgctagagttaataaag

SEQ ID NO: 292207 - DNA, 30 bp, Artificial Sequence
  Synthetic oligonucleotide
atctgacatggacgtctagtttggataaag

SEQ ID NO: 292208 - DNA, 30 bp, Artificial Sequence
  Synthetic oligonucleotide
atccgcatagcgctccacgagctgataaag

SEQ ID NO: 292209 - DNA, 30 bp, Artificial Sequence
  Synthetic oligonucleotide
cttctggccaactggataaccagtataaag

SEQ ID NO: 292210 - DNA, 30 bp, Artificial Sequence
  Synthetic oligonucleotide
tgcagttggcgatagtgatgtcttataaag

SEQ ID NO: 292211 - DNA, 30 bp, Artificial Sequence
  Synthetic oligonucleotide
gaatgagtcccttacgccactttactaaag

SEQ ID NO: 292212 - DNA, 30 bp, Artificial Sequence
  Synthetic oligonucleotide
gattagcctgttcgacggggggagctaaag

SEQ ID NO: 292213 - DNA, 30 bp, Artificial Sequence
  Synthetic oligonucleotide
gtacatacgctgactaagaatgcgctaaag

SEQ ID NO: 292214 - DNA, 30 bp, Artificial Sequence
  Synthetic oligonucleotide
aacagacagtatgttttatttcatctaaag

SEQ ID NO: 292215 - DNA, 30 bp, Artificial Sequence
  Synthetic oligonucleotide
gttaggcagtaatgacacccctctctaaag

SEQ ID NO: 292216 - DNA, 30 bp, Artificial Sequence
  Synthetic oligonucleotide
ggagatattttgtattatgcgagtctaaag

SEQ ID NO: 292217 - DNA, 30 bp, Artificial Sequence
  Synthetic oligonucleotide
caatattcctacccttctcacggtctaaag

SEQ ID NO: 292218 - DNA, 30 bp, Artificial Sequence
  Synthetic oligonucleotide
tttcgtagtagtcatgtgctataagtaaag

SEQ ID NO: 292219 - DNA, 30 bp, Artificial Sequence
  Synthetic oligonucleotide
caatttgctaagtaccgtgcgtacgtaaag

SEQ ID NO: 292220 - DNA, 30 bp, Artificial Sequence
  Synthetic oligonucleotide
gcagcattgtttgaggagcgacaggtaaag

SEQ ID NO: 292221 - DNA, 30 bp, Artificial Sequence
  Synthetic oligonucleotide
ggtaccgtgtcgcaatagtctagggtaaag

SEQ ID NO: 292222 - DNA, 30 bp, Artificial Sequence
  Synthetic oligonucleotide
agtgctacgatgccgggcgcgcgggtaaag

SEQ ID NO: 292223 - DNA, 30 bp, Artificial Sequence
  Synthetic oligonucleotide
tggtatgaagttctgggtaaggctgtaaag

SEQ ID NO: 292224 - DNA, 30 bp, Artificial Sequence
  Synthetic oligonucleotide
tctgggctatgaggaatcagcagtgtaaag

SEQ ID NO: 292225 - DNA, 30 bp, Artificial Sequence
  Synthetic oligonucleotide
atcggttctagataaataggaggtgtaaag

SEQ ID NO: 292226 - DNA, 30 bp, Artificial Sequence
  Synthetic oligonucleotide
ccggggtcgggtatgttgggactattaaag

SEQ ID NO: 292227 - DNA, 30 bp, Artificial Sequence
  Synthetic oligonucleotide
taatgcggtaaaaaaagtactcagttaaag

SEQ ID NO: 292228 - DNA, 30 bp, Artificial Sequence
  Synthetic oligonucleotide
ttaactccctggtcagtcatatagttaaag

SEQ ID NO: 292229 - DNA, 30 bp, Artificial Sequence
  Synthetic oligonucleotide
cacgtacagccccgccctcagcggttaaag

SEQ ID NO: 292230 - DNA, 30 bp, Artificial Sequence
  Synthetic oligonucleotide
ccttcagcgtggccggaatgtaatttaaag

SEQ ID NO: 292231 - DNA, 30 bp, Artificial Sequence
  Synthetic oligonucleotide
aagttcggagctagaggacgggatttaaag

SEQ ID NO: 292232 - DNA, 30 bp, Artificial Sequence
  Synthetic oligonucleotide
cgggtagtagcgcgctcttctagtttaaag

SEQ ID NO: 292233 - DNA, 30 bp, Artificial Sequence
  Synthetic oligonucleotide
aagctgagctggctattatgttttttaaag

SEQ ID NO: 292234 - DNA, 30 bp, Artificial Sequence
  Synthetic oligonucleotide
ccacgtcgacgatcaaagcgcgtaaacaag

SEQ ID NO: 292235 - DNA, 30 bp, Artificial Sequence
  Synthetic oligonucleotide
gtatatttcaattgactgtaagttaacaag

SEQ ID NO: 292236 - DNA, 30 bp, Artificial Sequence
  Synthetic oligonucleotide
aatcaaataattgtatttgttacacacaag

SEQ ID NO: 292237 - DNA, 30 bp, Artificial Sequence
  Synthetic oligonucleotide
cccgaatcatatgagacttacttacacaag

SEQ ID NO: 292238 - DNA, 30 bp, Artificial Sequence
  Synthetic oligonucleotide
ctggggctgtcatatggctgttaccacaag

SEQ ID NO: 292239 - DNA, 30 bp, Artificial Sequence
  Synthetic oligonucleotide
gaatatatcaccacgaaatgggtccacaag

SEQ ID NO: 292240 - DNA, 30 bp, Artificial Sequence
  Synthetic oligonucleotide
cggtctttggtaaattagcgtaagcacaag

SEQ ID NO: 292241 - DNA, 30 bp, Artificial Sequence
  Synthetic oligonucleotide
ggtccgtatagaatcaggtattagcacaag

SEQ ID NO: 292242 - DNA, 30 bp, Artificial Sequence
  Synthetic oligonucleotide
gttcggtgcccgggaagcctaaggcacaag

SEQ ID NO: 292243 - DNA, 31 bp, Artificial Sequence
  Synthetic oligonucleotide
tataacatgctcgactacatccggagacaag

SEQ ID NO: 292244 - DNA, 30 bp, Artificial Sequence
  Synthetic oligonucleotide
gctggtgtgctgtgcaggttcagggacaag

SEQ ID NO: 292245 - DNA, 30 bp, Artificial Sequence
  Synthetic oligonucleotide
gagtcatacaattagatgactcgggacaag

SEQ ID NO: 292246 - DNA, 30 bp, Artificial Sequence
  Synthetic oligonucleotide
atgtatgcagcgtgtggggttcgggacaag

SEQ ID NO: 292247 - DNA, 30 bp, Artificial Sequence
  Synthetic oligonucleotide
ggaccagcacagggcttacggcatgacaag

SEQ ID NO: 292248 - DNA, 30 bp, Artificial Sequence
  Synthetic oligonucleotide
ctggagcaacaagtaagtcatgatgacaag

SEQ ID NO: 292249 - DNA, 30 bp, Artificial Sequence
  Synthetic oligonucleotide
agaaatcgttccagtgttgttggatacaag

SEQ ID NO: 292250 - DNA, 30 bp, Artificial Sequence
  Synthetic oligonucleotide
tgccagtccctataagcgactatatacaag

SEQ ID NO: 292251 - DNA, 30 bp, Artificial Sequence
  Synthetic oligonucleotide
ctctaagtgcaatgggtgggtagttacaag

SEQ ID NO: 292252 - DNA, 30 bp, Artificial Sequence
  Synthetic oligonucleotide
aaagtagtgacctatcaaattccaaccaag

SEQ ID NO: 292253 - DNA, 30 bp, Artificial Sequence
  Synthetic oligonucleotide
cctgtcctgatatatattgtaggaaccaag

SEQ ID NO: 292254 - DNA, 30 bp, Artificial Sequence
  Synthetic oligonucleotide
ttaagacggtggttccgcgtagcgaccaag

SEQ ID NO: 292255 - DNA, 30 bp, Artificial Sequence
  Synthetic oligonucleotide
cttgcaaaaacgacatcgtgctttaccaag

SEQ ID NO: 292256 - DNA, 30 bp, Artificial Sequence
  Synthetic oligonucleotide
tccacgtaggattcccatattccccccaag

SEQ ID NO: 292257 - DNA, 30 bp, Artificial Sequence
  Synthetic oligonucleotide
ccgcctacgcccaaagtgaacacgcccaag

SEQ ID NO: 292258 - DNA, 30 bp, Artificial Sequence
  Synthetic oligonucleotide
gagtctgctttacgtgtaggctggcccaag

SEQ ID NO: 292259 - DNA, 30 bp, Artificial Sequence
  Synthetic oligonucleotide
cagttccatagagtcgctgggggtcccaag

SEQ ID NO: 292260 - DNA, 30 bp, Artificial Sequence
  Synthetic oligonucleotide
atgagcgtcccatttacggcgtcagccaag

SEQ ID NO: 292261 - DNA, 30 bp, Artificial Sequence
  Synthetic oligonucleotide
tgctaaataagtaatctgggcgacgccaag

SEQ ID NO: 292262 - DNA, 30 bp, Artificial Sequence
  Synthetic oligonucleotide
acttacaggactgccgttagtttcgccaag

SEQ ID NO: 292263 - DNA, 30 bp, Artificial Sequence
  Synthetic oligonucleotide
cgcatccagaccactgatcataaggccaag

SEQ ID NO: 292264 - DNA, 30 bp, Artificial Sequence
  Synthetic oligonucleotide
tccctcagttacataaatctccatgccaag

SEQ ID NO: 292265 - DNA, 30 bp, Artificial Sequence
  Synthetic oligonucleotide
gtgcaaatgggccctaattgtactgccaag

SEQ ID NO: 292266 - DNA, 30 bp, Artificial Sequence
  Synthetic oligonucleotide
ccggggtaatgtttctgaactccctccaag

SEQ ID NO: 292267 - DNA, 30 bp, Artificial Sequence
  Synthetic oligonucleotide
tggcacgattggtgtggggttaggtccaag

SEQ ID NO: 292268 - DNA, 30 bp, Artificial Sequence
  Synthetic oligonucleotide
ctgccgctttgtatcttcttaatttccaag

SEQ ID NO: 292269 - DNA, 30 bp, Artificial Sequence
  Synthetic oligonucleotide
cgtccaactcaaaggaccatagaaagcaag

SEQ ID NO: 292270 - DNA, 30 bp, Artificial Sequence
  Synthetic oligonucleotide
tgaacccaatgacgcatggcggcaagcaag

SEQ ID NO: 292271 - DNA, 30 bp, Artificial Sequence
  Synthetic oligonucleotide
taactcagaggacctgcgttggcgagcaag

SEQ ID NO: 292272 - DNA, 30 bp, Artificial Sequence
  Synthetic oligonucleotide
aatagatccgacactccctcaaatagcaag

SEQ ID NO: 292273 - DNA, 30 bp, Artificial Sequence
  Synthetic oligonucleotide
gataccactattaggtgctggtaacgcaag

SEQ ID NO: 292274 - DNA, 30 bp, Artificial Sequence
  Synthetic oligonucleotide
tacagcgacgtcagctagcaaaaccgcaag

SEQ ID NO: 292275 - DNA, 30 bp, Artificial Sequence
  Synthetic oligonucleotide
gagttagtaggcagtcgaacggtccgcaag

SEQ ID NO: 292276 - DNA, 30 bp, Artificial Sequence
  Synthetic oligonucleotide
cagggatatagcacgccgcatgtgcgcaag

SEQ ID NO: 292277 - DNA, 30 bp, Artificial Sequence
  Synthetic oligonucleotide
cacgggtactaaacccgtatgtgaggcaag

SEQ ID NO: 292278 - DNA, 30 bp, Artificial Sequence
  Synthetic oligonucleotide
gtacacgtctatatgacaattttaggcaag

SEQ ID NO: 292279 - DNA, 30 bp, Artificial Sequence
  Synthetic oligonucleotide
ctactaagccccgtcggttaagagggcaag

SEQ ID NO: 292280 - DNA, 30 bp, Artificial Sequence
  Synthetic oligonucleotide
cagacaggcgcgcatcgtcggtcgggcaag

SEQ ID NO: 292281 - DNA, 30 bp, Artificial Sequence
  Synthetic oligonucleotide
agactttcctgccaagttacgaatggcaag

SEQ ID NO: 292282 - DNA, 30 bp, Artificial Sequence
  Synthetic oligonucleotide
tacacattctcgaatatggggggtggcaag

SEQ ID NO: 292283 - DNA, 30 bp, Artificial Sequence
  Synthetic oligonucleotide
gaacgctctgaggccgacgctgaatgcaag

SEQ ID NO: 292284 - DNA, 30 bp, Artificial Sequence
  Synthetic oligonucleotide
ttccatgcgagcttagtaatttcatgcaag

SEQ ID NO: 292285 - DNA, 30 bp, Artificial Sequence
  Synthetic oligonucleotide
gaccggatttcgagaccgatttcgtgcaag

SEQ ID NO: 292286 - DNA, 30 bp, Artificial Sequence
  Synthetic oligonucleotide
gggtagttgtggaccctaatggaaatcaag

SEQ ID NO: 292287 - DNA, 30 bp, Artificial Sequence
  Synthetic oligonucleotide
aagacctccgattcccagattttaatcaag

SEQ ID NO: 292288 - DNA, 30 bp, Artificial Sequence
  Synthetic oligonucleotide
caaactgagctgatctttaagctcatcaag

SEQ ID NO: 292289 - DNA, 30 bp, Artificial Sequence
  Synthetic oligonucleotide
agggtgctgggagtggttcgggagatcaag

SEQ ID NO: 292290 - DNA, 30 bp, Artificial Sequence
  Synthetic oligonucleotide
attattcaccgttctaaaagggctatcaag

SEQ ID NO: 292291 - DNA, 30 bp, Artificial Sequence
  Synthetic oligonucleotide
gggagatcagcagattgtatacccctcaag

SEQ ID NO: 292292 - DNA, 30 bp, Artificial Sequence
  Synthetic oligonucleotide
gtacagcgtatttgtgtaaggcccctcaag

SEQ ID NO: 292293 - DNA, 30 bp, Artificial Sequence
  Synthetic oligonucleotide
atcgcattatgtcagcggaccggcctcaag

SEQ ID NO: 292294 - DNA, 30 bp, Artificial Sequence
  Synthetic oligonucleotide
ccctaccttgacaagaccggactgctcaag

SEQ ID NO: 292295 - DNA, 30 bp, Artificial Sequence
  Synthetic oligonucleotide
aatacgtctagtgtgtgtgactctctcaag

SEQ ID NO: 292296 - DNA, 30 bp, Artificial Sequence
  Synthetic oligonucleotide
cagccagctgcttgtgaagcaagagtcaag

SEQ ID NO: 292297 - DNA, 30 bp, Artificial Sequence
  Synthetic oligonucleotide
gctgtgtagttctcgtacgcacgagtcaag

SEQ ID NO: 292298 - DNA, 30 bp, Artificial Sequence
  Synthetic oligonucleotide
gtcatagaacgtaaggaccggtgagtcaag

SEQ ID NO: 292299 - DNA, 30 bp, Artificial Sequence
  Synthetic oligonucleotide
acagctgccatggatgtgcctcacgtcaag

SEQ ID NO: 292300 - DNA, 30 bp, Artificial Sequence
  Synthetic oligonucleotide
tgggtgaatgaatttactaatatcgtcaag

SEQ ID NO: 292301 - DNA, 30 bp, Artificial Sequence
  Synthetic oligonucleotide
atggtatcactacgccgggtcgtggtcaag

SEQ ID NO: 292302 - DNA, 30 bp, Artificial Sequence
  Synthetic oligonucleotide
tgttgtgcggagtcaatcctagaattcaag

SEQ ID NO: 292303 - DNA, 30 bp, Artificial Sequence
  Synthetic oligonucleotide
ctataccagaactttgttgatcacttcaag

SEQ ID NO: 292304 - DNA, 30 bp, Artificial Sequence
  Synthetic oligonucleotide
ctgcttttcatgcttgtgggcctcttcaag

SEQ ID NO: 292305 - DNA, 30 bp, Artificial Sequence
  Synthetic oligonucleotide
aaacgcgcaggcagataatgtctcttcaag

SEQ ID NO: 292306 - DNA, 30 bp, Artificial Sequence
  Synthetic oligonucleotide
tccttcctaattaagtcagtctcgttcaag

SEQ ID NO: 292307 - DNA, 30 bp, Artificial Sequence
  Synthetic oligonucleotide
ggtccatctcttccgggccgttatttcaag

SEQ ID NO: 292308 - DNA, 30 bp, Artificial Sequence
  Synthetic oligonucleotide
gttgcgggtattagagtccccactttcaag

SEQ ID NO: 292309 - DNA, 30 bp, Artificial Sequence
  Synthetic oligonucleotide
tcacatggtaactatgcaaggattttcaag

SEQ ID NO: 292310 - DNA, 30 bp, Artificial Sequence
  Synthetic oligonucleotide
acaatcgtggaaacggattcacgcaagaag

SEQ ID NO: 292311 - DNA, 30 bp, Artificial Sequence
  Synthetic oligonucleotide
aattaaccgtactattagtaagataagaag

SEQ ID NO: 292312 - DNA, 30 bp, Artificial Sequence
  Synthetic oligonucleotide
tttgtgagcattaagtcacgcaaacagaag

SEQ ID NO: 292313 - DNA, 31 bp, Artificial Sequence
  Synthetic oligonucleotide
gccagggactggaccggtaattaaacagaag

SEQ ID NO: 292314 - DNA, 30 bp, Artificial Sequence
  Synthetic oligonucleotide
aacctttcaattgtacacacgtaacagaag

SEQ ID NO: 292315 - DNA, 30 bp, Artificial Sequence
  Synthetic oligonucleotide
tgtgatgcgatgcgagactcacgacagaag

SEQ ID NO: 292316 - DNA, 30 bp, Artificial Sequence
  Synthetic oligonucleotide
gcccccggggactcaaaatatggacagaag

SEQ ID NO: 292317 - DNA, 30 bp, Artificial Sequence
  Synthetic oligonucleotide
tcggcgtcagggatgtttgcagtacagaag

SEQ ID NO: 292318 - DNA, 30 bp, Artificial Sequence
  Synthetic oligonucleotide
tgtttggcacacgttgcctatctccagaag

SEQ ID NO: 292319 - DNA, 30 bp, Artificial Sequence
  Synthetic oligonucleotide
atagtgatgcgcaatcggaaacagcagaag

SEQ ID NO: 292320 - DNA, 30 bp, Artificial Sequence
  Synthetic oligonucleotide
ctagggaacacaacaagtattacgcagaag

SEQ ID NO: 292321 - DNA, 30 bp, Artificial Sequence
  Synthetic oligonucleotide
gggtggtttgaacagcaaaaatcgcagaag

SEQ ID NO: 292322 - DNA, 30 bp, Artificial Sequence
  Synthetic oligonucleotide
gtgtaacgacgcaagccgtgacggcagaag

SEQ ID NO: 292323 - DNA, 30 bp, Artificial Sequence
  Synthetic oligonucleotide
atctctggaacatatttgtgagtgcagaag

SEQ ID NO: 292324 - DNA, 30 bp, Artificial Sequence
  Synthetic oligonucleotide
ggtcatgcatggtggaaatactaagagaag

SEQ ID NO: 292325 - DNA, 30 bp, Artificial Sequence
  Synthetic oligonucleotide
cgacgttgaagggtagtcctcttagagaag

SEQ ID NO: 292326 - DNA, 30 bp, Artificial Sequence
  Synthetic oligonucleotide
ttgatacacccggacagcacgaacgagaag

SEQ ID NO: 292327 - DNA, 30 bp, Artificial Sequence
  Synthetic oligonucleotide
gaactatttcctgggctccgggccgagaag

SEQ ID NO: 292328 - DNA, 30 bp, Artificial Sequence
  Synthetic oligonucleotide
agccgtgttggcatatcgatgatggagaag

SEQ ID NO: 292329 - DNA, 30 bp, Artificial Sequence
  Synthetic oligonucleotide
gctttgatgtggtgagtggccagtgagaag

SEQ ID NO: 292330 - DNA, 30 bp, Artificial Sequence
  Synthetic oligonucleotide
gacctccccaatgtaagcttacttgagaag

SEQ ID NO: 292331 - DNA, 30 bp, Artificial Sequence
  Synthetic oligonucleotide
tcagtagggttcctcaaaggttcaacgaag

SEQ ID NO: 292332 - DNA, 30 bp, Artificial Sequence
  Synthetic oligonucleotide
gtttggacgcccacggggcgaggaacgaag

SEQ ID NO: 292333 - DNA, 31 bp, Artificial Sequence
  Synthetic oligonucleotide
caaaagcccataaagatttcggcacacgaag

SEQ ID NO: 292334 - DNA, 30 bp, Artificial Sequence
  Synthetic oligonucleotide
ataagagaggaaacggagaggctcacgaag

SEQ ID NO: 292335 - DNA, 30 bp, Artificial Sequence
  Synthetic oligonucleotide
attctccgcgcgtcggtatacgtcacgaag

SEQ ID NO: 292336 - DNA, 30 bp, Artificial Sequence
  Synthetic oligonucleotide
cccgctaattaggtcgacagaacgacgaag

SEQ ID NO: 292337 - DNA, 30 bp, Artificial Sequence
  Synthetic oligonucleotide
ctctggtcgctcgggacccgacctacgaag

SEQ ID NO: 292338 - DNA, 30 bp, Artificial Sequence
  Synthetic oligonucleotide
tagggggtcagcatcgtcggaccaccgaag

SEQ ID NO: 292339 - DNA, 30 bp, Artificial Sequence
  Synthetic oligonucleotide
gcggctttggtccgccattacttcccgaag

SEQ ID NO: 292340 - DNA, 30 bp, Artificial Sequence
  Synthetic oligonucleotide
atccgggcttaagctgaatcgctgccgaag

SEQ ID NO: 292341 - DNA, 30 bp, Artificial Sequence
  Synthetic oligonucleotide
catgcgggactttgaccggttacagcgaag

SEQ ID NO: 292342 - DNA, 30 bp, Artificial Sequence
  Synthetic oligonucleotide
tgttatttcgtggtgctggtgtatgcgaag

SEQ ID NO: 292343 - DNA, 30 bp, Artificial Sequence
  Synthetic oligonucleotide
tttacttcgagcagatgtacccaatcgaag

SEQ ID NO: 292344 - DNA, 30 bp, Artificial Sequence
  Synthetic oligonucleotide
cactttacatttcgatcaataagctcgaag

SEQ ID NO: 292345 - DNA, 30 bp, Artificial Sequence
  Synthetic oligonucleotide
gcgtagcgggataccgcagttttgtcgaag

SEQ ID NO: 292346 - DNA, 30 bp, Artificial Sequence
  Synthetic oligonucleotide
tctgatagtggttcagacccaccttcgaag

SEQ ID NO: 292347 - DNA, 30 bp, Artificial Sequence
  Synthetic oligonucleotide
gggccggtggcagggattctcagttcgaag

SEQ ID NO: 292348 - DNA, 30 bp, Artificial Sequence
  Synthetic oligonucleotide
tgattcaaggctattttgctgtgttcgaag

SEQ ID NO: 292349 - DNA, 30 bp, Artificial Sequence
  Synthetic oligonucleotide
actattctatagacggatcattaaaggaag

SEQ ID NO: 292350 - DNA, 30 bp, Artificial Sequence
  Synthetic oligonucleotide
gtactactttacctccgtggaataaggaag

SEQ ID NO: 292351 - DNA, 30 bp, Artificial Sequence
  Synthetic oligonucleotide
atcgagtatgacatttgaggagtaaggaag

SEQ ID NO: 292352 - DNA, 30 bp, Artificial Sequence
  Synthetic oligonucleotide
actacgcgtcccccctttgggttaaggaag

SEQ ID NO: 292353 - DNA, 30 bp, Artificial Sequence
  Synthetic oligonucleotide
atcctggactgttcacgcgaagccaggaag

SEQ ID NO: 292354 - DNA, 30 bp, Artificial Sequence
  Synthetic oligonucleotide
aatcgagcgtactttaaatagctcaggaag

SEQ ID NO: 292355 - DNA, 30 bp, Artificial Sequence
  Synthetic oligonucleotide
gtgaaggtccactgttggatttataggaag

SEQ ID NO: 292356 - DNA, 30 bp, Artificial Sequence
  Synthetic oligonucleotide
ggcatggtgacatcgggtggccctaggaag

SEQ ID NO: 292357 - DNA, 30 bp, Artificial Sequence
  Synthetic oligonucleotide
cggcggggaactgcgcagggtggtaggaag

SEQ ID NO: 292358 - DNA, 30 bp, Artificial Sequence
  Synthetic oligonucleotide
acataagttcagcggtggttaattaggaag

SEQ ID NO: 292359 - DNA, 30 bp, Artificial Sequence
  Synthetic oligonucleotide
cgcttctcggatgcggtactgtttaggaag

SEQ ID NO: 292360 - DNA, 30 bp, Artificial Sequence
  Synthetic oligonucleotide
agcgctcgctcgggcacagcgcaacggaag

SEQ ID NO: 292361 - DNA, 30 bp, Artificial Sequence
  Synthetic oligonucleotide
agcgtgtgctggctgcccgctccacggaag

SEQ ID NO: 292362 - DNA, 30 bp, Artificial Sequence
  Synthetic oligonucleotide
atttaaggagtgtagggtatttatcggaag

SEQ ID NO: 292363 - DNA, 30 bp, Artificial Sequence
  Synthetic oligonucleotide
ttgaagtggagagttacaacttgagggaag

SEQ ID NO: 292364 - DNA, 30 bp, Artificial Sequence
  Synthetic oligonucleotide
tcctgaccgtgcataggccgcttagggaag

SEQ ID NO: 292365 - DNA, 30 bp, Artificial Sequence
  Synthetic oligonucleotide
cctcggttggatgttgagagttccgggaag

SEQ ID NO: 292366 - DNA, 30 bp, Artificial Sequence
  Synthetic oligonucleotide
agtgaaatcggaagcctacaccgggggaag

SEQ ID NO: 292367 - DNA, 30 bp, Artificial Sequence
  Synthetic oligonucleotide
ggggacaaaacagggcccccgcttgggaag

SEQ ID NO: 292368 - DNA, 30 bp, Artificial Sequence
  Synthetic oligonucleotide
agcgtactcggctacagtcatgcatggaag

SEQ ID NO: 292369 - DNA, 30 bp, Artificial Sequence
  Synthetic oligonucleotide
gtaacattctgcggagtgattgtatggaag

SEQ ID NO: 292370 - DNA, 30 bp, Artificial Sequence
  Synthetic oligonucleotide
aaaatcttggaaattaggggcgcctggaag

SEQ ID NO: 292371 - DNA, 30 bp, Artificial Sequence
  Synthetic oligonucleotide
aatggccgcggctatcgtataggctggaag

SEQ ID NO: 292372 - DNA, 30 bp, Artificial Sequence
  Synthetic oligonucleotide
ataaaggtaccgaggagtaggatctggaag

SEQ ID NO: 292373 - DNA, 30 bp, Artificial Sequence
  Synthetic oligonucleotide
gatgagaatgcagcttatggtcggtggaag

SEQ ID NO: 292374 - DNA, 30 bp, Artificial Sequence
  Synthetic oligonucleotide
aagttcacgttagtcggataggtcatgaag

SEQ ID NO: 292375 - DNA, 30 bp, Artificial Sequence
  Synthetic oligonucleotide
accctgcgaagcagatgttgatcactgaag

SEQ ID NO: 292376 - DNA, 30 bp, Artificial Sequence
  Synthetic oligonucleotide
cattctttactcattccgacgtccctgaag

SEQ ID NO: 292377 - DNA, 30 bp, Artificial Sequence
  Synthetic oligonucleotide
tatttggagtggacctgtactatcctgaag

SEQ ID NO: 292378 - DNA, 30 bp, Artificial Sequence
  Synthetic oligonucleotide
ggatgtagcgatacagtgtactagctgaag

SEQ ID NO: 292379 - DNA, 30 bp, Artificial Sequence
  Synthetic oligonucleotide
ccccagatggcggggaacggctcgctgaag

SEQ ID NO: 292380 - DNA, 30 bp, Artificial Sequence
  Synthetic oligonucleotide
atagtccaacacattaggctggggctgaag

SEQ ID NO: 292381 - DNA, 30 bp, Artificial Sequence
  Synthetic oligonucleotide
ctcgggcgcgcgtatacgcgtacagtgaag

SEQ ID NO: 292382 - DNA, 30 bp, Artificial Sequence
  Synthetic oligonucleotide
gtgtggtaataccttggggagcgagtgaag

SEQ ID NO: 292383 - DNA, 30 bp, Artificial Sequence
  Synthetic oligonucleotide
ttggcaaatccattagggggcggcgtgaag

SEQ ID NO: 292384 - DNA, 30 bp, Artificial Sequence
  Synthetic oligonucleotide
taggtcttaagtgggggcacgtacttgaag

SEQ ID NO: 292385 - DNA, 30 bp, Artificial Sequence
  Synthetic oligonucleotide
gaggtttgctcgggtgtcattcgcttgaag

SEQ ID NO: 292386 - DNA, 30 bp, Artificial Sequence
  Synthetic oligonucleotide
gatagctacgccatctggaagggcttgaag

SEQ ID NO: 292387 - DNA, 30 bp, Artificial Sequence
  Synthetic oligonucleotide
accagccatgcaactggcgattagttgaag

SEQ ID NO: 292388 - DNA, 30 bp, Artificial Sequence
  Synthetic oligonucleotide
gcgtaaccggatccggtttaacggttgaag

SEQ ID NO: 292389 - DNA, 30 bp, Artificial Sequence
  Synthetic oligonucleotide
tgctagttcacatgaaactggcatttgaag

SEQ ID NO: 292390 - DNA, 30 bp, Artificial Sequence
  Synthetic oligonucleotide
gtctccaagtagtcagctagtggtttgaag

SEQ ID NO: 292391 - DNA, 30 bp, Artificial Sequence
  Synthetic oligonucleotide
acccgcgcataacatgcggaggttttgaag

SEQ ID NO: 292392 - DNA, 30 bp, Artificial Sequence
  Synthetic oligonucleotide
agggagcgtatggctaggacctttttgaag

SEQ ID NO: 292393 - DNA, 30 bp, Artificial Sequence
  Synthetic oligonucleotide
cttctgtggaaaggttaccatacaaataag

SEQ ID NO: 292394 - DNA, 30 bp, Artificial Sequence
  Synthetic oligonucleotide
tgacttacgcgggcacgggatgcaaataag

SEQ ID NO: 292395 - DNA, 30 bp, Artificial Sequence
  Synthetic oligonucleotide
caaaatctcggtcttgccgagagaaataag

SEQ ID NO: 292396 - DNA, 30 bp, Artificial Sequence
  Synthetic oligonucleotide
aatagtcagtctggatctgggggaaataag

SEQ ID NO: 292397 - DNA, 30 bp, Artificial Sequence
  Synthetic oligonucleotide
ttttgacacaatctcgaccgaagcaataag

SEQ ID NO: 292398 - DNA, 30 bp, Artificial Sequence
  Synthetic oligonucleotide
gagagcgttgaatgactgaatgggaataag

SEQ ID NO: 292399 - DNA, 30 bp, Artificial Sequence
  Synthetic oligonucleotide
tgacggcttctttgaccggcgaataataag

SEQ ID NO: 292400 - DNA, 30 bp, Artificial Sequence
  Synthetic oligonucleotide
ggcatttaataataatcgttttaacataag

SEQ ID NO: 292401 - DNA, 30 bp, Artificial Sequence
  Synthetic oligonucleotide
ggggccttacaactgaaatgaggacataag

SEQ ID NO: 292402 - DNA, 30 bp, Artificial Sequence
  Synthetic oligonucleotide
aggcatccggcgttataactgcagcataag

SEQ ID NO: 292403 - DNA, 30 bp, Artificial Sequence
  Synthetic oligonucleotide
ggagttagcctctcacatccccatcataag

SEQ ID NO: 292404 - DNA, 30 bp, Artificial Sequence
  Synthetic oligonucleotide
tgatatgggcatgctggaactgttcataag

SEQ ID NO: 292405 - DNA, 30 bp, Artificial Sequence
  Synthetic oligonucleotide
cgtggcccctcatagaatttttcagataag

SEQ ID NO: 292406 - DNA, 30 bp, Artificial Sequence
  Synthetic oligonucleotide
gattgctggggagacacaccttgagataag

SEQ ID NO: 292407 - DNA, 30 bp, Artificial Sequence
  Synthetic oligonucleotide
gtacttcagaacgtagtataggtagataag

SEQ ID NO: 292408 - DNA, 30 bp, Artificial Sequence
  Synthetic oligonucleotide
tgacgcaacgcaattctatgagccgataag

SEQ ID NO: 292409 - DNA, 30 bp, Artificial Sequence
  Synthetic oligonucleotide
ccaaatgctacacttttaggtagcgataag

SEQ ID NO: 292410 - DNA, 30 bp, Artificial Sequence
  Synthetic oligonucleotide
tgatagcgcacggcacctactggggataag

SEQ ID NO: 292411 - DNA, 30 bp, Artificial Sequence
  Synthetic oligonucleotide
acccgtcgatctgtttaacggcctgataag

SEQ ID NO: 292412 - DNA, 30 bp, Artificial Sequence
  Synthetic oligonucleotide
ggcgctgtggtcggatattcttctgataag

SEQ ID NO: 292413 - DNA, 30 bp, Artificial Sequence
  Synthetic oligonucleotide
cgcgcttcgtgacccaagtgcacatataag

SEQ ID NO: 292414 - DNA, 30 bp, Artificial Sequence
  Synthetic oligonucleotide
ggttcgggagagaaccactggtcatataag

SEQ ID NO: 292415 - DNA, 30 bp, Artificial Sequence
  Synthetic oligonucleotide
tgtacccggcatcacctgacagactataag

SEQ ID NO: 292416 - DNA, 30 bp, Artificial Sequence
  Synthetic oligonucleotide
tcgggtaggttaccctaactccgctataag

SEQ ID NO: 292417 - DNA, 30 bp, Artificial Sequence
  Synthetic oligonucleotide
tcgatcgtgccgccaaacgttacgtataag

SEQ ID NO: 292418 - DNA, 30 bp, Artificial Sequence
  Synthetic oligonucleotide
agtaatccctcgtgttgggcgatgtataag

SEQ ID NO: 292419 - DNA, 30 bp, Artificial Sequence
  Synthetic oligonucleotide
actgcgcttcagcagtaagatatttataag

SEQ ID NO: 292420 - DNA, 30 bp, Artificial Sequence
  Synthetic oligonucleotide
cacatatacctctacggtgtagaaactaag

SEQ ID NO: 292421 - DNA, 31 bp, Artificial Sequence
  Synthetic oligonucleotide
agaattcagcgctaggggcgacgccactaag

SEQ ID NO: 292422 - DNA, 30 bp, Artificial Sequence
  Synthetic oligonucleotide
tcgaattggcagcgcatctaacgcactaag

SEQ ID NO: 292423 - DNA, 30 bp, Artificial Sequence
  Synthetic oligonucleotide
aactgttggagtactttatttctcactaag

SEQ ID NO: 292424 - DNA, 30 bp, Artificial Sequence
  Synthetic oligonucleotide
ttgaagggcgcgttgctgtcacagactaag

SEQ ID NO: 292425 - DNA, 30 bp, Artificial Sequence
  Synthetic oligonucleotide
ctaggctctaacagcgtttggtcgactaag

SEQ ID NO: 292426 - DNA, 30 bp, Artificial Sequence
  Synthetic oligonucleotide
atggtaaatgtgggtacttcagtgactaag

SEQ ID NO: 292427 - DNA, 30 bp, Artificial Sequence
  Synthetic oligonucleotide
tctagccagtataaactctggcatactaag

SEQ ID NO: 292428 - DNA, 30 bp, Artificial Sequence
  Synthetic oligonucleotide
caaactattttagatgagtgacgacctaag

SEQ ID NO: 292429 - DNA, 30 bp, Artificial Sequence
  Synthetic oligonucleotide
ttcaagtacggttgtactaggaaccctaag

SEQ ID NO: 292430 - DNA, 30 bp, Artificial Sequence
  Synthetic oligonucleotide
gcgggaagtattttttttgccccgcctaag

SEQ ID NO: 292431 - DNA, 30 bp, Artificial Sequence
  Synthetic oligonucleotide
tgaaagtgttttttctttaatcggcctaag

SEQ ID NO: 292432 - DNA, 30 bp, Artificial Sequence
  Synthetic oligonucleotide
gatcgcgcctgtttcggagcaatgcctaag

SEQ ID NO: 292433 - DNA, 30 bp, Artificial Sequence
  Synthetic oligonucleotide
tcgccctcaagagcgacactcactcctaag

SEQ ID NO: 292434 - DNA, 30 bp, Artificial Sequence
  Synthetic oligonucleotide
ctcatagccccgacacgttgatatgctaag

SEQ ID NO: 292435 - DNA, 30 bp, Artificial Sequence
  Synthetic oligonucleotide
caattttaaccatcccagcattttgctaag

SEQ ID NO: 292436 - DNA, 30 bp, Artificial Sequence
  Synthetic oligonucleotide
ggcatcttcgaaatgaccttataatctaag

SEQ ID NO: 292437 - DNA, 30 bp, Artificial Sequence
  Synthetic oligonucleotide
gtctaattgcagggccaggggttctctaag

SEQ ID NO: 292438 - DNA, 30 bp, Artificial Sequence
  Synthetic oligonucleotide
taggtacccgccatgcacaggaccagtaag

SEQ ID NO: 292439 - DNA, 30 bp, Artificial Sequence
  Synthetic oligonucleotide
gccaacaagctccgaccggattgcagtaag

SEQ ID NO: 292440 - DNA, 30 bp, Artificial Sequence
  Synthetic oligonucleotide
taatccgcctttgtccgtagtcatagtaag

SEQ ID NO: 292441 - DNA, 30 bp, Artificial Sequence
  Synthetic oligonucleotide
tgtggtgcaccacctcgcgacactagtaag

SEQ ID NO: 292442 - DNA, 30 bp, Artificial Sequence
  Synthetic oligonucleotide
accattctgactgtgaaggtagctagtaag

SEQ ID NO: 292443 - DNA, 30 bp, Artificial Sequence
  Synthetic oligonucleotide
gctcaatttgtatccattataatacgtaag

SEQ ID NO: 292444 - DNA, 30 bp, Artificial Sequence
  Synthetic oligonucleotide
tactagggtgtagtagccaccggccgtaag

SEQ ID NO: 292445 - DNA, 30 bp, Artificial Sequence
  Synthetic oligonucleotide
ctagatcattcgacggaccatttaggtaag

SEQ ID NO: 292446 - DNA, 30 bp, Artificial Sequence
  Synthetic oligonucleotide
ctcgcattccatgactcagtaaagggtaag

SEQ ID NO: 292447 - DNA, 30 bp, Artificial Sequence
  Synthetic oligonucleotide
aagttggcacttaagtcgcaggggggtaag

SEQ ID NO: 292448 - DNA, 30 bp, Artificial Sequence
  Synthetic oligonucleotide
tcgaccaagctaggccgttgaatgggtaag

SEQ ID NO: 292449 - DNA, 30 bp, Artificial Sequence
  Synthetic oligonucleotide
tacagatccgtatctctaccttaatgtaag

SEQ ID NO: 292450 - DNA, 30 bp, Artificial Sequence
  Synthetic oligonucleotide
tcatgaatcaaattcttataagcatgtaag

SEQ ID NO: 292451 - DNA, 30 bp, Artificial Sequence
  Synthetic oligonucleotide
tagtgggttttcgaaatcattatatgtaag

SEQ ID NO: 292452 - DNA, 30 bp, Artificial Sequence
  Synthetic oligonucleotide
atgccattgcataccaaaagagtatgtaag

SEQ ID NO: 292453 - DNA, 30 bp, Artificial Sequence
  Synthetic oligonucleotide
aagcataatacctcaggcgaggcctgtaag

SEQ ID NO: 292454 - DNA, 30 bp, Artificial Sequence
  Synthetic oligonucleotide
gtaagcgtgttggagtcgggcagctgtaag

SEQ ID NO: 292455 - DNA, 30 bp, Artificial Sequence
  Synthetic oligonucleotide
cattgatgctacgacaaacaaatctgtaag

SEQ ID NO: 292456 - DNA, 30 bp, Artificial Sequence
  Synthetic oligonucleotide
ggggtcacaccagatcacctgcagtgtaag

SEQ ID NO: 292457 - DNA, 30 bp, Artificial Sequence
  Synthetic oligonucleotide
aaatatcaacctttaagcctatcgtgtaag

SEQ ID NO: 292458 - DNA, 30 bp, Artificial Sequence
  Synthetic oligonucleotide
taagatcacgggcatggatcgcggtgtaag

SEQ ID NO: 292459 - DNA, 30 bp, Artificial Sequence
  Synthetic oligonucleotide
gcttgtcgtatgcttgcgctatggtgtaag

SEQ ID NO: 292460 - DNA, 30 bp, Artificial Sequence
  Synthetic oligonucleotide
ccacaaaccgcactaaccctcatgtgtaag

SEQ ID NO: 292461 - DNA, 30 bp, Artificial Sequence
  Synthetic oligonucleotide
ttgacttggacgatacgtctggcttgtaag

SEQ ID NO: 292462 - DNA, 30 bp, Artificial Sequence
  Synthetic oligonucleotide
tggttagttcttgtgatggctgcttgtaag

SEQ ID NO: 292463 - DNA, 30 bp, Artificial Sequence
  Synthetic oligonucleotide
gaaataaaagactattaatgcagttgtaag

SEQ ID NO: 292464 - DNA, 30 bp, Artificial Sequence
  Synthetic oligonucleotide
ccttcgtgtttggacccaaatagttgtaag

SEQ ID NO: 292465 - DNA, 30 bp, Artificial Sequence
  Synthetic oligonucleotide
gcttagatgagcgcggttggcttttgtaag

SEQ ID NO: 292466 - DNA, 30 bp, Artificial Sequence
  Synthetic oligonucleotide
gtagtggagccttgggggaaggccattaag

SEQ ID NO: 292467 - DNA, 30 bp, Artificial Sequence
  Synthetic oligonucleotide
atttccgcgaggtcattgaacagcattaag

SEQ ID NO: 292468 - DNA, 30 bp, Artificial Sequence
  Synthetic oligonucleotide
taattgggcgtactcaggaacgtcattaag

SEQ ID NO: 292469 - DNA, 30 bp, Artificial Sequence
  Synthetic oligonucleotide
cagtaattctactagaggcgatcgattaag

SEQ ID NO: 292470 - DNA, 30 bp, Artificial Sequence
  Synthetic oligonucleotide
atcggcagcctcttctgaacacggattaag

SEQ ID NO: 292471 - DNA, 30 bp, Artificial Sequence
  Synthetic oligonucleotide
ccggggcgccgcaacggattaaatattaag

SEQ ID NO: 292472 - DNA, 30 bp, Artificial Sequence
  Synthetic oligonucleotide
atgattaattgggaacaaaccagtattaag

SEQ ID NO: 292473 - DNA, 30 bp, Artificial Sequence
  Synthetic oligonucleotide
actccccagtaaatatgagagcaacttaag

SEQ ID NO: 292474 - DNA, 30 bp, Artificial Sequence
  Synthetic oligonucleotide
tttaagttcccggtagggatcgaccttaag

SEQ ID NO: 292475 - DNA, 30 bp, Artificial Sequence
  Synthetic oligonucleotide
gttgcacggtgcacaggagcagtccttaag

SEQ ID NO: 292476 - DNA, 30 bp, Artificial Sequence
  Synthetic oligonucleotide
gttagggatactgcgtttaagcctcttaag

SEQ ID NO: 292477 - DNA, 30 bp, Artificial Sequence
  Synthetic oligonucleotide
aatgctctacaaaaccaatgagctcttaag

SEQ ID NO: 292478 - DNA, 30 bp, Artificial Sequence
  Synthetic oligonucleotide
tcacgcggtcattccgcttcccaagttaag

SEQ ID NO: 292479 - DNA, 30 bp, Artificial Sequence
  Synthetic oligonucleotide
cgtagttagtctgtcccaagccaagttaag

SEQ ID NO: 292480 - DNA, 30 bp, Artificial Sequence
  Synthetic oligonucleotide
aaaaaggatcgagcggttactacagttaag

SEQ ID NO: 292481 - DNA, 30 bp, Artificial Sequence
  Synthetic oligonucleotide
cctagatttgatggggcacggagagttaag

SEQ ID NO: 292482 - DNA, 30 bp, Artificial Sequence
  Synthetic oligonucleotide
atgtaaaagggactcaagagcatagttaag

SEQ ID NO: 292483 - DNA, 30 bp, Artificial Sequence
  Synthetic oligonucleotide
gtgggcgccaatgtctgtagattagttaag

SEQ ID NO: 292484 - DNA, 30 bp, Artificial Sequence
  Synthetic oligonucleotide
caagatatacatggtgtgtgtcatgttaag

SEQ ID NO: 292485 - DNA, 30 bp, Artificial Sequence
  Synthetic oligonucleotide
ctttaattaccgcgacgggactcatttaag

SEQ ID NO: 292486 - DNA, 30 bp, Artificial Sequence
  Synthetic oligonucleotide
ctcagcttgatccgtggcgatgactttaag

SEQ ID NO: 292487 - DNA, 30 bp, Artificial Sequence
  Synthetic oligonucleotide
tgtcgctgataaaaagcgtatgtctttaag

SEQ ID NO: 292488 - DNA, 30 bp, Artificial Sequence
  Synthetic oligonucleotide
ggttaactggcaacttaaccgaagtttaag

SEQ ID NO: 292489 - DNA, 30 bp, Artificial Sequence
  Synthetic oligonucleotide
tagggtgtcatatggtactaacattttaag

SEQ ID NO: 292490 - DNA, 30 bp, Artificial Sequence
  Synthetic oligonucleotide
ctcaagtagacgactacccttagttttaag

SEQ ID NO: 292491 - DNA, 30 bp, Artificial Sequence
  Synthetic oligonucleotide
ccgcatggttgacaatgtcacgtttttaag

SEQ ID NO: 292492 - DNA, 30 bp, Artificial Sequence
  Synthetic oligonucleotide
tgaatagtcaatcggcattggccaaaacag

SEQ ID NO: 292493 - DNA, 30 bp, Artificial Sequence
  Synthetic oligonucleotide
gaacctagatatggacaagatttcaaacag

SEQ ID NO: 292494 - DNA, 30 bp, Artificial Sequence
  Synthetic oligonucleotide
aatgtgatatgaactccaaatacgaaacag

SEQ ID NO: 292495 - DNA, 30 bp, Artificial Sequence
  Synthetic oligonucleotide
cacttcgcacttgatcgccgtttgaaacag

SEQ ID NO: 292496 - DNA, 30 bp, Artificial Sequence
  Synthetic oligonucleotide
taatacgtcgtttataaaatggctaaacag

SEQ ID NO: 292497 - DNA, 30 bp, Artificial Sequence
  Synthetic oligonucleotide
agcgctcgtcgggtgtgaagcgaacaacag

SEQ ID NO: 292498 - DNA, 30 bp, Artificial Sequence
  Synthetic oligonucleotide
ctgtgggtccctaagttagatgaccaacag

SEQ ID NO: 292499 - DNA, 28 bp, Artificial Sequence
  Synthetic oligonucleotide
catttaatcaagtgtgacactccaacag

SEQ ID NO: 292500 - DNA, 30 bp, Artificial Sequence
  Synthetic oligonucleotide
tctccaacctggtaaaattacgagcaacag

SEQ ID NO: 292501 - DNA, 30 bp, Artificial Sequence
  Synthetic oligonucleotide
acgcgcgactaagcgtgtgggatagaacag

SEQ ID NO: 292502 - DNA, 30 bp, Artificial Sequence
  Synthetic oligonucleotide
aacccttcggtacggcaaagcgccgaacag

SEQ ID NO: 292503 - DNA, 30 bp, Artificial Sequence
  Synthetic oligonucleotide
gctagtacccaatactgtagtacggaacag

SEQ ID NO: 292504 - DNA, 25 bp, Artificial Sequence
  Synthetic oligonucleotide
catacttgtttgttgatcggaacag

SEQ ID NO: 292505 - DNA, 30 bp, Artificial Sequence
  Synthetic oligonucleotide
tgggcttggttccagacagatagggaacag

SEQ ID NO: 292506 - DNA, 30 bp, Artificial Sequence
  Synthetic oligonucleotide
ttaattaactcttgggtctggcgtgaacag

SEQ ID NO: 292507 - DNA, 30 bp, Artificial Sequence
  Synthetic oligonucleotide
ccgagcgaatacggagcaacataataacag

SEQ ID NO: 292508 - DNA, 30 bp, Artificial Sequence
  Synthetic oligonucleotide
ttgactataaaggccacctggcgataacag

SEQ ID NO: 292509 - DNA, 30 bp, Artificial Sequence
  Synthetic oligonucleotide
gtctattgaagggcttacaatgcctaacag

SEQ ID NO: 292510 - DNA, 29 bp, Artificial Sequence
  Synthetic oligonucleotide
cagtggtcttctacgaaggcctctaacag

SEQ ID NO: 292511 - DNA, 30 bp, Artificial Sequence
  Synthetic oligonucleotide
accggaatcgtgtatcgtacattctaacag

SEQ ID NO: 292512 - DNA, 30 bp, Artificial Sequence
  Synthetic oligonucleotide
tctcacgtgcttgcggcaggcaggtaacag

SEQ ID NO: 292513 - DNA, 30 bp, Artificial Sequence
  Synthetic oligonucleotide
aggtatctgcgacgcctgggccggtaacag

SEQ ID NO: 292514 - DNA, 30 bp, Artificial Sequence
  Synthetic oligonucleotide
attgactgaaacttgggattttggtaacag

SEQ ID NO: 292515 - DNA, 30 bp, Artificial Sequence
  Synthetic oligonucleotide
ttaccgcccacgctacaatcttgaacacag

SEQ ID NO: 292516 - DNA, 30 bp, Artificial Sequence
  Synthetic oligonucleotide
tgacctcgcgaatctgacaccgggacacag

SEQ ID NO: 292517 - DNA, 30 bp, Artificial Sequence
  Synthetic oligonucleotide
ctgcgtgtagttatatctcttgggacacag

SEQ ID NO: 292518 - DNA, 30 bp, Artificial Sequence
  Synthetic oligonucleotide
tcggcaggtcgtagacatacatggacacag

SEQ ID NO: 292519 - DNA, 30 bp, Artificial Sequence
  Synthetic oligonucleotide
atcgcattcgtcattgcatgggatacacag

SEQ ID NO: 292520 - DNA, 30 bp, Artificial Sequence
  Synthetic oligonucleotide
gtagagttcccagtcactgggtacccacag

SEQ ID NO: 292521 - DNA, 30 bp, Artificial Sequence
  Synthetic oligonucleotide
cagcctaggtcggctggtatgttcccacag

SEQ ID NO: 292522 - DNA, 30 bp, Artificial Sequence
  Synthetic oligonucleotide
accggccagggcagccccctgaagccacag

SEQ ID NO: 292523 - DNA, 30 bp, Artificial Sequence
  Synthetic oligonucleotide
gtgccctgatgaccagttgctagagcacag

SEQ ID NO: 292524 - DNA, 30 bp, Artificial Sequence
  Synthetic oligonucleotide
ctgctcctcaagatgctacattacgcacag

SEQ ID NO: 292525 - DNA, 30 bp, Artificial Sequence
  Synthetic oligonucleotide
cgcttatctagaatcacacaaggcgcacag

SEQ ID NO: 292526 - DNA, 30 bp, Artificial Sequence
  Synthetic oligonucleotide
ttcacccgccgaaatggccaggtcgcacag

SEQ ID NO: 292527 - DNA, 30 bp, Artificial Sequence
  Synthetic oligonucleotide
gtcgttaatctcactctatggcaatcacag

SEQ ID NO: 292528 - DNA, 30 bp, Artificial Sequence
  Synthetic oligonucleotide
agtgggctcggagcgggggccttatcacag

SEQ ID NO: 292529 - DNA, 30 bp, Artificial Sequence
  Synthetic oligonucleotide
tactctaacaatgcacgtgatacctcacag

SEQ ID NO: 292530 - DNA, 30 bp, Artificial Sequence
  Synthetic oligonucleotide
aattaagaaaacaacggggaccagtcacag

SEQ ID NO: 292531 - DNA, 30 bp, Artificial Sequence
  Synthetic oligonucleotide
tactgcggagttcagttagtgcgttcacag

SEQ ID NO: 292532 - DNA, 30 bp, Artificial Sequence
  Synthetic oligonucleotide
gtgctgtattgcgggacaggtcaaagacag

SEQ ID NO: 292533 - DNA, 30 bp, Artificial Sequence
  Synthetic oligonucleotide
aggggttaggtctggcacaatttaagacag

SEQ ID NO: 292534 - DNA, 30 bp, Artificial Sequence
  Synthetic oligonucleotide
cagttcgcgcaacaggcacagatcagacag

SEQ ID NO: 292535 - DNA, 30 bp, Artificial Sequence
  Synthetic oligonucleotide
cctcctttatgcaagtatctcactagacag

SEQ ID NO: 292536 - DNA, 30 bp, Artificial Sequence
  Synthetic oligonucleotide
ctaattgctagtagagaatcgggtagacag

SEQ ID NO: 292537 - DNA, 30 bp, Artificial Sequence
  Synthetic oligonucleotide
ttcgactctcactgtggtaggtgtagacag

SEQ ID NO: 292538 - DNA, 30 bp, Artificial Sequence
  Synthetic oligonucleotide
gagcgccagaatcctcgcctttgtagacag

SEQ ID NO: 292539 - DNA, 30 bp, Artificial Sequence
  Synthetic oligonucleotide
ccaactggactcctaaggcttaaacgacag

SEQ ID NO: 292540 - DNA, 29 bp, Artificial Sequence
  Synthetic oligonucleotide
atcccggccagcctccgtgagcacgacag

SEQ ID NO: 292541 - DNA, 30 bp, Artificial Sequence
  Synthetic oligonucleotide
tatgagtgaatttagaggctaaaccgacag

SEQ ID NO: 292542 - DNA, 30 bp, Artificial Sequence
  Synthetic oligonucleotide
tacacgccaatgacttcgcaacaccgacag

SEQ ID NO: 292543 - DNA, 30 bp, Artificial Sequence
  Synthetic oligonucleotide
ctagagcaatgtcccagctacgttcgacag

SEQ ID NO: 292544 - DNA, 30 bp, Artificial Sequence
  Synthetic oligonucleotide
ataatcaattggttgacatggttcggacag

SEQ ID NO: 292545 - DNA, 30 bp, Artificial Sequence
  Synthetic oligonucleotide
ggcataatacataattttcttgtatgacag

SEQ ID NO: 292546 - DNA, 30 bp, Artificial Sequence
  Synthetic oligonucleotide
gacaaaggagaaatatggaggccttgacag

SEQ ID NO: 292547 - DNA, 30 bp, Artificial Sequence
  Synthetic oligonucleotide
cacccccttacccaacttatcatttgacag

SEQ ID NO: 292548 - DNA, 30 bp, Artificial Sequence
  Synthetic oligonucleotide
ggcggcatctggacacgtatatcaatacag

SEQ ID NO: 292549 - DNA, 30 bp, Artificial Sequence
  Synthetic oligonucleotide
acagattgcgtgaattacttctgaatacag

SEQ ID NO: 292550 - DNA, 30 bp, Artificial Sequence
  Synthetic oligonucleotide
gcaatttggccgctaaagacttgaatacag

SEQ ID NO: 292551 - DNA, 30 bp, Artificial Sequence
  Synthetic oligonucleotide
tgtcccgctaagcctgccttacacatacag

SEQ ID NO: 292552 - DNA, 30 bp, Artificial Sequence
  Synthetic oligonucleotide
tttgggcaggtgtcacactgggccatacag

SEQ ID NO: 292553 - DNA, 30 bp, Artificial Sequence
  Synthetic oligonucleotide
gagcgataagcaggccctggcaagatacag

SEQ ID NO: 292554 - DNA, 30 bp, Artificial Sequence
  Synthetic oligonucleotide
gatgctttctgatgctattctatgatacag

SEQ ID NO: 292555 - DNA, 30 bp, Artificial Sequence
  Synthetic oligonucleotide
aaagtgttgtcaccgccggcccaactacag

SEQ ID NO: 292556 - DNA, 30 bp, Artificial Sequence
  Synthetic oligonucleotide
gctccccgaagatcgtcaaccacactacag

SEQ ID NO: 292557 - DNA, 30 bp, Artificial Sequence
  Synthetic oligonucleotide
agccgcgtatctggtgctgttctactacag

SEQ ID NO: 292558 - DNA, 30 bp, Artificial Sequence
  Synthetic oligonucleotide
ggtcctctctagtgaaggattaacctacag

SEQ ID NO: 292559 - DNA, 30 bp, Artificial Sequence
  Synthetic oligonucleotide
cgaatcttaagggtcacgggttggctacag

SEQ ID NO: 292560 - DNA, 30 bp, Artificial Sequence
  Synthetic oligonucleotide
tcagattgctgcagcgaagtaatgctacag

SEQ ID NO: 292561 - DNA, 30 bp, Artificial Sequence
  Synthetic oligonucleotide
tctcgggccgtctcctcataagctctacag

SEQ ID NO: 292562 - DNA, 30 bp, Artificial Sequence
  Synthetic oligonucleotide
tatctattacatcccacgttttgtctacag

SEQ ID NO: 292563 - DNA, 30 bp, Artificial Sequence
  Synthetic oligonucleotide
cggacaagaaactatccccgtcttctacag

SEQ ID NO: 292564 - DNA, 30 bp, Artificial Sequence
  Synthetic oligonucleotide
caaacgcgacgataaggtagatttctacag

SEQ ID NO: 292565 - DNA, 30 bp, Artificial Sequence
  Synthetic oligonucleotide
acaccgaaacctttgatttcaacggtacag

SEQ ID NO: 292566 - DNA, 30 bp, Artificial Sequence
  Synthetic oligonucleotide
cgacctccaacgataacgcctgcggtacag

SEQ ID NO: 292567 - DNA, 30 bp, Artificial Sequence
  Synthetic oligonucleotide
gttgtcggacagtcgacacaccgggtacag

SEQ ID NO: 292568 - DNA, 30 bp, Artificial Sequence
  Synthetic oligonucleotide
gaagcaagcgtcgttagacatctggtacag

SEQ ID NO: 292569 - DNA, 30 bp, Artificial Sequence
  Synthetic oligonucleotide
gatcgtgtggttagagtaaaaattgtacag

SEQ ID NO: 292570 - DNA, 30 bp, Artificial Sequence
  Synthetic oligonucleotide
aagtaatcgttccgaaacggggtattacag

SEQ ID NO: 292571 - DNA, 30 bp, Artificial Sequence
  Synthetic oligonucleotide
cgtagcgacagtcggctccgaagcttacag

SEQ ID NO: 292572 - DNA, 30 bp, Artificial Sequence
  Synthetic oligonucleotide
agccaggatcaatctgggtgttcaaaccag

SEQ ID NO: 292573 - DNA, 30 bp, Artificial Sequence
  Synthetic oligonucleotide
cggtgacctgctggttattagatcaaccag

SEQ ID NO: 292574 - DNA, 30 bp, Artificial Sequence
  Synthetic oligonucleotide
ttcgagatcacggtgagtaaagtcaaccag

SEQ ID NO: 292575 - DNA, 30 bp, Artificial Sequence
  Synthetic oligonucleotide
tccgcttcgacgtcacttcatgataaccag

SEQ ID NO: 292576 - DNA, 30 bp, Artificial Sequence
  Synthetic oligonucleotide
taataatactcgtgtccatcgcctaaccag

SEQ ID NO: 292577 - DNA, 30 bp, Artificial Sequence
  Synthetic oligonucleotide
cagaagctggagggtgagtgcgcacaccag

SEQ ID NO: 292578 - DNA, 30 bp, Artificial Sequence
  Synthetic oligonucleotide
ggccccgagtagaatgcgtgcctacaccag

SEQ ID NO: 292579 - DNA, 30 bp, Artificial Sequence
  Synthetic oligonucleotide
taattatcacggcgggttatggaccaccag

SEQ ID NO: 292580 - DNA, 30 bp, Artificial Sequence
  Synthetic oligonucleotide
agtttagggatcaaatttacaaagcaccag

SEQ ID NO: 292581 - DNA, 30 bp, Artificial Sequence
  Synthetic oligonucleotide
tattggggacaaatcacagtggcgcaccag

SEQ ID NO: 292582 - DNA, 30 bp, Artificial Sequence
  Synthetic oligonucleotide
tgcgccagaacacgttggtgcctgcaccag

SEQ ID NO: 292583 - DNA, 30 bp, Artificial Sequence
  Synthetic oligonucleotide
gctttcaactcgcaagcgggctctcaccag

SEQ ID NO: 292584 - DNA, 30 bp, Artificial Sequence
  Synthetic oligonucleotide
gcattggtcttaaggtgtgccggcgaccag

SEQ ID NO: 292585 - DNA, 30 bp, Artificial Sequence
  Synthetic oligonucleotide
ttgcaaaacacgttccggcaccaggaccag

SEQ ID NO: 292586 - DNA, 30 bp, Artificial Sequence
  Synthetic oligonucleotide
taggacggccgagggattcaaggggaccag

SEQ ID NO: 292587 - DNA, 30 bp, Artificial Sequence
  Synthetic oligonucleotide
ttcgatcatagtattaagggggctgaccag

SEQ ID NO: 292588 - DNA, 30 bp, Artificial Sequence
  Synthetic oligonucleotide
gaatccgctgtactatggataacctaccag

SEQ ID NO: 292589 - DNA, 30 bp, Artificial Sequence
  Synthetic oligonucleotide
aaatttaaagggaacatcctatcgtaccag

SEQ ID NO: 292590 - DNA, 30 bp, Artificial Sequence
  Synthetic oligonucleotide
cttatgtttcagaagagccttttttaccag

SEQ ID NO: 292591 - DNA, 30 bp, Artificial Sequence
  Synthetic oligonucleotide
ctacacaagcatttctattctctcacccag

SEQ ID NO: 292592 - DNA, 30 bp, Artificial Sequence
  Synthetic oligonucleotide
gtgttgttcgtagccgtgcattgtacccag

SEQ ID NO: 292593 - DNA, 30 bp, Artificial Sequence
  Synthetic oligonucleotide
tgcgtgataataatgctccgcggaccccag

SEQ ID NO: 292594 - DNA, 30 bp, Artificial Sequence
  Synthetic oligonucleotide
agcggttgggaaggttttcctaagccccag

SEQ ID NO: 292595 - DNA, 30 bp, Artificial Sequence
  Synthetic oligonucleotide
ccaatgtaatcttcacatactaatccccag

SEQ ID NO: 292596 - DNA, 30 bp, Artificial Sequence
  Synthetic oligonucleotide
gtcatgtgtaatggcgtggtgcgtccccag

SEQ ID NO: 292597 - DNA, 30 bp, Artificial Sequence
  Synthetic oligonucleotide
ctgtgcgatgcttctagtttcggtccccag

SEQ ID NO: 292598 - DNA, 30 bp, Artificial Sequence
  Synthetic oligonucleotide
atcatactatggctccacagtctagcccag

SEQ ID NO: 292599 - DNA, 30 bp, Artificial Sequence
  Synthetic oligonucleotide
aaaggatcagggttttcgcaatttgcccag

SEQ ID NO: 292600 - DNA, 30 bp, Artificial Sequence
  Synthetic oligonucleotide
gtagaatataatcgtcagcaggagtcccag

SEQ ID NO: 292601 - DNA, 30 bp, Artificial Sequence
  Synthetic oligonucleotide
cggttgatatgacacctgcgccaaagccag

SEQ ID NO: 292602 - DNA, 30 bp, Artificial Sequence
  Synthetic oligonucleotide
gtgcctgcccatagacatgtaacaagccag

SEQ ID NO: 292603 - DNA, 30 bp, Artificial Sequence
  Synthetic oligonucleotide
tctcatgacttggtgggaacaccaagccag

SEQ ID NO: 292604 - DNA, 30 bp, Artificial Sequence
  Synthetic oligonucleotide
aatcagaccgtgtgcataaattgaagccag

SEQ ID NO: 292605 - DNA, 30 bp, Artificial Sequence
  Synthetic oligonucleotide
gagcacgcgcattggaagatagtaagccag

SEQ ID NO: 292606 - DNA, 30 bp, Artificial Sequence
  Synthetic oligonucleotide
agccatcacagacttaaaaacaacagccag

SEQ ID NO: 292607 - DNA, 30 bp, Artificial Sequence
  Synthetic oligonucleotide
cttagtctgaaagttcactcaaagagccag

SEQ ID NO: 292608 - DNA, 30 bp, Artificial Sequence
  Synthetic oligonucleotide
cgttcaaggcgtggtcgaccgcagagccag

SEQ ID NO: 292609 - DNA, 30 bp, Artificial Sequence
  Synthetic oligonucleotide
atgtgaagaggccagtgtagctatagccag

SEQ ID NO: 292610 - DNA, 30 bp, Artificial Sequence
  Synthetic oligonucleotide
aactgggctatgtacacaccagctagccag

SEQ ID NO: 292611 - DNA, 30 bp, Artificial Sequence
  Synthetic oligonucleotide
taccctacgtggatgaaagattgtagccag

SEQ ID NO: 292612 - DNA, 30 bp, Artificial Sequence
  Synthetic oligonucleotide
acatatgtgtctcgactgcacttacgccag

SEQ ID NO: 292613 - DNA, 30 bp, Artificial Sequence
  Synthetic oligonucleotide
ttcaggagatcacacgcggcgcaccgccag

SEQ ID NO: 292614 - DNA, 30 bp, Artificial Sequence
  Synthetic oligonucleotide
gagggtcaaattataagggtaatccgccag

SEQ ID NO: 292615 - DNA, 30 bp, Artificial Sequence
  Synthetic oligonucleotide
tgcaccggcaacttgccagttcagcgccag

SEQ ID NO: 292616 - DNA, 30 bp, Artificial Sequence
  Synthetic oligonucleotide
ccgtttacaaatgcttgtttatatcgccag

SEQ ID NO: 292617 - DNA, 30 bp, Artificial Sequence
  Synthetic oligonucleotide
gacattcgtaatgcaacacaagacggccag

SEQ ID NO: 292618 - DNA, 30 bp, Artificial Sequence
  Synthetic oligonucleotide
ttcagatcggacgaggtgttcccatgccag

SEQ ID NO: 292619 - DNA, 30 bp, Artificial Sequence
  Synthetic oligonucleotide
aggcgacagtcccaattattcagatgccag

SEQ ID NO: 292620 - DNA, 30 bp, Artificial Sequence
  Synthetic oligonucleotide
tactgtagaccgacttctaatgtctgccag

SEQ ID NO: 292621 - DNA, 30 bp, Artificial Sequence
  Synthetic oligonucleotide
tgaggatctgtctgttgtaccacgtgccag

SEQ ID NO: 292622 - DNA, 30 bp, Artificial Sequence
  Synthetic oligonucleotide
cgttcatttcagggtggcagtgaaatccag

SEQ ID NO: 292623 - DNA, 30 bp, Artificial Sequence
  Synthetic oligonucleotide
caggcttcgtttcccgagaagtaaatccag

SEQ ID NO: 292624 - DNA, 30 bp, Artificial Sequence
  Synthetic oligonucleotide
gaagattcaagtaaaatcgcacacatccag

SEQ ID NO: 292625 - DNA, 30 bp, Artificial Sequence
  Synthetic oligonucleotide
gccccttgggcccatctacattacatccag

SEQ ID NO: 292626 - DNA, 30 bp, Artificial Sequence
  Synthetic oligonucleotide
cttctctagggcatcagatgaggcatccag

SEQ ID NO: 292627 - DNA, 30 bp, Artificial Sequence
  Synthetic oligonucleotide
gtttagggctatcaataatgttaactccag

SEQ ID NO: 292628 - DNA, 30 bp, Artificial Sequence
  Synthetic oligonucleotide
tggttgcgactgaacgtgttgacactccag

SEQ ID NO: 292629 - DNA, 30 bp, Artificial Sequence
  Synthetic oligonucleotide
tttgtaattcaaacctcaggttacctccag

SEQ ID NO: 292630 - DNA, 30 bp, Artificial Sequence
  Synthetic oligonucleotide
gacattctttggcctggtacgggcctccag

SEQ ID NO: 292631 - DNA, 30 bp, Artificial Sequence
  Synthetic oligonucleotide
aactgaatgtttagttatatcactctccag

SEQ ID NO: 292632 - DNA, 30 bp, Artificial Sequence
  Synthetic oligonucleotide
agtgagtttaccttccggaccgctctccag

SEQ ID NO: 292633 - DNA, 30 bp, Artificial Sequence
  Synthetic oligonucleotide
acaagtggcctaggacgagtaacagtccag

SEQ ID NO: 292634 - DNA, 30 bp, Artificial Sequence
  Synthetic oligonucleotide
ccgctcactgccttgttgtgcttagtccag

SEQ ID NO: 292635 - DNA, 30 bp, Artificial Sequence
  Synthetic oligonucleotide
ctctctgctgcttcttattgactggtccag

SEQ ID NO: 292636 - DNA, 30 bp, Artificial Sequence
  Synthetic oligonucleotide
agtcggtgcgtggcggtcgttgaattccag

SEQ ID NO: 292637 - DNA, 30 bp, Artificial Sequence
  Synthetic oligonucleotide
cgtttgttttagcatgctcggggattccag

SEQ ID NO: 292638 - DNA, 30 bp, Artificial Sequence
  Synthetic oligonucleotide
tcataaggagacgtaggtagcaacttccag

SEQ ID NO: 292639 - DNA, 30 bp, Artificial Sequence
  Synthetic oligonucleotide
ccaagcggccacgtaggggatgacttccag

SEQ ID NO: 292640 - DNA, 30 bp, Artificial Sequence
  Synthetic oligonucleotide
ccaacagtctaggcgcggtagtagttccag

SEQ ID NO: 292641 - DNA, 30 bp, Artificial Sequence
  Synthetic oligonucleotide
tacgctctcccctttaagcttttgttccag

SEQ ID NO: 292642 - DNA, 30 bp, Artificial Sequence
  Synthetic oligonucleotide
accacccacgcagaatgcgagtttttccag

SEQ ID NO: 292643 - DNA, 30 bp, Artificial Sequence
  Synthetic oligonucleotide
taatccgggtagggatctcccaataagcag

SEQ ID NO: 292644 - DNA, 30 bp, Artificial Sequence
  Synthetic oligonucleotide
tatgttgtttaccaaaccagacgtaagcag

SEQ ID NO: 292645 - DNA, 30 bp, Artificial Sequence
  Synthetic oligonucleotide
tttcgacagggatacgatgctgaccagcag

SEQ ID NO: 292646 - DNA, 30 bp, Artificial Sequence
  Synthetic oligonucleotide
ttcttgactcgagaggaattttggcagcag

SEQ ID NO: 292647 - DNA, 30 bp, Artificial Sequence
  Synthetic oligonucleotide
tacggggtacaccaccggagttatcagcag

SEQ ID NO: 292648 - DNA, 30 bp, Artificial Sequence
  Synthetic oligonucleotide
cgcgcgggacatcaatttaggtcggagcag

SEQ ID NO: 292649 - DNA, 30 bp, Artificial Sequence
  Synthetic oligonucleotide
aagaacatgggtggggacgtttatgagcag

SEQ ID NO: 292650 - DNA, 30 bp, Artificial Sequence
  Synthetic oligonucleotide
gtagcgacgcgcttacttggtactgagcag

SEQ ID NO: 292651 - DNA, 30 bp, Artificial Sequence
  Synthetic oligonucleotide
atttaaagtgctcagtcagtcaaatagcag

SEQ ID NO: 292652 - DNA, 30 bp, Artificial Sequence
  Synthetic oligonucleotide
gaagggtatctgtcagagtgtaaatagcag

SEQ ID NO: 292653 - DNA, 30 bp, Artificial Sequence
  Synthetic oligonucleotide
taataaaccaagtcggatccactatagcag

SEQ ID NO: 292654 - DNA, 30 bp, Artificial Sequence
  Synthetic oligonucleotide
gcaaggtaaggtgcactactgatgtagcag

SEQ ID NO: 292655 - DNA, 30 bp, Artificial Sequence
  Synthetic oligonucleotide
atcccaccgtggataaagttctcttagcag

SEQ ID NO: 292656 - DNA, 30 bp, Artificial Sequence
  Synthetic oligonucleotide
caaatgcatgagccaatcaaagcaacgcag

SEQ ID NO: 292657 - DNA, 30 bp, Artificial Sequence
  Synthetic oligonucleotide
cgagtctccgggcggctgaaagtcacgcag

SEQ ID NO: 292658 - DNA, 30 bp, Artificial Sequence
  Synthetic oligonucleotide
gtataagggcgcgttggagcaaggacgcag

SEQ ID NO: 292659 - DNA, 30 bp, Artificial Sequence
  Synthetic oligonucleotide
gcaatggaagtgacagttgatgaaccgcag

SEQ ID NO: 292660 - DNA, 30 bp, Artificial Sequence
  Synthetic oligonucleotide
gacgattgcgtgatacctcactaaccgcag

SEQ ID NO: 292661 - DNA, 30 bp, Artificial Sequence
  Synthetic oligonucleotide
gcattaagattgcaaggtacggtaccgcag

SEQ ID NO: 292662 - DNA, 30 bp, Artificial Sequence
  Synthetic oligonucleotide
cgctcctaacccacgaggtcttagccgcag

SEQ ID NO: 292663 - DNA, 31 bp, Artificial Sequence
  Synthetic oligonucleotide
tagtcttattggaccatcctgaacgccgcag

SEQ ID NO: 292664 - DNA, 30 bp, Artificial Sequence
  Synthetic oligonucleotide
aaacaggggttgtttagttgcatgccgcag

SEQ ID NO: 292665 - DNA, 30 bp, Artificial Sequence
  Synthetic oligonucleotide
catgtcaatcaaaattatggtatgccgcag

SEQ ID NO: 292666 - DNA, 30 bp, Artificial Sequence
  Synthetic oligonucleotide
gaaacaagaacagttacggagactccgcag

SEQ ID NO: 292667 - DNA, 30 bp, Artificial Sequence
  Synthetic oligonucleotide
tagtgtgggttggagtatagcgtcgcgcag

SEQ ID NO: 292668 - DNA, 30 bp, Artificial Sequence
  Synthetic oligonucleotide
ttttaggcccgatttcgataactggcgcag

SEQ ID NO: 292669 - DNA, 30 bp, Artificial Sequence
  Synthetic oligonucleotide
ataggacaacgagaacgccctttggcgcag

SEQ ID NO: 292670 - DNA, 30 bp, Artificial Sequence
  Synthetic oligonucleotide
tcaattcacatgtatatcacccatgcgcag

SEQ ID NO: 292671 - DNA, 30 bp, Artificial Sequence
  Synthetic oligonucleotide
atctagcggtggcatctgcggaaatcgcag

SEQ ID NO: 292672 - DNA, 30 bp, Artificial Sequence
  Synthetic oligonucleotide
caaatcgcttgcgtaaatcgtagatcgcag

SEQ ID NO: 292673 - DNA, 30 bp, Artificial Sequence
  Synthetic oligonucleotide
cgtggaacttactagttcgatgattcgcag

SEQ ID NO: 292674 - DNA, 30 bp, Artificial Sequence
  Synthetic oligonucleotide
tgacacagacacgtttactttctttcgcag

SEQ ID NO: 292675 - DNA, 30 bp, Artificial Sequence
  Synthetic oligonucleotide
gactgttggttcagggcccatgtcaggcag

SEQ ID NO: 292676 - DNA, 30 bp, Artificial Sequence
  Synthetic oligonucleotide
gcacggaaattacggggatattagaggcag

SEQ ID NO: 292677 - DNA, 30 bp, Artificial Sequence
  Synthetic oligonucleotide
tgtcaaaataattccttccgtgggaggcag

SEQ ID NO: 292678 - DNA, 30 bp, Artificial Sequence
  Synthetic oligonucleotide
gctcggtcttgtggtcgatgctggaggcag

SEQ ID NO: 292679 - DNA, 30 bp, Artificial Sequence
  Synthetic oligonucleotide
tgtccgagatttagatcggagactaggcag

SEQ ID NO: 292680 - DNA, 30 bp, Artificial Sequence
  Synthetic oligonucleotide
aacccgatatactaggtctgaacccggcag

SEQ ID NO: 292681 - DNA, 30 bp, Artificial Sequence
  Synthetic oligonucleotide
tcccggtaattccgcccggaaccccggcag

SEQ ID NO: 292682 - DNA, 30 bp, Artificial Sequence
  Synthetic oligonucleotide
ttagcaattcctacatcactatcgcggcag

SEQ ID NO: 292683 - DNA, 30 bp, Artificial Sequence
  Synthetic oligonucleotide
gcataaacgcggcgtacacgtatgcggcag

SEQ ID NO: 292684 - DNA, 30 bp, Artificial Sequence
  Synthetic oligonucleotide
cgggccctactgcaatgaacgagagggcag

SEQ ID NO: 292685 - DNA, 30 bp, Artificial Sequence
  Synthetic oligonucleotide
tagtgacaacgcgctgcgattggagggcag

SEQ ID NO: 292686 - DNA, 30 bp, Artificial Sequence
  Synthetic oligonucleotide
cggctttttttatcaaaagagctcgggcag

SEQ ID NO: 292687 - DNA, 30 bp, Artificial Sequence
  Synthetic oligonucleotide
aatctgacagtgtgaccaattagatggcag

SEQ ID NO: 292688 - DNA, 30 bp, Artificial Sequence
  Synthetic oligonucleotide
atttgaagtgttaaaagcttccgatggcag

SEQ ID NO: 292689 - DNA, 30 bp, Artificial Sequence
  Synthetic oligonucleotide
caagtgtgtaattcaactccagtatggcag

SEQ ID NO: 292690 - DNA, 30 bp, Artificial Sequence
  Synthetic oligonucleotide
ctgtaagccattacaacgtacagttggcag

SEQ ID NO: 292691 - DNA, 30 bp, Artificial Sequence
  Synthetic oligonucleotide
acccacaaccgtaaacgtacttgaatgcag

SEQ ID NO: 292692 - DNA, 30 bp, Artificial Sequence
  Synthetic oligonucleotide
tggtaaaaacttcatgaccgggccatgcag

SEQ ID NO: 292693 - DNA, 30 bp, Artificial Sequence
  Synthetic oligonucleotide
gttgggatagggactaatacgcgcatgcag

SEQ ID NO: 292694 - DNA, 30 bp, Artificial Sequence
  Synthetic oligonucleotide
gtggatctggagaggttgttcgtcatgcag

SEQ ID NO: 292695 - DNA, 30 bp, Artificial Sequence
  Synthetic oligonucleotide
taaagaagacggtaccagtaagtgatgcag

SEQ ID NO: 292696 - DNA, 30 bp, Artificial Sequence
  Synthetic oligonucleotide
tgtaattggacattcattgttttgatgcag

SEQ ID NO: 292697 - DNA, 30 bp, Artificial Sequence
  Synthetic oligonucleotide
ttccctgaactagtaaccaatcaactgcag

SEQ ID NO: 292698 - DNA, 30 bp, Artificial Sequence
  Synthetic oligonucleotide
taagttcgcaagagtcccgataacctgcag

SEQ ID NO: 292699 - DNA, 30 bp, Artificial Sequence
  Synthetic oligonucleotide
gcacagatgattattacagtcaggctgcag

SEQ ID NO: 292700 - DNA, 30 bp, Artificial Sequence
  Synthetic oligonucleotide
cgccctgtaaacttcataggttaagtgcag

SEQ ID NO: 292701 - DNA, 30 bp, Artificial Sequence
  Synthetic oligonucleotide
atgcgttggctttagtgtcactacgtgcag

SEQ ID NO: 292702 - DNA, 30 bp, Artificial Sequence
  Synthetic oligonucleotide
atactcaagaccctagtctcgctggtgcag

SEQ ID NO: 292703 - DNA, 30 bp, Artificial Sequence
  Synthetic oligonucleotide
tctaggttcggcaagcctcagcctgtgcag

SEQ ID NO: 292704 - DNA, 30 bp, Artificial Sequence
  Synthetic oligonucleotide
ggcttatgtgatcagtattcactattgcag

SEQ ID NO: 292705 - DNA, 30 bp, Artificial Sequence
  Synthetic oligonucleotide
tttcatgaagggcaagtgtacctattgcag

SEQ ID NO: 292706 - DNA, 30 bp, Artificial Sequence
  Synthetic oligonucleotide
agctggctgccaactttgcactgcttgcag

SEQ ID NO: 292707 - DNA, 30 bp, Artificial Sequence
  Synthetic oligonucleotide
ttattaatacataacaaattactcttgcag

SEQ ID NO: 292708 - DNA, 30 bp, Artificial Sequence
  Synthetic oligonucleotide
gaaagcagggcttcacattggaagttgcag

SEQ ID NO: 292709 - DNA, 30 bp, Artificial Sequence
  Synthetic oligonucleotide
atatcccgaagcctgttgtacatgttgcag

SEQ ID NO: 292710 - DNA, 30 bp, Artificial Sequence
  Synthetic oligonucleotide
ctattgcaaaatatcacgttgtctttgcag

SEQ ID NO: 292711 - DNA, 30 bp, Artificial Sequence
  Synthetic oligonucleotide
aggtacttggtctaagagaggcttttgcag

SEQ ID NO: 292712 - DNA, 30 bp, Artificial Sequence
  Synthetic oligonucleotide
gacccaacaccatgtttccatgtaaatcag

SEQ ID NO: 292713 - DNA, 30 bp, Artificial Sequence
  Synthetic oligonucleotide
agttggagaatatacacccaaatcaatcag

SEQ ID NO: 292714 - DNA, 29 bp, Artificial Sequence
  Synthetic oligonucleotide
aggatctaagggagccttctgggaatcag

SEQ ID NO: 292715 - DNA, 30 bp, Artificial Sequence
  Synthetic oligonucleotide
ctgggagatccagtcttttatactaatcag

SEQ ID NO: 292716 - DNA, 30 bp, Artificial Sequence
  Synthetic oligonucleotide
acttgcgattacaaagtctatggtaatcag

SEQ ID NO: 292717 - DNA, 30 bp, Artificial Sequence
  Synthetic oligonucleotide
ttaaccctcgttgagccccgccagcatcag

SEQ ID NO: 292718 - DNA, 30 bp, Artificial Sequence
  Synthetic oligonucleotide
tcatttcgagaccgtatgatctaagatcag

SEQ ID NO: 292719 - DNA, 30 bp, Artificial Sequence
  Synthetic oligonucleotide
tgttgcgttttcagatataatctagatcag

SEQ ID NO: 292720 - DNA, 30 bp, Artificial Sequence
  Synthetic oligonucleotide
actataaggtaggggttcggccaggatcag

SEQ ID NO: 292721 - DNA, 30 bp, Artificial Sequence
  Synthetic oligonucleotide
atttatgaaatgttgtatatatgggatcag

SEQ ID NO: 292722 - DNA, 30 bp, Artificial Sequence
  Synthetic oligonucleotide
cctttaacgggcagacagcataagtatcag

SEQ ID NO: 292723 - DNA, 30 bp, Artificial Sequence
  Synthetic oligonucleotide
gtcaataattccgggtgactttggtatcag

SEQ ID NO: 292724 - DNA, 30 bp, Artificial Sequence
  Synthetic oligonucleotide
gtcgggggaggacgaggtggcgtgtatcag

SEQ ID NO: 292725 - DNA, 30 bp, Artificial Sequence
  Synthetic oligonucleotide
acccccattcccagagagccaggttatcag

SEQ ID NO: 292726 - DNA, 30 bp, Artificial Sequence
  Synthetic oligonucleotide
ggcggtggccgtatggggctaatttatcag

SEQ ID NO: 292727 - DNA, 30 bp, Artificial Sequence
  Synthetic oligonucleotide
acgacagagcaagggggcagcgcaactcag

SEQ ID NO: 292728 - DNA, 30 bp, Artificial Sequence
  Synthetic oligonucleotide
cattgagctctattaacccgttgaactcag

SEQ ID NO: 292729 - DNA, 30 bp, Artificial Sequence
  Synthetic oligonucleotide
ccccgcaacacactgaagaatctaactcag

SEQ ID NO: 292730 - DNA, 30 bp, Artificial Sequence
  Synthetic oligonucleotide
tccgttcgcaaaaatttttgcaacactcag

SEQ ID NO: 292731 - DNA, 30 bp, Artificial Sequence
  Synthetic oligonucleotide
tagggaactgagccatgcggacgcactcag

SEQ ID NO: 292732 - DNA, 30 bp, Artificial Sequence
  Synthetic oligonucleotide
tataccaatgaacagacgtttgggactcag

SEQ ID NO: 292733 - DNA, 30 bp, Artificial Sequence
  Synthetic oligonucleotide
aacttgaaatttccgcccgggtatactcag

SEQ ID NO: 292734 - DNA, 30 bp, Artificial Sequence
  Synthetic oligonucleotide
atcagctcagggaggtattggacacctcag

SEQ ID NO: 292735 - DNA, 30 bp, Artificial Sequence
  Synthetic oligonucleotide
tgagggcttagtatatcttaagcacctcag

SEQ ID NO: 292736 - DNA, 30 bp, Artificial Sequence
  Synthetic oligonucleotide
ccgcttcaggggtatgatactatacctcag

SEQ ID NO: 292737 - DNA, 30 bp, Artificial Sequence
  Synthetic oligonucleotide
gagtttccggatcgacgaatactacctcag

SEQ ID NO: 292738 - DNA, 30 bp, Artificial Sequence
  Synthetic oligonucleotide
atacagaatttctcaaaaaggaggcctcag

SEQ ID NO: 292739 - DNA, 30 bp, Artificial Sequence
  Synthetic oligonucleotide
ggcgggtgcccttcgtggtcgctgcctcag

SEQ ID NO: 292740 - DNA, 30 bp, Artificial Sequence
  Synthetic oligonucleotide
gtactgggaagaaataagtatggagctcag

SEQ ID NO: 292741 - DNA, 30 bp, Artificial Sequence
  Synthetic oligonucleotide
ttagacttttggagttatgtaaacgctcag

SEQ ID NO: 292742 - DNA, 31 bp, Artificial Sequence
  Synthetic oligonucleotide
aagatcaatcaagggtgaccccggggctcag

SEQ ID NO: 292743 - DNA, 30 bp, Artificial Sequence
  Synthetic oligonucleotide
gtggatactttcagtggttgacatgctcag

SEQ ID NO: 292744 - DNA, 30 bp, Artificial Sequence
  Synthetic oligonucleotide
tacctagaagtcgcttcacgccgttctcag

SEQ ID NO: 292745 - DNA, 30 bp, Artificial Sequence
  Synthetic oligonucleotide
aaacggctacggggtgcctgcctttctcag

SEQ ID NO: 292746 - DNA, 30 bp, Artificial Sequence
  Synthetic oligonucleotide
caagtccagtattaggtccagttttctcag

SEQ ID NO: 292747 - DNA, 30 bp, Artificial Sequence
  Synthetic oligonucleotide
gctctacatgtcagatattagaaaagtcag

SEQ ID NO: 292748 - DNA, 30 bp, Artificial Sequence
  Synthetic oligonucleotide
accaaaagggtctcctatatcaccagtcag

SEQ ID NO: 292749 - DNA, 30 bp, Artificial Sequence
  Synthetic oligonucleotide
ttaaatgtgcgtaactggtataccagtcag

SEQ ID NO: 292750 - DNA, 30 bp, Artificial Sequence
  Synthetic oligonucleotide
tatcgtgtctcggagatttagaagagtcag

SEQ ID NO: 292751 - DNA, 30 bp, Artificial Sequence
  Synthetic oligonucleotide
ctaagatgggggtcattacggatgagtcag

SEQ ID NO: 292752 - DNA, 30 bp, Artificial Sequence
  Synthetic oligonucleotide
gactattagaataaacaagtcgctagtcag

SEQ ID NO: 292753 - DNA, 30 bp, Artificial Sequence
  Synthetic oligonucleotide
cgttcgtgtatcaccactagacaacgtcag

SEQ ID NO: 292754 - DNA, 30 bp, Artificial Sequence
  Synthetic oligonucleotide
gacttctgtagtctcgataccagccgtcag

SEQ ID NO: 292755 - DNA, 30 bp, Artificial Sequence
  Synthetic oligonucleotide
cccggctagcacgctaggggaacgcgtcag

SEQ ID NO: 292756 - DNA, 30 bp, Artificial Sequence
  Synthetic oligonucleotide
gggagcctatccatgccgcaagggcgtcag

SEQ ID NO: 292757 - DNA, 30 bp, Artificial Sequence
  Synthetic oligonucleotide
gtatccttacccaggatgttctatcgtcag

SEQ ID NO: 292758 - DNA, 30 bp, Artificial Sequence
  Synthetic oligonucleotide
aacgagtaatccaagtcctggggtcgtcag

SEQ ID NO: 292759 - DNA, 30 bp, Artificial Sequence
  Synthetic oligonucleotide
cctagttggtggcatctaaccgaaggtcag

SEQ ID NO: 292760 - DNA, 30 bp, Artificial Sequence
  Synthetic oligonucleotide
ttgattaggaattaaacaccgcggggtcag

SEQ ID NO: 292761 - DNA, 30 bp, Artificial Sequence
  Synthetic oligonucleotide
ggatcggctaccccgattgatcggggtcag

SEQ ID NO: 292762 - DNA, 30 bp, Artificial Sequence
  Synthetic oligonucleotide
catctgcggggtttgggtaggatgggtcag

SEQ ID NO: 292763 - DNA, 30 bp, Artificial Sequence
  Synthetic oligonucleotide
gtatcgatctacagtagctgattgggtcag

SEQ ID NO: 292764 - DNA, 30 bp, Artificial Sequence
  Synthetic oligonucleotide
tcgagtcttgcgggcgctggtaatggtcag

SEQ ID NO: 292765 - DNA, 30 bp, Artificial Sequence
  Synthetic oligonucleotide
caattatggtgcaatagcgtcgctggtcag

SEQ ID NO: 292766 - DNA, 30 bp, Artificial Sequence
  Synthetic oligonucleotide
gaaccaggcaattgctccaactttggtcag

SEQ ID NO: 292767 - DNA, 30 bp, Artificial Sequence
  Synthetic oligonucleotide
ccgagtccaggactgccgcatagatgtcag

SEQ ID NO: 292768 - DNA, 30 bp, Artificial Sequence
  Synthetic oligonucleotide
gaacttcaaaacacggaggaaggctgtcag

SEQ ID NO: 292769 - DNA, 30 bp, Artificial Sequence
  Synthetic oligonucleotide
gtcggaggtttgtgattctgcgggtgtcag

SEQ ID NO: 292770 - DNA, 30 bp, Artificial Sequence
  Synthetic oligonucleotide
cattgacttgtataattagcctgaattcag

SEQ ID NO: 292771 - DNA, 30 bp, Artificial Sequence
  Synthetic oligonucleotide
tggataacttctctgaaaagcaacattcag

SEQ ID NO: 292772 - DNA, 30 bp, Artificial Sequence
  Synthetic oligonucleotide
tctaacgggggcgtccccaagcgcattcag

SEQ ID NO: 292773 - DNA, 30 bp, Artificial Sequence
  Synthetic oligonucleotide
gtctggaaccacaccacgcgtacgattcag

SEQ ID NO: 292774 - DNA, 30 bp, Artificial Sequence
  Synthetic oligonucleotide
ttaatcggcgtatcagccagccttattcag

SEQ ID NO: 292775 - DNA, 31 bp, Artificial Sequence
  Synthetic oligonucleotide
ggtgcactcaaaggatctagaagtccttcag

SEQ ID NO: 292776 - DNA, 30 bp, Artificial Sequence
  Synthetic oligonucleotide
ggaaatacgcctgggagtgttccgcttcag

SEQ ID NO: 292777 - DNA, 30 bp, Artificial Sequence
  Synthetic oligonucleotide
tacattaaccgaagtgttaatgcgcttcag

SEQ ID NO: 292778 - DNA, 30 bp, Artificial Sequence
  Synthetic oligonucleotide
ttttgcgaggactgcctgtggtatcttcag

SEQ ID NO: 292779 - DNA, 30 bp, Artificial Sequence
  Synthetic oligonucleotide
taccctatgactcagggcattaccgttcag

SEQ ID NO: 292780 - DNA, 30 bp, Artificial Sequence
  Synthetic oligonucleotide
gtaaggattttgattctataaatcgttcag

SEQ ID NO: 292781 - DNA, 30 bp, Artificial Sequence
  Synthetic oligonucleotide
taaaccatgctggcgcggattccggttcag

SEQ ID NO: 292782 - DNA, 30 bp, Artificial Sequence
  Synthetic oligonucleotide
ccgggtggtcggacgattgggatggttcag

SEQ ID NO: 292783 - DNA, 30 bp, Artificial Sequence
  Synthetic oligonucleotide
agataattaacagattcccgtctctttcag

SEQ ID NO: 292784 - DNA, 30 bp, Artificial Sequence
  Synthetic oligonucleotide
tgccagaagtcttcccttctaaggtttcag

SEQ ID NO: 292785 - DNA, 30 bp, Artificial Sequence
  Synthetic oligonucleotide
gaccggtcttcgcgaatatataaaaaagag

SEQ ID NO: 292786 - DNA, 30 bp, Artificial Sequence
  Synthetic oligonucleotide
gtacgcaatacatgtgggagtaaaaaagag

SEQ ID NO: 292787 - DNA, 30 bp, Artificial Sequence
  Synthetic oligonucleotide
tgttaagaagaggactaatcagaaaaagag

SEQ ID NO: 292788 - DNA, 30 bp, Artificial Sequence
  Synthetic oligonucleotide
tatcacatttctacatggcgtacaaaagag

SEQ ID NO: 292789 - DNA, 30 bp, Artificial Sequence
  Synthetic oligonucleotide
agaaaatacttcttggtcatacgaaaagag

SEQ ID NO: 292790 - DNA, 30 bp, Artificial Sequence
  Synthetic oligonucleotide
tcagtagacctaccggtctccctaaaagag

SEQ ID NO: 292791 - DNA, 30 bp, Artificial Sequence
  Synthetic oligonucleotide
caagatcctattgttgagcatgacaaagag

SEQ ID NO: 292792 - DNA, 30 bp, Artificial Sequence
  Synthetic oligonucleotide
attttgccgggtgccgcttgtgggaaagag

SEQ ID NO: 292793 - DNA, 30 bp, Artificial Sequence
  Synthetic oligonucleotide
tcttatactacaaacatagttaataaagag

SEQ ID NO: 292794 - DNA, 30 bp, Artificial Sequence
  Synthetic oligonucleotide
caacgtggaccctcgtggaggcgtaaagag

SEQ ID NO: 292795 - DNA, 30 bp, Artificial Sequence
  Synthetic oligonucleotide
taaggttttcagctcgctatctgtaaagag

SEQ ID NO: 292796 - DNA, 30 bp, Artificial Sequence
  Synthetic oligonucleotide
gggtgccattggtacatacgatttaaagag

SEQ ID NO: 292797 - DNA, 30 bp, Artificial Sequence
  Synthetic oligonucleotide
actctgtgcacgtccggttcgatccaagag

SEQ ID NO: 292798 - DNA, 30 bp, Artificial Sequence
  Synthetic oligonucleotide
tcttgcattcgtgtggctatttagcaagag

SEQ ID NO: 292799 - DNA, 30 bp, Artificial Sequence
  Synthetic oligonucleotide
ctcgagcttctcgcacatctaccagaagag

SEQ ID NO: 292800 - DNA, 30 bp, Artificial Sequence
  Synthetic oligonucleotide
tgaagtgaccgccggtcggatgcagaagag

SEQ ID NO: 292801 - DNA, 30 bp, Artificial Sequence
  Synthetic oligonucleotide
aaccgggattggtggccgaaattagaagag

SEQ ID NO: 292802 - DNA, 30 bp, Artificial Sequence
  Synthetic oligonucleotide
tcatttaagtaacacaacaaagacgaagag

SEQ ID NO: 292803 - DNA, 30 bp, Artificial Sequence
  Synthetic oligonucleotide
atccagtttgagacagcgtctcatgaagag

SEQ ID NO: 292804 - DNA, 30 bp, Artificial Sequence
  Synthetic oligonucleotide
tgacgggcctcacctgtagtcattgaagag

SEQ ID NO: 292805 - DNA, 30 bp, Artificial Sequence
  Synthetic oligonucleotide
aaacccgatgatccaactcaatttgaagag

SEQ ID NO: 292806 - DNA, 30 bp, Artificial Sequence
  Synthetic oligonucleotide
aactgtcaaaattgacttgcgccataagag

SEQ ID NO: 292807 - DNA, 30 bp, Artificial Sequence
  Synthetic oligonucleotide
ggcgattactacccgactgccggataagag

SEQ ID NO: 292808 - DNA, 30 bp, Artificial Sequence
  Synthetic oligonucleotide
tacgtgcgcattgggggggtattctaagag

SEQ ID NO: 292809 - DNA, 30 bp, Artificial Sequence
  Synthetic oligonucleotide
ggatttactagggccaccatggggtaagag

SEQ ID NO: 292810 - DNA, 30 bp, Artificial Sequence
  Synthetic oligonucleotide
tacgtaatttgaccgggcgtagcttaagag

SEQ ID NO: 292811 - DNA, 30 bp, Artificial Sequence
  Synthetic oligonucleotide
gtgaaattattgggtagtgttgtttaagag

SEQ ID NO: 292812 - DNA, 30 bp, Artificial Sequence
  Synthetic oligonucleotide
ccccaaatcatgggctgcgttggaacagag

SEQ ID NO: 292813 - DNA, 30 bp, Artificial Sequence
  Synthetic oligonucleotide
accttatatgagttttgggaaataacagag

SEQ ID NO: 292814 - DNA, 30 bp, Artificial Sequence
  Synthetic oligonucleotide
cttagttggggcacggtgataagcacagag

SEQ ID NO: 292815 - DNA, 30 bp, Artificial Sequence
  Synthetic oligonucleotide
ttacggatacgccaatgcccgggcacagag

SEQ ID NO: 292816 - DNA, 30 bp, Artificial Sequence
  Synthetic oligonucleotide
gtggggacgtcgggtataatatagacagag

SEQ ID NO: 292817 - DNA, 30 bp, Artificial Sequence
  Synthetic oligonucleotide
cctgctcgaagcaacggtgcgctgacagag

SEQ ID NO: 292818 - DNA, 30 bp, Artificial Sequence
  Synthetic oligonucleotide
catgaatggggggagtgactgctgacagag

SEQ ID NO: 292819 - DNA, 30 bp, Artificial Sequence
  Synthetic oligonucleotide
ttcattgggacgtggaccatacgtacagag

SEQ ID NO: 292820 - DNA, 30 bp, Artificial Sequence
  Synthetic oligonucleotide
aaatcaagcatttgcgattagccagcagag

SEQ ID NO: 292821 - DNA, 30 bp, Artificial Sequence
  Synthetic oligonucleotide
ggtgtcaaaattacttactcgtgcgcagag

SEQ ID NO: 292822 - DNA, 30 bp, Artificial Sequence
  Synthetic oligonucleotide
cgtgacaacatcgggccttcctaggcagag

SEQ ID NO: 292823 - DNA, 30 bp, Artificial Sequence
  Synthetic oligonucleotide
agtctgcgcttcgagagagccggggcagag

SEQ ID NO: 292824 - DNA, 30 bp, Artificial Sequence
  Synthetic oligonucleotide
agatgttaacggtcttatcactgtgcagag

SEQ ID NO: 292825 - DNA, 30 bp, Artificial Sequence
  Synthetic oligonucleotide
tacagaaggaccatgcgcgtaattgcagag

SEQ ID NO: 292826 - DNA, 30 bp, Artificial Sequence
  Synthetic oligonucleotide
tccgacacgaacccctcctataaatcagag

SEQ ID NO: 292827 - DNA, 30 bp, Artificial Sequence
  Synthetic oligonucleotide
aaagaatcccgggtgactctagtatcagag

SEQ ID NO: 292828 - DNA, 30 bp, Artificial Sequence
  Synthetic oligonucleotide
agttatgtcagaagttctaggcactcagag

SEQ ID NO: 292829 - DNA, 30 bp, Artificial Sequence
  Synthetic oligonucleotide
gcttgacgaatacgtcgcgtaacctcagag

SEQ ID NO: 292830 - DNA, 30 bp, Artificial Sequence
  Synthetic oligonucleotide
ccgcattcgtatggctttagaatctcagag

SEQ ID NO: 292831 - DNA, 30 bp, Artificial Sequence
  Synthetic oligonucleotide
aagaacaggtgccagactgctgtctcagag

SEQ ID NO: 292832 - DNA, 30 bp, Artificial Sequence
  Synthetic oligonucleotide
tgctacggcaatggccaaattgggtcagag

SEQ ID NO: 292833 - DNA, 30 bp, Artificial Sequence
  Synthetic oligonucleotide
agaaaagcgagctctacgccgatgtcagag

SEQ ID NO: 292834 - DNA, 30 bp, Artificial Sequence
  Synthetic oligonucleotide
tacggcagtatccctggacattgttcagag

SEQ ID NO: 292835 - DNA, 30 bp, Artificial Sequence
  Synthetic oligonucleotide
taatccaatctgactatggtgctttcagag

SEQ ID NO: 292836 - DNA, 30 bp, Artificial Sequence
  Synthetic oligonucleotide
ctaggtctctgagtaccccactccagagag

SEQ ID NO: 292837 - DNA, 30 bp, Artificial Sequence
  Synthetic oligonucleotide
ctaacttgtctgatacgggtgctcagagag

SEQ ID NO: 292838 - DNA, 30 bp, Artificial Sequence
  Synthetic oligonucleotide
acatttgggccatacaactggaatagagag

SEQ ID NO: 292839 - DNA, 30 bp, Artificial Sequence
  Synthetic oligonucleotide
tctttcagatctcgaattccaactagagag

SEQ ID NO: 292840 - DNA, 30 bp, Artificial Sequence
  Synthetic oligonucleotide
attccggcttgcgtactgcacgaccgagag

SEQ ID NO: 292841 - DNA, 30 bp, Artificial Sequence
  Synthetic oligonucleotide
atagaacggtttcggcgataacgccgagag

SEQ ID NO: 292842 - DNA, 30 bp, Artificial Sequence
  Synthetic oligonucleotide
ttttcatcgtagagggaaaaggctcgagag

SEQ ID NO: 292843 - DNA, 30 bp, Artificial Sequence
  Synthetic oligonucleotide
gtctaaggtcgacctggtctaagtcgagag

SEQ ID NO: 292844 - DNA, 30 bp, Artificial Sequence
  Synthetic oligonucleotide
ggattgcggatgactcacttatggggagag

SEQ ID NO: 292845 - DNA, 30 bp, Artificial Sequence
  Synthetic oligonucleotide
gatattggcgcaatacctgtaattggagag

SEQ ID NO: 292846 - DNA, 30 bp, Artificial Sequence
  Synthetic oligonucleotide
aactacgggttggcagtctttgttggagag

SEQ ID NO: 292847 - DNA, 30 bp, Artificial Sequence
  Synthetic oligonucleotide
cggtgcaggggtactgacgtctggtgagag

SEQ ID NO: 292848 - DNA, 30 bp, Artificial Sequence
  Synthetic oligonucleotide
ataaagactccgtcgagtatggtgtgagag

SEQ ID NO: 292849 - DNA, 30 bp, Artificial Sequence
  Synthetic oligonucleotide
actgaatatagttgatgtcctgggatagag

SEQ ID NO: 292850 - DNA, 30 bp, Artificial Sequence
  Synthetic oligonucleotide
ggtttgctgcttagcagaatgatgatagag

SEQ ID NO: 292851 - DNA, 30 bp, Artificial Sequence
  Synthetic oligonucleotide
ccacgccgtcagtctataagggtgatagag

SEQ ID NO: 292852 - DNA, 30 bp, Artificial Sequence
  Synthetic oligonucleotide
gtggtgcctgatttgaaattccatatagag

SEQ ID NO: 292853 - DNA, 30 bp, Artificial Sequence
  Synthetic oligonucleotide
aagtagaagatggggggcgacagtatagag

SEQ ID NO: 292854 - DNA, 30 bp, Artificial Sequence
  Synthetic oligonucleotide
ctcgagcggctcgatgttattagtatagag

SEQ ID NO: 292855 - DNA, 30 bp, Artificial Sequence
  Synthetic oligonucleotide
aatggcgtgtaagcagtgaggaccctagag

SEQ ID NO: 292856 - DNA, 30 bp, Artificial Sequence
  Synthetic oligonucleotide
ttcgactgaaattgtagcttttgcctagag

SEQ ID NO: 292857 - DNA, 30 bp, Artificial Sequence
  Synthetic oligonucleotide
ttacgttggaggtcatgcggtctcctagag

SEQ ID NO: 292858 - DNA, 30 bp, Artificial Sequence
  Synthetic oligonucleotide
ctgaagcggctgggtaccgaccatctagag

SEQ ID NO: 292859 - DNA, 30 bp, Artificial Sequence
  Synthetic oligonucleotide
tggcggctctcaccggggacatgtctagag

SEQ ID NO: 292860 - DNA, 30 bp, Artificial Sequence
  Synthetic oligonucleotide
tggggtgtggcggacccgatttacgtagag

SEQ ID NO: 292861 - DNA, 30 bp, Artificial Sequence
  Synthetic oligonucleotide
tctgcattcaggggcatccgataggtagag

SEQ ID NO: 292862 - DNA, 30 bp, Artificial Sequence
  Synthetic oligonucleotide
tcgaaatgtttttttaaagttggggtagag

SEQ ID NO: 292863 - DNA, 30 bp, Artificial Sequence
  Synthetic oligonucleotide
gtgaccgggggctgttcgccgggtgtagag

SEQ ID NO: 292864 - DNA, 30 bp, Artificial Sequence
  Synthetic oligonucleotide
cgtagtgaggattgggaaaggggtgtagag

SEQ ID NO: 292865 - DNA, 30 bp, Artificial Sequence
  Synthetic oligonucleotide
ggacggggacacactgtacgggaattagag

SEQ ID NO: 292866 - DNA, 30 bp, Artificial Sequence
  Synthetic oligonucleotide
cgattttacgacatagtgccatagttagag

SEQ ID NO: 292867 - DNA, 30 bp, Artificial Sequence
  Synthetic oligonucleotide
ctcgcgggttgttaatttagggggttagag

SEQ ID NO: 292868 - DNA, 30 bp, Artificial Sequence
  Synthetic oligonucleotide
cgcttccgtgcttagagagcggtgttagag

SEQ ID NO: 292869 - DNA, 30 bp, Artificial Sequence
  Synthetic oligonucleotide
gtaaaggtggtttggacggtatctttagag

SEQ ID NO: 292870 - DNA, 30 bp, Artificial Sequence
  Synthetic oligonucleotide
tatcaaatggaaaaggcgctgtgtttagag

SEQ ID NO: 292871 - DNA, 30 bp, Artificial Sequence
  Synthetic oligonucleotide
acctgggcgcggttgtttaactccaacgag

SEQ ID NO: 292872 - DNA, 30 bp, Artificial Sequence
  Synthetic oligonucleotide
tttgcgagtttcaagtatgtactcaacgag

SEQ ID NO: 292873 - DNA, 30 bp, Artificial Sequence
  Synthetic oligonucleotide
ataccagcgctaggacggacatcgaacgag

SEQ ID NO: 292874 - DNA, 30 bp, Artificial Sequence
  Synthetic oligonucleotide
caatgcgtcagcatttccttgtgccacgag

SEQ ID NO: 292875 - DNA, 30 bp, Artificial Sequence
  Synthetic oligonucleotide
gacagtcaagataaacgctcttgccacgag

SEQ ID NO: 292876 - DNA, 31 bp, Artificial Sequence
  Synthetic oligonucleotide
tctttcagcgaatgaccaggcgttgcacgag

SEQ ID NO: 292877 - DNA, 30 bp, Artificial Sequence
  Synthetic oligonucleotide
agtcaatcacgcgtgcctgatcatcacgag

SEQ ID NO: 292878 - DNA, 30 bp, Artificial Sequence
  Synthetic oligonucleotide
attgggccctgtatgtccaattatcacgag

SEQ ID NO: 292879 - DNA, 30 bp, Artificial Sequence
  Synthetic oligonucleotide
tagatgagaaccagcggtgcgtttcacgag

SEQ ID NO: 292880 - DNA, 30 bp, Artificial Sequence
  Synthetic oligonucleotide
ttccagcatgtgcagatgattcaagacgag

SEQ ID NO: 292881 - DNA, 30 bp, Artificial Sequence
  Synthetic oligonucleotide
gccttttgttattgacatcgtcacgacgag

SEQ ID NO: 292882 - DNA, 30 bp, Artificial Sequence
  Synthetic oligonucleotide
ctacttttgactgaagtctctcaggacgag

SEQ ID NO: 292883 - DNA, 30 bp, Artificial Sequence
  Synthetic oligonucleotide
tttatcgtgatatgcgaaataactgacgag

SEQ ID NO: 292884 - DNA, 30 bp, Artificial Sequence
  Synthetic oligonucleotide
gttatgtgctacaaagccttatctgacgag

SEQ ID NO: 292885 - DNA, 30 bp, Artificial Sequence
  Synthetic oligonucleotide
tctcgctacgacccaacgtaaagtgacgag

SEQ ID NO: 292886 - DNA, 30 bp, Artificial Sequence
  Synthetic oligonucleotide
gcctattggcacggccacaagcaatacgag

SEQ ID NO: 292887 - DNA, 30 bp, Artificial Sequence
  Synthetic oligonucleotide
ctttgactttatatcacgagatactacgag

SEQ ID NO: 292888 - DNA, 30 bp, Artificial Sequence
  Synthetic oligonucleotide
tatgtgcaaacaggtgaccccgcgtacgag

SEQ ID NO: 292889 - DNA, 30 bp, Artificial Sequence
  Synthetic oligonucleotide
taatttggatgctaatccgcgcgaaccgag

SEQ ID NO: 292890 - DNA, 30 bp, Artificial Sequence
  Synthetic oligonucleotide
tggtgatacttacagttactactaaccgag

SEQ ID NO: 292891 - DNA, 30 bp, Artificial Sequence
  Synthetic oligonucleotide
agtgttttgaagaatcatagtgcgaccgag

SEQ ID NO: 292892 - DNA, 30 bp, Artificial Sequence
  Synthetic oligonucleotide
ttgaatctgaggcaggttgggcgtaccgag

SEQ ID NO: 292893 - DNA, 30 bp, Artificial Sequence
  Synthetic oligonucleotide
gcccaagggtcagctacagaccctcccgag

SEQ ID NO: 292894 - DNA, 30 bp, Artificial Sequence
  Synthetic oligonucleotide
tcacacatacgccatactcttgtagccgag

SEQ ID NO: 292895 - DNA, 30 bp, Artificial Sequence
  Synthetic oligonucleotide
tagtatgacctttctgtcttgtacgccgag

SEQ ID NO: 292896 - DNA, 30 bp, Artificial Sequence
  Synthetic oligonucleotide
caagggaccgagtaagcggttccggccgag

SEQ ID NO: 292897 - DNA, 30 bp, Artificial Sequence
  Synthetic oligonucleotide
gttgggatataatatatgcctccaagcgag

SEQ ID NO: 292898 - DNA, 30 bp, Artificial Sequence
  Synthetic oligonucleotide
ccaattatataatagggcgactgaagcgag

SEQ ID NO: 292899 - DNA, 30 bp, Artificial Sequence
  Synthetic oligonucleotide
ttgattcgagatgacaatttacgacgcgag

SEQ ID NO: 292900 - DNA, 30 bp, Artificial Sequence
  Synthetic oligonucleotide
ttgttatgaaaaacgatcctaatacgcgag

SEQ ID NO: 292901 - DNA, 30 bp, Artificial Sequence
  Synthetic oligonucleotide
cagtgttaatactgatgtacgcaccgcgag

SEQ ID NO: 292902 - DNA, 30 bp, Artificial Sequence
  Synthetic oligonucleotide
attggattggcggacaaaagtgtccgcgag

SEQ ID NO: 292903 - DNA, 30 bp, Artificial Sequence
  Synthetic oligonucleotide
actattacctactgttttccaaagcgcgag

SEQ ID NO: 292904 - DNA, 30 bp, Artificial Sequence
  Synthetic oligonucleotide
gccgccgcataatatctctgcgatcgcgag

SEQ ID NO: 292905 - DNA, 30 bp, Artificial Sequence
  Synthetic oligonucleotide
tcgcagctcgattagttggtcattcgcgag

SEQ ID NO: 292906 - DNA, 30 bp, Artificial Sequence
  Synthetic oligonucleotide
cttctgtgcctggcagatatagtaggcgag

SEQ ID NO: 292907 - DNA, 30 bp, Artificial Sequence
  Synthetic oligonucleotide
ttgggcaagtttggacctgggaacggcgag

SEQ ID NO: 292908 - DNA, 30 bp, Artificial Sequence
  Synthetic oligonucleotide
gatcatgccatcgggtaaccggtcggcgag

SEQ ID NO: 292909 - DNA, 30 bp, Artificial Sequence
  Synthetic oligonucleotide
tctaatggaaaggcaccgggttctggcgag

SEQ ID NO: 292910 - DNA, 30 bp, Artificial Sequence
  Synthetic oligonucleotide
acccagagcgtttgagcccgctgctgcgag

SEQ ID NO: 292911 - DNA, 30 bp, Artificial Sequence
  Synthetic oligonucleotide
ctgggtaaacattgagattacgagtgcgag

SEQ ID NO: 292912 - DNA, 30 bp, Artificial Sequence
  Synthetic oligonucleotide
gctggacttaattagaaggaccacatcgag

SEQ ID NO: 292913 - DNA, 30 bp, Artificial Sequence
  Synthetic oligonucleotide
gctcaattcgtcttgggagacgacatcgag

SEQ ID NO: 292914 - DNA, 30 bp, Artificial Sequence
  Synthetic oligonucleotide
cacatgtgacctgcttttctgttactcgag

SEQ ID NO: 292915 - DNA, 30 bp, Artificial Sequence
  Synthetic oligonucleotide
atgctgagtcgtgccgggtaagatctcgag

SEQ ID NO: 292916 - DNA, 30 bp, Artificial Sequence
  Synthetic oligonucleotide
taatgacggattctttaagcatcagtcgag

SEQ ID NO: 292917 - DNA, 30 bp, Artificial Sequence
  Synthetic oligonucleotide
cctagtccggtggatacggtcatagtcgag

SEQ ID NO: 292918 - DNA, 30 bp, Artificial Sequence
  Synthetic oligonucleotide
gtttaggcacacgatgagtaaacggtcgag

SEQ ID NO: 292919 - DNA, 30 bp, Artificial Sequence
  Synthetic oligonucleotide
cacacggcatgtatgtaagaacgggtcgag

SEQ ID NO: 292920 - DNA, 30 bp, Artificial Sequence
  Synthetic oligonucleotide
attaaagataccaaagcagcttatgtcgag

SEQ ID NO: 292921 - DNA, 30 bp, Artificial Sequence
  Synthetic oligonucleotide
ctgtctagtcgacatggtctctcattcgag

SEQ ID NO: 292922 - DNA, 30 bp, Artificial Sequence
  Synthetic oligonucleotide
aactacgcggctgaggtctgtttcttcgag

SEQ ID NO: 292923 - DNA, 30 bp, Artificial Sequence
  Synthetic oligonucleotide
tggccgagctgttcagctattagtttcgag

SEQ ID NO: 292924 - DNA, 30 bp, Artificial Sequence
  Synthetic oligonucleotide
ggaacgtggcttcaggtatcttttttcgag

SEQ ID NO: 292925 - DNA, 30 bp, Artificial Sequence
  Synthetic oligonucleotide
ttgagtaaagcaacagttattaacaaggag

SEQ ID NO: 292926 - DNA, 30 bp, Artificial Sequence
  Synthetic oligonucleotide
tgctccattgagaataatccttccaaggag

SEQ ID NO: 292927 - DNA, 30 bp, Artificial Sequence
  Synthetic oligonucleotide
gtattcaagtatcggacaggcctcaaggag

SEQ ID NO: 292928 - DNA, 30 bp, Artificial Sequence
  Synthetic oligonucleotide
ccctttaattgctttctaacgacacaggag

SEQ ID NO: 292929 - DNA, 30 bp, Artificial Sequence
  Synthetic oligonucleotide
ctttagaacctatcatctcgtccacaggag

SEQ ID NO: 292930 - DNA, 30 bp, Artificial Sequence
  Synthetic oligonucleotide
ggtgcacctgccgctgcccatcgacaggag

SEQ ID NO: 292931 - DNA, 30 bp, Artificial Sequence
  Synthetic oligonucleotide
ccatacggacagggatcgcttctacaggag

SEQ ID NO: 292932 - DNA, 30 bp, Artificial Sequence
  Synthetic oligonucleotide
aacagaagactcgcgctgaggagtcaggag

SEQ ID NO: 292933 - DNA, 30 bp, Artificial Sequence
  Synthetic oligonucleotide
gacaagcatatgagtgcgcacaccgaggag

SEQ ID NO: 292934 - DNA, 30 bp, Artificial Sequence
  Synthetic oligonucleotide
gcgagactataacggcaacatggcgaggag

SEQ ID NO: 292935 - DNA, 30 bp, Artificial Sequence
  Synthetic oligonucleotide
ttcccatccgtcgctccagtatgggaggag

SEQ ID NO: 292936 - DNA, 30 bp, Artificial Sequence
  Synthetic oligonucleotide
cacgggcgaagtttatcctcgatggaggag

SEQ ID NO: 292937 - DNA, 30 bp, Artificial Sequence
  Synthetic oligonucleotide
tgcgcgtcttaatggagctcggtataggag

SEQ ID NO: 292938 - DNA, 30 bp, Artificial Sequence
  Synthetic oligonucleotide
gttctgtaattcacatcgacccagtaggag

SEQ ID NO: 292939 - DNA, 30 bp, Artificial Sequence
  Synthetic oligonucleotide
gacttacggttgtgaagggactagtaggag

SEQ ID NO: 292940 - DNA, 30 bp, Artificial Sequence
  Synthetic oligonucleotide
attaaggtcaaaattaccgtcctgtaggag

SEQ ID NO: 292941 - DNA, 30 bp, Artificial Sequence
  Synthetic oligonucleotide
caatgtcggttcgggtccgaaaattaggag

SEQ ID NO: 292942 - DNA, 30 bp, Artificial Sequence
  Synthetic oligonucleotide
tcgtcgacgctaaggatgcgaaaaacggag

SEQ ID NO: 292943 - DNA, 30 bp, Artificial Sequence
  Synthetic oligonucleotide
ctatctgcctatttagttagaaccacggag

SEQ ID NO: 292944 - DNA, 30 bp, Artificial Sequence
  Synthetic oligonucleotide
aatccggcccaattctgcaattgtacggag

SEQ ID NO: 292945 - DNA, 30 bp, Artificial Sequence
  Synthetic oligonucleotide
tatttcggtttacacctagaatttacggag

SEQ ID NO: 292946 - DNA, 30 bp, Artificial Sequence
  Synthetic oligonucleotide
ccgtcacggttgtcgggtcgaggaccggag

SEQ ID NO: 292947 - DNA, 30 bp, Artificial Sequence
  Synthetic oligonucleotide
aaggtgagctggttcgcagacgatccggag

SEQ ID NO: 292948 - DNA, 30 bp, Artificial Sequence
  Synthetic oligonucleotide
ttggtttcgccgcgcgcaagctgtccggag

SEQ ID NO: 292949 - DNA, 30 bp, Artificial Sequence
  Synthetic oligonucleotide
gacgcggtctacaaagcgtcactagcggag

SEQ ID NO: 292950 - DNA, 30 bp, Artificial Sequence
  Synthetic oligonucleotide
gaatgagatattgcgaaacgtgccgcggag

SEQ ID NO: 292951 - DNA, 30 bp, Artificial Sequence
  Synthetic oligonucleotide
ttattcacatttgcatgggaagaggcggag

SEQ ID NO: 292952 - DNA, 30 bp, Artificial Sequence
  Synthetic oligonucleotide
tcggtgtacacggtcttcccaattgcggag

SEQ ID NO: 292953 - DNA, 30 bp, Artificial Sequence
  Synthetic oligonucleotide
ttcatcccagatgcactgtaataaagggag

SEQ ID NO: 292954 - DNA, 30 bp, Artificial Sequence
  Synthetic oligonucleotide
gaggtaggtggtagtgcgggcgacagggag

SEQ ID NO: 292955 - DNA, 30 bp, Artificial Sequence
  Synthetic oligonucleotide
catctgccgcaaatgcttgcgacgagggag

SEQ ID NO: 292956 - DNA, 30 bp, Artificial Sequence
  Synthetic oligonucleotide
atcccccaagggcatttgctctggagggag

SEQ ID NO: 292957 - DNA, 30 bp, Artificial Sequence
  Synthetic oligonucleotide
attcatggaatccgtctcatctatagggag

SEQ ID NO: 292958 - DNA, 30 bp, Artificial Sequence
  Synthetic oligonucleotide
ggaccggtacggtatccacaaaaacgggag

SEQ ID NO: 292959 - DNA, 30 bp, Artificial Sequence
  Synthetic oligonucleotide
cccgcgacactgggggcccacccccgggag

SEQ ID NO: 292960 - DNA, 30 bp, Artificial Sequence
  Synthetic oligonucleotide
caaaaatttgatagtcggatccgccgggag

SEQ ID NO: 292961 - DNA, 30 bp, Artificial Sequence
  Synthetic oligonucleotide
ctatgatctcttgtatgctggtgaggggag

SEQ ID NO: 292962 - DNA, 30 bp, Artificial Sequence
  Synthetic oligonucleotide
gtgggttttcgtgggcaccgacggggggag

SEQ ID NO: 292963 - DNA, 30 bp, Artificial Sequence
  Synthetic oligonucleotide
tggcgccatatgcggcctcggttatgggag

SEQ ID NO: 292964 - DNA, 30 bp, Artificial Sequence
  Synthetic oligonucleotide
cactccatcaggcgatatcatcactgggag

SEQ ID NO: 292965 - DNA, 30 bp, Artificial Sequence
  Synthetic oligonucleotide
gactcatcggttttctctgcagactgggag

SEQ ID NO: 292966 - DNA, 30 bp, Artificial Sequence
  Synthetic oligonucleotide
gtcatgatccagccctcaaaatgctgggag

SEQ ID NO: 292967 - DNA, 30 bp, Artificial Sequence
  Synthetic oligonucleotide
atattgacatttcgcaatgacgggtgggag

SEQ ID NO: 292968 - DNA, 30 bp, Artificial Sequence
  Synthetic oligonucleotide
ttatgctccaagcaagcgagtcattgggag

SEQ ID NO: 292969 - DNA, 30 bp, Artificial Sequence
  Synthetic oligonucleotide
cagagtgcctcaatatgaagttgttgggag

SEQ ID NO: 292970 - DNA, 30 bp, Artificial Sequence
  Synthetic oligonucleotide
taactccgtaattgatccggcctcatggag

SEQ ID NO: 292971 - DNA, 30 bp, Artificial Sequence
  Synthetic oligonucleotide
tgcaaccgtgcccggactgctactatggag

SEQ ID NO: 292972 - DNA, 30 bp, Artificial Sequence
  Synthetic oligonucleotide
ctcttctgagggaaaaataatcccctggag

SEQ ID NO: 292973 - DNA, 30 bp, Artificial Sequence
  Synthetic oligonucleotide
tggtgtgttatctgccctcaattcctggag

SEQ ID NO: 292974 - DNA, 30 bp, Artificial Sequence
  Synthetic oligonucleotide
ggtaaggggaacaagcagagagggctggag

SEQ ID NO: 292975 - DNA, 30 bp, Artificial Sequence
  Synthetic oligonucleotide
tagattacccggggattctgagggctggag

SEQ ID NO: 292976 - DNA, 30 bp, Artificial Sequence
  Synthetic oligonucleotide
atcagttcaatacaggtaccacatctggag

SEQ ID NO: 292977 - DNA, 30 bp, Artificial Sequence
  Synthetic oligonucleotide
gccgttgattaagtaaagcagactctggag

SEQ ID NO: 292978 - DNA, 30 bp, Artificial Sequence
  Synthetic oligonucleotide
tatcgccgggcactcttgcgtactctggag

SEQ ID NO: 292979 - DNA, 30 bp, Artificial Sequence
  Synthetic oligonucleotide
aataggtagaagtttgagacaagcgtggag

SEQ ID NO: 292980 - DNA, 30 bp, Artificial Sequence
  Synthetic oligonucleotide
ctgctgcttccaattgtttagttcgtggag

SEQ ID NO: 292981 - DNA, 30 bp, Artificial Sequence
  Synthetic oligonucleotide
ttcggagaatcactagtgggctttgtggag

SEQ ID NO: 292982 - DNA, 30 bp, Artificial Sequence
  Synthetic oligonucleotide
taaagtatataattaacttataagttggag

SEQ ID NO: 292983 - DNA, 30 bp, Artificial Sequence
  Synthetic oligonucleotide
gttatgtggcataaagcacgggcaaatgag

SEQ ID NO: 292984 - DNA, 30 bp, Artificial Sequence
  Synthetic oligonucleotide
ggatcttccctgtcggaacgactacatgag

SEQ ID NO: 292985 - DNA, 30 bp, Artificial Sequence
  Synthetic oligonucleotide
caggaccatagtctgtgtaatttacatgag

SEQ ID NO: 292986 - DNA, 30 bp, Artificial Sequence
  Synthetic oligonucleotide
gggtttcggaggtgtttcgtgcaccatgag

SEQ ID NO: 292987 - DNA, 30 bp, Artificial Sequence
  Synthetic oligonucleotide
atcactcggttgaagttcaaaactcatgag

SEQ ID NO: 292988 - DNA, 30 bp, Artificial Sequence
  Synthetic oligonucleotide
tagaccggccaccagttttgttcagatgag

SEQ ID NO: 292989 - DNA, 30 bp, Artificial Sequence
  Synthetic oligonucleotide
ctaacggtatgaggatactgtgacgatgag

SEQ ID NO: 292990 - DNA, 30 bp, Artificial Sequence
  Synthetic oligonucleotide
acccatgattgctaatcattcacggatgag

SEQ ID NO: 292991 - DNA, 30 bp, Artificial Sequence
  Synthetic oligonucleotide
attatcgtgctaactctaagaatggatgag

SEQ ID NO: 292992 - DNA, 30 bp, Artificial Sequence
  Synthetic oligonucleotide
atgttacattggcggcggtgcatggatgag

SEQ ID NO: 292993 - DNA, 30 bp, Artificial Sequence
  Synthetic oligonucleotide
gtaaaggaatgtgaggataatgttgatgag

SEQ ID NO: 292994 - DNA, 30 bp, Artificial Sequence
  Synthetic oligonucleotide
cataattctgcagggttgcaacaatatgag

SEQ ID NO: 292995 - DNA, 30 bp, Artificial Sequence
  Synthetic oligonucleotide
aaagtctcgatggggtcgagcggatatgag

SEQ ID NO: 292996 - DNA, 30 bp, Artificial Sequence
  Synthetic oligonucleotide
gatgggttaatgtacaagttagtatatgag

SEQ ID NO: 292997 - DNA, 30 bp, Artificial Sequence
  Synthetic oligonucleotide
gagaatttaatctctgacacagactatgag

SEQ ID NO: 292998 - DNA, 30 bp, Artificial Sequence
  Synthetic oligonucleotide
aatatgtccggggtcacaagcggctatgag

SEQ ID NO: 292999 - DNA, 30 bp, Artificial Sequence
  Synthetic oligonucleotide
caccactgtctctgacgggcttgctatgag

SEQ ID NO: 293000 - DNA, 30 bp, Artificial Sequence
  Synthetic oligonucleotide
gggtgaggggccgagggggcatagtatgag

SEQ ID NO: 293001 - DNA, 30 bp, Artificial Sequence
  Synthetic oligonucleotide
tacctctgtaactcgaccactatttatgag

SEQ ID NO: 293002 - DNA, 30 bp, Artificial Sequence
  Synthetic oligonucleotide
aagcgagcaacctttgcgtcgacaactgag

SEQ ID NO: 293003 - DNA, 30 bp, Artificial Sequence
  Synthetic oligonucleotide
cgtggtttctcctggaggcatctcactgag

SEQ ID NO: 293004 - DNA, 30 bp, Artificial Sequence
  Synthetic oligonucleotide
atagtatggggaatagatgcagttactgag

SEQ ID NO: 293005 - DNA, 30 bp, Artificial Sequence
  Synthetic oligonucleotide
atttagatctcctagtcgagtggccctgag

SEQ ID NO: 293006 - DNA, 30 bp, Artificial Sequence
  Synthetic oligonucleotide
gacgctcgaaacggtccgttagcgcctgag

SEQ ID NO: 293007 - DNA, 30 bp, Artificial Sequence
  Synthetic oligonucleotide
ttgccagatggctggacattgccagctgag

SEQ ID NO: 293008 - DNA, 30 bp, Artificial Sequence
  Synthetic oligonucleotide
catgttggtcaacccggtgatccagctgag

SEQ ID NO: 293009 - DNA, 30 bp, Artificial Sequence
  Synthetic oligonucleotide
tctcatggcggtcgttcgttccacgctgag

SEQ ID NO: 293010 - DNA, 30 bp, Artificial Sequence
  Synthetic oligonucleotide
atgtagctacgactggacatgggggctgag

SEQ ID NO: 293011 - DNA, 30 bp, Artificial Sequence
  Synthetic oligonucleotide
ttcggagcatatggttgggttactgctgag

SEQ ID NO: 293012 - DNA, 30 bp, Artificial Sequence
  Synthetic oligonucleotide
tagttcctggtgtcaaactaatctgctgag

SEQ ID NO: 293013 - DNA, 30 bp, Artificial Sequence
  Synthetic oligonucleotide
ataaggatggacctgggggcaaactctgag

SEQ ID NO: 293014 - DNA, 30 bp, Artificial Sequence
  Synthetic oligonucleotide
acacatctttagcgtgctaagaacagtgag

SEQ ID NO: 293015 - DNA, 30 bp, Artificial Sequence
  Synthetic oligonucleotide
ctggctacgcacacattacgcaccagtgag

SEQ ID NO: 293016 - DNA, 30 bp, Artificial Sequence
  Synthetic oligonucleotide
gatttcaagcttgaaaacaggcatagtgag

SEQ ID NO: 293017 - DNA, 30 bp, Artificial Sequence
  Synthetic oligonucleotide
ggaatcaggggccaggactgaggacgtgag

SEQ ID NO: 293018 - DNA, 30 bp, Artificial Sequence
  Synthetic oligonucleotide
aacagcataaagttgtagttgatacgtgag

SEQ ID NO: 293019 - DNA, 30 bp, Artificial Sequence
  Synthetic oligonucleotide
aaatattggtgatcggagacacaccgtgag

SEQ ID NO: 293020 - DNA, 30 bp, Artificial Sequence
  Synthetic oligonucleotide
tgggtctttccagacaagaacagccgtgag

SEQ ID NO: 293021 - DNA, 30 bp, Artificial Sequence
  Synthetic oligonucleotide
gtcggcaccagcacctctgatagccgtgag

SEQ ID NO: 293022 - DNA, 30 bp, Artificial Sequence
  Synthetic oligonucleotide
tccaaagtggttttctcctgagatcgtgag

SEQ ID NO: 293023 - DNA, 30 bp, Artificial Sequence
  Synthetic oligonucleotide
ggaactaggtacagtccaacgtgtcgtgag

SEQ ID NO: 293024 - DNA, 30 bp, Artificial Sequence
  Synthetic oligonucleotide
tgatattccgctaaagtgaagcttcgtgag

SEQ ID NO: 293025 - DNA, 30 bp, Artificial Sequence
  Synthetic oligonucleotide
agaagacgtctactcagtggtcgtggtgag

SEQ ID NO: 293026 - DNA, 30 bp, Artificial Sequence
  Synthetic oligonucleotide
ttgtacgtgaagtcgtacagctcatgtgag

SEQ ID NO: 293027 - DNA, 30 bp, Artificial Sequence
  Synthetic oligonucleotide
cgagacgcgacgtggcgtgatttatgtgag

SEQ ID NO: 293028 - DNA, 30 bp, Artificial Sequence
  Synthetic oligonucleotide
agactagctatgatgtctagtttctgtgag

SEQ ID NO: 293029 - DNA, 30 bp, Artificial Sequence
  Synthetic oligonucleotide
cccgctgttgtaggcatttcttagtgtgag

SEQ ID NO: 293030 - DNA, 30 bp, Artificial Sequence
  Synthetic oligonucleotide
tatagtttatcttgatgaaaatggtgtgag

SEQ ID NO: 293031 - DNA, 30 bp, Artificial Sequence
  Synthetic oligonucleotide
aagggctaactcttgcccgtttattgtgag

SEQ ID NO: 293032 - DNA, 30 bp, Artificial Sequence
  Synthetic oligonucleotide
gttccatggaatagcgataacatcattgag

SEQ ID NO: 293033 - DNA, 30 bp, Artificial Sequence
  Synthetic oligonucleotide
ctgaatctcgaggagatgtccgttattgag

SEQ ID NO: 293034 - DNA, 30 bp, Artificial Sequence
  Synthetic oligonucleotide
agggtgcagagttgttaaacccaacttgag

SEQ ID NO: 293035 - DNA, 30 bp, Artificial Sequence
  Synthetic oligonucleotide
tgccgttaagtgtctgtagatgcacttgag

SEQ ID NO: 293036 - DNA, 30 bp, Artificial Sequence
  Synthetic oligonucleotide
gggggtacccccactgtacgttcccttgag

SEQ ID NO: 293037 - DNA, 30 bp, Artificial Sequence
  Synthetic oligonucleotide
aatcatatcgagtttttcctgtagcttgag

SEQ ID NO: 293038 - DNA, 30 bp, Artificial Sequence
  Synthetic oligonucleotide
aattggaatcattataatgtatcgcttgag

SEQ ID NO: 293039 - DNA, 30 bp, Artificial Sequence
  Synthetic oligonucleotide
gatcgggggccagacccagctcatcttgag

SEQ ID NO: 293040 - DNA, 30 bp, Artificial Sequence
  Synthetic oligonucleotide
ttacgtggctttactcgtcaatgtcttgag

SEQ ID NO: 293041 - DNA, 30 bp, Artificial Sequence
  Synthetic oligonucleotide
ctgggacagcctgcttcgtttgaagttgag

SEQ ID NO: 293042 - DNA, 30 bp, Artificial Sequence
  Synthetic oligonucleotide
gagatcgctatctggaagcacgcagttgag

SEQ ID NO: 293043 - DNA, 30 bp, Artificial Sequence
  Synthetic oligonucleotide
tgagagaccgtgcttacgggttcagttgag

SEQ ID NO: 293044 - DNA, 30 bp, Artificial Sequence
  Synthetic oligonucleotide
aacttcaccaagtatactgcacacgttgag

SEQ ID NO: 293045 - DNA, 30 bp, Artificial Sequence
  Synthetic oligonucleotide
caccggaggatatcaactagtggcgttgag

SEQ ID NO: 293046 - DNA, 30 bp, Artificial Sequence
  Synthetic oligonucleotide
aacggaggactgattatactttgcgttgag

SEQ ID NO: 293047 - DNA, 30 bp, Artificial Sequence
  Synthetic oligonucleotide
catagaacaaggtcgacccctatggttgag

SEQ ID NO: 293048 - DNA, 30 bp, Artificial Sequence
  Synthetic oligonucleotide
gaataatcatttcgatctatggctgttgag

SEQ ID NO: 293049 - DNA, 30 bp, Artificial Sequence
  Synthetic oligonucleotide
ttatggactagttggatcactgttgttgag

SEQ ID NO: 293050 - DNA, 30 bp, Artificial Sequence
  Synthetic oligonucleotide
cgtaagaatacaagtgctttgtcatttgag

SEQ ID NO: 293051 - DNA, 30 bp, Artificial Sequence
  Synthetic oligonucleotide
gattcatacgtacgaagtagtatctttgag

SEQ ID NO: 293052 - DNA, 30 bp, Artificial Sequence
  Synthetic oligonucleotide
cggttcctcccagagatactaaattttgag

SEQ ID NO: 293053 - DNA, 30 bp, Artificial Sequence
  Synthetic oligonucleotide
cttgggagcgatgttggcactaattttgag

SEQ ID NO: 293054 - DNA, 30 bp, Artificial Sequence
  Synthetic oligonucleotide
ctctggacttaaagactttcccattttgag

SEQ ID NO: 293055 - DNA, 30 bp, Artificial Sequence
  Synthetic oligonucleotide
tttaggtgttttggcgtgtcatcttttgag

SEQ ID NO: 293056 - DNA, 30 bp, Artificial Sequence
  Synthetic oligonucleotide
gtgagtaggaaactctgtggattttttgag

SEQ ID NO: 293057 - DNA, 30 bp, Artificial Sequence
  Synthetic oligonucleotide
gtcccgacaagacgccattgttcaaaatag

SEQ ID NO: 293058 - DNA, 30 bp, Artificial Sequence
  Synthetic oligonucleotide
gcatgccaatggggtctgttccgcaaatag

SEQ ID NO: 293059 - DNA, 30 bp, Artificial Sequence
  Synthetic oligonucleotide
taacgattgctaacttaaagattcaaatag

SEQ ID NO: 293060 - DNA, 31 bp, Artificial Sequence
  Synthetic oligonucleotide
aggagaagtctctagcagagatgagaaatag

SEQ ID NO: 293061 - DNA, 30 bp, Artificial Sequence
  Synthetic oligonucleotide
gtacggcttaaataagcaggaacgaaatag

SEQ ID NO: 293062 - DNA, 30 bp, Artificial Sequence
  Synthetic oligonucleotide
tttctcgccatgtaataggagacgaaatag

SEQ ID NO: 293063 - DNA, 30 bp, Artificial Sequence
  Synthetic oligonucleotide
ccatgcacgttcctaagctttaataaatag

SEQ ID NO: 293064 - DNA, 30 bp, Artificial Sequence
  Synthetic oligonucleotide
gacatcggcggatcttatggccataaatag

SEQ ID NO: 293065 - DNA, 30 bp, Artificial Sequence
  Synthetic oligonucleotide
cccggcaccggcctgtattgtccgcaatag

SEQ ID NO: 293066 - DNA, 30 bp, Artificial Sequence
  Synthetic oligonucleotide
gtaggtttagtcccaagcttcctgcaatag

SEQ ID NO: 293067 - DNA, 30 bp, Artificial Sequence
  Synthetic oligonucleotide
tagcgatgcaggcatgcgtaaaaagaatag

SEQ ID NO: 293068 - DNA, 30 bp, Artificial Sequence
  Synthetic oligonucleotide
cggttgatattgtcgagcgattaagaatag

SEQ ID NO: 293069 - DNA, 30 bp, Artificial Sequence
  Synthetic oligonucleotide
aacacccggagttagaacaatgtagaatag

SEQ ID NO: 293070 - DNA, 30 bp, Artificial Sequence
  Synthetic oligonucleotide
ttattcgcgggggagacctgagccgaatag

SEQ ID NO: 293071 - DNA, 30 bp, Artificial Sequence
  Synthetic oligonucleotide
cttaaagaagcgcgtttaaatggcgaatag

SEQ ID NO: 293072 - DNA, 30 bp, Artificial Sequence
  Synthetic oligonucleotide
aatgccaatcctggcatttgcaaggaatag

SEQ ID NO: 293073 - DNA, 30 bp, Artificial Sequence
  Synthetic oligonucleotide
ctcctctttgttcttatgggaaatgaatag

SEQ ID NO: 293074 - DNA, 30 bp, Artificial Sequence
  Synthetic oligonucleotide
cccaacaacgcagattccatgagtgaatag

SEQ ID NO: 293075 - DNA, 30 bp, Artificial Sequence
  Synthetic oligonucleotide
tctactgtcaagaatcgttatcttgaatag

SEQ ID NO: 293076 - DNA, 31 bp, Artificial Sequence
  Synthetic oligonucleotide
acttaacgattatattggggtcctctaatag

SEQ ID NO: 293077 - DNA, 30 bp, Artificial Sequence
  Synthetic oligonucleotide
catgtcaacgatatttacttattctaatag

SEQ ID NO: 293078 - DNA, 30 bp, Artificial Sequence
  Synthetic oligonucleotide
tatttatacttgtgtttcaatgattaatag

SEQ ID NO: 293079 - DNA, 30 bp, Artificial Sequence
  Synthetic oligonucleotide
gtttgtatggaaccggaaggatcttaatag

SEQ ID NO: 293080 - DNA, 30 bp, Artificial Sequence
  Synthetic oligonucleotide
tacggtattacaacttgttccacaacatag

SEQ ID NO: 293081 - DNA, 30 bp, Artificial Sequence
  Synthetic oligonucleotide
ggcctagcctgtctgggcacgcgcacatag

SEQ ID NO: 293082 - DNA, 30 bp, Artificial Sequence
  Synthetic oligonucleotide
tatgtcacggaactatacgtgcggacatag

SEQ ID NO: 293083 - DNA, 30 bp, Artificial Sequence
  Synthetic oligonucleotide
gactggccagtctaggcggcggccccatag

SEQ ID NO: 293084 - DNA, 30 bp, Artificial Sequence
  Synthetic oligonucleotide
acgcactctatcactaattcgttcccatag

SEQ ID NO: 293085 - DNA, 30 bp, Artificial Sequence
  Synthetic oligonucleotide
tctaaaatagatggacaattatcggcatag

SEQ ID NO: 293086 - DNA, 30 bp, Artificial Sequence
  Synthetic oligonucleotide
cccgacataacattcttatggtcggcatag

SEQ ID NO: 293087 - DNA, 30 bp, Artificial Sequence
  Synthetic oligonucleotide
agaatgggagcaggtgaaggcctggcatag

SEQ ID NO: 293088 - DNA, 30 bp, Artificial Sequence
  Synthetic oligonucleotide
aagatctacaaaggattactgaaatcatag

SEQ ID NO: 293089 - DNA, 30 bp, Artificial Sequence
  Synthetic oligonucleotide
ataggtcagagcactgggtccggatcatag

SEQ ID NO: 293090 - DNA, 30 bp, Artificial Sequence
  Synthetic oligonucleotide
cgctgcgttcgatagttaactgtatcatag

SEQ ID NO: 293091 - DNA, 30 bp, Artificial Sequence
  Synthetic oligonucleotide
ccggaacgtgcttagaagaggcagtcatag

SEQ ID NO: 293092 - DNA, 30 bp, Artificial Sequence
  Synthetic oligonucleotide
atctggatgaagctcaaactaacgtcatag

SEQ ID NO: 293093 - DNA, 30 bp, Artificial Sequence
  Synthetic oligonucleotide
atggctgtagttctcctgcggaattcatag

SEQ ID NO: 293094 - DNA, 30 bp, Artificial Sequence
  Synthetic oligonucleotide
ttaaggacactctctattgggtattcatag

SEQ ID NO: 293095 - DNA, 30 bp, Artificial Sequence
  Synthetic oligonucleotide
atctcgggttaaggtataagctcaagatag

SEQ ID NO: 293096 - DNA, 30 bp, Artificial Sequence
  Synthetic oligonucleotide
aacagttaggtaactgccacaggaagatag

SEQ ID NO: 293097 - DNA, 30 bp, Artificial Sequence
  Synthetic oligonucleotide
agagtcatcggagcacgtattctaagatag

SEQ ID NO: 293098 - DNA, 30 bp, Artificial Sequence
  Synthetic oligonucleotide
gtcggcacgaagtctgtaatagacagatag

SEQ ID NO: 293099 - DNA, 30 bp, Artificial Sequence
  Synthetic oligonucleotide
gagagagttaattgttgactgtcgagatag

SEQ ID NO: 293100 - DNA, 30 bp, Artificial Sequence
  Synthetic oligonucleotide
ctccgcggtgggactttgcgaagtagatag

SEQ ID NO: 293101 - DNA, 30 bp, Artificial Sequence
  Synthetic oligonucleotide
gctagtataaagggctcaaagcgtagatag

SEQ ID NO: 293102 - DNA, 30 bp, Artificial Sequence
  Synthetic oligonucleotide
ctggcatggacactggaccaaggtagatag

SEQ ID NO: 293103 - DNA, 30 bp, Artificial Sequence
  Synthetic oligonucleotide
gaattacaaagcctaagacagtcacgatag

SEQ ID NO: 293104 - DNA, 30 bp, Artificial Sequence
  Synthetic oligonucleotide
tttgttcaagaaagcacggagatccgatag

SEQ ID NO: 293105 - DNA, 30 bp, Artificial Sequence
  Synthetic oligonucleotide
acgttcgctcgatattcgcgcaagcgatag

SEQ ID NO: 293106 - DNA, 30 bp, Artificial Sequence
  Synthetic oligonucleotide
tgtctggcgtggaaatggccacttcgatag

SEQ ID NO: 293107 - DNA, 30 bp, Artificial Sequence
  Synthetic oligonucleotide
gagtcacttgggcgaccctccggaggatag

SEQ ID NO: 293108 - DNA, 30 bp, Artificial Sequence
  Synthetic oligonucleotide
tagttaaaactctaagcctgtccgggatag

SEQ ID NO: 293109 - DNA, 30 bp, Artificial Sequence
  Synthetic oligonucleotide
gtcggattacgctcattagggtcgggatag

SEQ ID NO: 293110 - DNA, 30 bp, Artificial Sequence
  Synthetic oligonucleotide
gcccgagaagcaattgttaggtggggatag

SEQ ID NO: 293111 - DNA, 30 bp, Artificial Sequence
  Synthetic oligonucleotide
aaatcgattgaagtgaaaggggtgggatag

SEQ ID NO: 293112 - DNA, 30 bp, Artificial Sequence
  Synthetic oligonucleotide
gacttaacaaatggggccggtgctggatag

SEQ ID NO: 293113 - DNA, 30 bp, Artificial Sequence
  Synthetic oligonucleotide
ccataggtggtaagtgaggccattggatag

SEQ ID NO: 293114 - DNA, 30 bp, Artificial Sequence
  Synthetic oligonucleotide
taagagttgggcacagccgagattggatag

SEQ ID NO: 293115 - DNA, 30 bp, Artificial Sequence
  Synthetic oligonucleotide
ggatcacccacgatgggttacgaatgatag

SEQ ID NO: 293116 - DNA, 30 bp, Artificial Sequence
  Synthetic oligonucleotide
ccggcgagcgttactctatggaaaatatag

SEQ ID NO: 293117 - DNA, 29 bp, Artificial Sequence
  Synthetic oligonucleotide
ccacgcttatgtacgggcgagaaatatag

SEQ ID NO: 293118 - DNA, 30 bp, Artificial Sequence
  Synthetic oligonucleotide
tgtggggactcgggttaaccggaaatatag

SEQ ID NO: 293119 - DNA, 30 bp, Artificial Sequence
  Synthetic oligonucleotide
atcattgtcttaaggaagatcacgatatag

SEQ ID NO: 293120 - DNA, 30 bp, Artificial Sequence
  Synthetic oligonucleotide
tagaatactttgcaatggatctcgatatag

SEQ ID NO: 293121 - DNA, 30 bp, Artificial Sequence
  Synthetic oligonucleotide
tgaatgacttcttggcaatctttgatatag

SEQ ID NO: 293122 - DNA, 30 bp, Artificial Sequence
  Synthetic oligonucleotide
agtaactataagatggggcttgatatatag

SEQ ID NO: 293123 - DNA, 30 bp, Artificial Sequence
  Synthetic oligonucleotide
ttgtgcgttatagtttcatagtgtatatag

SEQ ID NO: 293124 - DNA, 30 bp, Artificial Sequence
  Synthetic oligonucleotide
ttgccaagaccggccaagctaattatatag

SEQ ID NO: 293125 - DNA, 30 bp, Artificial Sequence
  Synthetic oligonucleotide
gggatggctagtgttgattgcaacctatag

SEQ ID NO: 293126 - DNA, 30 bp, Artificial Sequence
  Synthetic oligonucleotide
aagaactactaggttccaatcaacctatag

SEQ ID NO: 293127 - DNA, 30 bp, Artificial Sequence
  Synthetic oligonucleotide
ccgcgctgggacgggatcccgaccctatag

SEQ ID NO: 293128 - DNA, 30 bp, Artificial Sequence
  Synthetic oligonucleotide
aaggatcactgtagcggttggaagctatag

SEQ ID NO: 293129 - DNA, 29 bp, Artificial Sequence
  Synthetic oligonucleotide
aagcttagtctgtcaacgcaccgctatag

SEQ ID NO: 293130 - DNA, 30 bp, Artificial Sequence
  Synthetic oligonucleotide
gaagtgtccggatgccaagtggtgctatag

SEQ ID NO: 293131 - DNA, 30 bp, Artificial Sequence
  Synthetic oligonucleotide
gcgctggtaaatagtggtggtcatctatag

SEQ ID NO: 293132 - DNA, 30 bp, Artificial Sequence
  Synthetic oligonucleotide
agcttcgctcggtatgtgtaagctctatag

SEQ ID NO: 293133 - DNA, 30 bp, Artificial Sequence
  Synthetic oligonucleotide
cgcaggtgacgtttttccaacgctctatag

SEQ ID NO: 293134 - DNA, 30 bp, Artificial Sequence
  Synthetic oligonucleotide
ataattgatagtgagcggtagggtctatag

SEQ ID NO: 293135 - DNA, 30 bp, Artificial Sequence
  Synthetic oligonucleotide
tagactaatgcgttgcaatcgaaagtatag

SEQ ID NO: 293136 - DNA, 30 bp, Artificial Sequence
  Synthetic oligonucleotide
acatgtccaaactagattcatacagtatag

SEQ ID NO: 293137 - DNA, 30 bp, Artificial Sequence
  Synthetic oligonucleotide
ggagatcttacgttcttgcaataggtatag

SEQ ID NO: 293138 - DNA, 30 bp, Artificial Sequence
  Synthetic oligonucleotide
agccccactcttatccaagcagtattatag

SEQ ID NO: 293139 - DNA, 30 bp, Artificial Sequence
  Synthetic oligonucleotide
tatccactgtaaccatgcagggtcttatag

SEQ ID NO: 293140 - DNA, 30 bp, Artificial Sequence
  Synthetic oligonucleotide
gccactgcggagtaatgcatggtcttatag

SEQ ID NO: 293141 - DNA, 30 bp, Artificial Sequence
  Synthetic oligonucleotide
gtcttttacaatgtgcaactttagttatag

SEQ ID NO: 293142 - DNA, 30 bp, Artificial Sequence
  Synthetic oligonucleotide
tgatagacgtgaactatagtatgtttatag

SEQ ID NO: 293143 - DNA, 30 bp, Artificial Sequence
  Synthetic oligonucleotide
aatatcgaatagcggccgtttcaaaactag

SEQ ID NO: 293144 - DNA, 30 bp, Artificial Sequence
  Synthetic oligonucleotide
ataactcctttaccgtctggctaaaactag

SEQ ID NO: 293145 - DNA, 30 bp, Artificial Sequence
  Synthetic oligonucleotide
acagtcaacgcgcgaatatgttggaactag

SEQ ID NO: 293146 - DNA, 30 bp, Artificial Sequence
  Synthetic oligonucleotide
gagctacgctggaagcctcggttgaactag

SEQ ID NO: 293147 - DNA, 30 bp, Artificial Sequence
  Synthetic oligonucleotide
tgttccgttgtctcgtatattggtaactag

SEQ ID NO: 293148 - DNA, 30 bp, Artificial Sequence
  Synthetic oligonucleotide
gcacgcgtcaaagcgtcccgcgcacactag

SEQ ID NO: 293149 - DNA, 30 bp, Artificial Sequence
  Synthetic oligonucleotide
ccacttgagtatccacggaccatacactag

SEQ ID NO: 293150 - DNA, 30 bp, Artificial Sequence
  Synthetic oligonucleotide
attcacaaccgatgcgataatttacactag

SEQ ID NO: 293151 - DNA, 30 bp, Artificial Sequence
  Synthetic oligonucleotide
tctggtgtgcttgctaagttaagccactag

SEQ ID NO: 293152 - DNA, 30 bp, Artificial Sequence
  Synthetic oligonucleotide
cgtttataagagattaagagctgccactag

SEQ ID NO: 293153 - DNA, 30 bp, Artificial Sequence
  Synthetic oligonucleotide
aagcgatttgcttccgagcacggtcactag

SEQ ID NO: 293154 - DNA, 30 bp, Artificial Sequence
  Synthetic oligonucleotide
ttgttggtccgaccgttgttagtggactag

SEQ ID NO: 293155 - DNA, 30 bp, Artificial Sequence
  Synthetic oligonucleotide
atgtctcggaagcaatactgagatgactag

SEQ ID NO: 293156 - DNA, 30 bp, Artificial Sequence
  Synthetic oligonucleotide
aatgcaccgcagacacacggtaaatactag

SEQ ID NO: 293157 - DNA, 30 bp, Artificial Sequence
  Synthetic oligonucleotide
tagccaggcagagacataaagcactactag

SEQ ID NO: 293158 - DNA, 30 bp, Artificial Sequence
  Synthetic oligonucleotide
gaaccaaccgacgcggaataaacctactag

SEQ ID NO: 293159 - DNA, 30 bp, Artificial Sequence
  Synthetic oligonucleotide
cgggcggataccgtcactttgagttactag

SEQ ID NO: 293160 - DNA, 30 bp, Artificial Sequence
  Synthetic oligonucleotide
tatcgctgcggtttaccgattggttactag

SEQ ID NO: 293161 - DNA, 30 bp, Artificial Sequence
  Synthetic oligonucleotide
atcgcaatgttcacgtattctctttactag

SEQ ID NO: 293162 - DNA, 30 bp, Artificial Sequence
  Synthetic oligonucleotide
cattccgcaagttcttacggcaacacctag

SEQ ID NO: 293163 - DNA, 30 bp, Artificial Sequence
  Synthetic oligonucleotide
acgttacaaaattcgtctctagatacctag

SEQ ID NO: 293164 - DNA, 30 bp, Artificial Sequence
  Synthetic oligonucleotide
gacaggtatgcccgcgattgagctacctag

SEQ ID NO: 293165 - DNA, 30 bp, Artificial Sequence
  Synthetic oligonucleotide
caatctccctttcttcacaatgctacctag

SEQ ID NO: 293166 - DNA, 30 bp, Artificial Sequence
  Synthetic oligonucleotide
tgtagtgctttatcagcaggttgaccctag

SEQ ID NO: 293167 - DNA, 30 bp, Artificial Sequence
  Synthetic oligonucleotide
aacgtttcagaacagggcagcggtccctag

SEQ ID NO: 293168 - DNA, 30 bp, Artificial Sequence
  Synthetic oligonucleotide
atattacaccgctagcgtccaattccctag

SEQ ID NO: 293169 - DNA, 30 bp, Artificial Sequence
  Synthetic oligonucleotide
aaatccttacagcatagggtccgcgcctag

SEQ ID NO: 293170 - DNA, 30 bp, Artificial Sequence
  Synthetic oligonucleotide
ttctgtcacacaggcaagtcgcgcgcctag

SEQ ID NO: 293171 - DNA, 30 bp, Artificial Sequence
  Synthetic oligonucleotide
gacgacgcttggcattttacaggcgcctag

SEQ ID NO: 293172 - DNA, 30 bp, Artificial Sequence
  Synthetic oligonucleotide
acaatacgttcactcgggcatggcgcctag

SEQ ID NO: 293173 - DNA, 30 bp, Artificial Sequence
  Synthetic oligonucleotide
gtcgtttttcccataagatattaggcctag

SEQ ID NO: 293174 - DNA, 30 bp, Artificial Sequence
  Synthetic oligonucleotide
tcccatgattcaacatacaacactgcctag

SEQ ID NO: 293175 - DNA, 30 bp, Artificial Sequence
  Synthetic oligonucleotide
attatccctactaagacttatgactcctag

SEQ ID NO: 293176 - DNA, 30 bp, Artificial Sequence
  Synthetic oligonucleotide
ggctgcttcctgatcatcttttactcctag

SEQ ID NO: 293177 - DNA, 30 bp, Artificial Sequence
  Synthetic oligonucleotide
atgctgtggcacggtagtgtaacctcctag

SEQ ID NO: 293178 - DNA, 30 bp, Artificial Sequence
  Synthetic oligonucleotide
taggttgtaaaagtacaagttgggtcctag

SEQ ID NO: 293179 - DNA, 30 bp, Artificial Sequence
  Synthetic oligonucleotide
tggggatctgtcgtcgttgcactgtcctag

SEQ ID NO: 293180 - DNA, 30 bp, Artificial Sequence
  Synthetic oligonucleotide
ctgaatcttgcctgcttgacgtgttcctag

SEQ ID NO: 293181 - DNA, 30 bp, Artificial Sequence
  Synthetic oligonucleotide
tgccttcaccatcacatgaccagaagctag

SEQ ID NO: 293182 - DNA, 30 bp, Artificial Sequence
  Synthetic oligonucleotide
tctgcggctctctcgtgtcataccagctag

SEQ ID NO: 293183 - DNA, 30 bp, Artificial Sequence
  Synthetic oligonucleotide
cacagtaaggcttccagtgatatgagctag

SEQ ID NO: 293184 - DNA, 30 bp, Artificial Sequence
  Synthetic oligonucleotide
tgctatatcgtgatagctagtgctagctag

SEQ ID NO: 293185 - DNA, 30 bp, Artificial Sequence
  Synthetic oligonucleotide
gtcacgcgacgactgagaccccgtagctag

SEQ ID NO: 293186 - DNA, 30 bp, Artificial Sequence
  Synthetic oligonucleotide
ttcgacgccgtcgtcgaaacctgacgctag

SEQ ID NO: 293187 - DNA, 30 bp, Artificial Sequence
  Synthetic oligonucleotide
gcacgcgcacatcaaaagtgtagccgctag

SEQ ID NO: 293188 - DNA, 30 bp, Artificial Sequence
  Synthetic oligonucleotide
ctttggatccaaagataacgtagcggctag

SEQ ID NO: 293189 - DNA, 30 bp, Artificial Sequence
  Synthetic oligonucleotide
gtcctccgcaatcacatgggcacgggctag

SEQ ID NO: 293190 - DNA, 30 bp, Artificial Sequence
  Synthetic oligonucleotide
acgttaccggccgcatatgtagcgggctag

SEQ ID NO: 293191 - DNA, 30 bp, Artificial Sequence
  Synthetic oligonucleotide
tgacgatcccgagaacaaagctcgggctag

SEQ ID NO: 293192 - DNA, 30 bp, Artificial Sequence
  Synthetic oligonucleotide
aacctagttttacacaactaatgtggctag

SEQ ID NO: 293193 - DNA, 30 bp, Artificial Sequence
  Synthetic oligonucleotide
acactagatctcatcatatcactatgctag

SEQ ID NO: 293194 - DNA, 30 bp, Artificial Sequence
  Synthetic oligonucleotide
cccctacgttcgttgccttcgttgtgctag

SEQ ID NO: 293195 - DNA, 30 bp, Artificial Sequence
  Synthetic oligonucleotide
aacacagaactttctttaaacgattgctag

SEQ ID NO: 293196 - DNA, 30 bp, Artificial Sequence
  Synthetic oligonucleotide
aatagaattggtgctgatgagagttgctag

SEQ ID NO: 293197 - DNA, 30 bp, Artificial Sequence
  Synthetic oligonucleotide
acggggcttggtccagcgcctagaatctag

SEQ ID NO: 293198 - DNA, 30 bp, Artificial Sequence
  Synthetic oligonucleotide
cacctacagggttagctgcttgggatctag

SEQ ID NO: 293199 - DNA, 30 bp, Artificial Sequence
  Synthetic oligonucleotide
tattattgtataaggaactgggatatctag

SEQ ID NO: 293200 - DNA, 30 bp, Artificial Sequence
  Synthetic oligonucleotide
acctgccgaggacttggtcgtcaactctag

SEQ ID NO: 293201 - DNA, 30 bp, Artificial Sequence
  Synthetic oligonucleotide
tccttccgcgtgattgtcaccagactctag

SEQ ID NO: 293202 - DNA, 30 bp, Artificial Sequence
  Synthetic oligonucleotide
gcaatgcagcaaattgccatacgactctag

SEQ ID NO: 293203 - DNA, 30 bp, Artificial Sequence
  Synthetic oligonucleotide
tcacctcatgtatctctgaagaggctctag

SEQ ID NO: 293204 - DNA, 30 bp, Artificial Sequence
  Synthetic oligonucleotide
ttataagatcgaaggagatcgtatctctag

SEQ ID NO: 293205 - DNA, 30 bp, Artificial Sequence
  Synthetic oligonucleotide
atgtgccagtcggactagaatcgtctctag

SEQ ID NO: 293206 - DNA, 30 bp, Artificial Sequence
  Synthetic oligonucleotide
atgtttggttagccggtgggttgtctctag

SEQ ID NO: 293207 - DNA, 30 bp, Artificial Sequence
  Synthetic oligonucleotide
attcttcaataggtcgactgtattctctag

SEQ ID NO: 293208 - DNA, 30 bp, Artificial Sequence
  Synthetic oligonucleotide
taagtgggcgttcagagagaatttctctag

SEQ ID NO: 293209 - DNA, 30 bp, Artificial Sequence
  Synthetic oligonucleotide
ggcgtcatctcactgaactggcccgtctag

SEQ ID NO: 293210 - DNA, 30 bp, Artificial Sequence
  Synthetic oligonucleotide
gccgacacatatatgtgacagagcgtctag

SEQ ID NO: 293211 - DNA, 30 bp, Artificial Sequence
  Synthetic oligonucleotide
tagccatacagctgtcggccacgcgtctag

SEQ ID NO: 293212 - DNA, 30 bp, Artificial Sequence
  Synthetic oligonucleotide
aagtgagtcgtatgaatccccaaggtctag

SEQ ID NO: 293213 - DNA, 30 bp, Artificial Sequence
  Synthetic oligonucleotide
ccggacaacggggacgtgtgcatattctag

SEQ ID NO: 293214 - DNA, 30 bp, Artificial Sequence
  Synthetic oligonucleotide
tccctcgtgaatctacaaggaaacttctag

SEQ ID NO: 293215 - DNA, 30 bp, Artificial Sequence
  Synthetic oligonucleotide
acccacccgcaagtgtcaaggaacttctag

SEQ ID NO: 293216 - DNA, 30 bp, Artificial Sequence
  Synthetic oligonucleotide
tctcagaaggaaccgactctatacttctag

SEQ ID NO: 293217 - DNA, 30 bp, Artificial Sequence
  Synthetic oligonucleotide
taggcggtacgcccctaggacctcttctag

SEQ ID NO: 293218 - DNA, 30 bp, Artificial Sequence
  Synthetic oligonucleotide
atcggccaccgcgcatggggtcagttctag

SEQ ID NO: 293219 - DNA, 27 bp, Artificial Sequence
  Synthetic oligonucleotide
ggtgtcgtggagacgttttggttctag

SEQ ID NO: 293220 - DNA, 30 bp, Artificial Sequence
  Synthetic oligonucleotide
tcatagttttatgaataacgatcacagtag

SEQ ID NO: 293221 - DNA, 30 bp, Artificial Sequence
  Synthetic oligonucleotide
attaccgagcttagaacatatagacagtag

SEQ ID NO: 293222 - DNA, 30 bp, Artificial Sequence
  Synthetic oligonucleotide
atagaagaccgtgggacttaactccagtag

SEQ ID NO: 293223 - DNA, 30 bp, Artificial Sequence
  Synthetic oligonucleotide
gttatttacagcacggcggttaggcagtag

SEQ ID NO: 293224 - DNA, 30 bp, Artificial Sequence
  Synthetic oligonucleotide
gatagagaggtgcttagacttaatcagtag

SEQ ID NO: 293225 - DNA, 30 bp, Artificial Sequence
  Synthetic oligonucleotide
taatgttaatgtgatcgtttgggagagtag

SEQ ID NO: 293226 - DNA, 31 bp, Artificial Sequence
  Synthetic oligonucleotide
agtaaggcatccgtgagcttttgacgagtag

SEQ ID NO: 293227 - DNA, 30 bp, Artificial Sequence
  Synthetic oligonucleotide
ttaatagggcaactcgattcttccgagtag

SEQ ID NO: 293228 - DNA, 30 bp, Artificial Sequence
  Synthetic oligonucleotide
ttcacgtctgcgacttttccttgcgagtag

SEQ ID NO: 293229 - DNA, 30 bp, Artificial Sequence
  Synthetic oligonucleotide
acgcttcaaatatagtgggctcaggagtag

SEQ ID NO: 293230 - DNA, 30 bp, Artificial Sequence
  Synthetic oligonucleotide
ctttttgaacagtgagtgcctattgagtag

SEQ ID NO: 293231 - DNA, 30 bp, Artificial Sequence
  Synthetic oligonucleotide
aatcactgcaatggcaagcctcgttagtag

SEQ ID NO: 293232 - DNA, 30 bp, Artificial Sequence
  Synthetic oligonucleotide
gtcagactatcaggtcaaattctttagtag

SEQ ID NO: 293233 - DNA, 30 bp, Artificial Sequence
  Synthetic oligonucleotide
ggttccgagactctaatatgggaaacgtag

SEQ ID NO: 293234 - DNA, 30 bp, Artificial Sequence
  Synthetic oligonucleotide
gggctatcaggtggccccgaggtaacgtag

SEQ ID NO: 293235 - DNA, 30 bp, Artificial Sequence
  Synthetic oligonucleotide
attggcataccggggatcccaaagacgtag

SEQ ID NO: 293236 - DNA, 30 bp, Artificial Sequence
  Synthetic oligonucleotide
agctcaattggtaactttggctcaccgtag

SEQ ID NO: 293237 - DNA, 30 bp, Artificial Sequence
  Synthetic oligonucleotide
gctaacggcccaatgagcagtaccccgtag

SEQ ID NO: 293238 - DNA, 30 bp, Artificial Sequence
  Synthetic oligonucleotide
gaagcagttcgctggcaagcatagccgtag

SEQ ID NO: 293239 - DNA, 30 bp, Artificial Sequence
  Synthetic oligonucleotide
aagagtctatagaagccctttgggccgtag

SEQ ID NO: 293240 - DNA, 30 bp, Artificial Sequence
  Synthetic oligonucleotide
ttgtgtaatacgtcgtccctacaagcgtag

SEQ ID NO: 293241 - DNA, 30 bp, Artificial Sequence
  Synthetic oligonucleotide
atttctagaggtgggttggtgccagcgtag

SEQ ID NO: 293242 - DNA, 30 bp, Artificial Sequence
  Synthetic oligonucleotide
gagtaccacgtgcagtataggcacgcgtag

SEQ ID NO: 293243 - DNA, 30 bp, Artificial Sequence
  Synthetic oligonucleotide
cgctttcggctgttgtacctttgggcgtag

SEQ ID NO: 293244 - DNA, 30 bp, Artificial Sequence
  Synthetic oligonucleotide
cagaattcgattagtccgtatatggcgtag

SEQ ID NO: 293245 - DNA, 30 bp, Artificial Sequence
  Synthetic oligonucleotide
cagtagtatgatataggtggtgggtcgtag

SEQ ID NO: 293246 - DNA, 30 bp, Artificial Sequence
  Synthetic oligonucleotide
gagggtgaagggccaggggtggtgtcgtag

SEQ ID NO: 293247 - DNA, 30 bp, Artificial Sequence
  Synthetic oligonucleotide
tacgtctttggttgttaatcatcttcgtag

SEQ ID NO: 293248 - DNA, 30 bp, Artificial Sequence
  Synthetic oligonucleotide
aacgtcgcacgacgatgttagtcttcgtag

SEQ ID NO: 293249 - DNA, 30 bp, Artificial Sequence
  Synthetic oligonucleotide
gggggactgatcacgcagtagagttcgtag

SEQ ID NO: 293250 - DNA, 30 bp, Artificial Sequence
  Synthetic oligonucleotide
gctgagattatatgaggattcaaaaggtag

SEQ ID NO: 293251 - DNA, 30 bp, Artificial Sequence
  Synthetic oligonucleotide
gacgggtaggatgcggcgattccaaggtag

SEQ ID NO: 293252 - DNA, 30 bp, Artificial Sequence
  Synthetic oligonucleotide
ggaagtgtgtccatctcttacaccaggtag

SEQ ID NO: 293253 - DNA, 30 bp, Artificial Sequence
  Synthetic oligonucleotide
gttcacgtacccttttgaaaagggaggtag

SEQ ID NO: 293254 - DNA, 30 bp, Artificial Sequence
  Synthetic oligonucleotide
tataaagcgctccgaccgcgaatgaggtag

SEQ ID NO: 293255 - DNA, 30 bp, Artificial Sequence
  Synthetic oligonucleotide
acctcataggtccggacacctgctaggtag

SEQ ID NO: 293256 - DNA, 30 bp, Artificial Sequence
  Synthetic oligonucleotide
acccagacccctgagcggtagcttaggtag

SEQ ID NO: 293257 - DNA, 30 bp, Artificial Sequence
  Synthetic oligonucleotide
cgtcctttgaaatgtgattttacacggtag

SEQ ID NO: 293258 - DNA, 30 bp, Artificial Sequence
  Synthetic oligonucleotide
gttgtctacgagtccaattttcgacggtag

SEQ ID NO: 293259 - DNA, 30 bp, Artificial Sequence
  Synthetic oligonucleotide
gaaggatatgccatgcgctacgaccggtag

SEQ ID NO: 293260 - DNA, 30 bp, Artificial Sequence
  Synthetic oligonucleotide
aatcaggtcgatcgaggatattaccggtag

SEQ ID NO: 293261 - DNA, 30 bp, Artificial Sequence
  Synthetic oligonucleotide
tttacgtcaagaaagattccacttcggtag

SEQ ID NO: 293262 - DNA, 30 bp, Artificial Sequence
  Synthetic oligonucleotide
ctaatgggtcgaggttccacagcggggtag

SEQ ID NO: 293263 - DNA, 30 bp, Artificial Sequence
  Synthetic oligonucleotide
ctagtaataaaggcccggaccaatgggtag

SEQ ID NO: 293264 - DNA, 30 bp, Artificial Sequence
  Synthetic oligonucleotide
gccctggatcgctctaaccaacctgggtag

SEQ ID NO: 293265 - DNA, 30 bp, Artificial Sequence
  Synthetic oligonucleotide
gaacagctctcctgagagctttttgggtag

SEQ ID NO: 293266 - DNA, 30 bp, Artificial Sequence
  Synthetic oligonucleotide
caggagtgtattgccgtgccaatatggtag

SEQ ID NO: 293267 - DNA, 30 bp, Artificial Sequence
  Synthetic oligonucleotide
tccggcacacaattcttttctctctggtag

SEQ ID NO: 293268 - DNA, 30 bp, Artificial Sequence
  Synthetic oligonucleotide
gtagtcttgtgatcatcattggggtggtag

SEQ ID NO: 293269 - DNA, 30 bp, Artificial Sequence
  Synthetic oligonucleotide
cttcagttacaggggtgcagggtgtggtag

SEQ ID NO: 293270 - DNA, 30 bp, Artificial Sequence
  Synthetic oligonucleotide
gagctgtgagtcttgttagatcattggtag

SEQ ID NO: 293271 - DNA, 30 bp, Artificial Sequence
  Synthetic oligonucleotide
cacagcacagatgttttaagatgttggtag

SEQ ID NO: 293272 - DNA, 30 bp, Artificial Sequence
  Synthetic oligonucleotide
ttacaggtatcctaaacctgttaaatgtag

SEQ ID NO: 293273 - DNA, 30 bp, Artificial Sequence
  Synthetic oligonucleotide
tggccgggcactattgtgattgcaatgtag

SEQ ID NO: 293274 - DNA, 30 bp, Artificial Sequence
  Synthetic oligonucleotide
gtcgagtgtccaatggccagaagaatgtag

SEQ ID NO: 293275 - DNA, 30 bp, Artificial Sequence
  Synthetic oligonucleotide
gtcggggcgcgtctatccccgaacatgtag

SEQ ID NO: 293276 - DNA, 30 bp, Artificial Sequence
  Synthetic oligonucleotide
cgacccagaatttagcctgctcacatgtag

SEQ ID NO: 293277 - DNA, 30 bp, Artificial Sequence
  Synthetic oligonucleotide
acggattacaccgccatacatcaactgtag

SEQ ID NO: 293278 - DNA, 30 bp, Artificial Sequence
  Synthetic oligonucleotide
taatcgcgcgtgaaggaatgcacactgtag

SEQ ID NO: 293279 - DNA, 30 bp, Artificial Sequence
  Synthetic oligonucleotide
aaaacgaatacgtggatgtgcgtcctgtag

SEQ ID NO: 293280 - DNA, 30 bp, Artificial Sequence
  Synthetic oligonucleotide
aaggatataagcaaggatcataagctgtag

SEQ ID NO: 293281 - DNA, 30 bp, Artificial Sequence
  Synthetic oligonucleotide
gtagtaacttaactgatatgagatctgtag

SEQ ID NO: 293282 - DNA, 30 bp, Artificial Sequence
  Synthetic oligonucleotide
agggatccccctgagacgctccctctgtag

SEQ ID NO: 293283 - DNA, 30 bp, Artificial Sequence
  Synthetic oligonucleotide
aatctggcctgcaggtatgtagttctgtag

SEQ ID NO: 293284 - DNA, 30 bp, Artificial Sequence
  Synthetic oligonucleotide
tcatatcagaagactgctggacccgtgtag

SEQ ID NO: 293285 - DNA, 30 bp, Artificial Sequence
  Synthetic oligonucleotide
ttaaaaagaggctcagtgataccggtgtag

SEQ ID NO: 293286 - DNA, 30 bp, Artificial Sequence
  Synthetic oligonucleotide
agacctgtaagtgatgttgcgaatgtgtag

SEQ ID NO: 293287 - DNA, 30 bp, Artificial Sequence
  Synthetic oligonucleotide
ataataataactactatatagcatgtgtag

SEQ ID NO: 293288 - DNA, 30 bp, Artificial Sequence
  Synthetic oligonucleotide
gcaattttgcctggcgggatgttattgtag

SEQ ID NO: 293289 - DNA, 30 bp, Artificial Sequence
  Synthetic oligonucleotide
ttcaatcaagcctatattatatgcttgtag

SEQ ID NO: 293290 - DNA, 30 bp, Artificial Sequence
  Synthetic oligonucleotide
gcttctagaacaagttccgtacgtttgtag

SEQ ID NO: 293291 - DNA, 30 bp, Artificial Sequence
  Synthetic oligonucleotide
aatgctctgatgagttcggctaacaattag

SEQ ID NO: 293292 - DNA, 30 bp, Artificial Sequence
  Synthetic oligonucleotide
gtttcgagtggagctgaagggtgcaattag

SEQ ID NO: 293293 - DNA, 30 bp, Artificial Sequence
  Synthetic oligonucleotide
cctcagcaacggcaccattggtgcaattag

SEQ ID NO: 293294 - DNA, 30 bp, Artificial Sequence
  Synthetic oligonucleotide
taaaacaatctcgcctttaattgcaattag

SEQ ID NO: 293295 - DNA, 30 bp, Artificial Sequence
  Synthetic oligonucleotide
aaatcagtattctactaagcttagaattag

SEQ ID NO: 293296 - DNA, 30 bp, Artificial Sequence
  Synthetic oligonucleotide
tacgcgaggcatactaaagccccgaattag

SEQ ID NO: 293297 - DNA, 30 bp, Artificial Sequence
  Synthetic oligonucleotide
aaaatgggtttcttcgcgaacgggaattag

SEQ ID NO: 293298 - DNA, 30 bp, Artificial Sequence
  Synthetic oligonucleotide
ccaacctaggcgatttcgggcatgaattag

SEQ ID NO: 293299 - DNA, 30 bp, Artificial Sequence
  Synthetic oligonucleotide
tccgttccaattgtctaagggagccattag

SEQ ID NO: 293300 - DNA, 30 bp, Artificial Sequence
  Synthetic oligonucleotide
acgtgggcatggcctgggtccgggcattag

SEQ ID NO: 293301 - DNA, 30 bp, Artificial Sequence
  Synthetic oligonucleotide
aaatgctggcggaaggctcacgtgcattag

SEQ ID NO: 293302 - DNA, 30 bp, Artificial Sequence
  Synthetic oligonucleotide
ctctcgtactgaaagtgttgcttgcattag

SEQ ID NO: 293303 - DNA, 30 bp, Artificial Sequence
  Synthetic oligonucleotide
catccgggtacgcttgaccaaattcattag

SEQ ID NO: 293304 - DNA, 30 bp, Artificial Sequence
  Synthetic oligonucleotide
ttatctatgtacggcactcagtcagattag

SEQ ID NO: 293305 - DNA, 30 bp, Artificial Sequence
  Synthetic oligonucleotide
ccgcatgtcggctgtaaaatgcgagattag

SEQ ID NO: 293306 - DNA, 30 bp, Artificial Sequence
  Synthetic oligonucleotide
gtagcacaaaggccacctacagatgattag

SEQ ID NO: 293307 - DNA, 30 bp, Artificial Sequence
  Synthetic oligonucleotide
tcggcccgcataaattattcgagtgattag

SEQ ID NO: 293308 - DNA, 30 bp, Artificial Sequence
  Synthetic oligonucleotide
tcgcgaccgggactgttgggaagctattag

SEQ ID NO: 293309 - DNA, 30 bp, Artificial Sequence
  Synthetic oligonucleotide
ccattcatggctctcaaatccaagtattag

SEQ ID NO: 293310 - DNA, 30 bp, Artificial Sequence
  Synthetic oligonucleotide
aagcactcaataaactgagctgggtattag

SEQ ID NO: 293311 - DNA, 30 bp, Artificial Sequence
  Synthetic oligonucleotide
tctgttctcgagagaaagctaatgtattag

SEQ ID NO: 293312 - DNA, 30 bp, Artificial Sequence
  Synthetic oligonucleotide
tcaagacgggccccagaattgatgtattag

SEQ ID NO: 293313 - DNA, 30 bp, Artificial Sequence
  Synthetic oligonucleotide
ggtcgaatcctctagcgtagtgattattag

SEQ ID NO: 293314 - DNA, 30 bp, Artificial Sequence
  Synthetic oligonucleotide
gcaatagcaaaggggattggtagttattag

SEQ ID NO: 293315 - DNA, 30 bp, Artificial Sequence
  Synthetic oligonucleotide
atctgtttagacaccaggcaactttattag

SEQ ID NO: 293316 - DNA, 30 bp, Artificial Sequence
  Synthetic oligonucleotide
gtagctcgccaaacggctgttcaaacttag

SEQ ID NO: 293317 - DNA, 30 bp, Artificial Sequence
  Synthetic oligonucleotide
gcataggtaagcttgtccactacaacttag

SEQ ID NO: 293318 - DNA, 30 bp, Artificial Sequence
  Synthetic oligonucleotide
ggcataattggccttgtaggtacaacttag

SEQ ID NO: 293319 - DNA, 30 bp, Artificial Sequence
  Synthetic oligonucleotide
ttgcacctttagttaaatgacctaacttag

SEQ ID NO: 293320 - DNA, 30 bp, Artificial Sequence
  Synthetic oligonucleotide
tacaggctgagtaccgggaggatgacttag

SEQ ID NO: 293321 - DNA, 30 bp, Artificial Sequence
  Synthetic oligonucleotide
caaaggtaaatcccagtgggttggccttag

SEQ ID NO: 293322 - DNA, 30 bp, Artificial Sequence
  Synthetic oligonucleotide
tgtaatgttattcgacaataaagagcttag

SEQ ID NO: 293323 - DNA, 30 bp, Artificial Sequence
  Synthetic oligonucleotide
agactgtcttagatttcttgcggagcttag

SEQ ID NO: 293324 - DNA, 30 bp, Artificial Sequence
  Synthetic oligonucleotide
agcgcgttaatgaatcacataggcgcttag

SEQ ID NO: 293325 - DNA, 30 bp, Artificial Sequence
  Synthetic oligonucleotide
gaacgtagcacctattcccaggaggcttag

SEQ ID NO: 293326 - DNA, 30 bp, Artificial Sequence
  Synthetic oligonucleotide
gagcttccacgcaccgtgtgtccggcttag

SEQ ID NO: 293327 - DNA, 30 bp, Artificial Sequence
  Synthetic oligonucleotide
gtcggtaccccctggcaggtttcggcttag

SEQ ID NO: 293328 - DNA, 30 bp, Artificial Sequence
  Synthetic oligonucleotide
gggagagacgtatctaaaagttaatcttag

SEQ ID NO: 293329 - DNA, 30 bp, Artificial Sequence
  Synthetic oligonucleotide
ttctataccaagtctgcgagttggtcttag

SEQ ID NO: 293330 - DNA, 30 bp, Artificial Sequence
  Synthetic oligonucleotide
gaaaaggctagggaagtagcctattcttag

SEQ ID NO: 293331 - DNA, 30 bp, Artificial Sequence
  Synthetic oligonucleotide
gtggaaaggacattctaaaagtcttcttag

SEQ ID NO: 293332 - DNA, 30 bp, Artificial Sequence
  Synthetic oligonucleotide
ttgagaatgacgcccggcatcggaagttag

SEQ ID NO: 293333 - DNA, 30 bp, Artificial Sequence
  Synthetic oligonucleotide
aaggaaacgcttactaaacaagtaagttag

SEQ ID NO: 293334 - DNA, 30 bp, Artificial Sequence
  Synthetic oligonucleotide
gcctagctagaaggaatccacaacagttag

SEQ ID NO: 293335 - DNA, 30 bp, Artificial Sequence
  Synthetic oligonucleotide
ttcttaagtgagtcttatgcaacgagttag

SEQ ID NO: 293336 - DNA, 30 bp, Artificial Sequence
  Synthetic oligonucleotide
ctaaagccgtaagtggcgatagtgagttag

SEQ ID NO: 293337 - DNA, 30 bp, Artificial Sequence
  Synthetic oligonucleotide
acagaagttggcggcgagactcatagttag

SEQ ID NO: 293338 - DNA, 30 bp, Artificial Sequence
  Synthetic oligonucleotide
ctttacagaagtgaatctggggatagttag

SEQ ID NO: 293339 - DNA, 30 bp, Artificial Sequence
  Synthetic oligonucleotide
acacgggaaacctctagttcctatagttag

SEQ ID NO: 293340 - DNA, 30 bp, Artificial Sequence
  Synthetic oligonucleotide
tataggcagcggtggacatgtgcacgttag

SEQ ID NO: 293341 - DNA, 30 bp, Artificial Sequence
  Synthetic oligonucleotide
acatggggtgaactccatattgcacgttag

SEQ ID NO: 293342 - DNA, 30 bp, Artificial Sequence
  Synthetic oligonucleotide
gaactggcaatgtaaggatccctacgttag

SEQ ID NO: 293343 - DNA, 30 bp, Artificial Sequence
  Synthetic oligonucleotide
agccgggaggcaagtggcgatctccgttag

SEQ ID NO: 293344 - DNA, 30 bp, Artificial Sequence
  Synthetic oligonucleotide
atcgcagtattctaagttgaaaagcgttag

SEQ ID NO: 293345 - DNA, 30 bp, Artificial Sequence
  Synthetic oligonucleotide
attcaatcattgtgcgtcgacgtgcgttag

SEQ ID NO: 293346 - DNA, 30 bp, Artificial Sequence
  Synthetic oligonucleotide
aatgcccgcagaggatcccaacctcgttag

SEQ ID NO: 293347 - DNA, 30 bp, Artificial Sequence
  Synthetic oligonucleotide
ccgagattcggcaggttctgtattcgttag

SEQ ID NO: 293348 - DNA, 30 bp, Artificial Sequence
  Synthetic oligonucleotide
gtaagcgtgtggcgtccggtggttcgttag

SEQ ID NO: 293349 - DNA, 30 bp, Artificial Sequence
  Synthetic oligonucleotide
gccggtgttacccaacaattacaaggttag

SEQ ID NO: 293350 - DNA, 30 bp, Artificial Sequence
  Synthetic oligonucleotide
gcctctcgtcgtatggccacgttcggttag

SEQ ID NO: 293351 - DNA, 30 bp, Artificial Sequence
  Synthetic oligonucleotide
gcctgacactgtgcaaacacaaagggttag

SEQ ID NO: 293352 - DNA, 30 bp, Artificial Sequence
  Synthetic oligonucleotide
gatcgccgtgagttcattactgagggttag

SEQ ID NO: 293353 - DNA, 30 bp, Artificial Sequence
  Synthetic oligonucleotide
gtggcgagtttgcaggcacaaccgggttag

SEQ ID NO: 293354 - DNA, 30 bp, Artificial Sequence
  Synthetic oligonucleotide
ggtagtgctatgcatcaggtgtcgggttag

SEQ ID NO: 293355 - DNA, 30 bp, Artificial Sequence
  Synthetic oligonucleotide
actgggccgagtagtgagaccgggggttag

SEQ ID NO: 293356 - DNA, 30 bp, Artificial Sequence
  Synthetic oligonucleotide
ttcacatgatgggtactgatatggggttag

SEQ ID NO: 293357 - DNA, 30 bp, Artificial Sequence
  Synthetic oligonucleotide
tatgatctcatggggcgcgatatgggttag

SEQ ID NO: 293358 - DNA, 30 bp, Artificial Sequence
  Synthetic oligonucleotide
ctaaggtttattcacccaccatatggttag

SEQ ID NO: 293359 - DNA, 30 bp, Artificial Sequence
  Synthetic oligonucleotide
gcttgcgtaatgctctacccctctggttag

SEQ ID NO: 293360 - DNA, 31 bp, Artificial Sequence
  Synthetic oligonucleotide
agtttgccacacgctgtgacgtggtggttag

SEQ ID NO: 293361 - DNA, 30 bp, Artificial Sequence
  Synthetic oligonucleotide
agttaaaactcctttatttagccatgttag

SEQ ID NO: 293362 - DNA, 30 bp, Artificial Sequence
  Synthetic oligonucleotide
cgcccctatcctctatgataatgatgttag

SEQ ID NO: 293363 - DNA, 30 bp, Artificial Sequence
  Synthetic oligonucleotide
gcggtttcatgtcagtgcccagtatgttag

SEQ ID NO: 293364 - DNA, 30 bp, Artificial Sequence
  Synthetic oligonucleotide
gcgatgacctaatttcttctccgttgttag

SEQ ID NO: 293365 - DNA, 30 bp, Artificial Sequence
  Synthetic oligonucleotide
ttggatcatttgcttaaaggttgttgttag

SEQ ID NO: 293366 - DNA, 30 bp, Artificial Sequence
  Synthetic oligonucleotide
aacttctgggtcgatgcttaggtttgttag

SEQ ID NO: 293367 - DNA, 30 bp, Artificial Sequence
  Synthetic oligonucleotide
atcggtaatcatggcgattctgtttgttag

SEQ ID NO: 293368 - DNA, 30 bp, Artificial Sequence
  Synthetic oligonucleotide
cctgagctcagttctagtgaaccaatttag

SEQ ID NO: 293369 - DNA, 30 bp, Artificial Sequence
  Synthetic oligonucleotide
taaaccaaacacggcataacgccaatttag

SEQ ID NO: 293370 - DNA, 30 bp, Artificial Sequence
  Synthetic oligonucleotide
gatgcgatatcaatcaaccaggtaatttag

SEQ ID NO: 293371 - DNA, 30 bp, Artificial Sequence
  Synthetic oligonucleotide
tggactcgaccctgatgtagggagatttag

SEQ ID NO: 293372 - DNA, 30 bp, Artificial Sequence
  Synthetic oligonucleotide
agtaatagtggcaaggaaacgaatatttag

SEQ ID NO: 293373 - DNA, 30 bp, Artificial Sequence
  Synthetic oligonucleotide
ctagaatctcaaatataaataattatttag

SEQ ID NO: 293374 - DNA, 30 bp, Artificial Sequence
  Synthetic oligonucleotide
ctattgtgtgcattgggatttacactttag

SEQ ID NO: 293375 - DNA, 30 bp, Artificial Sequence
  Synthetic oligonucleotide
gggtcaggtagcacacgatgcgaagtttag

SEQ ID NO: 293376 - DNA, 30 bp, Artificial Sequence
  Synthetic oligonucleotide
ctgcaagcgggtgtgcataatatagtttag

SEQ ID NO: 293377 - DNA, 30 bp, Artificial Sequence
  Synthetic oligonucleotide
ttgtagggatggtcgtctgatcacgtttag

SEQ ID NO: 293378 - DNA, 30 bp, Artificial Sequence
  Synthetic oligonucleotide
agagacaatagcgcattagagaccgtttag

SEQ ID NO: 293379 - DNA, 30 bp, Artificial Sequence
  Synthetic oligonucleotide
tacgactaagtttcataattcacggtttag

SEQ ID NO: 293380 - DNA, 30 bp, Artificial Sequence
  Synthetic oligonucleotide
gagtaactctcatgcgaagaagtggtttag

SEQ ID NO: 293381 - DNA, 30 bp, Artificial Sequence
  Synthetic oligonucleotide
gagactattcggcgtcgtctacttgtttag

SEQ ID NO: 293382 - DNA, 30 bp, Artificial Sequence
  Synthetic oligonucleotide
tccgcggttattataaccggagttgtttag

SEQ ID NO: 293383 - DNA, 30 bp, Artificial Sequence
  Synthetic oligonucleotide
gtctatatactcatggccggagttgtttag

SEQ ID NO: 293384 - DNA, 30 bp, Artificial Sequence
  Synthetic oligonucleotide
cttaccgaaaacaggcatgctagcttttag

SEQ ID NO: 293385 - DNA, 30 bp, Artificial Sequence
  Synthetic oligonucleotide
tgctctgtgccattgtcgtgcccgttttag

SEQ ID NO: 293386 - DNA, 30 bp, Artificial Sequence
  Synthetic oligonucleotide
cttttcctcgtcccattaacagggttttag

SEQ ID NO: 293387 - DNA, 30 bp, Artificial Sequence
  Synthetic oligonucleotide
agtgaggtaatatattaagccatgttttag

SEQ ID NO: 293388 - DNA, 30 bp, Artificial Sequence
  Synthetic oligonucleotide
aatatcggctcttgtacaccactcaaaacg

SEQ ID NO: 293389 - DNA, 30 bp, Artificial Sequence
  Synthetic oligonucleotide
gggaagtagtcgattaggtgggtcaaaacg

SEQ ID NO: 293390 - DNA, 30 bp, Artificial Sequence
  Synthetic oligonucleotide
ggagcagcgggcttggcccaattgaaaacg

SEQ ID NO: 293391 - DNA, 30 bp, Artificial Sequence
  Synthetic oligonucleotide
aatcgcacttgcccacctcaggataaaacg

SEQ ID NO: 293392 - DNA, 30 bp, Artificial Sequence
  Synthetic oligonucleotide
cacgtccgtggatgaatccagtctaaaacg

SEQ ID NO: 293393 - DNA, 30 bp, Artificial Sequence
  Synthetic oligonucleotide
cttggctagagtgatatgggtcgtaaaacg

SEQ ID NO: 293394 - DNA, 30 bp, Artificial Sequence
  Synthetic oligonucleotide
tgggacctgtttctatggcagtttaaaacg

SEQ ID NO: 293395 - DNA, 30 bp, Artificial Sequence
  Synthetic oligonucleotide
aaattgatggccgtatataggcgacaaacg

SEQ ID NO: 293396 - DNA, 30 bp, Artificial Sequence
  Synthetic oligonucleotide
aatcttaccgagtcctggacctccgaaacg

SEQ ID NO: 293397 - DNA, 30 bp, Artificial Sequence
  Synthetic oligonucleotide
tgccagggatgcgatgttttgtaataaacg

SEQ ID NO: 293398 - DNA, 30 bp, Artificial Sequence
  Synthetic oligonucleotide
tagcagtagaaccaaacgtgaatataaacg

SEQ ID NO: 293399 - DNA, 30 bp, Artificial Sequence
  Synthetic oligonucleotide
cacggctttcggcactgacaggcctaaacg

SEQ ID NO: 293400 - DNA, 30 bp, Artificial Sequence
  Synthetic oligonucleotide
agaatcaccggccttagaggatgctaaacg

SEQ ID NO: 293401 - DNA, 30 bp, Artificial Sequence
  Synthetic oligonucleotide
acggatctatttgttggatccctgtaaacg

SEQ ID NO: 293402 - DNA, 30 bp, Artificial Sequence
  Synthetic oligonucleotide
tattaaggattatatgtaagtttgtaaacg

SEQ ID NO: 293403 - DNA, 30 bp, Artificial Sequence
  Synthetic oligonucleotide
gaggagagccaggtggtggtagattaaacg

SEQ ID NO: 293404 - DNA, 30 bp, Artificial Sequence
  Synthetic oligonucleotide
attgattccacaattagggccgattaaacg

SEQ ID NO: 293405 - DNA, 30 bp, Artificial Sequence
  Synthetic oligonucleotide
ccaaacgattggagacactggtgttaaacg

SEQ ID NO: 293406 - DNA, 30 bp, Artificial Sequence
  Synthetic oligonucleotide
atcgcaacagcacatggaccttaaacaacg

SEQ ID NO: 293407 - DNA, 30 bp, Artificial Sequence
  Synthetic oligonucleotide
acgtcttctggcgacggaaagtcgacaacg

SEQ ID NO: 293408 - DNA, 30 bp, Artificial Sequence
  Synthetic oligonucleotide
acccgaggtgcaggtatcgactatacaacg

SEQ ID NO: 293409 - DNA, 30 bp, Artificial Sequence
  Synthetic oligonucleotide
cggcgccgtccacacgtaactgttacaacg

SEQ ID NO: 293410 - DNA, 30 bp, Artificial Sequence
  Synthetic oligonucleotide
cttgatggttgcgcaaatcaatttacaacg

SEQ ID NO: 293411 - DNA, 30 bp, Artificial Sequence
  Synthetic oligonucleotide
ccttaggtcccgtcagagctcccaccaacg

SEQ ID NO: 293412 - DNA, 30 bp, Artificial Sequence
  Synthetic oligonucleotide
tgtgtaccctaagccttataaacagcaacg

SEQ ID NO: 293413 - DNA, 30 bp, Artificial Sequence
  Synthetic oligonucleotide
gattgcaaagtacctcagcgggtagcaacg

SEQ ID NO: 293414 - DNA, 30 bp, Artificial Sequence
  Synthetic oligonucleotide
taccgcgcctgagtatctaaaggcgcaacg

SEQ ID NO: 293415 - DNA, 30 bp, Artificial Sequence
  Synthetic oligonucleotide
tgtagaggcattgtcacaacaggcgcaacg

SEQ ID NO: 293416 - DNA, 30 bp, Artificial Sequence
  Synthetic oligonucleotide
agcaccggacatgttcttaggatcgcaacg

SEQ ID NO: 293417 - DNA, 30 bp, Artificial Sequence
  Synthetic oligonucleotide
tcgcttgagtctatagcgtcattcgcaacg

SEQ ID NO: 293418 - DNA, 30 bp, Artificial Sequence
  Synthetic oligonucleotide
accgacctgcatgctaagttgatggcaacg

SEQ ID NO: 293419 - DNA, 30 bp, Artificial Sequence
  Synthetic oligonucleotide
gtaagtttggtgtaaggctgcgatgcaacg

SEQ ID NO: 293420 - DNA, 30 bp, Artificial Sequence
  Synthetic oligonucleotide
cgtcggggttttctgccaaggcgtgcaacg

SEQ ID NO: 293421 - DNA, 30 bp, Artificial Sequence
  Synthetic oligonucleotide
ccaagttatatcttcgtagtaaaatcaacg

SEQ ID NO: 293422 - DNA, 30 bp, Artificial Sequence
  Synthetic oligonucleotide
tgtggggccggacggccgtaacgatcaacg

SEQ ID NO: 293423 - DNA, 29 bp, Artificial Sequence
  Synthetic oligonucleotide
gacaagaagtcagagatctgggatcaacg

SEQ ID NO: 293424 - DNA, 30 bp, Artificial Sequence
  Synthetic oligonucleotide
cagcataatgtggttctaccgaactcaacg

SEQ ID NO: 293425 - DNA, 30 bp, Artificial Sequence
  Synthetic oligonucleotide
tggggcctatccgctcaaccgtgctcaacg

SEQ ID NO: 293426 - DNA, 30 bp, Artificial Sequence
  Synthetic oligonucleotide
gtccgcgtgcggtggatctcgtagtcaacg

SEQ ID NO: 293427 - DNA, 30 bp, Artificial Sequence
  Synthetic oligonucleotide
cgggttgctctttgtacacccacgtcaacg

SEQ ID NO: 293428 - DNA, 30 bp, Artificial Sequence
  Synthetic oligonucleotide
gaaccaagtatattcgccctatcgtcaacg

SEQ ID NO: 293429 - DNA, 30 bp, Artificial Sequence
  Synthetic oligonucleotide
caaaaaccgtttgacaggagcgggtcaacg

SEQ ID NO: 293430 - DNA, 30 bp, Artificial Sequence
  Synthetic oligonucleotide
tcgccatatataaagacgtatgggtcaacg

SEQ ID NO: 293431 - DNA, 30 bp, Artificial Sequence
  Synthetic oligonucleotide
tctataaaacaattgcgctcgtggtcaacg

SEQ ID NO: 293432 - DNA, 30 bp, Artificial Sequence
  Synthetic oligonucleotide
gcgtagtcaatgcctagcccgttaagaacg

SEQ ID NO: 293433 - DNA, 30 bp, Artificial Sequence
  Synthetic oligonucleotide
ttacctttagcgctagaaaacgccagaacg

SEQ ID NO: 293434 - DNA, 30 bp, Artificial Sequence
  Synthetic oligonucleotide
ttacctagacaacacggaggctagagaacg

SEQ ID NO: 293435 - DNA, 30 bp, Artificial Sequence
  Synthetic oligonucleotide
attgcaactaatttacccatacatagaacg

SEQ ID NO: 293436 - DNA, 30 bp, Artificial Sequence
  Synthetic oligonucleotide
agagggagctactagaaggtttctagaacg

SEQ ID NO: 293437 - DNA, 31 bp, Artificial Sequence
  Synthetic oligonucleotide
cgtgggccgattatacgtaatttgtagaacg

SEQ ID NO: 293438 - DNA, 30 bp, Artificial Sequence
  Synthetic oligonucleotide
agagaagtgcgtcgaggggaggcccgaacg

SEQ ID NO: 293439 - DNA, 30 bp, Artificial Sequence
  Synthetic oligonucleotide
acccgaaacgctgtatctaagtgccgaacg

SEQ ID NO: 293440 - DNA, 30 bp, Artificial Sequence
  Synthetic oligonucleotide
gacacggttctcaacaagcgacagcgaacg

SEQ ID NO: 293441 - DNA, 30 bp, Artificial Sequence
  Synthetic oligonucleotide
atcataggtacatcggtggacccgcgaacg

SEQ ID NO: 293442 - DNA, 30 bp, Artificial Sequence
  Synthetic oligonucleotide
cactatgtgactcttgtgatagatcgaacg

SEQ ID NO: 293443 - DNA, 30 bp, Artificial Sequence
  Synthetic oligonucleotide
aagaaacagcgtattatgtgtggaggaacg

SEQ ID NO: 293444 - DNA, 30 bp, Artificial Sequence
  Synthetic oligonucleotide
atatacaccggccggcctgtatgaggaacg

SEQ ID NO: 293445 - DNA, 30 bp, Artificial Sequence
  Synthetic oligonucleotide
ctgtaggcttcgtagggacttcgcggaacg

SEQ ID NO: 293446 - DNA, 30 bp, Artificial Sequence
  Synthetic oligonucleotide
aaggacgttgcctgcttacagacgggaacg

SEQ ID NO: 293447 - DNA, 30 bp, Artificial Sequence
  Synthetic oligonucleotide
cacgtgagattaggacgtactaatggaacg

SEQ ID NO: 293448 - DNA, 30 bp, Artificial Sequence
  Synthetic oligonucleotide
tagtaggataatgtttttcaggctggaacg

SEQ ID NO: 293449 - DNA, 30 bp, Artificial Sequence
  Synthetic oligonucleotide
tagcatgacggtcccacatatagtggaacg

SEQ ID NO: 293450 - DNA, 30 bp, Artificial Sequence
  Synthetic oligonucleotide
tacaagttataactggaaggcgttggaacg

SEQ ID NO: 293451 - DNA, 30 bp, Artificial Sequence
  Synthetic oligonucleotide
agcggccacggagaatccgtggaatgaacg

SEQ ID NO: 293452 - DNA, 30 bp, Artificial Sequence
  Synthetic oligonucleotide
actgggtgacttccgggtaagccatgaacg

SEQ ID NO: 293453 - DNA, 30 bp, Artificial Sequence
  Synthetic oligonucleotide
tttcgcacaggcgtaagcggcctctgaacg

SEQ ID NO: 293454 - DNA, 30 bp, Artificial Sequence
  Synthetic oligonucleotide
taataggaatgacaagaatatcattgaacg

SEQ ID NO: 293455 - DNA, 30 bp, Artificial Sequence
  Synthetic oligonucleotide
aacccggaacaactctatagaggttgaacg

SEQ ID NO: 293456 - DNA, 30 bp, Artificial Sequence
  Synthetic oligonucleotide
gaaactacaggattttgtgttccaataacg

SEQ ID NO: 293457 - DNA, 30 bp, Artificial Sequence
  Synthetic oligonucleotide
aagctgtgaatcaagctctgcgacataacg

SEQ ID NO: 293458 - DNA, 30 bp, Artificial Sequence
  Synthetic oligonucleotide
aacgcggttatagcgtctcgaaccataacg

SEQ ID NO: 293459 - DNA, 30 bp, Artificial Sequence
  Synthetic oligonucleotide
gaatcctataattcaagcccttccataacg

SEQ ID NO: 293460 - DNA, 30 bp, Artificial Sequence
  Synthetic oligonucleotide
agagtaagggattcatatctatagataacg

SEQ ID NO: 293461 - DNA, 30 bp, Artificial Sequence
  Synthetic oligonucleotide
ggatgtgtgtaggtgtaaatcgctataacg

SEQ ID NO: 293462 - DNA, 30 bp, Artificial Sequence
  Synthetic oligonucleotide
tgatgtcatgtgtacacacagcgcctaacg

SEQ ID NO: 293463 - DNA, 30 bp, Artificial Sequence
  Synthetic oligonucleotide
ggggggacgcgccccgcatggaagctaacg

SEQ ID NO: 293464 - DNA, 30 bp, Artificial Sequence
  Synthetic oligonucleotide
gtgaggctccgctcagaagtagggctaacg

SEQ ID NO: 293465 - DNA, 30 bp, Artificial Sequence
  Synthetic oligonucleotide
tttcgtgtacctggtaatgggtatctaacg

SEQ ID NO: 293466 - DNA, 30 bp, Artificial Sequence
  Synthetic oligonucleotide
cggttctccactataacagacagtctaacg

SEQ ID NO: 293467 - DNA, 30 bp, Artificial Sequence
  Synthetic oligonucleotide
ccgcgctggtgtgtgacagagtttctaacg

SEQ ID NO: 293468 - DNA, 30 bp, Artificial Sequence
  Synthetic oligonucleotide
attccacggaatcattgaactgaagtaacg

SEQ ID NO: 293469 - DNA, 30 bp, Artificial Sequence
  Synthetic oligonucleotide
taattatggctctaaagatatagcgtaacg

SEQ ID NO: 293470 - DNA, 30 bp, Artificial Sequence
  Synthetic oligonucleotide
tgatagaagttatgattggatcgtgtaacg

SEQ ID NO: 293471 - DNA, 30 bp, Artificial Sequence
  Synthetic oligonucleotide
ctgtgcggttcctcgaagtttacattaacg

SEQ ID NO: 293472 - DNA, 30 bp, Artificial Sequence
  Synthetic oligonucleotide
accaaagaaaggtacgctccgcctttaacg

SEQ ID NO: 293473 - DNA, 30 bp, Artificial Sequence
  Synthetic oligonucleotide
catttgaaaatgacacagttttgtttaacg

SEQ ID NO: 293474 - DNA, 30 bp, Artificial Sequence
  Synthetic oligonucleotide
tatcatgtcgggaccgggaccacaaacacg

SEQ ID NO: 293475 - DNA, 30 bp, Artificial Sequence
  Synthetic oligonucleotide
aaatcctggccgggtgagatgctcaacacg

SEQ ID NO: 293476 - DNA, 30 bp, Artificial Sequence
  Synthetic oligonucleotide
tgtaacgtaacgttaccggaccctaacacg

SEQ ID NO: 293477 - DNA, 30 bp, Artificial Sequence
  Synthetic oligonucleotide
agttcaatcctttgaattttctaacacacg

SEQ ID NO: 293478 - DNA, 30 bp, Artificial Sequence
  Synthetic oligonucleotide
cgtatctcaaattggccagcaatacacacg

SEQ ID NO: 293479 - DNA, 30 bp, Artificial Sequence
  Synthetic oligonucleotide
atgaataggacgggaacgatgatacacacg

SEQ ID NO: 293480 - DNA, 30 bp, Artificial Sequence
  Synthetic oligonucleotide
cagtcgtaagacaacgcaggtgagcacacg

SEQ ID NO: 293481 - DNA, 30 bp, Artificial Sequence
  Synthetic oligonucleotide
agtcgcccttgaggagtccattagcacacg

SEQ ID NO: 293482 - DNA, 30 bp, Artificial Sequence
  Synthetic oligonucleotide
ggtcagattcaattgctgcgcaatcacacg

SEQ ID NO: 293483 - DNA, 30 bp, Artificial Sequence
  Synthetic oligonucleotide
gctgtgtgtgttcttcatcgggaggacacg

SEQ ID NO: 293484 - DNA, 30 bp, Artificial Sequence
  Synthetic oligonucleotide
tgtgtaccgtctgtagtatctcttgacacg

SEQ ID NO: 293485 - DNA, 30 bp, Artificial Sequence
  Synthetic oligonucleotide
ggctggggactcaaacttgtgtgatacacg

SEQ ID NO: 293486 - DNA, 30 bp, Artificial Sequence
  Synthetic oligonucleotide
ttgccgtccaagtaaatgagtgtatacacg

SEQ ID NO: 293487 - DNA, 30 bp, Artificial Sequence
  Synthetic oligonucleotide
gtccctcttcagcggactgaagagtacacg

SEQ ID NO: 293488 - DNA, 30 bp, Artificial Sequence
  Synthetic oligonucleotide
gtatagatcagagtaagtataacgtacacg

SEQ ID NO: 293489 - DNA, 30 bp, Artificial Sequence
  Synthetic oligonucleotide
ggcgcaagtagaccaacgttaccgtacacg

SEQ ID NO: 293490 - DNA, 30 bp, Artificial Sequence
  Synthetic oligonucleotide
actatcacgcttccgaggtgagggtacacg

SEQ ID NO: 293491 - DNA, 30 bp, Artificial Sequence
  Synthetic oligonucleotide
attgtaaattcaactcactgtcgcaccacg

SEQ ID NO: 293492 - DNA, 30 bp, Artificial Sequence
  Synthetic oligonucleotide
agccgtcaagcccaccggtgcggcaccacg

SEQ ID NO: 293493 - DNA, 30 bp, Artificial Sequence
  Synthetic oligonucleotide
aaccgtagaaagtctatgctcgggaccacg

SEQ ID NO: 293494 - DNA, 30 bp, Artificial Sequence
  Synthetic oligonucleotide
ccgacatgtcatccctcaggcagccccacg

SEQ ID NO: 293495 - DNA, 30 bp, Artificial Sequence
  Synthetic oligonucleotide
acctgttttcaaagtgggttgtggcccacg

SEQ ID NO: 293496 - DNA, 30 bp, Artificial Sequence
  Synthetic oligonucleotide
atcacgtaacgtacctgtgtggtcgccacg

SEQ ID NO: 293497 - DNA, 30 bp, Artificial Sequence
  Synthetic oligonucleotide
tctaaacatgtcattagagttccggccacg

SEQ ID NO: 293498 - DNA, 30 bp, Artificial Sequence
  Synthetic oligonucleotide
agaacgacgagaagccggaccgcggccacg

SEQ ID NO: 293499 - DNA, 30 bp, Artificial Sequence
  Synthetic oligonucleotide
tccaatgtgaggttcgcacgctcggccacg

SEQ ID NO: 293500 - DNA, 30 bp, Artificial Sequence
  Synthetic oligonucleotide
actcggcaatgtcttgattctaaatccacg

SEQ ID NO: 293501 - DNA, 30 bp, Artificial Sequence
  Synthetic oligonucleotide
tgttgttcagcaatgtgaacaatatccacg

SEQ ID NO: 293502 - DNA, 30 bp, Artificial Sequence
  Synthetic oligonucleotide
gggcttagccgctgtgtgttggtatccacg

SEQ ID NO: 293503 - DNA, 30 bp, Artificial Sequence
  Synthetic oligonucleotide
gccgtgggtctatcttcactttgctccacg

SEQ ID NO: 293504 - DNA, 30 bp, Artificial Sequence
  Synthetic oligonucleotide
gtggtatgtcgacggccaatgaggtccacg

SEQ ID NO: 293505 - DNA, 30 bp, Artificial Sequence
  Synthetic oligonucleotide
tgcttgggctctgcaagatgctattccacg

SEQ ID NO: 293506 - DNA, 30 bp, Artificial Sequence
  Synthetic oligonucleotide
acttgttataatactcacccgacttccacg

SEQ ID NO: 293507 - DNA, 30 bp, Artificial Sequence
  Synthetic oligonucleotide
tccgtttcacttggggctctgacttccacg

SEQ ID NO: 293508 - DNA, 30 bp, Artificial Sequence
  Synthetic oligonucleotide
cgggtagcttccatgtttcgagcaagcacg

SEQ ID NO: 293509 - DNA, 30 bp, Artificial Sequence
  Synthetic oligonucleotide
ggtatggggactcgatagtttcccagcacg

SEQ ID NO: 293510 - DNA, 30 bp, Artificial Sequence
  Synthetic oligonucleotide
cgagttctgcatgtaccgaagtccagcacg

SEQ ID NO: 293511 - DNA, 30 bp, Artificial Sequence
  Synthetic oligonucleotide
gaaaacataggaagtcaagataagagcacg

SEQ ID NO: 293512 - DNA, 30 bp, Artificial Sequence
  Synthetic oligonucleotide
ggtcgtattaagcgaacgaaagcgagcacg

SEQ ID NO: 293513 - DNA, 30 bp, Artificial Sequence
  Synthetic oligonucleotide
gcggcaaaacgagtgggcagaggacgcacg

SEQ ID NO: 293514 - DNA, 30 bp, Artificial Sequence
  Synthetic oligonucleotide
tcgccgactattagatccttgatacgcacg

SEQ ID NO: 293515 - DNA, 30 bp, Artificial Sequence
  Synthetic oligonucleotide
ggcgctaaaagagcaggccttgcgcgcacg

SEQ ID NO: 293516 - DNA, 30 bp, Artificial Sequence
  Synthetic oligonucleotide
aaagcctaccgggtaaaggcagatcgcacg

SEQ ID NO: 293517 - DNA, 30 bp, Artificial Sequence
  Synthetic oligonucleotide
atcagctccctcctgtcgaggacaggcacg

SEQ ID NO: 293518 - DNA, 30 bp, Artificial Sequence
  Synthetic oligonucleotide
tctcgtttaatgccaaaaacgataggcacg

SEQ ID NO: 293519 - DNA, 30 bp, Artificial Sequence
  Synthetic oligonucleotide
aaggtatacatcctccgggcgttaggcacg

SEQ ID NO: 293520 - DNA, 30 bp, Artificial Sequence
  Synthetic oligonucleotide
taccatcggcttgggcgagggggcggcacg

SEQ ID NO: 293521 - DNA, 30 bp, Artificial Sequence
  Synthetic oligonucleotide
ttgttcaagtttcattagcatacgggcacg

SEQ ID NO: 293522 - DNA, 30 bp, Artificial Sequence
  Synthetic oligonucleotide
tctactctcctttctaaccttctgggcacg

SEQ ID NO: 293523 - DNA, 30 bp, Artificial Sequence
  Synthetic oligonucleotide
gagcaacgggacttgatcgcagtgggcacg

SEQ ID NO: 293524 - DNA, 30 bp, Artificial Sequence
  Synthetic oligonucleotide
cttatagagcgagcgcaaacagaatgcacg

SEQ ID NO: 293525 - DNA, 30 bp, Artificial Sequence
  Synthetic oligonucleotide
attggacatgatatattctttacatgcacg

SEQ ID NO: 293526 - DNA, 30 bp, Artificial Sequence
  Synthetic oligonucleotide
tgctatgactggccttataaatactgcacg

SEQ ID NO: 293527 - DNA, 30 bp, Artificial Sequence
  Synthetic oligonucleotide
atggagcttcttccgggggaggtctgcacg

SEQ ID NO: 293528 - DNA, 30 bp, Artificial Sequence
  Synthetic oligonucleotide
aaaatgcttactccattgctaatgtgcacg

SEQ ID NO: 293529 - DNA, 30 bp, Artificial Sequence
  Synthetic oligonucleotide
cgtgagccgcgcaggacaacagtgtgcacg

SEQ ID NO: 293530 - DNA, 30 bp, Artificial Sequence
  Synthetic oligonucleotide
tagggggtgccggatattcgtggttgcacg

SEQ ID NO: 293531 - DNA, 30 bp, Artificial Sequence
  Synthetic oligonucleotide
gcgtccgcaacatttagagtatgttgcacg

SEQ ID NO: 293532 - DNA, 30 bp, Artificial Sequence
  Synthetic oligonucleotide
aaattcaaacgtcaataggatcgaatcacg

SEQ ID NO: 293533 - DNA, 30 bp, Artificial Sequence
  Synthetic oligonucleotide
aagcaaagactgtcggattacggaatcacg

SEQ ID NO: 293534 - DNA, 30 bp, Artificial Sequence
  Synthetic oligonucleotide
ggtaagtacctaatagctaggaacatcacg

SEQ ID NO: 293535 - DNA, 30 bp, Artificial Sequence
  Synthetic oligonucleotide
gaggaggagcgctggatactttccatcacg

SEQ ID NO: 293536 - DNA, 30 bp, Artificial Sequence
  Synthetic oligonucleotide
ttcgtggtaacttgaactgatcggatcacg

SEQ ID NO: 293537 - DNA, 30 bp, Artificial Sequence
  Synthetic oligonucleotide
attgaccaccgtacggactcatatatcacg

SEQ ID NO: 293538 - DNA, 30 bp, Artificial Sequence
  Synthetic oligonucleotide
accaaactacataggtatgtgtaactcacg

SEQ ID NO: 293539 - DNA, 30 bp, Artificial Sequence
  Synthetic oligonucleotide
tctcaggataccacttcgtctcgactcacg

SEQ ID NO: 293540 - DNA, 30 bp, Artificial Sequence
  Synthetic oligonucleotide
atatctgtccgaaccctcgctcacctcacg

SEQ ID NO: 293541 - DNA, 30 bp, Artificial Sequence
  Synthetic oligonucleotide
gttttggcaccgtgacagaagagcctcacg

SEQ ID NO: 293542 - DNA, 30 bp, Artificial Sequence
  Synthetic oligonucleotide
gagcacgtcgcttggtcattgggtctcacg

SEQ ID NO: 293543 - DNA, 30 bp, Artificial Sequence
  Synthetic oligonucleotide
gctgatggtgacagtctcggatgtctcacg

SEQ ID NO: 293544 - DNA, 30 bp, Artificial Sequence
  Synthetic oligonucleotide
taagtaccgcaagatgtactttgtctcacg

SEQ ID NO: 293545 - DNA, 30 bp, Artificial Sequence
  Synthetic oligonucleotide
cattagttctcaatcactttgggagtcacg

SEQ ID NO: 293546 - DNA, 30 bp, Artificial Sequence
  Synthetic oligonucleotide
aagggctccttcgggtcaggagtcgtcacg

SEQ ID NO: 293547 - DNA, 30 bp, Artificial Sequence
  Synthetic oligonucleotide
cctgtggcgagcccctcccttgaggtcacg

SEQ ID NO: 293548 - DNA, 30 bp, Artificial Sequence
  Synthetic oligonucleotide
gtagcagatgcagtcggcttggatgtcacg

SEQ ID NO: 293549 - DNA, 30 bp, Artificial Sequence
  Synthetic oligonucleotide
taacggaaaaacccgtgcagttccttcacg

SEQ ID NO: 293550 - DNA, 30 bp, Artificial Sequence
  Synthetic oligonucleotide
gaacgttttaacttatttacatgcttcacg

SEQ ID NO: 293551 - DNA, 30 bp, Artificial Sequence
  Synthetic oligonucleotide
agggaatgataaaccccggacaatttcacg

SEQ ID NO: 293552 - DNA, 30 bp, Artificial Sequence
  Synthetic oligonucleotide
agaagagcctgggtttaattctctttcacg

SEQ ID NO: 293553 - DNA, 30 bp, Artificial Sequence
  Synthetic oligonucleotide
ctgacgtcagggccaggtttagtaaagacg

SEQ ID NO: 293554 - DNA, 31 bp, Artificial Sequence
  Synthetic oligonucleotide
gtgacatcccctcaaacttaggtagaagacg

SEQ ID NO: 293555 - DNA, 30 bp, Artificial Sequence
  Synthetic oligonucleotide
tcttccccacctggcatattccgtaagacg

SEQ ID NO: 293556 - DNA, 30 bp, Artificial Sequence
  Synthetic oligonucleotide
gttgacgtgtatagataacctgttaagacg

SEQ ID NO: 293557 - DNA, 30 bp, Artificial Sequence
  Synthetic oligonucleotide
ggctattatagctattgggcgatccagacg

SEQ ID NO: 293558 - DNA, 30 bp, Artificial Sequence
  Synthetic oligonucleotide
aggttcatgggaaggtgcttgatgcagacg

SEQ ID NO: 293559 - DNA, 30 bp, Artificial Sequence
  Synthetic oligonucleotide
ttgtatgagtctggcacatgatatcagacg

SEQ ID NO: 293560 - DNA, 30 bp, Artificial Sequence
  Synthetic oligonucleotide
caatcgtgtagacaccgttctagtcagacg

SEQ ID NO: 293561 - DNA, 30 bp, Artificial Sequence
  Synthetic oligonucleotide
tgaagtcactgcagtggtagataagagacg

SEQ ID NO: 293562 - DNA, 30 bp, Artificial Sequence
  Synthetic oligonucleotide
catcatttacgggattggttgacagagacg

SEQ ID NO: 293563 - DNA, 30 bp, Artificial Sequence
  Synthetic oligonucleotide
atatcggtgtctgggtgcaaatgagagacg

SEQ ID NO: 293564 - DNA, 30 bp, Artificial Sequence
  Synthetic oligonucleotide
cacgcacctgcacgccaaaaggccgagacg

SEQ ID NO: 293565 - DNA, 30 bp, Artificial Sequence
  Synthetic oligonucleotide
atactaaaacggtctggcgcactggagacg

SEQ ID NO: 293566 - DNA, 30 bp, Artificial Sequence
  Synthetic oligonucleotide
ctctcacgattgcaattagccaatgagacg

SEQ ID NO: 293567 - DNA, 30 bp, Artificial Sequence
  Synthetic oligonucleotide
cttaaatagacggcacatgagtaatagacg

SEQ ID NO: 293568 - DNA, 30 bp, Artificial Sequence
  Synthetic oligonucleotide
catgtatctaagcttagctgccagtagacg

SEQ ID NO: 293569 - DNA, 30 bp, Artificial Sequence
  Synthetic oligonucleotide
atgcagtactatgaagggcagcagtagacg

SEQ ID NO: 293570 - DNA, 30 bp, Artificial Sequence
  Synthetic oligonucleotide
aggcgcccgaggcaaaaaccccgttagacg

SEQ ID NO: 293571 - DNA, 30 bp, Artificial Sequence
  Synthetic oligonucleotide
gtggacgacacgccggacgatactacgacg

SEQ ID NO: 293572 - DNA, 30 bp, Artificial Sequence
  Synthetic oligonucleotide
cagttgggttaatcctcgagcttaccgacg

SEQ ID NO: 293573 - DNA, 30 bp, Artificial Sequence
  Synthetic oligonucleotide
ctaaatcatgggatcacggtcttcccgacg

SEQ ID NO: 293574 - DNA, 30 bp, Artificial Sequence
  Synthetic oligonucleotide
acgtttgagtagtgtctaaatacgccgacg

SEQ ID NO: 293575 - DNA, 30 bp, Artificial Sequence
  Synthetic oligonucleotide
tcggtacgctcttcttagagctggccgacg

SEQ ID NO: 293576 - DNA, 30 bp, Artificial Sequence
  Synthetic oligonucleotide
aagccagacaagatagtcgggattccgacg

SEQ ID NO: 293577 - DNA, 30 bp, Artificial Sequence
  Synthetic oligonucleotide
gacgtggatattagctagtcagcagcgacg

SEQ ID NO: 293578 - DNA, 30 bp, Artificial Sequence
  Synthetic oligonucleotide
gtctacttaaatgagtttattatcgcgacg

SEQ ID NO: 293579 - DNA, 30 bp, Artificial Sequence
  Synthetic oligonucleotide
gctacgaagccgtgcgttgggctggcgacg

SEQ ID NO: 293580 - DNA, 30 bp, Artificial Sequence
  Synthetic oligonucleotide
attgtaaaattcgcgattccgttggcgacg

SEQ ID NO: 293581 - DNA, 30 bp, Artificial Sequence
  Synthetic oligonucleotide
gggtgagagtccgtccggtgttgtgcgacg

SEQ ID NO: 293582 - DNA, 29 bp, Artificial Sequence
  Synthetic oligonucleotide
ccggctgcaatgtgtagagcatatcgacg

SEQ ID NO: 293583 - DNA, 30 bp, Artificial Sequence
  Synthetic oligonucleotide
atgtataactcgaaaatattttaaaggacg

SEQ ID NO: 293584 - DNA, 30 bp, Artificial Sequence
  Synthetic oligonucleotide
tggggtagtgctccgtgactgataaggacg

SEQ ID NO: 293585 - DNA, 30 bp, Artificial Sequence
  Synthetic oligonucleotide
taaagtcctgtgttgttgagggggaggacg

SEQ ID NO: 293586 - DNA, 30 bp, Artificial Sequence
  Synthetic oligonucleotide
gacaggttgtcgagcaccaaaattaggacg

SEQ ID NO: 293587 - DNA, 30 bp, Artificial Sequence
  Synthetic oligonucleotide
tactcccactcttggcgcattcaacggacg

SEQ ID NO: 293588 - DNA, 30 bp, Artificial Sequence
  Synthetic oligonucleotide
agcaatacaatgaatagaagactacggacg

SEQ ID NO: 293589 - DNA, 30 bp, Artificial Sequence
  Synthetic oligonucleotide
accggattaccagcatcccgtgaccggacg

SEQ ID NO: 293590 - DNA, 30 bp, Artificial Sequence
  Synthetic oligonucleotide
atcacaaattttatcattgtaccccggacg

SEQ ID NO: 293591 - DNA, 30 bp, Artificial Sequence
  Synthetic oligonucleotide
aaagtgtcggtcattctacgtatccggacg

SEQ ID NO: 293592 - DNA, 30 bp, Artificial Sequence
  Synthetic oligonucleotide
gcgagcccggggaacagtattctccggacg

SEQ ID NO: 293593 - DNA, 30 bp, Artificial Sequence
  Synthetic oligonucleotide
tcggccctgaatggattcacgcggcggacg

SEQ ID NO: 293594 - DNA, 30 bp, Artificial Sequence
  Synthetic oligonucleotide
cagtagttgcgagcaggttttgggcggacg

SEQ ID NO: 293595 - DNA, 30 bp, Artificial Sequence
  Synthetic oligonucleotide
acaaacgtactttatcgatccatgcggacg

SEQ ID NO: 293596 - DNA, 30 bp, Artificial Sequence
  Synthetic oligonucleotide
tgcgacgcgcggaccattccgctgcggacg

SEQ ID NO: 293597 - DNA, 30 bp, Artificial Sequence
  Synthetic oligonucleotide
acctgccctttaccgtcataggacgggacg

SEQ ID NO: 293598 - DNA, 30 bp, Artificial Sequence
  Synthetic oligonucleotide
gagccttttggcgtattcatgaccgggacg

SEQ ID NO: 293599 - DNA, 30 bp, Artificial Sequence
  Synthetic oligonucleotide
cacaccaactagcacactagccccgggacg

SEQ ID NO: 293600 - DNA, 30 bp, Artificial Sequence
  Synthetic oligonucleotide
aactaaaggtggggctgtttgtccgggacg

SEQ ID NO: 293601 - DNA, 30 bp, Artificial Sequence
  Synthetic oligonucleotide
gcatgacaacctccactctgtggggggacg

SEQ ID NO: 293602 - DNA, 30 bp, Artificial Sequence
  Synthetic oligonucleotide
agacttacagtgaccattggcatggggacg

SEQ ID NO: 293603 - DNA, 30 bp, Artificial Sequence
  Synthetic oligonucleotide
gagggcccgatcgctgggtactgctggacg

SEQ ID NO: 293604 - DNA, 30 bp, Artificial Sequence
  Synthetic oligonucleotide
ttgcgcaggaacatttgcgcttggtggacg

SEQ ID NO: 293605 - DNA, 30 bp, Artificial Sequence
  Synthetic oligonucleotide
tgggcagactagtggctgctattgtggacg

SEQ ID NO: 293606 - DNA, 30 bp, Artificial Sequence
  Synthetic oligonucleotide
cataggttgactatgagatgaccttggacg

SEQ ID NO: 293607 - DNA, 30 bp, Artificial Sequence
  Synthetic oligonucleotide
taaccacccggtagacttccaagaatgacg

SEQ ID NO: 293608 - DNA, 30 bp, Artificial Sequence
  Synthetic oligonucleotide
cctcctctgacctattctatagacatgacg

SEQ ID NO: 293609 - DNA, 30 bp, Artificial Sequence
  Synthetic oligonucleotide
gggtccacctacgagaacaggcgcatgacg

SEQ ID NO: 293610 - DNA, 30 bp, Artificial Sequence
  Synthetic oligonucleotide
cctggatagtacagtcataactgactgacg

SEQ ID NO: 293611 - DNA, 30 bp, Artificial Sequence
  Synthetic oligonucleotide
ttgaactcaactacgccttgtgtactgacg

SEQ ID NO: 293612 - DNA, 30 bp, Artificial Sequence
  Synthetic oligonucleotide
aggcactaacccgcatgtccgcccctgacg

SEQ ID NO: 293613 - DNA, 30 bp, Artificial Sequence
  Synthetic oligonucleotide
gctcgcgaagcaccgaaaattcgcctgacg

SEQ ID NO: 293614 - DNA, 29 bp, Artificial Sequence
  Synthetic oligonucleotide
tatacgagagctaaagattactgctgacg

SEQ ID NO: 293615 - DNA, 30 bp, Artificial Sequence
  Synthetic oligonucleotide
tctatcgtaggtcaggctagagatctgacg

SEQ ID NO: 293616 - DNA, 30 bp, Artificial Sequence
  Synthetic oligonucleotide
cgctttaaggggttaaaattgacagtgacg

SEQ ID NO: 293617 - DNA, 30 bp, Artificial Sequence
  Synthetic oligonucleotide
atttacggcgagtgtgaaatgaaggtgacg

SEQ ID NO: 293618 - DNA, 30 bp, Artificial Sequence
  Synthetic oligonucleotide
cgggatcccggagggtgcttccaggtgacg

SEQ ID NO: 293619 - DNA, 30 bp, Artificial Sequence
  Synthetic oligonucleotide
gccggtggagagtactgagggatggtgacg

SEQ ID NO: 293620 - DNA, 30 bp, Artificial Sequence
  Synthetic oligonucleotide
taggacaggtctacgatagaactggtgacg

SEQ ID NO: 293621 - DNA, 30 bp, Artificial Sequence
  Synthetic oligonucleotide
ctcacacttccagattcaaaaaatgtgacg

SEQ ID NO: 293622 - DNA, 30 bp, Artificial Sequence
  Synthetic oligonucleotide
aagaataatctcctatctctctctgtgacg

SEQ ID NO: 293623 - DNA, 30 bp, Artificial Sequence
  Synthetic oligonucleotide
atacatagccagcgtatcgactgtgtgacg

SEQ ID NO: 293624 - DNA, 30 bp, Artificial Sequence
  Synthetic oligonucleotide
aacacgcggacgggcagtataacattgacg

SEQ ID NO: 293625 - DNA, 30 bp, Artificial Sequence
  Synthetic oligonucleotide
ggagactgtctacctagctggccattgacg

SEQ ID NO: 293626 - DNA, 30 bp, Artificial Sequence
  Synthetic oligonucleotide
gctaacgacttagttagcgcaccaaatacg

SEQ ID NO: 293627 - DNA, 30 bp, Artificial Sequence
  Synthetic oligonucleotide
ggccgtcttttggagttggtaataaatacg

SEQ ID NO: 293628 - DNA, 30 bp, Artificial Sequence
  Synthetic oligonucleotide
ttggcatgatgtctgctttgccggaatacg

SEQ ID NO: 293629 - DNA, 30 bp, Artificial Sequence
  Synthetic oligonucleotide
taaaccgtgtgatgaagctaggataatacg

SEQ ID NO: 293630 - DNA, 30 bp, Artificial Sequence
  Synthetic oligonucleotide
gccgagcggtgtcagggcgacgcacatacg

SEQ ID NO: 293631 - DNA, 30 bp, Artificial Sequence
  Synthetic oligonucleotide
attacgtaattttctctgtacggacatacg

SEQ ID NO: 293632 - DNA, 30 bp, Artificial Sequence
  Synthetic oligonucleotide
ataccgtaatcccacaactacgtacatacg

SEQ ID NO: 293633 - DNA, 30 bp, Artificial Sequence
  Synthetic oligonucleotide
gttcgatgttcagagaatcgcttgcatacg

SEQ ID NO: 293634 - DNA, 31 bp, Artificial Sequence
  Synthetic oligonucleotide
cgtctgcgctaagtaaggctgtcgtcatacg

SEQ ID NO: 293635 - DNA, 30 bp, Artificial Sequence
  Synthetic oligonucleotide
ggcgagtactggcttctcgactttcatacg

SEQ ID NO: 293636 - DNA, 30 bp, Artificial Sequence
  Synthetic oligonucleotide
atccatccggacgttagccatagagatacg

SEQ ID NO: 293637 - DNA, 30 bp, Artificial Sequence
  Synthetic oligonucleotide
caaagtgctcgcgttggatcacgagatacg

SEQ ID NO: 293638 - DNA, 30 bp, Artificial Sequence
  Synthetic oligonucleotide
tacgcctccagcaatcaacgtggagatacg

SEQ ID NO: 293639 - DNA, 30 bp, Artificial Sequence
  Synthetic oligonucleotide
agagtccctgttcgaggattgttagatacg

SEQ ID NO: 293640 - DNA, 30 bp, Artificial Sequence
  Synthetic oligonucleotide
ctaacatgacagcatgaaaagcacgatacg

SEQ ID NO: 293641 - DNA, 30 bp, Artificial Sequence
  Synthetic oligonucleotide
caaagttttctgtgatcacagtgcgatacg

SEQ ID NO: 293642 - DNA, 30 bp, Artificial Sequence
  Synthetic oligonucleotide
accgcgcaccattagtggcatatcgatacg

SEQ ID NO: 293643 - DNA, 30 bp, Artificial Sequence
  Synthetic oligonucleotide
taatctactccgggagtgttcatggatacg

SEQ ID NO: 293644 - DNA, 30 bp, Artificial Sequence
  Synthetic oligonucleotide
gtgccttgcgatcggccctgtgtggatacg

SEQ ID NO: 293645 - DNA, 30 bp, Artificial Sequence
  Synthetic oligonucleotide
atggtacgctatacatagatccctgatacg

SEQ ID NO: 293646 - DNA, 30 bp, Artificial Sequence
  Synthetic oligonucleotide
tcacgatgactactgactgagcgtgatacg

SEQ ID NO: 293647 - DNA, 30 bp, Artificial Sequence
  Synthetic oligonucleotide
ctaggacgatgacatgtcagctaatatacg

SEQ ID NO: 293648 - DNA, 30 bp, Artificial Sequence
  Synthetic oligonucleotide
ggtcgccagtaggtgacctaaccatatacg

SEQ ID NO: 293649 - DNA, 30 bp, Artificial Sequence
  Synthetic oligonucleotide
tgccttcgggatccttgatcctcatatacg

SEQ ID NO: 293650 - DNA, 30 bp, Artificial Sequence
  Synthetic oligonucleotide
accgcagtgacaatcggcacgcgatatacg

SEQ ID NO: 293651 - DNA, 30 bp, Artificial Sequence
  Synthetic oligonucleotide
tctagacgcttaagtacattgatatatacg

SEQ ID NO: 293652 - DNA, 30 bp, Artificial Sequence
  Synthetic oligonucleotide
ccaacgtgttaacacttcaggagctatacg

SEQ ID NO: 293653 - DNA, 30 bp, Artificial Sequence
  Synthetic oligonucleotide
agtgtgttggtaaggtcgactggctatacg

SEQ ID NO: 293654 - DNA, 30 bp, Artificial Sequence
  Synthetic oligonucleotide
acacttcgttgggccgattggatctatacg

SEQ ID NO: 293655 - DNA, 30 bp, Artificial Sequence
  Synthetic oligonucleotide
ccagcgcaggtttcatgcattatctatacg

SEQ ID NO: 293656 - DNA, 30 bp, Artificial Sequence
  Synthetic oligonucleotide
taacatacagtgggaccgtctaagtatacg

SEQ ID NO: 293657 - DNA, 30 bp, Artificial Sequence
  Synthetic oligonucleotide
agtacacgttccagtgcgcctgagtatacg

SEQ ID NO: 293658 - DNA, 30 bp, Artificial Sequence
  Synthetic oligonucleotide
ccgactaaatgcgcttagattatgtatacg

SEQ ID NO: 293659 - DNA, 30 bp, Artificial Sequence
  Synthetic oligonucleotide
ctggctctcggttcgcatggcggaactacg

SEQ ID NO: 293660 - DNA, 30 bp, Artificial Sequence
  Synthetic oligonucleotide
cacgtatttgatggccagacgggaactacg

SEQ ID NO: 293661 - DNA, 30 bp, Artificial Sequence
  Synthetic oligonucleotide
gccattggggggtgtaactgacacactacg

SEQ ID NO: 293662 - DNA, 30 bp, Artificial Sequence
  Synthetic oligonucleotide
aaccacatcatccttcgactatgcactacg

SEQ ID NO: 293663 - DNA, 30 bp, Artificial Sequence
  Synthetic oligonucleotide
gcagggaatgaaatgaaacctgttactacg

SEQ ID NO: 293664 - DNA, 30 bp, Artificial Sequence
  Synthetic oligonucleotide
agcgcaatttaaaacggtcgttttactacg

SEQ ID NO: 293665 - DNA, 30 bp, Artificial Sequence
  Synthetic oligonucleotide
aggtcgattccagtcaccgtctcgcctacg

SEQ ID NO: 293666 - DNA, 30 bp, Artificial Sequence
  Synthetic oligonucleotide
tcacagcgctcaagcggcctaaaagctacg

SEQ ID NO: 293667 - DNA, 30 bp, Artificial Sequence
  Synthetic oligonucleotide
gaggtaccgcgatatgatctaatcgctacg

SEQ ID NO: 293668 - DNA, 30 bp, Artificial Sequence
  Synthetic oligonucleotide
ctgacagtgttaataccggcggaggctacg

SEQ ID NO: 293669 - DNA, 30 bp, Artificial Sequence
  Synthetic oligonucleotide
tctacacagtaccgcgagtagggggctacg

SEQ ID NO: 293670 - DNA, 30 bp, Artificial Sequence
  Synthetic oligonucleotide
tagtgtcgcactctggcgatatgggctacg

SEQ ID NO: 293671 - DNA, 30 bp, Artificial Sequence
  Synthetic oligonucleotide
tctattgctgtcggcacggactgtgctacg

SEQ ID NO: 293672 - DNA, 30 bp, Artificial Sequence
  Synthetic oligonucleotide
tacattccacagtcgtgcaatttatctacg

SEQ ID NO: 293673 - DNA, 30 bp, Artificial Sequence
  Synthetic oligonucleotide
tcagacataagtgctacagttttctctacg

SEQ ID NO: 293674 - DNA, 30 bp, Artificial Sequence
  Synthetic oligonucleotide
cgacgctgcatcataatgggcccgtctacg

SEQ ID NO: 293675 - DNA, 30 bp, Artificial Sequence
  Synthetic oligonucleotide
cacgtaatcgcttttctgacgagttctacg

SEQ ID NO: 293676 - DNA, 30 bp, Artificial Sequence
  Synthetic oligonucleotide
cctggtatgcgcgtcaacgtgggcagtacg

SEQ ID NO: 293677 - DNA, 30 bp, Artificial Sequence
  Synthetic oligonucleotide
cataatgaaactgtgggtgtatatagtacg

SEQ ID NO: 293678 - DNA, 30 bp, Artificial Sequence
  Synthetic oligonucleotide
acttcgttatcagaaaggttcgctagtacg

SEQ ID NO: 293679 - DNA, 30 bp, Artificial Sequence
  Synthetic oligonucleotide
atcatataactttagccttatgctagtacg

SEQ ID NO: 293680 - DNA, 30 bp, Artificial Sequence
  Synthetic oligonucleotide
gttatctggggaggactgcggatacgtacg

SEQ ID NO: 293681 - DNA, 30 bp, Artificial Sequence
  Synthetic oligonucleotide
tgagacgctcgactataggcggtacgtacg

SEQ ID NO: 293682 - DNA, 30 bp, Artificial Sequence
  Synthetic oligonucleotide
cccgaggcaaaactcgcgctgtgccgtacg

SEQ ID NO: 293683 - DNA, 30 bp, Artificial Sequence
  Synthetic oligonucleotide
gtcacacaggtcctaagtgaaggtcgtacg

SEQ ID NO: 293684 - DNA, 30 bp, Artificial Sequence
  Synthetic oligonucleotide
cacactaaactccccacttgtctgggtacg

SEQ ID NO: 293685 - DNA, 30 bp, Artificial Sequence
  Synthetic oligonucleotide
ccggcattcagcagtcgtattaaatgtacg

SEQ ID NO: 293686 - DNA, 30 bp, Artificial Sequence
  Synthetic oligonucleotide
atcgaggtacataacccacatttatgtacg

SEQ ID NO: 293687 - DNA, 30 bp, Artificial Sequence
  Synthetic oligonucleotide
gatgaccgtggcaataacagtgcctgtacg

SEQ ID NO: 293688 - DNA, 30 bp, Artificial Sequence
  Synthetic oligonucleotide
cccagataagtgcggttcgagacgtgtacg

SEQ ID NO: 293689 - DNA, 30 bp, Artificial Sequence
  Synthetic oligonucleotide
gctagacagagtatcaatcggagttgtacg

SEQ ID NO: 293690 - DNA, 30 bp, Artificial Sequence
  Synthetic oligonucleotide
tagttagctggtgataagcccgaaattacg

SEQ ID NO: 293691 - DNA, 30 bp, Artificial Sequence
  Synthetic oligonucleotide
gcgttctcagaggattcctacacaattacg

SEQ ID NO: 293692 - DNA, 30 bp, Artificial Sequence
  Synthetic oligonucleotide
gcttaggtgtacccaacgggcggaattacg

SEQ ID NO: 293693 - DNA, 30 bp, Artificial Sequence
  Synthetic oligonucleotide
cgcgaggctgatttaattacagcgattacg

SEQ ID NO: 293694 - DNA, 30 bp, Artificial Sequence
  Synthetic oligonucleotide
tcttaattcgactgtagtgattatattacg

SEQ ID NO: 293695 - DNA, 30 bp, Artificial Sequence
  Synthetic oligonucleotide
ggctacgttagaggttggatccttattacg

SEQ ID NO: 293696 - DNA, 30 bp, Artificial Sequence
  Synthetic oligonucleotide
ccggtctaaaggaggtacagagcacttacg

SEQ ID NO: 293697 - DNA, 30 bp, Artificial Sequence
  Synthetic oligonucleotide
ttgcgtttattcaactatcgccgacttacg

SEQ ID NO: 293698 - DNA, 30 bp, Artificial Sequence
  Synthetic oligonucleotide
gcataaaactgctaacccaatacccttacg

SEQ ID NO: 293699 - DNA, 30 bp, Artificial Sequence
  Synthetic oligonucleotide
tagtgcctgcgcagtgaaaggccgcttacg

SEQ ID NO: 293700 - DNA, 30 bp, Artificial Sequence
  Synthetic oligonucleotide
ctgtaacaaggggcgtagcagatgcttacg

SEQ ID NO: 293701 - DNA, 30 bp, Artificial Sequence
  Synthetic oligonucleotide
tagcattgacatgcatgagctgtgcttacg

SEQ ID NO: 293702 - DNA, 30 bp, Artificial Sequence
  Synthetic oligonucleotide
attacaccattgatcgatatattgcttacg

SEQ ID NO: 293703 - DNA, 30 bp, Artificial Sequence
  Synthetic oligonucleotide
gtcccatgattgggcgaacgtgctcttacg

SEQ ID NO: 293704 - DNA, 30 bp, Artificial Sequence
  Synthetic oligonucleotide
aacttggttgtccctgattgtcgtcttacg

SEQ ID NO: 293705 - DNA, 30 bp, Artificial Sequence
  Synthetic oligonucleotide
atacgtaccggggacaatatcgcggttacg

SEQ ID NO: 293706 - DNA, 30 bp, Artificial Sequence
  Synthetic oligonucleotide
ccgtggatatccggtataccccatgttacg

SEQ ID NO: 293707 - DNA, 30 bp, Artificial Sequence
  Synthetic oligonucleotide
tctcttgggagcgtgtcaaatcatgttacg

SEQ ID NO: 293708 - DNA, 30 bp, Artificial Sequence
  Synthetic oligonucleotide
cattgtcgcggcgtccatgtctatgttacg

SEQ ID NO: 293709 - DNA, 30 bp, Artificial Sequence
  Synthetic oligonucleotide
cacattgacatagtcgtctatcaatttacg

SEQ ID NO: 293710 - DNA, 30 bp, Artificial Sequence
  Synthetic oligonucleotide
catggtaacgtcggcgccggcagatttacg

SEQ ID NO: 293711 - DNA, 30 bp, Artificial Sequence
  Synthetic oligonucleotide
catctcagggaccagtactgtctatttacg

SEQ ID NO: 293712 - DNA, 30 bp, Artificial Sequence
  Synthetic oligonucleotide
ctctctacagtgagtagtcacacgtttacg

SEQ ID NO: 293713 - DNA, 30 bp, Artificial Sequence
  Synthetic oligonucleotide
cctgagctttatggagagtgcgggtttacg

SEQ ID NO: 293714 - DNA, 30 bp, Artificial Sequence
  Synthetic oligonucleotide
aggtgtatccgcgcgggattcatgtttacg

SEQ ID NO: 293715 - DNA, 30 bp, Artificial Sequence
  Synthetic oligonucleotide
cttaccccctgtcttgcatatttttttacg

SEQ ID NO: 293716 - DNA, 30 bp, Artificial Sequence
  Synthetic oligonucleotide
acaactcttattggcatcagaatcaaaccg

SEQ ID NO: 293717 - DNA, 30 bp, Artificial Sequence
  Synthetic oligonucleotide
ctcagaggcaatgtgcacatgctgaaaccg

SEQ ID NO: 293718 - DNA, 30 bp, Artificial Sequence
  Synthetic oligonucleotide
gccgtatttgtatttaggtgggctaaaccg

SEQ ID NO: 293719 - DNA, 30 bp, Artificial Sequence
  Synthetic oligonucleotide
cgatatctctggtacccggccgttaaaccg

SEQ ID NO: 293720 - DNA, 30 bp, Artificial Sequence
  Synthetic oligonucleotide
aggatcgggtaccccgttggtgcccaaccg

SEQ ID NO: 293721 - DNA, 30 bp, Artificial Sequence
  Synthetic oligonucleotide
gtaggtataatgcccaaatgaagccaaccg

SEQ ID NO: 293722 - DNA, 30 bp, Artificial Sequence
  Synthetic oligonucleotide
cttcattgtcggaaaccattagtccaaccg

SEQ ID NO: 293723 - DNA, 30 bp, Artificial Sequence
  Synthetic oligonucleotide
agggtccgaggggacaggctgtccgaaccg

SEQ ID NO: 293724 - DNA, 30 bp, Artificial Sequence
  Synthetic oligonucleotide
ttagggctatgattatcacggttcgaaccg

SEQ ID NO: 293725 - DNA, 30 bp, Artificial Sequence
  Synthetic oligonucleotide
aagccatatcaacaatgggttaagtaaccg

SEQ ID NO: 293726 - DNA, 30 bp, Artificial Sequence
  Synthetic oligonucleotide
ctacgatatttatcgaactactggtaaccg

SEQ ID NO: 293727 - DNA, 30 bp, Artificial Sequence
  Synthetic oligonucleotide
tgtaggagtgagggcgatatatattaaccg

SEQ ID NO: 293728 - DNA, 30 bp, Artificial Sequence
  Synthetic oligonucleotide
tccacttctcattctgattctgtttaaccg

SEQ ID NO: 293729 - DNA, 30 bp, Artificial Sequence
  Synthetic oligonucleotide
gcgattgtatgtttccatttcgcaacaccg

SEQ ID NO: 293730 - DNA, 30 bp, Artificial Sequence
  Synthetic oligonucleotide
gccgtacgtgaatggttctctcacacaccg

SEQ ID NO: 293731 - DNA, 30 bp, Artificial Sequence
  Synthetic oligonucleotide
ggtgtccagacagaatattgcaggacaccg

SEQ ID NO: 293732 - DNA, 30 bp, Artificial Sequence
  Synthetic oligonucleotide
tggaacactttaagagcctcttgtacaccg

SEQ ID NO: 293733 - DNA, 30 bp, Artificial Sequence
  Synthetic oligonucleotide
agtaaaagttcgtttcttctggttacaccg

SEQ ID NO: 293734 - DNA, 30 bp, Artificial Sequence
  Synthetic oligonucleotide
gaacccaaagtattacgcttgttgccaccg

SEQ ID NO: 293735 - DNA, 30 bp, Artificial Sequence
  Synthetic oligonucleotide
agagtcatccctcgggcgatagctccaccg

SEQ ID NO: 293736 - DNA, 30 bp, Artificial Sequence
  Synthetic oligonucleotide
gtctccacgatctgtacctcgaaggcaccg

SEQ ID NO: 293737 - DNA, 30 bp, Artificial Sequence
  Synthetic oligonucleotide
acggcgcgcaaccttagacattaggcaccg

SEQ ID NO: 293738 - DNA, 30 bp, Artificial Sequence
  Synthetic oligonucleotide
gagtcgaaacaaattcaaacacgggcaccg

SEQ ID NO: 293739 - DNA, 30 bp, Artificial Sequence
  Synthetic oligonucleotide
agccgacctttgggggacgccttctcaccg

SEQ ID NO: 293740 - DNA, 30 bp, Artificial Sequence
  Synthetic oligonucleotide
cgtacaatacgcttagagttgtagtcaccg

SEQ ID NO: 293741 - DNA, 30 bp, Artificial Sequence
  Synthetic oligonucleotide
gtgcttggatttcaggtaccaagttcaccg

SEQ ID NO: 293742 - DNA, 30 bp, Artificial Sequence
  Synthetic oligonucleotide
agctagagggtacttaacgtgagttcaccg

SEQ ID NO: 293743 - DNA, 30 bp, Artificial Sequence
  Synthetic oligonucleotide
tatagataaggtgtaggatgcatttcaccg

SEQ ID NO: 293744 - DNA, 30 bp, Artificial Sequence
  Synthetic oligonucleotide
attaagtcgagaaatgccagatccagaccg

SEQ ID NO: 293745 - DNA, 30 bp, Artificial Sequence
  Synthetic oligonucleotide
tgtggattgcttcggggctctagcagaccg

SEQ ID NO: 293746 - DNA, 30 bp, Artificial Sequence
  Synthetic oligonucleotide
atttcaatagtaagccaagatgtcagaccg

SEQ ID NO: 293747 - DNA, 30 bp, Artificial Sequence
  Synthetic oligonucleotide
tggctaaacgtatgagaacgtgttagaccg

SEQ ID NO: 293748 - DNA, 31 bp, Artificial Sequence
  Synthetic oligonucleotide
tgcgaattgctcttagttagagctacgaccg

SEQ ID NO: 293749 - DNA, 30 bp, Artificial Sequence
  Synthetic oligonucleotide
ttattgctttctacgggggtttatcgaccg

SEQ ID NO: 293750 - DNA, 30 bp, Artificial Sequence
  Synthetic oligonucleotide
atagaaaggatcgggctccgttctcgaccg

SEQ ID NO: 293751 - DNA, 30 bp, Artificial Sequence
  Synthetic oligonucleotide
cacgcttgtgtgtgcctgtggggtcgaccg

SEQ ID NO: 293752 - DNA, 30 bp, Artificial Sequence
  Synthetic oligonucleotide
tcacagcagccggtgtagtagaaaggaccg

SEQ ID NO: 293753 - DNA, 30 bp, Artificial Sequence
  Synthetic oligonucleotide
gaggagtgtttgtacgtgactctaggaccg

SEQ ID NO: 293754 - DNA, 30 bp, Artificial Sequence
  Synthetic oligonucleotide
taccacccagtatgtagcgtagccggaccg

SEQ ID NO: 293755 - DNA, 30 bp, Artificial Sequence
  Synthetic oligonucleotide
taaataatgagcaatggcgggtccggaccg

SEQ ID NO: 293756 - DNA, 30 bp, Artificial Sequence
  Synthetic oligonucleotide
acccaccccctccacgagttgggcggaccg

SEQ ID NO: 293757 - DNA, 30 bp, Artificial Sequence
  Synthetic oligonucleotide
atttgtgagttgtgaaagacagcgggaccg

SEQ ID NO: 293758 - DNA, 30 bp, Artificial Sequence
  Synthetic oligonucleotide
tgtccaaccagttttcacttgctgggaccg

SEQ ID NO: 293759 - DNA, 30 bp, Artificial Sequence
  Synthetic oligonucleotide
tgttttgacccatacaacgcacatggaccg

SEQ ID NO: 293760 - DNA, 30 bp, Artificial Sequence
  Synthetic oligonucleotide
tcctcctgtgccactcaacgacatggaccg

SEQ ID NO: 293761 - DNA, 30 bp, Artificial Sequence
  Synthetic oligonucleotide
atgccgcaaccctatgaggcagctggaccg

SEQ ID NO: 293762 - DNA, 30 bp, Artificial Sequence
  Synthetic oligonucleotide
tacgtatcgtacgagtgtatgtctggaccg

SEQ ID NO: 293763 - DNA, 30 bp, Artificial Sequence
  Synthetic oligonucleotide
ctggaggcacaggggcagatgcgctgaccg

SEQ ID NO: 293764 - DNA, 30 bp, Artificial Sequence
  Synthetic oligonucleotide
gctgaagatattccgcacatcgcgtgaccg

SEQ ID NO: 293765 - DNA, 30 bp, Artificial Sequence
  Synthetic oligonucleotide
cgaaaatttccgagcccatatcgttgaccg

SEQ ID NO: 293766 - DNA, 30 bp, Artificial Sequence
  Synthetic oligonucleotide
tatggcagcgaccaacgaagcttttgaccg

SEQ ID NO: 293767 - DNA, 30 bp, Artificial Sequence
  Synthetic oligonucleotide
gtgttacggagcggcgcccaagaactaccg

SEQ ID NO: 293768 - DNA, 30 bp, Artificial Sequence
  Synthetic oligonucleotide
ctatcttcggggtcatcgggcgcactaccg

SEQ ID NO: 293769 - DNA, 30 bp, Artificial Sequence
  Synthetic oligonucleotide
aatatagagcggtgctaaatcgacctaccg

SEQ ID NO: 293770 - DNA, 30 bp, Artificial Sequence
  Synthetic oligonucleotide
ggttagtagcgtggtatctcttcgctaccg

SEQ ID NO: 293771 - DNA, 30 bp, Artificial Sequence
  Synthetic oligonucleotide
taggttatctggcagcatgtggggctaccg

SEQ ID NO: 293772 - DNA, 30 bp, Artificial Sequence
  Synthetic oligonucleotide
atgttcgagtacatgagtccacatctaccg

SEQ ID NO: 293773 - DNA, 30 bp, Artificial Sequence
  Synthetic oligonucleotide
accctctctaatcctataaggctagtaccg

SEQ ID NO: 293774 - DNA, 30 bp, Artificial Sequence
  Synthetic oligonucleotide
cgggctaaaaacaacttgtttcaggtaccg

SEQ ID NO: 293775 - DNA, 30 bp, Artificial Sequence
  Synthetic oligonucleotide
taccagttaattagccaaattagggtaccg

SEQ ID NO: 293776 - DNA, 30 bp, Artificial Sequence
  Synthetic oligonucleotide
aaaatgcccttggagacctgcggggtaccg

SEQ ID NO: 293777 - DNA, 30 bp, Artificial Sequence
  Synthetic oligonucleotide
cataacaggtacatagcgaaatgggtaccg

SEQ ID NO: 293778 - DNA, 30 bp, Artificial Sequence
  Synthetic oligonucleotide
ttcgccaggatgcgcgagaccatggtaccg

SEQ ID NO: 293779 - DNA, 30 bp, Artificial Sequence
  Synthetic oligonucleotide
tgagggccattacacatggtagtggtaccg

SEQ ID NO: 293780 - DNA, 30 bp, Artificial Sequence
  Synthetic oligonucleotide
tgggttttaggatactagtggactgtaccg

SEQ ID NO: 293781 - DNA, 30 bp, Artificial Sequence
  Synthetic oligonucleotide
aaaagttcccgacgtatataagttgtaccg

SEQ ID NO: 293782 - DNA, 30 bp, Artificial Sequence
  Synthetic oligonucleotide
cttgcgtcgtcaaaaacagatgtattaccg

SEQ ID NO: 293783 - DNA, 30 bp, Artificial Sequence
  Synthetic oligonucleotide
aattctgtgcagggtcgagcggacttaccg

SEQ ID NO: 293784 - DNA, 30 bp, Artificial Sequence
  Synthetic oligonucleotide
attgacacagaaaccataggaaccttaccg

SEQ ID NO: 293785 - DNA, 30 bp, Artificial Sequence
  Synthetic oligonucleotide
gtcggtaaaggtaatcatattagtttaccg

SEQ ID NO: 293786 - DNA, 30 bp, Artificial Sequence
  Synthetic oligonucleotide
ctgcggacaaattgtctcaccattttaccg

SEQ ID NO: 293787 - DNA, 30 bp, Artificial Sequence
  Synthetic oligonucleotide
ccctttagagctatcacataacttttaccg

SEQ ID NO: 293788 - DNA, 30 bp, Artificial Sequence
  Synthetic oligonucleotide
tctgtcaggtgacaaccctgtaaaaacccg

SEQ ID NO: 293789 - DNA, 30 bp, Artificial Sequence
  Synthetic oligonucleotide
gaactaaacttacctttgatgtcaaacccg

SEQ ID NO: 293790 - DNA, 31 bp, Artificial Sequence
  Synthetic oligonucleotide
ctctcgtggagaatgagcaaatttaaacccg

SEQ ID NO: 293791 - DNA, 30 bp, Artificial Sequence
  Synthetic oligonucleotide
tatcagtctcggcttagagtatcgaacccg

SEQ ID NO: 293792 - DNA, 30 bp, Artificial Sequence
  Synthetic oligonucleotide
gcatcaaaatcattggagttaaaacacccg

SEQ ID NO: 293793 - DNA, 30 bp, Artificial Sequence
  Synthetic oligonucleotide
taggtgggttatctcaacgcgatccacccg

SEQ ID NO: 293794 - DNA, 30 bp, Artificial Sequence
  Synthetic oligonucleotide
gggatagccccgcggaggagacttcacccg

SEQ ID NO: 293795 - DNA, 30 bp, Artificial Sequence
  Synthetic oligonucleotide
gttggaatgttcacctaagtcgttcacccg

SEQ ID NO: 293796 - DNA, 30 bp, Artificial Sequence
  Synthetic oligonucleotide
atataagctggtgggtgcggtgcggacccg

SEQ ID NO: 293797 - DNA, 30 bp, Artificial Sequence
  Synthetic oligonucleotide
accttattgcccacaaggcaaccctacccg

SEQ ID NO: 293798 - DNA, 30 bp, Artificial Sequence
  Synthetic oligonucleotide
gcatcacatgcgaagcctgatctgtacccg

SEQ ID NO: 293799 - DNA, 30 bp, Artificial Sequence
  Synthetic oligonucleotide
tgcctgggcccctcggggttattttacccg

SEQ ID NO: 293800 - DNA, 30 bp, Artificial Sequence
  Synthetic oligonucleotide
gattcctaaatgcgaattacaacaaccccg

SEQ ID NO: 293801 - DNA, 30 bp, Artificial Sequence
  Synthetic oligonucleotide
gctatccctgagatcggcgaactcaccccg

SEQ ID NO: 293802 - DNA, 30 bp, Artificial Sequence
  Synthetic oligonucleotide
tttgagttcgggggtccaagtaataccccg

SEQ ID NO: 293803 - DNA, 30 bp, Artificial Sequence
  Synthetic oligonucleotide
gagtcactaaatacgttccacgctaccccg

SEQ ID NO: 293804 - DNA, 30 bp, Artificial Sequence
  Synthetic oligonucleotide
tccgaaaaaggctgactagggcttaccccg

SEQ ID NO: 293805 - DNA, 30 bp, Artificial Sequence
  Synthetic oligonucleotide
ggagagagagtctttcgagggcagcccccg

SEQ ID NO: 293806 - DNA, 30 bp, Artificial Sequence
  Synthetic oligonucleotide
atccctctgacagcaactccagcgcccccg

SEQ ID NO: 293807 - DNA, 30 bp, Artificial Sequence
  Synthetic oligonucleotide
tttagagaccggagaggccaaaggcccccg

SEQ ID NO: 293808 - DNA, 30 bp, Artificial Sequence
  Synthetic oligonucleotide
atattctaagtggcagcgaagttgcccccg

SEQ ID NO: 293809 - DNA, 30 bp, Artificial Sequence
  Synthetic oligonucleotide
gggccgccagggttattataggttcccccg

SEQ ID NO: 293810 - DNA, 30 bp, Artificial Sequence
  Synthetic oligonucleotide
tcagttatatatagagttttgtaagccccg

SEQ ID NO: 293811 - DNA, 30 bp, Artificial Sequence
  Synthetic oligonucleotide
ggagaactcatggcacctgctaaggccccg

SEQ ID NO: 293812 - DNA, 30 bp, Artificial Sequence
  Synthetic oligonucleotide
acatggatcggccatctgtggccggccccg

SEQ ID NO: 293813 - DNA, 30 bp, Artificial Sequence
  Synthetic oligonucleotide
ggagccaggattggaaatagtccatccccg

SEQ ID NO: 293814 - DNA, 30 bp, Artificial Sequence
  Synthetic oligonucleotide
gtatagacatattacgctcaagggtccccg

SEQ ID NO: 293815 - DNA, 30 bp, Artificial Sequence
  Synthetic oligonucleotide
aattctagtatgagagagaacgcttccccg

SEQ ID NO: 293816 - DNA, 30 bp, Artificial Sequence
  Synthetic oligonucleotide
tctgcacaagtgacggaatcgcctagcccg

SEQ ID NO: 293817 - DNA, 30 bp, Artificial Sequence
  Synthetic oligonucleotide
tatcggacactcacctgtgaagttagcccg

SEQ ID NO: 293818 - DNA, 30 bp, Artificial Sequence
  Synthetic oligonucleotide
gcgcaatatgagcatatctcgcaacgcccg

SEQ ID NO: 293819 - DNA, 30 bp, Artificial Sequence
  Synthetic oligonucleotide
tgacaatcgagtcttgtacgcgctcgcccg

SEQ ID NO: 293820 - DNA, 30 bp, Artificial Sequence
  Synthetic oligonucleotide
acctttcagaccaataggacccgaggcccg

SEQ ID NO: 293821 - DNA, 30 bp, Artificial Sequence
  Synthetic oligonucleotide
ggtgacttatacataccacgggatggcccg

SEQ ID NO: 293822 - DNA, 30 bp, Artificial Sequence
  Synthetic oligonucleotide
gctgcctcgttgggcgtgggtgttggcccg

SEQ ID NO: 293823 - DNA, 30 bp, Artificial Sequence
  Synthetic oligonucleotide
ccaggggccttatatcaaccttgatgcccg

SEQ ID NO: 293824 - DNA, 30 bp, Artificial Sequence
  Synthetic oligonucleotide
gccttacactcataccagcaaaactgcccg

SEQ ID NO: 293825 - DNA, 30 bp, Artificial Sequence
  Synthetic oligonucleotide
agcacgaagttcatggtctttccttgcccg

SEQ ID NO: 293826 - DNA, 30 bp, Artificial Sequence
  Synthetic oligonucleotide
actggggagtgtcgtcaggtctcttgcccg

SEQ ID NO: 293827 - DNA, 30 bp, Artificial Sequence
  Synthetic oligonucleotide
ttagggaggcgactgccagactgttgcccg

SEQ ID NO: 293828 - DNA, 30 bp, Artificial Sequence
  Synthetic oligonucleotide
tactatcgtacccgaagacattaaatcccg

SEQ ID NO: 293829 - DNA, 30 bp, Artificial Sequence
  Synthetic oligonucleotide
agccttattgataggaatgattagatcccg

SEQ ID NO: 293830 - DNA, 30 bp, Artificial Sequence
  Synthetic oligonucleotide
atcctatgtagcgcctcatgctcgatcccg

SEQ ID NO: 293831 - DNA, 30 bp, Artificial Sequence
  Synthetic oligonucleotide
cgccacgaacaacactcttgttttatcccg

SEQ ID NO: 293832 - DNA, 30 bp, Artificial Sequence
  Synthetic oligonucleotide
cgtaccattacggtctagcactaactcccg

SEQ ID NO: 293833 - DNA, 30 bp, Artificial Sequence
  Synthetic oligonucleotide
atggtagcaaatgacctggttggcctcccg

SEQ ID NO: 293834 - DNA, 30 bp, Artificial Sequence
  Synthetic oligonucleotide
accttgcactacgcctgggtgaagctcccg

SEQ ID NO: 293835 - DNA, 30 bp, Artificial Sequence
  Synthetic oligonucleotide
ctgtcgtgccgttattttgagagtctcccg

SEQ ID NO: 293836 - DNA, 30 bp, Artificial Sequence
  Synthetic oligonucleotide
agcacacgggaaaagtacggcaaagtcccg

SEQ ID NO: 293837 - DNA, 30 bp, Artificial Sequence
  Synthetic oligonucleotide
aaaaagagtcttgctatgattacagtcccg

SEQ ID NO: 293838 - DNA, 30 bp, Artificial Sequence
  Synthetic oligonucleotide
atcgggagactggacacaggatcagtcccg

SEQ ID NO: 293839 - DNA, 30 bp, Artificial Sequence
  Synthetic oligonucleotide
gactgtcccaatgagcgttgataggtcccg

SEQ ID NO: 293840 - DNA, 30 bp, Artificial Sequence
  Synthetic oligonucleotide
gagaacgttgtaaatgactacctggtcccg

SEQ ID NO: 293841 - DNA, 30 bp, Artificial Sequence
  Synthetic oligonucleotide
ggcttagcttgtggccctattctggtcccg

SEQ ID NO: 293842 - DNA, 30 bp, Artificial Sequence
  Synthetic oligonucleotide
ttctgctctggggtaagcatatcattcccg

SEQ ID NO: 293843 - DNA, 30 bp, Artificial Sequence
  Synthetic oligonucleotide
tcttatagtccctgtttctccatattcccg

SEQ ID NO: 293844 - DNA, 30 bp, Artificial Sequence
  Synthetic oligonucleotide
ctactcgacggtaggtgggcgttattcccg

SEQ ID NO: 293845 - DNA, 30 bp, Artificial Sequence
  Synthetic oligonucleotide
tagcgacttatttgaaaacagtggttcccg

SEQ ID NO: 293846 - DNA, 30 bp, Artificial Sequence
  Synthetic oligonucleotide
agtgcacggtctcggcactttactttcccg

SEQ ID NO: 293847 - DNA, 30 bp, Artificial Sequence
  Synthetic oligonucleotide
gtgtaactagagccacctaggcctttcccg

SEQ ID NO: 293848 - DNA, 30 bp, Artificial Sequence
  Synthetic oligonucleotide
agcacgtcctcgagatcctatctgcagccg

SEQ ID NO: 293849 - DNA, 30 bp, Artificial Sequence
  Synthetic oligonucleotide
gactcatgccgctttatgagggccgagccg

SEQ ID NO: 293850 - DNA, 30 bp, Artificial Sequence
  Synthetic oligonucleotide
atggaactattatttttccctagcgagccg

SEQ ID NO: 293851 - DNA, 30 bp, Artificial Sequence
  Synthetic oligonucleotide
tagaactttaaatgcaggcgcaaggagccg

SEQ ID NO: 293852 - DNA, 30 bp, Artificial Sequence
  Synthetic oligonucleotide
caaatagttcaatcgtcgcaagaggagccg

SEQ ID NO: 293853 - DNA, 30 bp, Artificial Sequence
  Synthetic oligonucleotide
ggcgatggtcacccccgcctataggagccg

SEQ ID NO: 293854 - DNA, 30 bp, Artificial Sequence
  Synthetic oligonucleotide
gttgtggaaatgatccgggattcggagccg

SEQ ID NO: 293855 - DNA, 30 bp, Artificial Sequence
  Synthetic oligonucleotide
ggttacataatggtaagtctcagtgagccg

SEQ ID NO: 293856 - DNA, 30 bp, Artificial Sequence
  Synthetic oligonucleotide
attctaggtggtctgctgagtgaatagccg

SEQ ID NO: 293857 - DNA, 30 bp, Artificial Sequence
  Synthetic oligonucleotide
gtactgactactgttggttcgccctagccg

SEQ ID NO: 293858 - DNA, 30 bp, Artificial Sequence
  Synthetic oligonucleotide
ccaacacttcaatttaccgcgttctagccg

SEQ ID NO: 293859 - DNA, 30 bp, Artificial Sequence
  Synthetic oligonucleotide
gatatccttgggccaactctatcgtagccg

SEQ ID NO: 293860 - DNA, 30 bp, Artificial Sequence
  Synthetic oligonucleotide
gccagtgtaacaaccagggattgttagccg

SEQ ID NO: 293861 - DNA, 30 bp, Artificial Sequence
  Synthetic oligonucleotide
gcaagtgttcgttgtcgtcagcaaacgccg

SEQ ID NO: 293862 - DNA, 30 bp, Artificial Sequence
  Synthetic oligonucleotide
cgcgaagcatcgggcataccgtgaacgccg

SEQ ID NO: 293863 - DNA, 30 bp, Artificial Sequence
  Synthetic oligonucleotide
acctaacaatgatgaggtaaacgcacgccg

SEQ ID NO: 293864 - DNA, 30 bp, Artificial Sequence
  Synthetic oligonucleotide
gtgagatgctctttgctacccatcacgccg

SEQ ID NO: 293865 - DNA, 30 bp, Artificial Sequence
  Synthetic oligonucleotide
ctcatatggattcatgggggaccgacgccg

SEQ ID NO: 293866 - DNA, 30 bp, Artificial Sequence
  Synthetic oligonucleotide
aacaccgtcccgccgagcatggggacgccg

SEQ ID NO: 293867 - DNA, 30 bp, Artificial Sequence
  Synthetic oligonucleotide
gccttgaaggcgcaccgagaatgtacgccg

SEQ ID NO: 293868 - DNA, 30 bp, Artificial Sequence
  Synthetic oligonucleotide
tatcgggatgttgtgtatagcacaccgccg

SEQ ID NO: 293869 - DNA, 30 bp, Artificial Sequence
  Synthetic oligonucleotide
cgccctagatcatcatgaccaagcccgccg

SEQ ID NO: 293870 - DNA, 30 bp, Artificial Sequence
  Synthetic oligonucleotide
acgtaggaaagtgcaactttacgtccgccg

SEQ ID NO: 293871 - DNA, 30 bp, Artificial Sequence
  Synthetic oligonucleotide
tcgctgccgacaatcagcgccgcagcgccg

SEQ ID NO: 293872 - DNA, 30 bp, Artificial Sequence
  Synthetic oligonucleotide
gaattttatcgcatctcactcttcgcgccg

SEQ ID NO: 293873 - DNA, 30 bp, Artificial Sequence
  Synthetic oligonucleotide
tgtgcacagtaggccctcttagaggcgccg

SEQ ID NO: 293874 - DNA, 30 bp, Artificial Sequence
  Synthetic oligonucleotide
agtatggtaagtcgatctaccgaggcgccg

SEQ ID NO: 293875 - DNA, 30 bp, Artificial Sequence
  Synthetic oligonucleotide
gcgttagaaggtactcgcgcataggcgccg

SEQ ID NO: 293876 - DNA, 30 bp, Artificial Sequence
  Synthetic oligonucleotide
cccaccgtgttagggctcgcttatgcgccg

SEQ ID NO: 293877 - DNA, 30 bp, Artificial Sequence
  Synthetic oligonucleotide
agagcaattgagggcgacatgattgcgccg

SEQ ID NO: 293878 - DNA, 30 bp, Artificial Sequence
  Synthetic oligonucleotide
gctcgtcagatacagcgatactcatcgccg

SEQ ID NO: 293879 - DNA, 30 bp, Artificial Sequence
  Synthetic oligonucleotide
cgtttacctgttctgttcctaatatcgccg

SEQ ID NO: 293880 - DNA, 30 bp, Artificial Sequence
  Synthetic oligonucleotide
cggacacattttagaggggctggctcgccg

SEQ ID NO: 293881 - DNA, 30 bp, Artificial Sequence
  Synthetic oligonucleotide
agtcggatgtcacgagtctgatattcgccg

SEQ ID NO: 293882 - DNA, 30 bp, Artificial Sequence
  Synthetic oligonucleotide
gtaaaggatcggagcaacacatcaaggccg

SEQ ID NO: 293883 - DNA, 30 bp, Artificial Sequence
  Synthetic oligonucleotide
cggcaaacgtgtatacacggttgaaggccg

SEQ ID NO: 293884 - DNA, 30 bp, Artificial Sequence
  Synthetic oligonucleotide
tgccttctattgcctaaaaaagccaggccg

SEQ ID NO: 293885 - DNA, 30 bp, Artificial Sequence
  Synthetic oligonucleotide
ggggaacaggtggatcatcaggccaggccg

SEQ ID NO: 293886 - DNA, 30 bp, Artificial Sequence
  Synthetic oligonucleotide
gcccggtcagaaacctctccgttgaggccg

SEQ ID NO: 293887 - DNA, 30 bp, Artificial Sequence
  Synthetic oligonucleotide
agtttgccggtcgctctcgggaaacggccg

SEQ ID NO: 293888 - DNA, 30 bp, Artificial Sequence
  Synthetic oligonucleotide
gagttatgactccaggatattatacggccg

SEQ ID NO: 293889 - DNA, 30 bp, Artificial Sequence
  Synthetic oligonucleotide
aaattgtaatatttgatttccaagcggccg

SEQ ID NO: 293890 - DNA, 30 bp, Artificial Sequence
  Synthetic oligonucleotide
ttccgtgagtgaaagggtctggagcggccg

SEQ ID NO: 293891 - DNA, 30 bp, Artificial Sequence
  Synthetic oligonucleotide
ccgaggttgcgagccaagaacacgcggccg

SEQ ID NO: 293892 - DNA, 30 bp, Artificial Sequence
  Synthetic oligonucleotide
tagcatcccctagtggggaggcctcggccg

SEQ ID NO: 293893 - DNA, 30 bp, Artificial Sequence
  Synthetic oligonucleotide
ccgtccagctttaaatcccgccttcggccg

SEQ ID NO: 293894 - DNA, 31 bp, Artificial Sequence
  Synthetic oligonucleotide
acagacacatgccgctgggggccgggggccg

SEQ ID NO: 293895 - DNA, 30 bp, Artificial Sequence
  Synthetic oligonucleotide
gaatatcttataatcgccgccatggggccg

SEQ ID NO: 293896 - DNA, 30 bp, Artificial Sequence
  Synthetic oligonucleotide
tcctgtgaagatgtagcaatgaaatggccg

SEQ ID NO: 293897 - DNA, 30 bp, Artificial Sequence
  Synthetic oligonucleotide
ccgatggtgtgtagcagcggataatggccg

SEQ ID NO: 293898 - DNA, 30 bp, Artificial Sequence
  Synthetic oligonucleotide
taccgtccttcttaaccaggggcatggccg

SEQ ID NO: 293899 - DNA, 30 bp, Artificial Sequence
  Synthetic oligonucleotide
ccatagcccggggattgcaaatgatggccg

SEQ ID NO: 293900 - DNA, 30 bp, Artificial Sequence
  Synthetic oligonucleotide
cacgctggaaaatgttctcggatatggccg

SEQ ID NO: 293901 - DNA, 30 bp, Artificial Sequence
  Synthetic oligonucleotide
cgttacgcgtacgtcttcgtccgctggccg

SEQ ID NO: 293902 - DNA, 30 bp, Artificial Sequence
  Synthetic oligonucleotide
catcgccgggtgagtttgtcaggaatgccg

SEQ ID NO: 293903 - DNA, 30 bp, Artificial Sequence
  Synthetic oligonucleotide
gtacatggggtagatgcgtctaacatgccg

SEQ ID NO: 293904 - DNA, 30 bp, Artificial Sequence
  Synthetic oligonucleotide
ttccgagagctaaacgataatgtcatgccg

SEQ ID NO: 293905 - DNA, 30 bp, Artificial Sequence
  Synthetic oligonucleotide
cgcgtgtcaacagatgggcgagcactgccg

SEQ ID NO: 293906 - DNA, 30 bp, Artificial Sequence
  Synthetic oligonucleotide
caacttagtcctccaacgatccacctgccg

SEQ ID NO: 293907 - DNA, 30 bp, Artificial Sequence
  Synthetic oligonucleotide
acccggacacaggaaccagcacggctgccg

SEQ ID NO: 293908 - DNA, 30 bp, Artificial Sequence
  Synthetic oligonucleotide
atttgtcgattttcaggaccttatctgccg

SEQ ID NO: 293909 - DNA, 30 bp, Artificial Sequence
  Synthetic oligonucleotide
aggctaaagcgctggcacactcgcgtgccg

SEQ ID NO: 293910 - DNA, 30 bp, Artificial Sequence
  Synthetic oligonucleotide
gatcaaaagtggtgtctacctccggtgccg

SEQ ID NO: 293911 - DNA, 30 bp, Artificial Sequence
  Synthetic oligonucleotide
gggacggcgtcgaggtcaaacgttgtgccg

SEQ ID NO: 293912 - DNA, 30 bp, Artificial Sequence
  Synthetic oligonucleotide
tgcgcatattgctaggcttcggaattgccg

SEQ ID NO: 293913 - DNA, 30 bp, Artificial Sequence
  Synthetic oligonucleotide
caaagtcagcaataaaggggctagttgccg

SEQ ID NO: 293914 - DNA, 30 bp, Artificial Sequence
  Synthetic oligonucleotide
aaccactggttatgattttggtcgttgccg

SEQ ID NO: 293915 - DNA, 30 bp, Artificial Sequence
  Synthetic oligonucleotide
ggaaactctagttcggatttattgttgccg

SEQ ID NO: 293916 - DNA, 30 bp, Artificial Sequence
  Synthetic oligonucleotide
cacgggcgcaagcttccgtgccctttgccg

SEQ ID NO: 293917 - DNA, 30 bp, Artificial Sequence
  Synthetic oligonucleotide
gacgcaactctgtgcgcccgtgaaaatccg

SEQ ID NO: 293918 - DNA, 30 bp, Artificial Sequence
  Synthetic oligonucleotide
atgtgttgacttgttcgggcaacaaatccg

SEQ ID NO: 293919 - DNA, 30 bp, Artificial Sequence
  Synthetic oligonucleotide
gcgggggaggttacatgtagcttgaatccg

SEQ ID NO: 293920 - DNA, 30 bp, Artificial Sequence
  Synthetic oligonucleotide
cttaggaaatgatataaacctaataatccg

SEQ ID NO: 293921 - DNA, 30 bp, Artificial Sequence
  Synthetic oligonucleotide
tctgggtatgcgtgggacatgggtcatccg

SEQ ID NO: 293922 - DNA, 30 bp, Artificial Sequence
  Synthetic oligonucleotide
ttactagtgccacctaagggtaaagatccg

SEQ ID NO: 293923 - DNA, 30 bp, Artificial Sequence
  Synthetic oligonucleotide
aaacgtcggacaatgtccattaaagatccg

SEQ ID NO: 293924 - DNA, 30 bp, Artificial Sequence
  Synthetic oligonucleotide
tcgaataggcgccgcaaagtgagagatccg

SEQ ID NO: 293925 - DNA, 30 bp, Artificial Sequence
  Synthetic oligonucleotide
cgctgacggttaattgagatatacgatccg

SEQ ID NO: 293926 - DNA, 30 bp, Artificial Sequence
  Synthetic oligonucleotide
gaagcctctagtttgggcaatcccgatccg

SEQ ID NO: 293927 - DNA, 30 bp, Artificial Sequence
  Synthetic oligonucleotide
gtcctgattacccgactttacggcgatccg

SEQ ID NO: 293928 - DNA, 30 bp, Artificial Sequence
  Synthetic oligonucleotide
gctatcgagagccaatttctctgcgatccg

SEQ ID NO: 293929 - DNA, 30 bp, Artificial Sequence
  Synthetic oligonucleotide
taattcatagttagtctgtttctcgatccg

SEQ ID NO: 293930 - DNA, 30 bp, Artificial Sequence
  Synthetic oligonucleotide
tcaatcgagttaaggcccccagaatatccg

SEQ ID NO: 293931 - DNA, 30 bp, Artificial Sequence
  Synthetic oligonucleotide
accgtagtgatgagtgttgggatatatccg

SEQ ID NO: 293932 - DNA, 30 bp, Artificial Sequence
  Synthetic oligonucleotide
tgagttgaccagcgactggtgatctatccg

SEQ ID NO: 293933 - DNA, 30 bp, Artificial Sequence
  Synthetic oligonucleotide
tggccgcccttcagctgcaccttctatccg

SEQ ID NO: 293934 - DNA, 30 bp, Artificial Sequence
  Synthetic oligonucleotide
atgcatgggtgaaagataatgtagtatccg

SEQ ID NO: 293935 - DNA, 30 bp, Artificial Sequence
  Synthetic oligonucleotide
ttagcgaagatgattgctcaggcttatccg

SEQ ID NO: 293936 - DNA, 30 bp, Artificial Sequence
  Synthetic oligonucleotide
aaggattggccacattcatggcgttatccg

SEQ ID NO: 293937 - DNA, 30 bp, Artificial Sequence
  Synthetic oligonucleotide
gcttggagtgccgaacagcccgcaactccg

SEQ ID NO: 293938 - DNA, 30 bp, Artificial Sequence
  Synthetic oligonucleotide
cgaccgataagaactcaaaggggaactccg

SEQ ID NO: 293939 - DNA, 30 bp, Artificial Sequence
  Synthetic oligonucleotide
cccttggaatacaggagtacccacactccg

SEQ ID NO: 293940 - DNA, 30 bp, Artificial Sequence
  Synthetic oligonucleotide
actatatggcttgtagtgaatccgactccg

SEQ ID NO: 293941 - DNA, 30 bp, Artificial Sequence
  Synthetic oligonucleotide
agctacgtaaggcacagactgactactccg

SEQ ID NO: 293942 - DNA, 30 bp, Artificial Sequence
  Synthetic oligonucleotide
atttggaagaggtcagatgtccttactccg

SEQ ID NO: 293943 - DNA, 30 bp, Artificial Sequence
  Synthetic oligonucleotide
cataaccccgcgtagattctccaacctccg

SEQ ID NO: 293944 - DNA, 30 bp, Artificial Sequence
  Synthetic oligonucleotide
ggaacattgatcaccaatcatacacctccg

SEQ ID NO: 293945 - DNA, 30 bp, Artificial Sequence
  Synthetic oligonucleotide
gcacggaatagatatccgcgtttccctccg

SEQ ID NO: 293946 - DNA, 30 bp, Artificial Sequence
  Synthetic oligonucleotide
atctgttggcatgtacgtctgccgcctccg

SEQ ID NO: 293947 - DNA, 30 bp, Artificial Sequence
  Synthetic oligonucleotide
acaaagtatcagtacgtcctccatcctccg

SEQ ID NO: 293948 - DNA, 30 bp, Artificial Sequence
  Synthetic oligonucleotide
aggatatcgtcacgtcgaggtatagctccg

SEQ ID NO: 293949 - DNA, 30 bp, Artificial Sequence
  Synthetic oligonucleotide
cttcatgggtaggacagagctctcgctccg

SEQ ID NO: 293950 - DNA, 30 bp, Artificial Sequence
  Synthetic oligonucleotide
gtcaagtggataattgaggaataggctccg

SEQ ID NO: 293951 - DNA, 30 bp, Artificial Sequence
  Synthetic oligonucleotide
cagaaaccgcggaggtttcgttatgctccg

SEQ ID NO: 293952 - DNA, 30 bp, Artificial Sequence
  Synthetic oligonucleotide
tcccggtggactgttattccagttgctccg

SEQ ID NO: 293953 - DNA, 30 bp, Artificial Sequence
  Synthetic oligonucleotide
ttgctggggctcatcctcgtcggctctccg

SEQ ID NO: 293954 - DNA, 30 bp, Artificial Sequence
  Synthetic oligonucleotide
ccgcgctattcagacactatagggtctccg

SEQ ID NO: 293955 - DNA, 30 bp, Artificial Sequence
  Synthetic oligonucleotide
gagtagattcgtcccgaataaaattctccg

SEQ ID NO: 293956 - DNA, 30 bp, Artificial Sequence
  Synthetic oligonucleotide
tcccccaaggtttttacgtgacaaagtccg

SEQ ID NO: 293957 - DNA, 30 bp, Artificial Sequence
  Synthetic oligonucleotide
agtcctgaggcacggtagggtctaagtccg

SEQ ID NO: 293958 - DNA, 30 bp, Artificial Sequence
  Synthetic oligonucleotide
tgtgaagttataagccctgagaccagtccg

SEQ ID NO: 293959 - DNA, 30 bp, Artificial Sequence
  Synthetic oligonucleotide
accccatcttgtttgggtaggagcagtccg

SEQ ID NO: 293960 - DNA, 30 bp, Artificial Sequence
  Synthetic oligonucleotide
ttgatggtgcctcgcctccccatgagtccg

SEQ ID NO: 293961 - DNA, 30 bp, Artificial Sequence
  Synthetic oligonucleotide
tcccggggcagctactatcctttgagtccg

SEQ ID NO: 293962 - DNA, 30 bp, Artificial Sequence
  Synthetic oligonucleotide
ttcgctaagcactaatacgcccaccgtccg

SEQ ID NO: 293963 - DNA, 30 bp, Artificial Sequence
  Synthetic oligonucleotide
ggggcgtatgccgggctttcaagccgtccg

SEQ ID NO: 293964 - DNA, 30 bp, Artificial Sequence
  Synthetic oligonucleotide
tgtaagcatggtcggggcgactgccgtccg

SEQ ID NO: 293965 - DNA, 30 bp, Artificial Sequence
  Synthetic oligonucleotide
acccttggcattggcgcgctactccgtccg

SEQ ID NO: 293966 - DNA, 30 bp, Artificial Sequence
  Synthetic oligonucleotide
aagtaagccttcagcttgtttcagcgtccg

SEQ ID NO: 293967 - DNA, 30 bp, Artificial Sequence
  Synthetic oligonucleotide
ttacagggtctatagggaactcatcgtccg

SEQ ID NO: 293968 - DNA, 30 bp, Artificial Sequence
  Synthetic oligonucleotide
ttatatttatcgcccgatcttcatcgtccg

SEQ ID NO: 293969 - DNA, 30 bp, Artificial Sequence
  Synthetic oligonucleotide
tcagacgccacattatgtccctgaggtccg

SEQ ID NO: 293970 - DNA, 30 bp, Artificial Sequence
  Synthetic oligonucleotide
agtgacccgtctcattgagtgataggtccg

SEQ ID NO: 293971 - DNA, 30 bp, Artificial Sequence
  Synthetic oligonucleotide
agctttagctttgtggaatcacacggtccg

SEQ ID NO: 293972 - DNA, 30 bp, Artificial Sequence
  Synthetic oligonucleotide
ttgctgctgcttaactcagtatatggtccg

SEQ ID NO: 293973 - DNA, 30 bp, Artificial Sequence
  Synthetic oligonucleotide
agcaaccgtcccatggacggctttggtccg

SEQ ID NO: 293974 - DNA, 30 bp, Artificial Sequence
  Synthetic oligonucleotide
gagccaagatgtagttatgggggatgtccg

SEQ ID NO: 293975 - DNA, 30 bp, Artificial Sequence
  Synthetic oligonucleotide
aggggggacctagcggtgagttactgtccg

SEQ ID NO: 293976 - DNA, 30 bp, Artificial Sequence
  Synthetic oligonucleotide
caacagaactccctcttgtacacaattccg

SEQ ID NO: 293977 - DNA, 30 bp, Artificial Sequence
  Synthetic oligonucleotide
caaatttctcggatgggttggccaattccg

SEQ ID NO: 293978 - DNA, 30 bp, Artificial Sequence
  Synthetic oligonucleotide
taagtgagaatcggcttgattcgaattccg

SEQ ID NO: 293979 - DNA, 30 bp, Artificial Sequence
  Synthetic oligonucleotide
cagcgacaccgtaaaggctcgctaattccg

SEQ ID NO: 293980 - DNA, 30 bp, Artificial Sequence
  Synthetic oligonucleotide
acgtggacgtatccagaaatgcacattccg

SEQ ID NO: 293981 - DNA, 30 bp, Artificial Sequence
  Synthetic oligonucleotide
tcttcccgtgtggcaatagacatcattccg

SEQ ID NO: 293982 - DNA, 30 bp, Artificial Sequence
  Synthetic oligonucleotide
gccggtctctaagcggtttcaaagattccg

SEQ ID NO: 293983 - DNA, 30 bp, Artificial Sequence
  Synthetic oligonucleotide
caggtgaaaggatggaacgcacggattccg

SEQ ID NO: 293984 - DNA, 30 bp, Artificial Sequence
  Synthetic oligonucleotide
tgtcggaggactacggagattgtacttccg

SEQ ID NO: 293985 - DNA, 30 bp, Artificial Sequence
  Synthetic oligonucleotide
ttatgcttcggtgcatataaggaccttccg

SEQ ID NO: 293986 - DNA, 30 bp, Artificial Sequence
  Synthetic oligonucleotide
acgattgcaccttagtgattatcgcttccg

SEQ ID NO: 293987 - DNA, 30 bp, Artificial Sequence
  Synthetic oligonucleotide
gaagcatatctatgatataggtcgcttccg

SEQ ID NO: 293988 - DNA, 30 bp, Artificial Sequence
  Synthetic oligonucleotide
actaattggacggtgaggttcttgcttccg

SEQ ID NO: 293989 - DNA, 30 bp, Artificial Sequence
  Synthetic oligonucleotide
tcgcgtaagatggcctgtggccccgttccg

SEQ ID NO: 293990 - DNA, 30 bp, Artificial Sequence
  Synthetic oligonucleotide
tttgaatctacttcttacacaagggttccg

SEQ ID NO: 293991 - DNA, 30 bp, Artificial Sequence
  Synthetic oligonucleotide
gtcacagatattgcgatatgaaaatttccg

SEQ ID NO: 293992 - DNA, 30 bp, Artificial Sequence
  Synthetic oligonucleotide
tatggagggcagacgtttaataagtttccg

SEQ ID NO: 293993 - DNA, 30 bp, Artificial Sequence
  Synthetic oligonucleotide
atggtgtagagtgcacgacactcgtttccg

SEQ ID NO: 293994 - DNA, 30 bp, Artificial Sequence
  Synthetic oligonucleotide
gtgctggttaatatacgggctacaaaagcg

SEQ ID NO: 293995 - DNA, 30 bp, Artificial Sequence
  Synthetic oligonucleotide
gatgcggaacatcgagatattcttaaagcg

SEQ ID NO: 293996 - DNA, 30 bp, Artificial Sequence
  Synthetic oligonucleotide
catatcctaaggaaggtcatcggacaagcg

SEQ ID NO: 293997 - DNA, 30 bp, Artificial Sequence
  Synthetic oligonucleotide
gtctctggtgccgggcttatacgccaagcg

SEQ ID NO: 293998 - DNA, 30 bp, Artificial Sequence
  Synthetic oligonucleotide
ggaagcgcgcaaatctgcagcgtgcaagcg

SEQ ID NO: 293999 - DNA, 30 bp, Artificial Sequence
  Synthetic oligonucleotide
aaaggtggtagaggtagtggatacgaagcg

SEQ ID NO: 294000 - DNA, 30 bp, Artificial Sequence
  Synthetic oligonucleotide
tgttagcccgtccctaccttgggcgaagcg

SEQ ID NO: 294001 - DNA, 30 bp, Artificial Sequence
  Synthetic oligonucleotide
acgtcgagaagctttagcaggctcgaagcg

SEQ ID NO: 294002 - DNA, 30 bp, Artificial Sequence
  Synthetic oligonucleotide
tgtgcgataacagggtccgccactgaagcg

SEQ ID NO: 294003 - DNA, 30 bp, Artificial Sequence
  Synthetic oligonucleotide
cgaatgtagacgtaatgcgcatcataagcg

SEQ ID NO: 294004 - DNA, 30 bp, Artificial Sequence
  Synthetic oligonucleotide
ttattatgtcgttcagccagaagctaagcg

SEQ ID NO: 294005 - DNA, 30 bp, Artificial Sequence
  Synthetic oligonucleotide
gccacggttggaagttggttgggctaagcg

SEQ ID NO: 294006 - DNA, 30 bp, Artificial Sequence
  Synthetic oligonucleotide
gtcgattgatgattagcataagagtaagcg

SEQ ID NO: 294007 - DNA, 30 bp, Artificial Sequence
  Synthetic oligonucleotide
gcgccgacgcaaagtacctgcccttaagcg

SEQ ID NO: 294008 - DNA, 30 bp, Artificial Sequence
  Synthetic oligonucleotide
tttactacgttcgaggtggacagttaagcg

SEQ ID NO: 294009 - DNA, 30 bp, Artificial Sequence
  Synthetic oligonucleotide
ccgccctaccgggccatccgagtttaagcg

SEQ ID NO: 294010 - DNA, 30 bp, Artificial Sequence
  Synthetic oligonucleotide
agtgacggtggttttatgcttacaacagcg

SEQ ID NO: 294011 - DNA, 30 bp, Artificial Sequence
  Synthetic oligonucleotide
ttaggattcgcataaaaacctggcacagcg

SEQ ID NO: 294012 - DNA, 30 bp, Artificial Sequence
  Synthetic oligonucleotide
taatctgggtaaaggggtaatgctacagcg

SEQ ID NO: 294013 - DNA, 30 bp, Artificial Sequence
  Synthetic oligonucleotide
attcgagcagtgcatatttgacttacagcg

SEQ ID NO: 294014 - DNA, 30 bp, Artificial Sequence
  Synthetic oligonucleotide
cagggatgccgaaacaggtgccccccagcg

SEQ ID NO: 294015 - DNA, 30 bp, Artificial Sequence
  Synthetic oligonucleotide
cacaaagaggttccatgtatcttcccagcg

SEQ ID NO: 294016 - DNA, 30 bp, Artificial Sequence
  Synthetic oligonucleotide
tgaacaaagggaccgcgctacaagccagcg

SEQ ID NO: 294017 - DNA, 30 bp, Artificial Sequence
  Synthetic oligonucleotide
gtgcttcgtgcctagcttacatagccagcg

SEQ ID NO: 294018 - DNA, 30 bp, Artificial Sequence
  Synthetic oligonucleotide
ttctgctgcaggtgtacccaatcgccagcg

SEQ ID NO: 294019 - DNA, 30 bp, Artificial Sequence
  Synthetic oligonucleotide
gtatttcactcaagagaatactccgcagcg

SEQ ID NO: 294020 - DNA, 30 bp, Artificial Sequence
  Synthetic oligonucleotide
tgtacgcgaacgattgagtagcaggcagcg

SEQ ID NO: 294021 - DNA, 30 bp, Artificial Sequence
  Synthetic oligonucleotide
atggagtatagccataacatttttgcagcg

SEQ ID NO: 294022 - DNA, 30 bp, Artificial Sequence
  Synthetic oligonucleotide
agtcagccggatggggatagattgtcagcg

SEQ ID NO: 294023 - DNA, 30 bp, Artificial Sequence
  Synthetic oligonucleotide
tgttccccgccctttctaagctaaagagcg

SEQ ID NO: 294024 - DNA, 30 bp, Artificial Sequence
  Synthetic oligonucleotide
taggaccgatcacattgcgattgaagagcg

SEQ ID NO: 294025 - DNA, 30 bp, Artificial Sequence
  Synthetic oligonucleotide
taaaggttagcggactctaccataagagcg

SEQ ID NO: 294026 - DNA, 30 bp, Artificial Sequence
  Synthetic oligonucleotide
tacttaatagctatcatgcgcgcacgagcg

SEQ ID NO: 294027 - DNA, 30 bp, Artificial Sequence
  Synthetic oligonucleotide
atttgtcatcggcacggtcgagaccgagcg

SEQ ID NO: 294028 - DNA, 30 bp, Artificial Sequence
  Synthetic oligonucleotide
acgcacttcagatatcgcgaggtgcgagcg

SEQ ID NO: 294029 - DNA, 30 bp, Artificial Sequence
  Synthetic oligonucleotide
gaaagatcttgctttccaggcattcgagcg

SEQ ID NO: 294030 - DNA, 26 bp, Artificial Sequence
  Synthetic oligonucleotide
aaatgtctgaataatatcaaggagcg

SEQ ID NO: 294031 - DNA, 30 bp, Artificial Sequence
  Synthetic oligonucleotide
gtgctaactacccatccaccacacggagcg

SEQ ID NO: 294032 - DNA, 30 bp, Artificial Sequence
  Synthetic oligonucleotide
taatatggaggcactcctctttgcggagcg

SEQ ID NO: 294033 - DNA, 30 bp, Artificial Sequence
  Synthetic oligonucleotide
atagggcgctataaacgcgtaaagggagcg

SEQ ID NO: 294034 - DNA, 30 bp, Artificial Sequence
  Synthetic oligonucleotide
tccatggattaaaaccatctctatggagcg

SEQ ID NO: 294035 - DNA, 30 bp, Artificial Sequence
  Synthetic oligonucleotide
gtgctgagggcgtaaagaaggtctggagcg

SEQ ID NO: 294036 - DNA, 30 bp, Artificial Sequence
  Synthetic oligonucleotide
taaccccaaataggctatcctccatgagcg

SEQ ID NO: 294037 - DNA, 30 bp, Artificial Sequence
  Synthetic oligonucleotide
tcctccgccattgaagtattatgatgagcg

SEQ ID NO: 294038 - DNA, 30 bp, Artificial Sequence
  Synthetic oligonucleotide
caagataacattgagatgaagcgttgagcg

SEQ ID NO: 294039 - DNA, 30 bp, Artificial Sequence
  Synthetic oligonucleotide
agcaggctgtttgacggaagttgttgagcg

SEQ ID NO: 294040 - DNA, 30 bp, Artificial Sequence
  Synthetic oligonucleotide
tcctggacatcgtctcacgccctttgagcg

SEQ ID NO: 294041 - DNA, 30 bp, Artificial Sequence
  Synthetic oligonucleotide
ttttgctccactgagctatagggaatagcg

SEQ ID NO: 294042 - DNA, 30 bp, Artificial Sequence
  Synthetic oligonucleotide
tcatgcaggggcagccattgtttgatagcg

SEQ ID NO: 294043 - DNA, 30 bp, Artificial Sequence
  Synthetic oligonucleotide
gcaaacccactgaggtgtgcgaacctagcg

SEQ ID NO: 294044 - DNA, 30 bp, Artificial Sequence
  Synthetic oligonucleotide
ccaacgcattcggagtaggcttaagtagcg

SEQ ID NO: 294045 - DNA, 30 bp, Artificial Sequence
  Synthetic oligonucleotide
gaccggcagtctgagtggcacggtgtagcg

SEQ ID NO: 294046 - DNA, 30 bp, Artificial Sequence
  Synthetic oligonucleotide
cgttcatccgggcacatgtgtgcattagcg

SEQ ID NO: 294047 - DNA, 30 bp, Artificial Sequence
  Synthetic oligonucleotide
gaacgctatcctggagtaccccgattagcg

SEQ ID NO: 294048 - DNA, 30 bp, Artificial Sequence
  Synthetic oligonucleotide
gttagatagacgggcaagggatggttagcg

SEQ ID NO: 294049 - DNA, 30 bp, Artificial Sequence
  Synthetic oligonucleotide
ctaagtgataacccttggattttgttagcg

SEQ ID NO: 294050 - DNA, 30 bp, Artificial Sequence
  Synthetic oligonucleotide
taagcatatcaaaggggggaggctttagcg

SEQ ID NO: 294051 - DNA, 30 bp, Artificial Sequence
  Synthetic oligonucleotide
tagaaaaatgggacattatgtgctttagcg

SEQ ID NO: 294052 - DNA, 30 bp, Artificial Sequence
  Synthetic oligonucleotide
ggaccatttattttactaagatctttagcg

SEQ ID NO: 294053 - DNA, 30 bp, Artificial Sequence
  Synthetic oligonucleotide
aatgactcccgttgaaagtagggaaacgcg

SEQ ID NO: 294054 - DNA, 30 bp, Artificial Sequence
  Synthetic oligonucleotide
gcagcgccactagtgctagtcctaaacgcg

SEQ ID NO: 294055 - DNA, 30 bp, Artificial Sequence
  Synthetic oligonucleotide
atacaagccaacctgcgcagtcagaacgcg

SEQ ID NO: 294056 - DNA, 30 bp, Artificial Sequence
  Synthetic oligonucleotide
ttattgtactcgaataaggtccctaacgcg

SEQ ID NO: 294057 - DNA, 30 bp, Artificial Sequence
  Synthetic oligonucleotide
tgccggagctaagtgcgcgctgctaacgcg

SEQ ID NO: 294058 - DNA, 30 bp, Artificial Sequence
  Synthetic oligonucleotide
gcgagctggtctctaaagggtcaacacgcg

SEQ ID NO: 294059 - DNA, 30 bp, Artificial Sequence
  Synthetic oligonucleotide
cccgccacagggacagcccgataccacgcg

SEQ ID NO: 294060 - DNA, 30 bp, Artificial Sequence
  Synthetic oligonucleotide
caaaggtttatggacactcggactcacgcg

SEQ ID NO: 294061 - DNA, 30 bp, Artificial Sequence
  Synthetic oligonucleotide
gggagaaactacgtccggactgttcacgcg

SEQ ID NO: 294062 - DNA, 30 bp, Artificial Sequence
  Synthetic oligonucleotide
aaactccgtacatgaagagagtttcacgcg

SEQ ID NO: 294063 - DNA, 30 bp, Artificial Sequence
  Synthetic oligonucleotide
gagagaatcgactgagcccgggtagacgcg

SEQ ID NO: 294064 - DNA, 30 bp, Artificial Sequence
  Synthetic oligonucleotide
gtgaaggacttacgttcgacataggacgcg

SEQ ID NO: 294065 - DNA, 30 bp, Artificial Sequence
  Synthetic oligonucleotide
ggacccatgatttccaggcccccggacgcg

SEQ ID NO: 294066 - DNA, 30 bp, Artificial Sequence
  Synthetic oligonucleotide
ccagtgatagatgattgcaaagaatacgcg

SEQ ID NO: 294067 - DNA, 30 bp, Artificial Sequence
  Synthetic oligonucleotide
atagattgctagtactctcaataatacgcg

SEQ ID NO: 294068 - DNA, 30 bp, Artificial Sequence
  Synthetic oligonucleotide
gtgggtctaaaatgccgcctcggatacgcg

SEQ ID NO: 294069 - DNA, 30 bp, Artificial Sequence
  Synthetic oligonucleotide
gcgaaggcgtacactgcaacggtatacgcg

SEQ ID NO: 294070 - DNA, 30 bp, Artificial Sequence
  Synthetic oligonucleotide
ctagtctggccatctaaacctaagtacgcg

SEQ ID NO: 294071 - DNA, 30 bp, Artificial Sequence
  Synthetic oligonucleotide
tccatggcgtgttgggggaagccgtacgcg

SEQ ID NO: 294072 - DNA, 30 bp, Artificial Sequence
  Synthetic oligonucleotide
atgcttcaagacacattcggtttgtacgcg

SEQ ID NO: 294073 - DNA, 30 bp, Artificial Sequence
  Synthetic oligonucleotide
tctagccacttcagagtttgatattacgcg

SEQ ID NO: 294074 - DNA, 30 bp, Artificial Sequence
  Synthetic oligonucleotide
actgtaaactagcattaccgaagttacgcg

SEQ ID NO: 294075 - DNA, 30 bp, Artificial Sequence
  Synthetic oligonucleotide
cgggttacacggctccgacagttaaccgcg

SEQ ID NO: 294076 - DNA, 30 bp, Artificial Sequence
  Synthetic oligonucleotide
gccatactatattcatagatgcacaccgcg

SEQ ID NO: 294077 - DNA, 30 bp, Artificial Sequence
  Synthetic oligonucleotide
atgctggcatctcgcgtaactaataccgcg

SEQ ID NO: 294078 - DNA, 30 bp, Artificial Sequence
  Synthetic oligonucleotide
ctcagggtgtcccgtacacatggtaccgcg

SEQ ID NO: 294079 - DNA, 30 bp, Artificial Sequence
  Synthetic oligonucleotide
cgggaaaaggagcaagacgatgcagccgcg

SEQ ID NO: 294080 - DNA, 30 bp, Artificial Sequence
  Synthetic oligonucleotide
accttgtgcgctgtggctattgccgccgcg

SEQ ID NO: 294081 - DNA, 30 bp, Artificial Sequence
  Synthetic oligonucleotide
attgctagagtgagtggggtccgcgccgcg

SEQ ID NO: 294082 - DNA, 30 bp, Artificial Sequence
  Synthetic oligonucleotide
gtcacccctcatggcttcgtatcggccgcg

SEQ ID NO: 294083 - DNA, 30 bp, Artificial Sequence
  Synthetic oligonucleotide
atcgaacacacgcaccgtctgtcggccgcg

SEQ ID NO: 294084 - DNA, 30 bp, Artificial Sequence
  Synthetic oligonucleotide
tgtagcggtagctgtactacaaatgccgcg

SEQ ID NO: 294085 - DNA, 30 bp, Artificial Sequence
  Synthetic oligonucleotide
gacgtacggcgggagactaggagatccgcg

SEQ ID NO: 294086 - DNA, 30 bp, Artificial Sequence
  Synthetic oligonucleotide
cggtccggctatgcgctggctatatccgcg

SEQ ID NO: 294087 - DNA, 30 bp, Artificial Sequence
  Synthetic oligonucleotide
ccggtcagaacgtggcccggaaagtccgcg

SEQ ID NO: 294088 - DNA, 30 bp, Artificial Sequence
  Synthetic oligonucleotide
tatcgtactttgtaaccactgggaagcgcg

SEQ ID NO: 294089 - DNA, 30 bp, Artificial Sequence
  Synthetic oligonucleotide
ttatgtacattagggtttttctacagcgcg

SEQ ID NO: 294090 - DNA, 30 bp, Artificial Sequence
  Synthetic oligonucleotide
gatcggatccgacggtgatgtcttagcgcg

SEQ ID NO: 294091 - DNA, 30 bp, Artificial Sequence
  Synthetic oligonucleotide
aacagtagatctgtatgtacaaaacgcgcg

SEQ ID NO: 294092 - DNA, 30 bp, Artificial Sequence
  Synthetic oligonucleotide
tgtgtgtacggacacatttagattcgcgcg

SEQ ID NO: 294093 - DNA, 30 bp, Artificial Sequence
  Synthetic oligonucleotide
aaaatagttgcgcacgtagagggaggcgcg

SEQ ID NO: 294094 - DNA, 30 bp, Artificial Sequence
  Synthetic oligonucleotide
agacgtggttcggggtcgggttccggcgcg

SEQ ID NO: 294095 - DNA, 30 bp, Artificial Sequence
  Synthetic oligonucleotide
cgtcatgcgaagtaggttaacgagggcgcg

SEQ ID NO: 294096 - DNA, 30 bp, Artificial Sequence
  Synthetic oligonucleotide
cgacaaacagtcggggcgttaacgggcgcg

SEQ ID NO: 294097 - DNA, 30 bp, Artificial Sequence
  Synthetic oligonucleotide
gaattggtgctgagattgtgtgttggcgcg

SEQ ID NO: 294098 - DNA, 30 bp, Artificial Sequence
  Synthetic oligonucleotide
gtgtgtatgtgcgtctgtggctaatgcgcg

SEQ ID NO: 294099 - DNA, 30 bp, Artificial Sequence
  Synthetic oligonucleotide
agtcagtcactggggagcgtggcatgcgcg

SEQ ID NO: 294100 - DNA, 30 bp, Artificial Sequence
  Synthetic oligonucleotide
gggaattgatggacacgggaagagtgcgcg

SEQ ID NO: 294101 - DNA, 30 bp, Artificial Sequence
  Synthetic oligonucleotide
agcgcgcggacaagaccagttatgtgcgcg

SEQ ID NO: 294102 - DNA, 30 bp, Artificial Sequence
  Synthetic oligonucleotide
tttgaatgtgcattgatctggataatcgcg

SEQ ID NO: 294103 - DNA, 30 bp, Artificial Sequence
  Synthetic oligonucleotide
tcatgtgaaagccaggtcgtagccatcgcg

SEQ ID NO: 294104 - DNA, 30 bp, Artificial Sequence
  Synthetic oligonucleotide
ctgggttatagaagcagacaaggcatcgcg

SEQ ID NO: 294105 - DNA, 30 bp, Artificial Sequence
  Synthetic oligonucleotide
cgtcagcaaagcaagaataaactcctcgcg

SEQ ID NO: 294106 - DNA, 30 bp, Artificial Sequence
  Synthetic oligonucleotide
atggtcagggcgatggtattacggctcgcg

SEQ ID NO: 294107 - DNA, 30 bp, Artificial Sequence
  Synthetic oligonucleotide
tcggggagcatccttactcgtttagtcgcg

SEQ ID NO: 294108 - DNA, 30 bp, Artificial Sequence
  Synthetic oligonucleotide
gatggttgtccgttgtctctcaaggtcgcg

SEQ ID NO: 294109 - DNA, 30 bp, Artificial Sequence
  Synthetic oligonucleotide
atctacagcgactgttcgtgtcatgtcgcg

SEQ ID NO: 294110 - DNA, 30 bp, Artificial Sequence
  Synthetic oligonucleotide
tctgaactcacggggcagatgaaattcgcg

SEQ ID NO: 294111 - DNA, 30 bp, Artificial Sequence
  Synthetic oligonucleotide
cgagggataatccgtcgttctgagttcgcg

SEQ ID NO: 294112 - DNA, 30 bp, Artificial Sequence
  Synthetic oligonucleotide
gcctatgaaccttaattagtttaaaaggcg

SEQ ID NO: 294113 - DNA, 30 bp, Artificial Sequence
  Synthetic oligonucleotide
taagttgcggtaaacgtaataaccaaggcg

SEQ ID NO: 294114 - DNA, 30 bp, Artificial Sequence
  Synthetic oligonucleotide
cgttatgtttttatacaatggacgaaggcg

SEQ ID NO: 294115 - DNA, 30 bp, Artificial Sequence
  Synthetic oligonucleotide
agcaagtggttgaccccaacggcgaaggcg

SEQ ID NO: 294116 - DNA, 30 bp, Artificial Sequence
  Synthetic oligonucleotide
catctctgcgccccgagttacttgaaggcg

SEQ ID NO: 294117 - DNA, 30 bp, Artificial Sequence
  Synthetic oligonucleotide
aagtctctagtcagttttccccctaaggcg

SEQ ID NO: 294118 - DNA, 30 bp, Artificial Sequence
  Synthetic oligonucleotide
gttggttggggggacgtggggggtaaggcg

SEQ ID NO: 294119 - DNA, 30 bp, Artificial Sequence
  Synthetic oligonucleotide
tatgaaaacggtatgggttcatcacaggcg

SEQ ID NO: 294120 - DNA, 30 bp, Artificial Sequence
  Synthetic oligonucleotide
acgtaccgttcactggtttcatcccaggcg

SEQ ID NO: 294121 - DNA, 30 bp, Artificial Sequence
  Synthetic oligonucleotide
tctatacttgcaagaagagagggccaggcg

SEQ ID NO: 294122 - DNA, 30 bp, Artificial Sequence
  Synthetic oligonucleotide
tcccagcaatcgccgagactgccgcaggcg

SEQ ID NO: 294123 - DNA, 30 bp, Artificial Sequence
  Synthetic oligonucleotide
gaaaagccagggtcagggttcatgcaggcg

SEQ ID NO: 294124 - DNA, 30 bp, Artificial Sequence
  Synthetic oligonucleotide
taagcgactctaggaaatgcttgtcaggcg

SEQ ID NO: 294125 - DNA, 30 bp, Artificial Sequence
  Synthetic oligonucleotide
aatgtttctttaaagaaaggaatagaggcg

SEQ ID NO: 294126 - DNA, 30 bp, Artificial Sequence
  Synthetic oligonucleotide
atttaaacttgcacgacaagcgttgaggcg

SEQ ID NO: 294127 - DNA, 30 bp, Artificial Sequence
  Synthetic oligonucleotide
gctctgacggactcgaagacaacctaggcg

SEQ ID NO: 294128 - DNA, 30 bp, Artificial Sequence
  Synthetic oligonucleotide
ctagtagagctggacacaatgtgctaggcg

SEQ ID NO: 294129 - DNA, 30 bp, Artificial Sequence
  Synthetic oligonucleotide
ttcaatacgtgttgtcgcaccgtctaggcg

SEQ ID NO: 294130 - DNA, 30 bp, Artificial Sequence
  Synthetic oligonucleotide
cgtctacccgatcttcgcgaggcgtaggcg

SEQ ID NO: 294131 - DNA, 30 bp, Artificial Sequence
  Synthetic oligonucleotide
gcctatttcttcgaaaccgacgtaacggcg

SEQ ID NO: 294132 - DNA, 30 bp, Artificial Sequence
  Synthetic oligonucleotide
accaatatgtgcttgtaaaaacggacggcg

SEQ ID NO: 294133 - DNA, 30 bp, Artificial Sequence
  Synthetic oligonucleotide
tcattaggtttgagaaggccggtgacggcg

SEQ ID NO: 294134 - DNA, 30 bp, Artificial Sequence
  Synthetic oligonucleotide
ctgtcaggaatgacggactacgcaccggcg

SEQ ID NO: 294135 - DNA, 30 bp, Artificial Sequence
  Synthetic oligonucleotide
gcatgatatgatgttaattcggacccggcg

SEQ ID NO: 294136 - DNA, 30 bp, Artificial Sequence
  Synthetic oligonucleotide
tacgccccagactgtgcaaatcagccggcg

SEQ ID NO: 294137 - DNA, 30 bp, Artificial Sequence
  Synthetic oligonucleotide
ttgtggacttgacacggtaattagccggcg

SEQ ID NO: 294138 - DNA, 30 bp, Artificial Sequence
  Synthetic oligonucleotide
ttactcgcgcgtattgttcgacgagcggcg

SEQ ID NO: 294139 - DNA, 30 bp, Artificial Sequence
  Synthetic oligonucleotide
gatatcatctgcgcagctatcttcgcggcg

SEQ ID NO: 294140 - DNA, 30 bp, Artificial Sequence
  Synthetic oligonucleotide
tcaaagtccttttctttttcgagggcggcg

SEQ ID NO: 294141 - DNA, 30 bp, Artificial Sequence
  Synthetic oligonucleotide
ccgagtggcgtaagctctattggggcggcg

SEQ ID NO: 294142 - DNA, 30 bp, Artificial Sequence
  Synthetic oligonucleotide
atttcgcatccgctcctgactctggcggcg

SEQ ID NO: 294143 - DNA, 30 bp, Artificial Sequence
  Synthetic oligonucleotide
acttagagaaacactatgtttgggtcggcg

SEQ ID NO: 294144 - DNA, 30 bp, Artificial Sequence
  Synthetic oligonucleotide
caagttacatatgtttgtgtaaattcggcg

SEQ ID NO: 294145 - DNA, 31 bp, Artificial Sequence
  Synthetic oligonucleotide
gcaccaccaagctagacacttattaagggcg

SEQ ID NO: 294146 - DNA, 35 bp, Artificial Sequence
  Synthetic oligonucleotide
cagacgcatgatctcctagaaggtgcgttagggcg

SEQ ID NO: 294147 - DNA, 30 bp, Artificial Sequence
  Synthetic oligonucleotide
gagttgggagatacgtcccaactacgggcg

SEQ ID NO: 294148 - DNA, 30 bp, Artificial Sequence
  Synthetic oligonucleotide
gtataacagcatacgtcagtcaaccgggcg

SEQ ID NO: 294149 - DNA, 30 bp, Artificial Sequence
  Synthetic oligonucleotide
tcatcgtgctcgtacatcggtacgcgggcg

SEQ ID NO: 294150 - DNA, 30 bp, Artificial Sequence
  Synthetic oligonucleotide
aaggcggtgtaccggatgtacaggcgggcg

SEQ ID NO: 294151 - DNA, 30 bp, Artificial Sequence
  Synthetic oligonucleotide
agatgagtagtaggtttggaccggcgggcg

SEQ ID NO: 294152 - DNA, 30 bp, Artificial Sequence
  Synthetic oligonucleotide
atatccgcggcatcaggatggacgggggcg

SEQ ID NO: 294153 - DNA, 30 bp, Artificial Sequence
  Synthetic oligonucleotide
caattgctcgtgaccaaagaggttggggcg

SEQ ID NO: 294154 - DNA, 30 bp, Artificial Sequence
  Synthetic oligonucleotide
taccgggttctatactctcgatgatgggcg

SEQ ID NO: 294155 - DNA, 30 bp, Artificial Sequence
  Synthetic oligonucleotide
gtggccagatcactcacatggatatgggcg

SEQ ID NO: 294156 - DNA, 31 bp, Artificial Sequence
  Synthetic oligonucleotide
gaacacgtaacaggcatgaggcacctgggcg

SEQ ID NO: 294157 - DNA, 30 bp, Artificial Sequence
  Synthetic oligonucleotide
aataaacggttgatggctacgccctgggcg

SEQ ID NO: 294158 - DNA, 30 bp, Artificial Sequence
  Synthetic oligonucleotide
gagttcgaaactataatcactagctgggcg

SEQ ID NO: 294159 - DNA, 30 bp, Artificial Sequence
  Synthetic oligonucleotide
tattatgtacatctggcatagttctgggcg

SEQ ID NO: 294160 - DNA, 30 bp, Artificial Sequence
  Synthetic oligonucleotide
ggtccgcgttgataagggtagcagtgggcg

SEQ ID NO: 294161 - DNA, 30 bp, Artificial Sequence
  Synthetic oligonucleotide
tggcaaaacgttgctacgcctctgtgggcg

SEQ ID NO: 294162 - DNA, 29 bp, Artificial Sequence
  Synthetic oligonucleotide
cttcggcgcttcaaggataatacatggcg

SEQ ID NO: 294163 - DNA, 30 bp, Artificial Sequence
  Synthetic oligonucleotide
tggctaccacggtgtcgcgaatccatggcg

SEQ ID NO: 294164 - DNA, 30 bp, Artificial Sequence
  Synthetic oligonucleotide
aatcagggttatagatgcccagagatggcg

SEQ ID NO: 294165 - DNA, 30 bp, Artificial Sequence
  Synthetic oligonucleotide
ttaagttgggacgtaatatacgagatggcg

SEQ ID NO: 294166 - DNA, 30 bp, Artificial Sequence
  Synthetic oligonucleotide
cggggaacccgttcgctgccgtatatggcg

SEQ ID NO: 294167 - DNA, 30 bp, Artificial Sequence
  Synthetic oligonucleotide
cagggaaaagccggcacgcattctatggcg

SEQ ID NO: 294168 - DNA, 30 bp, Artificial Sequence
  Synthetic oligonucleotide
agaaacccactggttgctgactgactggcg

SEQ ID NO: 294169 - DNA, 30 bp, Artificial Sequence
  Synthetic oligonucleotide
gagagtatagactctcaatggatactggcg

SEQ ID NO: 294170 - DNA, 30 bp, Artificial Sequence
  Synthetic oligonucleotide
ctactggtgttcaacggcatacgcctggcg

SEQ ID NO: 294171 - DNA, 30 bp, Artificial Sequence
  Synthetic oligonucleotide
agaatagtgcatcaaaggatggtcctggcg

SEQ ID NO: 294172 - DNA, 30 bp, Artificial Sequence
  Synthetic oligonucleotide
caatcagcgccacaagtaccacagctggcg

SEQ ID NO: 294173 - DNA, 30 bp, Artificial Sequence
  Synthetic oligonucleotide
agaatgggtcacctatcctccctgctggcg

SEQ ID NO: 294174 - DNA, 30 bp, Artificial Sequence
  Synthetic oligonucleotide
aagtaagggtttggtatttcatcagtggcg

SEQ ID NO: 294175 - DNA, 30 bp, Artificial Sequence
  Synthetic oligonucleotide
ctgtatctcaaaatagagaaacatgtggcg

SEQ ID NO: 294176 - DNA, 30 bp, Artificial Sequence
  Synthetic oligonucleotide
ctaggtagctggacaccatgaactgtggcg

SEQ ID NO: 294177 - DNA, 30 bp, Artificial Sequence
  Synthetic oligonucleotide
taccaaatatgaggcccacaggccttggcg

SEQ ID NO: 294178 - DNA, 30 bp, Artificial Sequence
  Synthetic oligonucleotide
cgaaacggcaagtatataaggatcttggcg

SEQ ID NO: 294179 - DNA, 30 bp, Artificial Sequence
  Synthetic oligonucleotide
gcgataagtttaatgctgcatatcttggcg

SEQ ID NO: 294180 - DNA, 30 bp, Artificial Sequence
  Synthetic oligonucleotide
cagggtaggttaaagtcgacactcttggcg

SEQ ID NO: 294181 - DNA, 30 bp, Artificial Sequence
  Synthetic oligonucleotide
gtataaacaactatggagacagtcttggcg

SEQ ID NO: 294182 - DNA, 30 bp, Artificial Sequence
  Synthetic oligonucleotide
gcgacgtgacagccggtatcagttttggcg

SEQ ID NO: 294183 - DNA, 30 bp, Artificial Sequence
  Synthetic oligonucleotide
gtgagaaaagcgctagtgtggtttttggcg

SEQ ID NO: 294184 - DNA, 30 bp, Artificial Sequence
  Synthetic oligonucleotide
cagataacaaagctgctctgcgcaaatgcg

SEQ ID NO: 294185 - DNA, 30 bp, Artificial Sequence
  Synthetic oligonucleotide
gaaaggtttaggaggttatgatcaaatgcg

SEQ ID NO: 294186 - DNA, 30 bp, Artificial Sequence
  Synthetic oligonucleotide
aagtagagtaccgctagagttcccaatgcg

SEQ ID NO: 294187 - DNA, 30 bp, Artificial Sequence
  Synthetic oligonucleotide
attacggcacattctttgtaaagcaatgcg

SEQ ID NO: 294188 - DNA, 30 bp, Artificial Sequence
  Synthetic oligonucleotide
cggcaatttgcctagcggatctcacatgcg

SEQ ID NO: 294189 - DNA, 30 bp, Artificial Sequence
  Synthetic oligonucleotide
tttcgcgtacatttacacgtcgtacatgcg

SEQ ID NO: 294190 - DNA, 30 bp, Artificial Sequence
  Synthetic oligonucleotide
accgctgcacacgagcgtaagagccatgcg

SEQ ID NO: 294191 - DNA, 30 bp, Artificial Sequence
  Synthetic oligonucleotide
accgaaagcccgaccttcatctcagatgcg

SEQ ID NO: 294192 - DNA, 30 bp, Artificial Sequence
  Synthetic oligonucleotide
cggctaaagtagatggtgcgccttgatgcg

SEQ ID NO: 294193 - DNA, 31 bp, Artificial Sequence
  Synthetic oligonucleotide
aatgaacgttttgttctggcgaaaatatgcg

SEQ ID NO: 294194 - DNA, 30 bp, Artificial Sequence
  Synthetic oligonucleotide
gcgcacgttcaaatatttgaagtatatgcg

SEQ ID NO: 294195 - DNA, 30 bp, Artificial Sequence
  Synthetic oligonucleotide
aagactgcggatgtaaacggtctgtatgcg

SEQ ID NO: 294196 - DNA, 30 bp, Artificial Sequence
  Synthetic oligonucleotide
tacactatctagggtttcccattttatgcg

SEQ ID NO: 294197 - DNA, 30 bp, Artificial Sequence
  Synthetic oligonucleotide
tcactacttttggtctggaccctaactgcg

SEQ ID NO: 294198 - DNA, 30 bp, Artificial Sequence
  Synthetic oligonucleotide
ttggtcccctgctttaacagccgtactgcg

SEQ ID NO: 294199 - DNA, 30 bp, Artificial Sequence
  Synthetic oligonucleotide
cggctgggtgtaaggggaacgaaacctgcg

SEQ ID NO: 294200 - DNA, 30 bp, Artificial Sequence
  Synthetic oligonucleotide
ttatctaacccttatgttggagaccctgcg

SEQ ID NO: 294201 - DNA, 30 bp, Artificial Sequence
  Synthetic oligonucleotide
ttatatccacgcttccagccgtaagctgcg

SEQ ID NO: 294202 - DNA, 30 bp, Artificial Sequence
  Synthetic oligonucleotide
atccttaagattttgcgaccacccgctgcg

SEQ ID NO: 294203 - DNA, 30 bp, Artificial Sequence
  Synthetic oligonucleotide
gagctatcggagctgttatgaaatgctgcg

SEQ ID NO: 294204 - DNA, 30 bp, Artificial Sequence
  Synthetic oligonucleotide
cggacaacggtcttggatgatacatctgcg

SEQ ID NO: 294205 - DNA, 30 bp, Artificial Sequence
  Synthetic oligonucleotide
gggggtttgcatacgcaatctatatctgcg

SEQ ID NO: 294206 - DNA, 30 bp, Artificial Sequence
  Synthetic oligonucleotide
aagctggacgacaaggcttatggaagtgcg

SEQ ID NO: 294207 - DNA, 30 bp, Artificial Sequence
  Synthetic oligonucleotide
aaattcggcgggttgtgccgaggcagtgcg

SEQ ID NO: 294208 - DNA, 30 bp, Artificial Sequence
  Synthetic oligonucleotide
atatgaggacactattattctcatagtgcg

SEQ ID NO: 294209 - DNA, 30 bp, Artificial Sequence
  Synthetic oligonucleotide
atgtgggtcgggactacgacacgtcgtgcg

SEQ ID NO: 294210 - DNA, 30 bp, Artificial Sequence
  Synthetic oligonucleotide
gcaacctagaacgcgtaattaaaaggtgcg

SEQ ID NO: 294211 - DNA, 30 bp, Artificial Sequence
  Synthetic oligonucleotide
gtcactatatctatagacggtttaggtgcg

SEQ ID NO: 294212 - DNA, 30 bp, Artificial Sequence
  Synthetic oligonucleotide
accctgtgaccatggaggattttaggtgcg

SEQ ID NO: 294213 - DNA, 30 bp, Artificial Sequence
  Synthetic oligonucleotide
gcgaatcagtcttatttgcatcaatgtgcg

SEQ ID NO: 294214 - DNA, 30 bp, Artificial Sequence
  Synthetic oligonucleotide
tgattctactgtctcgtgtcgtcatgtgcg

SEQ ID NO: 294215 - DNA, 30 bp, Artificial Sequence
  Synthetic oligonucleotide
ctcccaagccttgcagtagttgtatgtgcg

SEQ ID NO: 294216 - DNA, 30 bp, Artificial Sequence
  Synthetic oligonucleotide
gcgggactgagtccaggagggaccattgcg

SEQ ID NO: 294217 - DNA, 30 bp, Artificial Sequence
  Synthetic oligonucleotide
cctattaagttgaagggacaccagattgcg

SEQ ID NO: 294218 - DNA, 30 bp, Artificial Sequence
  Synthetic oligonucleotide
gagctagtatatgaagggttcgagattgcg

SEQ ID NO: 294219 - DNA, 30 bp, Artificial Sequence
  Synthetic oligonucleotide
ggttagattgggaaacagaactcgattgcg

SEQ ID NO: 294220 - DNA, 30 bp, Artificial Sequence
  Synthetic oligonucleotide
gaattcggggtatagtaaatccatattgcg

SEQ ID NO: 294221 - DNA, 30 bp, Artificial Sequence
  Synthetic oligonucleotide
gccacgttatgacccgaatgtcatattgcg

SEQ ID NO: 294222 - DNA, 30 bp, Artificial Sequence
  Synthetic oligonucleotide
gctggaacctcgctattaggcgatcttgcg

SEQ ID NO: 294223 - DNA, 30 bp, Artificial Sequence
  Synthetic oligonucleotide
gtggaccgatctatgagccttactcttgcg

SEQ ID NO: 294224 - DNA, 30 bp, Artificial Sequence
  Synthetic oligonucleotide
gccgtgaggcgccctacttcgggtcttgcg

SEQ ID NO: 294225 - DNA, 30 bp, Artificial Sequence
  Synthetic oligonucleotide
tgaagccaccggtcccatctccgtgttgcg

SEQ ID NO: 294226 - DNA, 30 bp, Artificial Sequence
  Synthetic oligonucleotide
tacggcgattgtagtagaatagcatttgcg

SEQ ID NO: 294227 - DNA, 30 bp, Artificial Sequence
  Synthetic oligonucleotide
ggtagcagtggtgtcagtcttcgatttgcg

SEQ ID NO: 294228 - DNA, 30 bp, Artificial Sequence
  Synthetic oligonucleotide
aaaggcatcagcgttagtctgatatttgcg

SEQ ID NO: 294229 - DNA, 30 bp, Artificial Sequence
  Synthetic oligonucleotide
atcccaaaggagttgtgttatatatttgcg

SEQ ID NO: 294230 - DNA, 30 bp, Artificial Sequence
  Synthetic oligonucleotide
tccttaggccaggtcagggtatactttgcg

SEQ ID NO: 294231 - DNA, 30 bp, Artificial Sequence
  Synthetic oligonucleotide
agttcagacgcctaagggtggtagtttgcg

SEQ ID NO: 294232 - DNA, 30 bp, Artificial Sequence
  Synthetic oligonucleotide
gctccaagggctaatctgcacttgtttgcg

SEQ ID NO: 294233 - DNA, 30 bp, Artificial Sequence
  Synthetic oligonucleotide
gtgtaatggacccgtaaggggaaaaaatcg

SEQ ID NO: 294234 - DNA, 30 bp, Artificial Sequence
  Synthetic oligonucleotide
gtagagtgtagcttcagctttgccaaatcg

SEQ ID NO: 294235 - DNA, 30 bp, Artificial Sequence
  Synthetic oligonucleotide
tacttccggtgaggtctgaatatgaaatcg

SEQ ID NO: 294236 - DNA, 30 bp, Artificial Sequence
  Synthetic oligonucleotide
cggcatacccgtcaggtggttacacaatcg

SEQ ID NO: 294237 - DNA, 30 bp, Artificial Sequence
  Synthetic oligonucleotide
atcaagttagtggattggcggatacaatcg

SEQ ID NO: 294238 - DNA, 30 bp, Artificial Sequence
  Synthetic oligonucleotide
acgaacgctactggttagaccgcgcaatcg

SEQ ID NO: 294239 - DNA, 30 bp, Artificial Sequence
  Synthetic oligonucleotide
ggtcagcgggacttggattctgcgcaatcg

SEQ ID NO: 294240 - DNA, 30 bp, Artificial Sequence
  Synthetic oligonucleotide
tcccaatagttcaaatagggtcatcaatcg

SEQ ID NO: 294241 - DNA, 30 bp, Artificial Sequence
  Synthetic oligonucleotide
ggttacggactggaggagaattaagaatcg

SEQ ID NO: 294242 - DNA, 30 bp, Artificial Sequence
  Synthetic oligonucleotide
aactagcatgaatcattttatgtagaatcg

SEQ ID NO: 294243 - DNA, 30 bp, Artificial Sequence
  Synthetic oligonucleotide
tcgatgtagtgtcccatcttcgcggaatcg

SEQ ID NO: 294244 - DNA, 30 bp, Artificial Sequence
  Synthetic oligonucleotide
caccccgactgcagtatcaaagctgaatcg

SEQ ID NO: 294245 - DNA, 30 bp, Artificial Sequence
  Synthetic oligonucleotide
aacaagtccatcacctccgttggtgaatcg

SEQ ID NO: 294246 - DNA, 30 bp, Artificial Sequence
  Synthetic oligonucleotide
acacaggtgtgtcgcagtttggcataatcg

SEQ ID NO: 294247 - DNA, 30 bp, Artificial Sequence
  Synthetic oligonucleotide
catatgagtaatgccatacgggtataatcg

SEQ ID NO: 294248 - DNA, 30 bp, Artificial Sequence
  Synthetic oligonucleotide
actacgagtattcgagcgcctccctaatcg

SEQ ID NO: 294249 - DNA, 30 bp, Artificial Sequence
  Synthetic oligonucleotide
catagcgtaagcaagcatgcaaagtaatcg

SEQ ID NO: 294250 - DNA, 31 bp, Artificial Sequence
  Synthetic oligonucleotide
ctagttatctatgttgatagctgcgtaatcg

SEQ ID NO: 294251 - DNA, 30 bp, Artificial Sequence
  Synthetic oligonucleotide
accggttgcctgacgtaaggatggtaatcg

SEQ ID NO: 294252 - DNA, 30 bp, Artificial Sequence
  Synthetic oligonucleotide
gctcatttttgtgtcaatagggcgacatcg

SEQ ID NO: 294253 - DNA, 30 bp, Artificial Sequence
  Synthetic oligonucleotide
agatggtttacaggagcagcgctgacatcg

SEQ ID NO: 294254 - DNA, 30 bp, Artificial Sequence
  Synthetic oligonucleotide
ttgcacaaattgtagaaccaggttacatcg

SEQ ID NO: 294255 - DNA, 30 bp, Artificial Sequence
  Synthetic oligonucleotide
gcaggccgtcctggcccaccagtgccatcg

SEQ ID NO: 294256 - DNA, 30 bp, Artificial Sequence
  Synthetic oligonucleotide
tgtgtaaaatcggcggcttccatagcatcg

SEQ ID NO: 294257 - DNA, 30 bp, Artificial Sequence
  Synthetic oligonucleotide
gggttaaacgtgctagtctcccgcgcatcg

SEQ ID NO: 294258 - DNA, 30 bp, Artificial Sequence
  Synthetic oligonucleotide
tgagcaattgacaagtgccgtaaggcatcg

SEQ ID NO: 294259 - DNA, 30 bp, Artificial Sequence
  Synthetic oligonucleotide
tccggtatcgagaggttggccagggcatcg

SEQ ID NO: 294260 - DNA, 30 bp, Artificial Sequence
  Synthetic oligonucleotide
taacaataacaggacctacggtttgcatcg

SEQ ID NO: 294261 - DNA, 30 bp, Artificial Sequence
  Synthetic oligonucleotide
tcgggccggatcccgagagacggatcatcg

SEQ ID NO: 294262 - DNA, 30 bp, Artificial Sequence
  Synthetic oligonucleotide
tgagtttcatttatatatcgggactcatcg

SEQ ID NO: 294263 - DNA, 30 bp, Artificial Sequence
  Synthetic oligonucleotide
acacttcaattgtttttcagtgactcatcg

SEQ ID NO: 294264 - DNA, 30 bp, Artificial Sequence
  Synthetic oligonucleotide
tcctttataggattttccgccaattcatcg

SEQ ID NO: 294265 - DNA, 30 bp, Artificial Sequence
  Synthetic oligonucleotide
cacgctaggcatgattgaacacattcatcg

SEQ ID NO: 294266 - DNA, 30 bp, Artificial Sequence
  Synthetic oligonucleotide
tttaggtgccaatctcacatagcttcatcg

SEQ ID NO: 294267 - DNA, 30 bp, Artificial Sequence
  Synthetic oligonucleotide
ttccattcagggaaccactatcaaagatcg

SEQ ID NO: 294268 - DNA, 30 bp, Artificial Sequence
  Synthetic oligonucleotide
atggttcgagcacgaccaaatcgcagatcg

SEQ ID NO: 294269 - DNA, 30 bp, Artificial Sequence
  Synthetic oligonucleotide
acttccggacttcccaaagatccgagatcg

SEQ ID NO: 294270 - DNA, 30 bp, Artificial Sequence
  Synthetic oligonucleotide
tgtgccgtagtaagaccagcggttagatcg

SEQ ID NO: 294271 - DNA, 30 bp, Artificial Sequence
  Synthetic oligonucleotide
aacgtgagcatgactgtaatctaacgatcg

SEQ ID NO: 294272 - DNA, 30 bp, Artificial Sequence
  Synthetic oligonucleotide
ggagatagaccccctgtctttccacgatcg

SEQ ID NO: 294273 - DNA, 30 bp, Artificial Sequence
  Synthetic oligonucleotide
ggaactcgggtggtactagaaatacgatcg

SEQ ID NO: 294274 - DNA, 30 bp, Artificial Sequence
  Synthetic oligonucleotide
tggagattgatgtctaagcgattacgatcg

SEQ ID NO: 294275 - DNA, 30 bp, Artificial Sequence
  Synthetic oligonucleotide
atcagtctaacatcgatagcgcaccgatcg

SEQ ID NO: 294276 - DNA, 30 bp, Artificial Sequence
  Synthetic oligonucleotide
ctctatccattatcctgtgttaacggatcg

SEQ ID NO: 294277 - DNA, 30 bp, Artificial Sequence
  Synthetic oligonucleotide
tgaacagttaaaacacggccattcggatcg

SEQ ID NO: 294278 - DNA, 30 bp, Artificial Sequence
  Synthetic oligonucleotide
ataacatctaaggtcgggagctatggatcg

SEQ ID NO: 294279 - DNA, 30 bp, Artificial Sequence
  Synthetic oligonucleotide
gctcgagtgttaagcgagcccggatgatcg

SEQ ID NO: 294280 - DNA, 30 bp, Artificial Sequence
  Synthetic oligonucleotide
cctttcatttaggtacagaaatactgatcg

SEQ ID NO: 294281 - DNA, 30 bp, Artificial Sequence
  Synthetic oligonucleotide
ctctgcttgctttataaccatttctgatcg

SEQ ID NO: 294282 - DNA, 30 bp, Artificial Sequence
  Synthetic oligonucleotide
atgttctgtttagggaaccgaaggtgatcg

SEQ ID NO: 294283 - DNA, 30 bp, Artificial Sequence
  Synthetic oligonucleotide
tcggaggcggtttggccttaacggtgatcg

SEQ ID NO: 294284 - DNA, 30 bp, Artificial Sequence
  Synthetic oligonucleotide
gaacacaacattcgataacaatattgatcg

SEQ ID NO: 294285 - DNA, 30 bp, Artificial Sequence
  Synthetic oligonucleotide
agcgttgcattatccagacatcaaatatcg

SEQ ID NO: 294286 - DNA, 30 bp, Artificial Sequence
  Synthetic oligonucleotide
cggcctctaatgcggtcgaaagcaatatcg

SEQ ID NO: 294287 - DNA, 30 bp, Artificial Sequence
  Synthetic oligonucleotide
gcctgtcgataaaacgaatatggaatatcg

SEQ ID NO: 294288 - DNA, 30 bp, Artificial Sequence
  Synthetic oligonucleotide
cggtggtaaatggataaatcaccactatcg

SEQ ID NO: 294289 - DNA, 30 bp, Artificial Sequence
  Synthetic oligonucleotide
aggttataggcattacacttaagactatcg

SEQ ID NO: 294290 - DNA, 30 bp, Artificial Sequence
  Synthetic oligonucleotide
gtcggtcgctcgataagacagtccctatcg

SEQ ID NO: 294291 - DNA, 30 bp, Artificial Sequence
  Synthetic oligonucleotide
gatatcttagaccatctccggaagctatcg

SEQ ID NO: 294292 - DNA, 29 bp, Artificial Sequence
  Synthetic oligonucleotide
aagatgccaagcaatttgatgttctatcg

SEQ ID NO: 294293 - DNA, 30 bp, Artificial Sequence
  Synthetic oligonucleotide
gtgagtgtcctaatgccactttaagtatcg

SEQ ID NO: 294294 - DNA, 30 bp, Artificial Sequence
  Synthetic oligonucleotide
gaatcgctaggggaagtggtcgcagtatcg

SEQ ID NO: 294295 - DNA, 30 bp, Artificial Sequence
  Synthetic oligonucleotide
tgcaagtactgtacggtgtacggcgtatcg

SEQ ID NO: 294296 - DNA, 30 bp, Artificial Sequence
  Synthetic oligonucleotide
agtcacgccccggcgaggcctgtcgtatcg

SEQ ID NO: 294297 - DNA, 30 bp, Artificial Sequence
  Synthetic oligonucleotide
aatcgcccgggagccattcgttcggtatcg

SEQ ID NO: 294298 - DNA, 30 bp, Artificial Sequence
  Synthetic oligonucleotide
gccgtctgcgtcttccccgtggtggtatcg

SEQ ID NO: 294299 - DNA, 30 bp, Artificial Sequence
  Synthetic oligonucleotide
tatctcgtgagtcaaacagacattgtatcg

SEQ ID NO: 294300 - DNA, 30 bp, Artificial Sequence
  Synthetic oligonucleotide
gcaacatgggtactaatcggtagattatcg

SEQ ID NO: 294301 - DNA, 30 bp, Artificial Sequence
  Synthetic oligonucleotide
actttccaaacgatatgggacttattatcg

SEQ ID NO: 294302 - DNA, 30 bp, Artificial Sequence
  Synthetic oligonucleotide
gtatacccgcgcattccagactacttatcg

SEQ ID NO: 294303 - DNA, 30 bp, Artificial Sequence
  Synthetic oligonucleotide
aggagtctccccacttagtttctcttatcg

SEQ ID NO: 294304 - DNA, 30 bp, Artificial Sequence
  Synthetic oligonucleotide
aaatatcatacaaagcgggcctggttatcg

SEQ ID NO: 294305 - DNA, 30 bp, Artificial Sequence
  Synthetic oligonucleotide
cacggtatggttagttcattaactttatcg

SEQ ID NO: 294306 - DNA, 30 bp, Artificial Sequence
  Synthetic oligonucleotide
cggtgtacttcctactatggagctttatcg

SEQ ID NO: 294307 - DNA, 30 bp, Artificial Sequence
  Synthetic oligonucleotide
agatgccgccgtaaatgtagttaaaactcg

SEQ ID NO: 294308 - DNA, 30 bp, Artificial Sequence
  Synthetic oligonucleotide
aacgttaccgtgtggtgcgtacacaactcg

SEQ ID NO: 294309 - DNA, 30 bp, Artificial Sequence
  Synthetic oligonucleotide
gtactgcagggccggtcggaacgcaactcg

SEQ ID NO: 294310 - DNA, 30 bp, Artificial Sequence
  Synthetic oligonucleotide
taagccatggggggaagatttatcaactcg

SEQ ID NO: 294311 - DNA, 30 bp, Artificial Sequence
  Synthetic oligonucleotide
gcatgcgtgtaaaagagctcgctcaactcg

SEQ ID NO: 294312 - DNA, 30 bp, Artificial Sequence
  Synthetic oligonucleotide
gcacaagttgttgtcactaacaagaactcg

SEQ ID NO: 294313 - DNA, 30 bp, Artificial Sequence
  Synthetic oligonucleotide
agtgtccatgcaggattagcccagaactcg

SEQ ID NO: 294314 - DNA, 30 bp, Artificial Sequence
  Synthetic oligonucleotide
tttagggacagggagatcaactggaactcg

SEQ ID NO: 294315 - DNA, 30 bp, Artificial Sequence
  Synthetic oligonucleotide
gcggaaaacgagatcaaatgcaataactcg

SEQ ID NO: 294316 - DNA, 30 bp, Artificial Sequence
  Synthetic oligonucleotide
gaagtgctgagtcctggaacgattaactcg

SEQ ID NO: 294317 - DNA, 30 bp, Artificial Sequence
  Synthetic oligonucleotide
acaccattccggagtctcggaacacactcg

SEQ ID NO: 294318 - DNA, 30 bp, Artificial Sequence
  Synthetic oligonucleotide
actcggcaacccaccagtccgcgccactcg

SEQ ID NO: 294319 - DNA, 30 bp, Artificial Sequence
  Synthetic oligonucleotide
acgtagcgacggcaaacccgtagtcactcg

SEQ ID NO: 294320 - DNA, 30 bp, Artificial Sequence
  Synthetic oligonucleotide
catcagcagatctgcaggtcgggtcactcg

SEQ ID NO: 294321 - DNA, 30 bp, Artificial Sequence
  Synthetic oligonucleotide
cagtatgttatgggagtcgatcacgactcg

SEQ ID NO: 294322 - DNA, 30 bp, Artificial Sequence
  Synthetic oligonucleotide
agtgatagtccacgccatccacccgactcg

SEQ ID NO: 294323 - DNA, 30 bp, Artificial Sequence
  Synthetic oligonucleotide
aagaggtccgcatacacgaagcgggactcg

SEQ ID NO: 294324 - DNA, 30 bp, Artificial Sequence
  Synthetic oligonucleotide
aagggttttagaggggggaaatgggactcg

SEQ ID NO: 294325 - DNA, 30 bp, Artificial Sequence
  Synthetic oligonucleotide
gtccgcgtccactttgctaactgggactcg

SEQ ID NO: 294326 - DNA, 30 bp, Artificial Sequence
  Synthetic oligonucleotide
ggcgaagaacttagtcgaggtttatactcg

SEQ ID NO: 294327 - DNA, 30 bp, Artificial Sequence
  Synthetic oligonucleotide
aatgagaaaggcccttaaagttattactcg

SEQ ID NO: 294328 - DNA, 30 bp, Artificial Sequence
  Synthetic oligonucleotide
ctattctgtatatagatgagcttttactcg

SEQ ID NO: 294329 - DNA, 30 bp, Artificial Sequence
  Synthetic oligonucleotide
tactcgggggacttctgatacaccacctcg

SEQ ID NO: 294330 - DNA, 30 bp, Artificial Sequence
  Synthetic oligonucleotide
cgtctgcacaaagcggtaggccagacctcg

SEQ ID NO: 294331 - DNA, 30 bp, Artificial Sequence
  Synthetic oligonucleotide
ttgaccttgagtgggtccattcagacctcg

SEQ ID NO: 294332 - DNA, 30 bp, Artificial Sequence
  Synthetic oligonucleotide
aggcacccttgagggagtgctatgacctcg

SEQ ID NO: 294333 - DNA, 30 bp, Artificial Sequence
  Synthetic oligonucleotide
gtctatggaatatcgcatgacaacccctcg

SEQ ID NO: 294334 - DNA, 31 bp, Artificial Sequence
  Synthetic oligonucleotide
caatacgccgcgcaaggcgaatttcccctcg

SEQ ID NO: 294335 - DNA, 30 bp, Artificial Sequence
  Synthetic oligonucleotide
ccaacggaccccgagaagttgacgccctcg

SEQ ID NO: 294336 - DNA, 30 bp, Artificial Sequence
  Synthetic oligonucleotide
ttgttcgcggttgaagaacctcatgcctcg

SEQ ID NO: 294337 - DNA, 30 bp, Artificial Sequence
  Synthetic oligonucleotide
cttcacaacatctaagactcaacatcctcg

SEQ ID NO: 294338 - DNA, 30 bp, Artificial Sequence
  Synthetic oligonucleotide
gagcctaaccgtcgctgtgttgcatcctcg

SEQ ID NO: 294339 - DNA, 30 bp, Artificial Sequence
  Synthetic oligonucleotide
agtacctcaagatattgtagccgatcctcg

SEQ ID NO: 294340 - DNA, 30 bp, Artificial Sequence
  Synthetic oligonucleotide
tggtagtacacccccccctcaaagtcctcg

SEQ ID NO: 294341 - DNA, 30 bp, Artificial Sequence
  Synthetic oligonucleotide
ggctaggctatattccagttgcagtcctcg

SEQ ID NO: 294342 - DNA, 31 bp, Artificial Sequence
  Synthetic oligonucleotide
tacacagtgggcattttagcgtcagtcctcg

SEQ ID NO: 294343 - DNA, 30 bp, Artificial Sequence
  Synthetic oligonucleotide
ggtaagcgttaaacagttttttcgtcctcg

SEQ ID NO: 294344 - DNA, 30 bp, Artificial Sequence
  Synthetic oligonucleotide
ggtggttgaacattgcataggcattcctcg

SEQ ID NO: 294345 - DNA, 30 bp, Artificial Sequence
  Synthetic oligonucleotide
ttgggcattatcgcacaagaccaaagctcg

SEQ ID NO: 294346 - DNA, 30 bp, Artificial Sequence
  Synthetic oligonucleotide
ctcagaaagtcgagccatgacagtagctcg

SEQ ID NO: 294347 - DNA, 30 bp, Artificial Sequence
  Synthetic oligonucleotide
gaggatttccaagaggagatgatccgctcg

SEQ ID NO: 294348 - DNA, 30 bp, Artificial Sequence
  Synthetic oligonucleotide
cattagagtcagcagcgtcctgcgcgctcg

SEQ ID NO: 294349 - DNA, 30 bp, Artificial Sequence
  Synthetic oligonucleotide
gagtgggggatacatcggtgtatgcgctcg

SEQ ID NO: 294350 - DNA, 30 bp, Artificial Sequence
  Synthetic oligonucleotide
tcttaaaaatgaggtaaacacggaggctcg

SEQ ID NO: 294351 - DNA, 30 bp, Artificial Sequence
  Synthetic oligonucleotide
ttttcagggcgatccaaacagttcggctcg

SEQ ID NO: 294352 - DNA, 30 bp, Artificial Sequence
  Synthetic oligonucleotide
aagttccctgaacctgtcacagagggctcg

SEQ ID NO: 294353 - DNA, 30 bp, Artificial Sequence
  Synthetic oligonucleotide
tttgcgtacacgctggttggttcgggctcg

SEQ ID NO: 294354 - DNA, 30 bp, Artificial Sequence
  Synthetic oligonucleotide
tggtgtggtcactaaaccccctggggctcg

SEQ ID NO: 294355 - DNA, 30 bp, Artificial Sequence
  Synthetic oligonucleotide
ggtattgttgtaaccgtgaacgcatgctcg

SEQ ID NO: 294356 - DNA, 30 bp, Artificial Sequence
  Synthetic oligonucleotide
agatactttagcagatagattgcaatctcg

SEQ ID NO: 294357 - DNA, 30 bp, Artificial Sequence
  Synthetic oligonucleotide
gccccccccttgataataactgtaatctcg

SEQ ID NO: 294358 - DNA, 30 bp, Artificial Sequence
  Synthetic oligonucleotide
cacgcgctgtaaggactgcagaccctctcg

SEQ ID NO: 294359 - DNA, 29 bp, Artificial Sequence
  Synthetic oligonucleotide
aatagggggagatagtgggatccctctcg

SEQ ID NO: 294360 - DNA, 30 bp, Artificial Sequence
  Synthetic oligonucleotide
cggcgaggagttaattttcgcatgctctcg

SEQ ID NO: 294361 - DNA, 30 bp, Artificial Sequence
  Synthetic oligonucleotide
cgcgtctaaaacatgtggaattctctctcg

SEQ ID NO: 294362 - DNA, 30 bp, Artificial Sequence
  Synthetic oligonucleotide
gaggtttaccggggtcccgattgtctctcg

SEQ ID NO: 294363 - DNA, 30 bp, Artificial Sequence
  Synthetic oligonucleotide
actctcagagggaaatccttaaaagtctcg

SEQ ID NO: 294364 - DNA, 30 bp, Artificial Sequence
  Synthetic oligonucleotide
tgatgcgtacaatttataggttaagtctcg

SEQ ID NO: 294365 - DNA, 30 bp, Artificial Sequence
  Synthetic oligonucleotide
tgtgggacgcggagacagacaccagtctcg

SEQ ID NO: 294366 - DNA, 30 bp, Artificial Sequence
  Synthetic oligonucleotide
aaggtgctggctatggagacggtagtctcg

SEQ ID NO: 294367 - DNA, 30 bp, Artificial Sequence
  Synthetic oligonucleotide
ctggtggtagcagtccgctagtcggtctcg

SEQ ID NO: 294368 - DNA, 30 bp, Artificial Sequence
  Synthetic oligonucleotide
gggttatattaaacctgagtagcattctcg

SEQ ID NO: 294369 - DNA, 30 bp, Artificial Sequence
  Synthetic oligonucleotide
tggggacgatatggctccggatcattctcg

SEQ ID NO: 294370 - DNA, 30 bp, Artificial Sequence
  Synthetic oligonucleotide
tatacgcaaactctttgatcacgattctcg

SEQ ID NO: 294371 - DNA, 30 bp, Artificial Sequence
  Synthetic oligonucleotide
gtcgacttggagttggccagtcgattctcg

SEQ ID NO: 294372 - DNA, 30 bp, Artificial Sequence
  Synthetic oligonucleotide
atgcacggtgataagtagctgttattctcg

SEQ ID NO: 294373 - DNA, 30 bp, Artificial Sequence
  Synthetic oligonucleotide
cttcatgggacaggtcagggtcacttctcg

SEQ ID NO: 294374 - DNA, 30 bp, Artificial Sequence
  Synthetic oligonucleotide
acctcatgatggtgatttgcagccttctcg

SEQ ID NO: 294375 - DNA, 30 bp, Artificial Sequence
  Synthetic oligonucleotide
tatcagcgattcaatacgaaagtcttctcg

SEQ ID NO: 294376 - DNA, 30 bp, Artificial Sequence
  Synthetic oligonucleotide
cctatacacggagcgtgtactgaaaagtcg

SEQ ID NO: 294377 - DNA, 30 bp, Artificial Sequence
  Synthetic oligonucleotide
tgagctgcaaagtcagaggctgcgaagtcg

SEQ ID NO: 294378 - DNA, 30 bp, Artificial Sequence
  Synthetic oligonucleotide
acggttccattgacgctgctatgtaagtcg

SEQ ID NO: 294379 - DNA, 30 bp, Artificial Sequence
  Synthetic oligonucleotide
gcggttcataaagatcacagcgcccagtcg

SEQ ID NO: 294380 - DNA, 30 bp, Artificial Sequence
  Synthetic oligonucleotide
gttagtgccctaggaggacctcgtcagtcg

SEQ ID NO: 294381 - DNA, 30 bp, Artificial Sequence
  Synthetic oligonucleotide
taatcacacgctggtggtaccatagagtcg

SEQ ID NO: 294382 - DNA, 30 bp, Artificial Sequence
  Synthetic oligonucleotide
accagctttctcacttattccaacgagtcg

SEQ ID NO: 294383 - DNA, 30 bp, Artificial Sequence
  Synthetic oligonucleotide
gtcaacgtgacctgcctcgacacatagtcg

SEQ ID NO: 294384 - DNA, 30 bp, Artificial Sequence
  Synthetic oligonucleotide
agagcccaaatctggaggggcctatagtcg

SEQ ID NO: 294385 - DNA, 30 bp, Artificial Sequence
  Synthetic oligonucleotide
atcttccggagttacatcattgtatagtcg

SEQ ID NO: 294386 - DNA, 30 bp, Artificial Sequence
  Synthetic oligonucleotide
ggcaggaaagtaccgttcctccactagtcg

SEQ ID NO: 294387 - DNA, 30 bp, Artificial Sequence
  Synthetic oligonucleotide
tgaagacattggctcgtgcaaaggtagtcg

SEQ ID NO: 294388 - DNA, 30 bp, Artificial Sequence
  Synthetic oligonucleotide
cccggctcgagcgcgctgcaagaaacgtcg

SEQ ID NO: 294389 - DNA, 30 bp, Artificial Sequence
  Synthetic oligonucleotide
ctcgcccatgatgaccttatagacacgtcg

SEQ ID NO: 294390 - DNA, 30 bp, Artificial Sequence
  Synthetic oligonucleotide
acactgaaacttctccccctgaacccgtcg

SEQ ID NO: 294391 - DNA, 30 bp, Artificial Sequence
  Synthetic oligonucleotide
gtaggtaaacacctgccgattcgcccgtcg

SEQ ID NO: 294392 - DNA, 30 bp, Artificial Sequence
  Synthetic oligonucleotide
ttcgggaagtcattaataggacggccgtcg

SEQ ID NO: 294393 - DNA, 30 bp, Artificial Sequence
  Synthetic oligonucleotide
ttgtcttttacgacattgatatcagcgtcg

SEQ ID NO: 294394 - DNA, 30 bp, Artificial Sequence
  Synthetic oligonucleotide
gttgagtataagacgcacactctagcgtcg

SEQ ID NO: 294395 - DNA, 30 bp, Artificial Sequence
  Synthetic oligonucleotide
gtttgtgtgcctattcgtggcgaaaggtcg

SEQ ID NO: 294396 - DNA, 30 bp, Artificial Sequence
  Synthetic oligonucleotide
catcgccctcagtcctcagtttcaaggtcg

SEQ ID NO: 294397 - DNA, 30 bp, Artificial Sequence
  Synthetic oligonucleotide
atcacggcgtttcgccgtgtctccaggtcg

SEQ ID NO: 294398 - DNA, 30 bp, Artificial Sequence
  Synthetic oligonucleotide
ggatgagccaggctcctatctcgcaggtcg

SEQ ID NO: 294399 - DNA, 30 bp, Artificial Sequence
  Synthetic oligonucleotide
ctgagcgtagatgcccattcacgacggtcg

SEQ ID NO: 294400 - DNA, 30 bp, Artificial Sequence
  Synthetic oligonucleotide
ataaggacctcgaccgagaatacccggtcg

SEQ ID NO: 294401 - DNA, 30 bp, Artificial Sequence
  Synthetic oligonucleotide
tttcaatttacgtataacagcaagcggtcg

SEQ ID NO: 294402 - DNA, 30 bp, Artificial Sequence
  Synthetic oligonucleotide
gtttcccagatgcgtgtgccatagcggtcg

SEQ ID NO: 294403 - DNA, 30 bp, Artificial Sequence
  Synthetic oligonucleotide
atcgacatcagatgttttcatcttcggtcg

SEQ ID NO: 294404 - DNA, 30 bp, Artificial Sequence
  Synthetic oligonucleotide
gatacgctttgcccaatccgtagagggtcg

SEQ ID NO: 294405 - DNA, 30 bp, Artificial Sequence
  Synthetic oligonucleotide
gaacaagacggtcgttttctacgcgggtcg

SEQ ID NO: 294406 - DNA, 30 bp, Artificial Sequence
  Synthetic oligonucleotide
gaaagtagcggccatttggatccggggtcg

SEQ ID NO: 294407 - DNA, 30 bp, Artificial Sequence
  Synthetic oligonucleotide
tattcatcgttgggatgatgtgtggggtcg

SEQ ID NO: 294408 - DNA, 30 bp, Artificial Sequence
  Synthetic oligonucleotide
ccgccacaaggcgcagacattggttggtcg

SEQ ID NO: 294409 - DNA, 30 bp, Artificial Sequence
  Synthetic oligonucleotide
atatctggttaaatattaggacgtatgtcg

SEQ ID NO: 294410 - DNA, 30 bp, Artificial Sequence
  Synthetic oligonucleotide
gctgggcagacgctcgaggcctgtatgtcg

SEQ ID NO: 294411 - DNA, 30 bp, Artificial Sequence
  Synthetic oligonucleotide
cacttattcagcaaaaattcggggctgtcg

SEQ ID NO: 294412 - DNA, 30 bp, Artificial Sequence
  Synthetic oligonucleotide
gtaagcggacacgtatgtctcagcgtgtcg

SEQ ID NO: 294413 - DNA, 30 bp, Artificial Sequence
  Synthetic oligonucleotide
gagccaggcggccttgttatgcaggtgtcg

SEQ ID NO: 294414 - DNA, 30 bp, Artificial Sequence
  Synthetic oligonucleotide
tggcttaacacggctgagttgcaggtgtcg

SEQ ID NO: 294415 - DNA, 30 bp, Artificial Sequence
  Synthetic oligonucleotide
gagctacacaagtctttgttttaggtgtcg

SEQ ID NO: 294416 - DNA, 30 bp, Artificial Sequence
  Synthetic oligonucleotide
ctttgaagtatgcgaagcttactggtgtcg

SEQ ID NO: 294417 - DNA, 30 bp, Artificial Sequence
  Synthetic oligonucleotide
gtccgcccgcgacttttgggggtggtgtcg

SEQ ID NO: 294418 - DNA, 30 bp, Artificial Sequence
  Synthetic oligonucleotide
gctaggtgctttgtataggatcttgtgtcg

SEQ ID NO: 294419 - DNA, 30 bp, Artificial Sequence
  Synthetic oligonucleotide
ctctcgtccggaccgacaggggaattgtcg

SEQ ID NO: 294420 - DNA, 30 bp, Artificial Sequence
  Synthetic oligonucleotide
attttcctatgcgtcctcgcaaccttgtcg

SEQ ID NO: 294421 - DNA, 30 bp, Artificial Sequence
  Synthetic oligonucleotide
tgccgtcgctaggcgggtgcgcgcttgtcg

SEQ ID NO: 294422 - DNA, 30 bp, Artificial Sequence
  Synthetic oligonucleotide
agtgaactacgggcgaccgcctctttgtcg

SEQ ID NO: 294423 - DNA, 30 bp, Artificial Sequence
  Synthetic oligonucleotide
tcaagaccgctcgtcaagctcaacaattcg

SEQ ID NO: 294424 - DNA, 30 bp, Artificial Sequence
  Synthetic oligonucleotide
cctcactctactcggtggcaaatcaattcg

SEQ ID NO: 294425 - DNA, 30 bp, Artificial Sequence
  Synthetic oligonucleotide
ataaagttgcaggaatataccaggaattcg

SEQ ID NO: 294426 - DNA, 30 bp, Artificial Sequence
  Synthetic oligonucleotide
gctaggagatattgtattgcgcataattcg

SEQ ID NO: 294427 - DNA, 30 bp, Artificial Sequence
  Synthetic oligonucleotide
gaggagtatccgttcggtatgtataattcg

SEQ ID NO: 294428 - DNA, 30 bp, Artificial Sequence
  Synthetic oligonucleotide
accacgatttcaatatatgagcctaattcg

SEQ ID NO: 294429 - DNA, 30 bp, Artificial Sequence
  Synthetic oligonucleotide
agccaattagaattgctttgaggtaattcg

SEQ ID NO: 294430 - DNA, 30 bp, Artificial Sequence
  Synthetic oligonucleotide
gatacaactttattccactgaccacattcg

SEQ ID NO: 294431 - DNA, 30 bp, Artificial Sequence
  Synthetic oligonucleotide
gcacctaccatgaaccatccgggccattcg

SEQ ID NO: 294432 - DNA, 30 bp, Artificial Sequence
  Synthetic oligonucleotide
gtagatcaccagtcacgccctgggcattcg

SEQ ID NO: 294433 - DNA, 30 bp, Artificial Sequence
  Synthetic oligonucleotide
acaacgtgagcagcctatacgatgcattcg

SEQ ID NO: 294434 - DNA, 30 bp, Artificial Sequence
  Synthetic oligonucleotide
tcccatcattctgactctggaaaagattcg

SEQ ID NO: 294435 - DNA, 30 bp, Artificial Sequence
  Synthetic oligonucleotide
cacgccgggagtatcaggcgttcagattcg

SEQ ID NO: 294436 - DNA, 30 bp, Artificial Sequence
  Synthetic oligonucleotide
ggattagacgacagtggaagcgacgattcg

SEQ ID NO: 294437 - DNA, 30 bp, Artificial Sequence
  Synthetic oligonucleotide
ggcgcagctagctgtcattcggacgattcg

SEQ ID NO: 294438 - DNA, 30 bp, Artificial Sequence
  Synthetic oligonucleotide
cgaccgaatctgtgacccctttgcgattcg

SEQ ID NO: 294439 - DNA, 30 bp, Artificial Sequence
  Synthetic oligonucleotide
cggtacggctgctgaattgcctcggattcg

SEQ ID NO: 294440 - DNA, 30 bp, Artificial Sequence
  Synthetic oligonucleotide
attatccaatggccaagtagtattgattcg

SEQ ID NO: 294441 - DNA, 30 bp, Artificial Sequence
  Synthetic oligonucleotide
ggacggcgaatattactaattacatattcg

SEQ ID NO: 294442 - DNA, 30 bp, Artificial Sequence
  Synthetic oligonucleotide
tcaaacagcttggcgaggcactcatattcg

SEQ ID NO: 294443 - DNA, 30 bp, Artificial Sequence
  Synthetic oligonucleotide
ttgggctccttaagggaacccagatattcg

SEQ ID NO: 294444 - DNA, 30 bp, Artificial Sequence
  Synthetic oligonucleotide
agcgaatcgaggtcatgatttgtatattcg

SEQ ID NO: 294445 - DNA, 30 bp, Artificial Sequence
  Synthetic oligonucleotide
actcctgactgcatgaaacctgattattcg

SEQ ID NO: 294446 - DNA, 30 bp, Artificial Sequence
  Synthetic oligonucleotide
gttggtagaggattgtgcgttcaaacttcg

SEQ ID NO: 294447 - DNA, 30 bp, Artificial Sequence
  Synthetic oligonucleotide
taatgacacgcctggtggctggaaacttcg

SEQ ID NO: 294448 - DNA, 30 bp, Artificial Sequence
  Synthetic oligonucleotide
cacagcgcctggagcgatgctgacacttcg

SEQ ID NO: 294449 - DNA, 30 bp, Artificial Sequence
  Synthetic oligonucleotide
ccggtaggtaatagttatactggcacttcg

SEQ ID NO: 294450 - DNA, 30 bp, Artificial Sequence
  Synthetic oligonucleotide
acagaggccatcaggcctaaggtcacttcg

SEQ ID NO: 294451 - DNA, 30 bp, Artificial Sequence
  Synthetic oligonucleotide
agaataatgatttatggagtttagacttcg

SEQ ID NO: 294452 - DNA, 30 bp, Artificial Sequence
  Synthetic oligonucleotide
aaaatgcgcacgcaataggcaacgacttcg

SEQ ID NO: 294453 - DNA, 30 bp, Artificial Sequence
  Synthetic oligonucleotide
ttttgccgtaactctggctataatacttcg

SEQ ID NO: 294454 - DNA, 30 bp, Artificial Sequence
  Synthetic oligonucleotide
ctcaaagataggagccaggcgtctacttcg

SEQ ID NO: 294455 - DNA, 30 bp, Artificial Sequence
  Synthetic oligonucleotide
gaggtgcccttaaagtgaaagtaaccttcg

SEQ ID NO: 294456 - DNA, 30 bp, Artificial Sequence
  Synthetic oligonucleotide
aagttgagctgtcaggactctacagcttcg

SEQ ID NO: 294457 - DNA, 30 bp, Artificial Sequence
  Synthetic oligonucleotide
acgacggtttatcacaccgcgtccgcttcg

SEQ ID NO: 294458 - DNA, 30 bp, Artificial Sequence
  Synthetic oligonucleotide
taacaggttattggctgtcgatcggcttcg

SEQ ID NO: 294459 - DNA, 30 bp, Artificial Sequence
  Synthetic oligonucleotide
caatgggcccgcgttatcgtaagggcttcg

SEQ ID NO: 294460 - DNA, 30 bp, Artificial Sequence
  Synthetic oligonucleotide
agctcgaggcctcatgcgaggtctgcttcg

SEQ ID NO: 294461 - DNA, 30 bp, Artificial Sequence
  Synthetic oligonucleotide
tatgataaatgtattatgccaggtgcttcg

SEQ ID NO: 294462 - DNA, 30 bp, Artificial Sequence
  Synthetic oligonucleotide
attagaccctttgaatagcaggttgcttcg

SEQ ID NO: 294463 - DNA, 30 bp, Artificial Sequence
  Synthetic oligonucleotide
gaatacgccgcccacgtggttatgtcttcg

SEQ ID NO: 294464 - DNA, 30 bp, Artificial Sequence
  Synthetic oligonucleotide
ctgatggcggttctgataactcattcttcg

SEQ ID NO: 294465 - DNA, 30 bp, Artificial Sequence
  Synthetic oligonucleotide
catcctattggggggcgtgctttttcttcg

SEQ ID NO: 294466 - DNA, 30 bp, Artificial Sequence
  Synthetic oligonucleotide
tgctttgcccgtctgaagtcgttaagttcg

SEQ ID NO: 294467 - DNA, 30 bp, Artificial Sequence
  Synthetic oligonucleotide
ctcgttgcttgtactgggccgaccagttcg

SEQ ID NO: 294468 - DNA, 30 bp, Artificial Sequence
  Synthetic oligonucleotide
ccgcctactgttgatactgctagcagttcg

SEQ ID NO: 294469 - DNA, 30 bp, Artificial Sequence
  Synthetic oligonucleotide
gaggtgagatagtcctgtccttcgagttcg

SEQ ID NO: 294470 - DNA, 30 bp, Artificial Sequence
  Synthetic oligonucleotide
acggtctagacttcatacctagatagttcg

SEQ ID NO: 294471 - DNA, 30 bp, Artificial Sequence
  Synthetic oligonucleotide
gcacaaagccttagggcgcgcgttagttcg

SEQ ID NO: 294472 - DNA, 30 bp, Artificial Sequence
  Synthetic oligonucleotide
atccctatcgcactgcttcaatcccgttcg

SEQ ID NO: 294473 - DNA, 30 bp, Artificial Sequence
  Synthetic oligonucleotide
tttctgccaattcgtatcaaccagcgttcg

SEQ ID NO: 294474 - DNA, 30 bp, Artificial Sequence
  Synthetic oligonucleotide
ctgcttggacggtcctcttaggcgcgttcg

SEQ ID NO: 294475 - DNA, 30 bp, Artificial Sequence
  Synthetic oligonucleotide
gcttggggtcaatacggggggcggcgttcg

SEQ ID NO: 294476 - DNA, 30 bp, Artificial Sequence
  Synthetic oligonucleotide
catggtcttttgccacaaagaggtcgttcg

SEQ ID NO: 294477 - DNA, 30 bp, Artificial Sequence
  Synthetic oligonucleotide
gcacgaaaggggtcgtgcatgggtcgttcg

SEQ ID NO: 294478 - DNA, 30 bp, Artificial Sequence
  Synthetic oligonucleotide
caaatctgattaccggttcggccaggttcg

SEQ ID NO: 294479 - DNA, 30 bp, Artificial Sequence
  Synthetic oligonucleotide
tacgtctctaggctatgccaggcaggttcg

SEQ ID NO: 294480 - DNA, 30 bp, Artificial Sequence
  Synthetic oligonucleotide
tgcgtattgaaactaacatttctaggttcg

SEQ ID NO: 294481 - DNA, 30 bp, Artificial Sequence
  Synthetic oligonucleotide
ggtacccaaggaccatttgacggcggttcg

SEQ ID NO: 294482 - DNA, 30 bp, Artificial Sequence
  Synthetic oligonucleotide
catgacccctgtaacttcagtgatggttcg

SEQ ID NO: 294483 - DNA, 30 bp, Artificial Sequence
  Synthetic oligonucleotide
acggaatgttgcagaccctcatgtggttcg

SEQ ID NO: 294484 - DNA, 30 bp, Artificial Sequence
  Synthetic oligonucleotide
ggatgtccaatctacgggtattgtggttcg

SEQ ID NO: 294485 - DNA, 30 bp, Artificial Sequence
  Synthetic oligonucleotide
ttagtgtgatgcagatgagaaaaatgttcg

SEQ ID NO: 294486 - DNA, 30 bp, Artificial Sequence
  Synthetic oligonucleotide
tagccggcgatgactttgaagccatgttcg

SEQ ID NO: 294487 - DNA, 30 bp, Artificial Sequence
  Synthetic oligonucleotide
ctcaagtacataaagaatcatacgtgttcg

SEQ ID NO: 294488 - DNA, 30 bp, Artificial Sequence
  Synthetic oligonucleotide
tattggaacgtacactagtataggtgttcg

SEQ ID NO: 294489 - DNA, 30 bp, Artificial Sequence
  Synthetic oligonucleotide
ggctaacgagcatagtatgtgtcttgttcg

SEQ ID NO: 294490 - DNA, 30 bp, Artificial Sequence
  Synthetic oligonucleotide
gtacgtatttgccctagtgcgttttgttcg

SEQ ID NO: 294491 - DNA, 30 bp, Artificial Sequence
  Synthetic oligonucleotide
tccacagggtagctactagctaaaatttcg

SEQ ID NO: 294492 - DNA, 30 bp, Artificial Sequence
  Synthetic oligonucleotide
ttatttgaagtcctagagactctaatttcg

SEQ ID NO: 294493 - DNA, 30 bp, Artificial Sequence
  Synthetic oligonucleotide
ggcataccaattggtgccgaagggatttcg

SEQ ID NO: 294494 - DNA, 30 bp, Artificial Sequence
  Synthetic oligonucleotide
gcccaatagtagtacttatcagtgatttcg

SEQ ID NO: 294495 - DNA, 30 bp, Artificial Sequence
  Synthetic oligonucleotide
actgtttgagtacccgcgaactatatttcg

SEQ ID NO: 294496 - DNA, 30 bp, Artificial Sequence
  Synthetic oligonucleotide
ccttgcgcctacactaaggggattatttcg

SEQ ID NO: 294497 - DNA, 30 bp, Artificial Sequence
  Synthetic oligonucleotide
cgtgcattattaacctgcggctttatttcg

SEQ ID NO: 294498 - DNA, 30 bp, Artificial Sequence
  Synthetic oligonucleotide
agtgatgccgtttatcatggaacactttcg

SEQ ID NO: 294499 - DNA, 30 bp, Artificial Sequence
  Synthetic oligonucleotide
aaagaagtggcgggccagcgttcactttcg

SEQ ID NO: 294500 - DNA, 30 bp, Artificial Sequence
  Synthetic oligonucleotide
gatcacgtatttgacacgatacagctttcg

SEQ ID NO: 294501 - DNA, 30 bp, Artificial Sequence
  Synthetic oligonucleotide
caaacgggaaagcactcctctgagctttcg

SEQ ID NO: 294502 - DNA, 30 bp, Artificial Sequence
  Synthetic oligonucleotide
cgaattacgcctaggtataacgaagtttcg

SEQ ID NO: 294503 - DNA, 30 bp, Artificial Sequence
  Synthetic oligonucleotide
tcagtagttgcggttgtagtattcgtttcg

SEQ ID NO: 294504 - DNA, 30 bp, Artificial Sequence
  Synthetic oligonucleotide
aaatgaggactcgccatgcttggggtttcg

SEQ ID NO: 294505 - DNA, 30 bp, Artificial Sequence
  Synthetic oligonucleotide
ttcaacaaaaattggtactaatatgtttcg

SEQ ID NO: 294506 - DNA, 30 bp, Artificial Sequence
  Synthetic oligonucleotide
ccagagatggcaacagatgttcgtgtttcg

SEQ ID NO: 294507 - DNA, 30 bp, Artificial Sequence
  Synthetic oligonucleotide
tagtccggaagcaaaattaggcttgtttcg

SEQ ID NO: 294508 - DNA, 30 bp, Artificial Sequence
  Synthetic oligonucleotide
tgatgcccgctggcagtttggacattttcg

SEQ ID NO: 294509 - DNA, 30 bp, Artificial Sequence
  Synthetic oligonucleotide
gacttgactatgatcggactcagattttcg

SEQ ID NO: 294510 - DNA, 30 bp, Artificial Sequence
  Synthetic oligonucleotide
ttgtgttgctgtgaggtccagatattttcg

SEQ ID NO: 294511 - DNA, 30 bp, Artificial Sequence
  Synthetic oligonucleotide
cacatttcaggggcaacgaaattattttcg

SEQ ID NO: 294512 - DNA, 30 bp, Artificial Sequence
  Synthetic oligonucleotide
cggctgcagcactggggtaagggcttttcg

SEQ ID NO: 294513 - DNA, 30 bp, Artificial Sequence
  Synthetic oligonucleotide
tacagcgagtcctctaggccacagttttcg

SEQ ID NO: 294514 - DNA, 30 bp, Artificial Sequence
  Synthetic oligonucleotide
ttagtcagtatagcatacttcacaaaaagg

SEQ ID NO: 294515 - DNA, 30 bp, Artificial Sequence
  Synthetic oligonucleotide
gggcatgttctttgtgggtgctcaaaaagg

SEQ ID NO: 294516 - DNA, 30 bp, Artificial Sequence
  Synthetic oligonucleotide
gcttgtaaactattagggttacgaaaaagg

SEQ ID NO: 294517 - DNA, 30 bp, Artificial Sequence
  Synthetic oligonucleotide
cacggtatagcgcagcatacctacaaaagg

SEQ ID NO: 294518 - DNA, 30 bp, Artificial Sequence
  Synthetic oligonucleotide
ctataaattgaaatcgttagccagaaaagg

SEQ ID NO: 294519 - DNA, 30 bp, Artificial Sequence
  Synthetic oligonucleotide
ctcgattatatcgaggttgaggcgaaaagg

SEQ ID NO: 294520 - DNA, 30 bp, Artificial Sequence
  Synthetic oligonucleotide
acttaatctattcggcagtaaagtaaaagg

SEQ ID NO: 294521 - DNA, 30 bp, Artificial Sequence
  Synthetic oligonucleotide
atcttgattgctccttaatcaccccaaagg

SEQ ID NO: 294522 - DNA, 30 bp, Artificial Sequence
  Synthetic oligonucleotide
tttcggcagagttaagattgatgccaaagg

SEQ ID NO: 294523 - DNA, 30 bp, Artificial Sequence
  Synthetic oligonucleotide
tcctaacgaagaccttacttaatccaaagg

SEQ ID NO: 294524 - DNA, 30 bp, Artificial Sequence
  Synthetic oligonucleotide
tatgtgaacatgtatgtaggtgcgcaaagg

SEQ ID NO: 294525 - DNA, 30 bp, Artificial Sequence
  Synthetic oligonucleotide
atgattagacttagattgaccctgcaaagg

SEQ ID NO: 294526 - DNA, 30 bp, Artificial Sequence
  Synthetic oligonucleotide
ttatgcctacttgcaacagccctgcaaagg

SEQ ID NO: 294527 - DNA, 30 bp, Artificial Sequence
  Synthetic oligonucleotide
aaagctcgtgcagagtcagctactcaaagg

SEQ ID NO: 294528 - DNA, 30 bp, Artificial Sequence
  Synthetic oligonucleotide
cgaatccggatgagtatacaatttcaaagg

SEQ ID NO: 294529 - DNA, 30 bp, Artificial Sequence
  Synthetic oligonucleotide
ccccaattcacgcttcaggtcccagaaagg

SEQ ID NO: 294530 - DNA, 30 bp, Artificial Sequence
  Synthetic oligonucleotide
caaccatatatttgagaatacgtagaaagg

SEQ ID NO: 294531 - DNA, 30 bp, Artificial Sequence
  Synthetic oligonucleotide
caagctggctagtcccccccagccgaaagg

SEQ ID NO: 294532 - DNA, 30 bp, Artificial Sequence
  Synthetic oligonucleotide
ctggcgttgtcgcccaacttcgaggaaagg

SEQ ID NO: 294533 - DNA, 30 bp, Artificial Sequence
  Synthetic oligonucleotide
gatgggtgggctgcgagcatttaggaaagg

SEQ ID NO: 294534 - DNA, 25 bp, Artificial Sequence
  Synthetic oligonucleotide
taatgaaattgcgttaatggaaagg

SEQ ID NO: 294535 - DNA, 29 bp, Artificial Sequence
  Synthetic oligonucleotide
gtcatcgtagtagtgcgattttggaaagg

SEQ ID NO: 294536 - DNA, 30 bp, Artificial Sequence
  Synthetic oligonucleotide
taacgcacattcacatctatggctgaaagg

SEQ ID NO: 294537 - DNA, 30 bp, Artificial Sequence
  Synthetic oligonucleotide
gggtagtcgacgtacctaagggaataaagg

SEQ ID NO: 294538 - DNA, 30 bp, Artificial Sequence
  Synthetic oligonucleotide
tgtagtcgctttaacaagagacgataaagg

SEQ ID NO: 294539 - DNA, 30 bp, Artificial Sequence
  Synthetic oligonucleotide
cctcgttttcgggtagcggggttataaagg

SEQ ID NO: 294540 - DNA, 30 bp, Artificial Sequence
  Synthetic oligonucleotide
agctttccttgggagcctgcccactaaagg

SEQ ID NO: 294541 - DNA, 30 bp, Artificial Sequence
  Synthetic oligonucleotide
tctgacttaaataggagatatatctaaagg

SEQ ID NO: 294542 - DNA, 30 bp, Artificial Sequence
  Synthetic oligonucleotide
aaatctgaggcgaacatatataagtaaagg

SEQ ID NO: 294543 - DNA, 30 bp, Artificial Sequence
  Synthetic oligonucleotide
cgaagaagcattcttcagcacttgtaaagg

SEQ ID NO: 294544 - DNA, 30 bp, Artificial Sequence
  Synthetic oligonucleotide
tgaaccgatttgactggtgcagattaaagg

SEQ ID NO: 294545 - DNA, 30 bp, Artificial Sequence
  Synthetic oligonucleotide
tttcacccacatcagtggttcgcttaaagg

SEQ ID NO: 294546 - DNA, 30 bp, Artificial Sequence
  Synthetic oligonucleotide
gagccgagcatagaattcgcctcttaaagg

SEQ ID NO: 294547 - DNA, 30 bp, Artificial Sequence
  Synthetic oligonucleotide
taagtagaagcttagactctatacacaagg

SEQ ID NO: 294548 - DNA, 30 bp, Artificial Sequence
  Synthetic oligonucleotide
atctatcggcatgtgcggtctttcacaagg

SEQ ID NO: 294549 - DNA, 30 bp, Artificial Sequence
  Synthetic oligonucleotide
atacgttgctatagggttaaacggacaagg

SEQ ID NO: 294550 - DNA, 30 bp, Artificial Sequence
  Synthetic oligonucleotide
tctcacgccccacggaggctacctacaagg

SEQ ID NO: 294551 - DNA, 30 bp, Artificial Sequence
  Synthetic oligonucleotide
aaggacctcatagagggccccgttacaagg

SEQ ID NO: 294552 - DNA, 30 bp, Artificial Sequence
  Synthetic oligonucleotide
ttggggctgtcgaaggccatgcgcccaagg

SEQ ID NO: 294553 - DNA, 30 bp, Artificial Sequence
  Synthetic oligonucleotide
gggagtctttgatgccggagggatccaagg

SEQ ID NO: 294554 - DNA, 30 bp, Artificial Sequence
  Synthetic oligonucleotide
agaatcttcgagtccaaggttgatccaagg

SEQ ID NO: 294555 - DNA, 30 bp, Artificial Sequence
  Synthetic oligonucleotide
cgacgtgctatttatctaggatgtccaagg

SEQ ID NO: 294556 - DNA, 30 bp, Artificial Sequence
  Synthetic oligonucleotide
tgccgctgttgcgccagatacgctgcaagg

SEQ ID NO: 294557 - DNA, 30 bp, Artificial Sequence
  Synthetic oligonucleotide
ccaatgaaccgtcattgtacgagtgcaagg

SEQ ID NO: 294558 - DNA, 30 bp, Artificial Sequence
  Synthetic oligonucleotide
tgtaaaaatctgtgggcagatagtgcaagg

SEQ ID NO: 294559 - DNA, 30 bp, Artificial Sequence
  Synthetic oligonucleotide
ttattttggtaagaataagtatgatcaagg

SEQ ID NO: 294560 - DNA, 30 bp, Artificial Sequence
  Synthetic oligonucleotide
acaacagccaaaatgatcatttgatcaagg

SEQ ID NO: 294561 - DNA, 30 bp, Artificial Sequence
  Synthetic oligonucleotide
cctggtacacgacggctcagacactcaagg

SEQ ID NO: 294562 - DNA, 30 bp, Artificial Sequence
  Synthetic oligonucleotide
ttttggttgcttactagcgcctgctcaagg

SEQ ID NO: 294563 - DNA, 30 bp, Artificial Sequence
  Synthetic oligonucleotide
tatccgatgtatttccacaaagtctcaagg

SEQ ID NO: 294564 - DNA, 30 bp, Artificial Sequence
  Synthetic oligonucleotide
actccgcggagggttataggacagtcaagg

SEQ ID NO: 294565 - DNA, 30 bp, Artificial Sequence
  Synthetic oligonucleotide
taaactagcaattgatttgtggagtcaagg

SEQ ID NO: 294566 - DNA, 30 bp, Artificial Sequence
  Synthetic oligonucleotide
tttgaatggtggtcgttaaatgagtcaagg

SEQ ID NO: 294567 - DNA, 30 bp, Artificial Sequence
  Synthetic oligonucleotide
taatatgcctacgtgttgtgattgtcaagg

SEQ ID NO: 294568 - DNA, 30 bp, Artificial Sequence
  Synthetic oligonucleotide
aaacaggattaggcgatatccagttcaagg

SEQ ID NO: 294569 - DNA, 30 bp, Artificial Sequence
  Synthetic oligonucleotide
cgcaattcacatgtaaacatgttcagaagg

SEQ ID NO: 294570 - DNA, 30 bp, Artificial Sequence
  Synthetic oligonucleotide
tagagtaacgccattaaaatgccgagaagg

SEQ ID NO: 294571 - DNA, 30 bp, Artificial Sequence
  Synthetic oligonucleotide
cgaacgtcgccgtaattgcgccatagaagg

SEQ ID NO: 294572 - DNA, 30 bp, Artificial Sequence
  Synthetic oligonucleotide
tgtcgaaaatggttcgtcggacttagaagg

SEQ ID NO: 294573 - DNA, 30 bp, Artificial Sequence
  Synthetic oligonucleotide
gaatcgaaggccgttatacggtttagaagg

SEQ ID NO: 294574 - DNA, 30 bp, Artificial Sequence
  Synthetic oligonucleotide
gggttatagataccaactgcccgacgaagg

SEQ ID NO: 294575 - DNA, 30 bp, Artificial Sequence
  Synthetic oligonucleotide
cagattcatagccacgatccgcagcgaagg

SEQ ID NO: 294576 - DNA, 30 bp, Artificial Sequence
  Synthetic oligonucleotide
gttctgagtgcgaaatcaccagcaggaagg

SEQ ID NO: 294577 - DNA, 30 bp, Artificial Sequence
  Synthetic oligonucleotide
aataatgggctgcaccgtggcaagggaagg

SEQ ID NO: 294578 - DNA, 30 bp, Artificial Sequence
  Synthetic oligonucleotide
atccaaaaccgtcgtcacacgaagggaagg

SEQ ID NO: 294579 - DNA, 30 bp, Artificial Sequence
  Synthetic oligonucleotide
catacatgtcaggcatggtaaccgggaagg

SEQ ID NO: 294580 - DNA, 30 bp, Artificial Sequence
  Synthetic oligonucleotide
gagcccgagggcactgttccagcgggaagg

SEQ ID NO: 294581 - DNA, 30 bp, Artificial Sequence
  Synthetic oligonucleotide
tttgtaacctgctggtaatgttcgggaagg

SEQ ID NO: 294582 - DNA, 30 bp, Artificial Sequence
  Synthetic oligonucleotide
gagaagtgattagagacatactggggaagg

SEQ ID NO: 294583 - DNA, 30 bp, Artificial Sequence
  Synthetic oligonucleotide
ttcacaaggttcccgcgcatgctgggaagg

SEQ ID NO: 294584 - DNA, 30 bp, Artificial Sequence
  Synthetic oligonucleotide
agaaacccgttagtggactcacgtggaagg

SEQ ID NO: 294585 - DNA, 30 bp, Artificial Sequence
  Synthetic oligonucleotide
ataggggtgtcaatgtctgcaggctgaagg

SEQ ID NO: 294586 - DNA, 30 bp, Artificial Sequence
  Synthetic oligonucleotide
gataaaatgttacgggagttttgctgaagg

SEQ ID NO: 294587 - DNA, 30 bp, Artificial Sequence
  Synthetic oligonucleotide
gcagatcgtaaagccacagtctcgtgaagg

SEQ ID NO: 294588 - DNA, 30 bp, Artificial Sequence
  Synthetic oligonucleotide
ggatctaacaagcctggaacagaaataagg

SEQ ID NO: 294589 - DNA, 30 bp, Artificial Sequence
  Synthetic oligonucleotide
gaacgtgcactcggtggtttcccaataagg

SEQ ID NO: 294590 - DNA, 30 bp, Artificial Sequence
  Synthetic oligonucleotide
cgcggtctgctgtgacgggctccaataagg

SEQ ID NO: 294591 - DNA, 30 bp, Artificial Sequence
  Synthetic oligonucleotide
aagtgtcgggtcgggctccaggcaataagg

SEQ ID NO: 294592 - DNA, 30 bp, Artificial Sequence
  Synthetic oligonucleotide
ctaatgcttcaaagccagcactcaataagg

SEQ ID NO: 294593 - DNA, 30 bp, Artificial Sequence
  Synthetic oligonucleotide
ggcggggttagcggatggttaaagataagg

SEQ ID NO: 294594 - DNA, 30 bp, Artificial Sequence
  Synthetic oligonucleotide
catggcccgagaagaggtgtgaagataagg

SEQ ID NO: 294595 - DNA, 30 bp, Artificial Sequence
  Synthetic oligonucleotide
aacgcagacgtgttgaggcaccagataagg

SEQ ID NO: 294596 - DNA, 30 bp, Artificial Sequence
  Synthetic oligonucleotide
ccgttcaacatggcatgtcgagagataagg

SEQ ID NO: 294597 - DNA, 30 bp, Artificial Sequence
  Synthetic oligonucleotide
ccaatggtaggggatggatctgatataagg

SEQ ID NO: 294598 - DNA, 30 bp, Artificial Sequence
  Synthetic oligonucleotide
atttcggagatcatggggaaaacactaagg

SEQ ID NO: 294599 - DNA, 30 bp, Artificial Sequence
  Synthetic oligonucleotide
cgtcaagagcctttcacgcctacactaagg

SEQ ID NO: 294600 - DNA, 30 bp, Artificial Sequence
  Synthetic oligonucleotide
tatgtctatgttttccggcggggactaagg

SEQ ID NO: 294601 - DNA, 30 bp, Artificial Sequence
  Synthetic oligonucleotide
ggaggtaggatttgaaacggttctctaagg

SEQ ID NO: 294602 - DNA, 30 bp, Artificial Sequence
  Synthetic oligonucleotide
caggggcaaccttgcatttatcaagtaagg

SEQ ID NO: 294603 - DNA, 30 bp, Artificial Sequence
  Synthetic oligonucleotide
tcacatgggcaaaacggtacagcggtaagg

SEQ ID NO: 294604 - DNA, 30 bp, Artificial Sequence
  Synthetic oligonucleotide
gaggtatggtggaatggctgtcgggtaagg

SEQ ID NO: 294605 - DNA, 30 bp, Artificial Sequence
  Synthetic oligonucleotide
gctacgtaatggggatggtaaatggtaagg

SEQ ID NO: 294606 - DNA, 30 bp, Artificial Sequence
  Synthetic oligonucleotide
ttaaagtacccacttccgtgactggtaagg

SEQ ID NO: 294607 - DNA, 30 bp, Artificial Sequence
  Synthetic oligonucleotide
cccgaattggtgcaccgcacatctgtaagg

SEQ ID NO: 294608 - DNA, 30 bp, Artificial Sequence
  Synthetic oligonucleotide
cgcatagtcattagtaactcgggattaagg

SEQ ID NO: 294609 - DNA, 30 bp, Artificial Sequence
  Synthetic oligonucleotide
atcgtgaaagtggtgaaatcacccttaagg

SEQ ID NO: 294610 - DNA, 30 bp, Artificial Sequence
  Synthetic oligonucleotide
gtgtatcacgcaatttggtcacggttaagg

SEQ ID NO: 294611 - DNA, 30 bp, Artificial Sequence
  Synthetic oligonucleotide
gcgcaattatgcatcggcctaactttaagg

SEQ ID NO: 294612 - DNA, 30 bp, Artificial Sequence
  Synthetic oligonucleotide
gttaccatagcgtcgacagacggtttaagg

SEQ ID NO: 294613 - DNA, 30 bp, Artificial Sequence
  Synthetic oligonucleotide
tatacgtacattctaactgggctaaacagg

SEQ ID NO: 294614 - DNA, 30 bp, Artificial Sequence
  Synthetic oligonucleotide
aaccaattcgaacggtgcagtctaaacagg

SEQ ID NO: 294615 - DNA, 30 bp, Artificial Sequence
  Synthetic oligonucleotide
ttggtagcctcccatcaccggggacacagg

SEQ ID NO: 294616 - DNA, 30 bp, Artificial Sequence
  Synthetic oligonucleotide
ctcctcacaactgtgataaggggccacagg

SEQ ID NO: 294617 - DNA, 30 bp, Artificial Sequence
  Synthetic oligonucleotide
attggagccattgtacatgtaactcacagg

SEQ ID NO: 294618 - DNA, 30 bp, Artificial Sequence
  Synthetic oligonucleotide
tatatgattgtaccttaccgacaggacagg

SEQ ID NO: 294619 - DNA, 30 bp, Artificial Sequence
  Synthetic oligonucleotide
gaatgtttagttgtggcactcacggacagg

SEQ ID NO: 294620 - DNA, 30 bp, Artificial Sequence
  Synthetic oligonucleotide
tgtccggcacttgcgaagcggagggacagg

SEQ ID NO: 294621 - DNA, 30 bp, Artificial Sequence
  Synthetic oligonucleotide
aaaaccagttggagagctattttatacagg

SEQ ID NO: 294622 - DNA, 30 bp, Artificial Sequence
  Synthetic oligonucleotide
tggaaagactccgtgggccctcactacagg

SEQ ID NO: 294623 - DNA, 30 bp, Artificial Sequence
  Synthetic oligonucleotide
aaacaagagttgacttataggccctacagg

SEQ ID NO: 294624 - DNA, 30 bp, Artificial Sequence
  Synthetic oligonucleotide
gccattcagtcaggtgaatacgcctacagg

SEQ ID NO: 294625 - DNA, 30 bp, Artificial Sequence
  Synthetic oligonucleotide
gggttgaaggtcataaggtcggcctacagg

SEQ ID NO: 294626 - DNA, 30 bp, Artificial Sequence
  Synthetic oligonucleotide
gttgagtgacagcctgttgacggctacagg

SEQ ID NO: 294627 - DNA, 30 bp, Artificial Sequence
  Synthetic oligonucleotide
tgcaccagcagaacattgaactagtacagg

SEQ ID NO: 294628 - DNA, 30 bp, Artificial Sequence
  Synthetic oligonucleotide
cgacgaatatgtgccacgtgtcggtacagg

SEQ ID NO: 294629 - DNA, 30 bp, Artificial Sequence
  Synthetic oligonucleotide
gtataaggctatgatctgctgctgtacagg

SEQ ID NO: 294630 - DNA, 30 bp, Artificial Sequence
  Synthetic oligonucleotide
attcccgttcggccgaccccgagttacagg

SEQ ID NO: 294631 - DNA, 31 bp, Artificial Sequence
  Synthetic oligonucleotide
acagaattcgttgatcccttttcgttacagg

SEQ ID NO: 294632 - DNA, 30 bp, Artificial Sequence
  Synthetic oligonucleotide
ccctacacagattcgggaatgatttacagg

SEQ ID NO: 294633 - DNA, 30 bp, Artificial Sequence
  Synthetic oligonucleotide
ttggaagaaacacaggggcttatttacagg

SEQ ID NO: 294634 - DNA, 30 bp, Artificial Sequence
  Synthetic oligonucleotide
tcgtaacagtgtatgtccgagctcaccagg

SEQ ID NO: 294635 - DNA, 30 bp, Artificial Sequence
  Synthetic oligonucleotide
cagagtggcagcatccacccacagaccagg

SEQ ID NO: 294636 - DNA, 30 bp, Artificial Sequence
  Synthetic oligonucleotide
ccgtgccggagttgcgctgtcgtgaccagg

SEQ ID NO: 294637 - DNA, 30 bp, Artificial Sequence
  Synthetic oligonucleotide
gtctaacgttacctagttgaagctaccagg

SEQ ID NO: 294638 - DNA, 30 bp, Artificial Sequence
  Synthetic oligonucleotide
ggatggagtagtgcattccttaaacccagg

SEQ ID NO: 294639 - DNA, 30 bp, Artificial Sequence
  Synthetic oligonucleotide
taaactacgcgaagtatgacctaacccagg

SEQ ID NO: 294640 - DNA, 30 bp, Artificial Sequence
  Synthetic oligonucleotide
caccacgcaaatagtggtataatccccagg

SEQ ID NO: 294641 - DNA, 30 bp, Artificial Sequence
  Synthetic oligonucleotide
tatataaggcctagtagggcttcgcccagg

SEQ ID NO: 294642 - DNA, 30 bp, Artificial Sequence
  Synthetic oligonucleotide
cctaatcccgtggaccgtatcagtcccagg

SEQ ID NO: 294643 - DNA, 30 bp, Artificial Sequence
  Synthetic oligonucleotide
tatacgcggtcgctgtcagagattcccagg

SEQ ID NO: 294644 - DNA, 30 bp, Artificial Sequence
  Synthetic oligonucleotide
gatgccagaaggttttgttcttatgccagg

SEQ ID NO: 294645 - DNA, 30 bp, Artificial Sequence
  Synthetic oligonucleotide
ttatgtataatcgagccgacgggtgccagg

SEQ ID NO: 294646 - DNA, 30 bp, Artificial Sequence
  Synthetic oligonucleotide
aaacatccgggagcgaaggaacaatccagg

SEQ ID NO: 294647 - DNA, 30 bp, Artificial Sequence
  Synthetic oligonucleotide
gaagggctattaaactatattgaatccagg

SEQ ID NO: 294648 - DNA, 30 bp, Artificial Sequence
  Synthetic oligonucleotide
gtggtgaacatgtggacgctaccatccagg

SEQ ID NO: 294649 - DNA, 30 bp, Artificial Sequence
  Synthetic oligonucleotide
aaaatgtggttttttcacgggtcatccagg

SEQ ID NO: 294650 - DNA, 30 bp, Artificial Sequence
  Synthetic oligonucleotide
ataagctcggaggtatatattaactccagg

SEQ ID NO: 294651 - DNA, 30 bp, Artificial Sequence
  Synthetic oligonucleotide
atcggggctagcccaaaatatgcgtccagg

SEQ ID NO: 294652 - DNA, 30 bp, Artificial Sequence
  Synthetic oligonucleotide
gaaaaatgtatccctgagcgatcaagcagg

SEQ ID NO: 294653 - DNA, 30 bp, Artificial Sequence
  Synthetic oligonucleotide
cgaccacaacagtaacctgtcaccagcagg

SEQ ID NO: 294654 - DNA, 30 bp, Artificial Sequence
  Synthetic oligonucleotide
atagtagagttacgcactccccccagcagg

SEQ ID NO: 294655 - DNA, 30 bp, Artificial Sequence
  Synthetic oligonucleotide
ccctaggactgtttgaggccgagcagcagg

SEQ ID NO: 294656 - DNA, 30 bp, Artificial Sequence
  Synthetic oligonucleotide
gctcgtcgcggcagcaacaaacagagcagg

SEQ ID NO: 294657 - DNA, 30 bp, Artificial Sequence
  Synthetic oligonucleotide
aagtttgctgacgaaaggataacgagcagg

SEQ ID NO: 294658 - DNA, 30 bp, Artificial Sequence
  Synthetic oligonucleotide
tagatagcatgcatatgctataatagcagg

SEQ ID NO: 294659 - DNA, 30 bp, Artificial Sequence
  Synthetic oligonucleotide
ttactgggagtgtgtgtcaaggctagcagg

SEQ ID NO: 294660 - DNA, 30 bp, Artificial Sequence
  Synthetic oligonucleotide
aacggcaaatcggagttatttaaacgcagg

SEQ ID NO: 294661 - DNA, 30 bp, Artificial Sequence
  Synthetic oligonucleotide
cggtaaaagatcccgctcgcggaacgcagg

SEQ ID NO: 294662 - DNA, 30 bp, Artificial Sequence
  Synthetic oligonucleotide
gcacacccaaacggactcctatcccgcagg

SEQ ID NO: 294663 - DNA, 30 bp, Artificial Sequence
  Synthetic oligonucleotide
aagaaagcgttggatcgaccacggcgcagg

SEQ ID NO: 294664 - DNA, 30 bp, Artificial Sequence
  Synthetic oligonucleotide
agtatgtatgaactctgtagaaatcgcagg

SEQ ID NO: 294665 - DNA, 30 bp, Artificial Sequence
  Synthetic oligonucleotide
agtgtgccctttttatattaaaaaggcagg

SEQ ID NO: 294666 - DNA, 30 bp, Artificial Sequence
  Synthetic oligonucleotide
acgctaaacggatcttagttaagctgcagg

SEQ ID NO: 294667 - DNA, 30 bp, Artificial Sequence
  Synthetic oligonucleotide
tgttcgaaagcaccaggggtaaagtgcagg

SEQ ID NO: 294668 - DNA, 30 bp, Artificial Sequence
  Synthetic oligonucleotide
gggcttttgcgctctggccccaagtgcagg

SEQ ID NO: 294669 - DNA, 30 bp, Artificial Sequence
  Synthetic oligonucleotide
cagggcgcgacgtatcgcggatggtgcagg

SEQ ID NO: 294670 - DNA, 30 bp, Artificial Sequence
  Synthetic oligonucleotide
agcgaaaggatcgtaaattctctgtgcagg

SEQ ID NO: 294671 - DNA, 30 bp, Artificial Sequence
  Synthetic oligonucleotide
accgcagccatgatactggcattttgcagg

SEQ ID NO: 294672 - DNA, 30 bp, Artificial Sequence
  Synthetic oligonucleotide
cttcgtatcgggtaccactgatgaatcagg

SEQ ID NO: 294673 - DNA, 30 bp, Artificial Sequence
  Synthetic oligonucleotide
agattatcaggcttgtcctaaggcatcagg

SEQ ID NO: 294674 - DNA, 30 bp, Artificial Sequence
  Synthetic oligonucleotide
agattctaaacatctgatgcctagatcagg

SEQ ID NO: 294675 - DNA, 30 bp, Artificial Sequence
  Synthetic oligonucleotide
agatggtaggtatctgagatcctgatcagg

SEQ ID NO: 294676 - DNA, 30 bp, Artificial Sequence
  Synthetic oligonucleotide
cccgtttaacatgtcaactggtttatcagg

SEQ ID NO: 294677 - DNA, 30 bp, Artificial Sequence
  Synthetic oligonucleotide
gggccggttggcaaaacatattcactcagg

SEQ ID NO: 294678 - DNA, 30 bp, Artificial Sequence
  Synthetic oligonucleotide
ttgcttgtcatacagcccccttacctcagg

SEQ ID NO: 294679 - DNA, 30 bp, Artificial Sequence
  Synthetic oligonucleotide
gtgataaacgatgacttctacgccctcagg

SEQ ID NO: 294680 - DNA, 30 bp, Artificial Sequence
  Synthetic oligonucleotide
gtgccggatcctatgcccgggccgctcagg

SEQ ID NO: 294681 - DNA, 30 bp, Artificial Sequence
  Synthetic oligonucleotide
tacatcgtaagtccgagcagccatctcagg

SEQ ID NO: 294682 - DNA, 30 bp, Artificial Sequence
  Synthetic oligonucleotide
gtccgatggcgcgtacgtcttgatctcagg

SEQ ID NO: 294683 - DNA, 30 bp, Artificial Sequence
  Synthetic oligonucleotide
gacgagcaaggagacgtccaacctctcagg

SEQ ID NO: 294684 - DNA, 30 bp, Artificial Sequence
  Synthetic oligonucleotide
gacacccttagtgtgctactcacagtcagg

SEQ ID NO: 294685 - DNA, 30 bp, Artificial Sequence
  Synthetic oligonucleotide
aagcggtagcggaaccaggaatcagtcagg

SEQ ID NO: 294686 - DNA, 30 bp, Artificial Sequence
  Synthetic oligonucleotide
tccgcacactccactgcatatttagtcagg

SEQ ID NO: 294687 - DNA, 30 bp, Artificial Sequence
  Synthetic oligonucleotide
tcaatggaatagtcttgacggctggtcagg

SEQ ID NO: 294688 - DNA, 30 bp, Artificial Sequence
  Synthetic oligonucleotide
agagcccttcatgaccctcgtattgtcagg

SEQ ID NO: 294689 - DNA, 30 bp, Artificial Sequence
  Synthetic oligonucleotide
ttgtctgacccctcgaggcaaccattcagg

SEQ ID NO: 294690 - DNA, 30 bp, Artificial Sequence
  Synthetic oligonucleotide
caaacttcggacccgaaagcagtattcagg

SEQ ID NO: 294691 - DNA, 30 bp, Artificial Sequence
  Synthetic oligonucleotide
aagaacccggaatgataccggactttcagg

SEQ ID NO: 294692 - DNA, 30 bp, Artificial Sequence
  Synthetic oligonucleotide
agagtggcttttacattctgtaacaagagg

SEQ ID NO: 294693 - DNA, 30 bp, Artificial Sequence
  Synthetic oligonucleotide
gctagacggctgctttacgacaggaagagg

SEQ ID NO: 294694 - DNA, 30 bp, Artificial Sequence
  Synthetic oligonucleotide
ttcctgttttggggagacgagcggaagagg

SEQ ID NO: 294695 - DNA, 30 bp, Artificial Sequence
  Synthetic oligonucleotide
tatctgggatggaataaactgcggaagagg

SEQ ID NO: 294696 - DNA, 30 bp, Artificial Sequence
  Synthetic oligonucleotide
tatctcgatcgcctggccacgcataagagg

SEQ ID NO: 294697 - DNA, 30 bp, Artificial Sequence
  Synthetic oligonucleotide
atcgcgatggtttgggcatttgaacagagg

SEQ ID NO: 294698 - DNA, 30 bp, Artificial Sequence
  Synthetic oligonucleotide
catttaatactcaggtttcgactacagagg

SEQ ID NO: 294699 - DNA, 30 bp, Artificial Sequence
  Synthetic oligonucleotide
gtataacccgacggggacgtcccgcagagg

SEQ ID NO: 294700 - DNA, 30 bp, Artificial Sequence
  Synthetic oligonucleotide
gcgcagtatctctttgctgggccgcagagg

SEQ ID NO: 294701 - DNA, 30 bp, Artificial Sequence
  Synthetic oligonucleotide
tccccaaacacacttcatacatggcagagg

SEQ ID NO: 294702 - DNA, 30 bp, Artificial Sequence
  Synthetic oligonucleotide
tatataacaaaataggtgtgagaagagagg

SEQ ID NO: 294703 - DNA, 30 bp, Artificial Sequence
  Synthetic oligonucleotide
aagggatataggcgcactatttatgagagg

SEQ ID NO: 294704 - DNA, 30 bp, Artificial Sequence
  Synthetic oligonucleotide
tttgctatagcgccgattaattttgagagg

SEQ ID NO: 294705 - DNA, 30 bp, Artificial Sequence
  Synthetic oligonucleotide
acacgtcttgacagcagcttcggatagagg

SEQ ID NO: 294706 - DNA, 31 bp, Artificial Sequence
  Synthetic oligonucleotide
tatccggccaggctgtagggacccctagagg

SEQ ID NO: 294707 - DNA, 30 bp, Artificial Sequence
  Synthetic oligonucleotide
ccgatgttgaagtctggccaggcctagagg

SEQ ID NO: 294708 - DNA, 30 bp, Artificial Sequence
  Synthetic oligonucleotide
tcagctctcgggaataagtcttgctagagg

SEQ ID NO: 294709 - DNA, 30 bp, Artificial Sequence
  Synthetic oligonucleotide
tccagatagggcgcttgccatgggtagagg

SEQ ID NO: 294710 - DNA, 30 bp, Artificial Sequence
  Synthetic oligonucleotide
aaagatcaagatagggggcccttgtagagg

SEQ ID NO: 294711 - DNA, 30 bp, Artificial Sequence
  Synthetic oligonucleotide
atgaagtccgccctgtactccggttagagg

SEQ ID NO: 294712 - DNA, 30 bp, Artificial Sequence
  Synthetic oligonucleotide
gacgtatgtctatgacgggtatagacgagg

SEQ ID NO: 294713 - DNA, 30 bp, Artificial Sequence
  Synthetic oligonucleotide
gtaaaaaattaatcttcaccaagaccgagg

SEQ ID NO: 294714 - DNA, 31 bp, Artificial Sequence
  Synthetic oligonucleotide
cgcgtggtaatggcgtcggggaaagccgagg

SEQ ID NO: 294715 - DNA, 30 bp, Artificial Sequence
  Synthetic oligonucleotide
tggactaatgcgctaggagggatgccgagg

SEQ ID NO: 294716 - DNA, 30 bp, Artificial Sequence
  Synthetic oligonucleotide
cgggacaacaagggtttgggtcaagcgagg

SEQ ID NO: 294717 - DNA, 30 bp, Artificial Sequence
  Synthetic oligonucleotide
aaataaaattgcttgttaaccatcgcgagg

SEQ ID NO: 294718 - DNA, 30 bp, Artificial Sequence
  Synthetic oligonucleotide
aagcgttcggaggatgctacaaaggcgagg

SEQ ID NO: 294719 - DNA, 30 bp, Artificial Sequence
  Synthetic oligonucleotide
tccagggataaacgctgttccggggcgagg

SEQ ID NO: 294720 - DNA, 30 bp, Artificial Sequence
  Synthetic oligonucleotide
acatgtacgctagggttttcagtggcgagg

SEQ ID NO: 294721 - DNA, 30 bp, Artificial Sequence
  Synthetic oligonucleotide
ttagcatagcacgaggaactgagtgcgagg

SEQ ID NO: 294722 - DNA, 30 bp, Artificial Sequence
  Synthetic oligonucleotide
ttggactcggaacgttgagtcgcatcgagg

SEQ ID NO: 294723 - DNA, 30 bp, Artificial Sequence
  Synthetic oligonucleotide
ttatatcacgaaggcggacgaggatcgagg

SEQ ID NO: 294724 - DNA, 30 bp, Artificial Sequence
  Synthetic oligonucleotide
ttaacgttagcctacggtgtgacgtcgagg

SEQ ID NO: 294725 - DNA, 30 bp, Artificial Sequence
  Synthetic oligonucleotide
aggcaattgactcaaacccggatgtcgagg

SEQ ID NO: 294726 - DNA, 30 bp, Artificial Sequence
  Synthetic oligonucleotide
atggcacattacgcgttatacgtttcgagg

SEQ ID NO: 294727 - DNA, 30 bp, Artificial Sequence
  Synthetic oligonucleotide
catctgagcgccggatttgactaaaggagg

SEQ ID NO: 294728 - DNA, 30 bp, Artificial Sequence
  Synthetic oligonucleotide
ctgggctaggccaccgactaaagaaggagg

SEQ ID NO: 294729 - DNA, 30 bp, Artificial Sequence
  Synthetic oligonucleotide
cgttcgcgatgagttcataaatcgaggagg

SEQ ID NO: 294730 - DNA, 30 bp, Artificial Sequence
  Synthetic oligonucleotide
actcattatattttacacctcaataggagg

SEQ ID NO: 294731 - DNA, 30 bp, Artificial Sequence
  Synthetic oligonucleotide
agtatgaggatgggcctagaggagcggagg

SEQ ID NO: 294732 - DNA, 30 bp, Artificial Sequence
  Synthetic oligonucleotide
gccgtcttcgaatagctattgaatcggagg

SEQ ID NO: 294733 - DNA, 30 bp, Artificial Sequence
  Synthetic oligonucleotide
gtacacatactcgtcatgtaatgagggagg

SEQ ID NO: 294734 - DNA, 30 bp, Artificial Sequence
  Synthetic oligonucleotide
ctcgtaagcatagccatttgccacgggagg

SEQ ID NO: 294735 - DNA, 30 bp, Artificial Sequence
  Synthetic oligonucleotide
tctagttggtcaacagagtctcacgggagg

SEQ ID NO: 294736 - DNA, 30 bp, Artificial Sequence
  Synthetic oligonucleotide
ataagtacatataaggagaaggtcgggagg

SEQ ID NO: 294737 - DNA, 30 bp, Artificial Sequence
  Synthetic oligonucleotide
aatgcaatcttcgactttagtgtcgggagg

SEQ ID NO: 294738 - DNA, 30 bp, Artificial Sequence
  Synthetic oligonucleotide
tcctccagtatcccttgcagcttcgggagg

SEQ ID NO: 294739 - DNA, 30 bp, Artificial Sequence
  Synthetic oligonucleotide
ctagtatgttatattgatgagcatgggagg

SEQ ID NO: 294740 - DNA, 30 bp, Artificial Sequence
  Synthetic oligonucleotide
gtgacaactttcgagtcagttcctgggagg

SEQ ID NO: 294741 - DNA, 30 bp, Artificial Sequence
  Synthetic oligonucleotide
gtaaccggatgccgttaggcggctgggagg

SEQ ID NO: 294742 - DNA, 30 bp, Artificial Sequence
  Synthetic oligonucleotide
aatgggtcaggttgtggaggctgtgggagg

SEQ ID NO: 294743 - DNA, 30 bp, Artificial Sequence
  Synthetic oligonucleotide
atgcctcggcatagatacgtggcatggagg

SEQ ID NO: 294744 - DNA, 30 bp, Artificial Sequence
  Synthetic oligonucleotide
gagggcgaagatcaacgccaggtatggagg

SEQ ID NO: 294745 - DNA, 30 bp, Artificial Sequence
  Synthetic oligonucleotide
ccttgttacagttgcacccgtaactggagg

SEQ ID NO: 294746 - DNA, 30 bp, Artificial Sequence
  Synthetic oligonucleotide
agtcttctacggggagcataccggtggagg

SEQ ID NO: 294747 - DNA, 30 bp, Artificial Sequence
  Synthetic oligonucleotide
cggggttcataatcgaagcatctgtggagg

SEQ ID NO: 294748 - DNA, 30 bp, Artificial Sequence
  Synthetic oligonucleotide
acagttgtttgacactaaggtgtgtggagg

SEQ ID NO: 294749 - DNA, 30 bp, Artificial Sequence
  Synthetic oligonucleotide
ctagtatatgcggtcgaccaacgaatgagg

SEQ ID NO: 294750 - DNA, 30 bp, Artificial Sequence
  Synthetic oligonucleotide
attttcaagaaacgcatatttcacatgagg

SEQ ID NO: 294751 - DNA, 30 bp, Artificial Sequence
  Synthetic oligonucleotide
ataggactcttcaattccagttagatgagg

SEQ ID NO: 294752 - DNA, 30 bp, Artificial Sequence
  Synthetic oligonucleotide
cagtgttcgtgattttgtaactcgatgagg

SEQ ID NO: 294753 - DNA, 30 bp, Artificial Sequence
  Synthetic oligonucleotide
cttcccgttccctgtgtggatctgatgagg

SEQ ID NO: 294754 - DNA, 30 bp, Artificial Sequence
  Synthetic oligonucleotide
caaaacaatcttggagtgacggtgatgagg

SEQ ID NO: 294755 - DNA, 30 bp, Artificial Sequence
  Synthetic oligonucleotide
gtcaacagtaccacatcgcagtccctgagg

SEQ ID NO: 294756 - DNA, 30 bp, Artificial Sequence
  Synthetic oligonucleotide
catagattcacaagctttttgttcctgagg

SEQ ID NO: 294757 - DNA, 30 bp, Artificial Sequence
  Synthetic oligonucleotide
taagggtcaagcttaagaggacagctgagg

SEQ ID NO: 294758 - DNA, 30 bp, Artificial Sequence
  Synthetic oligonucleotide
ggaactagcgtaaggacgggacagctgagg

SEQ ID NO: 294759 - DNA, 30 bp, Artificial Sequence
  Synthetic oligonucleotide
catccggcaatgcaatgttaggatctgagg

SEQ ID NO: 294760 - DNA, 30 bp, Artificial Sequence
  Synthetic oligonucleotide
ttgggaacttgataacgacgctctctgagg

SEQ ID NO: 294761 - DNA, 30 bp, Artificial Sequence
  Synthetic oligonucleotide
aagtgctctggaccccatgtaattctgagg

SEQ ID NO: 294762 - DNA, 30 bp, Artificial Sequence
  Synthetic oligonucleotide
tagaacggcgagttgaatgctggagtgagg

SEQ ID NO: 294763 - DNA, 30 bp, Artificial Sequence
  Synthetic oligonucleotide
cgagtctacgggagcagacacgacgtgagg

SEQ ID NO: 294764 - DNA, 30 bp, Artificial Sequence
  Synthetic oligonucleotide
gttaagagttacctggcggtgcgcgtgagg

SEQ ID NO: 294765 - DNA, 30 bp, Artificial Sequence
  Synthetic oligonucleotide
gaggggagcagtgtcttctacaaggtgagg

SEQ ID NO: 294766 - DNA, 30 bp, Artificial Sequence
  Synthetic oligonucleotide
tggtcttaaatggtatgacgaggggtgagg

SEQ ID NO: 294767 - DNA, 30 bp, Artificial Sequence
  Synthetic oligonucleotide
tggcgaaggagcggtcgacgggctgtgagg

SEQ ID NO: 294768 - DNA, 30 bp, Artificial Sequence
  Synthetic oligonucleotide
gaatcagacttataagggccgccattgagg

SEQ ID NO: 294769 - DNA, 30 bp, Artificial Sequence
  Synthetic oligonucleotide
cgacggcacttaaacagcatgggcttgagg

SEQ ID NO: 294770 - DNA, 30 bp, Artificial Sequence
  Synthetic oligonucleotide
gggtggggcccatttgggttgggcttgagg

SEQ ID NO: 294771 - DNA, 30 bp, Artificial Sequence
  Synthetic oligonucleotide
ctaaaaacaaggtgctaagggaggttgagg

SEQ ID NO: 294772 - DNA, 30 bp, Artificial Sequence
  Synthetic oligonucleotide
gtcaaacgactaatgatccggtatttgagg

SEQ ID NO: 294773 - DNA, 30 bp, Artificial Sequence
  Synthetic oligonucleotide
gcagtatgcctgccttgtacaattttgagg

SEQ ID NO: 294774 - DNA, 30 bp, Artificial Sequence
  Synthetic oligonucleotide
gaaagcccggtatgatagtacattttgagg

SEQ ID NO: 294775 - DNA, 30 bp, Artificial Sequence
  Synthetic oligonucleotide
cagcttcacagaatgccagggataaatagg

SEQ ID NO: 294776 - DNA, 30 bp, Artificial Sequence
  Synthetic oligonucleotide
atctagaccccagagtaggacgccaatagg

SEQ ID NO: 294777 - DNA, 30 bp, Artificial Sequence
  Synthetic oligonucleotide
caatcaaatgtgtaaattcggggcaatagg

SEQ ID NO: 294778 - DNA, 30 bp, Artificial Sequence
  Synthetic oligonucleotide
cgttatataggataggtccattgtaatagg

SEQ ID NO: 294779 - DNA, 30 bp, Artificial Sequence
  Synthetic oligonucleotide
gtatcgaactcattcgagcaacaccatagg

SEQ ID NO: 294780 - DNA, 30 bp, Artificial Sequence
  Synthetic oligonucleotide
caagatttggaatttgcactgcaccatagg

SEQ ID NO: 294781 - DNA, 30 bp, Artificial Sequence
  Synthetic oligonucleotide
aacaattgtgccgggtgaccgaagcatagg

SEQ ID NO: 294782 - DNA, 30 bp, Artificial Sequence
  Synthetic oligonucleotide
gtgacgaaatcctaataattacggcatagg

SEQ ID NO: 294783 - DNA, 30 bp, Artificial Sequence
  Synthetic oligonucleotide
ggttcattcgaaagtctcctgccagatagg

SEQ ID NO: 294784 - DNA, 30 bp, Artificial Sequence
  Synthetic oligonucleotide
tatcccgtcagtcggagatatccagatagg

SEQ ID NO: 294785 - DNA, 30 bp, Artificial Sequence
  Synthetic oligonucleotide
gaatcccgtgcccatgggtacggagatagg

SEQ ID NO: 294786 - DNA, 30 bp, Artificial Sequence
  Synthetic oligonucleotide
ggaagattcatgcgggcaaattgagatagg

SEQ ID NO: 294787 - DNA, 30 bp, Artificial Sequence
  Synthetic oligonucleotide
gatctaacaggttagtttcgttccgatagg

SEQ ID NO: 294788 - DNA, 30 bp, Artificial Sequence
  Synthetic oligonucleotide
ttgactacttatatactgtcgtgcgatagg

SEQ ID NO: 294789 - DNA, 30 bp, Artificial Sequence
  Synthetic oligonucleotide
catatctacatgaaaagtctgtgcgatagg

SEQ ID NO: 294790 - DNA, 30 bp, Artificial Sequence
  Synthetic oligonucleotide
aaccaatctatcgctattagagtcgatagg

SEQ ID NO: 294791 - DNA, 30 bp, Artificial Sequence
  Synthetic oligonucleotide
agtgatacttggatgccagatggtgatagg

SEQ ID NO: 294792 - DNA, 30 bp, Artificial Sequence
  Synthetic oligonucleotide
tagctcatgggcgttccctagtcatatagg

SEQ ID NO: 294793 - DNA, 30 bp, Artificial Sequence
  Synthetic oligonucleotide
tgcgtacaacttggccctcaaggatatagg

SEQ ID NO: 294794 - DNA, 30 bp, Artificial Sequence
  Synthetic oligonucleotide
taataggcgacaagccgcatttgctatagg

SEQ ID NO: 294795 - DNA, 30 bp, Artificial Sequence
  Synthetic oligonucleotide
gttggtcaattagggaaacgtccgtatagg

SEQ ID NO: 294796 - DNA, 30 bp, Artificial Sequence
  Synthetic oligonucleotide
attccaaaaaatcgcggtcgaccaactagg

SEQ ID NO: 294797 - DNA, 30 bp, Artificial Sequence
  Synthetic oligonucleotide
gcagaatacattcgagttcccacgactagg

SEQ ID NO: 294798 - DNA, 30 bp, Artificial Sequence
  Synthetic oligonucleotide
tatccctttttaaaaacgttggtgactagg

SEQ ID NO: 294799 - DNA, 30 bp, Artificial Sequence
  Synthetic oligonucleotide
ctcgtgcgacagcgcttgagggatactagg

SEQ ID NO: 294800 - DNA, 30 bp, Artificial Sequence
  Synthetic oligonucleotide
cgtctactacagagtagtggtctccctagg

SEQ ID NO: 294801 - DNA, 30 bp, Artificial Sequence
  Synthetic oligonucleotide
acctggattactaattggcagatgcctagg

SEQ ID NO: 294802 - DNA, 30 bp, Artificial Sequence
  Synthetic oligonucleotide
cctcgtgagtaggccacgagcaatcctagg

SEQ ID NO: 294803 - DNA, 30 bp, Artificial Sequence
  Synthetic oligonucleotide
attggattttcatcgcacggaaaggctagg

SEQ ID NO: 294804 - DNA, 30 bp, Artificial Sequence
  Synthetic oligonucleotide
aaagccccatggtggacggtaaaggctagg

SEQ ID NO: 294805 - DNA, 30 bp, Artificial Sequence
  Synthetic oligonucleotide
ttcacctttaaaggaccgatctaggctagg

SEQ ID NO: 294806 - DNA, 30 bp, Artificial Sequence
  Synthetic oligonucleotide
tgaggatgcgcaataccagatggctctagg

SEQ ID NO: 294807 - DNA, 30 bp, Artificial Sequence
  Synthetic oligonucleotide
caagtacaccaagtactgttgccgtctagg

SEQ ID NO: 294808 - DNA, 30 bp, Artificial Sequence
  Synthetic oligonucleotide
aattcacgattttgggttactttgtctagg

SEQ ID NO: 294809 - DNA, 30 bp, Artificial Sequence
  Synthetic oligonucleotide
tcctttggcagtcttgccatcacttctagg

SEQ ID NO: 294810 - DNA, 30 bp, Artificial Sequence
  Synthetic oligonucleotide
tgtcgttagagtgcagcgggagaaagtagg

SEQ ID NO: 294811 - DNA, 30 bp, Artificial Sequence
  Synthetic oligonucleotide
taatcaccgtcatatcaatgattaagtagg

SEQ ID NO: 294812 - DNA, 30 bp, Artificial Sequence
  Synthetic oligonucleotide
ctaatgctaataaggaggctggccagtagg

SEQ ID NO: 294813 - DNA, 30 bp, Artificial Sequence
  Synthetic oligonucleotide
catctcggcatttaaaataagatcagtagg

SEQ ID NO: 294814 - DNA, 30 bp, Artificial Sequence
  Synthetic oligonucleotide
gaatgactgtatgtgataacagagagtagg

SEQ ID NO: 294815 - DNA, 30 bp, Artificial Sequence
  Synthetic oligonucleotide
tttgtgaccagggcgaaaggcaggagtagg

SEQ ID NO: 294816 - DNA, 30 bp, Artificial Sequence
  Synthetic oligonucleotide
atacggtccgccgtgcctatactgagtagg

SEQ ID NO: 294817 - DNA, 30 bp, Artificial Sequence
  Synthetic oligonucleotide
gctaaggcactgcctcacagcatacgtagg

SEQ ID NO: 294818 - DNA, 30 bp, Artificial Sequence
  Synthetic oligonucleotide
acggcacttatggcggcgtaatcccgtagg

SEQ ID NO: 294819 - DNA, 30 bp, Artificial Sequence
  Synthetic oligonucleotide
acgacgttctcggaggcacgtacgcgtagg

SEQ ID NO: 294820 - DNA, 30 bp, Artificial Sequence
  Synthetic oligonucleotide
ttaagctggttcgttgacagagcgcgtagg

SEQ ID NO: 294821 - DNA, 30 bp, Artificial Sequence
  Synthetic oligonucleotide
taagaaagcgtgtaccgggcctatcgtagg

SEQ ID NO: 294822 - DNA, 30 bp, Artificial Sequence
  Synthetic oligonucleotide
gactccataagagggtgggtccctcgtagg

SEQ ID NO: 294823 - DNA, 30 bp, Artificial Sequence
  Synthetic oligonucleotide
caattgctaacaggaatataatcaggtagg

SEQ ID NO: 294824 - DNA, 30 bp, Artificial Sequence
  Synthetic oligonucleotide
gtgcgggtcgtatgtggcggatgaggtagg

SEQ ID NO: 294825 - DNA, 30 bp, Artificial Sequence
  Synthetic oligonucleotide
gctcattgccggcaggcaaaggtaggtagg

SEQ ID NO: 294826 - DNA, 30 bp, Artificial Sequence
  Synthetic oligonucleotide
acgccagcatccagattaatttgcggtagg

SEQ ID NO: 294827 - DNA, 30 bp, Artificial Sequence
  Synthetic oligonucleotide
aacgaaatcctcccgacaaggttcggtagg

SEQ ID NO: 294828 - DNA, 30 bp, Artificial Sequence
  Synthetic oligonucleotide
gggcccgttttatgtgggaagaggggtagg

SEQ ID NO: 294829 - DNA, 30 bp, Artificial Sequence
  Synthetic oligonucleotide
gggtggagcgtcgacattttgctgggtagg

SEQ ID NO: 294830 - DNA, 30 bp, Artificial Sequence
  Synthetic oligonucleotide
gaaggggattatccgcgctcgcatggtagg

SEQ ID NO: 294831 - DNA, 30 bp, Artificial Sequence
  Synthetic oligonucleotide
aacacggtatagattcgattgtttggtagg

SEQ ID NO: 294832 - DNA, 30 bp, Artificial Sequence
  Synthetic oligonucleotide
atggtctaattgaggaacaaggcctgtagg

SEQ ID NO: 294833 - DNA, 30 bp, Artificial Sequence
  Synthetic oligonucleotide
catggcgtgtccagtagtggcaggtgtagg

SEQ ID NO: 294834 - DNA, 30 bp, Artificial Sequence
  Synthetic oligonucleotide
ggttagtccttgagtcttttgcattgtagg

SEQ ID NO: 294835 - DNA, 30 bp, Artificial Sequence
  Synthetic oligonucleotide
tgctgtcatgcacccgtttagacttgtagg

SEQ ID NO: 294836 - DNA, 30 bp, Artificial Sequence
  Synthetic oligonucleotide
aacccgtccggccacagtctcggttgtagg

SEQ ID NO: 294837 - DNA, 30 bp, Artificial Sequence
  Synthetic oligonucleotide
gcaccgaaattgaaataaagctggattagg

SEQ ID NO: 294838 - DNA, 30 bp, Artificial Sequence
  Synthetic oligonucleotide
tttcgagaagtaggacacgtagtgattagg

SEQ ID NO: 294839 - DNA, 30 bp, Artificial Sequence
  Synthetic oligonucleotide
cgctggcgtatttataaacgaattattagg

SEQ ID NO: 294840 - DNA, 30 bp, Artificial Sequence
  Synthetic oligonucleotide
agtcggttgcggtatacctgtattattagg

SEQ ID NO: 294841 - DNA, 30 bp, Artificial Sequence
  Synthetic oligonucleotide
tagttggatggattacttggaaaacttagg

SEQ ID NO: 294842 - DNA, 30 bp, Artificial Sequence
  Synthetic oligonucleotide
ctgctgataatttgatatcaggaccttagg

SEQ ID NO: 294843 - DNA, 30 bp, Artificial Sequence
  Synthetic oligonucleotide
cagagtggccgggggtttttaacccttagg

SEQ ID NO: 294844 - DNA, 30 bp, Artificial Sequence
  Synthetic oligonucleotide
aagtaaaaactgccgcgaggtggccttagg

SEQ ID NO: 294845 - DNA, 30 bp, Artificial Sequence
  Synthetic oligonucleotide
ttggacgagatacgtcaggccaagcttagg

SEQ ID NO: 294846 - DNA, 30 bp, Artificial Sequence
  Synthetic oligonucleotide
ggtaccacatgttttaacccgtagcttagg

SEQ ID NO: 294847 - DNA, 30 bp, Artificial Sequence
  Synthetic oligonucleotide
cagaccttattattatttatgtcgcttagg

SEQ ID NO: 294848 - DNA, 30 bp, Artificial Sequence
  Synthetic oligonucleotide
gttcaccaaagcacgcgagaaaggcttagg

SEQ ID NO: 294849 - DNA, 30 bp, Artificial Sequence
  Synthetic oligonucleotide
gcgccggaacacctcgagtgttacgttagg

SEQ ID NO: 294850 - DNA, 30 bp, Artificial Sequence
  Synthetic oligonucleotide
tgagtcgttgcctcattaacattcgttagg

SEQ ID NO: 294851 - DNA, 30 bp, Artificial Sequence
  Synthetic oligonucleotide
gctataaaaatggcctctgcgacggttagg

SEQ ID NO: 294852 - DNA, 30 bp, Artificial Sequence
  Synthetic oligonucleotide
atgcagtgggaccccctctggacggttagg

SEQ ID NO: 294853 - DNA, 30 bp, Artificial Sequence
  Synthetic oligonucleotide
taacctgggctatgcggcttgtcggttagg

SEQ ID NO: 294854 - DNA, 30 bp, Artificial Sequence
  Synthetic oligonucleotide
gcatataatagacacgatcttcgggttagg

SEQ ID NO: 294855 - DNA, 30 bp, Artificial Sequence
  Synthetic oligonucleotide
gaggactcttctgaagggactatggttagg

SEQ ID NO: 294856 - DNA, 30 bp, Artificial Sequence
  Synthetic oligonucleotide
cacagccctcacgatgagctgggtgttagg

SEQ ID NO: 294857 - DNA, 30 bp, Artificial Sequence
  Synthetic oligonucleotide
taagctcgtagtcagcccatatagtttagg

SEQ ID NO: 294858 - DNA, 30 bp, Artificial Sequence
  Synthetic oligonucleotide
gacgtatcattgcctggcataaaaaaacgg

SEQ ID NO: 294859 - DNA, 30 bp, Artificial Sequence
  Synthetic oligonucleotide
gttatgaaacgcacctctatagccaaacgg

SEQ ID NO: 294860 - DNA, 30 bp, Artificial Sequence
  Synthetic oligonucleotide
gtcagcagaagcctggaggctacgaaacgg

SEQ ID NO: 294861 - DNA, 30 bp, Artificial Sequence
  Synthetic oligonucleotide
aaatctttggacaattgaagtacgaaacgg

SEQ ID NO: 294862 - DNA, 30 bp, Artificial Sequence
  Synthetic oligonucleotide
ctcgcacggtattcttgacgtatgaaacgg

SEQ ID NO: 294863 - DNA, 30 bp, Artificial Sequence
  Synthetic oligonucleotide
gagcatctaatttgcctttacgctaaacgg

SEQ ID NO: 294864 - DNA, 30 bp, Artificial Sequence
  Synthetic oligonucleotide
ggtttgttcgctgtttgtggaagccaacgg

SEQ ID NO: 294865 - DNA, 30 bp, Artificial Sequence
  Synthetic oligonucleotide
taaacacttgtaaagtaactcgggcaacgg

SEQ ID NO: 294866 - DNA, 30 bp, Artificial Sequence
  Synthetic oligonucleotide
ctttcaagcaactagctttgggggcaacgg

SEQ ID NO: 294867 - DNA, 30 bp, Artificial Sequence
  Synthetic oligonucleotide
tcccgagacgaggatgcaaaccaagaacgg

SEQ ID NO: 294868 - DNA, 30 bp, Artificial Sequence
  Synthetic oligonucleotide
cgcagtgacggcccgtggagagtagaacgg

SEQ ID NO: 294869 - DNA, 30 bp, Artificial Sequence
  Synthetic oligonucleotide
cccccgtgttgtcagattggtgacgaacgg

SEQ ID NO: 294870 - DNA, 30 bp, Artificial Sequence
  Synthetic oligonucleotide
tgaggatgtaagcaaactgcatgcgaacgg

SEQ ID NO: 294871 - DNA, 30 bp, Artificial Sequence
  Synthetic oligonucleotide
gatagaaacgtctataaatcgtcggaacgg

SEQ ID NO: 294872 - DNA, 30 bp, Artificial Sequence
  Synthetic oligonucleotide
tgacaacgacgcgataacgttgatgaacgg

SEQ ID NO: 294873 - DNA, 30 bp, Artificial Sequence
  Synthetic oligonucleotide
tttcatatcatggtccagatctctgaacgg

SEQ ID NO: 294874 - DNA, 30 bp, Artificial Sequence
  Synthetic oligonucleotide
ggataaggtcaataggtttaaattgaacgg

SEQ ID NO: 294875 - DNA, 30 bp, Artificial Sequence
  Synthetic oligonucleotide
gacgttgtacagccttgatcacaataacgg

SEQ ID NO: 294876 - DNA, 30 bp, Artificial Sequence
  Synthetic oligonucleotide
agcatttgtcattagtgtgatggataacgg

SEQ ID NO: 294877 - DNA, 30 bp, Artificial Sequence
  Synthetic oligonucleotide
aggcagagtaagttcgccgggcactaacgg

SEQ ID NO: 294878 - DNA, 30 bp, Artificial Sequence
  Synthetic oligonucleotide
atacagccaggtaagtgctggcactaacgg

SEQ ID NO: 294879 - DNA, 30 bp, Artificial Sequence
  Synthetic oligonucleotide
ggagcagaggtccgggacacgacctaacgg

SEQ ID NO: 294880 - DNA, 30 bp, Artificial Sequence
  Synthetic oligonucleotide
ctgaaaccgcgaaaaacatcgccctaacgg

SEQ ID NO: 294881 - DNA, 30 bp, Artificial Sequence
  Synthetic oligonucleotide
ggaaccgccgcgaccaatcagagctaacgg

SEQ ID NO: 294882 - DNA, 30 bp, Artificial Sequence
  Synthetic oligonucleotide
gcgacaccaatattttgtgggcgctaacgg

SEQ ID NO: 294883 - DNA, 30 bp, Artificial Sequence
  Synthetic oligonucleotide
taggatagccacaaggggctagcgtaacgg

SEQ ID NO: 294884 - DNA, 30 bp, Artificial Sequence
  Synthetic oligonucleotide
ccttgaatcagggtaccactgcggtaacgg

SEQ ID NO: 294885 - DNA, 30 bp, Artificial Sequence
  Synthetic oligonucleotide
ctcagataaggggtacggaaagggtaacgg

SEQ ID NO: 294886 - DNA, 30 bp, Artificial Sequence
  Synthetic oligonucleotide
gccgcagttgctcatcccgcgtattaacgg

SEQ ID NO: 294887 - DNA, 30 bp, Artificial Sequence
  Synthetic oligonucleotide
tagtgggcgaggatctttatgccttaacgg

SEQ ID NO: 294888 - DNA, 30 bp, Artificial Sequence
  Synthetic oligonucleotide
agcgagagtcaaactcttcgggcttaacgg

SEQ ID NO: 294889 - DNA, 30 bp, Artificial Sequence
  Synthetic oligonucleotide
acgccgcagtgtatactttactgttaacgg

SEQ ID NO: 294890 - DNA, 30 bp, Artificial Sequence
  Synthetic oligonucleotide
accgccgtactactctggaggtgttaacgg

SEQ ID NO: 294891 - DNA, 30 bp, Artificial Sequence
  Synthetic oligonucleotide
tctaggggggtcttcccgccgttttaacgg

SEQ ID NO: 294892 - DNA, 30 bp, Artificial Sequence
  Synthetic oligonucleotide
tatagtcgcgccgcaaataagcgaacacgg

SEQ ID NO: 294893 - DNA, 30 bp, Artificial Sequence
  Synthetic oligonucleotide
gtgaaaactacagccgcatagattacacgg

SEQ ID NO: 294894 - DNA, 30 bp, Artificial Sequence
  Synthetic oligonucleotide
acttaccctagatacacgcgaggaccacgg

SEQ ID NO: 294895 - DNA, 30 bp, Artificial Sequence
  Synthetic oligonucleotide
gctgaagttagggcacaatagaccccacgg

SEQ ID NO: 294896 - DNA, 30 bp, Artificial Sequence
  Synthetic oligonucleotide
cagccttgccatcgtgagcagatcccacgg

SEQ ID NO: 294897 - DNA, 30 bp, Artificial Sequence
  Synthetic oligonucleotide
gcgttatcaagtgtgcggactctgccacgg

SEQ ID NO: 294898 - DNA, 30 bp, Artificial Sequence
  Synthetic oligonucleotide
gtggggtgctgggccaagccatcagcacgg

SEQ ID NO: 294899 - DNA, 30 bp, Artificial Sequence
  Synthetic oligonucleotide
agcacctagggagggatatgtctagcacgg

SEQ ID NO: 294900 - DNA, 30 bp, Artificial Sequence
  Synthetic oligonucleotide
acaaggcgtaggtctgccagccaggcacgg

SEQ ID NO: 294901 - DNA, 30 bp, Artificial Sequence
  Synthetic oligonucleotide
tactgcgaaagaaggttagagagggcacgg

SEQ ID NO: 294902 - DNA, 30 bp, Artificial Sequence
  Synthetic oligonucleotide
ggagctgttagacagagcgagagggcacgg

SEQ ID NO: 294903 - DNA, 30 bp, Artificial Sequence
  Synthetic oligonucleotide
catacgtcagttgtaactatatgggcacgg

SEQ ID NO: 294904 - DNA, 30 bp, Artificial Sequence
  Synthetic oligonucleotide
gtatgataccggcggtcgaatggtgcacgg

SEQ ID NO: 294905 - DNA, 30 bp, Artificial Sequence
  Synthetic oligonucleotide
ccgtgttttttaacaataaaccttgcacgg

SEQ ID NO: 294906 - DNA, 30 bp, Artificial Sequence
  Synthetic oligonucleotide
agcattttggacaggcgttgaggatcacgg

SEQ ID NO: 294907 - DNA, 30 bp, Artificial Sequence
  Synthetic oligonucleotide
tagcagttcttttgtgcaactagctcacgg

SEQ ID NO: 294908 - DNA, 30 bp, Artificial Sequence
  Synthetic oligonucleotide
ggaggagcgaaaatgccattcacgtcacgg

SEQ ID NO: 294909 - DNA, 30 bp, Artificial Sequence
  Synthetic oligonucleotide
agcgataaggagtcaatctgtgggtcacgg

SEQ ID NO: 294910 - DNA, 30 bp, Artificial Sequence
  Synthetic oligonucleotide
gtcgaccaagggaagtgtcgcatgtcacgg

SEQ ID NO: 294911 - DNA, 30 bp, Artificial Sequence
  Synthetic oligonucleotide
gacttcgcgtaggttatatgatgttcacgg

SEQ ID NO: 294912 - DNA, 30 bp, Artificial Sequence
  Synthetic oligonucleotide
cgttcgaaatgcgactgttatatttcacgg

SEQ ID NO: 294913 - DNA, 30 bp, Artificial Sequence
  Synthetic oligonucleotide
tggtgggtggtgaactcttaagaaagacgg

SEQ ID NO: 294914 - DNA, 30 bp, Artificial Sequence
  Synthetic oligonucleotide
tatagtcagactgtatctaggacaagacgg

SEQ ID NO: 294915 - DNA, 30 bp, Artificial Sequence
  Synthetic oligonucleotide
aaactatactattgctgactcccaagacgg

SEQ ID NO: 294916 - DNA, 30 bp, Artificial Sequence
  Synthetic oligonucleotide
ctagtcgatgttgactacgactgaagacgg

SEQ ID NO: 294917 - DNA, 30 bp, Artificial Sequence
  Synthetic oligonucleotide
gcttagtgcacgctttcacgtgtcagacgg

SEQ ID NO: 294918 - DNA, 30 bp, Artificial Sequence
  Synthetic oligonucleotide
accgcgcttgggaaaccggaggagagacgg

SEQ ID NO: 294919 - DNA, 30 bp, Artificial Sequence
  Synthetic oligonucleotide
gccttgcaaccgccaggtaagaaacgacgg

SEQ ID NO: 294920 - DNA, 30 bp, Artificial Sequence
  Synthetic oligonucleotide
tagagcgatatagagacccgctaacgacgg

SEQ ID NO: 294921 - DNA, 30 bp, Artificial Sequence
  Synthetic oligonucleotide
atgccgcggtgagagctttggcgacgacgg

SEQ ID NO: 294922 - DNA, 30 bp, Artificial Sequence
  Synthetic oligonucleotide
gcgaattccggtagtatggagggacgacgg

SEQ ID NO: 294923 - DNA, 30 bp, Artificial Sequence
  Synthetic oligonucleotide
ccacttggtcaacccccaccgggccgacgg

SEQ ID NO: 294924 - DNA, 30 bp, Artificial Sequence
  Synthetic oligonucleotide
cggtaattaaggccaaagctctcgcgacgg

SEQ ID NO: 294925 - DNA, 30 bp, Artificial Sequence
  Synthetic oligonucleotide
ttaacaacaactctagcctggtggcgacgg

SEQ ID NO: 294926 - DNA, 30 bp, Artificial Sequence
  Synthetic oligonucleotide
ccatgggagcatttcatccacaatcgacgg

SEQ ID NO: 294927 - DNA, 30 bp, Artificial Sequence
  Synthetic oligonucleotide
aagtccacagggaggttggttcatcgacgg

SEQ ID NO: 294928 - DNA, 30 bp, Artificial Sequence
  Synthetic oligonucleotide
caaatcctaccgcgcgtatctcctcgacgg

SEQ ID NO: 294929 - DNA, 30 bp, Artificial Sequence
  Synthetic oligonucleotide
ctacgtatccaaggcttacacgcaggacgg

SEQ ID NO: 294930 - DNA, 30 bp, Artificial Sequence
  Synthetic oligonucleotide
tacgttatactgcattaagcttgaggacgg

SEQ ID NO: 294931 - DNA, 30 bp, Artificial Sequence
  Synthetic oligonucleotide
actaatagcggctactctactaacggacgg

SEQ ID NO: 294932 - DNA, 30 bp, Artificial Sequence
  Synthetic oligonucleotide
attatacccagagtgtagggagtcggacgg

SEQ ID NO: 294933 - DNA, 30 bp, Artificial Sequence
  Synthetic oligonucleotide
tccaagacgaggttttgcctactgggacgg

SEQ ID NO: 294934 - DNA, 30 bp, Artificial Sequence
  Synthetic oligonucleotide
tctaggcggggaaagtagtgcgtgggacgg

SEQ ID NO: 294935 - DNA, 30 bp, Artificial Sequence
  Synthetic oligonucleotide
agtaatgtcaattatttaggatttggacgg

SEQ ID NO: 294936 - DNA, 30 bp, Artificial Sequence
  Synthetic oligonucleotide
gggggctcttccggaggttatgaatgacgg

SEQ ID NO: 294937 - DNA, 30 bp, Artificial Sequence
  Synthetic oligonucleotide
gggtagcgttcacagcttataatctgacgg

SEQ ID NO: 294938 - DNA, 30 bp, Artificial Sequence
  Synthetic oligonucleotide
taggagggtccccggactttgttgtgacgg

SEQ ID NO: 294939 - DNA, 30 bp, Artificial Sequence
  Synthetic oligonucleotide
gagcctgacagcgacatggttcaaatacgg

SEQ ID NO: 294940 - DNA, 30 bp, Artificial Sequence
  Synthetic oligonucleotide
aagttttccgaacatattgttggaatacgg

SEQ ID NO: 294941 - DNA, 30 bp, Artificial Sequence
  Synthetic oligonucleotide
atccttacctcagaggatagtagcatacgg

SEQ ID NO: 294942 - DNA, 30 bp, Artificial Sequence
  Synthetic oligonucleotide
gatgcagactcgccagcactgaagatacgg

SEQ ID NO: 294943 - DNA, 30 bp, Artificial Sequence
  Synthetic oligonucleotide
gtgcagacacctcttcgcccggagatacgg

SEQ ID NO: 294944 - DNA, 30 bp, Artificial Sequence
  Synthetic oligonucleotide
gatcttatgtacttaacaaggtcgatacgg

SEQ ID NO: 294945 - DNA, 30 bp, Artificial Sequence
  Synthetic oligonucleotide
acatcggttgtcgtagtcggatatatacgg

SEQ ID NO: 294946 - DNA, 30 bp, Artificial Sequence
  Synthetic oligonucleotide
agtgtaacaagttgttggctccttatacgg

SEQ ID NO: 294947 - DNA, 30 bp, Artificial Sequence
  Synthetic oligonucleotide
cttatcttcacactatcgggtaccctacgg

SEQ ID NO: 294948 - DNA, 30 bp, Artificial Sequence
  Synthetic oligonucleotide
aggggtcgtgaagtgcgtgttcccctacgg

SEQ ID NO: 294949 - DNA, 30 bp, Artificial Sequence
  Synthetic oligonucleotide
tatcaaggattattactttctcagctacgg

SEQ ID NO: 294950 - DNA, 30 bp, Artificial Sequence
  Synthetic oligonucleotide
tcgaatgtagttattacattagtgctacgg

SEQ ID NO: 294951 - DNA, 30 bp, Artificial Sequence
  Synthetic oligonucleotide
tccgaggggagtctcacgttcgtagtacgg

SEQ ID NO: 294952 - DNA, 30 bp, Artificial Sequence
  Synthetic oligonucleotide
aggcaatggcatttgaatctcgccgtacgg

SEQ ID NO: 294953 - DNA, 30 bp, Artificial Sequence
  Synthetic oligonucleotide
cactaacttagacttcttgaaggattacgg

SEQ ID NO: 294954 - DNA, 30 bp, Artificial Sequence
  Synthetic oligonucleotide
ctacgtctagtcggttttactggattacgg

SEQ ID NO: 294955 - DNA, 30 bp, Artificial Sequence
  Synthetic oligonucleotide
accgcccacgaaatatcgactcacttacgg

SEQ ID NO: 294956 - DNA, 30 bp, Artificial Sequence
  Synthetic oligonucleotide
ggcgcgcaggacagtccgcattgcttacgg

SEQ ID NO: 294957 - DNA, 30 bp, Artificial Sequence
  Synthetic oligonucleotide
ctcagttcgcaaccatctaattaaaaccgg

SEQ ID NO: 294958 - DNA, 30 bp, Artificial Sequence
  Synthetic oligonucleotide
cctgttcgagcccatggacgcataaaccgg

SEQ ID NO: 294959 - DNA, 30 bp, Artificial Sequence
  Synthetic oligonucleotide
aaataggagaatttgcacgccaacaaccgg

SEQ ID NO: 294960 - DNA, 30 bp, Artificial Sequence
  Synthetic oligonucleotide
cttcttgaggggagcagtaggcgcaaccgg

SEQ ID NO: 294961 - DNA, 30 bp, Artificial Sequence
  Synthetic oligonucleotide
caccgtgtcataaccctcacgggcaaccgg

SEQ ID NO: 294962 - DNA, 30 bp, Artificial Sequence
  Synthetic oligonucleotide
aatatatgtagagagaggttgtggaaccgg

SEQ ID NO: 294963 - DNA, 30 bp, Artificial Sequence
  Synthetic oligonucleotide
tgagggatcggcggcatccattctaaccgg

SEQ ID NO: 294964 - DNA, 30 bp, Artificial Sequence
  Synthetic oligonucleotide
agagtaatcagtaggcccgtaagtaaccgg

SEQ ID NO: 294965 - DNA, 30 bp, Artificial Sequence
  Synthetic oligonucleotide
gacggagggcaacttccatgctaacaccgg

SEQ ID NO: 294966 - DNA, 30 bp, Artificial Sequence
  Synthetic oligonucleotide
tggttggattaaagcacacacgcacaccgg

SEQ ID NO: 294967 - DNA, 30 bp, Artificial Sequence
  Synthetic oligonucleotide
tgcccgagtctttaggagctgagacaccgg

SEQ ID NO: 294968 - DNA, 30 bp, Artificial Sequence
  Synthetic oligonucleotide
cattagccgctcagtcgtcagtaccaccgg

SEQ ID NO: 294969 - DNA, 30 bp, Artificial Sequence
  Synthetic oligonucleotide
agtatttggtccgcggcaaagatccaccgg

SEQ ID NO: 294970 - DNA, 30 bp, Artificial Sequence
  Synthetic oligonucleotide
attagtgtgactcctggtcgttctcaccgg

SEQ ID NO: 294971 - DNA, 30 bp, Artificial Sequence
  Synthetic oligonucleotide
actaacggagtccaatagtgcgtagaccgg

SEQ ID NO: 294972 - DNA, 30 bp, Artificial Sequence
  Synthetic oligonucleotide
ttgatcagcagggacatacaccacgaccgg

SEQ ID NO: 294973 - DNA, 30 bp, Artificial Sequence
  Synthetic oligonucleotide
aaagccaaaggtcctctccggatggaccgg

SEQ ID NO: 294974 - DNA, 30 bp, Artificial Sequence
  Synthetic oligonucleotide
tctgatgacatagtgagacgtatggaccgg

SEQ ID NO: 294975 - DNA, 31 bp, Artificial Sequence
  Synthetic oligonucleotide
ctaacggcggcgagatgttacaattgaccgg

SEQ ID NO: 294976 - DNA, 30 bp, Artificial Sequence
  Synthetic oligonucleotide
gtacacgaatggggcaagcgccactaccgg

SEQ ID NO: 294977 - DNA, 30 bp, Artificial Sequence
  Synthetic oligonucleotide
atggtgagtatctgctaaatgtgctaccgg

SEQ ID NO: 294978 - DNA, 30 bp, Artificial Sequence
  Synthetic oligonucleotide
ggaggaagaacatattactacaggtaccgg

SEQ ID NO: 294979 - DNA, 30 bp, Artificial Sequence
  Synthetic oligonucleotide
tcgagagctccacacgtcggatggtaccgg

SEQ ID NO: 294980 - DNA, 30 bp, Artificial Sequence
  Synthetic oligonucleotide
atcaattataaactcccactgatcacccgg

SEQ ID NO: 294981 - DNA, 30 bp, Artificial Sequence
  Synthetic oligonucleotide
cgatatccgagtgatttacataagacccgg

SEQ ID NO: 294982 - DNA, 30 bp, Artificial Sequence
  Synthetic oligonucleotide
acttacattcctttctcgcgtggtacccgg

SEQ ID NO: 294983 - DNA, 30 bp, Artificial Sequence
  Synthetic oligonucleotide
tcgttgggtgaagctcggatttacccccgg

SEQ ID NO: 294984 - DNA, 30 bp, Artificial Sequence
  Synthetic oligonucleotide
cacaagggaagtacctatgggcgcccccgg

SEQ ID NO: 294985 - DNA, 30 bp, Artificial Sequence
  Synthetic oligonucleotide
tttgtgagctgcagttgggctcgtccccgg

SEQ ID NO: 294986 - DNA, 30 bp, Artificial Sequence
  Synthetic oligonucleotide
agtgtaaacgcgcatatgccgggtccccgg

SEQ ID NO: 294987 - DNA, 30 bp, Artificial Sequence
  Synthetic oligonucleotide
gcaatagcggcgcatatcatgattccccgg

SEQ ID NO: 294988 - DNA, 30 bp, Artificial Sequence
  Synthetic oligonucleotide
gctagtctcttggaactgtggctagcccgg

SEQ ID NO: 294989 - DNA, 30 bp, Artificial Sequence
  Synthetic oligonucleotide
cacgctcaaccgtattgtgactccgcccgg

SEQ ID NO: 294990 - DNA, 30 bp, Artificial Sequence
  Synthetic oligonucleotide
ggggcgtgtggcagccgaaggggggcccgg

SEQ ID NO: 294991 - DNA, 30 bp, Artificial Sequence
  Synthetic oligonucleotide
aggattcgggtatgccgccgactggcccgg

SEQ ID NO: 294992 - DNA, 30 bp, Artificial Sequence
  Synthetic oligonucleotide
tagaaccccgcaattcataaagcttcccgg

SEQ ID NO: 294993 - DNA, 30 bp, Artificial Sequence
  Synthetic oligonucleotide
tcagaacaccgatcttagggcagttcccgg

SEQ ID NO: 294994 - DNA, 30 bp, Artificial Sequence
  Synthetic oligonucleotide
agggccatagcctggtccggcgtttcccgg

SEQ ID NO: 294995 - DNA, 30 bp, Artificial Sequence
  Synthetic oligonucleotide
taattgatacaacttagaaaatcaagccgg

SEQ ID NO: 294996 - DNA, 30 bp, Artificial Sequence
  Synthetic oligonucleotide
attcgaggtcatgatagagtactaagccgg

SEQ ID NO: 294997 - DNA, 30 bp, Artificial Sequence
  Synthetic oligonucleotide
gcacaatagtgcctgggagtgttcagccgg

SEQ ID NO: 294998 - DNA, 30 bp, Artificial Sequence
  Synthetic oligonucleotide
gtaccacacacggtgtatggaacgagccgg

SEQ ID NO: 294999 - DNA, 30 bp, Artificial Sequence
  Synthetic oligonucleotide
atgagacatccggcatgtgaatgtagccgg

SEQ ID NO: 295000 - DNA, 30 bp, Artificial Sequence
  Synthetic oligonucleotide
cctgttcgatgtaactaatacgtacgccgg

SEQ ID NO: 295001 - DNA, 30 bp, Artificial Sequence
  Synthetic oligonucleotide
aagtaaggtacagattccgggcaccgccgg

SEQ ID NO: 295002 - DNA, 30 bp, Artificial Sequence
  Synthetic oligonucleotide
gatcgtcgggggcttgggggcaagcgccgg

SEQ ID NO: 295003 - DNA, 30 bp, Artificial Sequence
  Synthetic oligonucleotide
ttcacgatcgtggtgatccgaatgcgccgg

SEQ ID NO: 295004 - DNA, 30 bp, Artificial Sequence
  Synthetic oligonucleotide
gactgtgactcagtcacgggatgtcgccgg

SEQ ID NO: 295005 - DNA, 30 bp, Artificial Sequence
  Synthetic oligonucleotide
tcggagcctgcacaagtctattgtcgccgg

SEQ ID NO: 295006 - DNA, 30 bp, Artificial Sequence
  Synthetic oligonucleotide
agaggttaagcgcgtagcatcccaggccgg

SEQ ID NO: 295007 - DNA, 31 bp, Artificial Sequence
  Synthetic oligonucleotide
gttttagttcagcattgtcgatgtaggccgg

SEQ ID NO: 295008 - DNA, 30 bp, Artificial Sequence
  Synthetic oligonucleotide
ttgggacattgtaaatatcaacgcggccgg

SEQ ID NO: 295009 - DNA, 30 bp, Artificial Sequence
  Synthetic oligonucleotide
taggttgttttacggctagctaggggccgg

SEQ ID NO: 295010 - DNA, 30 bp, Artificial Sequence
  Synthetic oligonucleotide
tctagacactgcccagcccgtacatgccgg

SEQ ID NO: 295011 - DNA, 30 bp, Artificial Sequence
  Synthetic oligonucleotide
agtacccacaaatctatactattatgccgg

SEQ ID NO: 295012 - DNA, 30 bp, Artificial Sequence
  Synthetic oligonucleotide
tattgaattctaagacggatccagtgccgg

SEQ ID NO: 295013 - DNA, 30 bp, Artificial Sequence
  Synthetic oligonucleotide
acttactgcagctaattgactgcttgccgg

SEQ ID NO: 295014 - DNA, 30 bp, Artificial Sequence
  Synthetic oligonucleotide
ccatcatcccttttccaggagttttgccgg

SEQ ID NO: 295015 - DNA, 30 bp, Artificial Sequence
  Synthetic oligonucleotide
agaggcttccttctatataaacaaatccgg

SEQ ID NO: 295016 - DNA, 30 bp, Artificial Sequence
  Synthetic oligonucleotide
gatttacgctcgaacgtggagtgaatccgg

SEQ ID NO: 295017 - DNA, 30 bp, Artificial Sequence
  Synthetic oligonucleotide
gtgactggcgtagtcgagtgcgccatccgg

SEQ ID NO: 295018 - DNA, 30 bp, Artificial Sequence
  Synthetic oligonucleotide
cataacctgtctaggcacactggactccgg

SEQ ID NO: 295019 - DNA, 30 bp, Artificial Sequence
  Synthetic oligonucleotide
cggggccgctacgactgtcaaactctccgg

SEQ ID NO: 295020 - DNA, 30 bp, Artificial Sequence
  Synthetic oligonucleotide
accttttagaggggcctggaaattctccgg

SEQ ID NO: 295021 - DNA, 30 bp, Artificial Sequence
  Synthetic oligonucleotide
aaatatccgtactacacgtcgagggtccgg

SEQ ID NO: 295022 - DNA, 30 bp, Artificial Sequence
  Synthetic oligonucleotide
ataccagctgaattacaacctctggtccgg

SEQ ID NO: 295023 - DNA, 30 bp, Artificial Sequence
  Synthetic oligonucleotide
ccatgggccaagggagtcaaacctgtccgg

SEQ ID NO: 295024 - DNA, 30 bp, Artificial Sequence
  Synthetic oligonucleotide
attaaatcgttgtgggggattattgtccgg

SEQ ID NO: 295025 - DNA, 30 bp, Artificial Sequence
  Synthetic oligonucleotide
atctccccgcgttgaatcggcctattccgg

SEQ ID NO: 295026 - DNA, 30 bp, Artificial Sequence
  Synthetic oligonucleotide
gtcaactgagcatgttagtgctccttccgg

SEQ ID NO: 295027 - DNA, 30 bp, Artificial Sequence
  Synthetic oligonucleotide
cacgtgattctcaaaacgggcaatttccgg

SEQ ID NO: 295028 - DNA, 30 bp, Artificial Sequence
  Synthetic oligonucleotide
tatagtacaagttgcgaatcaagtttccgg

SEQ ID NO: 295029 - DNA, 30 bp, Artificial Sequence
  Synthetic oligonucleotide
caggctaagaaccaggttgcggttttccgg

SEQ ID NO: 295030 - DNA, 30 bp, Artificial Sequence
  Synthetic oligonucleotide
gatgggtttcgggtacaactcgaaaagcgg

SEQ ID NO: 295031 - DNA, 30 bp, Artificial Sequence
  Synthetic oligonucleotide
tattcgataattctacggcttataaagcgg

SEQ ID NO: 295032 - DNA, 30 bp, Artificial Sequence
  Synthetic oligonucleotide
agtggcccggagagatattgacctaagcgg

SEQ ID NO: 295033 - DNA, 30 bp, Artificial Sequence
  Synthetic oligonucleotide
gtcaatgaagccatcggaaatgaccagcgg

SEQ ID NO: 295034 - DNA, 30 bp, Artificial Sequence
  Synthetic oligonucleotide
aaaagcgctcctttgtgtgcattccagcgg

SEQ ID NO: 295035 - DNA, 30 bp, Artificial Sequence
  Synthetic oligonucleotide
ttctacgggctagatctgcattagcagcgg

SEQ ID NO: 295036 - DNA, 30 bp, Artificial Sequence
  Synthetic oligonucleotide
gggtgtactaatgaagtcaatgcgcagcgg

SEQ ID NO: 295037 - DNA, 30 bp, Artificial Sequence
  Synthetic oligonucleotide
ctggctcggtgctggtcgttgaatcagcgg

SEQ ID NO: 295038 - DNA, 30 bp, Artificial Sequence
  Synthetic oligonucleotide
ggcgatatttagattgtgggatgggagcgg

SEQ ID NO: 295039 - DNA, 30 bp, Artificial Sequence
  Synthetic oligonucleotide
aagcgaaaaccgctaggcagagtggagcgg

SEQ ID NO: 295040 - DNA, 30 bp, Artificial Sequence
  Synthetic oligonucleotide
cggttttggaggcttcgtgtgtgtgagcgg

SEQ ID NO: 295041 - DNA, 30 bp, Artificial Sequence
  Synthetic oligonucleotide
cgttcagactttttcaaccctattgagcgg

SEQ ID NO: 295042 - DNA, 30 bp, Artificial Sequence
  Synthetic oligonucleotide
gatcctttgattacatcaaggccatagcgg

SEQ ID NO: 295043 - DNA, 30 bp, Artificial Sequence
  Synthetic oligonucleotide
gtgataccttaaaccaagcagcgatagcgg

SEQ ID NO: 295044 - DNA, 30 bp, Artificial Sequence
  Synthetic oligonucleotide
gtctgtgctatactcggtaggaactagcgg

SEQ ID NO: 295045 - DNA, 30 bp, Artificial Sequence
  Synthetic oligonucleotide
cagatattccgaatcaaacgcacgtagcgg

SEQ ID NO: 295046 - DNA, 30 bp, Artificial Sequence
  Synthetic oligonucleotide
tggctcgttgccatacgcgaaacttagcgg

SEQ ID NO: 295047 - DNA, 30 bp, Artificial Sequence
  Synthetic oligonucleotide
tcctgtgcgaaggttggcctagtttagcgg

SEQ ID NO: 295048 - DNA, 30 bp, Artificial Sequence
  Synthetic oligonucleotide
ggaccccatattttttagcgtgtttagcgg

SEQ ID NO: 295049 - DNA, 30 bp, Artificial Sequence
  Synthetic oligonucleotide
gtgtacacagtcagcatcctccgaacgcgg

SEQ ID NO: 295050 - DNA, 30 bp, Artificial Sequence
  Synthetic oligonucleotide
accgcgaagcgaggtgctgtcggaacgcgg

SEQ ID NO: 295051 - DNA, 30 bp, Artificial Sequence
  Synthetic oligonucleotide
caagttgtatctaacgggggtacgacgcgg

SEQ ID NO: 295052 - DNA, 30 bp, Artificial Sequence
  Synthetic oligonucleotide
tgcggctcaatcgacgtgcggcgcccgcgg

SEQ ID NO: 295053 - DNA, 30 bp, Artificial Sequence
  Synthetic oligonucleotide
gaccccggagagataaatcgcgagccgcgg

SEQ ID NO: 295054 - DNA, 30 bp, Artificial Sequence
  Synthetic oligonucleotide
aacgggcgcgcgtgatagagccgtccgcgg

SEQ ID NO: 295055 - DNA, 30 bp, Artificial Sequence
  Synthetic oligonucleotide
gtcaagaggagcaggcaggagccagcgcgg

SEQ ID NO: 295056 - DNA, 30 bp, Artificial Sequence
  Synthetic oligonucleotide
ataaacgtggggttaggagcacccgcgcgg

SEQ ID NO: 295057 - DNA, 31 bp, Artificial Sequence
  Synthetic oligonucleotide
aactatttaaataccatgatgggcggcgcgg

SEQ ID NO: 295058 - DNA, 30 bp, Artificial Sequence
  Synthetic oligonucleotide
ctttaagctctaggacttgaaggctcgcgg

SEQ ID NO: 295059 - DNA, 29 bp, Artificial Sequence
  Synthetic oligonucleotide
tgactgtcgagctaaacttagggtcgcgg

SEQ ID NO: 295060 - DNA, 30 bp, Artificial Sequence
  Synthetic oligonucleotide
cgggcacagttgaagggactgaggaggcgg

SEQ ID NO: 295061 - DNA, 30 bp, Artificial Sequence
  Synthetic oligonucleotide
cgtacgccgacggccctagggtctaggcgg

SEQ ID NO: 295062 - DNA, 30 bp, Artificial Sequence
  Synthetic oligonucleotide
aagttgcgtctcgggattggttgacggcgg

SEQ ID NO: 295063 - DNA, 30 bp, Artificial Sequence
  Synthetic oligonucleotide
tcaggggtctacatgacacgatgccggcgg

SEQ ID NO: 295064 - DNA, 30 bp, Artificial Sequence
  Synthetic oligonucleotide
ctaaattactgctaccattacgtccggcgg

SEQ ID NO: 295065 - DNA, 30 bp, Artificial Sequence
  Synthetic oligonucleotide
gtccagtcgggaccgtcatttctagggcgg

SEQ ID NO: 295066 - DNA, 30 bp, Artificial Sequence
  Synthetic oligonucleotide
tgattcgtctgctggtggccgtgcgggcgg

SEQ ID NO: 295067 - DNA, 30 bp, Artificial Sequence
  Synthetic oligonucleotide
gtggccctcactcttctgtaatcggggcgg

SEQ ID NO: 295068 - DNA, 30 bp, Artificial Sequence
  Synthetic oligonucleotide
ccgcggatactcgtgctaagaggggggcgg

SEQ ID NO: 295069 - DNA, 30 bp, Artificial Sequence
  Synthetic oligonucleotide
ccaccgattttgcggctgcatggggggcgg

SEQ ID NO: 295070 - DNA, 30 bp, Artificial Sequence
  Synthetic oligonucleotide
ggacctcaggcatccaatattttggggcgg

SEQ ID NO: 295071 - DNA, 30 bp, Artificial Sequence
  Synthetic oligonucleotide
accgacaagtttcgtcgcccatatgggcgg

SEQ ID NO: 295072 - DNA, 30 bp, Artificial Sequence
  Synthetic oligonucleotide
gggttccaggtcaagtgtgaccgatggcgg

SEQ ID NO: 295073 - DNA, 31 bp, Artificial Sequence
  Synthetic oligonucleotide
ctaagccgctcagattcgcacaaactggcgg

SEQ ID NO: 295074 - DNA, 30 bp, Artificial Sequence
  Synthetic oligonucleotide
cgtgaacagatatgtgccctttgctggcgg

SEQ ID NO: 295075 - DNA, 30 bp, Artificial Sequence
  Synthetic oligonucleotide
caacctgataggctgcgccggttctggcgg

SEQ ID NO: 295076 - DNA, 30 bp, Artificial Sequence
  Synthetic oligonucleotide
tacttggaattggttcggagtgagtggcgg

SEQ ID NO: 295077 - DNA, 30 bp, Artificial Sequence
  Synthetic oligonucleotide
gtaaagaaacaaggtccacgttcgtggcgg

SEQ ID NO: 295078 - DNA, 30 bp, Artificial Sequence
  Synthetic oligonucleotide
gaccgccatgaacttcagcaaaggtggcgg

SEQ ID NO: 295079 - DNA, 30 bp, Artificial Sequence
  Synthetic oligonucleotide
cctgctgttccgttacattgccattggcgg

SEQ ID NO: 295080 - DNA, 30 bp, Artificial Sequence
  Synthetic oligonucleotide
ggtaaacggttacgaagtgacgtaatgcgg

SEQ ID NO: 295081 - DNA, 30 bp, Artificial Sequence
  Synthetic oligonucleotide
gtaaaatacggtgggctagttttaatgcgg

SEQ ID NO: 295082 - DNA, 30 bp, Artificial Sequence
  Synthetic oligonucleotide
attcgctaattgttgcactaagtgatgcgg

SEQ ID NO: 295083 - DNA, 30 bp, Artificial Sequence
  Synthetic oligonucleotide
aggccactcgaatcgagcgggcgactgcgg

SEQ ID NO: 295084 - DNA, 30 bp, Artificial Sequence
  Synthetic oligonucleotide
taggagtcgcgcttagaccgactactgcgg

SEQ ID NO: 295085 - DNA, 30 bp, Artificial Sequence
  Synthetic oligonucleotide
gcctacgcacgtccacaatgtgtgctgcgg

SEQ ID NO: 295086 - DNA, 30 bp, Artificial Sequence
  Synthetic oligonucleotide
aggtcggaaactttcgtcttcaatctgcgg

SEQ ID NO: 295087 - DNA, 30 bp, Artificial Sequence
  Synthetic oligonucleotide
tcacttaaaagtgcgactaccgcagtgcgg

SEQ ID NO: 295088 - DNA, 30 bp, Artificial Sequence
  Synthetic oligonucleotide
aggcgtatcgtatatattgtttaggtgcgg

SEQ ID NO: 295089 - DNA, 30 bp, Artificial Sequence
  Synthetic oligonucleotide
agcgattctgatgtctaatggttggtgcgg

SEQ ID NO: 295090 - DNA, 30 bp, Artificial Sequence
  Synthetic oligonucleotide
tgactgcgcaacagggcaaaagcattgcgg

SEQ ID NO: 295091 - DNA, 30 bp, Artificial Sequence
  Synthetic oligonucleotide
tattgctactgatgagattatagcttgcgg

SEQ ID NO: 295092 - DNA, 30 bp, Artificial Sequence
  Synthetic oligonucleotide
ttgttgcttccctaacaatactcgttgcgg

SEQ ID NO: 295093 - DNA, 30 bp, Artificial Sequence
  Synthetic oligonucleotide
gttgatagaatctgcgggtgacggttgcgg

SEQ ID NO: 295094 - DNA, 30 bp, Artificial Sequence
  Synthetic oligonucleotide
aacaaaggccaaacgcgctcagagaatcgg

SEQ ID NO: 295095 - DNA, 30 bp, Artificial Sequence
  Synthetic oligonucleotide
aattggtccgaagaggaggccgataatcgg

SEQ ID NO: 295096 - DNA, 30 bp, Artificial Sequence
  Synthetic oligonucleotide
cgtgcttcggaacgtggttgttataatcgg

SEQ ID NO: 295097 - DNA, 30 bp, Artificial Sequence
  Synthetic oligonucleotide
acccttgcagttcccgctcagggtaatcgg

SEQ ID NO: 295098 - DNA, 30 bp, Artificial Sequence
  Synthetic oligonucleotide
taggacggaaaaggggggttatttaatcgg

SEQ ID NO: 295099 - DNA, 30 bp, Artificial Sequence
  Synthetic oligonucleotide
gacgaccgttgtgtagagacaaaacatcgg

SEQ ID NO: 295100 - DNA, 30 bp, Artificial Sequence
  Synthetic oligonucleotide
cctcgagctaaagtttgcgtcgaacatcgg

SEQ ID NO: 295101 - DNA, 30 bp, Artificial Sequence
  Synthetic oligonucleotide
atcctacatagagtaatggtatgacatcgg

SEQ ID NO: 295102 - DNA, 30 bp, Artificial Sequence
  Synthetic oligonucleotide
gttgagtagtaggttctcttccaagatcgg

SEQ ID NO: 295103 - DNA, 30 bp, Artificial Sequence
  Synthetic oligonucleotide
tggtcgacgaggagacctgtgccagatcgg

SEQ ID NO: 295104 - DNA, 30 bp, Artificial Sequence
  Synthetic oligonucleotide
cggcgaataggcttggggcaaatagatcgg

SEQ ID NO: 295105 - DNA, 30 bp, Artificial Sequence
  Synthetic oligonucleotide
agagaattatattagttatgtatcgatcgg

SEQ ID NO: 295106 - DNA, 30 bp, Artificial Sequence
  Synthetic oligonucleotide
gtaacagaataaatattgttagtggatcgg

SEQ ID NO: 295107 - DNA, 30 bp, Artificial Sequence
  Synthetic oligonucleotide
gttactcttatgggattgaaccatgatcgg

SEQ ID NO: 295108 - DNA, 30 bp, Artificial Sequence
  Synthetic oligonucleotide
aatatgagggtacgctggcgccctgatcgg

SEQ ID NO: 295109 - DNA, 30 bp, Artificial Sequence
  Synthetic oligonucleotide
gtctgtactagggctccccttaaatatcgg

SEQ ID NO: 295110 - DNA, 30 bp, Artificial Sequence
  Synthetic oligonucleotide
gatttggccaattggatagaggtatatcgg

SEQ ID NO: 295111 - DNA, 30 bp, Artificial Sequence
  Synthetic oligonucleotide
tcgatattgaagtcaggacaatactatcgg

SEQ ID NO: 295112 - DNA, 30 bp, Artificial Sequence
  Synthetic oligonucleotide
gagcccgggaacaggctacccgagtatcgg

SEQ ID NO: 295113 - DNA, 30 bp, Artificial Sequence
  Synthetic oligonucleotide
tgctacccacttttatcggcacgttatcgg

SEQ ID NO: 295114 - DNA, 30 bp, Artificial Sequence
  Synthetic oligonucleotide
gacgcgggacagaacttactgaacactcgg

SEQ ID NO: 295115 - DNA, 30 bp, Artificial Sequence
  Synthetic oligonucleotide
cgcgtgcatcatatagcatattacactcgg

SEQ ID NO: 295116 - DNA, 30 bp, Artificial Sequence
  Synthetic oligonucleotide
gaggatgagggggctatatgttacactcgg

SEQ ID NO: 295117 - DNA, 30 bp, Artificial Sequence
  Synthetic oligonucleotide
gcctgcggtaagcgcccgctccgcactcgg

SEQ ID NO: 295118 - DNA, 30 bp, Artificial Sequence
  Synthetic oligonucleotide
cagggatacttccggctaccggtcactcgg

SEQ ID NO: 295119 - DNA, 31 bp, Artificial Sequence
  Synthetic oligonucleotide
cagcaggggggagtagctcagctggactcgg

SEQ ID NO: 295120 - DNA, 30 bp, Artificial Sequence
  Synthetic oligonucleotide
cattccgcataaccagtacatagtactcgg

SEQ ID NO: 295121 - DNA, 30 bp, Artificial Sequence
  Synthetic oligonucleotide
taatctggatcaccgtccagctgtactcgg

SEQ ID NO: 295122 - DNA, 30 bp, Artificial Sequence
  Synthetic oligonucleotide
cgtttacttttacccagtcaaattactcgg

SEQ ID NO: 295123 - DNA, 30 bp, Artificial Sequence
  Synthetic oligonucleotide
ttcaactcagagcatatcatctgccctcgg

SEQ ID NO: 295124 - DNA, 30 bp, Artificial Sequence
  Synthetic oligonucleotide
gggtggagatgggatggtagaatccctcgg

SEQ ID NO: 295125 - DNA, 30 bp, Artificial Sequence
  Synthetic oligonucleotide
attattgattcgaggtgacggtcgcctcgg

SEQ ID NO: 295126 - DNA, 31 bp, Artificial Sequence
  Synthetic oligonucleotide
gaagccgcgtatgccaggtggcattcctcgg

SEQ ID NO: 295127 - DNA, 30 bp, Artificial Sequence
  Synthetic oligonucleotide
caatacgcacgcctgtgcacaggagctcgg

SEQ ID NO: 295128 - DNA, 30 bp, Artificial Sequence
  Synthetic oligonucleotide
ccggccaatttccctggcttagatgctcgg

SEQ ID NO: 295129 - DNA, 30 bp, Artificial Sequence
  Synthetic oligonucleotide
gaagttagttgagtggctcttccgtctcgg

SEQ ID NO: 295130 - DNA, 30 bp, Artificial Sequence
  Synthetic oligonucleotide
tgatatgtatttagctgtcataggtctcgg

SEQ ID NO: 295131 - DNA, 30 bp, Artificial Sequence
  Synthetic oligonucleotide
gaggagagtgcgatctttgtggacagtcgg

SEQ ID NO: 295132 - DNA, 30 bp, Artificial Sequence
  Synthetic oligonucleotide
aatcattagacaattacgatcggccgtcgg

SEQ ID NO: 295133 - DNA, 30 bp, Artificial Sequence
  Synthetic oligonucleotide
gactacgaggctagttcgatatcaggtcgg

SEQ ID NO: 295134 - DNA, 30 bp, Artificial Sequence
  Synthetic oligonucleotide
tcgatggggacagggcgcatgggaggtcgg

SEQ ID NO: 295135 - DNA, 30 bp, Artificial Sequence
  Synthetic oligonucleotide
aacgttcagctttagtcagcgtgaggtcgg

SEQ ID NO: 295136 - DNA, 30 bp, Artificial Sequence
  Synthetic oligonucleotide
ttgtcctcagtcctggatagagtaggtcgg

SEQ ID NO: 295137 - DNA, 30 bp, Artificial Sequence
  Synthetic oligonucleotide
gaataagtacaacgcatcggcttaggtcgg

SEQ ID NO: 295138 - DNA, 30 bp, Artificial Sequence
  Synthetic oligonucleotide
tctgttagtgatgccaatattcgcggtcgg

SEQ ID NO: 295139 - DNA, 30 bp, Artificial Sequence
  Synthetic oligonucleotide
atcaaactacatttcgcatgtctgggtcgg

SEQ ID NO: 295140 - DNA, 30 bp, Artificial Sequence
  Synthetic oligonucleotide
cgaggcccttgtacagggtccgatggtcgg

SEQ ID NO: 295141 - DNA, 30 bp, Artificial Sequence
  Synthetic oligonucleotide
tcgggttcgtatcacaaccgagttggtcgg

SEQ ID NO: 295142 - DNA, 30 bp, Artificial Sequence
  Synthetic oligonucleotide
cgcgtgcggcagatatgacatcaatgtcgg

SEQ ID NO: 295143 - DNA, 30 bp, Artificial Sequence
  Synthetic oligonucleotide
acttcgcattaaatccggccatgttgtcgg

SEQ ID NO: 295144 - DNA, 30 bp, Artificial Sequence
  Synthetic oligonucleotide
gctgtggatattctacggtacaacattcgg

SEQ ID NO: 295145 - DNA, 30 bp, Artificial Sequence
  Synthetic oligonucleotide
tcctaattgacaatcattgagctcattcgg

SEQ ID NO: 295146 - DNA, 30 bp, Artificial Sequence
  Synthetic oligonucleotide
tcagcacaaatgagcaaacgttcgattcgg

SEQ ID NO: 295147 - DNA, 30 bp, Artificial Sequence
  Synthetic oligonucleotide
agcggtcgatgatggcactcgctgattcgg

SEQ ID NO: 295148 - DNA, 30 bp, Artificial Sequence
  Synthetic oligonucleotide
gccataggcaagatcaatgggtatattcgg

SEQ ID NO: 295149 - DNA, 30 bp, Artificial Sequence
  Synthetic oligonucleotide
attcgacagcaaactaaaaaatgtattcgg

SEQ ID NO: 295150 - DNA, 30 bp, Artificial Sequence
  Synthetic oligonucleotide
tcgtacccgggcagaacttgcctccttcgg

SEQ ID NO: 295151 - DNA, 30 bp, Artificial Sequence
  Synthetic oligonucleotide
gactaggactaaaagatgtaggtccttcgg

SEQ ID NO: 295152 - DNA, 30 bp, Artificial Sequence
  Synthetic oligonucleotide
ctcctcgggtacattcgtattgtccttcgg

SEQ ID NO: 295153 - DNA, 30 bp, Artificial Sequence
  Synthetic oligonucleotide
tgaaaatggcgatgttgtcgagagcttcgg

SEQ ID NO: 295154 - DNA, 30 bp, Artificial Sequence
  Synthetic oligonucleotide
cgggaacgagcggtttcgtaggctcttcgg

SEQ ID NO: 295155 - DNA, 30 bp, Artificial Sequence
  Synthetic oligonucleotide
catttaagcttcaaagaggtgtaagttcgg

SEQ ID NO: 295156 - DNA, 30 bp, Artificial Sequence
  Synthetic oligonucleotide
gggctaagggctcagagcataggagttcgg

SEQ ID NO: 295157 - DNA, 30 bp, Artificial Sequence
  Synthetic oligonucleotide
aacgatcccaatgaatgaactctggttcgg

SEQ ID NO: 295158 - DNA, 30 bp, Artificial Sequence
  Synthetic oligonucleotide
actgttgtccagttgcgagattaatttcgg

SEQ ID NO: 295159 - DNA, 30 bp, Artificial Sequence
  Synthetic oligonucleotide
aagaagtattgcgtcggtggcgcgtttcgg

SEQ ID NO: 295160 - DNA, 30 bp, Artificial Sequence
  Synthetic oligonucleotide
acttctatcagaccacgataacattttcgg

SEQ ID NO: 295161 - DNA, 30 bp, Artificial Sequence
  Synthetic oligonucleotide
gtttttcgtcgtgtaagtgaattaaaaggg

SEQ ID NO: 295162 - DNA, 30 bp, Artificial Sequence
  Synthetic oligonucleotide
tgaggcagaccgttagggcgtcacaaaggg

SEQ ID NO: 295163 - DNA, 30 bp, Artificial Sequence
  Synthetic oligonucleotide
gacaggcggacagcaaggcgacccaaaggg

SEQ ID NO: 295164 - DNA, 30 bp, Artificial Sequence
  Synthetic oligonucleotide
taaatacaatcgccccctttaagcaaaggg

SEQ ID NO: 295165 - DNA, 30 bp, Artificial Sequence
  Synthetic oligonucleotide
cttaggagtattatgcaaccccgcaaaggg

SEQ ID NO: 295166 - DNA, 30 bp, Artificial Sequence
  Synthetic oligonucleotide
atatgtagcggagatcttcatggcaaaggg

SEQ ID NO: 295167 - DNA, 30 bp, Artificial Sequence
  Synthetic oligonucleotide
accgcgccacaaggtcttattgtgaaaggg

SEQ ID NO: 295168 - DNA, 30 bp, Artificial Sequence
  Synthetic oligonucleotide
gaagttcgaatccctagcgcttgtaaaggg

SEQ ID NO: 295169 - DNA, 30 bp, Artificial Sequence
  Synthetic oligonucleotide
aacataaagaaaggcataagtcaccaaggg

SEQ ID NO: 295170 - DNA, 30 bp, Artificial Sequence
  Synthetic oligonucleotide
ccggcctcacacgacaaccggtgccaaggg

SEQ ID NO: 295171 - DNA, 30 bp, Artificial Sequence
  Synthetic oligonucleotide
gaatgctgcgcaggagtacgactgcaaggg

SEQ ID NO: 295172 - DNA, 30 bp, Artificial Sequence
  Synthetic oligonucleotide
gtgtgcaagatttataagctcattcaaggg

SEQ ID NO: 295173 - DNA, 30 bp, Artificial Sequence
  Synthetic oligonucleotide
acttaagacggatttccgttctttcaaggg

SEQ ID NO: 295174 - DNA, 30 bp, Artificial Sequence
  Synthetic oligonucleotide
tcaaagtagcagcgttgttcttttcaaggg

SEQ ID NO: 295175 - DNA, 30 bp, Artificial Sequence
  Synthetic oligonucleotide
gagtagttaacaaccactctccaagaaggg

SEQ ID NO: 295176 - DNA, 30 bp, Artificial Sequence
  Synthetic oligonucleotide
agtgaaatactaattttgttcaacgaaggg

SEQ ID NO: 295177 - DNA, 30 bp, Artificial Sequence
  Synthetic oligonucleotide
tggcgctatggttctacgaaacccgaaggg

SEQ ID NO: 295178 - DNA, 30 bp, Artificial Sequence
  Synthetic oligonucleotide
aatcaccatctccgtatccaggaggaaggg

SEQ ID NO: 295179 - DNA, 30 bp, Artificial Sequence
  Synthetic oligonucleotide
tccggtagaccggtaattaggtaggaaggg

SEQ ID NO: 295180 - DNA, 30 bp, Artificial Sequence
  Synthetic oligonucleotide
taggtgttggattcggggccttcggaaggg

SEQ ID NO: 295181 - DNA, 30 bp, Artificial Sequence
  Synthetic oligonucleotide
gagtcagacactgtagttcaattggaaggg

SEQ ID NO: 295182 - DNA, 30 bp, Artificial Sequence
  Synthetic oligonucleotide
tttaggaccgatcactcttcacctgaaggg

SEQ ID NO: 295183 - DNA, 30 bp, Artificial Sequence
  Synthetic oligonucleotide
tccattccgtacacggacaatcaataaggg

SEQ ID NO: 295184 - DNA, 30 bp, Artificial Sequence
  Synthetic oligonucleotide
gggagtagcctctgtgctttaagataaggg

SEQ ID NO: 295185 - DNA, 30 bp, Artificial Sequence
  Synthetic oligonucleotide
aaagaatttgattcgacattgagataaggg

SEQ ID NO: 295186 - DNA, 30 bp, Artificial Sequence
  Synthetic oligonucleotide
aaaaagtccgcctaccaccttggataaggg

SEQ ID NO: 295187 - DNA, 30 bp, Artificial Sequence
  Synthetic oligonucleotide
gagcgatagtttgatcaatgctggtaaggg

SEQ ID NO: 295188 - DNA, 30 bp, Artificial Sequence
  Synthetic oligonucleotide
ttaccgatcgtcttggtaacgctgtaaggg

SEQ ID NO: 295189 - DNA, 30 bp, Artificial Sequence
  Synthetic oligonucleotide
agacggttcacggccggcaaatattaaggg

SEQ ID NO: 295190 - DNA, 30 bp, Artificial Sequence
  Synthetic oligonucleotide
ctggtgactgcatgatgttggacttaaggg

SEQ ID NO: 295191 - DNA, 30 bp, Artificial Sequence
  Synthetic oligonucleotide
aaccaatacgttgttgtccatacttaaggg

SEQ ID NO: 295192 - DNA, 30 bp, Artificial Sequence
  Synthetic oligonucleotide
cagttgactaacaagttcgcacgttaaggg

SEQ ID NO: 295193 - DNA, 30 bp, Artificial Sequence
  Synthetic oligonucleotide
gtatggcaaagacgtcgtcacggttaaggg

SEQ ID NO: 295194 - DNA, 30 bp, Artificial Sequence
  Synthetic oligonucleotide
tatgttcagattagtacacaacgaacaggg

SEQ ID NO: 295195 - DNA, 30 bp, Artificial Sequence
  Synthetic oligonucleotide
ccatggaatctaggtgactctgccacaggg

SEQ ID NO: 295196 - DNA, 30 bp, Artificial Sequence
  Synthetic oligonucleotide
ttatggcctgtcagtaaagcaggcacaggg

SEQ ID NO: 295197 - DNA, 30 bp, Artificial Sequence
  Synthetic oligonucleotide
cctaatagagctgctcgccgtgcgacaggg

SEQ ID NO: 295198 - DNA, 30 bp, Artificial Sequence
  Synthetic oligonucleotide
agtcgtgcggaggaacgacgggccccaggg

SEQ ID NO: 295199 - DNA, 30 bp, Artificial Sequence
  Synthetic oligonucleotide
tattcttactcggacgtggttgagccaggg

SEQ ID NO: 295200 - DNA, 30 bp, Artificial Sequence
  Synthetic oligonucleotide
cttaacactaagctggtgtcacggccaggg

SEQ ID NO: 295201 - DNA, 30 bp, Artificial Sequence
  Synthetic oligonucleotide
aagagccgggccacccttatatatccaggg

SEQ ID NO: 295202 - DNA, 30 bp, Artificial Sequence
  Synthetic oligonucleotide
gttagagaaaatgccgagtattctccaggg

SEQ ID NO: 295203 - DNA, 30 bp, Artificial Sequence
  Synthetic oligonucleotide
gggaaatgttgcttcgggcaccttccaggg

SEQ ID NO: 295204 - DNA, 31 bp, Artificial Sequence
  Synthetic oligonucleotide
gggcacggtttaactgagccctgtagcaggg

SEQ ID NO: 295205 - DNA, 30 bp, Artificial Sequence
  Synthetic oligonucleotide
gggaaacgtatatatgtccctgaggcaggg

SEQ ID NO: 295206 - DNA, 30 bp, Artificial Sequence
  Synthetic oligonucleotide
gcctggtcggatgcacgaggtgaggcaggg

SEQ ID NO: 295207 - DNA, 30 bp, Artificial Sequence
  Synthetic oligonucleotide
gaccatgaaacgaattatagtctatcaggg

SEQ ID NO: 295208 - DNA, 30 bp, Artificial Sequence
  Synthetic oligonucleotide
ttaggcatccgaatattcgcgccctcaggg

SEQ ID NO: 295209 - DNA, 30 bp, Artificial Sequence
  Synthetic oligonucleotide
caccttatttagccggtgagtatctcaggg

SEQ ID NO: 295210 - DNA, 30 bp, Artificial Sequence
  Synthetic oligonucleotide
agtgcgtagtaccccgagcaatcgtcaggg

SEQ ID NO: 295211 - DNA, 30 bp, Artificial Sequence
  Synthetic oligonucleotide
tgtctttttatagtgttcacgccttcaggg

SEQ ID NO: 295212 - DNA, 30 bp, Artificial Sequence
  Synthetic oligonucleotide
gattgtccgcgctgacacttgttaagaggg

SEQ ID NO: 295213 - DNA, 30 bp, Artificial Sequence
  Synthetic oligonucleotide
cgttcgcgcactagaaatattaacagaggg

SEQ ID NO: 295214 - DNA, 30 bp, Artificial Sequence
  Synthetic oligonucleotide
attgtaatacgttgacactagctgagaggg

SEQ ID NO: 295215 - DNA, 30 bp, Artificial Sequence
  Synthetic oligonucleotide
gcctttttcgccggctagtacgttagaggg

SEQ ID NO: 295216 - DNA, 30 bp, Artificial Sequence
  Synthetic oligonucleotide
agtaaggggaaccgcgggaagtcccgaggg

SEQ ID NO: 295217 - DNA, 30 bp, Artificial Sequence
  Synthetic oligonucleotide
gagtcttgattatctgtttccatccgaggg

SEQ ID NO: 295218 - DNA, 30 bp, Artificial Sequence
  Synthetic oligonucleotide
tagatgcatccgcctcatgcccgcggaggg

SEQ ID NO: 295219 - DNA, 30 bp, Artificial Sequence
  Synthetic oligonucleotide
ttatgactgacagattgctagcgcggaggg

SEQ ID NO: 295220 - DNA, 30 bp, Artificial Sequence
  Synthetic oligonucleotide
gccagaatctcgcaccatcgtatcggaggg

SEQ ID NO: 295221 - DNA, 30 bp, Artificial Sequence
  Synthetic oligonucleotide
aaccaatcacaggtggctatttatggaggg

SEQ ID NO: 295222 - DNA, 30 bp, Artificial Sequence
  Synthetic oligonucleotide
ctactgatctttagtcagcgacgtggaggg

SEQ ID NO: 295223 - DNA, 30 bp, Artificial Sequence
  Synthetic oligonucleotide
aattctttgccacggctctactgtggaggg

SEQ ID NO: 295224 - DNA, 30 bp, Artificial Sequence
  Synthetic oligonucleotide
cgcaagctttgtggagatccgccatgaggg

SEQ ID NO: 295225 - DNA, 30 bp, Artificial Sequence
  Synthetic oligonucleotide
cgttcgctacataccatatcgccatgaggg

SEQ ID NO: 295226 - DNA, 30 bp, Artificial Sequence
  Synthetic oligonucleotide
taaatagtataatatatcctaagatgaggg

SEQ ID NO: 295227 - DNA, 30 bp, Artificial Sequence
  Synthetic oligonucleotide
gtggacaattagggggattcattatgaggg

SEQ ID NO: 295228 - DNA, 30 bp, Artificial Sequence
  Synthetic oligonucleotide
ttaatataacgggtacggggtacgtgaggg

SEQ ID NO: 295229 - DNA, 30 bp, Artificial Sequence
  Synthetic oligonucleotide
actaagttctaagttggaacaatgtgaggg

SEQ ID NO: 295230 - DNA, 30 bp, Artificial Sequence
  Synthetic oligonucleotide
ttctcggctctacctggatgcgccataggg

SEQ ID NO: 295231 - DNA, 30 bp, Artificial Sequence
  Synthetic oligonucleotide
ctttctttagaccagaatgtatccataggg

SEQ ID NO: 295232 - DNA, 30 bp, Artificial Sequence
  Synthetic oligonucleotide
attatgccctttttcgctgggctgataggg

SEQ ID NO: 295233 - DNA, 30 bp, Artificial Sequence
  Synthetic oligonucleotide
aactgtgtataggggaaaattttgataggg

SEQ ID NO: 295234 - DNA, 30 bp, Artificial Sequence
  Synthetic oligonucleotide
atgtattcgcggcgatcttggaatataggg

SEQ ID NO: 295235 - DNA, 30 bp, Artificial Sequence
  Synthetic oligonucleotide
ggtatcggctcaaaaaactcaattataggg

SEQ ID NO: 295236 - DNA, 30 bp, Artificial Sequence
  Synthetic oligonucleotide
attcgatcggggcctagcggttaactaggg

SEQ ID NO: 295237 - DNA, 30 bp, Artificial Sequence
  Synthetic oligonucleotide
cgctctagaggttcagctgcaggcctaggg

SEQ ID NO: 295238 - DNA, 30 bp, Artificial Sequence
  Synthetic oligonucleotide
gcaaggcggacacgtgtacgtttcctaggg

SEQ ID NO: 295239 - DNA, 30 bp, Artificial Sequence
  Synthetic oligonucleotide
gggccagcggtttgagaatttttcctaggg

SEQ ID NO: 295240 - DNA, 30 bp, Artificial Sequence
  Synthetic oligonucleotide
gcgcccccactagacttttgtcggctaggg

SEQ ID NO: 295241 - DNA, 30 bp, Artificial Sequence
  Synthetic oligonucleotide
aggccagacacccgactagcggttctaggg

SEQ ID NO: 295242 - DNA, 31 bp, Artificial Sequence
  Synthetic oligonucleotide
cccgggataagacgtgcttataaaagtaggg

SEQ ID NO: 295243 - DNA, 30 bp, Artificial Sequence
  Synthetic oligonucleotide
ttatccgtcggcgaaagtcgcgccgtaggg

SEQ ID NO: 295244 - DNA, 30 bp, Artificial Sequence
  Synthetic oligonucleotide
aaaacgccaagccggctccaagcggtaggg

SEQ ID NO: 295245 - DNA, 30 bp, Artificial Sequence
  Synthetic oligonucleotide
ctccattctacacccatgctatgggtaggg

SEQ ID NO: 295246 - DNA, 30 bp, Artificial Sequence
  Synthetic oligonucleotide
gggtgcaagagtgtcacttatcatgtaggg

SEQ ID NO: 295247 - DNA, 30 bp, Artificial Sequence
  Synthetic oligonucleotide
acaaacctgcctggcctgctcattgtaggg

SEQ ID NO: 295248 - DNA, 30 bp, Artificial Sequence
  Synthetic oligonucleotide
tccaaatcccccctacagtactggttaggg

SEQ ID NO: 295249 - DNA, 30 bp, Artificial Sequence
  Synthetic oligonucleotide
caccctggacgaccattaagtagaaacggg

SEQ ID NO: 295250 - DNA, 30 bp, Artificial Sequence
  Synthetic oligonucleotide
cagtcttcacagattacggaaagcaacggg

SEQ ID NO: 295251 - DNA, 30 bp, Artificial Sequence
  Synthetic oligonucleotide
cgatatagaagttgagggggtttcaacggg

SEQ ID NO: 295252 - DNA, 30 bp, Artificial Sequence
  Synthetic oligonucleotide
atcgaggaggccggcaggggggggaacggg

SEQ ID NO: 295253 - DNA, 30 bp, Artificial Sequence
  Synthetic oligonucleotide
gactctggtttcagtgttaaaactaacggg

SEQ ID NO: 295254 - DNA, 30 bp, Artificial Sequence
  Synthetic oligonucleotide
ccctgccacagttctgagggtactaacggg

SEQ ID NO: 295255 - DNA, 30 bp, Artificial Sequence
  Synthetic oligonucleotide
cccttgccgaccctgtaacgaggtaacggg

SEQ ID NO: 295256 - DNA, 30 bp, Artificial Sequence
  Synthetic oligonucleotide
ccctacctgtcctgttgtttagttaacggg

SEQ ID NO: 295257 - DNA, 30 bp, Artificial Sequence
  Synthetic oligonucleotide
acggtttatgcttagttcgaagaacacggg

SEQ ID NO: 295258 - DNA, 30 bp, Artificial Sequence
  Synthetic oligonucleotide
agggcactttgtatatgctctccacacggg

SEQ ID NO: 295259 - DNA, 30 bp, Artificial Sequence
  Synthetic oligonucleotide
atcaagcccctgcaaaggtcgtgacacggg

SEQ ID NO: 295260 - DNA, 30 bp, Artificial Sequence
  Synthetic oligonucleotide
aaatagaaggtacactagatacgccacggg

SEQ ID NO: 295261 - DNA, 30 bp, Artificial Sequence
  Synthetic oligonucleotide
ttaagggtttgccagaatcgaacgcacggg

SEQ ID NO: 295262 - DNA, 29 bp, Artificial Sequence
  Synthetic oligonucleotide
aaagactacttccacgaggtgcgcacggg

SEQ ID NO: 295263 - DNA, 30 bp, Artificial Sequence
  Synthetic oligonucleotide
cggcgactgtaaggggggaagaatcacggg

SEQ ID NO: 295264 - DNA, 30 bp, Artificial Sequence
  Synthetic oligonucleotide
ggaagatagccggggtgccggcgagacggg

SEQ ID NO: 295265 - DNA, 30 bp, Artificial Sequence
  Synthetic oligonucleotide
ggctcactatgatgaggcgtcgtagacggg

SEQ ID NO: 295266 - DNA, 30 bp, Artificial Sequence
  Synthetic oligonucleotide
cttgcaatcaaatgagtcgtcgacgacggg

SEQ ID NO: 295267 - DNA, 30 bp, Artificial Sequence
  Synthetic oligonucleotide
cagtcacgactacaggacgcaagcgacggg

SEQ ID NO: 295268 - DNA, 30 bp, Artificial Sequence
  Synthetic oligonucleotide
ggatcactgtttgaagattagagcgacggg

SEQ ID NO: 295269 - DNA, 30 bp, Artificial Sequence
  Synthetic oligonucleotide
actccctccgactctaagtgtaaggacggg

SEQ ID NO: 295270 - DNA, 30 bp, Artificial Sequence
  Synthetic oligonucleotide
atggcataaagaggcgggagatgggacggg

SEQ ID NO: 295271 - DNA, 30 bp, Artificial Sequence
  Synthetic oligonucleotide
aggagagctcgaggaggccggttggacggg

SEQ ID NO: 295272 - DNA, 30 bp, Artificial Sequence
  Synthetic oligonucleotide
atgtgatgggaacttctacgtgttgacggg

SEQ ID NO: 295273 - DNA, 30 bp, Artificial Sequence
  Synthetic oligonucleotide
ataacatttccccgggtgatgcaatacggg

SEQ ID NO: 295274 - DNA, 30 bp, Artificial Sequence
  Synthetic oligonucleotide
atgctataacagacgcccggggaatacggg

SEQ ID NO: 295275 - DNA, 30 bp, Artificial Sequence
  Synthetic oligonucleotide
ggttgtcccccaaccctacattaatacggg

SEQ ID NO: 295276 - DNA, 30 bp, Artificial Sequence
  Synthetic oligonucleotide
tcaaaagctgccaaatctacctcctacggg

SEQ ID NO: 295277 - DNA, 30 bp, Artificial Sequence
  Synthetic oligonucleotide
tgggacaacactgttgtttacctctacggg

SEQ ID NO: 295278 - DNA, 30 bp, Artificial Sequence
  Synthetic oligonucleotide
catcctatccagccgtaaagggagtacggg

SEQ ID NO: 295279 - DNA, 30 bp, Artificial Sequence
  Synthetic oligonucleotide
catatctacgactgtagctggaggtacggg

SEQ ID NO: 295280 - DNA, 30 bp, Artificial Sequence
  Synthetic oligonucleotide
gcgagtttcgatgctttgagattttacggg

SEQ ID NO: 295281 - DNA, 30 bp, Artificial Sequence
  Synthetic oligonucleotide
tataagggcatagtgggtatggcaaccggg

SEQ ID NO: 295282 - DNA, 30 bp, Artificial Sequence
  Synthetic oligonucleotide
tgggattcaaggatactcacttgaaccggg

SEQ ID NO: 295283 - DNA, 30 bp, Artificial Sequence
  Synthetic oligonucleotide
tgtccttcgttactagagcgtcccaccggg

SEQ ID NO: 295284 - DNA, 30 bp, Artificial Sequence
  Synthetic oligonucleotide
ctctctgatccagtgtgtcagatcaccggg

SEQ ID NO: 295285 - DNA, 30 bp, Artificial Sequence
  Synthetic oligonucleotide
tctatgtttagatacattaagttgaccggg

SEQ ID NO: 295286 - DNA, 30 bp, Artificial Sequence
  Synthetic oligonucleotide
attacaccgcgcaatcttacggtacccggg

SEQ ID NO: 295287 - DNA, 30 bp, Artificial Sequence
  Synthetic oligonucleotide
ctggaagtcttatccgtaggccgccccggg

SEQ ID NO: 295288 - DNA, 30 bp, Artificial Sequence
  Synthetic oligonucleotide
gtagtgcccatatgtactcgctgggccggg

SEQ ID NO: 295289 - DNA, 30 bp, Artificial Sequence
  Synthetic oligonucleotide
ggatgtgtcaggctgacagtgtgggccggg

SEQ ID NO: 295290 - DNA, 30 bp, Artificial Sequence
  Synthetic oligonucleotide
tgagtaaacctcgcaggaaccggatccggg

SEQ ID NO: 295291 - DNA, 30 bp, Artificial Sequence
  Synthetic oligonucleotide
gccattagtcacaacatcaatatatccggg

SEQ ID NO: 295292 - DNA, 30 bp, Artificial Sequence
  Synthetic oligonucleotide
ctgtcaattacgtctggtccagtatccggg

SEQ ID NO: 295293 - DNA, 30 bp, Artificial Sequence
  Synthetic oligonucleotide
agcacctgttcgctgatctcaggctccggg

SEQ ID NO: 295294 - DNA, 30 bp, Artificial Sequence
  Synthetic oligonucleotide
tggccactttttgatgctcactgctccggg

SEQ ID NO: 295295 - DNA, 30 bp, Artificial Sequence
  Synthetic oligonucleotide
cgtttaagtcctcgtcaggaattctccggg

SEQ ID NO: 295296 - DNA, 30 bp, Artificial Sequence
  Synthetic oligonucleotide
catggcgccctgtagtggtcctcaagcggg

SEQ ID NO: 295297 - DNA, 30 bp, Artificial Sequence
  Synthetic oligonucleotide
tagacagctcagaaatccatctacagcggg

SEQ ID NO: 295298 - DNA, 30 bp, Artificial Sequence
  Synthetic oligonucleotide
gctaatcactttatcgtataggccagcggg

SEQ ID NO: 295299 - DNA, 30 bp, Artificial Sequence
  Synthetic oligonucleotide
ggaccccaagagccgcccagcagcagcggg

SEQ ID NO: 295300 - DNA, 30 bp, Artificial Sequence
  Synthetic oligonucleotide
gtcacagggaggcacatggtggttagcggg

SEQ ID NO: 295301 - DNA, 30 bp, Artificial Sequence
  Synthetic oligonucleotide
aaggtggcatgtttgccacgaaggcgcggg

SEQ ID NO: 295302 - DNA, 30 bp, Artificial Sequence
  Synthetic oligonucleotide
tttcaattcaccattgggcaacggcgcggg

SEQ ID NO: 295303 - DNA, 30 bp, Artificial Sequence
  Synthetic oligonucleotide
gaggtagtgagtagtgtggttgggcgcggg

SEQ ID NO: 295304 - DNA, 30 bp, Artificial Sequence
  Synthetic oligonucleotide
ctttcgtggctcgcgactctaactcgcggg

SEQ ID NO: 295305 - DNA, 30 bp, Artificial Sequence
  Synthetic oligonucleotide
catcaggatctatacagaacggctcgcggg

SEQ ID NO: 295306 - DNA, 30 bp, Artificial Sequence
  Synthetic oligonucleotide
ctatcagtatggaggtgggagtaaggcggg

SEQ ID NO: 295307 - DNA, 30 bp, Artificial Sequence
  Synthetic oligonucleotide
cgtcgaatgacaactcacaacgtaggcggg

SEQ ID NO: 295308 - DNA, 30 bp, Artificial Sequence
  Synthetic oligonucleotide
tttaagcttaagcttaaaccgtccggcggg

SEQ ID NO: 295309 - DNA, 30 bp, Artificial Sequence
  Synthetic oligonucleotide
tttctgcctcaaatgtcatcaagcggcggg

SEQ ID NO: 295310 - DNA, 30 bp, Artificial Sequence
  Synthetic oligonucleotide
gtcttatcttcgcggagttgaagcggcggg

SEQ ID NO: 295311 - DNA, 30 bp, Artificial Sequence
  Synthetic oligonucleotide
gggggtcatggctgccacaattgcggcggg

SEQ ID NO: 295312 - DNA, 30 bp, Artificial Sequence
  Synthetic oligonucleotide
tttgcttgtttatcactagggtatggcggg

SEQ ID NO: 295313 - DNA, 30 bp, Artificial Sequence
  Synthetic oligonucleotide
ctcaggctagcgtggagttagcttggcggg

SEQ ID NO: 295314 - DNA, 30 bp, Artificial Sequence
  Synthetic oligonucleotide
gcaaggacgtcccgttgagtcttatgcggg

SEQ ID NO: 295315 - DNA, 30 bp, Artificial Sequence
  Synthetic oligonucleotide
cgacaaggtactacgggtcttttatgcggg

SEQ ID NO: 295316 - DNA, 30 bp, Artificial Sequence
  Synthetic oligonucleotide
cacctgcagtgtacgtgcgtgctctgcggg

SEQ ID NO: 295317 - DNA, 30 bp, Artificial Sequence
  Synthetic oligonucleotide
ttgttctacgtattggaaattctctgcggg

SEQ ID NO: 295318 - DNA, 30 bp, Artificial Sequence
  Synthetic oligonucleotide
tcttaaaccgaggctcggaattcaatcggg

SEQ ID NO: 295319 - DNA, 30 bp, Artificial Sequence
  Synthetic oligonucleotide
ggtttgtactcggttaattcaaccatcggg

SEQ ID NO: 295320 - DNA, 30 bp, Artificial Sequence
  Synthetic oligonucleotide
gggagctgattgcgatatatcttcatcggg

SEQ ID NO: 295321 - DNA, 30 bp, Artificial Sequence
  Synthetic oligonucleotide
tgcttttgaaccaagaaatggagtatcggg

SEQ ID NO: 295322 - DNA, 30 bp, Artificial Sequence
  Synthetic oligonucleotide
taggggcacgggtcagtctccattatcggg

SEQ ID NO: 295323 - DNA, 30 bp, Artificial Sequence
  Synthetic oligonucleotide
gtaggtagtaagtgccctccgaaactcggg

SEQ ID NO: 295324 - DNA, 30 bp, Artificial Sequence
  Synthetic oligonucleotide
gcagttgctgtgcaatgccaaggactcggg

SEQ ID NO: 295325 - DNA, 30 bp, Artificial Sequence
  Synthetic oligonucleotide
gatgacaacgcaagcggaccatgactcggg

SEQ ID NO: 295326 - DNA, 30 bp, Artificial Sequence
  Synthetic oligonucleotide
tcgcccgtggagttgttccccaacctcggg

SEQ ID NO: 295327 - DNA, 30 bp, Artificial Sequence
  Synthetic oligonucleotide
aagaccttgtattgagagaggagcctcggg

SEQ ID NO: 295328 - DNA, 30 bp, Artificial Sequence
  Synthetic oligonucleotide
tcagtcatgcccgtttgtcatgtcctcggg

SEQ ID NO: 295329 - DNA, 30 bp, Artificial Sequence
  Synthetic oligonucleotide
gactatgttgtagatcccacaacgctcggg

SEQ ID NO: 295330 - DNA, 30 bp, Artificial Sequence
  Synthetic oligonucleotide
cgagggcaggctcgcgattagctagtcggg

SEQ ID NO: 295331 - DNA, 30 bp, Artificial Sequence
  Synthetic oligonucleotide
aacgactagctgcccccaagggacgtcggg

SEQ ID NO: 295332 - DNA, 30 bp, Artificial Sequence
  Synthetic oligonucleotide
cccacgacagcctaacttttccccgtcggg

SEQ ID NO: 295333 - DNA, 30 bp, Artificial Sequence
  Synthetic oligonucleotide
gggtgcttcaccaataactggtaggtcggg

SEQ ID NO: 295334 - DNA, 30 bp, Artificial Sequence
  Synthetic oligonucleotide
tacaacgcgtttgaggtccggaaattcggg

SEQ ID NO: 295335 - DNA, 30 bp, Artificial Sequence
  Synthetic oligonucleotide
ctaagattgaattatagctggaaattcggg

SEQ ID NO: 295336 - DNA, 30 bp, Artificial Sequence
  Synthetic oligonucleotide
tgcggcaatccgcgctaataagcattcggg

SEQ ID NO: 295337 - DNA, 30 bp, Artificial Sequence
  Synthetic oligonucleotide
aattgctctagcccctagtttgcattcggg

SEQ ID NO: 295338 - DNA, 30 bp, Artificial Sequence
  Synthetic oligonucleotide
ggtaacgccggcaggactgccagattcggg

SEQ ID NO: 295339 - DNA, 29 bp, Artificial Sequence
  Synthetic oligonucleotide
attaccgaaattgaaaggcggtattcggg

SEQ ID NO: 295340 - DNA, 30 bp, Artificial Sequence
  Synthetic oligonucleotide
atgccccatataagctcataatcaaagggg

SEQ ID NO: 295341 - DNA, 30 bp, Artificial Sequence
  Synthetic oligonucleotide
ttgaaagattatcgtggaccgctaaagggg

SEQ ID NO: 295342 - DNA, 30 bp, Artificial Sequence
  Synthetic oligonucleotide
ccccaactcgctagtgcccgtgctaagggg

SEQ ID NO: 295343 - DNA, 30 bp, Artificial Sequence
  Synthetic oligonucleotide
gtgggtggccacgtgccatgccgtaagggg

SEQ ID NO: 295344 - DNA, 30 bp, Artificial Sequence
  Synthetic oligonucleotide
cagagagtctcgggcttagttcgacagggg

SEQ ID NO: 295345 - DNA, 30 bp, Artificial Sequence
  Synthetic oligonucleotide
cggaaggcatggtctgcagtggaccagggg

SEQ ID NO: 295346 - DNA, 30 bp, Artificial Sequence
  Synthetic oligonucleotide
ttcgccaaatccgtggcgtgtaatcagggg

SEQ ID NO: 295347 - DNA, 30 bp, Artificial Sequence
  Synthetic oligonucleotide
catgtcgggccccaagctcggggagagggg

SEQ ID NO: 295348 - DNA, 30 bp, Artificial Sequence
  Synthetic oligonucleotide
aggtcgagccaattcattgttgtagagggg

SEQ ID NO: 295349 - DNA, 30 bp, Artificial Sequence
  Synthetic oligonucleotide
atggtatctcgcacataccatttagagggg

SEQ ID NO: 295350 - DNA, 30 bp, Artificial Sequence
  Synthetic oligonucleotide
catccggtcataaactatagatccgagggg

SEQ ID NO: 295351 - DNA, 30 bp, Artificial Sequence
  Synthetic oligonucleotide
ccggggcggcaagcgtgaggccaggagggg

SEQ ID NO: 295352 - DNA, 30 bp, Artificial Sequence
  Synthetic oligonucleotide
caagcgcgtcacaaatagacggtggagggg

SEQ ID NO: 295353 - DNA, 30 bp, Artificial Sequence
  Synthetic oligonucleotide
agggcatattgtcacgcggggtgatagggg

SEQ ID NO: 295354 - DNA, 30 bp, Artificial Sequence
  Synthetic oligonucleotide
aatcgggaaagcgatgtggggtgctagggg

SEQ ID NO: 295355 - DNA, 30 bp, Artificial Sequence
  Synthetic oligonucleotide
gaaatgcagggcacggagggtatctagggg

SEQ ID NO: 295356 - DNA, 30 bp, Artificial Sequence
  Synthetic oligonucleotide
atgcaagcgcagccgaggtgtgggtagggg

SEQ ID NO: 295357 - DNA, 30 bp, Artificial Sequence
  Synthetic oligonucleotide
gttaaacgtcatataacccctctgtagggg

SEQ ID NO: 295358 - DNA, 30 bp, Artificial Sequence
  Synthetic oligonucleotide
taagaaactacgactaaggccacttagggg

SEQ ID NO: 295359 - DNA, 30 bp, Artificial Sequence
  Synthetic oligonucleotide
actggctaaactatttataatggttagggg

SEQ ID NO: 295360 - DNA, 30 bp, Artificial Sequence
  Synthetic oligonucleotide
tacgcggcgacatcggaagcagtaacgggg

SEQ ID NO: 295361 - DNA, 30 bp, Artificial Sequence
  Synthetic oligonucleotide
acggaccctaagcgcagagtcaacacgggg

SEQ ID NO: 295362 - DNA, 30 bp, Artificial Sequence
  Synthetic oligonucleotide
gaatggcagctctaatgtgcttccacgggg

SEQ ID NO: 295363 - DNA, 30 bp, Artificial Sequence
  Synthetic oligonucleotide
actctggcaccaggggatccgtggacgggg

SEQ ID NO: 295364 - DNA, 30 bp, Artificial Sequence
  Synthetic oligonucleotide
aagaagccttgcaaatcgtacttgacgggg

SEQ ID NO: 295365 - DNA, 30 bp, Artificial Sequence
  Synthetic oligonucleotide
gtaatacgtctgatctacgattatacgggg

SEQ ID NO: 295366 - DNA, 30 bp, Artificial Sequence
  Synthetic oligonucleotide
ccctattgcggagtgtgagcagtaccgggg

SEQ ID NO: 295367 - DNA, 30 bp, Artificial Sequence
  Synthetic oligonucleotide
gggtataggtggacaacggggaggccgggg

SEQ ID NO: 295368 - DNA, 30 bp, Artificial Sequence
  Synthetic oligonucleotide
attaacgcggcaatcgtcgtgcggccgggg

SEQ ID NO: 295369 - DNA, 30 bp, Artificial Sequence
  Synthetic oligonucleotide
aattgatgcccgtggccttagcttccgggg

SEQ ID NO: 295370 - DNA, 30 bp, Artificial Sequence
  Synthetic oligonucleotide
tcaggttccatagcaggtcgcaaagcgggg

SEQ ID NO: 295371 - DNA, 30 bp, Artificial Sequence
  Synthetic oligonucleotide
cacataggagaatgttcggctatagcgggg

SEQ ID NO: 295372 - DNA, 30 bp, Artificial Sequence
  Synthetic oligonucleotide
cctgtgccagtaagggtacgcgccgcgggg

SEQ ID NO: 295373 - DNA, 30 bp, Artificial Sequence
  Synthetic oligonucleotide
attttgtggcgcactatcgtggcggcgggg

SEQ ID NO: 295374 - DNA, 30 bp, Artificial Sequence
  Synthetic oligonucleotide
ggtggtgagaggtgggaaaccggggcgggg

SEQ ID NO: 295375 - DNA, 31 bp, Artificial Sequence
  Synthetic oligonucleotide
tctaactttcacagtgatgctgctggcgggg

SEQ ID NO: 295376 - DNA, 30 bp, Artificial Sequence
  Synthetic oligonucleotide
ctcggcgtatagcgataggaaccatcgggg

SEQ ID NO: 295377 - DNA, 30 bp, Artificial Sequence
  Synthetic oligonucleotide
gccgctgctggggcaatccgtccatcgggg

SEQ ID NO: 295378 - DNA, 30 bp, Artificial Sequence
  Synthetic oligonucleotide
gatcccagatccattcggcgaatatcgggg

SEQ ID NO: 295379 - DNA, 30 bp, Artificial Sequence
  Synthetic oligonucleotide
acgaagattacccatgccggaatatcgggg

SEQ ID NO: 295380 - DNA, 30 bp, Artificial Sequence
  Synthetic oligonucleotide
cattcatcttaagttatgtcggagtcgggg

SEQ ID NO: 295381 - DNA, 30 bp, Artificial Sequence
  Synthetic oligonucleotide
ctatagccatagcagcgcgctgattcgggg

SEQ ID NO: 295382 - DNA, 30 bp, Artificial Sequence
  Synthetic oligonucleotide
tcggcttaaacggcatttaaacgaaggggg

SEQ ID NO: 295383 - DNA, 30 bp, Artificial Sequence
  Synthetic oligonucleotide
catagcattgggtatcaggcacacaggggg

SEQ ID NO: 295384 - DNA, 30 bp, Artificial Sequence
  Synthetic oligonucleotide
gtcaagtgtcgaagtataggaaccaggggg

SEQ ID NO: 295385 - DNA, 30 bp, Artificial Sequence
  Synthetic oligonucleotide
gcacgaccgacttcgtggtagttcaggggg

SEQ ID NO: 295386 - DNA, 30 bp, Artificial Sequence
  Synthetic oligonucleotide
ctttttaacctactacgcggagagaggggg

SEQ ID NO: 295387 - DNA, 30 bp, Artificial Sequence
  Synthetic oligonucleotide
atctgataacaaagcacggtacggaggggg

SEQ ID NO: 295388 - DNA, 30 bp, Artificial Sequence
  Synthetic oligonucleotide
gaaggtgccctcaaagaccggatgaggggg

SEQ ID NO: 295389 - DNA, 30 bp, Artificial Sequence
  Synthetic oligonucleotide
acggtcttaatcatgagggggcataggggg

SEQ ID NO: 295390 - DNA, 30 bp, Artificial Sequence
  Synthetic oligonucleotide
gcaaaaaatccagagctgggcacccggggg

SEQ ID NO: 295391 - DNA, 30 bp, Artificial Sequence
  Synthetic oligonucleotide
ctaggactcatagagggtcctaagcggggg

SEQ ID NO: 295392 - DNA, 30 bp, Artificial Sequence
  Synthetic oligonucleotide
caaagtccggaccttttgacgattcggggg

SEQ ID NO: 295393 - DNA, 25 bp, Artificial Sequence
  Synthetic oligonucleotide
ttggtaagagagagctattcggggg

SEQ ID NO: 295394 - DNA, 30 bp, Artificial Sequence
  Synthetic oligonucleotide
ctggtccctgcctcggagccatcagggggg

SEQ ID NO: 295395 - DNA, 30 bp, Artificial Sequence
  Synthetic oligonucleotide
gactagatgttgaacacgactatagggggg

SEQ ID NO: 295396 - DNA, 29 bp, Artificial Sequence
  Synthetic oligonucleotide
gcaaggttaatatcaattccgcggggggg

SEQ ID NO: 295397 - DNA, 30 bp, Artificial Sequence
  Synthetic oligonucleotide
ccgcggggcatcccgaagatgcatgggggg

SEQ ID NO: 295398 - DNA, 30 bp, Artificial Sequence
  Synthetic oligonucleotide
aggctataggattgaagaggagttgggggg

SEQ ID NO: 295399 - DNA, 30 bp, Artificial Sequence
  Synthetic oligonucleotide
tcaagggagggcagttccacaccgtggggg

SEQ ID NO: 295400 - DNA, 30 bp, Artificial Sequence
  Synthetic oligonucleotide
gcacggctgaggcatatggtttggtggggg

SEQ ID NO: 295401 - DNA, 30 bp, Artificial Sequence
  Synthetic oligonucleotide
agtcagcgctttgggtttgaccattggggg

SEQ ID NO: 295402 - DNA, 30 bp, Artificial Sequence
  Synthetic oligonucleotide
gcgctttaaacgcggaaaggccattggggg

SEQ ID NO: 295403 - DNA, 30 bp, Artificial Sequence
  Synthetic oligonucleotide
ggggtgaagaagcgggatgggtcaatgggg

SEQ ID NO: 295404 - DNA, 30 bp, Artificial Sequence
  Synthetic oligonucleotide
cagaacatcttagtccggtcgtgaatgggg

SEQ ID NO: 295405 - DNA, 30 bp, Artificial Sequence
  Synthetic oligonucleotide
agtaccatcacgattgttccgtggatgggg

SEQ ID NO: 295406 - DNA, 30 bp, Artificial Sequence
  Synthetic oligonucleotide
gggcagtggttctgtaacgttgatatgggg

SEQ ID NO: 295407 - DNA, 30 bp, Artificial Sequence
  Synthetic oligonucleotide
gaggtcagtacgacggatggctgtatgggg

SEQ ID NO: 295408 - DNA, 30 bp, Artificial Sequence
  Synthetic oligonucleotide
tgtacgacattcggcagaatagtactgggg

SEQ ID NO: 295409 - DNA, 30 bp, Artificial Sequence
  Synthetic oligonucleotide
cccgttagtatggtcatgatctccctgggg

SEQ ID NO: 295410 - DNA, 30 bp, Artificial Sequence
  Synthetic oligonucleotide
cagttcggaccgttttaagtcttcctgggg

SEQ ID NO: 295411 - DNA, 30 bp, Artificial Sequence
  Synthetic oligonucleotide
gggtctcggctactccgattcggagtgggg

SEQ ID NO: 295412 - DNA, 30 bp, Artificial Sequence
  Synthetic oligonucleotide
cctgagagcattcccagtgctggagtgggg

SEQ ID NO: 295413 - DNA, 30 bp, Artificial Sequence
  Synthetic oligonucleotide
cggagggagcctccacgcttgttagtgggg

SEQ ID NO: 295414 - DNA, 31 bp, Artificial Sequence
  Synthetic oligonucleotide
gaagtaactatattaagcacggtccgtgggg

SEQ ID NO: 295415 - DNA, 30 bp, Artificial Sequence
  Synthetic oligonucleotide
cagacggtgagtcctgactctaaattgggg

SEQ ID NO: 295416 - DNA, 30 bp, Artificial Sequence
  Synthetic oligonucleotide
tgtataggtagtgacccgggcagattgggg

SEQ ID NO: 295417 - DNA, 30 bp, Artificial Sequence
  Synthetic oligonucleotide
gacatactacggcgccgactcatattgggg

SEQ ID NO: 295418 - DNA, 30 bp, Artificial Sequence
  Synthetic oligonucleotide
gtaggcggagccttataaggtaacttgggg

SEQ ID NO: 295419 - DNA, 30 bp, Artificial Sequence
  Synthetic oligonucleotide
tctgtaataatatcactactggagttgggg

SEQ ID NO: 295420 - DNA, 30 bp, Artificial Sequence
  Synthetic oligonucleotide
aatgtggttccgctaaaatcatagttgggg

SEQ ID NO: 295421 - DNA, 30 bp, Artificial Sequence
  Synthetic oligonucleotide
ccaacggtgcagatataaggtctgttgggg

SEQ ID NO: 295422 - DNA, 30 bp, Artificial Sequence
  Synthetic oligonucleotide
agtggcacttggggagtgacattgttgggg

SEQ ID NO: 295423 - DNA, 30 bp, Artificial Sequence
  Synthetic oligonucleotide
agtagagtctcttgcgaacggcctttgggg

SEQ ID NO: 295424 - DNA, 30 bp, Artificial Sequence
  Synthetic oligonucleotide
gagcgcgagtagacagccggggctttgggg

SEQ ID NO: 295425 - DNA, 30 bp, Artificial Sequence
  Synthetic oligonucleotide
tttgagatacgtaacttagactgtttgggg

SEQ ID NO: 295426 - DNA, 30 bp, Artificial Sequence
  Synthetic oligonucleotide
acacacaccgttctcgaactgtttttgggg

SEQ ID NO: 295427 - DNA, 30 bp, Artificial Sequence
  Synthetic oligonucleotide
acgtcattcaccccgcatgtgtttttgggg

SEQ ID NO: 295428 - DNA, 30 bp, Artificial Sequence
  Synthetic oligonucleotide
ctgggtgagggaggcatagaataaaatggg

SEQ ID NO: 295429 - DNA, 30 bp, Artificial Sequence
  Synthetic oligonucleotide
aacgtgcacgcgcccaacactacaaatggg

SEQ ID NO: 295430 - DNA, 30 bp, Artificial Sequence
  Synthetic oligonucleotide
atgctcacgagcagccgtatatgcaatggg

SEQ ID NO: 295431 - DNA, 30 bp, Artificial Sequence
  Synthetic oligonucleotide
cacgtctacttctgcaatatctagaatggg

SEQ ID NO: 295432 - DNA, 30 bp, Artificial Sequence
  Synthetic oligonucleotide
cgccatttggggttacctgcaacgaatggg

SEQ ID NO: 295433 - DNA, 30 bp, Artificial Sequence
  Synthetic oligonucleotide
actcagagacgcgcaggctgcactaatggg

SEQ ID NO: 295434 - DNA, 30 bp, Artificial Sequence
  Synthetic oligonucleotide
ttgtagcacataatggatgatcctaatggg

SEQ ID NO: 295435 - DNA, 30 bp, Artificial Sequence
  Synthetic oligonucleotide
gtaattgggagtcttggacgtgctaatggg

SEQ ID NO: 295436 - DNA, 30 bp, Artificial Sequence
  Synthetic oligonucleotide
ccatgacttaacataaatgtgtctaatggg

SEQ ID NO: 295437 - DNA, 30 bp, Artificial Sequence
  Synthetic oligonucleotide
atgacgtgtgcttttggttctgttaatggg

SEQ ID NO: 295438 - DNA, 30 bp, Artificial Sequence
  Synthetic oligonucleotide
actgcgggcaggaatacctggctacatggg

SEQ ID NO: 295439 - DNA, 30 bp, Artificial Sequence
  Synthetic oligonucleotide
agggtaggtgcgggaaaggtaccgcatggg

SEQ ID NO: 295440 - DNA, 30 bp, Artificial Sequence
  Synthetic oligonucleotide
tgtccgtcgatatgagtgtaagggcatggg

SEQ ID NO: 295441 - DNA, 30 bp, Artificial Sequence
  Synthetic oligonucleotide
ttcaaatttgcgactgaccccgtagatggg

SEQ ID NO: 295442 - DNA, 30 bp, Artificial Sequence
  Synthetic oligonucleotide
aatcgctgaattgcaatcctctctgatggg

SEQ ID NO: 295443 - DNA, 30 bp, Artificial Sequence
  Synthetic oligonucleotide
ctccccatgaacttagcttaaggatatggg

SEQ ID NO: 295444 - DNA, 30 bp, Artificial Sequence
  Synthetic oligonucleotide
ataaaacggcagttatcttaaccctatggg

SEQ ID NO: 295445 - DNA, 30 bp, Artificial Sequence
  Synthetic oligonucleotide
tcttgcttgaatgcgtagaacagctatggg

SEQ ID NO: 295446 - DNA, 30 bp, Artificial Sequence
  Synthetic oligonucleotide
tcagagcgaggccggacgcaattctatggg

SEQ ID NO: 295447 - DNA, 30 bp, Artificial Sequence
  Synthetic oligonucleotide
accaaatgtttagtagtcaaccgaactggg

SEQ ID NO: 295448 - DNA, 30 bp, Artificial Sequence
  Synthetic oligonucleotide
catgcatgggcttattgttatcacactggg

SEQ ID NO: 295449 - DNA, 30 bp, Artificial Sequence
  Synthetic oligonucleotide
ttgttgagaatctagacatgcccgactggg

SEQ ID NO: 295450 - DNA, 30 bp, Artificial Sequence
  Synthetic oligonucleotide
ctggaaactggttggtggcccatgactggg

SEQ ID NO: 295451 - DNA, 30 bp, Artificial Sequence
  Synthetic oligonucleotide
actggagacgctgcggacaacggtactggg

SEQ ID NO: 295452 - DNA, 30 bp, Artificial Sequence
  Synthetic oligonucleotide
agtgtcgtcattgtatctgctgttactggg

SEQ ID NO: 295453 - DNA, 30 bp, Artificial Sequence
  Synthetic oligonucleotide
agttgcggatctaggcagttggtacctggg

SEQ ID NO: 295454 - DNA, 30 bp, Artificial Sequence
  Synthetic oligonucleotide
caccactttgccggtgtttcggaccctggg

SEQ ID NO: 295455 - DNA, 30 bp, Artificial Sequence
  Synthetic oligonucleotide
ggctaagttactgtggctgttttccctggg

SEQ ID NO: 295456 - DNA, 30 bp, Artificial Sequence
  Synthetic oligonucleotide
gcgtttctcattcattggcttgctcctggg

SEQ ID NO: 295457 - DNA, 30 bp, Artificial Sequence
  Synthetic oligonucleotide
atcccaggactctaggaacttttagctggg

SEQ ID NO: 295458 - DNA, 30 bp, Artificial Sequence
  Synthetic oligonucleotide
aagggttgaatcttttgcacaccggctggg

SEQ ID NO: 295459 - DNA, 30 bp, Artificial Sequence
  Synthetic oligonucleotide
ttcttctggttactaagtaaaggggctggg

SEQ ID NO: 295460 - DNA, 30 bp, Artificial Sequence
  Synthetic oligonucleotide
gtacaagtcagacccgtaaggctggctggg

SEQ ID NO: 295461 - DNA, 30 bp, Artificial Sequence
  Synthetic oligonucleotide
gtcgggctgagaccgcggtctgctgctggg

SEQ ID NO: 295462 - DNA, 30 bp, Artificial Sequence
  Synthetic oligonucleotide
cagcgggatgcaggacaagggagtgctggg

SEQ ID NO: 295463 - DNA, 30 bp, Artificial Sequence
  Synthetic oligonucleotide
catttatccgctccgaacaatattgctggg

SEQ ID NO: 295464 - DNA, 30 bp, Artificial Sequence
  Synthetic oligonucleotide
cactcggaacagcgctcagcacaatctggg

SEQ ID NO: 295465 - DNA, 30 bp, Artificial Sequence
  Synthetic oligonucleotide
tgcgcctaacgtgggtgtactgactctggg

SEQ ID NO: 295466 - DNA, 30 bp, Artificial Sequence
  Synthetic oligonucleotide
gaagttacgtgagccgggtcataaagtggg

SEQ ID NO: 295467 - DNA, 30 bp, Artificial Sequence
  Synthetic oligonucleotide
ctgagttcgaaattgaggcagtaaagtggg

SEQ ID NO: 295468 - DNA, 30 bp, Artificial Sequence
  Synthetic oligonucleotide
catggtcgagaatgcgccgctagaagtggg

SEQ ID NO: 295469 - DNA, 30 bp, Artificial Sequence
  Synthetic oligonucleotide
taagactagatatatatgccccagagtggg

SEQ ID NO: 295470 - DNA, 30 bp, Artificial Sequence
  Synthetic oligonucleotide
cgtagagggtccagcggaacttcgagtggg

SEQ ID NO: 295471 - DNA, 30 bp, Artificial Sequence
  Synthetic oligonucleotide
atttaccttgtatggggagaacatagtggg

SEQ ID NO: 295472 - DNA, 30 bp, Artificial Sequence
  Synthetic oligonucleotide
taagttaacgaaaggcgatgccatagtggg

SEQ ID NO: 295473 - DNA, 30 bp, Artificial Sequence
  Synthetic oligonucleotide
atcgtcacttttgaccgtcaagatagtggg

SEQ ID NO: 295474 - DNA, 30 bp, Artificial Sequence
  Synthetic oligonucleotide
agaaaattagttctggtcggcacccgtggg

SEQ ID NO: 295475 - DNA, 30 bp, Artificial Sequence
  Synthetic oligonucleotide
tcaccatactgctttcagggtgctcgtggg

SEQ ID NO: 295476 - DNA, 30 bp, Artificial Sequence
  Synthetic oligonucleotide
ggaacctgtacttggcaatccccaggtggg

SEQ ID NO: 295477 - DNA, 30 bp, Artificial Sequence
  Synthetic oligonucleotide
ctgcgcaccagacagctgtacctaggtggg

SEQ ID NO: 295478 - DNA, 30 bp, Artificial Sequence
  Synthetic oligonucleotide
gctgatggaccgtcacccggggacggtggg

SEQ ID NO: 295479 - DNA, 30 bp, Artificial Sequence
  Synthetic oligonucleotide
acagaaaccgcaatgctagtgtacggtggg

SEQ ID NO: 295480 - DNA, 30 bp, Artificial Sequence
  Synthetic oligonucleotide
gactagtcagcctaaccttgttacggtggg

SEQ ID NO: 295481 - DNA, 30 bp, Artificial Sequence
  Synthetic oligonucleotide
atcgcttccccgggaaggagttccggtggg

SEQ ID NO: 295482 - DNA, 30 bp, Artificial Sequence
  Synthetic oligonucleotide
cttccatccgtatataaaagaaagggtggg

SEQ ID NO: 295483 - DNA, 30 bp, Artificial Sequence
  Synthetic oligonucleotide
cgggaactacctacttactggaggggtggg

SEQ ID NO: 295484 - DNA, 30 bp, Artificial Sequence
  Synthetic oligonucleotide
aagcttggaagggcaatagctgtgggtggg

SEQ ID NO: 295485 - DNA, 30 bp, Artificial Sequence
  Synthetic oligonucleotide
cgggatcaaataaatgaatatactggtggg

SEQ ID NO: 295486 - DNA, 30 bp, Artificial Sequence
  Synthetic oligonucleotide
attaactggatcaagatagatgctggtggg

SEQ ID NO: 295487 - DNA, 30 bp, Artificial Sequence
  Synthetic oligonucleotide
tcagcgcgatctagattatcacgctgtggg

SEQ ID NO: 295488 - DNA, 30 bp, Artificial Sequence
  Synthetic oligonucleotide
gtacattccttttaggatactcgttgtggg

SEQ ID NO: 295489 - DNA, 30 bp, Artificial Sequence
  Synthetic oligonucleotide
gtagattattaagactctaggttttgtggg

SEQ ID NO: 295490 - DNA, 30 bp, Artificial Sequence
  Synthetic oligonucleotide
ttaaaggtctcctaattcataaagattggg

SEQ ID NO: 295491 - DNA, 30 bp, Artificial Sequence
  Synthetic oligonucleotide
atttaaagtggttggcgcatatcgattggg

SEQ ID NO: 295492 - DNA, 30 bp, Artificial Sequence
  Synthetic oligonucleotide
ctaaactaggtgataaactagagtattggg

SEQ ID NO: 295493 - DNA, 30 bp, Artificial Sequence
  Synthetic oligonucleotide
gaattcgggttagcagtaacgagtattggg

SEQ ID NO: 295494 - DNA, 30 bp, Artificial Sequence
  Synthetic oligonucleotide
gtcttatgggttgacgcttaacgtattggg

SEQ ID NO: 295495 - DNA, 30 bp, Artificial Sequence
  Synthetic oligonucleotide
gcccctaatagcgctgagggaaagcttggg

SEQ ID NO: 295496 - DNA, 30 bp, Artificial Sequence
  Synthetic oligonucleotide
gagggtcgtcaggactgaggatggcttggg

SEQ ID NO: 295497 - DNA, 30 bp, Artificial Sequence
  Synthetic oligonucleotide
tacgggttgacttttggtgtaattcttggg

SEQ ID NO: 295498 - DNA, 30 bp, Artificial Sequence
  Synthetic oligonucleotide
ctggtactaacatcgtgatggaaagttggg

SEQ ID NO: 295499 - DNA, 30 bp, Artificial Sequence
  Synthetic oligonucleotide
gtttcgattgccaagagaagcggagttggg

SEQ ID NO: 295500 - DNA, 30 bp, Artificial Sequence
  Synthetic oligonucleotide
taattgtggatctccagaagcctagttggg

SEQ ID NO: 295501 - DNA, 30 bp, Artificial Sequence
  Synthetic oligonucleotide
taggccgggatatgcgcatagtacgttggg

SEQ ID NO: 295502 - DNA, 30 bp, Artificial Sequence
  Synthetic oligonucleotide
atcaggtgcctgatatggtaagaggttggg

SEQ ID NO: 295503 - DNA, 30 bp, Artificial Sequence
  Synthetic oligonucleotide
tgggcaacggtcatgcaattgcctgttggg

SEQ ID NO: 295504 - DNA, 30 bp, Artificial Sequence
  Synthetic oligonucleotide
gccccgagacctaatcaagtaggtgttggg

SEQ ID NO: 295505 - DNA, 30 bp, Artificial Sequence
  Synthetic oligonucleotide
aaacagaatatgcggtttccactatttggg

SEQ ID NO: 295506 - DNA, 30 bp, Artificial Sequence
  Synthetic oligonucleotide
gcaaaaacgcttagattagcactatttggg

SEQ ID NO: 295507 - DNA, 30 bp, Artificial Sequence
  Synthetic oligonucleotide
aatatggcgaaccgagattcactatttggg

SEQ ID NO: 295508 - DNA, 30 bp, Artificial Sequence
  Synthetic oligonucleotide
ggatcaatagcagtgggagtcgcgtttggg

SEQ ID NO: 295509 - DNA, 30 bp, Artificial Sequence
  Synthetic oligonucleotide
agtacatgatctgggaggggggcgtttggg

SEQ ID NO: 295510 - DNA, 30 bp, Artificial Sequence
  Synthetic oligonucleotide
cgatttatagttcactgtttcataaaatgg

SEQ ID NO: 295511 - DNA, 30 bp, Artificial Sequence
  Synthetic oligonucleotide
gaaaactgtgctataataaacaagaaatgg

SEQ ID NO: 295512 - DNA, 30 bp, Artificial Sequence
  Synthetic oligonucleotide
gtgctagacgttattatacacatgaaatgg

SEQ ID NO: 295513 - DNA, 30 bp, Artificial Sequence
  Synthetic oligonucleotide
cggttcgtgcacggtttcactgataaatgg

SEQ ID NO: 295514 - DNA, 30 bp, Artificial Sequence
  Synthetic oligonucleotide
attacgcttaagtcgtagggtgataaatgg

SEQ ID NO: 295515 - DNA, 29 bp, Artificial Sequence
  Synthetic oligonucleotide
gtgcatcaaccagtatgtgtactaaatgg

SEQ ID NO: 295516 - DNA, 30 bp, Artificial Sequence
  Synthetic oligonucleotide
cttgcaaaagtatgaaacgcctttaaatgg

SEQ ID NO: 295517 - DNA, 30 bp, Artificial Sequence
  Synthetic oligonucleotide
gtcttcggttaatttcgttagagacaatgg

SEQ ID NO: 295518 - DNA, 30 bp, Artificial Sequence
  Synthetic oligonucleotide
ccctatgtagagatctctataggacaatgg

SEQ ID NO: 295519 - DNA, 30 bp, Artificial Sequence
  Synthetic oligonucleotide
accagtaggtcttttgcagaatcccaatgg

SEQ ID NO: 295520 - DNA, 30 bp, Artificial Sequence
  Synthetic oligonucleotide
gattctaaactattgtcacataaagaatgg

SEQ ID NO: 295521 - DNA, 30 bp, Artificial Sequence
  Synthetic oligonucleotide
attcggtatgctgcgttagttgaagaatgg

SEQ ID NO: 295522 - DNA, 30 bp, Artificial Sequence
  Synthetic oligonucleotide
ggctgggcgcaacacaagggcacagaatgg

SEQ ID NO: 295523 - DNA, 30 bp, Artificial Sequence
  Synthetic oligonucleotide
ggggtagatgcccggtggggcacagaatgg

SEQ ID NO: 295524 - DNA, 30 bp, Artificial Sequence
  Synthetic oligonucleotide
gcatgtggctgtcgtgggaccatagaatgg

SEQ ID NO: 295525 - DNA, 30 bp, Artificial Sequence
  Synthetic oligonucleotide
ggaccaggagacagggtacagctcgaatgg

SEQ ID NO: 295526 - DNA, 30 bp, Artificial Sequence
  Synthetic oligonucleotide
tgctgtacgcctatgtcataggcggaatgg

SEQ ID NO: 295527 - DNA, 30 bp, Artificial Sequence
  Synthetic oligonucleotide
tagcgctggtgacttaagtagtcggaatgg

SEQ ID NO: 295528 - DNA, 30 bp, Artificial Sequence
  Synthetic oligonucleotide
attcgcgttcagtgtgccctgtgtgaatgg

SEQ ID NO: 295529 - DNA, 30 bp, Artificial Sequence
  Synthetic oligonucleotide
ccaggttcaagtggtcgttagacataatgg

SEQ ID NO: 295530 - DNA, 30 bp, Artificial Sequence
  Synthetic oligonucleotide
gctgaacggagcggactcagcgcataatgg

SEQ ID NO: 295531 - DNA, 30 bp, Artificial Sequence
  Synthetic oligonucleotide
cgtggcattatccgctgctgtccctaatgg

SEQ ID NO: 295532 - DNA, 30 bp, Artificial Sequence
  Synthetic oligonucleotide
tgttatggccgatccctttgaagctaatgg

SEQ ID NO: 295533 - DNA, 29 bp, Artificial Sequence
  Synthetic oligonucleotide
tatatcatccgtaacggatgcagtaatgg

SEQ ID NO: 295534 - DNA, 30 bp, Artificial Sequence
  Synthetic oligonucleotide
gtcaaaggagacagccgcacactgtaatgg

SEQ ID NO: 295535 - DNA, 30 bp, Artificial Sequence
  Synthetic oligonucleotide
tcccgagctctctaaattcgtctgtaatgg

SEQ ID NO: 295536 - DNA, 30 bp, Artificial Sequence
  Synthetic oligonucleotide
cgtcgcgaaattatctctttaggttaatgg

SEQ ID NO: 295537 - DNA, 30 bp, Artificial Sequence
  Synthetic oligonucleotide
cgctgtttgtctagggtaggatgcacatgg

SEQ ID NO: 295538 - DNA, 30 bp, Artificial Sequence
  Synthetic oligonucleotide
atcttcagctatgaatcgttggcgacatgg

SEQ ID NO: 295539 - DNA, 30 bp, Artificial Sequence
  Synthetic oligonucleotide
ttttttcaaggaacttatgttgcgacatgg

SEQ ID NO: 295540 - DNA, 30 bp, Artificial Sequence
  Synthetic oligonucleotide
aagtctagcgacaaggggctacttacatgg

SEQ ID NO: 295541 - DNA, 30 bp, Artificial Sequence
  Synthetic oligonucleotide
tctaagttcgcggtgcgatggttaccatgg

SEQ ID NO: 295542 - DNA, 30 bp, Artificial Sequence
  Synthetic oligonucleotide
gcaaggttccactaacctggcaggccatgg

SEQ ID NO: 295543 - DNA, 30 bp, Artificial Sequence
  Synthetic oligonucleotide
gctaaggtgcaagagcggataattccatgg

SEQ ID NO: 295544 - DNA, 30 bp, Artificial Sequence
  Synthetic oligonucleotide
catggtcaatggcccggaaggatagcatgg

SEQ ID NO: 295545 - DNA, 30 bp, Artificial Sequence
  Synthetic oligonucleotide
gtgctgtggactcggcatgcatctgcatgg

SEQ ID NO: 295546 - DNA, 30 bp, Artificial Sequence
  Synthetic oligonucleotide
agccgggaagggtggagacttgcatcatgg

SEQ ID NO: 295547 - DNA, 30 bp, Artificial Sequence
  Synthetic oligonucleotide
ggacgcgcatcgcggacgcgtagatcatgg

SEQ ID NO: 295548 - DNA, 30 bp, Artificial Sequence
  Synthetic oligonucleotide
cacattgcatcaaatttgcgtagatcatgg

SEQ ID NO: 295549 - DNA, 30 bp, Artificial Sequence
  Synthetic oligonucleotide
tactgtaaataatgttggaaaccgtcatgg

SEQ ID NO: 295550 - DNA, 30 bp, Artificial Sequence
  Synthetic oligonucleotide
aagtacttatacacttactggagttcatgg

SEQ ID NO: 295551 - DNA, 30 bp, Artificial Sequence
  Synthetic oligonucleotide
gctttcttattacgggtcgtgtgttcatgg

SEQ ID NO: 295552 - DNA, 30 bp, Artificial Sequence
  Synthetic oligonucleotide
aggaatactaatatcgccgcacaaagatgg

SEQ ID NO: 295553 - DNA, 30 bp, Artificial Sequence
  Synthetic oligonucleotide
ccagtcagaatctattaataaaacagatgg

SEQ ID NO: 295554 - DNA, 30 bp, Artificial Sequence
  Synthetic oligonucleotide
aagtatggactaagacgccgccgcagatgg

SEQ ID NO: 295555 - DNA, 30 bp, Artificial Sequence
  Synthetic oligonucleotide
actatattcggttggatacgtgtcagatgg

SEQ ID NO: 295556 - DNA, 30 bp, Artificial Sequence
  Synthetic oligonucleotide
gcctcaacacgtgccagaacatagagatgg

SEQ ID NO: 295557 - DNA, 30 bp, Artificial Sequence
  Synthetic oligonucleotide
gccccgaaccgatctactgtaactagatgg

SEQ ID NO: 295558 - DNA, 30 bp, Artificial Sequence
  Synthetic oligonucleotide
tcgctttggatgaggtttcatacacgatgg

SEQ ID NO: 295559 - DNA, 30 bp, Artificial Sequence
  Synthetic oligonucleotide
ctaatggcgttcgtgctcaaggaccgatgg

SEQ ID NO: 295560 - DNA, 30 bp, Artificial Sequence
  Synthetic oligonucleotide
aacttatctacggaatcctaatagcgatgg

SEQ ID NO: 295561 - DNA, 30 bp, Artificial Sequence
  Synthetic oligonucleotide
cggatagctttactgatatataggcgatgg

SEQ ID NO: 295562 - DNA, 30 bp, Artificial Sequence
  Synthetic oligonucleotide
aaatcccaaagcttaacggatcacggatgg

SEQ ID NO: 295563 - DNA, 30 bp, Artificial Sequence
  Synthetic oligonucleotide
ctattttgagcgttgtaggcggccggatgg

SEQ ID NO: 295564 - DNA, 30 bp, Artificial Sequence
  Synthetic oligonucleotide
gagagaacggcctctgccatgcgtggatgg

SEQ ID NO: 295565 - DNA, 30 bp, Artificial Sequence
  Synthetic oligonucleotide
cagagcgtcgtcgatatcttggcatgatgg

SEQ ID NO: 295566 - DNA, 30 bp, Artificial Sequence
  Synthetic oligonucleotide
tatactcgtggtaggacacagggatgatgg

SEQ ID NO: 295567 - DNA, 31 bp, Artificial Sequence
  Synthetic oligonucleotide
caataccaatagctctgcttgctgatgatgg

SEQ ID NO: 295568 - DNA, 30 bp, Artificial Sequence
  Synthetic oligonucleotide
cagcgcgacgagatcaatcaagcctgatgg

SEQ ID NO: 295569 - DNA, 30 bp, Artificial Sequence
  Synthetic oligonucleotide
tatttacccacgggatacggttagtgatgg

SEQ ID NO: 295570 - DNA, 30 bp, Artificial Sequence
  Synthetic oligonucleotide
ggggtaggaaagaacaggaggacgtgatgg

SEQ ID NO: 295571 - DNA, 30 bp, Artificial Sequence
  Synthetic oligonucleotide
ggcatatgggtttgtccaccaatgtgatgg

SEQ ID NO: 295572 - DNA, 30 bp, Artificial Sequence
  Synthetic oligonucleotide
cagatgctcgctgagtctatgacaatatgg

SEQ ID NO: 295573 - DNA, 30 bp, Artificial Sequence
  Synthetic oligonucleotide
gttaagtgctgtgctgtgaattccatatgg

SEQ ID NO: 295574 - DNA, 30 bp, Artificial Sequence
  Synthetic oligonucleotide
tgtaagaagttgtagcttggtaagatatgg

SEQ ID NO: 295575 - DNA, 30 bp, Artificial Sequence
  Synthetic oligonucleotide
acagttatatgggttccggatcagatatgg

SEQ ID NO: 295576 - DNA, 30 bp, Artificial Sequence
  Synthetic oligonucleotide
gtaggtgcgtccccattacccaggatatgg

SEQ ID NO: 295577 - DNA, 30 bp, Artificial Sequence
  Synthetic oligonucleotide
ttagagtctaacccccgtgcacgtatatgg

SEQ ID NO: 295578 - DNA, 30 bp, Artificial Sequence
  Synthetic oligonucleotide
gaaagacgaagggcaactgggtaactatgg

SEQ ID NO: 295579 - DNA, 30 bp, Artificial Sequence
  Synthetic oligonucleotide
tgcgtataccgcggagccgcgagactatgg

SEQ ID NO: 295580 - DNA, 30 bp, Artificial Sequence
  Synthetic oligonucleotide
gctctggttccagaccagaggcacctatgg

SEQ ID NO: 295581 - DNA, 30 bp, Artificial Sequence
  Synthetic oligonucleotide
gtacggccgtattaaagtagaggcctatgg

SEQ ID NO: 295582 - DNA, 30 bp, Artificial Sequence
  Synthetic oligonucleotide
tgcagcttatgtatgccactgtagctatgg

SEQ ID NO: 295583 - DNA, 30 bp, Artificial Sequence
  Synthetic oligonucleotide
gcaccaaaaggcagatcttgaatgctatgg

SEQ ID NO: 295584 - DNA, 30 bp, Artificial Sequence
  Synthetic oligonucleotide
gcggtcactctagagtttatcccagtatgg

SEQ ID NO: 295585 - DNA, 30 bp, Artificial Sequence
  Synthetic oligonucleotide
ggattggaacgttaattgctaagcgtatgg

SEQ ID NO: 295586 - DNA, 30 bp, Artificial Sequence
  Synthetic oligonucleotide
ttctgtggcgttcggaccactcgcgtatgg

SEQ ID NO: 295587 - DNA, 30 bp, Artificial Sequence
  Synthetic oligonucleotide
tctaaccgctaatctggaaggggcgtatgg

SEQ ID NO: 295588 - DNA, 30 bp, Artificial Sequence
  Synthetic oligonucleotide
ttctaataagatccgaatttgttcgtatgg

SEQ ID NO: 295589 - DNA, 30 bp, Artificial Sequence
  Synthetic oligonucleotide
agttcctgagaagccgtgagtagggtatgg

SEQ ID NO: 295590 - DNA, 30 bp, Artificial Sequence
  Synthetic oligonucleotide
tatataacaagtggtgatgttggggtatgg

SEQ ID NO: 295591 - DNA, 30 bp, Artificial Sequence
  Synthetic oligonucleotide
aatttcaagaagctgctcgagcgtgtatgg

SEQ ID NO: 295592 - DNA, 30 bp, Artificial Sequence
  Synthetic oligonucleotide
gatcctactattcgaagcctaaaattatgg

SEQ ID NO: 295593 - DNA, 30 bp, Artificial Sequence
  Synthetic oligonucleotide
gcaggatgctaactggggcgaatattatgg

SEQ ID NO: 295594 - DNA, 30 bp, Artificial Sequence
  Synthetic oligonucleotide
gaaaccgggcattggcggcagaagttatgg

SEQ ID NO: 295595 - DNA, 30 bp, Artificial Sequence
  Synthetic oligonucleotide
cggaatagtgcctgactttataggttatgg

SEQ ID NO: 295596 - DNA, 30 bp, Artificial Sequence
  Synthetic oligonucleotide
accccatgacccggatcgttagggttatgg

SEQ ID NO: 295597 - DNA, 30 bp, Artificial Sequence
  Synthetic oligonucleotide
acaccgcactctatactaacttggttatgg

SEQ ID NO: 295598 - DNA, 30 bp, Artificial Sequence
  Synthetic oligonucleotide
catcaataacttgatgtaggcctgttatgg

SEQ ID NO: 295599 - DNA, 30 bp, Artificial Sequence
  Synthetic oligonucleotide
gataatgatattctgagtgtcttgttatgg

SEQ ID NO: 295600 - DNA, 30 bp, Artificial Sequence
  Synthetic oligonucleotide
acaagctgcgacagaactgtcgacaactgg

SEQ ID NO: 295601 - DNA, 30 bp, Artificial Sequence
  Synthetic oligonucleotide
atatgaggataatataacgccgtgaactgg

SEQ ID NO: 295602 - DNA, 30 bp, Artificial Sequence
  Synthetic oligonucleotide
ttttgtgtacgcgattggaaatctaactgg

SEQ ID NO: 295603 - DNA, 30 bp, Artificial Sequence
  Synthetic oligonucleotide
gtagtaagtgtttcgcgagcgtttaactgg

SEQ ID NO: 295604 - DNA, 30 bp, Artificial Sequence
  Synthetic oligonucleotide
ctaggcctcgtgccccatgaaaaacactgg

SEQ ID NO: 295605 - DNA, 30 bp, Artificial Sequence
  Synthetic oligonucleotide
gtagagaaagctcagcgtagagtacactgg

SEQ ID NO: 295606 - DNA, 30 bp, Artificial Sequence
  Synthetic oligonucleotide
ccatgaactaccgcagtccacgaccactgg

SEQ ID NO: 295607 - DNA, 30 bp, Artificial Sequence
  Synthetic oligonucleotide
ccctctggagttcgccggacaagccactgg

SEQ ID NO: 295608 - DNA, 30 bp, Artificial Sequence
  Synthetic oligonucleotide
actggcgaacggcccaaggcctatcactgg

SEQ ID NO: 295609 - DNA, 30 bp, Artificial Sequence
  Synthetic oligonucleotide
gggcccgcatcagttcggaaccctcactgg

SEQ ID NO: 295610 - DNA, 30 bp, Artificial Sequence
  Synthetic oligonucleotide
aacgggggatacgcccgaggctaagactgg

SEQ ID NO: 295611 - DNA, 30 bp, Artificial Sequence
  Synthetic oligonucleotide
tacccatttatatcgtgttaaacagactgg

SEQ ID NO: 295612 - DNA, 30 bp, Artificial Sequence
  Synthetic oligonucleotide
gtcaagcgcagataataaagttacgactgg

SEQ ID NO: 295613 - DNA, 30 bp, Artificial Sequence
  Synthetic oligonucleotide
gacatcacactgtttatagtttacgactgg

SEQ ID NO: 295614 - DNA, 30 bp, Artificial Sequence
  Synthetic oligonucleotide
tagagcttgactactttgcagagcgactgg

SEQ ID NO: 295615 - DNA, 30 bp, Artificial Sequence
  Synthetic oligonucleotide
gtccaaggcaataaagccgttaaggactgg

SEQ ID NO: 295616 - DNA, 30 bp, Artificial Sequence
  Synthetic oligonucleotide
atacaagtccgaccccatcagggggactgg

SEQ ID NO: 295617 - DNA, 30 bp, Artificial Sequence
  Synthetic oligonucleotide
cgtctactgcattgcgtataggtggactgg

SEQ ID NO: 295618 - DNA, 30 bp, Artificial Sequence
  Synthetic oligonucleotide
cgggtacctatttctatcgagagtgactgg

SEQ ID NO: 295619 - DNA, 30 bp, Artificial Sequence
  Synthetic oligonucleotide
agacttcggaacggtggatgaacatactgg

SEQ ID NO: 295620 - DNA, 30 bp, Artificial Sequence
  Synthetic oligonucleotide
tctacgattaaaattcggcacggctactgg

SEQ ID NO: 295621 - DNA, 30 bp, Artificial Sequence
  Synthetic oligonucleotide
cgtcatacgtctcagtacaatgggtactgg

SEQ ID NO: 295622 - DNA, 30 bp, Artificial Sequence
  Synthetic oligonucleotide
gcttaactggcacggagacgcctttactgg

SEQ ID NO: 295623 - DNA, 30 bp, Artificial Sequence
  Synthetic oligonucleotide
gcgcggtgacactcacaggactgaacctgg

SEQ ID NO: 295624 - DNA, 30 bp, Artificial Sequence
  Synthetic oligonucleotide
gcatcttacccagacatatacaacacctgg

SEQ ID NO: 295625 - DNA, 30 bp, Artificial Sequence
  Synthetic oligonucleotide
gttcccttgtgacggaccagtctcacctgg

SEQ ID NO: 295626 - DNA, 30 bp, Artificial Sequence
  Synthetic oligonucleotide
aatccgctcagcaatcgtcaattgacctgg

SEQ ID NO: 295627 - DNA, 30 bp, Artificial Sequence
  Synthetic oligonucleotide
ggtatgagtcgttaggaaacacatacctgg

SEQ ID NO: 295628 - DNA, 30 bp, Artificial Sequence
  Synthetic oligonucleotide
aagcaacgtgctcgttgaatgcatacctgg

SEQ ID NO: 295629 - DNA, 30 bp, Artificial Sequence
  Synthetic oligonucleotide
tattgtttctgtactccctcatagccctgg

SEQ ID NO: 295630 - DNA, 30 bp, Artificial Sequence
  Synthetic oligonucleotide
tacctaatgctcttagtaaagccgccctgg

SEQ ID NO: 295631 - DNA, 30 bp, Artificial Sequence
  Synthetic oligonucleotide
catagtacggtaagtccggtacggccctgg

SEQ ID NO: 295632 - DNA, 30 bp, Artificial Sequence
  Synthetic oligonucleotide
ccgaaaagggagtgccgcgtgcatccctgg

SEQ ID NO: 295633 - DNA, 30 bp, Artificial Sequence
  Synthetic oligonucleotide
taggtcgcacgtggacgagctgctccctgg

SEQ ID NO: 295634 - DNA, 30 bp, Artificial Sequence
  Synthetic oligonucleotide
tcacatcaggagattccggagcttccctgg

SEQ ID NO: 295635 - DNA, 30 bp, Artificial Sequence
  Synthetic oligonucleotide
ttgttggggaccgaaaacccaacagcctgg

SEQ ID NO: 295636 - DNA, 30 bp, Artificial Sequence
  Synthetic oligonucleotide
ccttacctgtcgagcacataattagcctgg

SEQ ID NO: 295637 - DNA, 30 bp, Artificial Sequence
  Synthetic oligonucleotide
gtcaatcaggggttatgtttggaggcctgg

SEQ ID NO: 295638 - DNA, 30 bp, Artificial Sequence
  Synthetic oligonucleotide
ctgcatttttccgagcacaaggcatcctgg

SEQ ID NO: 295639 - DNA, 30 bp, Artificial Sequence
  Synthetic oligonucleotide
tggaacgtctgagcgcggacggcatcctgg

SEQ ID NO: 295640 - DNA, 30 bp, Artificial Sequence
  Synthetic oligonucleotide
ctactcaacaacttcggttcgcgatcctgg

SEQ ID NO: 295641 - DNA, 30 bp, Artificial Sequence
  Synthetic oligonucleotide
aaaggattttgagcttgacggtactcctgg

SEQ ID NO: 295642 - DNA, 30 bp, Artificial Sequence
  Synthetic oligonucleotide
aacgaccaaagcttatggagaggctcctgg

SEQ ID NO: 295643 - DNA, 30 bp, Artificial Sequence
  Synthetic oligonucleotide
aaattacctggccggacgacggaaagctgg

SEQ ID NO: 295644 - DNA, 30 bp, Artificial Sequence
  Synthetic oligonucleotide
aaggaggcttgccaagcgattaccagctgg

SEQ ID NO: 295645 - DNA, 30 bp, Artificial Sequence
  Synthetic oligonucleotide
accacgtcccgcatatgatatcccagctgg

SEQ ID NO: 295646 - DNA, 30 bp, Artificial Sequence
  Synthetic oligonucleotide
gacatgtagattgtaattaccatcagctgg

SEQ ID NO: 295647 - DNA, 30 bp, Artificial Sequence
  Synthetic oligonucleotide
gcgcagcttgtcgttctacggatcagctgg

SEQ ID NO: 295648 - DNA, 30 bp, Artificial Sequence
  Synthetic oligonucleotide
gagatcggggataggaactgtacgagctgg

SEQ ID NO: 295649 - DNA, 30 bp, Artificial Sequence
  Synthetic oligonucleotide
gctgcccaggacggctgagtcgcacgctgg

SEQ ID NO: 295650 - DNA, 30 bp, Artificial Sequence
  Synthetic oligonucleotide
tgtaacgcatgacgaaaaggtcaccgctgg

SEQ ID NO: 295651 - DNA, 30 bp, Artificial Sequence
  Synthetic oligonucleotide
cgtagagcataacttctacgttgccgctgg

SEQ ID NO: 295652 - DNA, 30 bp, Artificial Sequence
  Synthetic oligonucleotide
agcaaagcaactgagacacgaactcgctgg

SEQ ID NO: 295653 - DNA, 30 bp, Artificial Sequence
  Synthetic oligonucleotide
taggagtatccctattcgtcaagtcgctgg

SEQ ID NO: 295654 - DNA, 30 bp, Artificial Sequence
  Synthetic oligonucleotide
cgtcttagaataaatcgttattttcgctgg

SEQ ID NO: 295655 - DNA, 30 bp, Artificial Sequence
  Synthetic oligonucleotide
tacacttatctacctttagttccaggctgg

SEQ ID NO: 295656 - DNA, 30 bp, Artificial Sequence
  Synthetic oligonucleotide
ggggttggccctgtctcaagttagggctgg

SEQ ID NO: 295657 - DNA, 30 bp, Artificial Sequence
  Synthetic oligonucleotide
gtccgtgtagcccggcaggccgcatgctgg

SEQ ID NO: 295658 - DNA, 30 bp, Artificial Sequence
  Synthetic oligonucleotide
atgtagtggggcgtgtccaatcgctgctgg

SEQ ID NO: 295659 - DNA, 30 bp, Artificial Sequence
  Synthetic oligonucleotide
agtataggattcttggatatcgcgtgctgg

SEQ ID NO: 295660 - DNA, 30 bp, Artificial Sequence
  Synthetic oligonucleotide
tagagtagcgctaatagactcttttgctgg

SEQ ID NO: 295661 - DNA, 30 bp, Artificial Sequence
  Synthetic oligonucleotide
gtgtatgtaagcattcaggatacaatctgg

SEQ ID NO: 295662 - DNA, 30 bp, Artificial Sequence
  Synthetic oligonucleotide
tgcactcgtggctcaccgagcactatctgg

SEQ ID NO: 295663 - DNA, 30 bp, Artificial Sequence
  Synthetic oligonucleotide
acttgtatgcttacatttaggcctatctgg

SEQ ID NO: 295664 - DNA, 30 bp, Artificial Sequence
  Synthetic oligonucleotide
tggtcataatacttatgccaaattatctgg

SEQ ID NO: 295665 - DNA, 30 bp, Artificial Sequence
  Synthetic oligonucleotide
ggtatcctaaggtggggcctttttatctgg

SEQ ID NO: 295666 - DNA, 30 bp, Artificial Sequence
  Synthetic oligonucleotide
gagaaaaagaattggatcggagaactctgg

SEQ ID NO: 295667 - DNA, 30 bp, Artificial Sequence
  Synthetic oligonucleotide
cggtgtgtagggccaggaaaggaactctgg

SEQ ID NO: 295668 - DNA, 30 bp, Artificial Sequence
  Synthetic oligonucleotide
tgccgtaggaccgaccagaaccccctctgg

SEQ ID NO: 295669 - DNA, 30 bp, Artificial Sequence
  Synthetic oligonucleotide
tcataggacatgtcaaattaatccctctgg

SEQ ID NO: 295670 - DNA, 30 bp, Artificial Sequence
  Synthetic oligonucleotide
ggatccacgagtccacctttgggcctctgg

SEQ ID NO: 295671 - DNA, 30 bp, Artificial Sequence
  Synthetic oligonucleotide
cgcccgcgttttctgctgccagttctctgg

SEQ ID NO: 295672 - DNA, 30 bp, Artificial Sequence
  Synthetic oligonucleotide
tcgacgttcgtggggcccctttttctctgg

SEQ ID NO: 295673 - DNA, 30 bp, Artificial Sequence
  Synthetic oligonucleotide
tgcagttacgagctattttcctgagtctgg

SEQ ID NO: 295674 - DNA, 30 bp, Artificial Sequence
  Synthetic oligonucleotide
cgttcttatgcgaggatccgagtagtctgg

SEQ ID NO: 295675 - DNA, 30 bp, Artificial Sequence
  Synthetic oligonucleotide
ggagtcatagcctagggtaagagggtctgg

SEQ ID NO: 295676 - DNA, 30 bp, Artificial Sequence
  Synthetic oligonucleotide
ctaagtatatcgtctcgaggcatggtctgg

SEQ ID NO: 295677 - DNA, 30 bp, Artificial Sequence
  Synthetic oligonucleotide
gggggcatgcacgacttggtcagtgtctgg

SEQ ID NO: 295678 - DNA, 30 bp, Artificial Sequence
  Synthetic oligonucleotide
ttgtcaggtctactagtagtaagattctgg

SEQ ID NO: 295679 - DNA, 30 bp, Artificial Sequence
  Synthetic oligonucleotide
cggctagagtactctctgtccagattctgg

SEQ ID NO: 295680 - DNA, 30 bp, Artificial Sequence
  Synthetic oligonucleotide
gtcagaaagcactatccttccttattctgg

SEQ ID NO: 295681 - DNA, 30 bp, Artificial Sequence
  Synthetic oligonucleotide
tcatagtgtgggtccgatgtatacttctgg

SEQ ID NO: 295682 - DNA, 29 bp, Artificial Sequence
  Synthetic oligonucleotide
ccgcaggttactacgcaagtagcttctgg

SEQ ID NO: 295683 - DNA, 30 bp, Artificial Sequence
  Synthetic oligonucleotide
gattaaacacgggtaatcatttcgttctgg

SEQ ID NO: 295684 - DNA, 30 bp, Artificial Sequence
  Synthetic oligonucleotide
ggaagtgggcgctcgtgtagacctttctgg

SEQ ID NO: 295685 - DNA, 30 bp, Artificial Sequence
  Synthetic oligonucleotide
taattttgcggatccgtctcatttttctgg

SEQ ID NO: 295686 - DNA, 30 bp, Artificial Sequence
  Synthetic oligonucleotide
tagtgaacttaaacacccactttcaagtgg

SEQ ID NO: 295687 - DNA, 30 bp, Artificial Sequence
  Synthetic oligonucleotide
acagtgagcgagctccactaacagaagtgg

SEQ ID NO: 295688 - DNA, 30 bp, Artificial Sequence
  Synthetic oligonucleotide
aattgatgtgtttcgtcgaagtagaagtgg

SEQ ID NO: 295689 - DNA, 30 bp, Artificial Sequence
  Synthetic oligonucleotide
ctccaatctcgaaacgccgccggtaagtgg

SEQ ID NO: 295690 - DNA, 30 bp, Artificial Sequence
  Synthetic oligonucleotide
acagccagccggagttggacaccccagtgg

SEQ ID NO: 295691 - DNA, 30 bp, Artificial Sequence
  Synthetic oligonucleotide
aactgattccgctaacacgtgtcccagtgg

SEQ ID NO: 295692 - DNA, 30 bp, Artificial Sequence
  Synthetic oligonucleotide
gccccctacaaaactggatcagtgcagtgg

SEQ ID NO: 295693 - DNA, 30 bp, Artificial Sequence
  Synthetic oligonucleotide
aagttagggtttgaaggataaaatcagtgg

SEQ ID NO: 295694 - DNA, 30 bp, Artificial Sequence
  Synthetic oligonucleotide
taagatttggggaaactaggagttcagtgg

SEQ ID NO: 295695 - DNA, 30 bp, Artificial Sequence
  Synthetic oligonucleotide
tactgggccgtgcgttcccataacgagtgg

SEQ ID NO: 295696 - DNA, 30 bp, Artificial Sequence
  Synthetic oligonucleotide
caataatcattaagatttattagcgagtgg

SEQ ID NO: 295697 - DNA, 30 bp, Artificial Sequence
  Synthetic oligonucleotide
tctctaggggaaaattgtacagatgagtgg

SEQ ID NO: 295698 - DNA, 30 bp, Artificial Sequence
  Synthetic oligonucleotide
ggaacagtgtttaagtacgccgctgagtgg

SEQ ID NO: 295699 - DNA, 30 bp, Artificial Sequence
  Synthetic oligonucleotide
ccgcgttgcgagctgaacgcgtactagtgg

SEQ ID NO: 295700 - DNA, 30 bp, Artificial Sequence
  Synthetic oligonucleotide
ggaacctgtgcgtgcgtggtgttctagtgg

SEQ ID NO: 295701 - DNA, 30 bp, Artificial Sequence
  Synthetic oligonucleotide
gagtcaaaagctttgtatactggttagtgg

SEQ ID NO: 295702 - DNA, 30 bp, Artificial Sequence
  Synthetic oligonucleotide
aaagattggtaagggtactcaccaacgtgg

SEQ ID NO: 295703 - DNA, 30 bp, Artificial Sequence
  Synthetic oligonucleotide
ggattcatagagtccagcctgtcaacgtgg

SEQ ID NO: 295704 - DNA, 30 bp, Artificial Sequence
  Synthetic oligonucleotide
cgtttatttgcgatcttagtatgaacgtgg

SEQ ID NO: 295705 - DNA, 30 bp, Artificial Sequence
  Synthetic oligonucleotide
aatcatcatatgccggatgtgctaacgtgg

SEQ ID NO: 295706 - DNA, 30 bp, Artificial Sequence
  Synthetic oligonucleotide
gaaatctgggcgcacgtacgagcgacgtgg

SEQ ID NO: 295707 - DNA, 30 bp, Artificial Sequence
  Synthetic oligonucleotide
gatgtgagtgactaatatgattggacgtgg

SEQ ID NO: 295708 - DNA, 30 bp, Artificial Sequence
  Synthetic oligonucleotide
aatgaccactcgaaggatgccagtacgtgg

SEQ ID NO: 295709 - DNA, 30 bp, Artificial Sequence
  Synthetic oligonucleotide
ttatactgtcagtgaggtggacttacgtgg

SEQ ID NO: 295710 - DNA, 30 bp, Artificial Sequence
  Synthetic oligonucleotide
gggtgtagcatagtcgtcgtgtttacgtgg

SEQ ID NO: 295711 - DNA, 30 bp, Artificial Sequence
  Synthetic oligonucleotide
gaagtgtaatcagtaatactagaaccgtgg

SEQ ID NO: 295712 - DNA, 30 bp, Artificial Sequence
  Synthetic oligonucleotide
ggctcgaaatacggacctgagccaccgtgg

SEQ ID NO: 295713 - DNA, 30 bp, Artificial Sequence
  Synthetic oligonucleotide
gtgaaatggcagcttgacagggacccgtgg

SEQ ID NO: 295714 - DNA, 30 bp, Artificial Sequence
  Synthetic oligonucleotide
gccacgtccattggggagtgaaccccgtgg

SEQ ID NO: 295715 - DNA, 30 bp, Artificial Sequence
  Synthetic oligonucleotide
cctagtgctggtacgccaaaggccccgtgg

SEQ ID NO: 295716 - DNA, 30 bp, Artificial Sequence
  Synthetic oligonucleotide
cagcaccggtgtagtactttcatcccgtgg

SEQ ID NO: 295717 - DNA, 30 bp, Artificial Sequence
  Synthetic oligonucleotide
ggcgcttatatacttttacagtagccgtgg

SEQ ID NO: 295718 - DNA, 30 bp, Artificial Sequence
  Synthetic oligonucleotide
aatccatgttatagtgtttttagagcgtgg

SEQ ID NO: 295719 - DNA, 30 bp, Artificial Sequence
  Synthetic oligonucleotide
actttaaattttgtcgagtggtgtgcgtgg

SEQ ID NO: 295720 - DNA, 30 bp, Artificial Sequence
  Synthetic oligonucleotide
gaactccgctaggggtataggcagtcgtgg

SEQ ID NO: 295721 - DNA, 30 bp, Artificial Sequence
  Synthetic oligonucleotide
taccggccacatatacctggcaggtcgtgg

SEQ ID NO: 295722 - DNA, 30 bp, Artificial Sequence
  Synthetic oligonucleotide
acgttacagacgcggtgtaaaaattcgtgg

SEQ ID NO: 295723 - DNA, 30 bp, Artificial Sequence
  Synthetic oligonucleotide
ttcgaagagaatgggaaacacacaaggtgg

SEQ ID NO: 295724 - DNA, 30 bp, Artificial Sequence
  Synthetic oligonucleotide
gtacgtcccaatctgaagtttgtcaggtgg

SEQ ID NO: 295725 - DNA, 30 bp, Artificial Sequence
  Synthetic oligonucleotide
tactttaggttcaaagaaaaatggaggtgg

SEQ ID NO: 295726 - DNA, 30 bp, Artificial Sequence
  Synthetic oligonucleotide
ttcggtactcacatcctgtgatggaggtgg

SEQ ID NO: 295727 - DNA, 30 bp, Artificial Sequence
  Synthetic oligonucleotide
tacaatcctgctcacgactacaataggtgg

SEQ ID NO: 295728 - DNA, 30 bp, Artificial Sequence
  Synthetic oligonucleotide
gtagtgaattatataccatataaacggtgg

SEQ ID NO: 295729 - DNA, 30 bp, Artificial Sequence
  Synthetic oligonucleotide
gttggatattcagaatacggtaagcggtgg

SEQ ID NO: 295730 - DNA, 30 bp, Artificial Sequence
  Synthetic oligonucleotide
aatcaaacccatcagtgtcaaactcggtgg

SEQ ID NO: 295731 - DNA, 30 bp, Artificial Sequence
  Synthetic oligonucleotide
cactgtatcaaacgaaacgggtttcggtgg

SEQ ID NO: 295732 - DNA, 30 bp, Artificial Sequence
  Synthetic oligonucleotide
aatccccctaagatatttggctgagggtgg

SEQ ID NO: 295733 - DNA, 30 bp, Artificial Sequence
  Synthetic oligonucleotide
tagccgtccactgtggggaatcacgggtgg

SEQ ID NO: 295734 - DNA, 30 bp, Artificial Sequence
  Synthetic oligonucleotide
ctggaaggctaacggatgtagatggggtgg

SEQ ID NO: 295735 - DNA, 30 bp, Artificial Sequence
  Synthetic oligonucleotide
cagtaggggtagctttaaggaaatgggtgg

SEQ ID NO: 295736 - DNA, 31 bp, Artificial Sequence
  Synthetic oligonucleotide
gtattctcaatgaaaaccctgccgtgggtgg

SEQ ID NO: 295737 - DNA, 30 bp, Artificial Sequence
  Synthetic oligonucleotide
tacactcatgcgtggaacgtccttgggtgg

SEQ ID NO: 295738 - DNA, 30 bp, Artificial Sequence
  Synthetic oligonucleotide
ggtaggcgtaacgctgctcttgcatggtgg

SEQ ID NO: 295739 - DNA, 30 bp, Artificial Sequence
  Synthetic oligonucleotide
cactggtctcccactatcgacggatggtgg

SEQ ID NO: 295740 - DNA, 30 bp, Artificial Sequence
  Synthetic oligonucleotide
gcgcacgcagaatcaaaggttggatggtgg

SEQ ID NO: 295741 - DNA, 30 bp, Artificial Sequence
  Synthetic oligonucleotide
gcatattggctgtcgtcactaacgtggtgg

SEQ ID NO: 295742 - DNA, 30 bp, Artificial Sequence
  Synthetic oligonucleotide
attggggcgatggctagcgttgggtggtgg

SEQ ID NO: 295743 - DNA, 30 bp, Artificial Sequence
  Synthetic oligonucleotide
caaaatgcactgccgtatgatatgtggtgg

SEQ ID NO: 295744 - DNA, 30 bp, Artificial Sequence
  Synthetic oligonucleotide
ccactccttgaaaatacctgtgattggtgg

SEQ ID NO: 295745 - DNA, 30 bp, Artificial Sequence
  Synthetic oligonucleotide
agctcgggggggaagttatgactttggtgg

SEQ ID NO: 295746 - DNA, 30 bp, Artificial Sequence
  Synthetic oligonucleotide
tctagtaacctctcggctagatgaatgtgg

SEQ ID NO: 295747 - DNA, 31 bp, Artificial Sequence
  Synthetic oligonucleotide
aacacgtggaaaacaaattccttccatgtgg

SEQ ID NO: 295748 - DNA, 30 bp, Artificial Sequence
  Synthetic oligonucleotide
agtttggacaaaactattctgtcgatgtgg

SEQ ID NO: 295749 - DNA, 30 bp, Artificial Sequence
  Synthetic oligonucleotide
taatcgacatctaaacttattaggatgtgg

SEQ ID NO: 295750 - DNA, 30 bp, Artificial Sequence
  Synthetic oligonucleotide
attatgtcgaacctttctttaatgatgtgg

SEQ ID NO: 295751 - DNA, 30 bp, Artificial Sequence
  Synthetic oligonucleotide
taataataggaggtgataatcaatatgtgg

SEQ ID NO: 295752 - DNA, 30 bp, Artificial Sequence
  Synthetic oligonucleotide
gcagcttatacattgggaagcaaactgtgg

SEQ ID NO: 295753 - DNA, 30 bp, Artificial Sequence
  Synthetic oligonucleotide
acaaaagtaatcttccatgcattactgtgg

SEQ ID NO: 295754 - DNA, 30 bp, Artificial Sequence
  Synthetic oligonucleotide
gggcgcacttgtgccctgagcgacctgtgg

SEQ ID NO: 295755 - DNA, 30 bp, Artificial Sequence
  Synthetic oligonucleotide
cgttagcagcccaaacgcgatcggctgtgg

SEQ ID NO: 295756 - DNA, 30 bp, Artificial Sequence
  Synthetic oligonucleotide
gtgggtaagacgatcgatattagtctgtgg

SEQ ID NO: 295757 - DNA, 30 bp, Artificial Sequence
  Synthetic oligonucleotide
agttctatctaaaaatttggagtagtgtgg

SEQ ID NO: 295758 - DNA, 30 bp, Artificial Sequence
  Synthetic oligonucleotide
aaccgggtatggacgtgcgggcacgtgtgg

SEQ ID NO: 295759 - DNA, 30 bp, Artificial Sequence
  Synthetic oligonucleotide
aagttcaaggtgtaagcgagtcacgtgtgg

SEQ ID NO: 295760 - DNA, 30 bp, Artificial Sequence
  Synthetic oligonucleotide
aggggatcctaccagacttatttcgtgtgg

SEQ ID NO: 295761 - DNA, 30 bp, Artificial Sequence
  Synthetic oligonucleotide
tagtgatgccgtctgggagagtaggtgtgg

SEQ ID NO: 295762 - DNA, 30 bp, Artificial Sequence
  Synthetic oligonucleotide
acttccagtatcttgagtattcgggtgtgg

SEQ ID NO: 295763 - DNA, 30 bp, Artificial Sequence
  Synthetic oligonucleotide
tgcgagagtgatgcgactgaaactgtgtgg

SEQ ID NO: 295764 - DNA, 30 bp, Artificial Sequence
  Synthetic oligonucleotide
ccactcaagggagcattacaaattgtgtgg

SEQ ID NO: 295765 - DNA, 30 bp, Artificial Sequence
  Synthetic oligonucleotide
tctacacctggaattttcgcatacttgtgg

SEQ ID NO: 295766 - DNA, 30 bp, Artificial Sequence
  Synthetic oligonucleotide
ttaccggcaggggcccaaacacagttgtgg

SEQ ID NO: 295767 - DNA, 30 bp, Artificial Sequence
  Synthetic oligonucleotide
gacgccatagaccagagattgtttttgtgg

SEQ ID NO: 295768 - DNA, 30 bp, Artificial Sequence
  Synthetic oligonucleotide
tgccggggttgttgtattccagcaaattgg

SEQ ID NO: 295769 - DNA, 30 bp, Artificial Sequence
  Synthetic oligonucleotide
caccgtcgcatatctatagcctgaaattgg

SEQ ID NO: 295770 - DNA, 30 bp, Artificial Sequence
  Synthetic oligonucleotide
ctgattgtaatgcagaattatctcaattgg

SEQ ID NO: 295771 - DNA, 30 bp, Artificial Sequence
  Synthetic oligonucleotide
gatacggattttcataccgggcctaattgg

SEQ ID NO: 295772 - DNA, 30 bp, Artificial Sequence
  Synthetic oligonucleotide
ataggttactagttgcggcagtaacattgg

SEQ ID NO: 295773 - DNA, 30 bp, Artificial Sequence
  Synthetic oligonucleotide
tcgtttgcggcgcaacgcggttaacattgg

SEQ ID NO: 295774 - DNA, 30 bp, Artificial Sequence
  Synthetic oligonucleotide
attcggtacggccttgattatacacattgg

SEQ ID NO: 295775 - DNA, 30 bp, Artificial Sequence
  Synthetic oligonucleotide
gcagcattcgtgttgttttgagcgcattgg

SEQ ID NO: 295776 - DNA, 30 bp, Artificial Sequence
  Synthetic oligonucleotide
gctggaccgcataggcccccgatagattgg

SEQ ID NO: 295777 - DNA, 30 bp, Artificial Sequence
  Synthetic oligonucleotide
acatctaccagcttccggctcaccgattgg

SEQ ID NO: 295778 - DNA, 30 bp, Artificial Sequence
  Synthetic oligonucleotide
atccctggtgccttataaaggtgcgattgg

SEQ ID NO: 295779 - DNA, 30 bp, Artificial Sequence
  Synthetic oligonucleotide
ttcctacttagtgcaatagtttgcgattgg

SEQ ID NO: 295780 - DNA, 30 bp, Artificial Sequence
  Synthetic oligonucleotide
tataacacacgtacaacgtgctgggattgg

SEQ ID NO: 295781 - DNA, 30 bp, Artificial Sequence
  Synthetic oligonucleotide
aagtctgggaaaaggaaaaatatggattgg

SEQ ID NO: 295782 - DNA, 30 bp, Artificial Sequence
  Synthetic oligonucleotide
ggaatatgctgtgtcaaatcttgtgattgg

SEQ ID NO: 295783 - DNA, 30 bp, Artificial Sequence
  Synthetic oligonucleotide
gcccaagcgatactacgttctggatattgg

SEQ ID NO: 295784 - DNA, 30 bp, Artificial Sequence
  Synthetic oligonucleotide
gtctttcctaatgaactgtcggggtattgg

SEQ ID NO: 295785 - DNA, 30 bp, Artificial Sequence
  Synthetic oligonucleotide
gtggtaccacagtgatcagaggacacttgg

SEQ ID NO: 295786 - DNA, 30 bp, Artificial Sequence
  Synthetic oligonucleotide
agacctttctgatgctatcccgcgacttgg

SEQ ID NO: 295787 - DNA, 30 bp, Artificial Sequence
  Synthetic oligonucleotide
ttaaactatggataatgcgtgtggacttgg

SEQ ID NO: 295788 - DNA, 30 bp, Artificial Sequence
  Synthetic oligonucleotide
tcgtgttttcatttcgcacgataaccttgg

SEQ ID NO: 295789 - DNA, 30 bp, Artificial Sequence
  Synthetic oligonucleotide
ttccaatacgagagatagcgctccccttgg

SEQ ID NO: 295790 - DNA, 30 bp, Artificial Sequence
  Synthetic oligonucleotide
aggcttgggtcaccgtcctccagcccttgg

SEQ ID NO: 295791 - DNA, 30 bp, Artificial Sequence
  Synthetic oligonucleotide
tcttgacctacggtgtcagttgtcccttgg

SEQ ID NO: 295792 - DNA, 30 bp, Artificial Sequence
  Synthetic oligonucleotide
tacgcccaggcgcgttcccggactccttgg

SEQ ID NO: 295793 - DNA, 30 bp, Artificial Sequence
  Synthetic oligonucleotide
cacctaccacctgctctcggcccggcttgg

SEQ ID NO: 295794 - DNA, 30 bp, Artificial Sequence
  Synthetic oligonucleotide
aatggcaacaatccatgcgccggggcttgg

SEQ ID NO: 295795 - DNA, 30 bp, Artificial Sequence
  Synthetic oligonucleotide
ggccctgatggctggacaagttatgcttgg

SEQ ID NO: 295796 - DNA, 30 bp, Artificial Sequence
  Synthetic oligonucleotide
acaagtgagaaacgttcctccggatcttgg

SEQ ID NO: 295797 - DNA, 30 bp, Artificial Sequence
  Synthetic oligonucleotide
tgcccatctttgtaggctatggagtcttgg

SEQ ID NO: 295798 - DNA, 30 bp, Artificial Sequence
  Synthetic oligonucleotide
cgcgtctaaggacgttaatggtggtcttgg

SEQ ID NO: 295799 - DNA, 30 bp, Artificial Sequence
  Synthetic oligonucleotide
tgctcccaatgagggttccccctgtcttgg

SEQ ID NO: 295800 - DNA, 30 bp, Artificial Sequence
  Synthetic oligonucleotide
tggttcctcgtatatatgtttccttcttgg

SEQ ID NO: 295801 - DNA, 30 bp, Artificial Sequence
  Synthetic oligonucleotide
gcggcgtcaggagagttgtggggttcttgg

SEQ ID NO: 295802 - DNA, 30 bp, Artificial Sequence
  Synthetic oligonucleotide
atggccctgcgccacaagcgcgcaagttgg

SEQ ID NO: 295803 - DNA, 30 bp, Artificial Sequence
  Synthetic oligonucleotide
ttccgccgtatggcacgactacgcagttgg

SEQ ID NO: 295804 - DNA, 30 bp, Artificial Sequence
  Synthetic oligonucleotide
aaagcgtaactttgcgggctcctgagttgg

SEQ ID NO: 295805 - DNA, 30 bp, Artificial Sequence
  Synthetic oligonucleotide
tctcgcgctgatggtcggtaacatagttgg

SEQ ID NO: 295806 - DNA, 30 bp, Artificial Sequence
  Synthetic oligonucleotide
gctgatcgcacacccagacgtactagttgg

SEQ ID NO: 295807 - DNA, 30 bp, Artificial Sequence
  Synthetic oligonucleotide
aaaagccacctaacggagaaaacacgttgg

SEQ ID NO: 295808 - DNA, 30 bp, Artificial Sequence
  Synthetic oligonucleotide
gtacctcaagccggtccaggtatccgttgg

SEQ ID NO: 295809 - DNA, 30 bp, Artificial Sequence
  Synthetic oligonucleotide
ccagtagactttacagctgcatttcgttgg

SEQ ID NO: 295810 - DNA, 30 bp, Artificial Sequence
  Synthetic oligonucleotide
agtactcctaagttttgtacttttcgttgg

SEQ ID NO: 295811 - DNA, 30 bp, Artificial Sequence
  Synthetic oligonucleotide
cgtggaggtgggttcgggcgctaaggttgg

SEQ ID NO: 295812 - DNA, 30 bp, Artificial Sequence
  Synthetic oligonucleotide
gccatcttaagtcttaggaacaacggttgg

SEQ ID NO: 295813 - DNA, 30 bp, Artificial Sequence
  Synthetic oligonucleotide
gcgcacggggtggggagccttgtcggttgg

SEQ ID NO: 295814 - DNA, 30 bp, Artificial Sequence
  Synthetic oligonucleotide
accgccaaagaagtctacccctggggttgg

SEQ ID NO: 295815 - DNA, 30 bp, Artificial Sequence
  Synthetic oligonucleotide
taggccgttcagggcttgcaactgggttgg

SEQ ID NO: 295816 - DNA, 30 bp, Artificial Sequence
  Synthetic oligonucleotide
agtctttgaggcgtactcatagggtgttgg

SEQ ID NO: 295817 - DNA, 30 bp, Artificial Sequence
  Synthetic oligonucleotide
gtaaaggtggcacagttggcggattgttgg

SEQ ID NO: 295818 - DNA, 30 bp, Artificial Sequence
  Synthetic oligonucleotide
atacaatattggtgatgaacaccttgttgg

SEQ ID NO: 295819 - DNA, 30 bp, Artificial Sequence
  Synthetic oligonucleotide
gtctagcgaaggtctttagcccaaatttgg

SEQ ID NO: 295820 - DNA, 30 bp, Artificial Sequence
  Synthetic oligonucleotide
cccgcggagataacggagcctcaaatttgg

SEQ ID NO: 295821 - DNA, 30 bp, Artificial Sequence
  Synthetic oligonucleotide
atagtttgtttaattgtaagagggatttgg

SEQ ID NO: 295822 - DNA, 30 bp, Artificial Sequence
  Synthetic oligonucleotide
tagctgagcgttggttgactcttgatttgg

SEQ ID NO: 295823 - DNA, 30 bp, Artificial Sequence
  Synthetic oligonucleotide
gcgggggtagcccgagcttactctatttgg

SEQ ID NO: 295824 - DNA, 30 bp, Artificial Sequence
  Synthetic oligonucleotide
agaaatcttgcctaccgcagggttatttgg

SEQ ID NO: 295825 - DNA, 30 bp, Artificial Sequence
  Synthetic oligonucleotide
taacatagtcgagaggaggatttcctttgg

SEQ ID NO: 295826 - DNA, 30 bp, Artificial Sequence
  Synthetic oligonucleotide
cgtgttaaaatcggcacacttaagctttgg

SEQ ID NO: 295827 - DNA, 30 bp, Artificial Sequence
  Synthetic oligonucleotide
atgtaactggtaatgcgcaggccgctttgg

SEQ ID NO: 295828 - DNA, 30 bp, Artificial Sequence
  Synthetic oligonucleotide
gatcaatgctgacctgtgatatctctttgg

SEQ ID NO: 295829 - DNA, 30 bp, Artificial Sequence
  Synthetic oligonucleotide
cgatactgacattcttgcctaagagtttgg

SEQ ID NO: 295830 - DNA, 30 bp, Artificial Sequence
  Synthetic oligonucleotide
aatcgggtggggcgggattggtgggtttgg

SEQ ID NO: 295831 - DNA, 30 bp, Artificial Sequence
  Synthetic oligonucleotide
tagagtactattccgatttgggatgtttgg

SEQ ID NO: 295832 - DNA, 30 bp, Artificial Sequence
  Synthetic oligonucleotide
catatcggtaatataataccaatattttgg

SEQ ID NO: 295833 - DNA, 30 bp, Artificial Sequence
  Synthetic oligonucleotide
gcctcgaaggcaactgtcaggtccttttgg

SEQ ID NO: 295834 - DNA, 30 bp, Artificial Sequence
  Synthetic oligonucleotide
cgactcgttaaaagcgaacttcctttttgg

SEQ ID NO: 295835 - DNA, 30 bp, Artificial Sequence
  Synthetic oligonucleotide
tgacgaaaggacctttgaacacgtttttgg

SEQ ID NO: 295836 - DNA, 30 bp, Artificial Sequence
  Synthetic oligonucleotide
agcaccattctccttttatggagaaaaatg

SEQ ID NO: 295837 - DNA, 30 bp, Artificial Sequence
  Synthetic oligonucleotide
agcttaaaatttttgtatagcgtaaaaatg

SEQ ID NO: 295838 - DNA, 30 bp, Artificial Sequence
  Synthetic oligonucleotide
taggatgttcacaccaagtggttaaaaatg

SEQ ID NO: 295839 - DNA, 30 bp, Artificial Sequence
  Synthetic oligonucleotide
tttgagtaatgaggcctggttaacaaaatg

SEQ ID NO: 295840 - DNA, 30 bp, Artificial Sequence
  Synthetic oligonucleotide
tctcctaagcggaatacttatcccaaaatg

SEQ ID NO: 295841 - DNA, 30 bp, Artificial Sequence
  Synthetic oligonucleotide
ctaagctctatgctatgcacaagcaaaatg

SEQ ID NO: 295842 - DNA, 30 bp, Artificial Sequence
  Synthetic oligonucleotide
tatgaattgagcaccgtggtaagcaaaatg

SEQ ID NO: 295843 - DNA, 30 bp, Artificial Sequence
  Synthetic oligonucleotide
gataatgcatcccgcctgagtcagaaaatg

SEQ ID NO: 295844 - DNA, 30 bp, Artificial Sequence
  Synthetic oligonucleotide
aatatgtcagcgttaggcagagggaaaatg

SEQ ID NO: 295845 - DNA, 30 bp, Artificial Sequence
  Synthetic oligonucleotide
actgcttcgcagtcgagatgactgaaaatg

SEQ ID NO: 295846 - DNA, 30 bp, Artificial Sequence
  Synthetic oligonucleotide
ctagttattttcggctgtagtcttaaaatg

SEQ ID NO: 295847 - DNA, 30 bp, Artificial Sequence
  Synthetic oligonucleotide
aattagactccatcagccgaccgacaaatg

SEQ ID NO: 295848 - DNA, 30 bp, Artificial Sequence
  Synthetic oligonucleotide
tttacgatcctcaaattgatcccgcaaatg

SEQ ID NO: 295849 - DNA, 30 bp, Artificial Sequence
  Synthetic oligonucleotide
ggagttactaccgaaagcatgtggcaaatg

SEQ ID NO: 295850 - DNA, 30 bp, Artificial Sequence
  Synthetic oligonucleotide
gcccgtcctcacagcccaaattacgaaatg

SEQ ID NO: 295851 - DNA, 30 bp, Artificial Sequence
  Synthetic oligonucleotide
gctttgatcaaaatgagcaacggcgaaatg

SEQ ID NO: 295852 - DNA, 30 bp, Artificial Sequence
  Synthetic oligonucleotide
ccattaccaagtagcgtaatataggaaatg

SEQ ID NO: 295853 - DNA, 30 bp, Artificial Sequence
  Synthetic oligonucleotide
gtaaaggtaaccgcggcagtcactgaaatg

SEQ ID NO: 295854 - DNA, 30 bp, Artificial Sequence
  Synthetic oligonucleotide
cgcgtattggatgtatggatgtctgaaatg

SEQ ID NO: 295855 - DNA, 30 bp, Artificial Sequence
  Synthetic oligonucleotide
cgcttgccaatggtaggcttaagtgaaatg

SEQ ID NO: 295856 - DNA, 30 bp, Artificial Sequence
  Synthetic oligonucleotide
actcttaggcctgacacatctgcctaaatg

SEQ ID NO: 295857 - DNA, 30 bp, Artificial Sequence
  Synthetic oligonucleotide
ctctactgaagaggcacgttttgctaaatg

SEQ ID NO: 295858 - DNA, 30 bp, Artificial Sequence
  Synthetic oligonucleotide
gcggtggttgtgggaaacccggggtaaatg

SEQ ID NO: 295859 - DNA, 30 bp, Artificial Sequence
  Synthetic oligonucleotide
ataggcaaaaaaccgcgaggtatgtaaatg

SEQ ID NO: 295860 - DNA, 30 bp, Artificial Sequence
  Synthetic oligonucleotide
tcttatcctgttagtaaaggtcattaaatg

SEQ ID NO: 295861 - DNA, 30 bp, Artificial Sequence
  Synthetic oligonucleotide
gtaagtcctggtctgttacagacttaaatg

SEQ ID NO: 295862 - DNA, 30 bp, Artificial Sequence
  Synthetic oligonucleotide
ccaaggatcagactccctgggggttaaatg

SEQ ID NO: 295863 - DNA, 30 bp, Artificial Sequence
  Synthetic oligonucleotide
caacgagcgcataagaagactttttaaatg

SEQ ID NO: 295864 - DNA, 30 bp, Artificial Sequence
  Synthetic oligonucleotide
ggctcccggatagcaatgggtagcacaatg

SEQ ID NO: 295865 - DNA, 30 bp, Artificial Sequence
  Synthetic oligonucleotide
aacaccactagcgagactagtcagacaatg

SEQ ID NO: 295866 - DNA, 30 bp, Artificial Sequence
  Synthetic oligonucleotide
gtaatctatgtatttacgttgctcccaatg

SEQ ID NO: 295867 - DNA, 30 bp, Artificial Sequence
  Synthetic oligonucleotide
tattcctcggaacgccacttcgagccaatg

SEQ ID NO: 295868 - DNA, 30 bp, Artificial Sequence
  Synthetic oligonucleotide
gaatagcgaaggaataatactgggccaatg

SEQ ID NO: 295869 - DNA, 30 bp, Artificial Sequence
  Synthetic oligonucleotide
gccaacaccgtgcaatgctgaatcgcaatg

SEQ ID NO: 295870 - DNA, 30 bp, Artificial Sequence
  Synthetic oligonucleotide
aagtcggtgtgaaatgcgtgtcatgcaatg

SEQ ID NO: 295871 - DNA, 30 bp, Artificial Sequence
  Synthetic oligonucleotide
gggggaaaccgcgcacgcgcatctgcaatg

SEQ ID NO: 295872 - DNA, 30 bp, Artificial Sequence
  Synthetic oligonucleotide
acaaaatcaatcaacatataaggtgcaatg

SEQ ID NO: 295873 - DNA, 30 bp, Artificial Sequence
  Synthetic oligonucleotide
atactaacgtagggggtgattgttgcaatg

SEQ ID NO: 295874 - DNA, 30 bp, Artificial Sequence
  Synthetic oligonucleotide
aatgtgcaggccctcggaagactatcaatg

SEQ ID NO: 295875 - DNA, 30 bp, Artificial Sequence
  Synthetic oligonucleotide
tgggatgagtgagcaggctcgctctcaatg

SEQ ID NO: 295876 - DNA, 30 bp, Artificial Sequence
  Synthetic oligonucleotide
atcgggcaactctgggtgggaacttcaatg

SEQ ID NO: 295877 - DNA, 30 bp, Artificial Sequence
  Synthetic oligonucleotide
gacatggggggcctgcgttatatttcaatg

SEQ ID NO: 295878 - DNA, 30 bp, Artificial Sequence
  Synthetic oligonucleotide
tggcggtcttttccaaggcgtcagagaatg

SEQ ID NO: 295879 - DNA, 30 bp, Artificial Sequence
  Synthetic oligonucleotide
tcggtaagacagggcggtaaatggagaatg

SEQ ID NO: 295880 - DNA, 30 bp, Artificial Sequence
  Synthetic oligonucleotide
gacatagaccatggtagatgtatgagaatg

SEQ ID NO: 295881 - DNA, 30 bp, Artificial Sequence
  Synthetic oligonucleotide
gtacaaatattacggccgacgggtagaatg

SEQ ID NO: 295882 - DNA, 30 bp, Artificial Sequence
  Synthetic oligonucleotide
tggtgcgcataacatattttgtacggaatg

SEQ ID NO: 295883 - DNA, 29 bp, Artificial Sequence
  Synthetic oligonucleotide
gcactgttgatttctacaacaccggaatg

SEQ ID NO: 295884 - DNA, 30 bp, Artificial Sequence
  Synthetic oligonucleotide
gattacagtactatcgttcgagtgggaatg

SEQ ID NO: 295885 - DNA, 30 bp, Artificial Sequence
  Synthetic oligonucleotide
gtgccggggcagtaggagggccctggaatg

SEQ ID NO: 295886 - DNA, 30 bp, Artificial Sequence
  Synthetic oligonucleotide
ttacgcaacgcgtgatgatgctaatgaatg

SEQ ID NO: 295887 - DNA, 30 bp, Artificial Sequence
  Synthetic oligonucleotide
aggcctatcctaatgtaaacgtcatgaatg

SEQ ID NO: 295888 - DNA, 30 bp, Artificial Sequence
  Synthetic oligonucleotide
ttgtacaatcgcgcggggcctgcctgaatg

SEQ ID NO: 295889 - DNA, 30 bp, Artificial Sequence
  Synthetic oligonucleotide
tgactattactggtctttgaggtgtgaatg

SEQ ID NO: 295890 - DNA, 30 bp, Artificial Sequence
  Synthetic oligonucleotide
gatgcaaagataaaggcagcacgttgaatg

SEQ ID NO: 295891 - DNA, 30 bp, Artificial Sequence
  Synthetic oligonucleotide
ttttcagtcggatggggacttgagataatg

SEQ ID NO: 295892 - DNA, 30 bp, Artificial Sequence
  Synthetic oligonucleotide
tacaatagcgcactgcggggatagataatg

SEQ ID NO: 295893 - DNA, 30 bp, Artificial Sequence
  Synthetic oligonucleotide
gggttgggcccagctcgcttctagataatg

SEQ ID NO: 295894 - DNA, 30 bp, Artificial Sequence
  Synthetic oligonucleotide
cagaaggtgatcgcaggatatgttataatg

SEQ ID NO: 295895 - DNA, 30 bp, Artificial Sequence
  Synthetic oligonucleotide
ccgtattgtattacatcatgataactaatg

SEQ ID NO: 295896 - DNA, 30 bp, Artificial Sequence
  Synthetic oligonucleotide
atcaggttattgaaagatcccgtactaatg

SEQ ID NO: 295897 - DNA, 30 bp, Artificial Sequence
  Synthetic oligonucleotide
tgtttgacgtctcaaaaatctaagctaatg

SEQ ID NO: 295898 - DNA, 30 bp, Artificial Sequence
  Synthetic oligonucleotide
ctatttaggtggttcggtagtgagctaatg

SEQ ID NO: 295899 - DNA, 30 bp, Artificial Sequence
  Synthetic oligonucleotide
gggctagatgtaatccgcgccactctaatg

SEQ ID NO: 295900 - DNA, 30 bp, Artificial Sequence
  Synthetic oligonucleotide
tacccatctgtttgagtcggtagtctaatg

SEQ ID NO: 295901 - DNA, 30 bp, Artificial Sequence
  Synthetic oligonucleotide
cacggttcgtctgcaagccgatgtctaatg

SEQ ID NO: 295902 - DNA, 30 bp, Artificial Sequence
  Synthetic oligonucleotide
caacaagcggagcgtctgcggagcgtaatg

SEQ ID NO: 295903 - DNA, 30 bp, Artificial Sequence
  Synthetic oligonucleotide
cagtaggacctatagtaaggtatcgtaatg

SEQ ID NO: 295904 - DNA, 30 bp, Artificial Sequence
  Synthetic oligonucleotide
taaatgtgatttgcttaatttatcgtaatg

SEQ ID NO: 295905 - DNA, 30 bp, Artificial Sequence
  Synthetic oligonucleotide
gttgtcgggtccgtcctaatctctgtaatg

SEQ ID NO: 295906 - DNA, 30 bp, Artificial Sequence
  Synthetic oligonucleotide
tcggctattaatcaagttgctaaattaatg

SEQ ID NO: 295907 - DNA, 30 bp, Artificial Sequence
  Synthetic oligonucleotide
agagtatttaagggagtcgctccattaatg

SEQ ID NO: 295908 - DNA, 30 bp, Artificial Sequence
  Synthetic oligonucleotide
ggtcggttttacggacttcactagttaatg

SEQ ID NO: 295909 - DNA, 30 bp, Artificial Sequence
  Synthetic oligonucleotide
gatcgcaaataacatcaaggattgttaatg

SEQ ID NO: 295910 - DNA, 30 bp, Artificial Sequence
  Synthetic oligonucleotide
aataagggttttactgtaaacaaaaacatg

SEQ ID NO: 295911 - DNA, 30 bp, Artificial Sequence
  Synthetic oligonucleotide
ccatgtctttagtatcggggttaaaacatg

SEQ ID NO: 295912 - DNA, 30 bp, Artificial Sequence
  Synthetic oligonucleotide
agtacgttactcatcatatttagaaacatg

SEQ ID NO: 295913 - DNA, 30 bp, Artificial Sequence
  Synthetic oligonucleotide
tataattcgagcacggtggaaataaacatg

SEQ ID NO: 295914 - DNA, 30 bp, Artificial Sequence
  Synthetic oligonucleotide
agtagccaggaaggagattgtgtcaacatg

SEQ ID NO: 295915 - DNA, 30 bp, Artificial Sequence
  Synthetic oligonucleotide
tctatggacaaactggagcacatgaacatg

SEQ ID NO: 295916 - DNA, 30 bp, Artificial Sequence
  Synthetic oligonucleotide
gtctgcgctcaaagcataataactaacatg

SEQ ID NO: 295917 - DNA, 30 bp, Artificial Sequence
  Synthetic oligonucleotide
tgattacacgtgatagttgttattaacatg

SEQ ID NO: 295918 - DNA, 30 bp, Artificial Sequence
  Synthetic oligonucleotide
gatggaatagagttggtcaggctacacatg

SEQ ID NO: 295919 - DNA, 30 bp, Artificial Sequence
  Synthetic oligonucleotide
tacatgggggattcatcttcaaaccacatg

SEQ ID NO: 295920 - DNA, 30 bp, Artificial Sequence
  Synthetic oligonucleotide
gacttagagcaagctcagtgttcccacatg

SEQ ID NO: 295921 - DNA, 30 bp, Artificial Sequence
  Synthetic oligonucleotide
gcgcaagctccacgagagctggggcacatg

SEQ ID NO: 295922 - DNA, 30 bp, Artificial Sequence
  Synthetic oligonucleotide
gatgcgttcagagttgttgcgtttcacatg

SEQ ID NO: 295923 - DNA, 30 bp, Artificial Sequence
  Synthetic oligonucleotide
cggcagggtacttcaaccggtccagacatg

SEQ ID NO: 295924 - DNA, 30 bp, Artificial Sequence
  Synthetic oligonucleotide
tgctgggctagttcaactcatcccgacatg

SEQ ID NO: 295925 - DNA, 30 bp, Artificial Sequence
  Synthetic oligonucleotide
tgcggacatacgagacgtcataaggacatg

SEQ ID NO: 295926 - DNA, 30 bp, Artificial Sequence
  Synthetic oligonucleotide
ccggggataattagcacaattggggacatg

SEQ ID NO: 295927 - DNA, 30 bp, Artificial Sequence
  Synthetic oligonucleotide
tttccaccgctataaggaagaatggacatg

SEQ ID NO: 295928 - DNA, 30 bp, Artificial Sequence
  Synthetic oligonucleotide
tcgctacccgctttaaaacactctgacatg

SEQ ID NO: 295929 - DNA, 30 bp, Artificial Sequence
  Synthetic oligonucleotide
cctaggacaatcgtctaatagtttgacatg

SEQ ID NO: 295930 - DNA, 30 bp, Artificial Sequence
  Synthetic oligonucleotide
gtgcggcttgattacggagagtaatacatg

SEQ ID NO: 295931 - DNA, 30 bp, Artificial Sequence
  Synthetic oligonucleotide
caaattttcgagcctgtttggacatacatg

SEQ ID NO: 295932 - DNA, 30 bp, Artificial Sequence
  Synthetic oligonucleotide
agctgtcaatgcatgaaattgatatacatg

SEQ ID NO: 295933 - DNA, 29 bp, Artificial Sequence
  Synthetic oligonucleotide
gggatatctaggggagttaactatacatg

SEQ ID NO: 295934 - DNA, 30 bp, Artificial Sequence
  Synthetic oligonucleotide
gtggcgacgcctaaaaaacagttatacatg

SEQ ID NO: 295935 - DNA, 30 bp, Artificial Sequence
  Synthetic oligonucleotide
ttgggcaataatcgttatcctttatacatg

SEQ ID NO: 295936 - DNA, 30 bp, Artificial Sequence
  Synthetic oligonucleotide
gtactcgtttaacacaagactatgtacatg

SEQ ID NO: 295937 - DNA, 30 bp, Artificial Sequence
  Synthetic oligonucleotide
ggacaaagacacgtccacgcgggaaccatg

SEQ ID NO: 295938 - DNA, 30 bp, Artificial Sequence
  Synthetic oligonucleotide
tcacctaagtggggagcgagatctaccatg

SEQ ID NO: 295939 - DNA, 30 bp, Artificial Sequence
  Synthetic oligonucleotide
aattatggggtctattcagaaggtaccatg

SEQ ID NO: 295940 - DNA, 30 bp, Artificial Sequence
  Synthetic oligonucleotide
cctgtcatcagggaaatcctataacccatg

SEQ ID NO: 295941 - DNA, 30 bp, Artificial Sequence
  Synthetic oligonucleotide
tccagagaccgtagcatgcgaccgcccatg

SEQ ID NO: 295942 - DNA, 30 bp, Artificial Sequence
  Synthetic oligonucleotide
ttacattcacggcactatattgggcccatg

SEQ ID NO: 295943 - DNA, 30 bp, Artificial Sequence
  Synthetic oligonucleotide
gagctctatgaatccctataacatcccatg

SEQ ID NO: 295944 - DNA, 30 bp, Artificial Sequence
  Synthetic oligonucleotide
tgtagacaattacgttggaggggtcccatg

SEQ ID NO: 295945 - DNA, 30 bp, Artificial Sequence
  Synthetic oligonucleotide
tcatggctcttcagctggtggcgggccatg

SEQ ID NO: 295946 - DNA, 30 bp, Artificial Sequence
  Synthetic oligonucleotide
cggctaggtaaccgcgaatcatgggccatg

SEQ ID NO: 295947 - DNA, 30 bp, Artificial Sequence
  Synthetic oligonucleotide
ttgtacaaaaccggtgactcgtcatccatg

SEQ ID NO: 295948 - DNA, 30 bp, Artificial Sequence
  Synthetic oligonucleotide
cacagttcaataacctgcgtgcactccatg

SEQ ID NO: 295949 - DNA, 30 bp, Artificial Sequence
  Synthetic oligonucleotide
ccggaatcttaagggactaaagactccatg

SEQ ID NO: 295950 - DNA, 30 bp, Artificial Sequence
  Synthetic oligonucleotide
ggcctgttctggcagtcgggatagtccatg

SEQ ID NO: 295951 - DNA, 30 bp, Artificial Sequence
  Synthetic oligonucleotide
tttagtcggcctgaatcccgtagttccatg

SEQ ID NO: 295952 - DNA, 30 bp, Artificial Sequence
  Synthetic oligonucleotide
cagaaaaggtgctcgacgcgactttccatg

SEQ ID NO: 295953 - DNA, 30 bp, Artificial Sequence
  Synthetic oligonucleotide
cagcgatcgtagtcgtgcaccgaaagcatg

SEQ ID NO: 295954 - DNA, 30 bp, Artificial Sequence
  Synthetic oligonucleotide
ggtactagtaatcagatatgatcaagcatg

SEQ ID NO: 295955 - DNA, 30 bp, Artificial Sequence
  Synthetic oligonucleotide
agtatcagaactaagtgtattttaagcatg

SEQ ID NO: 295956 - DNA, 30 bp, Artificial Sequence
  Synthetic oligonucleotide
aacaggacacagggcacgatgtccagcatg

SEQ ID NO: 295957 - DNA, 30 bp, Artificial Sequence
  Synthetic oligonucleotide
gagtgctcttcatagcgtcaaatcagcatg

SEQ ID NO: 295958 - DNA, 30 bp, Artificial Sequence
  Synthetic oligonucleotide
gacggaactttattgaggcaggatagcatg

SEQ ID NO: 295959 - DNA, 30 bp, Artificial Sequence
  Synthetic oligonucleotide
ttcctaaggcgacaaaacaatacacgcatg

SEQ ID NO: 295960 - DNA, 30 bp, Artificial Sequence
  Synthetic oligonucleotide
tggagtaccgttggatagtagcgccgcatg

SEQ ID NO: 295961 - DNA, 30 bp, Artificial Sequence
  Synthetic oligonucleotide
acaggtctagcagccggaaagtggcgcatg

SEQ ID NO: 295962 - DNA, 30 bp, Artificial Sequence
  Synthetic oligonucleotide
ttcgtgccgccagaatggctaatgcgcatg

SEQ ID NO: 295963 - DNA, 30 bp, Artificial Sequence
  Synthetic oligonucleotide
ctcaacataaatcttgcctataaaggcatg

SEQ ID NO: 295964 - DNA, 30 bp, Artificial Sequence
  Synthetic oligonucleotide
ttgtagacaagggcactgctcttaggcatg

SEQ ID NO: 295965 - DNA, 30 bp, Artificial Sequence
  Synthetic oligonucleotide
tggcccacattgaagaagtccccgggcatg

SEQ ID NO: 295966 - DNA, 30 bp, Artificial Sequence
  Synthetic oligonucleotide
cgtggcgtcgtgttcagcggcatgggcatg

SEQ ID NO: 295967 - DNA, 30 bp, Artificial Sequence
  Synthetic oligonucleotide
gtgattttatcattcatcatcgaatgcatg

SEQ ID NO: 295968 - DNA, 30 bp, Artificial Sequence
  Synthetic oligonucleotide
gaagtatctgttcaggactccctatgcatg

SEQ ID NO: 295969 - DNA, 30 bp, Artificial Sequence
  Synthetic oligonucleotide
gggaatcgatcagcagcctgcaactgcatg

SEQ ID NO: 295970 - DNA, 30 bp, Artificial Sequence
  Synthetic oligonucleotide
ccagggtggttcttcagtccccgttgcatg

SEQ ID NO: 295971 - DNA, 30 bp, Artificial Sequence
  Synthetic oligonucleotide
tgcgatcgagtagtgcttgaacgaatcatg

SEQ ID NO: 295972 - DNA, 30 bp, Artificial Sequence
  Synthetic oligonucleotide
gattaggtttccgggatatcgaccatcatg

SEQ ID NO: 295973 - DNA, 30 bp, Artificial Sequence
  Synthetic oligonucleotide
aaggtctaaactttggcatgggagatcatg

SEQ ID NO: 295974 - DNA, 30 bp, Artificial Sequence
  Synthetic oligonucleotide
ttcccagcggaagtttgatcgtcgatcatg

SEQ ID NO: 295975 - DNA, 30 bp, Artificial Sequence
  Synthetic oligonucleotide
gcgcaattgtcaccctagccctatatcatg

SEQ ID NO: 295976 - DNA, 30 bp, Artificial Sequence
  Synthetic oligonucleotide
ttgtcggccacgtcctacagcagtatcatg

SEQ ID NO: 295977 - DNA, 30 bp, Artificial Sequence
  Synthetic oligonucleotide
cctttagttttaatgcgacccgaactcatg

SEQ ID NO: 295978 - DNA, 30 bp, Artificial Sequence
  Synthetic oligonucleotide
aaagtactcagtagcttcgccctactcatg

SEQ ID NO: 295979 - DNA, 30 bp, Artificial Sequence
  Synthetic oligonucleotide
aatgactgctgcttactagatccgctcatg

SEQ ID NO: 295980 - DNA, 30 bp, Artificial Sequence
  Synthetic oligonucleotide
tatgaaacagctatttgaggtaaagtcatg

SEQ ID NO: 295981 - DNA, 30 bp, Artificial Sequence
  Synthetic oligonucleotide
cgtaccttacaggaactatgcatagtcatg

SEQ ID NO: 295982 - DNA, 30 bp, Artificial Sequence
  Synthetic oligonucleotide
taattgaaaaacgtatagatctgcgtcatg

SEQ ID NO: 295983 - DNA, 30 bp, Artificial Sequence
  Synthetic oligonucleotide
ttgcttcgcggtaaagcgaatggggtcatg

SEQ ID NO: 295984 - DNA, 30 bp, Artificial Sequence
  Synthetic oligonucleotide
aaaactgatctagctcgggggatggtcatg

SEQ ID NO: 295985 - DNA, 30 bp, Artificial Sequence
  Synthetic oligonucleotide
aaaaaaatctgtccgcggggtgttgtcatg

SEQ ID NO: 295986 - DNA, 30 bp, Artificial Sequence
  Synthetic oligonucleotide
gccgctcctacgggacccccccaattcatg

SEQ ID NO: 295987 - DNA, 30 bp, Artificial Sequence
  Synthetic oligonucleotide
ttaccttcaagtaaaggtatctacttcatg

SEQ ID NO: 295988 - DNA, 30 bp, Artificial Sequence
  Synthetic oligonucleotide
aagatcagtatcttttttcaccggttcatg

SEQ ID NO: 295989 - DNA, 30 bp, Artificial Sequence
  Synthetic oligonucleotide
gcgatagctgtctgaaagtctcgtttcatg

SEQ ID NO: 295990 - DNA, 30 bp, Artificial Sequence
  Synthetic oligonucleotide
ttggcctcgaaatagacgacatgtttcatg

SEQ ID NO: 295991 - DNA, 30 bp, Artificial Sequence
  Synthetic oligonucleotide
aacgtctgctgttatcagttccaaaagatg

SEQ ID NO: 295992 - DNA, 30 bp, Artificial Sequence
  Synthetic oligonucleotide
gtaaaagcgcgtaccctatgataaaagatg

SEQ ID NO: 295993 - DNA, 30 bp, Artificial Sequence
  Synthetic oligonucleotide
aatgcagtgtggcatcgtatgtaaaagatg

SEQ ID NO: 295994 - DNA, 30 bp, Artificial Sequence
  Synthetic oligonucleotide
caccgagcgagttcgaagcagtcaaagatg

SEQ ID NO: 295995 - DNA, 30 bp, Artificial Sequence
  Synthetic oligonucleotide
ctctcctagtactgaagttccgtaaagatg

SEQ ID NO: 295996 - DNA, 30 bp, Artificial Sequence
  Synthetic oligonucleotide
ccccagagatttacgatcaaggacaagatg

SEQ ID NO: 295997 - DNA, 30 bp, Artificial Sequence
  Synthetic oligonucleotide
actatctagaaacggaggctttgcaagatg

SEQ ID NO: 295998 - DNA, 30 bp, Artificial Sequence
  Synthetic oligonucleotide
gacagcactcaggctctgcggcggaagatg

SEQ ID NO: 295999 - DNA, 30 bp, Artificial Sequence
  Synthetic oligonucleotide
atttctcgaagttgaatagagatgaagatg

SEQ ID NO: 296000 - DNA, 30 bp, Artificial Sequence
  Synthetic oligonucleotide
gcgagtattgctcagatttcacataagatg

SEQ ID NO: 296001 - DNA, 30 bp, Artificial Sequence
  Synthetic oligonucleotide
accccgcaggcctatgaaactgttaagatg

SEQ ID NO: 296002 - DNA, 30 bp, Artificial Sequence
  Synthetic oligonucleotide
cggaggtttgaccggaaagcttaccagatg

SEQ ID NO: 296003 - DNA, 30 bp, Artificial Sequence
  Synthetic oligonucleotide
gtacgcttcggcgcaggccttgatcagatg

SEQ ID NO: 296004 - DNA, 30 bp, Artificial Sequence
  Synthetic oligonucleotide
cgttcggcctcgggcttaagtcaggagatg

SEQ ID NO: 296005 - DNA, 30 bp, Artificial Sequence
  Synthetic oligonucleotide
tgtccactggatctacgttacgttgagatg

SEQ ID NO: 296006 - DNA, 30 bp, Artificial Sequence
  Synthetic oligonucleotide
acaggagactccgatgttttaagatagatg

SEQ ID NO: 296007 - DNA, 30 bp, Artificial Sequence
  Synthetic oligonucleotide
tgactataaagtggtttcatttgatagatg

SEQ ID NO: 296008 - DNA, 30 bp, Artificial Sequence
  Synthetic oligonucleotide
aagtatgtatacatctcctataagtagatg

SEQ ID NO: 296009 - DNA, 30 bp, Artificial Sequence
  Synthetic oligonucleotide
acggtattggtcacgcggaaccggtagatg

SEQ ID NO: 296010 - DNA, 30 bp, Artificial Sequence
  Synthetic oligonucleotide
tacggggaaaaattatgagtatgttagatg

SEQ ID NO: 296011 - DNA, 30 bp, Artificial Sequence
  Synthetic oligonucleotide
ttgcgtaagatttacggttatgcaacgatg

SEQ ID NO: 296012 - DNA, 30 bp, Artificial Sequence
  Synthetic oligonucleotide
tttagagacgttgaagtgcgactaacgatg

SEQ ID NO: 296013 - DNA, 30 bp, Artificial Sequence
  Synthetic oligonucleotide
atgagcaaccggctccaaacggccacgatg

SEQ ID NO: 296014 - DNA, 30 bp, Artificial Sequence
  Synthetic oligonucleotide
tggtagcggagatgtcggcgattcacgatg

SEQ ID NO: 296015 - DNA, 30 bp, Artificial Sequence
  Synthetic oligonucleotide
tctgacagatgacgatcgttttcgacgatg

SEQ ID NO: 296016 - DNA, 30 bp, Artificial Sequence
  Synthetic oligonucleotide
ggttggtactaaatagttcggtatacgatg

SEQ ID NO: 296017 - DNA, 30 bp, Artificial Sequence
  Synthetic oligonucleotide
gtcgtttaagatgtgggtcaaaaaccgatg

SEQ ID NO: 296018 - DNA, 30 bp, Artificial Sequence
  Synthetic oligonucleotide
tctgtagctctattgtcacaataaccgatg

SEQ ID NO: 296019 - DNA, 30 bp, Artificial Sequence
  Synthetic oligonucleotide
attaaaagtttatctgaaaagggcccgatg

SEQ ID NO: 296020 - DNA, 30 bp, Artificial Sequence
  Synthetic oligonucleotide
tcggacacagcgctggcgaggcagccgatg

SEQ ID NO: 296021 - DNA, 30 bp, Artificial Sequence
  Synthetic oligonucleotide
acaatttcagggcctccacgccctccgatg

SEQ ID NO: 296022 - DNA, 30 bp, Artificial Sequence
  Synthetic oligonucleotide
acaaagtgggacggggtaactgtagcgatg

SEQ ID NO: 296023 - DNA, 30 bp, Artificial Sequence
  Synthetic oligonucleotide
cacatcgttgaatttttgttggccgcgatg

SEQ ID NO: 296024 - DNA, 30 bp, Artificial Sequence
  Synthetic oligonucleotide
gtcccggcctcactctcattgggggcgatg

SEQ ID NO: 296025 - DNA, 30 bp, Artificial Sequence
  Synthetic oligonucleotide
aaaattccgaatttctagtctatggcgatg

SEQ ID NO: 296026 - DNA, 31 bp, Artificial Sequence
  Synthetic oligonucleotide
aactatatctttacaactaaggattgcgatg

SEQ ID NO: 296027 - DNA, 30 bp, Artificial Sequence
  Synthetic oligonucleotide
ttaataagttagggtgccgcttaatcgatg

SEQ ID NO: 296028 - DNA, 30 bp, Artificial Sequence
  Synthetic oligonucleotide
agagatactggacggttttgcagctcgatg

SEQ ID NO: 296029 - DNA, 30 bp, Artificial Sequence
  Synthetic oligonucleotide
atcgttgttagtgacaatctatgctcgatg

SEQ ID NO: 296030 - DNA, 30 bp, Artificial Sequence
  Synthetic oligonucleotide
gcgatcggtattaagtttaagccgtcgatg

SEQ ID NO: 296031 - DNA, 30 bp, Artificial Sequence
  Synthetic oligonucleotide
gatcctgctgaatgacgattaaggtcgatg

SEQ ID NO: 296032 - DNA, 30 bp, Artificial Sequence
  Synthetic oligonucleotide
tccgtgagttcccggttggaggtgtcgatg

SEQ ID NO: 296033 - DNA, 30 bp, Artificial Sequence
  Synthetic oligonucleotide
atggctacctgatggcctttggaaaggatg

SEQ ID NO: 296034 - DNA, 30 bp, Artificial Sequence
  Synthetic oligonucleotide
cctccattgggtatctgctgtccaaggatg

SEQ ID NO: 296035 - DNA, 30 bp, Artificial Sequence
  Synthetic oligonucleotide
attggtaagtcgtgctggcgagtcaggatg

SEQ ID NO: 296036 - DNA, 30 bp, Artificial Sequence
  Synthetic oligonucleotide
tccttaagatcatcccgtgatactaggatg

SEQ ID NO: 296037 - DNA, 30 bp, Artificial Sequence
  Synthetic oligonucleotide
taagaactgacggtgcccatgtttaggatg

SEQ ID NO: 296038 - DNA, 30 bp, Artificial Sequence
  Synthetic oligonucleotide
aagtgtggcgatttagctcgcaagcggatg

SEQ ID NO: 296039 - DNA, 30 bp, Artificial Sequence
  Synthetic oligonucleotide
ggctgggcacgtgcatcatactcgcggatg

SEQ ID NO: 296040 - DNA, 30 bp, Artificial Sequence
  Synthetic oligonucleotide
aactgaccgtgcagccgcataactcggatg

SEQ ID NO: 296041 - DNA, 30 bp, Artificial Sequence
  Synthetic oligonucleotide
ttcctgtcgtttctggtgtcaggtcggatg

SEQ ID NO: 296042 - DNA, 30 bp, Artificial Sequence
  Synthetic oligonucleotide
taaacatgtataaggacctcccaagggatg

SEQ ID NO: 296043 - DNA, 30 bp, Artificial Sequence
  Synthetic oligonucleotide
ctctggaacttcggccttcagggagggatg

SEQ ID NO: 296044 - DNA, 30 bp, Artificial Sequence
  Synthetic oligonucleotide
gctatgtggtgtcatgagctatacgggatg

SEQ ID NO: 296045 - DNA, 30 bp, Artificial Sequence
  Synthetic oligonucleotide
aaagcaaaaccgtgaggtttgagcgggatg

SEQ ID NO: 296046 - DNA, 30 bp, Artificial Sequence
  Synthetic oligonucleotide
ctggcaaagggcattagcggtagggggatg

SEQ ID NO: 296047 - DNA, 30 bp, Artificial Sequence
  Synthetic oligonucleotide
acgttgcatagacgtacgtacggggggatg

SEQ ID NO: 296048 - DNA, 30 bp, Artificial Sequence
  Synthetic oligonucleotide
aaaaaaaaagcaaccctcttctatgggatg

SEQ ID NO: 296049 - DNA, 30 bp, Artificial Sequence
  Synthetic oligonucleotide
gagtagaagatgcccctgcctaaatggatg

SEQ ID NO: 296050 - DNA, 30 bp, Artificial Sequence
  Synthetic oligonucleotide
ggacgccttgaaaatacgaagcactggatg

SEQ ID NO: 296051 - DNA, 30 bp, Artificial Sequence
  Synthetic oligonucleotide
gcaactgggccctgtgctaccgcttggatg

SEQ ID NO: 296052 - DNA, 31 bp, Artificial Sequence
  Synthetic oligonucleotide
ttctgcattaagaccagtaaataaaatgatg

SEQ ID NO: 296053 - DNA, 30 bp, Artificial Sequence
  Synthetic oligonucleotide
atctgacgggtttggcataatagcatgatg

SEQ ID NO: 296054 - DNA, 30 bp, Artificial Sequence
  Synthetic oligonucleotide
gcgggcatttctaatgggccgatcatgatg

SEQ ID NO: 296055 - DNA, 30 bp, Artificial Sequence
  Synthetic oligonucleotide
ttcgacacccaacggctcttgggtatgatg

SEQ ID NO: 296056 - DNA, 30 bp, Artificial Sequence
  Synthetic oligonucleotide
tacatggatatcacattggggattatgatg

SEQ ID NO: 296057 - DNA, 30 bp, Artificial Sequence
  Synthetic oligonucleotide
agaagttcggatatggatgaatttatgatg

SEQ ID NO: 296058 - DNA, 30 bp, Artificial Sequence
  Synthetic oligonucleotide
aatagttgtagatgtatatttagactgatg

SEQ ID NO: 296059 - DNA, 30 bp, Artificial Sequence
  Synthetic oligonucleotide
gcccgtaaatatttacgaacacgactgatg

SEQ ID NO: 296060 - DNA, 30 bp, Artificial Sequence
  Synthetic oligonucleotide
atcagacaatcttcatgcgaactgctgatg

SEQ ID NO: 296061 - DNA, 30 bp, Artificial Sequence
  Synthetic oligonucleotide
atcttcgaggccgttttagctctagtgatg

SEQ ID NO: 296062 - DNA, 30 bp, Artificial Sequence
  Synthetic oligonucleotide
gtttacacaaagggtgccaccgttgtgatg

SEQ ID NO: 296063 - DNA, 30 bp, Artificial Sequence
  Synthetic oligonucleotide
ttttcgctccatctagagcttgaattgatg

SEQ ID NO: 296064 - DNA, 30 bp, Artificial Sequence
  Synthetic oligonucleotide
ttactgtcggaatatccttcatcattgatg

SEQ ID NO: 296065 - DNA, 30 bp, Artificial Sequence
  Synthetic oligonucleotide
caatcaaacgttagagctatgtgattgatg

SEQ ID NO: 296066 - DNA, 30 bp, Artificial Sequence
  Synthetic oligonucleotide
gatgccctaaggaatcatatggtattgatg

SEQ ID NO: 296067 - DNA, 30 bp, Artificial Sequence
  Synthetic oligonucleotide
tacctctcaaagacagattgtcccttgatg

SEQ ID NO: 296068 - DNA, 30 bp, Artificial Sequence
  Synthetic oligonucleotide
gggtatcatttttgtgagatgtgcttgatg

SEQ ID NO: 296069 - DNA, 30 bp, Artificial Sequence
  Synthetic oligonucleotide
cccgtaaaaagttagcgatagaggttgatg

SEQ ID NO: 296070 - DNA, 30 bp, Artificial Sequence
  Synthetic oligonucleotide
cggtgtatttgtttagggaaaattttgatg

SEQ ID NO: 296071 - DNA, 30 bp, Artificial Sequence
  Synthetic oligonucleotide
gattgctggctgcatgtgatcaacaatatg

SEQ ID NO: 296072 - DNA, 30 bp, Artificial Sequence
  Synthetic oligonucleotide
ctatgtccgtgttggtcaacgccgaatatg

SEQ ID NO: 296073 - DNA, 30 bp, Artificial Sequence
  Synthetic oligonucleotide
aatatccggcgatctcatggaaggaatatg

SEQ ID NO: 296074 - DNA, 30 bp, Artificial Sequence
  Synthetic oligonucleotide
catttgcgtgtatacggggattggaatatg

SEQ ID NO: 296075 - DNA, 30 bp, Artificial Sequence
  Synthetic oligonucleotide
ccaaggccgaagacatagaggaaacatatg

SEQ ID NO: 296076 - DNA, 30 bp, Artificial Sequence
  Synthetic oligonucleotide
tatgctaccaaaggggtctgaccccatatg

SEQ ID NO: 296077 - DNA, 30 bp, Artificial Sequence
  Synthetic oligonucleotide
gatccagaaacaatttggatagtccatatg

SEQ ID NO: 296078 - DNA, 30 bp, Artificial Sequence
  Synthetic oligonucleotide
gcgtttaaaacgaatctgcactagcatatg

SEQ ID NO: 296079 - DNA, 30 bp, Artificial Sequence
  Synthetic oligonucleotide
cgtcttagtgcagaatcttggtcgcatatg

SEQ ID NO: 296080 - DNA, 30 bp, Artificial Sequence
  Synthetic oligonucleotide
tataacgccaagtatagcgcttggcatatg

SEQ ID NO: 296081 - DNA, 30 bp, Artificial Sequence
  Synthetic oligonucleotide
tgattgattaatcatcttgtactgcatatg

SEQ ID NO: 296082 - DNA, 30 bp, Artificial Sequence
  Synthetic oligonucleotide
actacttcgcctactacaggacatcatatg

SEQ ID NO: 296083 - DNA, 30 bp, Artificial Sequence
  Synthetic oligonucleotide
gtgcaaacgcacacgctcaggctagatatg

SEQ ID NO: 296084 - DNA, 30 bp, Artificial Sequence
  Synthetic oligonucleotide
tgtttcgctttcaactgtactctagatatg

SEQ ID NO: 296085 - DNA, 30 bp, Artificial Sequence
  Synthetic oligonucleotide
tacaaggcgactgcacggatgagcgatatg

SEQ ID NO: 296086 - DNA, 30 bp, Artificial Sequence
  Synthetic oligonucleotide
ctgctaagaagggcttaaggggtcgatatg

SEQ ID NO: 296087 - DNA, 30 bp, Artificial Sequence
  Synthetic oligonucleotide
aagtttagagcaggcttgtgatcggatatg

SEQ ID NO: 296088 - DNA, 30 bp, Artificial Sequence
  Synthetic oligonucleotide
ccggaaacttccccgggggacagggatatg

SEQ ID NO: 296089 - DNA, 30 bp, Artificial Sequence
  Synthetic oligonucleotide
cctattacattatatagctctatggatatg

SEQ ID NO: 296090 - DNA, 30 bp, Artificial Sequence
  Synthetic oligonucleotide
actcggcagcacaaaagtactactgatatg

SEQ ID NO: 296091 - DNA, 31 bp, Artificial Sequence
  Synthetic oligonucleotide
ggtctggtatacagcaagaagcattgatatg

SEQ ID NO: 296092 - DNA, 30 bp, Artificial Sequence
  Synthetic oligonucleotide
ggagttgattaaattgcatagaaatatatg

SEQ ID NO: 296093 - DNA, 30 bp, Artificial Sequence
  Synthetic oligonucleotide
ctgtgcatccagatcagtcgcgcatatatg

SEQ ID NO: 296094 - DNA, 30 bp, Artificial Sequence
  Synthetic oligonucleotide
acacccttggagccacgccctggatatatg

SEQ ID NO: 296095 - DNA, 30 bp, Artificial Sequence
  Synthetic oligonucleotide
aaggacctgtaacttaaatcatcctatatg

SEQ ID NO: 296096 - DNA, 30 bp, Artificial Sequence
  Synthetic oligonucleotide
ggccaaagcggcagtccacatggctatatg

SEQ ID NO: 296097 - DNA, 30 bp, Artificial Sequence
  Synthetic oligonucleotide
cgttaggggataatgtacaagatctatatg

SEQ ID NO: 296098 - DNA, 30 bp, Artificial Sequence
  Synthetic oligonucleotide
ttacactgtcagactcgggggtcttatatg

SEQ ID NO: 296099 - DNA, 30 bp, Artificial Sequence
  Synthetic oligonucleotide
cagaaatatgactatcaaaacagttatatg

SEQ ID NO: 296100 - DNA, 30 bp, Artificial Sequence
  Synthetic oligonucleotide
ctcggggccttagtaggcgatattactatg

SEQ ID NO: 296101 - DNA, 30 bp, Artificial Sequence
  Synthetic oligonucleotide
gggaccgtttttcgaatctgctaacctatg

SEQ ID NO: 296102 - DNA, 30 bp, Artificial Sequence
  Synthetic oligonucleotide
gagatcgggtaacttcgcgtatcccctatg

SEQ ID NO: 296103 - DNA, 30 bp, Artificial Sequence
  Synthetic oligonucleotide
atcgcaacaccacccccaaaattccctatg

SEQ ID NO: 296104 - DNA, 30 bp, Artificial Sequence
  Synthetic oligonucleotide
tgatgaattatatgatgcaaacctcctatg

SEQ ID NO: 296105 - DNA, 30 bp, Artificial Sequence
  Synthetic oligonucleotide
acgtgagaaggccggatcaccgctcctatg

SEQ ID NO: 296106 - DNA, 30 bp, Artificial Sequence
  Synthetic oligonucleotide
cagtacctcagccgtagaaccgttcctatg

SEQ ID NO: 296107 - DNA, 30 bp, Artificial Sequence
  Synthetic oligonucleotide
aaggagttacagatgaaccatgttcctatg

SEQ ID NO: 296108 - DNA, 30 bp, Artificial Sequence
  Synthetic oligonucleotide
caagacgttccggaatatcaataagctatg

SEQ ID NO: 296109 - DNA, 30 bp, Artificial Sequence
  Synthetic oligonucleotide
cgaagtggcggatagcagtgttcagctatg

SEQ ID NO: 296110 - DNA, 30 bp, Artificial Sequence
  Synthetic oligonucleotide
cctatttgtatctccaatcatgtggctatg

SEQ ID NO: 296111 - DNA, 30 bp, Artificial Sequence
  Synthetic oligonucleotide
cgaatgctagttcctcaaacggcatctatg

SEQ ID NO: 296112 - DNA, 30 bp, Artificial Sequence
  Synthetic oligonucleotide
tgtccggtatagcttgtgctctgatctatg

SEQ ID NO: 296113 - DNA, 30 bp, Artificial Sequence
  Synthetic oligonucleotide
aagcagagttaccttcgtgttatctctatg

SEQ ID NO: 296114 - DNA, 30 bp, Artificial Sequence
  Synthetic oligonucleotide
gaagaccgtctagcttagtgaaggtctatg

SEQ ID NO: 296115 - DNA, 30 bp, Artificial Sequence
  Synthetic oligonucleotide
ggaggcgtccgtacagtaatgtcttctatg

SEQ ID NO: 296116 - DNA, 30 bp, Artificial Sequence
  Synthetic oligonucleotide
gaaatagtgaaccccgcacatacaagtatg

SEQ ID NO: 296117 - DNA, 30 bp, Artificial Sequence
  Synthetic oligonucleotide
ccagtcgttacgccgcaaaagtagagtatg

SEQ ID NO: 296118 - DNA, 30 bp, Artificial Sequence
  Synthetic oligonucleotide
taacatggcactaatgcgcatgtgagtatg

SEQ ID NO: 296119 - DNA, 30 bp, Artificial Sequence
  Synthetic oligonucleotide
gatgggttaaatatccggatcatacgtatg

SEQ ID NO: 296120 - DNA, 30 bp, Artificial Sequence
  Synthetic oligonucleotide
ttcaacacgggttactgcgtcaaccgtatg

SEQ ID NO: 296121 - DNA, 30 bp, Artificial Sequence
  Synthetic oligonucleotide
aggtacaattggaaatcggctgggcgtatg

SEQ ID NO: 296122 - DNA, 30 bp, Artificial Sequence
  Synthetic oligonucleotide
tcgtgtggttattcagagagtcaaggtatg

SEQ ID NO: 296123 - DNA, 30 bp, Artificial Sequence
  Synthetic oligonucleotide
ttaagcaggtggtttcaccgtgaaggtatg

SEQ ID NO: 296124 - DNA, 30 bp, Artificial Sequence
  Synthetic oligonucleotide
tatgcccaagtacgtggttcggacggtatg

SEQ ID NO: 296125 - DNA, 30 bp, Artificial Sequence
  Synthetic oligonucleotide
tgctgtagtgtgcggggttacccgggtatg

SEQ ID NO: 296126 - DNA, 30 bp, Artificial Sequence
  Synthetic oligonucleotide
cgacgctatagcaatatggttcggggtatg

SEQ ID NO: 296127 - DNA, 30 bp, Artificial Sequence
  Synthetic oligonucleotide
ggtcgcgaccgttgtctttcatatggtatg

SEQ ID NO: 296128 - DNA, 30 bp, Artificial Sequence
  Synthetic oligonucleotide
gcgcgggcgttgctttgtctcattggtatg

SEQ ID NO: 296129 - DNA, 30 bp, Artificial Sequence
  Synthetic oligonucleotide
tgagtcgatcgggcattcaaataatgtatg

SEQ ID NO: 296130 - DNA, 30 bp, Artificial Sequence
  Synthetic oligonucleotide
cgttgacgtgactgccaagctggatgtatg

SEQ ID NO: 296131 - DNA, 30 bp, Artificial Sequence
  Synthetic oligonucleotide
ccagcctcgcacttaccggcatcctgtatg

SEQ ID NO: 296132 - DNA, 30 bp, Artificial Sequence
  Synthetic oligonucleotide
cgccagatgttcgttaaacttttgtgtatg

SEQ ID NO: 296133 - DNA, 30 bp, Artificial Sequence
  Synthetic oligonucleotide
gcaagtgtttacgaccgtgcttattgtatg

SEQ ID NO: 296134 - DNA, 30 bp, Artificial Sequence
  Synthetic oligonucleotide
ttaaggggacgtcactacgctctcattatg

SEQ ID NO: 296135 - DNA, 30 bp, Artificial Sequence
  Synthetic oligonucleotide
agtcattatagctacaacagcgcgattatg

SEQ ID NO: 296136 - DNA, 30 bp, Artificial Sequence
  Synthetic oligonucleotide
ccgtaatactagtatcgttctactattatg

SEQ ID NO: 296137 - DNA, 30 bp, Artificial Sequence
  Synthetic oligonucleotide
gtaaccgatggtctgtttacaattattatg

SEQ ID NO: 296138 - DNA, 30 bp, Artificial Sequence
  Synthetic oligonucleotide
gtgattgccagaccctcatatgtgcttatg

SEQ ID NO: 296139 - DNA, 30 bp, Artificial Sequence
  Synthetic oligonucleotide
atatcatctttccgtgcgccggatcttatg

SEQ ID NO: 296140 - DNA, 30 bp, Artificial Sequence
  Synthetic oligonucleotide
tggacgtccacgcatatcgtcactcttatg

SEQ ID NO: 296141 - DNA, 30 bp, Artificial Sequence
  Synthetic oligonucleotide
gccttatggaaatcctcgaggcgtcttatg

SEQ ID NO: 296142 - DNA, 30 bp, Artificial Sequence
  Synthetic oligonucleotide
ttattgatcggcgagtggctgtaagttatg

SEQ ID NO: 296143 - DNA, 30 bp, Artificial Sequence
  Synthetic oligonucleotide
ccaacacaaatctggagtgccactgttatg

SEQ ID NO: 296144 - DNA, 30 bp, Artificial Sequence
  Synthetic oligonucleotide
agcagtatagaatcattagtgagtgttatg

SEQ ID NO: 296145 - DNA, 30 bp, Artificial Sequence
  Synthetic oligonucleotide
catttgggtccaggattataagttgttatg

SEQ ID NO: 296146 - DNA, 30 bp, Artificial Sequence
  Synthetic oligonucleotide
ccatagcaacgtgcagtggcggttgttatg

SEQ ID NO: 296147 - DNA, 30 bp, Artificial Sequence
  Synthetic oligonucleotide
acaggtgtacaattgttcattgcatttatg

SEQ ID NO: 296148 - DNA, 30 bp, Artificial Sequence
  Synthetic oligonucleotide
gtgcccagtgcatagggctccctatttatg

SEQ ID NO: 296149 - DNA, 30 bp, Artificial Sequence
  Synthetic oligonucleotide
agtggatactagcaaagccgttactttatg

SEQ ID NO: 296150 - DNA, 30 bp, Artificial Sequence
  Synthetic oligonucleotide
gtgaaatcaattaacacaagaccctttatg

SEQ ID NO: 296151 - DNA, 30 bp, Artificial Sequence
  Synthetic oligonucleotide
gctaacaacagctaaaagtattgctttatg

SEQ ID NO: 296152 - DNA, 30 bp, Artificial Sequence
  Synthetic oligonucleotide
tgaggtagcagtttcgtgaggacgtttatg

SEQ ID NO: 296153 - DNA, 29 bp, Artificial Sequence
  Synthetic oligonucleotide
ccgacaaaattaagcttatcgcttttatg

SEQ ID NO: 296154 - DNA, 30 bp, Artificial Sequence
  Synthetic oligonucleotide
ttgactccgaggaggatgaaacgttttatg

SEQ ID NO: 296155 - DNA, 30 bp, Artificial Sequence
  Synthetic oligonucleotide
agtaatacaagtaagaacacttgaaaactg

SEQ ID NO: 296156 - DNA, 30 bp, Artificial Sequence
  Synthetic oligonucleotide
ggaatgtggagctctcagtcagacaaactg

SEQ ID NO: 296157 - DNA, 30 bp, Artificial Sequence
  Synthetic oligonucleotide
agctgtcgcgaaatggccggagccaaactg

SEQ ID NO: 296158 - DNA, 30 bp, Artificial Sequence
  Synthetic oligonucleotide
gtagtccgcgcaataacatctgccaaactg

SEQ ID NO: 296159 - DNA, 30 bp, Artificial Sequence
  Synthetic oligonucleotide
tcctagtcgtttgattgctggagcaaactg

SEQ ID NO: 296160 - DNA, 30 bp, Artificial Sequence
  Synthetic oligonucleotide
atcatttcgtcaggttttagttcgaaactg

SEQ ID NO: 296161 - DNA, 30 bp, Artificial Sequence
  Synthetic oligonucleotide
ttgctcagtgtcattgcgtggacacaactg

SEQ ID NO: 296162 - DNA, 30 bp, Artificial Sequence
  Synthetic oligonucleotide
ggtgttactgtggatctaggcatacaactg

SEQ ID NO: 296163 - DNA, 30 bp, Artificial Sequence
  Synthetic oligonucleotide
attatggcttagacacacagcacccaactg

SEQ ID NO: 296164 - DNA, 30 bp, Artificial Sequence
  Synthetic oligonucleotide
gcctctacatttttgtttaacggccaactg

SEQ ID NO: 296165 - DNA, 30 bp, Artificial Sequence
  Synthetic oligonucleotide
gggggtagcggggtcgcttccctccaactg

SEQ ID NO: 296166 - DNA, 30 bp, Artificial Sequence
  Synthetic oligonucleotide
ggccaccggcgatttaataaccggcaactg

SEQ ID NO: 296167 - DNA, 30 bp, Artificial Sequence
  Synthetic oligonucleotide
cccacaggtcgctactattgagatcaactg

SEQ ID NO: 296168 - DNA, 30 bp, Artificial Sequence
  Synthetic oligonucleotide
cattatgtaccaacgaaacaaggtcaactg

SEQ ID NO: 296169 - DNA, 30 bp, Artificial Sequence
  Synthetic oligonucleotide
ttacccggaggctagcgtgttaaagaactg

SEQ ID NO: 296170 - DNA, 30 bp, Artificial Sequence
  Synthetic oligonucleotide
aagacggggtcgagtccaaaactcgaactg

SEQ ID NO: 296171 - DNA, 30 bp, Artificial Sequence
  Synthetic oligonucleotide
ggcctacagggctgatggctcgatgaactg

SEQ ID NO: 296172 - DNA, 30 bp, Artificial Sequence
  Synthetic oligonucleotide
tacgacctgttagacgattgagttgaactg

SEQ ID NO: 296173 - DNA, 30 bp, Artificial Sequence
  Synthetic oligonucleotide
tctgattatattatagtatgtgcataactg

SEQ ID NO: 296174 - DNA, 30 bp, Artificial Sequence
  Synthetic oligonucleotide
ggactgaaagcattattgataggataactg

SEQ ID NO: 296175 - DNA, 30 bp, Artificial Sequence
  Synthetic oligonucleotide
agttatggttaagggtagctgaggtaactg

SEQ ID NO: 296176 - DNA, 30 bp, Artificial Sequence
  Synthetic oligonucleotide
gcgacacttatttttggtatcaattaactg

SEQ ID NO: 296177 - DNA, 30 bp, Artificial Sequence
  Synthetic oligonucleotide
tacagacaatgagtagaggcgcaaacactg

SEQ ID NO: 296178 - DNA, 30 bp, Artificial Sequence
  Synthetic oligonucleotide
cctagccatccacctaacacctcaacactg

SEQ ID NO: 296179 - DNA, 30 bp, Artificial Sequence
  Synthetic oligonucleotide
atcctagaagggaaaccctgaggaacactg

SEQ ID NO: 296180 - DNA, 30 bp, Artificial Sequence
  Synthetic oligonucleotide
gtactattttcaaatatcgggtgaacactg

SEQ ID NO: 296181 - DNA, 30 bp, Artificial Sequence
  Synthetic oligonucleotide
aatcagactacttgcatacagttaacactg

SEQ ID NO: 296182 - DNA, 30 bp, Artificial Sequence
  Synthetic oligonucleotide
catacttaagacgaacccattcatacactg

SEQ ID NO: 296183 - DNA, 30 bp, Artificial Sequence
  Synthetic oligonucleotide
tttaaccatcccatgacactccgtacactg

SEQ ID NO: 296184 - DNA, 30 bp, Artificial Sequence
  Synthetic oligonucleotide
cgcagccttaaccggaaaacataaccactg

SEQ ID NO: 296185 - DNA, 30 bp, Artificial Sequence
  Synthetic oligonucleotide
attactccatgcgagatgaagctcccactg

SEQ ID NO: 296186 - DNA, 30 bp, Artificial Sequence
  Synthetic oligonucleotide
gcaaaaagaattaataattatgtcccactg

SEQ ID NO: 296187 - DNA, 30 bp, Artificial Sequence
  Synthetic oligonucleotide
ggtggtgataggctttggagtcatccactg

SEQ ID NO: 296188 - DNA, 30 bp, Artificial Sequence
  Synthetic oligonucleotide
atacataggcttctagtcggtagtccactg

SEQ ID NO: 296189 - DNA, 30 bp, Artificial Sequence
  Synthetic oligonucleotide
actgcatgtgacacaccattagttccactg

SEQ ID NO: 296190 - DNA, 30 bp, Artificial Sequence
  Synthetic oligonucleotide
gggactactctcacacgatcagaagcactg

SEQ ID NO: 296191 - DNA, 30 bp, Artificial Sequence
  Synthetic oligonucleotide
acgtctctgtagtccagttcccacgcactg

SEQ ID NO: 296192 - DNA, 30 bp, Artificial Sequence
  Synthetic oligonucleotide
ccagagtgggtctacataagttccgcactg

SEQ ID NO: 296193 - DNA, 30 bp, Artificial Sequence
  Synthetic oligonucleotide
ggtcgaaaatcggtatcatctcgcgcactg

SEQ ID NO: 296194 - DNA, 30 bp, Artificial Sequence
  Synthetic oligonucleotide
tatacgtagtagcgcttatctatcgcactg

SEQ ID NO: 296195 - DNA, 30 bp, Artificial Sequence
  Synthetic oligonucleotide
ttcaaatacactgtgatgatactggcactg

SEQ ID NO: 296196 - DNA, 30 bp, Artificial Sequence
  Synthetic oligonucleotide
ttatcagtgccggactgatccgaatcactg

SEQ ID NO: 296197 - DNA, 30 bp, Artificial Sequence
  Synthetic oligonucleotide
gatattcattaatgtttcagagagtcactg

SEQ ID NO: 296198 - DNA, 30 bp, Artificial Sequence
  Synthetic oligonucleotide
accaataatgtgtcagagattgcgtcactg

SEQ ID NO: 296199 - DNA, 30 bp, Artificial Sequence
  Synthetic oligonucleotide
attgatcggtccctggaggcgttgtcactg

SEQ ID NO: 296200 - DNA, 30 bp, Artificial Sequence
  Synthetic oligonucleotide
attaatactaccgttgggttgtcaagactg

SEQ ID NO: 296201 - DNA, 30 bp, Artificial Sequence
  Synthetic oligonucleotide
ttagcgggtattaataaatatgtaagactg

SEQ ID NO: 296202 - DNA, 30 bp, Artificial Sequence
  Synthetic oligonucleotide
cacccgaggtaaggacgtcatgagagactg

SEQ ID NO: 296203 - DNA, 30 bp, Artificial Sequence
  Synthetic oligonucleotide
ggaagttgagacactcacatcacgagactg

SEQ ID NO: 296204 - DNA, 30 bp, Artificial Sequence
  Synthetic oligonucleotide
cgtctatggaattattatcagattagactg

SEQ ID NO: 296205 - DNA, 30 bp, Artificial Sequence
  Synthetic oligonucleotide
ttatcgagaataagctcggtttcacgactg

SEQ ID NO: 296206 - DNA, 30 bp, Artificial Sequence
  Synthetic oligonucleotide
cgacggtgtgttcgatgcaacgaccgactg

SEQ ID NO: 296207 - DNA, 30 bp, Artificial Sequence
  Synthetic oligonucleotide
tgtgggaactcggcacaaggagaaggactg

SEQ ID NO: 296208 - DNA, 30 bp, Artificial Sequence
  Synthetic oligonucleotide
ccgtctgttttttttagtttctcaggactg

SEQ ID NO: 296209 - DNA, 30 bp, Artificial Sequence
  Synthetic oligonucleotide
gccggataccctctgaaatattccggactg

SEQ ID NO: 296210 - DNA, 30 bp, Artificial Sequence
  Synthetic oligonucleotide
tggtgtgtcataacatgtggtatgggactg

SEQ ID NO: 296211 - DNA, 30 bp, Artificial Sequence
  Synthetic oligonucleotide
attacccggtctaaaggccttgctggactg

SEQ ID NO: 296212 - DNA, 29 bp, Artificial Sequence
  Synthetic oligonucleotide
attgaattagtcgctaggttgttggactg

SEQ ID NO: 296213 - DNA, 30 bp, Artificial Sequence
  Synthetic oligonucleotide
acttccgggtaggcctaacacaaatgactg

SEQ ID NO: 296214 - DNA, 30 bp, Artificial Sequence
  Synthetic oligonucleotide
gtgggtctcaataaagtacctgaatgactg

SEQ ID NO: 296215 - DNA, 30 bp, Artificial Sequence
  Synthetic oligonucleotide
taacagtctcactccctagccgcatgactg

SEQ ID NO: 296216 - DNA, 30 bp, Artificial Sequence
  Synthetic oligonucleotide
gtgctctaacggcgcggtcaaaactgactg

SEQ ID NO: 296217 - DNA, 29 bp, Artificial Sequence
  Synthetic oligonucleotide
atccgcatgccccagggtgtaattgactg

SEQ ID NO: 296218 - DNA, 30 bp, Artificial Sequence
  Synthetic oligonucleotide
ttgatgtggtcccggctgacgagttgactg

SEQ ID NO: 296219 - DNA, 30 bp, Artificial Sequence
  Synthetic oligonucleotide
gtcatcaagtcaacatcgagccgttgactg

SEQ ID NO: 296220 - DNA, 30 bp, Artificial Sequence
  Synthetic oligonucleotide
atatgggttgcccctgaaatcaaaatactg

SEQ ID NO: 296221 - DNA, 30 bp, Artificial Sequence
  Synthetic oligonucleotide
gacgaactttaggattcgactgggatactg

SEQ ID NO: 296222 - DNA, 30 bp, Artificial Sequence
  Synthetic oligonucleotide
ctatctgcaataattggggaggctatactg

SEQ ID NO: 296223 - DNA, 30 bp, Artificial Sequence
  Synthetic oligonucleotide
agttatattaatatcttggttcatctactg

SEQ ID NO: 296224 - DNA, 30 bp, Artificial Sequence
  Synthetic oligonucleotide
cacttgatatcaaacggaattggagtactg

SEQ ID NO: 296225 - DNA, 30 bp, Artificial Sequence
  Synthetic oligonucleotide
gcaactaatctcgtatacgtcgacgtactg

SEQ ID NO: 296226 - DNA, 30 bp, Artificial Sequence
  Synthetic oligonucleotide
ttttgaggcctgactagcccaaaggtactg

SEQ ID NO: 296227 - DNA, 30 bp, Artificial Sequence
  Synthetic oligonucleotide
gaccagaagttcaggcccgatccggtactg

SEQ ID NO: 296228 - DNA, 30 bp, Artificial Sequence
  Synthetic oligonucleotide
agggattgttttagcggtgcgcatgtactg

SEQ ID NO: 296229 - DNA, 30 bp, Artificial Sequence
  Synthetic oligonucleotide
tataattgtatcaaattcattaaattactg

SEQ ID NO: 296230 - DNA, 30 bp, Artificial Sequence
  Synthetic oligonucleotide
atatgctggaatcgtggtggtccattactg

SEQ ID NO: 296231 - DNA, 30 bp, Artificial Sequence
  Synthetic oligonucleotide
gaacaaccaccggctcgtaggggattactg

SEQ ID NO: 296232 - DNA, 30 bp, Artificial Sequence
  Synthetic oligonucleotide
gtggggggagatttaaaatttcccttactg

SEQ ID NO: 296233 - DNA, 30 bp, Artificial Sequence
  Synthetic oligonucleotide
atcatccgcagatgatggcaagatttactg

SEQ ID NO: 296234 - DNA, 30 bp, Artificial Sequence
  Synthetic oligonucleotide
tttatcgtgattttggttgatattttactg

SEQ ID NO: 296235 - DNA, 30 bp, Artificial Sequence
  Synthetic oligonucleotide
tagggttggcagtaaaacgctgttttactg

SEQ ID NO: 296236 - DNA, 30 bp, Artificial Sequence
  Synthetic oligonucleotide
agtagaggaaggtcagatcgtttaaacctg

SEQ ID NO: 296237 - DNA, 30 bp, Artificial Sequence
  Synthetic oligonucleotide
cggcttcgtataccgggtgtgatcaacctg

SEQ ID NO: 296238 - DNA, 30 bp, Artificial Sequence
  Synthetic oligonucleotide
cagagggcacccagcagccttgcgaacctg

SEQ ID NO: 296239 - DNA, 30 bp, Artificial Sequence
  Synthetic oligonucleotide
atagtaaatccatttaatcacgggaacctg

SEQ ID NO: 296240 - DNA, 30 bp, Artificial Sequence
  Synthetic oligonucleotide
ttagggtgtagatcataacaggggaacctg

SEQ ID NO: 296241 - DNA, 30 bp, Artificial Sequence
  Synthetic oligonucleotide
gaggccctttttcgtagaacctggaacctg

SEQ ID NO: 296242 - DNA, 30 bp, Artificial Sequence
  Synthetic oligonucleotide
cacttgggtctcgtggtctggggacacctg

SEQ ID NO: 296243 - DNA, 30 bp, Artificial Sequence
  Synthetic oligonucleotide
gtacatccagtctcgtcaacataccacctg

SEQ ID NO: 296244 - DNA, 30 bp, Artificial Sequence
  Synthetic oligonucleotide
accgattagccgtctatttggatccacctg

SEQ ID NO: 296245 - DNA, 30 bp, Artificial Sequence
  Synthetic oligonucleotide
cctaattgtaactatactggctcgcacctg

SEQ ID NO: 296246 - DNA, 30 bp, Artificial Sequence
  Synthetic oligonucleotide
taagcggagtggcactgtgttgggcacctg

SEQ ID NO: 296247 - DNA, 30 bp, Artificial Sequence
  Synthetic oligonucleotide
gtgctcttgcaactccgcatcgctcacctg

SEQ ID NO: 296248 - DNA, 30 bp, Artificial Sequence
  Synthetic oligonucleotide
cgaatttactgacaaggcgactctcacctg

SEQ ID NO: 296249 - DNA, 30 bp, Artificial Sequence
  Synthetic oligonucleotide
acaccatacaaggtacgatgcgttcacctg

SEQ ID NO: 296250 - DNA, 30 bp, Artificial Sequence
  Synthetic oligonucleotide
actgatctcaaggcaatggcctgagacctg

SEQ ID NO: 296251 - DNA, 30 bp, Artificial Sequence
  Synthetic oligonucleotide
aggcttttcggcttttggtaaaaggacctg

SEQ ID NO: 296252 - DNA, 30 bp, Artificial Sequence
  Synthetic oligonucleotide
taaaccacggattgtagtacttgggacctg

SEQ ID NO: 296253 - DNA, 30 bp, Artificial Sequence
  Synthetic oligonucleotide
actctaagcccaaaaagttccggtgacctg

SEQ ID NO: 296254 - DNA, 30 bp, Artificial Sequence
  Synthetic oligonucleotide
tcacggtattgtaatatttagcaatacctg

SEQ ID NO: 296255 - DNA, 30 bp, Artificial Sequence
  Synthetic oligonucleotide
caaacgcagacgatattactatcatacctg

SEQ ID NO: 296256 - DNA, 30 bp, Artificial Sequence
  Synthetic oligonucleotide
gggcgcttcatgaacgcggtaaagtacctg

SEQ ID NO: 296257 - DNA, 30 bp, Artificial Sequence
  Synthetic oligonucleotide
atgacccgatggacaaaggtgaattacctg

SEQ ID NO: 296258 - DNA, 30 bp, Artificial Sequence
  Synthetic oligonucleotide
tgctcgcccgtggcaaatgaagtttacctg

SEQ ID NO: 296259 - DNA, 30 bp, Artificial Sequence
  Synthetic oligonucleotide
acacaggtggggaccaggatctccaccctg

SEQ ID NO: 296260 - DNA, 30 bp, Artificial Sequence
  Synthetic oligonucleotide
gcatccagccggagcagtaccaagcccctg

SEQ ID NO: 296261 - DNA, 30 bp, Artificial Sequence
  Synthetic oligonucleotide
gacaggttactggtatctataaggcccctg

SEQ ID NO: 296262 - DNA, 30 bp, Artificial Sequence
  Synthetic oligonucleotide
ccgtggaggaccttggctcttcggcccctg

SEQ ID NO: 296263 - DNA, 30 bp, Artificial Sequence
  Synthetic oligonucleotide
ttcgtgaacgtgggcagccgaccagccctg

SEQ ID NO: 296264 - DNA, 30 bp, Artificial Sequence
  Synthetic oligonucleotide
agcgatatacgcgcggatctggcggccctg

SEQ ID NO: 296265 - DNA, 30 bp, Artificial Sequence
  Synthetic oligonucleotide
attccgccactggtttcggagctggccctg

SEQ ID NO: 296266 - DNA, 30 bp, Artificial Sequence
  Synthetic oligonucleotide
gcaacggcctttagtcggggtaatgccctg

SEQ ID NO: 296267 - DNA, 30 bp, Artificial Sequence
  Synthetic oligonucleotide
ctatgaggaggctctagacactatgccctg

SEQ ID NO: 296268 - DNA, 30 bp, Artificial Sequence
  Synthetic oligonucleotide
ccggccaaatcacgcccgacaggtgccctg

SEQ ID NO: 296269 - DNA, 30 bp, Artificial Sequence
  Synthetic oligonucleotide
accttcgtcgggactaaacggcttgccctg

SEQ ID NO: 296270 - DNA, 30 bp, Artificial Sequence
  Synthetic oligonucleotide
cctattacataactctcctcgacgtccctg

SEQ ID NO: 296271 - DNA, 30 bp, Artificial Sequence
  Synthetic oligonucleotide
aatcaggggagataaggtatcgtttccctg

SEQ ID NO: 296272 - DNA, 30 bp, Artificial Sequence
  Synthetic oligonucleotide
attgccctattattgatctcaaaaagcctg

SEQ ID NO: 296273 - DNA, 30 bp, Artificial Sequence
  Synthetic oligonucleotide
caatctgacgtggtattggagaaaagcctg

SEQ ID NO: 296274 - DNA, 30 bp, Artificial Sequence
  Synthetic oligonucleotide
gttcctctgcaggagaagagtataagcctg

SEQ ID NO: 296275 - DNA, 30 bp, Artificial Sequence
  Synthetic oligonucleotide
tttaggcaactgctgagggcactaagcctg

SEQ ID NO: 296276 - DNA, 30 bp, Artificial Sequence
  Synthetic oligonucleotide
ctcatgctagagggggacgcggacagcctg

SEQ ID NO: 296277 - DNA, 30 bp, Artificial Sequence
  Synthetic oligonucleotide
ctgccacctgtactgaggattagcagcctg

SEQ ID NO: 296278 - DNA, 30 bp, Artificial Sequence
  Synthetic oligonucleotide
tagcgctagggcagtacaatcttcagcctg

SEQ ID NO: 296279 - DNA, 30 bp, Artificial Sequence
  Synthetic oligonucleotide
agttcccaataggttgatggaccgagcctg

SEQ ID NO: 296280 - DNA, 30 bp, Artificial Sequence
  Synthetic oligonucleotide
ggttcattatcgtcctcgctgaggagcctg

SEQ ID NO: 296281 - DNA, 30 bp, Artificial Sequence
  Synthetic oligonucleotide
gaagtatccgatgaggcggaccttagcctg

SEQ ID NO: 296282 - DNA, 30 bp, Artificial Sequence
  Synthetic oligonucleotide
tgcgcgctactggcccagttcctccgcctg

SEQ ID NO: 296283 - DNA, 30 bp, Artificial Sequence
  Synthetic oligonucleotide
gccaagggatgcgcgatatccttgcgcctg

SEQ ID NO: 296284 - DNA, 30 bp, Artificial Sequence
  Synthetic oligonucleotide
ttttgtgtgccacatgtcgcttatcgcctg

SEQ ID NO: 296285 - DNA, 30 bp, Artificial Sequence
  Synthetic oligonucleotide
tagtaggtgttactctaaggataaggcctg

SEQ ID NO: 296286 - DNA, 30 bp, Artificial Sequence
  Synthetic oligonucleotide
gaccgtcagggtgtaatatattttggcctg

SEQ ID NO: 296287 - DNA, 30 bp, Artificial Sequence
  Synthetic oligonucleotide
tagtggatcccactttagggcaaatgcctg

SEQ ID NO: 296288 - DNA, 30 bp, Artificial Sequence
  Synthetic oligonucleotide
gaaagccagtgcacgtgtctagtatgcctg

SEQ ID NO: 296289 - DNA, 30 bp, Artificial Sequence
  Synthetic oligonucleotide
ggcatgtaacaaattgctgatttatgcctg

SEQ ID NO: 296290 - DNA, 30 bp, Artificial Sequence
  Synthetic oligonucleotide
gagtagcatgtaggtcataataagtgcctg

SEQ ID NO: 296291 - DNA, 30 bp, Artificial Sequence
  Synthetic oligonucleotide
tggggacgccactcattcttgttaatcctg

SEQ ID NO: 296292 - DNA, 30 bp, Artificial Sequence
  Synthetic oligonucleotide
gagattaactgtgctcaaatatccatcctg

SEQ ID NO: 296293 - DNA, 30 bp, Artificial Sequence
  Synthetic oligonucleotide
tacaggagggtcgaccgttgcatactcctg

SEQ ID NO: 296294 - DNA, 30 bp, Artificial Sequence
  Synthetic oligonucleotide
tatacagatgtaggaaagggagtgctcctg

SEQ ID NO: 296295 - DNA, 30 bp, Artificial Sequence
  Synthetic oligonucleotide
ctagacctgcgggccagcgagccagtcctg

SEQ ID NO: 296296 - DNA, 30 bp, Artificial Sequence
  Synthetic oligonucleotide
tcgcgctccgtgggatgtgacaacgtcctg

SEQ ID NO: 296297 - DNA, 30 bp, Artificial Sequence
  Synthetic oligonucleotide
ttatgaaggaacgcgtgcattatcgtcctg

SEQ ID NO: 296298 - DNA, 30 bp, Artificial Sequence
  Synthetic oligonucleotide
tggtgatcataactcgacttggtggtcctg

SEQ ID NO: 296299 - DNA, 30 bp, Artificial Sequence
  Synthetic oligonucleotide
atcgaaatgtcctggtaagctattgtcctg

SEQ ID NO: 296300 - DNA, 30 bp, Artificial Sequence
  Synthetic oligonucleotide
acaagatgattctcacacggggttgtcctg

SEQ ID NO: 296301 - DNA, 30 bp, Artificial Sequence
  Synthetic oligonucleotide
ccgtcagcggcgcagcggctggcgttcctg

SEQ ID NO: 296302 - DNA, 30 bp, Artificial Sequence
  Synthetic oligonucleotide
gtcatgagcactagggtcagtgggttcctg

SEQ ID NO: 296303 - DNA, 30 bp, Artificial Sequence
  Synthetic oligonucleotide
ctagaatccctgttctaaggcctgttcctg

SEQ ID NO: 296304 - DNA, 30 bp, Artificial Sequence
  Synthetic oligonucleotide
tgagtccgttacggaaggcttagtttcctg

SEQ ID NO: 296305 - DNA, 30 bp, Artificial Sequence
  Synthetic oligonucleotide
ttcgggaaggtcagcctttggcgtttcctg

SEQ ID NO: 296306 - DNA, 30 bp, Artificial Sequence
  Synthetic oligonucleotide
acatcgtcccagccggaaagcattttcctg

SEQ ID NO: 296307 - DNA, 30 bp, Artificial Sequence
  Synthetic oligonucleotide
aggagatatggggagttacatcttttcctg

SEQ ID NO: 296308 - DNA, 30 bp, Artificial Sequence
  Synthetic oligonucleotide
ggggaagaggggtcgttacacgttttcctg

SEQ ID NO: 296309 - DNA, 30 bp, Artificial Sequence
  Synthetic oligonucleotide
aatagtattttaaagttaaggggcaagctg

SEQ ID NO: 296310 - DNA, 30 bp, Artificial Sequence
  Synthetic oligonucleotide
cacttctcctcgaaaaatgcaaaacagctg

SEQ ID NO: 296311 - DNA, 30 bp, Artificial Sequence
  Synthetic oligonucleotide
gaagacgcaggaactcgtacggtacagctg

SEQ ID NO: 296312 - DNA, 30 bp, Artificial Sequence
  Synthetic oligonucleotide
gggtagacatggttgtgcgctgagcagctg

SEQ ID NO: 296313 - DNA, 30 bp, Artificial Sequence
  Synthetic oligonucleotide
caaaacctaacaatattagggattcagctg

SEQ ID NO: 296314 - DNA, 30 bp, Artificial Sequence
  Synthetic oligonucleotide
ggagtaacgttggtccatctcggagagctg

SEQ ID NO: 296315 - DNA, 30 bp, Artificial Sequence
  Synthetic oligonucleotide
gtgcaggcccggacagttttaggcgagctg

SEQ ID NO: 296316 - DNA, 30 bp, Artificial Sequence
  Synthetic oligonucleotide
tgttgttgcggcgtcgtactgggcgagctg

SEQ ID NO: 296317 - DNA, 30 bp, Artificial Sequence
  Synthetic oligonucleotide
tttatgacccagaggtaacatctggagctg

SEQ ID NO: 296318 - DNA, 30 bp, Artificial Sequence
  Synthetic oligonucleotide
tatcctgcactttcgtgtgcggcatagctg

SEQ ID NO: 296319 - DNA, 30 bp, Artificial Sequence
  Synthetic oligonucleotide
tcccatagccatgctttgcaagtgtagctg

SEQ ID NO: 296320 - DNA, 30 bp, Artificial Sequence
  Synthetic oligonucleotide
caagttaaatttgcctctactgtgtagctg

SEQ ID NO: 296321 - DNA, 30 bp, Artificial Sequence
  Synthetic oligonucleotide
ggggcatgatcatccctgcaatcttagctg

SEQ ID NO: 296322 - DNA, 30 bp, Artificial Sequence
  Synthetic oligonucleotide
ttcgtgggttgtcgaacaggtggttagctg

SEQ ID NO: 296323 - DNA, 30 bp, Artificial Sequence
  Synthetic oligonucleotide
cacagtgtatgacgtaatagaaggacgctg

SEQ ID NO: 296324 - DNA, 30 bp, Artificial Sequence
  Synthetic oligonucleotide
ctggcagcttgctataccgagatgacgctg

SEQ ID NO: 296325 - DNA, 30 bp, Artificial Sequence
  Synthetic oligonucleotide
gcgagcgcgggtcgggagcactatacgctg

SEQ ID NO: 296326 - DNA, 30 bp, Artificial Sequence
  Synthetic oligonucleotide
cgtcggaggtgcaaatctttaggtacgctg

SEQ ID NO: 296327 - DNA, 30 bp, Artificial Sequence
  Synthetic oligonucleotide
tacagttggaggaatcacaagagcccgctg

SEQ ID NO: 296328 - DNA, 30 bp, Artificial Sequence
  Synthetic oligonucleotide
gctgaaaagcgcggcattactaagccgctg

SEQ ID NO: 296329 - DNA, 30 bp, Artificial Sequence
  Synthetic oligonucleotide
taaacgatgaagttggatgcgtgagcgctg

SEQ ID NO: 296330 - DNA, 30 bp, Artificial Sequence
  Synthetic oligonucleotide
gggatgagttgagcatctggtaacgcgctg

SEQ ID NO: 296331 - DNA, 30 bp, Artificial Sequence
  Synthetic oligonucleotide
catccatgatttgacataacttacgcgctg

SEQ ID NO: 296332 - DNA, 30 bp, Artificial Sequence
  Synthetic oligonucleotide
gttacgcaaaatgtagtagaaaactcgctg

SEQ ID NO: 296333 - DNA, 30 bp, Artificial Sequence
  Synthetic oligonucleotide
gtacccactacggattagacgtgcaggctg

SEQ ID NO: 296334 - DNA, 31 bp, Artificial Sequence
  Synthetic oligonucleotide
ttgcacccttaaactgcatcaacagaggctg

SEQ ID NO: 296335 - DNA, 30 bp, Artificial Sequence
  Synthetic oligonucleotide
gggccgccccgtgacgaagaggcgaggctg

SEQ ID NO: 296336 - DNA, 30 bp, Artificial Sequence
  Synthetic oligonucleotide
ggtctagggagttaccgtcttgctaggctg

SEQ ID NO: 296337 - DNA, 30 bp, Artificial Sequence
  Synthetic oligonucleotide
agattaaaggggattgaatgccgccggctg

SEQ ID NO: 296338 - DNA, 30 bp, Artificial Sequence
  Synthetic oligonucleotide
cgattggacggggaatacatggtgcggctg

SEQ ID NO: 296339 - DNA, 30 bp, Artificial Sequence
  Synthetic oligonucleotide
atagagcacgtgtccaattaaagtcggctg

SEQ ID NO: 296340 - DNA, 30 bp, Artificial Sequence
  Synthetic oligonucleotide
ttgggggacccgatgttctggggtcggctg

SEQ ID NO: 296341 - DNA, 30 bp, Artificial Sequence
  Synthetic oligonucleotide
gtactggggtgagtgcatctaattcggctg

SEQ ID NO: 296342 - DNA, 30 bp, Artificial Sequence
  Synthetic oligonucleotide
cgggtaaacccgaatcattacctagggctg

SEQ ID NO: 296343 - DNA, 30 bp, Artificial Sequence
  Synthetic oligonucleotide
tagcattcgaggcaagtgttccacgggctg

SEQ ID NO: 296344 - DNA, 30 bp, Artificial Sequence
  Synthetic oligonucleotide
ttacagcgtggttcaattccgtaggggctg

SEQ ID NO: 296345 - DNA, 30 bp, Artificial Sequence
  Synthetic oligonucleotide
cgtaaaagcgtatgtcataatgcggggctg

SEQ ID NO: 296346 - DNA, 30 bp, Artificial Sequence
  Synthetic oligonucleotide
aggaagggtgatgcaagtacggatgggctg

SEQ ID NO: 296347 - DNA, 30 bp, Artificial Sequence
  Synthetic oligonucleotide
aatgaaatatcggatccccgaagatggctg

SEQ ID NO: 296348 - DNA, 30 bp, Artificial Sequence
  Synthetic oligonucleotide
cgcgtacctgttgaccggtgattatggctg

SEQ ID NO: 296349 - DNA, 30 bp, Artificial Sequence
  Synthetic oligonucleotide
tttggggggaggttgtaattaaaaatgctg

SEQ ID NO: 296350 - DNA, 30 bp, Artificial Sequence
  Synthetic oligonucleotide
cttctgagataaggggagcatgaaatgctg

SEQ ID NO: 296351 - DNA, 31 bp, Artificial Sequence
  Synthetic oligonucleotide
tcaccattaacgaggcctgtgaagcatgctg

SEQ ID NO: 296352 - DNA, 30 bp, Artificial Sequence
  Synthetic oligonucleotide
agtccaatgaaattcgttttgcagatgctg

SEQ ID NO: 296353 - DNA, 30 bp, Artificial Sequence
  Synthetic oligonucleotide
agtgccgcccatagctccgagaggatgctg

SEQ ID NO: 296354 - DNA, 30 bp, Artificial Sequence
  Synthetic oligonucleotide
gtcgtagatttggcccgcaaacggatgctg

SEQ ID NO: 296355 - DNA, 30 bp, Artificial Sequence
  Synthetic oligonucleotide
agcagcaagatgatagggcacctgatgctg

SEQ ID NO: 296356 - DNA, 30 bp, Artificial Sequence
  Synthetic oligonucleotide
atctgtccgttaggacttagtttgatgctg

SEQ ID NO: 296357 - DNA, 30 bp, Artificial Sequence
  Synthetic oligonucleotide
gaaagagcagcgtaagcacatcctatgctg

SEQ ID NO: 296358 - DNA, 30 bp, Artificial Sequence
  Synthetic oligonucleotide
taaaaaaccagttctgcgttttttatgctg

SEQ ID NO: 296359 - DNA, 30 bp, Artificial Sequence
  Synthetic oligonucleotide
ctgcagggcaaaagtacatttttactgctg

SEQ ID NO: 296360 - DNA, 30 bp, Artificial Sequence
  Synthetic oligonucleotide
tcctggttggccatggctgtgaccctgctg

SEQ ID NO: 296361 - DNA, 30 bp, Artificial Sequence
  Synthetic oligonucleotide
agtgatatgtaggggttgtagttcctgctg

SEQ ID NO: 296362 - DNA, 30 bp, Artificial Sequence
  Synthetic oligonucleotide
atcttaggtcaccgaattaattagctgctg

SEQ ID NO: 296363 - DNA, 30 bp, Artificial Sequence
  Synthetic oligonucleotide
tcgtgagggcttgtcgtcttatctgtgctg

SEQ ID NO: 296364 - DNA, 30 bp, Artificial Sequence
  Synthetic oligonucleotide
tctgggcaacgtcgggtttaatcattgctg

SEQ ID NO: 296365 - DNA, 30 bp, Artificial Sequence
  Synthetic oligonucleotide
tagagtatgacactgattacagccttgctg

SEQ ID NO: 296366 - DNA, 30 bp, Artificial Sequence
  Synthetic oligonucleotide
attaggacattttcgcatcatgatttgctg

SEQ ID NO: 296367 - DNA, 30 bp, Artificial Sequence
  Synthetic oligonucleotide
tacactccctcaaagtgcgtaccaaatctg

SEQ ID NO: 296368 - DNA, 30 bp, Artificial Sequence
  Synthetic oligonucleotide
actatcgcgttgtgcaaaatcccaaatctg

SEQ ID NO: 296369 - DNA, 30 bp, Artificial Sequence
  Synthetic oligonucleotide
aatctaggctgtggggacttgcttaatctg

SEQ ID NO: 296370 - DNA, 30 bp, Artificial Sequence
  Synthetic oligonucleotide
atccactattagattgggctgcaacatctg

SEQ ID NO: 296371 - DNA, 30 bp, Artificial Sequence
  Synthetic oligonucleotide
gtcaggttctttgtattcgcgccccatctg

SEQ ID NO: 296372 - DNA, 30 bp, Artificial Sequence
  Synthetic oligonucleotide
tgagacttccacacggagttggcgcatctg

SEQ ID NO: 296373 - DNA, 30 bp, Artificial Sequence
  Synthetic oligonucleotide
tggataggcaaatccccaggacggcatctg

SEQ ID NO: 296374 - DNA, 30 bp, Artificial Sequence
  Synthetic oligonucleotide
taaagtgttcggcgttgtgacttagatctg

SEQ ID NO: 296375 - DNA, 30 bp, Artificial Sequence
  Synthetic oligonucleotide
gatctcatgggcggagatagtgaggatctg

SEQ ID NO: 296376 - DNA, 30 bp, Artificial Sequence
  Synthetic oligonucleotide
cattacgacggtcgctggttataggatctg

SEQ ID NO: 296377 - DNA, 30 bp, Artificial Sequence
  Synthetic oligonucleotide
tggccactcaaccatcctgctttctatctg

SEQ ID NO: 296378 - DNA, 30 bp, Artificial Sequence
  Synthetic oligonucleotide
gttaagaggaataccaatccatagtatctg

SEQ ID NO: 296379 - DNA, 30 bp, Artificial Sequence
  Synthetic oligonucleotide
gtaagtgagatgtcgcttgtggcgtatctg

SEQ ID NO: 296380 - DNA, 30 bp, Artificial Sequence
  Synthetic oligonucleotide
gtcgatacgatcctaggaaagtgttatctg

SEQ ID NO: 296381 - DNA, 30 bp, Artificial Sequence
  Synthetic oligonucleotide
gtactaagcggccccactaagggaactctg

SEQ ID NO: 296382 - DNA, 30 bp, Artificial Sequence
  Synthetic oligonucleotide
gtccatttgcacaaaagtatggtcactctg

SEQ ID NO: 296383 - DNA, 30 bp, Artificial Sequence
  Synthetic oligonucleotide
caccgtgggactcggctcaccgagactctg

SEQ ID NO: 296384 - DNA, 30 bp, Artificial Sequence
  Synthetic oligonucleotide
ggaccagagactgagcaatcagggactctg

SEQ ID NO: 296385 - DNA, 30 bp, Artificial Sequence
  Synthetic oligonucleotide
atcgggtcttttcaaatcgagtggactctg

SEQ ID NO: 296386 - DNA, 30 bp, Artificial Sequence
  Synthetic oligonucleotide
aagggaccagaagagttctcggatactctg

SEQ ID NO: 296387 - DNA, 30 bp, Artificial Sequence
  Synthetic oligonucleotide
aagaccatgcggtccagctaaccccctctg

SEQ ID NO: 296388 - DNA, 30 bp, Artificial Sequence
  Synthetic oligonucleotide
gaagaagcaacaatgggtaggtagcctctg

SEQ ID NO: 296389 - DNA, 30 bp, Artificial Sequence
  Synthetic oligonucleotide
ctcgtccgcgggcctgacattgcgcctctg

SEQ ID NO: 296390 - DNA, 30 bp, Artificial Sequence
  Synthetic oligonucleotide
cgcaactaaaaagctcattagatgcctctg

SEQ ID NO: 296391 - DNA, 30 bp, Artificial Sequence
  Synthetic oligonucleotide
gggtagctcttgttcatcaacggagctctg

SEQ ID NO: 296392 - DNA, 30 bp, Artificial Sequence
  Synthetic oligonucleotide
tagttgggcgaaacggttttgatagctctg

SEQ ID NO: 296393 - DNA, 30 bp, Artificial Sequence
  Synthetic oligonucleotide
gaaacataagcgtagacgtaataatctctg

SEQ ID NO: 296394 - DNA, 30 bp, Artificial Sequence
  Synthetic oligonucleotide
gtatgccatccaggtgtgcgtggatctctg

SEQ ID NO: 296395 - DNA, 29 bp, Artificial Sequence
  Synthetic oligonucleotide
tgccagtggccacaatgttatgctctctg

SEQ ID NO: 296396 - DNA, 30 bp, Artificial Sequence
  Synthetic oligonucleotide
gggcgatgcccattacacagaaattctctg

SEQ ID NO: 296397 - DNA, 30 bp, Artificial Sequence
  Synthetic oligonucleotide
catggctgcccacccgcagcttaaagtctg

SEQ ID NO: 296398 - DNA, 30 bp, Artificial Sequence
  Synthetic oligonucleotide
aagtggcctatgaggtagttttgcagtctg

SEQ ID NO: 296399 - DNA, 30 bp, Artificial Sequence
  Synthetic oligonucleotide
gctagcttatgcaccagttgagggagtctg

SEQ ID NO: 296400 - DNA, 30 bp, Artificial Sequence
  Synthetic oligonucleotide
tcctcgaccctttgttaggcatttagtctg

SEQ ID NO: 296401 - DNA, 30 bp, Artificial Sequence
  Synthetic oligonucleotide
cactaggaggtgttaaaaaaccaacgtctg

SEQ ID NO: 296402 - DNA, 30 bp, Artificial Sequence
  Synthetic oligonucleotide
tgcagacagtgttcggccgggtcacgtctg

SEQ ID NO: 296403 - DNA, 30 bp, Artificial Sequence
  Synthetic oligonucleotide
ccgttctcatcatctaactcactccgtctg

SEQ ID NO: 296404 - DNA, 30 bp, Artificial Sequence
  Synthetic oligonucleotide
agtgaacgtagtgatcggtcgcatcgtctg

SEQ ID NO: 296405 - DNA, 30 bp, Artificial Sequence
  Synthetic oligonucleotide
aggcattctctcgccagtctcgtaggtctg

SEQ ID NO: 296406 - DNA, 30 bp, Artificial Sequence
  Synthetic oligonucleotide
gctcagacgcctggttgtcgatccggtctg

SEQ ID NO: 296407 - DNA, 30 bp, Artificial Sequence
  Synthetic oligonucleotide
ggataggggaggcgtgcagtggggggtctg

SEQ ID NO: 296408 - DNA, 30 bp, Artificial Sequence
  Synthetic oligonucleotide
ctgaattgccagggaccatatctgggtctg

SEQ ID NO: 296409 - DNA, 30 bp, Artificial Sequence
  Synthetic oligonucleotide
ccaatattgacgtaacccgaaccatgtctg

SEQ ID NO: 296410 - DNA, 30 bp, Artificial Sequence
  Synthetic oligonucleotide
cctctgcccagagatgcagggtgctgtctg

SEQ ID NO: 296411 - DNA, 30 bp, Artificial Sequence
  Synthetic oligonucleotide
tgtacctatgcttcgcgctagctctgtctg

SEQ ID NO: 296412 - DNA, 30 bp, Artificial Sequence
  Synthetic oligonucleotide
gtaccgctctcgagctgacttcattgtctg

SEQ ID NO: 296413 - DNA, 30 bp, Artificial Sequence
  Synthetic oligonucleotide
atctaattccgataacgtagaaaaattctg

SEQ ID NO: 296414 - DNA, 30 bp, Artificial Sequence
  Synthetic oligonucleotide
gggaaggccctgcgtctagtggccattctg

SEQ ID NO: 296415 - DNA, 30 bp, Artificial Sequence
  Synthetic oligonucleotide
tatcaagatgcattcatctgacgacttctg

SEQ ID NO: 296416 - DNA, 30 bp, Artificial Sequence
  Synthetic oligonucleotide
gtaatgctagagaagaaacacccgcttctg

SEQ ID NO: 296417 - DNA, 30 bp, Artificial Sequence
  Synthetic oligonucleotide
gtagtgattctcctttcgtggtttcttctg

SEQ ID NO: 296418 - DNA, 30 bp, Artificial Sequence
  Synthetic oligonucleotide
ctgcgtggggtgcgattaggcttcgttctg

SEQ ID NO: 296419 - DNA, 30 bp, Artificial Sequence
  Synthetic oligonucleotide
ttcatgctatggcacaatggataggttctg

SEQ ID NO: 296420 - DNA, 30 bp, Artificial Sequence
  Synthetic oligonucleotide
ctccccgtcggagcttggttgacggttctg

SEQ ID NO: 296421 - DNA, 30 bp, Artificial Sequence
  Synthetic oligonucleotide
tgcaggagctcgaatacgtcagcggttctg

SEQ ID NO: 296422 - DNA, 30 bp, Artificial Sequence
  Synthetic oligonucleotide
gcatagagagctaaaataactgcatttctg

SEQ ID NO: 296423 - DNA, 30 bp, Artificial Sequence
  Synthetic oligonucleotide
ggggacaaacggtaaaagagtccgtttctg

SEQ ID NO: 296424 - DNA, 30 bp, Artificial Sequence
  Synthetic oligonucleotide
ccttgcagtggctggaaatcgatgtttctg

SEQ ID NO: 296425 - DNA, 30 bp, Artificial Sequence
  Synthetic oligonucleotide
caggtcgacaacttactgtcgtattttctg

SEQ ID NO: 296426 - DNA, 30 bp, Artificial Sequence
  Synthetic oligonucleotide
agtgcttgtattaggctgacaacttttctg

SEQ ID NO: 296427 - DNA, 30 bp, Artificial Sequence
  Synthetic oligonucleotide
gcagcagcctcggaagtcttagtttttctg

SEQ ID NO: 296428 - DNA, 30 bp, Artificial Sequence
  Synthetic oligonucleotide
caaggtggcgccccgggggggcaaaaagtg

SEQ ID NO: 296429 - DNA, 30 bp, Artificial Sequence
  Synthetic oligonucleotide
acacgctatgcaggcatgtaagacaaagtg

SEQ ID NO: 296430 - DNA, 30 bp, Artificial Sequence
  Synthetic oligonucleotide
tcagatttaggtcggggttctttcaaagtg

SEQ ID NO: 296431 - DNA, 30 bp, Artificial Sequence
  Synthetic oligonucleotide
ataagtgtatatgtgatatgagcgaaagtg

SEQ ID NO: 296432 - DNA, 30 bp, Artificial Sequence
  Synthetic oligonucleotide
agaccaccggttgcgccggtatgtaaagtg

SEQ ID NO: 296433 - DNA, 30 bp, Artificial Sequence
  Synthetic oligonucleotide
tttgacccaacagtagggaactgtaaagtg

SEQ ID NO: 296434 - DNA, 30 bp, Artificial Sequence
  Synthetic oligonucleotide
gtagatgccggacgggagtcggcacaagtg

SEQ ID NO: 296435 - DNA, 30 bp, Artificial Sequence
  Synthetic oligonucleotide
gatttacgccgtacacagacctaccaagtg

SEQ ID NO: 296436 - DNA, 30 bp, Artificial Sequence
  Synthetic oligonucleotide
aacaattgcttgggtccagcaagccaagtg

SEQ ID NO: 296437 - DNA, 30 bp, Artificial Sequence
  Synthetic oligonucleotide
catattttggtaaggatcgatttccaagtg

SEQ ID NO: 296438 - DNA, 30 bp, Artificial Sequence
  Synthetic oligonucleotide
ggagtccgttcgcacgtttttttccaagtg

SEQ ID NO: 296439 - DNA, 30 bp, Artificial Sequence
  Synthetic oligonucleotide
gtaaccctctgtgtgcgagcggagcaagtg

SEQ ID NO: 296440 - DNA, 30 bp, Artificial Sequence
  Synthetic oligonucleotide
aataaacaatacaaggaggtggcagaagtg

SEQ ID NO: 296441 - DNA, 30 bp, Artificial Sequence
  Synthetic oligonucleotide
tttggggttgtcttatagaaaactgaagtg

SEQ ID NO: 296442 - DNA, 30 bp, Artificial Sequence
  Synthetic oligonucleotide
atattgacgactatataattgggtgaagtg

SEQ ID NO: 296443 - DNA, 30 bp, Artificial Sequence
  Synthetic oligonucleotide
aataagagttggggtgtaacggtataagtg

SEQ ID NO: 296444 - DNA, 30 bp, Artificial Sequence
  Synthetic oligonucleotide
acaggctcttatccagtaagttgctaagtg

SEQ ID NO: 296445 - DNA, 30 bp, Artificial Sequence
  Synthetic oligonucleotide
aatattcaccaatggcaccacatctaagtg

SEQ ID NO: 296446 - DNA, 30 bp, Artificial Sequence
  Synthetic oligonucleotide
aagctcaaagttgtgtgcaagctctaagtg

SEQ ID NO: 296447 - DNA, 30 bp, Artificial Sequence
  Synthetic oligonucleotide
attggtcttgtacttaatgctaagtaagtg

SEQ ID NO: 296448 - DNA, 30 bp, Artificial Sequence
  Synthetic oligonucleotide
ttgcgtctatgcggagacaacaggtaagtg

SEQ ID NO: 296449 - DNA, 30 bp, Artificial Sequence
  Synthetic oligonucleotide
tcgctgtaatgcctggacgctatgtaagtg

SEQ ID NO: 296450 - DNA, 30 bp, Artificial Sequence
  Synthetic oligonucleotide
ctgaatcgcataatattgacggaaacagtg

SEQ ID NO: 296451 - DNA, 30 bp, Artificial Sequence
  Synthetic oligonucleotide
ttagcggtatgaggcattataccaacagtg

SEQ ID NO: 296452 - DNA, 30 bp, Artificial Sequence
  Synthetic oligonucleotide
cagtagctgtggaatgtgcgcagaacagtg

SEQ ID NO: 296453 - DNA, 30 bp, Artificial Sequence
  Synthetic oligonucleotide
attggtccgggcgccaatgactaaccagtg

SEQ ID NO: 296454 - DNA, 30 bp, Artificial Sequence
  Synthetic oligonucleotide
ccctggccagagccggagacggccccagtg

SEQ ID NO: 296455 - DNA, 30 bp, Artificial Sequence
  Synthetic oligonucleotide
ctaaggagtcgaagcattcacctcccagtg

SEQ ID NO: 296456 - DNA, 30 bp, Artificial Sequence
  Synthetic oligonucleotide
gcaagatggtaggcgagcccgcgtccagtg

SEQ ID NO: 296457 - DNA, 30 bp, Artificial Sequence
  Synthetic oligonucleotide
aggtaaggaacgaacaggcccgaggcagtg

SEQ ID NO: 296458 - DNA, 30 bp, Artificial Sequence
  Synthetic oligonucleotide
gttttatccacgctcgaaccggaggcagtg

SEQ ID NO: 296459 - DNA, 30 bp, Artificial Sequence
  Synthetic oligonucleotide
tcttgttaagaaaagcgtgtaggggcagtg

SEQ ID NO: 296460 - DNA, 30 bp, Artificial Sequence
  Synthetic oligonucleotide
gttggattcgtcccggctgtttgggcagtg

SEQ ID NO: 296461 - DNA, 30 bp, Artificial Sequence
  Synthetic oligonucleotide
aaaaactgtgaaagggctgttcatgcagtg

SEQ ID NO: 296462 - DNA, 30 bp, Artificial Sequence
  Synthetic oligonucleotide
ctatttgtcaacatccccaaaattgcagtg

SEQ ID NO: 296463 - DNA, 30 bp, Artificial Sequence
  Synthetic oligonucleotide
gccaaagctagctgggaggtcgttgcagtg

SEQ ID NO: 296464 - DNA, 30 bp, Artificial Sequence
  Synthetic oligonucleotide
ccaacgtttaagttcccgctacaatcagtg

SEQ ID NO: 296465 - DNA, 30 bp, Artificial Sequence
  Synthetic oligonucleotide
aactcctaatgggacatccatgcctcagtg

SEQ ID NO: 296466 - DNA, 30 bp, Artificial Sequence
  Synthetic oligonucleotide
aacgcctagggcggtgaattgatctcagtg

SEQ ID NO: 296467 - DNA, 30 bp, Artificial Sequence
  Synthetic oligonucleotide
gatagcagcatacgaacagaagagtcagtg

SEQ ID NO: 296468 - DNA, 30 bp, Artificial Sequence
  Synthetic oligonucleotide
gctgccgtttaaaaagtttaggggtcagtg

SEQ ID NO: 296469 - DNA, 30 bp, Artificial Sequence
  Synthetic oligonucleotide
accctccgcgggtggagcgaagcttcagtg

SEQ ID NO: 296470 - DNA, 30 bp, Artificial Sequence
  Synthetic oligonucleotide
tgtagtgatataagaggatatatttcagtg

SEQ ID NO: 296471 - DNA, 30 bp, Artificial Sequence
  Synthetic oligonucleotide
tctttttcaactgcgcgtaagttttcagtg

SEQ ID NO: 296472 - DNA, 30 bp, Artificial Sequence
  Synthetic oligonucleotide
tgcttagttatacgtcgatgtagaagagtg

SEQ ID NO: 296473 - DNA, 30 bp, Artificial Sequence
  Synthetic oligonucleotide
catatcggcaattgagtgtaaggcagagtg

SEQ ID NO: 296474 - DNA, 30 bp, Artificial Sequence
  Synthetic oligonucleotide
cctcggtataaaggggtacatctgagagtg

SEQ ID NO: 296475 - DNA, 30 bp, Artificial Sequence
  Synthetic oligonucleotide
tattcagtgcccatgaatcggttgagagtg

SEQ ID NO: 296476 - DNA, 30 bp, Artificial Sequence
  Synthetic oligonucleotide
ggaagttaatgaagttttacgggtagagtg

SEQ ID NO: 296477 - DNA, 30 bp, Artificial Sequence
  Synthetic oligonucleotide
accgcactgcactaccggatgcttagagtg

SEQ ID NO: 296478 - DNA, 30 bp, Artificial Sequence
  Synthetic oligonucleotide
tcccgctacctgcggggtacgttacgagtg

SEQ ID NO: 296479 - DNA, 30 bp, Artificial Sequence
  Synthetic oligonucleotide
gggtgtgtagtgtccccttgctgccgagtg

SEQ ID NO: 296480 - DNA, 31 bp, Artificial Sequence
  Synthetic oligonucleotide
caataacggaaaacgtagacacttgcgagtg

SEQ ID NO: 296481 - DNA, 30 bp, Artificial Sequence
  Synthetic oligonucleotide
gcttatactcattgggaccaaaatcgagtg

SEQ ID NO: 296482 - DNA, 30 bp, Artificial Sequence
  Synthetic oligonucleotide
aaggctttgggcaactttagagatcgagtg

SEQ ID NO: 296483 - DNA, 30 bp, Artificial Sequence
  Synthetic oligonucleotide
cacgtctaaagacgtacccgccttcgagtg

SEQ ID NO: 296484 - DNA, 30 bp, Artificial Sequence
  Synthetic oligonucleotide
accgataatcttcaatttttggcaggagtg

SEQ ID NO: 296485 - DNA, 30 bp, Artificial Sequence
  Synthetic oligonucleotide
caaactcccctgttaagaacctgcggagtg

SEQ ID NO: 296486 - DNA, 30 bp, Artificial Sequence
  Synthetic oligonucleotide
gtgtagcttaaacagattggaccgggagtg

SEQ ID NO: 296487 - DNA, 30 bp, Artificial Sequence
  Synthetic oligonucleotide
agccaatgggctttgtgcggggatggagtg

SEQ ID NO: 296488 - DNA, 30 bp, Artificial Sequence
  Synthetic oligonucleotide
aggccagaaactcctcaatacactggagtg

SEQ ID NO: 296489 - DNA, 30 bp, Artificial Sequence
  Synthetic oligonucleotide
tacctaaggtttagacagtaggtctgagtg

SEQ ID NO: 296490 - DNA, 30 bp, Artificial Sequence
  Synthetic oligonucleotide
tacgcaaggtgcacggtgacgctgtgagtg

SEQ ID NO: 296491 - DNA, 30 bp, Artificial Sequence
  Synthetic oligonucleotide
ggtctgcagcaatgacattcaggttgagtg

SEQ ID NO: 296492 - DNA, 30 bp, Artificial Sequence
  Synthetic oligonucleotide
ttacgtgtatgggacgctatagtttgagtg

SEQ ID NO: 296493 - DNA, 30 bp, Artificial Sequence
  Synthetic oligonucleotide
tgaaaatagcgctatagcaaacaaatagtg

SEQ ID NO: 296494 - DNA, 30 bp, Artificial Sequence
  Synthetic oligonucleotide
aatcactggaatattgtgtatcggatagtg

SEQ ID NO: 296495 - DNA, 30 bp, Artificial Sequence
  Synthetic oligonucleotide
gccggttttaaagcttgtagagggatagtg

SEQ ID NO: 296496 - DNA, 30 bp, Artificial Sequence
  Synthetic oligonucleotide
gttacctgtaagatgtcgggtactatagtg

SEQ ID NO: 296497 - DNA, 30 bp, Artificial Sequence
  Synthetic oligonucleotide
tgggcggctccttcaaatctttgtatagtg

SEQ ID NO: 296498 - DNA, 30 bp, Artificial Sequence
  Synthetic oligonucleotide
ttgatcaaaaaaagtaaatatattatagtg

SEQ ID NO: 296499 - DNA, 30 bp, Artificial Sequence
  Synthetic oligonucleotide
aatggtcagagcaaggtatttgcactagtg

SEQ ID NO: 296500 - DNA, 30 bp, Artificial Sequence
  Synthetic oligonucleotide
ggtctccggttctagataacgtcactagtg

SEQ ID NO: 296501 - DNA, 30 bp, Artificial Sequence
  Synthetic oligonucleotide
ttacaaagtaagggtgcatcttacctagtg

SEQ ID NO: 296502 - DNA, 30 bp, Artificial Sequence
  Synthetic oligonucleotide
ctcaacaagctgacgtggatacggctagtg

SEQ ID NO: 296503 - DNA, 30 bp, Artificial Sequence
  Synthetic oligonucleotide
agagggtgcaccagccggtgttcagtagtg

SEQ ID NO: 296504 - DNA, 30 bp, Artificial Sequence
  Synthetic oligonucleotide
ggaatatgtttaaatgccgttaacgtagtg

SEQ ID NO: 296505 - DNA, 30 bp, Artificial Sequence
  Synthetic oligonucleotide
tagcttatcaacgggaagggtttcgtagtg

SEQ ID NO: 296506 - DNA, 30 bp, Artificial Sequence
  Synthetic oligonucleotide
atacaccacgtgcgtataaaatctgtagtg

SEQ ID NO: 296507 - DNA, 30 bp, Artificial Sequence
  Synthetic oligonucleotide
aaaagattcgggacggcttgatctgtagtg

SEQ ID NO: 296508 - DNA, 30 bp, Artificial Sequence
  Synthetic oligonucleotide
actagtcctgtcccttctgtcccattagtg

SEQ ID NO: 296509 - DNA, 30 bp, Artificial Sequence
  Synthetic oligonucleotide
atcatgttgggcaggtgtgggctattagtg

SEQ ID NO: 296510 - DNA, 30 bp, Artificial Sequence
  Synthetic oligonucleotide
atcaagactaaatcctagcgacgcttagtg

SEQ ID NO: 296511 - DNA, 30 bp, Artificial Sequence
  Synthetic oligonucleotide
gattaagttaaaagccgtcgtatcttagtg

SEQ ID NO: 296512 - DNA, 30 bp, Artificial Sequence
  Synthetic oligonucleotide
agcagccttgatacacgggttacgttagtg

SEQ ID NO: 296513 - DNA, 30 bp, Artificial Sequence
  Synthetic oligonucleotide
gaatagagaaagggtcttaccatgttagtg

SEQ ID NO: 296514 - DNA, 30 bp, Artificial Sequence
  Synthetic oligonucleotide
agtctccgactcattacaaaaccaaacgtg

SEQ ID NO: 296515 - DNA, 30 bp, Artificial Sequence
  Synthetic oligonucleotide
gagggagatactctgatgacgggaaacgtg

SEQ ID NO: 296516 - DNA, 29 bp, Artificial Sequence
  Synthetic oligonucleotide
ggcacaggttccaaaaaagattgaacgtg

SEQ ID NO: 296517 - DNA, 30 bp, Artificial Sequence
  Synthetic oligonucleotide
ttacattatgggctgttggtagataacgtg

SEQ ID NO: 296518 - DNA, 30 bp, Artificial Sequence
  Synthetic oligonucleotide
catacacttttctgtaaaggaactaacgtg

SEQ ID NO: 296519 - DNA, 30 bp, Artificial Sequence
  Synthetic oligonucleotide
gtcggttggttggggaaagcgcaacacgtg

SEQ ID NO: 296520 - DNA, 30 bp, Artificial Sequence
  Synthetic oligonucleotide
taagtacgctgtggagatgcgtaacacgtg

SEQ ID NO: 296521 - DNA, 30 bp, Artificial Sequence
  Synthetic oligonucleotide
tataacaggtgtagccttttaacacacgtg

SEQ ID NO: 296522 - DNA, 30 bp, Artificial Sequence
  Synthetic oligonucleotide
ggctattagccacgctagtggttccacgtg

SEQ ID NO: 296523 - DNA, 30 bp, Artificial Sequence
  Synthetic oligonucleotide
tgctctacatggttactcaggaggcacgtg

SEQ ID NO: 296524 - DNA, 30 bp, Artificial Sequence
  Synthetic oligonucleotide
tgcggcactgatgccgttccaagagacgtg

SEQ ID NO: 296525 - DNA, 30 bp, Artificial Sequence
  Synthetic oligonucleotide
agccttcctatgtaaggcaattgagacgtg

SEQ ID NO: 296526 - DNA, 30 bp, Artificial Sequence
  Synthetic oligonucleotide
gttaaagggattatgggcaagttagacgtg

SEQ ID NO: 296527 - DNA, 30 bp, Artificial Sequence
  Synthetic oligonucleotide
tgatgataaatgaagtcgatattggacgtg

SEQ ID NO: 296528 - DNA, 30 bp, Artificial Sequence
  Synthetic oligonucleotide
ccagcgtgcaggattgttaagcctgacgtg

SEQ ID NO: 296529 - DNA, 29 bp, Artificial Sequence
  Synthetic oligonucleotide
accgtaacggtgcctgcgcgctatacgtg

SEQ ID NO: 296530 - DNA, 30 bp, Artificial Sequence
  Synthetic oligonucleotide
attaaggagtcgattagaaggggctacgtg

SEQ ID NO: 296531 - DNA, 30 bp, Artificial Sequence
  Synthetic oligonucleotide
gccgtacatttacattcctccgggtacgtg

SEQ ID NO: 296532 - DNA, 30 bp, Artificial Sequence
  Synthetic oligonucleotide
cacaagcagtgtgccaactcattgtacgtg

SEQ ID NO: 296533 - DNA, 30 bp, Artificial Sequence
  Synthetic oligonucleotide
ttgtcataacagtaaccgacgcattacgtg

SEQ ID NO: 296534 - DNA, 30 bp, Artificial Sequence
  Synthetic oligonucleotide
tttcggacccgaatcaacgcgcattacgtg

SEQ ID NO: 296535 - DNA, 30 bp, Artificial Sequence
  Synthetic oligonucleotide
tttcacaaccagtgcatatatagttacgtg

SEQ ID NO: 296536 - DNA, 30 bp, Artificial Sequence
  Synthetic oligonucleotide
cgtcgtgtgttgcatgaagcgatttacgtg

SEQ ID NO: 296537 - DNA, 30 bp, Artificial Sequence
  Synthetic oligonucleotide
agaacattagtgtcgggcttcccaaccgtg

SEQ ID NO: 296538 - DNA, 30 bp, Artificial Sequence
  Synthetic oligonucleotide
ataggctccagagacggtgcgcccaccgtg

SEQ ID NO: 296539 - DNA, 30 bp, Artificial Sequence
  Synthetic oligonucleotide
ttgttcgtaaaagacagcaggcagaccgtg

SEQ ID NO: 296540 - DNA, 30 bp, Artificial Sequence
  Synthetic oligonucleotide
gaagctctgtttgaggcacggacgaccgtg

SEQ ID NO: 296541 - DNA, 30 bp, Artificial Sequence
  Synthetic oligonucleotide
ttactacagtacacttaatggttgaccgtg

SEQ ID NO: 296542 - DNA, 30 bp, Artificial Sequence
  Synthetic oligonucleotide
ggaaaaattatggtccgtatggataccgtg

SEQ ID NO: 296543 - DNA, 30 bp, Artificial Sequence
  Synthetic oligonucleotide
ttagcgttttgaggcaacctgtctaccgtg

SEQ ID NO: 296544 - DNA, 30 bp, Artificial Sequence
  Synthetic oligonucleotide
taaagcaattcaaaataactgtgtaccgtg

SEQ ID NO: 296545 - DNA, 30 bp, Artificial Sequence
  Synthetic oligonucleotide
aagtaacgactaaattttaacacacccgtg

SEQ ID NO: 296546 - DNA, 30 bp, Artificial Sequence
  Synthetic oligonucleotide
gatttcttctggttaaaattcacacccgtg

SEQ ID NO: 296547 - DNA, 30 bp, Artificial Sequence
  Synthetic oligonucleotide
gccagcaatttgcgataccaggcacccgtg

SEQ ID NO: 296548 - DNA, 30 bp, Artificial Sequence
  Synthetic oligonucleotide
tctttgcacaacaaatagccgcagcccgtg

SEQ ID NO: 296549 - DNA, 30 bp, Artificial Sequence
  Synthetic oligonucleotide
gtgaccccagccggcaaggtagggcccgtg

SEQ ID NO: 296550 - DNA, 30 bp, Artificial Sequence
  Synthetic oligonucleotide
gtctcttcaagtatagggtgccgtcccgtg

SEQ ID NO: 296551 - DNA, 30 bp, Artificial Sequence
  Synthetic oligonucleotide
ggtctttactgaagacctgataacgccgtg

SEQ ID NO: 296552 - DNA, 30 bp, Artificial Sequence
  Synthetic oligonucleotide
ctacgcacacattgcgtagtaaaggccgtg

SEQ ID NO: 296553 - DNA, 30 bp, Artificial Sequence
  Synthetic oligonucleotide
tgcaaatcagcctaaggtcaaccggccgtg

SEQ ID NO: 296554 - DNA, 30 bp, Artificial Sequence
  Synthetic oligonucleotide
ggaagacttccacgttccttactggccgtg

SEQ ID NO: 296555 - DNA, 30 bp, Artificial Sequence
  Synthetic oligonucleotide
gacctaggaaacgcggccaagatatccgtg

SEQ ID NO: 296556 - DNA, 30 bp, Artificial Sequence
  Synthetic oligonucleotide
cagggggttatttctcgctaaccgtccgtg

SEQ ID NO: 296557 - DNA, 30 bp, Artificial Sequence
  Synthetic oligonucleotide
taatctgccaacgacgccgccctgtccgtg

SEQ ID NO: 296558 - DNA, 30 bp, Artificial Sequence
  Synthetic oligonucleotide
tacggagcataatgccgggtcacaagcgtg

SEQ ID NO: 296559 - DNA, 30 bp, Artificial Sequence
  Synthetic oligonucleotide
acacttgacatgttgacagaaatcagcgtg

SEQ ID NO: 296560 - DNA, 30 bp, Artificial Sequence
  Synthetic oligonucleotide
ataagcaagagtcgtgtattgaggagcgtg

SEQ ID NO: 296561 - DNA, 30 bp, Artificial Sequence
  Synthetic oligonucleotide
cgacttctcacaattaaactgacgcgcgtg

SEQ ID NO: 296562 - DNA, 30 bp, Artificial Sequence
  Synthetic oligonucleotide
gccgcgccacaatcgtgaaaatgtcgcgtg

SEQ ID NO: 296563 - DNA, 30 bp, Artificial Sequence
  Synthetic oligonucleotide
cgtccggtttaagaactagccgttcgcgtg

SEQ ID NO: 296564 - DNA, 30 bp, Artificial Sequence
  Synthetic oligonucleotide
actgagaataaacagcccgtacagggcgtg

SEQ ID NO: 296565 - DNA, 31 bp, Artificial Sequence
  Synthetic oligonucleotide
gaacgctcagaacggtcccatactgggcgtg

SEQ ID NO: 296566 - DNA, 30 bp, Artificial Sequence
  Synthetic oligonucleotide
cctttgctttgtgggccttctcatggcgtg

SEQ ID NO: 296567 - DNA, 30 bp, Artificial Sequence
  Synthetic oligonucleotide
aaaagttcctgggggagatctgatggcgtg

SEQ ID NO: 296568 - DNA, 30 bp, Artificial Sequence
  Synthetic oligonucleotide
ttacctgaccgtgaaagcaaacctggcgtg

SEQ ID NO: 296569 - DNA, 30 bp, Artificial Sequence
  Synthetic oligonucleotide
ttacgtctgacgctcatctaagcgtgcgtg

SEQ ID NO: 296570 - DNA, 30 bp, Artificial Sequence
  Synthetic oligonucleotide
aaactacccagataggacggcctgtgcgtg

SEQ ID NO: 296571 - DNA, 30 bp, Artificial Sequence
  Synthetic oligonucleotide
gtccgtagatccgtccaatttgtgtgcgtg

SEQ ID NO: 296572 - DNA, 30 bp, Artificial Sequence
  Synthetic oligonucleotide
ttaatgggaacgaaataatcgttttgcgtg

SEQ ID NO: 296573 - DNA, 30 bp, Artificial Sequence
  Synthetic oligonucleotide
gacattttctgggtaccgattcgaatcgtg

SEQ ID NO: 296574 - DNA, 30 bp, Artificial Sequence
  Synthetic oligonucleotide
ccttgacaagtatcactacatcacatcgtg

SEQ ID NO: 296575 - DNA, 30 bp, Artificial Sequence
  Synthetic oligonucleotide
tgcgacgaaggcgtgaaggtggacatcgtg

SEQ ID NO: 296576 - DNA, 30 bp, Artificial Sequence
  Synthetic oligonucleotide
accatgccttgttcggtcctgccactcgtg

SEQ ID NO: 296577 - DNA, 30 bp, Artificial Sequence
  Synthetic oligonucleotide
tatacgttaaacgtatatcccttcctcgtg

SEQ ID NO: 296578 - DNA, 30 bp, Artificial Sequence
  Synthetic oligonucleotide
agttgcgttggcacatggaagtatctcgtg

SEQ ID NO: 296579 - DNA, 30 bp, Artificial Sequence
  Synthetic oligonucleotide
atcaaacgtattgtcagacgacgcgtcgtg

SEQ ID NO: 296580 - DNA, 30 bp, Artificial Sequence
  Synthetic oligonucleotide
gtaggggtacggacggagccgtgcgtcgtg

SEQ ID NO: 296581 - DNA, 30 bp, Artificial Sequence
  Synthetic oligonucleotide
ttcctgttgtcaattgtgagctaggtcgtg

SEQ ID NO: 296582 - DNA, 30 bp, Artificial Sequence
  Synthetic oligonucleotide
agaattagcggtagcatgtagtctgtcgtg

SEQ ID NO: 296583 - DNA, 30 bp, Artificial Sequence
  Synthetic oligonucleotide
tctctgtgccacgataccgagcaattcgtg

SEQ ID NO: 296584 - DNA, 30 bp, Artificial Sequence
  Synthetic oligonucleotide
atatactaataacgaactatgtaattcgtg

SEQ ID NO: 296585 - DNA, 30 bp, Artificial Sequence
  Synthetic oligonucleotide
atgcccgctgcctatgagaaccccttcgtg

SEQ ID NO: 296586 - DNA, 30 bp, Artificial Sequence
  Synthetic oligonucleotide
gagagcgataggatacaaggcttcttcgtg

SEQ ID NO: 296587 - DNA, 30 bp, Artificial Sequence
  Synthetic oligonucleotide
tcggacccacttagcctatcgttcttcgtg

SEQ ID NO: 296588 - DNA, 30 bp, Artificial Sequence
  Synthetic oligonucleotide
ggttttcgcgtcagtggagtgcagttcgtg

SEQ ID NO: 296589 - DNA, 30 bp, Artificial Sequence
  Synthetic oligonucleotide
cagatgcctcggagtttggtgtgtttcgtg

SEQ ID NO: 296590 - DNA, 30 bp, Artificial Sequence
  Synthetic oligonucleotide
aatcacccggtccgtgaaattttcaaggtg

SEQ ID NO: 296591 - DNA, 30 bp, Artificial Sequence
  Synthetic oligonucleotide
caacataacggagcaggaccatcgaaggtg

SEQ ID NO: 296592 - DNA, 30 bp, Artificial Sequence
  Synthetic oligonucleotide
tgcctaccacgtttaatggcacctaaggtg

SEQ ID NO: 296593 - DNA, 30 bp, Artificial Sequence
  Synthetic oligonucleotide
agctatgattacctccagctaagtaaggtg

SEQ ID NO: 296594 - DNA, 30 bp, Artificial Sequence
  Synthetic oligonucleotide
gcaaacggtccataaaaattgtaacaggtg

SEQ ID NO: 296595 - DNA, 28 bp, Artificial Sequence
  Synthetic oligonucleotide
ccaaatgatagccataaatgtacaggtg

SEQ ID NO: 296596 - DNA, 30 bp, Artificial Sequence
  Synthetic oligonucleotide
acacttagtgtaggttacacaagccaggtg

SEQ ID NO: 296597 - DNA, 30 bp, Artificial Sequence
  Synthetic oligonucleotide
tctgtccgtacgctggtgccatgccaggtg

SEQ ID NO: 296598 - DNA, 30 bp, Artificial Sequence
  Synthetic oligonucleotide
tggggaagtacacaggatgtagcagaggtg

SEQ ID NO: 296599 - DNA, 30 bp, Artificial Sequence
  Synthetic oligonucleotide
tgctaagtccacacatccactacggaggtg

SEQ ID NO: 296600 - DNA, 30 bp, Artificial Sequence
  Synthetic oligonucleotide
tctcttagtcagcacaattaatcggaggtg

SEQ ID NO: 296601 - DNA, 30 bp, Artificial Sequence
  Synthetic oligonucleotide
cgtttggtatttatgagggtgcgtgaggtg

SEQ ID NO: 296602 - DNA, 30 bp, Artificial Sequence
  Synthetic oligonucleotide
ggtctatatcagatatgagggattgaggtg

SEQ ID NO: 296603 - DNA, 30 bp, Artificial Sequence
  Synthetic oligonucleotide
ggtgtcgggttacttgagaagaaataggtg

SEQ ID NO: 296604 - DNA, 30 bp, Artificial Sequence
  Synthetic oligonucleotide
aatgtattacgtatagatcggaaataggtg

SEQ ID NO: 296605 - DNA, 30 bp, Artificial Sequence
  Synthetic oligonucleotide
agcccgaaaccttggaagtcggaataggtg

SEQ ID NO: 296606 - DNA, 30 bp, Artificial Sequence
  Synthetic oligonucleotide
gacgtagagggggccaccttactataggtg

SEQ ID NO: 296607 - DNA, 30 bp, Artificial Sequence
  Synthetic oligonucleotide
taaaatgggacatcaggatgcaactaggtg

SEQ ID NO: 296608 - DNA, 30 bp, Artificial Sequence
  Synthetic oligonucleotide
aacagttcctcgatgattatagactaggtg

SEQ ID NO: 296609 - DNA, 30 bp, Artificial Sequence
  Synthetic oligonucleotide
ctaataaatacgcttcagatctgctaggtg

SEQ ID NO: 296610 - DNA, 30 bp, Artificial Sequence
  Synthetic oligonucleotide
atatacgatcaacattcccctcggtaggtg

SEQ ID NO: 296611 - DNA, 30 bp, Artificial Sequence
  Synthetic oligonucleotide
agggctcttggagaacactataattaggtg

SEQ ID NO: 296612 - DNA, 30 bp, Artificial Sequence
  Synthetic oligonucleotide
aaaggatcctggtttcaacaatattaggtg

SEQ ID NO: 296613 - DNA, 30 bp, Artificial Sequence
  Synthetic oligonucleotide
gaattgaccctacgtttggggtgttaggtg

SEQ ID NO: 296614 - DNA, 30 bp, Artificial Sequence
  Synthetic oligonucleotide
acatgagtctgtctttctatagaaacggtg

SEQ ID NO: 296615 - DNA, 30 bp, Artificial Sequence
  Synthetic oligonucleotide
atacaaacagttgtttcagcatatacggtg

SEQ ID NO: 296616 - DNA, 30 bp, Artificial Sequence
  Synthetic oligonucleotide
ctggacccaaggaattaatcgcttacggtg

SEQ ID NO: 296617 - DNA, 30 bp, Artificial Sequence
  Synthetic oligonucleotide
gccatgaagtgacaccttcattttacggtg

SEQ ID NO: 296618 - DNA, 30 bp, Artificial Sequence
  Synthetic oligonucleotide
cgtatcctaggtttgtgtaaattaccggtg

SEQ ID NO: 296619 - DNA, 30 bp, Artificial Sequence
  Synthetic oligonucleotide
gggaaactggagcactacccagcgccggtg

SEQ ID NO: 296620 - DNA, 30 bp, Artificial Sequence
  Synthetic oligonucleotide
ttcatgccaatctaaaaaggacatccggtg

SEQ ID NO: 296621 - DNA, 30 bp, Artificial Sequence
  Synthetic oligonucleotide
ttaacgatcccgtatccgtttcatccggtg

SEQ ID NO: 296622 - DNA, 30 bp, Artificial Sequence
  Synthetic oligonucleotide
gattacattgtatatggtggccgatcggtg

SEQ ID NO: 296623 - DNA, 30 bp, Artificial Sequence
  Synthetic oligonucleotide
tttaagtacctggtgtcttgattatcggtg

SEQ ID NO: 296624 - DNA, 30 bp, Artificial Sequence
  Synthetic oligonucleotide
gcagtgacattctccgacagcttatcggtg

SEQ ID NO: 296625 - DNA, 30 bp, Artificial Sequence
  Synthetic oligonucleotide
aagttattggcctactacaaccgctcggtg

SEQ ID NO: 296626 - DNA, 30 bp, Artificial Sequence
  Synthetic oligonucleotide
agcttttttgttcacctaaacatctcggtg

SEQ ID NO: 296627 - DNA, 30 bp, Artificial Sequence
  Synthetic oligonucleotide
atatgcgcggtcaggagaccagtctcggtg

SEQ ID NO: 296628 - DNA, 30 bp, Artificial Sequence
  Synthetic oligonucleotide
aaacactgccgatgagtctataattcggtg

SEQ ID NO: 296629 - DNA, 30 bp, Artificial Sequence
  Synthetic oligonucleotide
ggaaacgcgcagcagataagaatgagggtg

SEQ ID NO: 296630 - DNA, 30 bp, Artificial Sequence
  Synthetic oligonucleotide
gctgcggggtaatgcactgcgcttagggtg

SEQ ID NO: 296631 - DNA, 30 bp, Artificial Sequence
  Synthetic oligonucleotide
ccaatgctctgtactggtacatttagggtg

SEQ ID NO: 296632 - DNA, 30 bp, Artificial Sequence
  Synthetic oligonucleotide
aacgccgtgttctacagcggacgacgggtg

SEQ ID NO: 296633 - DNA, 30 bp, Artificial Sequence
  Synthetic oligonucleotide
ggtggtggcttttctagaaatggacgggtg

SEQ ID NO: 296634 - DNA, 30 bp, Artificial Sequence
  Synthetic oligonucleotide
gtcgtatttgttcacatggtgttacgggtg

SEQ ID NO: 296635 - DNA, 30 bp, Artificial Sequence
  Synthetic oligonucleotide
cttaaaatgtggattcacgcgcatcgggtg

SEQ ID NO: 296636 - DNA, 30 bp, Artificial Sequence
  Synthetic oligonucleotide
cctatgttctggttacaattcgctcgggtg

SEQ ID NO: 296637 - DNA, 30 bp, Artificial Sequence
  Synthetic oligonucleotide
acgctatagtatatatgatattacggggtg

SEQ ID NO: 296638 - DNA, 30 bp, Artificial Sequence
  Synthetic oligonucleotide
ggggctgtccagcaagcttggcccggggtg

SEQ ID NO: 296639 - DNA, 30 bp, Artificial Sequence
  Synthetic oligonucleotide
gtaacggtagccacctatcggtagggggtg

SEQ ID NO: 296640 - DNA, 30 bp, Artificial Sequence
  Synthetic oligonucleotide
taagataagtatggccctgggcggggggtg

SEQ ID NO: 296641 - DNA, 30 bp, Artificial Sequence
  Synthetic oligonucleotide
gcatatgatttcgtttcataagtgggggtg

SEQ ID NO: 296642 - DNA, 30 bp, Artificial Sequence
  Synthetic oligonucleotide
ggatcttacagcattcgataatctggggtg

SEQ ID NO: 296643 - DNA, 30 bp, Artificial Sequence
  Synthetic oligonucleotide
ggctctgcggcgcggacgtgacaatgggtg

SEQ ID NO: 296644 - DNA, 30 bp, Artificial Sequence
  Synthetic oligonucleotide
gtcctgagtagacgaatctgtacctgggtg

SEQ ID NO: 296645 - DNA, 30 bp, Artificial Sequence
  Synthetic oligonucleotide
tggcgtaggataaataggcatggctgggtg

SEQ ID NO: 296646 - DNA, 30 bp, Artificial Sequence
  Synthetic oligonucleotide
gtgctctaattcgccactattcggtgggtg

SEQ ID NO: 296647 - DNA, 30 bp, Artificial Sequence
  Synthetic oligonucleotide
aaaagtggcaggcctaccattttttgggtg

SEQ ID NO: 296648 - DNA, 30 bp, Artificial Sequence
  Synthetic oligonucleotide
cagcggtgagagggtaatattaaaatggtg

SEQ ID NO: 296649 - DNA, 30 bp, Artificial Sequence
  Synthetic oligonucleotide
ataattcgaagttgggggtggttaatggtg

SEQ ID NO: 296650 - DNA, 30 bp, Artificial Sequence
  Synthetic oligonucleotide
acgctcgtgctgtcctagtagaccatggtg

SEQ ID NO: 296651 - DNA, 30 bp, Artificial Sequence
  Synthetic oligonucleotide
atgcattcgaatatatataacgcgatggtg

SEQ ID NO: 296652 - DNA, 30 bp, Artificial Sequence
  Synthetic oligonucleotide
gtcccgactgggtcttgggccaatatggtg

SEQ ID NO: 296653 - DNA, 30 bp, Artificial Sequence
  Synthetic oligonucleotide
aaagtgctgatggcgcgtgactcactggtg

SEQ ID NO: 296654 - DNA, 30 bp, Artificial Sequence
  Synthetic oligonucleotide
aacggccctgcacagctataattactggtg

SEQ ID NO: 296655 - DNA, 30 bp, Artificial Sequence
  Synthetic oligonucleotide
gtacaatcgttctattgtaccggcctggtg

SEQ ID NO: 296656 - DNA, 30 bp, Artificial Sequence
  Synthetic oligonucleotide
agaaacgggttaccgatgaaggtcctggtg

SEQ ID NO: 296657 - DNA, 30 bp, Artificial Sequence
  Synthetic oligonucleotide
taaaggaggggcaagaggccggatctggtg

SEQ ID NO: 296658 - DNA, 30 bp, Artificial Sequence
  Synthetic oligonucleotide
cccagccgattggttgcatagtcagtggtg

SEQ ID NO: 296659 - DNA, 30 bp, Artificial Sequence
  Synthetic oligonucleotide
ttgcccgggcgagttcaccgggccgtggtg

SEQ ID NO: 296660 - DNA, 30 bp, Artificial Sequence
  Synthetic oligonucleotide
ttgtgccgaatttaaaacccgcgcgtggtg

SEQ ID NO: 296661 - DNA, 34 bp, Artificial Sequence
  Synthetic oligonucleotide
aactacccaagtaactagcagtaggcgggtggtg

SEQ ID NO: 296662 - DNA, 30 bp, Artificial Sequence
  Synthetic oligonucleotide
atgcaatagactcaccacgtagctgtggtg

SEQ ID NO: 296663 - DNA, 30 bp, Artificial Sequence
  Synthetic oligonucleotide
gtgttccggaagggctcgcagtaattggtg

SEQ ID NO: 296664 - DNA, 30 bp, Artificial Sequence
  Synthetic oligonucleotide
acggtcgcaatataaaaatgtacattggtg

SEQ ID NO: 296665 - DNA, 30 bp, Artificial Sequence
  Synthetic oligonucleotide
aaacttaagaggttcacgtattgcttggtg

SEQ ID NO: 296666 - DNA, 30 bp, Artificial Sequence
  Synthetic oligonucleotide
gcataataacacaatggtaatgtgttggtg

SEQ ID NO: 296667 - DNA, 30 bp, Artificial Sequence
  Synthetic oligonucleotide
gcaattcaagagatgcaaaccgatttggtg

SEQ ID NO: 296668 - DNA, 30 bp, Artificial Sequence
  Synthetic oligonucleotide
tacccacaacggttataaaaggatttggtg

SEQ ID NO: 296669 - DNA, 30 bp, Artificial Sequence
  Synthetic oligonucleotide
atgaaaaggggtatgcaacgtggtttggtg

SEQ ID NO: 296670 - DNA, 30 bp, Artificial Sequence
  Synthetic oligonucleotide
ggacaatgggccgatactggtcagaatgtg

SEQ ID NO: 296671 - DNA, 31 bp, Artificial Sequence
  Synthetic oligonucleotide
cgcacgtagattttatacttctgggaatgtg

SEQ ID NO: 296672 - DNA, 30 bp, Artificial Sequence
  Synthetic oligonucleotide
gctacaagactgcgcgcatagaataatgtg

SEQ ID NO: 296673 - DNA, 30 bp, Artificial Sequence
  Synthetic oligonucleotide
cattgatgtaaaagtttcttggataatgtg

SEQ ID NO: 296674 - DNA, 30 bp, Artificial Sequence
  Synthetic oligonucleotide
accccgtgggtagattacatgcaacatgtg

SEQ ID NO: 296675 - DNA, 30 bp, Artificial Sequence
  Synthetic oligonucleotide
ccaactgggccaagttcacccagacatgtg

SEQ ID NO: 296676 - DNA, 31 bp, Artificial Sequence
  Synthetic oligonucleotide
tgtcaaacttagagtcttttgtcgccatgtg

SEQ ID NO: 296677 - DNA, 30 bp, Artificial Sequence
  Synthetic oligonucleotide
gtatcagatagagatattgttaatcatgtg

SEQ ID NO: 296678 - DNA, 30 bp, Artificial Sequence
  Synthetic oligonucleotide
gagcattcgcttgataaagggcacgatgtg

SEQ ID NO: 296679 - DNA, 30 bp, Artificial Sequence
  Synthetic oligonucleotide
ccttgaatgtaacgcgcttagatggatgtg

SEQ ID NO: 296680 - DNA, 30 bp, Artificial Sequence
  Synthetic oligonucleotide
tttggggtacttatcgttcgataatatgtg

SEQ ID NO: 296681 - DNA, 30 bp, Artificial Sequence
  Synthetic oligonucleotide
ctaaggcaggttgatttctagatatatgtg

SEQ ID NO: 296682 - DNA, 30 bp, Artificial Sequence
  Synthetic oligonucleotide
attgatcttggcattacgggggagtatgtg

SEQ ID NO: 296683 - DNA, 30 bp, Artificial Sequence
  Synthetic oligonucleotide
aactgagtataatagcggggggagtatgtg

SEQ ID NO: 296684 - DNA, 30 bp, Artificial Sequence
  Synthetic oligonucleotide
agttgccaactaggttaaccaacgtatgtg

SEQ ID NO: 296685 - DNA, 30 bp, Artificial Sequence
  Synthetic oligonucleotide
atggccaggagaaacatcggggcgtatgtg

SEQ ID NO: 296686 - DNA, 30 bp, Artificial Sequence
  Synthetic oligonucleotide
cgggagaggtaagagcagtacgacactgtg

SEQ ID NO: 296687 - DNA, 30 bp, Artificial Sequence
  Synthetic oligonucleotide
atgccgtatatcaacccgactcgcactgtg

SEQ ID NO: 296688 - DNA, 30 bp, Artificial Sequence
  Synthetic oligonucleotide
gtagtggctacagttggctgagtcactgtg

SEQ ID NO: 296689 - DNA, 30 bp, Artificial Sequence
  Synthetic oligonucleotide
cagggtccaatatctactccccggactgtg

SEQ ID NO: 296690 - DNA, 30 bp, Artificial Sequence
  Synthetic oligonucleotide
ttgaaaacttaagtccgagtagcacctgtg

SEQ ID NO: 296691 - DNA, 30 bp, Artificial Sequence
  Synthetic oligonucleotide
atagacggagcagaacgtccctcacctgtg

SEQ ID NO: 296692 - DNA, 30 bp, Artificial Sequence
  Synthetic oligonucleotide
tgcataagaacgcaatcattctcacctgtg

SEQ ID NO: 296693 - DNA, 30 bp, Artificial Sequence
  Synthetic oligonucleotide
cctgggattaagagaccgcagatgcctgtg

SEQ ID NO: 296694 - DNA, 30 bp, Artificial Sequence
  Synthetic oligonucleotide
aacaatagactaagcctggaagtgcctgtg

SEQ ID NO: 296695 - DNA, 30 bp, Artificial Sequence
  Synthetic oligonucleotide
tatacctaagtatggtctgacccggctgtg

SEQ ID NO: 296696 - DNA, 30 bp, Artificial Sequence
  Synthetic oligonucleotide
gctatactggaatacaattagtatgctgtg

SEQ ID NO: 296697 - DNA, 30 bp, Artificial Sequence
  Synthetic oligonucleotide
tcgactttcgtatcgaagggccctgctgtg

SEQ ID NO: 296698 - DNA, 30 bp, Artificial Sequence
  Synthetic oligonucleotide
cattcaaaaacggccggtccgacatctgtg

SEQ ID NO: 296699 - DNA, 30 bp, Artificial Sequence
  Synthetic oligonucleotide
ggtcagcgacaagcccgcacaagaagtgtg

SEQ ID NO: 296700 - DNA, 30 bp, Artificial Sequence
  Synthetic oligonucleotide
atcttagcagacttcattggatgaagtgtg

SEQ ID NO: 296701 - DNA, 30 bp, Artificial Sequence
  Synthetic oligonucleotide
aaaccttcgccctggccaaaggacagtgtg

SEQ ID NO: 296702 - DNA, 30 bp, Artificial Sequence
  Synthetic oligonucleotide
aagaacggtcaggtaacgatgcgcagtgtg

SEQ ID NO: 296703 - DNA, 30 bp, Artificial Sequence
  Synthetic oligonucleotide
ccttagggcccggctaagacttatcgtgtg

SEQ ID NO: 296704 - DNA, 30 bp, Artificial Sequence
  Synthetic oligonucleotide
tctggtccgccgcgagaaaaaattcgtgtg

SEQ ID NO: 296705 - DNA, 30 bp, Artificial Sequence
  Synthetic oligonucleotide
cggacctgagtgcgccgtacttacggtgtg

SEQ ID NO: 296706 - DNA, 30 bp, Artificial Sequence
  Synthetic oligonucleotide
gcggataacagctgtgtaaagcgtggtgtg

SEQ ID NO: 296707 - DNA, 30 bp, Artificial Sequence
  Synthetic oligonucleotide
actacgcagctgttgagttaagttggtgtg

SEQ ID NO: 296708 - DNA, 29 bp, Artificial Sequence
  Synthetic oligonucleotide
ccctaagggcttggtaagcagcctgtgtg

SEQ ID NO: 296709 - DNA, 30 bp, Artificial Sequence
  Synthetic oligonucleotide
aagcgtgtttccgggaacgcgaagtgtgtg

SEQ ID NO: 296710 - DNA, 30 bp, Artificial Sequence
  Synthetic oligonucleotide
tcaccaagatgggtgagtttacagtgtgtg

SEQ ID NO: 296711 - DNA, 30 bp, Artificial Sequence
  Synthetic oligonucleotide
cgctgatcgccaacacgaaattggtgtgtg

SEQ ID NO: 296712 - DNA, 30 bp, Artificial Sequence
  Synthetic oligonucleotide
cggttgcacgggccaggacaagaaattgtg

SEQ ID NO: 296713 - DNA, 30 bp, Artificial Sequence
  Synthetic oligonucleotide
aaaagcgctcatttaatatagataattgtg

SEQ ID NO: 296714 - DNA, 30 bp, Artificial Sequence
  Synthetic oligonucleotide
gtgacaatgatgttcagttaatagattgtg

SEQ ID NO: 296715 - DNA, 30 bp, Artificial Sequence
  Synthetic oligonucleotide
cgctcatcttgttgagacatttcgattgtg

SEQ ID NO: 296716 - DNA, 30 bp, Artificial Sequence
  Synthetic oligonucleotide
cagcgtagtcctaattgatcgaggattgtg

SEQ ID NO: 296717 - DNA, 30 bp, Artificial Sequence
  Synthetic oligonucleotide
tatttgccgtacaatcggaaggatattgtg

SEQ ID NO: 296718 - DNA, 30 bp, Artificial Sequence
  Synthetic oligonucleotide
gagtaactattattttgcatggatattgtg

SEQ ID NO: 296719 - DNA, 30 bp, Artificial Sequence
  Synthetic oligonucleotide
gacaaatcagagagcttctaccctattgtg

SEQ ID NO: 296720 - DNA, 30 bp, Artificial Sequence
  Synthetic oligonucleotide
ttgcatctctcccgacgggaaacccttgtg

SEQ ID NO: 296721 - DNA, 30 bp, Artificial Sequence
  Synthetic oligonucleotide
ctcatggcagcaggagatcatccccttgtg

SEQ ID NO: 296722 - DNA, 30 bp, Artificial Sequence
  Synthetic oligonucleotide
tgtggttgcaggtttattttagcccttgtg

SEQ ID NO: 296723 - DNA, 30 bp, Artificial Sequence
  Synthetic oligonucleotide
atatggctgtccagaattgagtgcgttgtg

SEQ ID NO: 296724 - DNA, 30 bp, Artificial Sequence
  Synthetic oligonucleotide
gcttgcgttatgatgtaagcgacggttgtg

SEQ ID NO: 296725 - DNA, 30 bp, Artificial Sequence
  Synthetic oligonucleotide
ctaaggatatagaagcatccaaaatttgtg

SEQ ID NO: 296726 - DNA, 30 bp, Artificial Sequence
  Synthetic oligonucleotide
gtcacgcctgagttttccatggactttgtg

SEQ ID NO: 296727 - DNA, 30 bp, Artificial Sequence
  Synthetic oligonucleotide
acagtaggacaatttaatgcgcggtttgtg

SEQ ID NO: 296728 - DNA, 30 bp, Artificial Sequence
  Synthetic oligonucleotide
ttatgggtgcgctatataaggagttttgtg

SEQ ID NO: 296729 - DNA, 30 bp, Artificial Sequence
  Synthetic oligonucleotide
attcggggtagggccacgatcagcaaattg

SEQ ID NO: 296730 - DNA, 30 bp, Artificial Sequence
  Synthetic oligonucleotide
cgacggccccgatgacgctggagcaaattg

SEQ ID NO: 296731 - DNA, 30 bp, Artificial Sequence
  Synthetic oligonucleotide
cccctcaaagtgtaaaatcggtataaattg

SEQ ID NO: 296732 - DNA, 30 bp, Artificial Sequence
  Synthetic oligonucleotide
gtattagctctgtaaaacgcgactaaattg

SEQ ID NO: 296733 - DNA, 30 bp, Artificial Sequence
  Synthetic oligonucleotide
aatggcacatttagtctgcggagacaattg

SEQ ID NO: 296734 - DNA, 30 bp, Artificial Sequence
  Synthetic oligonucleotide
taccggccgagatcccttggccgacaattg

SEQ ID NO: 296735 - DNA, 30 bp, Artificial Sequence
  Synthetic oligonucleotide
attctctacgactgggtaggcttccaattg

SEQ ID NO: 296736 - DNA, 30 bp, Artificial Sequence
  Synthetic oligonucleotide
gcttaggtcgtcaccgctgttgaagaattg

SEQ ID NO: 296737 - DNA, 30 bp, Artificial Sequence
  Synthetic oligonucleotide
cctccgggatatctaactgtgtgagaattg

SEQ ID NO: 296738 - DNA, 29 bp, Artificial Sequence
  Synthetic oligonucleotide
tctgtccttactccagatgggacgaattg

SEQ ID NO: 296739 - DNA, 30 bp, Artificial Sequence
  Synthetic oligonucleotide
atccatgtagtaggctcatctggcgaattg

SEQ ID NO: 296740 - DNA, 30 bp, Artificial Sequence
  Synthetic oligonucleotide
cgtcttgaatgtaccttgaaggaggaattg

SEQ ID NO: 296741 - DNA, 30 bp, Artificial Sequence
  Synthetic oligonucleotide
caagattcgcggtgctatgcgggtgaattg

SEQ ID NO: 296742 - DNA, 30 bp, Artificial Sequence
  Synthetic oligonucleotide
cgcaccctctacccatttataaaataattg

SEQ ID NO: 296743 - DNA, 30 bp, Artificial Sequence
  Synthetic oligonucleotide
atgcctagagttagaatcacataataattg

SEQ ID NO: 296744 - DNA, 30 bp, Artificial Sequence
  Synthetic oligonucleotide
ctggtctatcgatcatgctatatataattg

SEQ ID NO: 296745 - DNA, 30 bp, Artificial Sequence
  Synthetic oligonucleotide
ggaatagggccatagctcagttgctaattg

SEQ ID NO: 296746 - DNA, 30 bp, Artificial Sequence
  Synthetic oligonucleotide
cgctaggaaagcggctgcttccagtaattg

SEQ ID NO: 296747 - DNA, 30 bp, Artificial Sequence
  Synthetic oligonucleotide
aacgcttacgtcaagaactgggcgtaattg

SEQ ID NO: 296748 - DNA, 30 bp, Artificial Sequence
  Synthetic oligonucleotide
actcaagtcccagactttaggatgtaattg

SEQ ID NO: 296749 - DNA, 30 bp, Artificial Sequence
  Synthetic oligonucleotide
aaaagcggctggtaccttttgttcacattg

SEQ ID NO: 296750 - DNA, 30 bp, Artificial Sequence
  Synthetic oligonucleotide
tagtccgcgcagacgggcagtgcgacattg

SEQ ID NO: 296751 - DNA, 30 bp, Artificial Sequence
  Synthetic oligonucleotide
taatttgctcagacggggcttacaccattg

SEQ ID NO: 296752 - DNA, 30 bp, Artificial Sequence
  Synthetic oligonucleotide
ccgggagatttcggtggtattggcccattg

SEQ ID NO: 296753 - DNA, 30 bp, Artificial Sequence
  Synthetic oligonucleotide
aactcggttttgtaagtggagaagccattg

SEQ ID NO: 296754 - DNA, 30 bp, Artificial Sequence
  Synthetic oligonucleotide
gccacagtgtccgcccccgttgtgccattg

SEQ ID NO: 296755 - DNA, 30 bp, Artificial Sequence
  Synthetic oligonucleotide
tgtttgcgcaacccgtgacgtaccgcattg

SEQ ID NO: 296756 - DNA, 30 bp, Artificial Sequence
  Synthetic oligonucleotide
agataatctggtgccgacattggcgcattg

SEQ ID NO: 296757 - DNA, 30 bp, Artificial Sequence
  Synthetic oligonucleotide
gtgccagacaatgcttcagcacaggcattg

SEQ ID NO: 296758 - DNA, 30 bp, Artificial Sequence
  Synthetic oligonucleotide
ctaagtgcatgtgtgaaattgacggcattg

SEQ ID NO: 296759 - DNA, 30 bp, Artificial Sequence
  Synthetic oligonucleotide
tgaagaaacacggcctcggtacatgcattg

SEQ ID NO: 296760 - DNA, 30 bp, Artificial Sequence
  Synthetic oligonucleotide
gtgacaagttgttcactctggaaatcattg

SEQ ID NO: 296761 - DNA, 30 bp, Artificial Sequence
  Synthetic oligonucleotide
agcgctggggaccacattcaacactcattg

SEQ ID NO: 296762 - DNA, 30 bp, Artificial Sequence
  Synthetic oligonucleotide
gacgtgcgggggccgtttgcggactcattg

SEQ ID NO: 296763 - DNA, 30 bp, Artificial Sequence
  Synthetic oligonucleotide
aagcggccgatctatggaaggggctcattg

SEQ ID NO: 296764 - DNA, 30 bp, Artificial Sequence
  Synthetic oligonucleotide
ctcggtaaagccttcgatggatcgtcattg

SEQ ID NO: 296765 - DNA, 30 bp, Artificial Sequence
  Synthetic oligonucleotide
tacgtgctcccctcaatgccactgtcattg

SEQ ID NO: 296766 - DNA, 30 bp, Artificial Sequence
  Synthetic oligonucleotide
aatgggcccgctaagatctaaataagattg

SEQ ID NO: 296767 - DNA, 30 bp, Artificial Sequence
  Synthetic oligonucleotide
cccgcgtacgagccagtagaaagcagattg

SEQ ID NO: 296768 - DNA, 30 bp, Artificial Sequence
  Synthetic oligonucleotide
cctatcgaaaaaaggcgtccgggcagattg

SEQ ID NO: 296769 - DNA, 30 bp, Artificial Sequence
  Synthetic oligonucleotide
aagaacatgcttttgtttagcctcagattg

SEQ ID NO: 296770 - DNA, 30 bp, Artificial Sequence
  Synthetic oligonucleotide
tatacagtaagttaagagagaccgagattg

SEQ ID NO: 296771 - DNA, 30 bp, Artificial Sequence
  Synthetic oligonucleotide
gatgcccttcatggagggttacggagattg

SEQ ID NO: 296772 - DNA, 31 bp, Artificial Sequence
  Synthetic oligonucleotide
gaccagtcagggccagggtgggtttagattg

SEQ ID NO: 296773 - DNA, 30 bp, Artificial Sequence
  Synthetic oligonucleotide
tcccatgcttggttttagtgcgcacgattg

SEQ ID NO: 296774 - DNA, 30 bp, Artificial Sequence
  Synthetic oligonucleotide
cactgcatacgctaaagcccatagcgattg

SEQ ID NO: 296775 - DNA, 30 bp, Artificial Sequence
  Synthetic oligonucleotide
tgggcagactcagcaagcacaatgcgattg

SEQ ID NO: 296776 - DNA, 30 bp, Artificial Sequence
  Synthetic oligonucleotide
atggtatcgtacccagggagcggtcgattg

SEQ ID NO: 296777 - DNA, 30 bp, Artificial Sequence
  Synthetic oligonucleotide
ttcacaattaaacgcaataactacggattg

SEQ ID NO: 296778 - DNA, 30 bp, Artificial Sequence
  Synthetic oligonucleotide
caagccggtagattagaaccttagggattg

SEQ ID NO: 296779 - DNA, 30 bp, Artificial Sequence
  Synthetic oligonucleotide
tccacgtaaccgcgtggtacgctctgattg

SEQ ID NO: 296780 - DNA, 30 bp, Artificial Sequence
  Synthetic oligonucleotide
tatattgattaatcacgtataaagtgattg

SEQ ID NO: 296781 - DNA, 31 bp, Artificial Sequence
  Synthetic oligonucleotide
tgcccacgatcacctggtaacttagtgattg

SEQ ID NO: 296782 - DNA, 30 bp, Artificial Sequence
  Synthetic oligonucleotide
atttggacagtaagtccaagagtgtgattg

SEQ ID NO: 296783 - DNA, 30 bp, Artificial Sequence
  Synthetic oligonucleotide
gcttggacctttcgcatagcaaattgattg

SEQ ID NO: 296784 - DNA, 30 bp, Artificial Sequence
  Synthetic oligonucleotide
agatctgaggtcacatcaccatcttgattg

SEQ ID NO: 296785 - DNA, 30 bp, Artificial Sequence
  Synthetic oligonucleotide
gagcattacaaggattgacagaccatattg

SEQ ID NO: 296786 - DNA, 30 bp, Artificial Sequence
  Synthetic oligonucleotide
aataaatgtacgagacagtcagagatattg

SEQ ID NO: 296787 - DNA, 30 bp, Artificial Sequence
  Synthetic oligonucleotide
aaaaactagacgcatctagaagacctattg

SEQ ID NO: 296788 - DNA, 30 bp, Artificial Sequence
  Synthetic oligonucleotide
attagccgccactataaggacgacctattg

SEQ ID NO: 296789 - DNA, 30 bp, Artificial Sequence
  Synthetic oligonucleotide
tcagcacggttgggaggtacgtgtctattg

SEQ ID NO: 296790 - DNA, 30 bp, Artificial Sequence
  Synthetic oligonucleotide
tagtattcacttggacacatggttctattg

SEQ ID NO: 296791 - DNA, 30 bp, Artificial Sequence
  Synthetic oligonucleotide
ctttggtctcagcaagattcccaagtattg

SEQ ID NO: 296792 - DNA, 30 bp, Artificial Sequence
  Synthetic oligonucleotide
aactgcccccacaagaaatatgtagtattg

SEQ ID NO: 296793 - DNA, 30 bp, Artificial Sequence
  Synthetic oligonucleotide
ttgatgcgcaaaggcgggatttacgtattg

SEQ ID NO: 296794 - DNA, 30 bp, Artificial Sequence
  Synthetic oligonucleotide
gtcatgaatttggcaagattttccgtattg

SEQ ID NO: 296795 - DNA, 30 bp, Artificial Sequence
  Synthetic oligonucleotide
aaacactgggctacgtcgtttctcgtattg

SEQ ID NO: 296796 - DNA, 30 bp, Artificial Sequence
  Synthetic oligonucleotide
gtgaacgggttcacaagcgtgaatgtattg

SEQ ID NO: 296797 - DNA, 30 bp, Artificial Sequence
  Synthetic oligonucleotide
caacttcgtgaggtaactacccctgtattg

SEQ ID NO: 296798 - DNA, 30 bp, Artificial Sequence
  Synthetic oligonucleotide
ccaccaggtcatcgtatttgaacattattg

SEQ ID NO: 296799 - DNA, 30 bp, Artificial Sequence
  Synthetic oligonucleotide
atgaagagccgcgaagcttcatccttattg

SEQ ID NO: 296800 - DNA, 30 bp, Artificial Sequence
  Synthetic oligonucleotide
aaactgcaagaacaaactgaaggcttattg

SEQ ID NO: 296801 - DNA, 30 bp, Artificial Sequence
  Synthetic oligonucleotide
taggggaaataacaatgttttttcttattg

SEQ ID NO: 296802 - DNA, 30 bp, Artificial Sequence
  Synthetic oligonucleotide
taaagactaggcggctaagacaagttattg

SEQ ID NO: 296803 - DNA, 30 bp, Artificial Sequence
  Synthetic oligonucleotide
taaaagggacagggtttatgtaatttattg

SEQ ID NO: 296804 - DNA, 30 bp, Artificial Sequence
  Synthetic oligonucleotide
ggtaacgcaggaagcaatcaagtaaacttg

SEQ ID NO: 296805 - DNA, 30 bp, Artificial Sequence
  Synthetic oligonucleotide
cacaacgctatcaaatttgaacttaacttg

SEQ ID NO: 296806 - DNA, 30 bp, Artificial Sequence
  Synthetic oligonucleotide
acttcttaagttaaagaccgtgttaacttg

SEQ ID NO: 296807 - DNA, 30 bp, Artificial Sequence
  Synthetic oligonucleotide
tcaggttcaacaacgatttagtaacacttg

SEQ ID NO: 296808 - DNA, 30 bp, Artificial Sequence
  Synthetic oligonucleotide
ggcaagcagagtgtgttacagaaccacttg

SEQ ID NO: 296809 - DNA, 30 bp, Artificial Sequence
  Synthetic oligonucleotide
cgttttatgtgggttttctactaccacttg

SEQ ID NO: 296810 - DNA, 30 bp, Artificial Sequence
  Synthetic oligonucleotide
gtgagacgtatccaacggtgcagccacttg

SEQ ID NO: 296811 - DNA, 30 bp, Artificial Sequence
  Synthetic oligonucleotide
tttccgtggaaacaggtaaagactcacttg

SEQ ID NO: 296812 - DNA, 30 bp, Artificial Sequence
  Synthetic oligonucleotide
ctagggcgcttgtagcttagcgaagacttg

SEQ ID NO: 296813 - DNA, 30 bp, Artificial Sequence
  Synthetic oligonucleotide
gggcctcatcacgttgggtgcgaggacttg

SEQ ID NO: 296814 - DNA, 30 bp, Artificial Sequence
  Synthetic oligonucleotide
tggctttgggtctaaacgcgtacggacttg

SEQ ID NO: 296815 - DNA, 30 bp, Artificial Sequence
  Synthetic oligonucleotide
ccgagtgtacttcgctacatcgtatacttg

SEQ ID NO: 296816 - DNA, 30 bp, Artificial Sequence
  Synthetic oligonucleotide
atgctgtcccgcactcctttccattacttg

SEQ ID NO: 296817 - DNA, 30 bp, Artificial Sequence
  Synthetic oligonucleotide
caccgggaaatgaacttagtcgaaaccttg

SEQ ID NO: 296818 - DNA, 30 bp, Artificial Sequence
  Synthetic oligonucleotide
cttgcggcaggttccagattacgaaccttg

SEQ ID NO: 296819 - DNA, 30 bp, Artificial Sequence
  Synthetic oligonucleotide
ccgaatttaacatcgctcccaggaaccttg

SEQ ID NO: 296820 - DNA, 30 bp, Artificial Sequence
  Synthetic oligonucleotide
ggatttggatagagtcgcaagataaccttg

SEQ ID NO: 296821 - DNA, 30 bp, Artificial Sequence
  Synthetic oligonucleotide
agcagtatagagtggcacagtaccaccttg

SEQ ID NO: 296822 - DNA, 30 bp, Artificial Sequence
  Synthetic oligonucleotide
gctcgactgcgcaattcaattcctcccttg

SEQ ID NO: 296823 - DNA, 30 bp, Artificial Sequence
  Synthetic oligonucleotide
tggccaccagtagtctggcgatgtcccttg

SEQ ID NO: 296824 - DNA, 30 bp, Artificial Sequence
  Synthetic oligonucleotide
gatactatattttgaatattggaagccttg

SEQ ID NO: 296825 - DNA, 30 bp, Artificial Sequence
  Synthetic oligonucleotide
ggatccactgcagataactgctgagccttg

SEQ ID NO: 296826 - DNA, 30 bp, Artificial Sequence
  Synthetic oligonucleotide
cgtccatatgggtccaacggaaaggccttg

SEQ ID NO: 296827 - DNA, 30 bp, Artificial Sequence
  Synthetic oligonucleotide
ggaagccgggagctgatgggagcggccttg

SEQ ID NO: 296828 - DNA, 30 bp, Artificial Sequence
  Synthetic oligonucleotide
actttcgggttggtctagcagtgggccttg

SEQ ID NO: 296829 - DNA, 30 bp, Artificial Sequence
  Synthetic oligonucleotide
cgtgataggttagggttgggggctgccttg

SEQ ID NO: 296830 - DNA, 30 bp, Artificial Sequence
  Synthetic oligonucleotide
ctcgtacgttggcagattacaattgccttg

SEQ ID NO: 296831 - DNA, 31 bp, Artificial Sequence
  Synthetic oligonucleotide
tgtgtacccaataatcaaatcaatatccttg

SEQ ID NO: 296832 - DNA, 30 bp, Artificial Sequence
  Synthetic oligonucleotide
cgatccacagagcttacagccggaagcttg

SEQ ID NO: 296833 - DNA, 30 bp, Artificial Sequence
  Synthetic oligonucleotide
gtcctccgccgttgtgttaaaatcagcttg

SEQ ID NO: 296834 - DNA, 30 bp, Artificial Sequence
  Synthetic oligonucleotide
acaccatacgttactaagttcgtcagcttg

SEQ ID NO: 296835 - DNA, 30 bp, Artificial Sequence
  Synthetic oligonucleotide
gggtcaatcggcaaacttgtcacgagcttg

SEQ ID NO: 296836 - DNA, 30 bp, Artificial Sequence
  Synthetic oligonucleotide
accagcgcgtctgccttatagacgagcttg

SEQ ID NO: 296837 - DNA, 30 bp, Artificial Sequence
  Synthetic oligonucleotide
gcatcgtgttctcccgaagctacgagcttg

SEQ ID NO: 296838 - DNA, 30 bp, Artificial Sequence
  Synthetic oligonucleotide
ttgattcattagtgggtccaattgagcttg

SEQ ID NO: 296839 - DNA, 30 bp, Artificial Sequence
  Synthetic oligonucleotide
agatgtttttctttctgaccagttagcttg

SEQ ID NO: 296840 - DNA, 30 bp, Artificial Sequence
  Synthetic oligonucleotide
ttccaacatctgcctctcatgttacgcttg

SEQ ID NO: 296841 - DNA, 30 bp, Artificial Sequence
  Synthetic oligonucleotide
aaaaatacaaaagataagcccgagcgcttg

SEQ ID NO: 296842 - DNA, 30 bp, Artificial Sequence
  Synthetic oligonucleotide
aacggggtcagctaaaagcgccatcgcttg

SEQ ID NO: 296843 - DNA, 30 bp, Artificial Sequence
  Synthetic oligonucleotide
ttaggacctgtgataggcagcgatcgcttg

SEQ ID NO: 296844 - DNA, 30 bp, Artificial Sequence
  Synthetic oligonucleotide
cattagtaacatgtggggcggtctcgcttg

SEQ ID NO: 296845 - DNA, 30 bp, Artificial Sequence
  Synthetic oligonucleotide
agggtatgggcttcgcgaccgcacggcttg

SEQ ID NO: 296846 - DNA, 30 bp, Artificial Sequence
  Synthetic oligonucleotide
gttctcaaccgagtcaagctagacggcttg

SEQ ID NO: 296847 - DNA, 30 bp, Artificial Sequence
  Synthetic oligonucleotide
acaccttatagagtagccgctcgcggcttg

SEQ ID NO: 296848 - DNA, 30 bp, Artificial Sequence
  Synthetic oligonucleotide
tttgtttttcggatacgtgcgcagggcttg

SEQ ID NO: 296849 - DNA, 30 bp, Artificial Sequence
  Synthetic oligonucleotide
tgaagagttcgcgacgatttaaaatgcttg

SEQ ID NO: 296850 - DNA, 30 bp, Artificial Sequence
  Synthetic oligonucleotide
aattgagttcgaggcgtagtacaatgcttg

SEQ ID NO: 296851 - DNA, 30 bp, Artificial Sequence
  Synthetic oligonucleotide
cttgacccacgactggccctaccatgcttg

SEQ ID NO: 296852 - DNA, 30 bp, Artificial Sequence
  Synthetic oligonucleotide
cgcggccagtaatgatagacaacctgcttg

SEQ ID NO: 296853 - DNA, 30 bp, Artificial Sequence
  Synthetic oligonucleotide
gccgctaaacgtgatcataggtcctgcttg

SEQ ID NO: 296854 - DNA, 30 bp, Artificial Sequence
  Synthetic oligonucleotide
tgacttcaattttctattggacggtgcttg

SEQ ID NO: 296855 - DNA, 30 bp, Artificial Sequence
  Synthetic oligonucleotide
cggctcgtctgctcgtgatctcccatcttg

SEQ ID NO: 296856 - DNA, 30 bp, Artificial Sequence
  Synthetic oligonucleotide
gagggaacattgacgtcgcatagcatcttg

SEQ ID NO: 296857 - DNA, 30 bp, Artificial Sequence
  Synthetic oligonucleotide
cttccctaatgaacgtttggtctcatcttg

SEQ ID NO: 296858 - DNA, 30 bp, Artificial Sequence
  Synthetic oligonucleotide
atccgagacgagttgtttgagacgatcttg

SEQ ID NO: 296859 - DNA, 30 bp, Artificial Sequence
  Synthetic oligonucleotide
gatacggtatataggttataccggatcttg

SEQ ID NO: 296860 - DNA, 30 bp, Artificial Sequence
  Synthetic oligonucleotide
cctaaacatattaagatcggccggatcttg

SEQ ID NO: 296861 - DNA, 30 bp, Artificial Sequence
  Synthetic oligonucleotide
gccatgtgccggtccacactgcatatcttg

SEQ ID NO: 296862 - DNA, 30 bp, Artificial Sequence
  Synthetic oligonucleotide
gcaattaaaccctaatacgattcactcttg

SEQ ID NO: 296863 - DNA, 30 bp, Artificial Sequence
  Synthetic oligonucleotide
ctcacaaagtttgctgccatgagactcttg

SEQ ID NO: 296864 - DNA, 30 bp, Artificial Sequence
  Synthetic oligonucleotide
aaaaggcagcctttttctggatacctcttg

SEQ ID NO: 296865 - DNA, 30 bp, Artificial Sequence
  Synthetic oligonucleotide
tgttatgcgatgctataggtgactctcttg

SEQ ID NO: 296866 - DNA, 30 bp, Artificial Sequence
  Synthetic oligonucleotide
gccaacacgcggcacgctatgaaagtcttg

SEQ ID NO: 296867 - DNA, 30 bp, Artificial Sequence
  Synthetic oligonucleotide
taggagtaggcagtgaagcgctccgtcttg

SEQ ID NO: 296868 - DNA, 31 bp, Artificial Sequence
  Synthetic oligonucleotide
gttagccggttagtgtacacctgaggtcttg

SEQ ID NO: 296869 - DNA, 30 bp, Artificial Sequence
  Synthetic oligonucleotide
ggcgaacgcaacagactacctatggtcttg

SEQ ID NO: 296870 - DNA, 30 bp, Artificial Sequence
  Synthetic oligonucleotide
caaaagtcctcaagcaggtacttggtcttg

SEQ ID NO: 296871 - DNA, 30 bp, Artificial Sequence
  Synthetic oligonucleotide
ggcggaacgatcgtctacagttcattcttg

SEQ ID NO: 296872 - DNA, 30 bp, Artificial Sequence
  Synthetic oligonucleotide
ataacgtacgtcttttctgatttattcttg

SEQ ID NO: 296873 - DNA, 30 bp, Artificial Sequence
  Synthetic oligonucleotide
ttagaactgcccaaggatgggatgttcttg

SEQ ID NO: 296874 - DNA, 30 bp, Artificial Sequence
  Synthetic oligonucleotide
gctatgttatgaacctagggcgatttcttg

SEQ ID NO: 296875 - DNA, 30 bp, Artificial Sequence
  Synthetic oligonucleotide
atgaaggcttgaaaaaagcgtgatttcttg

SEQ ID NO: 296876 - DNA, 30 bp, Artificial Sequence
  Synthetic oligonucleotide
cctctagcacaacgtcttggcagtttcttg

SEQ ID NO: 296877 - DNA, 30 bp, Artificial Sequence
  Synthetic oligonucleotide
ggcgaggttaatcaacgtttcaaaaagttg

SEQ ID NO: 296878 - DNA, 31 bp, Artificial Sequence
  Synthetic oligonucleotide
gaatatatgattgtcaccacacgaaaagttg

SEQ ID NO: 296879 - DNA, 30 bp, Artificial Sequence
  Synthetic oligonucleotide
caagtgtggattactctggcatacaagttg

SEQ ID NO: 296880 - DNA, 30 bp, Artificial Sequence
  Synthetic oligonucleotide
aacgtgtcactgagttcaggcagcaagttg

SEQ ID NO: 296881 - DNA, 30 bp, Artificial Sequence
  Synthetic oligonucleotide
tctaatcatctggcttttgaattcaagttg

SEQ ID NO: 296882 - DNA, 30 bp, Artificial Sequence
  Synthetic oligonucleotide
ttaatccgttactcttttacgccgaagttg

SEQ ID NO: 296883 - DNA, 30 bp, Artificial Sequence
  Synthetic oligonucleotide
gactgttcaaggtaccggtaaaggaagttg

SEQ ID NO: 296884 - DNA, 30 bp, Artificial Sequence
  Synthetic oligonucleotide
tacgcacgacatgtcctggtttggaagttg

SEQ ID NO: 296885 - DNA, 30 bp, Artificial Sequence
  Synthetic oligonucleotide
gctggtcggggagggttgttggtgaagttg

SEQ ID NO: 296886 - DNA, 30 bp, Artificial Sequence
  Synthetic oligonucleotide
atcctggagtgaacgaatatgcataagttg

SEQ ID NO: 296887 - DNA, 30 bp, Artificial Sequence
  Synthetic oligonucleotide
tcacttctctccgtgttgatgagtaagttg

SEQ ID NO: 296888 - DNA, 30 bp, Artificial Sequence
  Synthetic oligonucleotide
atatggaactagtgggaggttgaacagttg

SEQ ID NO: 296889 - DNA, 30 bp, Artificial Sequence
  Synthetic oligonucleotide
tcgatagctttccttcatgattgacagttg

SEQ ID NO: 296890 - DNA, 30 bp, Artificial Sequence
  Synthetic oligonucleotide
gccaaaatgtatgagccaattttacagttg

SEQ ID NO: 296891 - DNA, 30 bp, Artificial Sequence
  Synthetic oligonucleotide
gctcgtagaccgtgcagggataaccagttg

SEQ ID NO: 296892 - DNA, 30 bp, Artificial Sequence
  Synthetic oligonucleotide
tttcctatagaggcttagtcccgccagttg

SEQ ID NO: 296893 - DNA, 29 bp, Artificial Sequence
  Synthetic oligonucleotide
gtacctaattgagaagaatcatgcagttg

SEQ ID NO: 296894 - DNA, 30 bp, Artificial Sequence
  Synthetic oligonucleotide
gtcttagtcctgaaaggcggagatcagttg

SEQ ID NO: 296895 - DNA, 30 bp, Artificial Sequence
  Synthetic oligonucleotide
ccaacaagggaatatttcaaccacgagttg

SEQ ID NO: 296896 - DNA, 30 bp, Artificial Sequence
  Synthetic oligonucleotide
attcgaatcatccattccagcacggagttg

SEQ ID NO: 296897 - DNA, 30 bp, Artificial Sequence
  Synthetic oligonucleotide
aacaagcatattgctcctcctagggagttg

SEQ ID NO: 296898 - DNA, 30 bp, Artificial Sequence
  Synthetic oligonucleotide
gcccgtcacgtgtctaccccggtggagttg

SEQ ID NO: 296899 - DNA, 30 bp, Artificial Sequence
  Synthetic oligonucleotide
gagagcagttatcgctatctgcttgagttg

SEQ ID NO: 296900 - DNA, 30 bp, Artificial Sequence
  Synthetic oligonucleotide
acacctagtaagggatatggttgatagttg

SEQ ID NO: 296901 - DNA, 30 bp, Artificial Sequence
  Synthetic oligonucleotide
tgtcggaccacccacggatcatactagttg

SEQ ID NO: 296902 - DNA, 30 bp, Artificial Sequence
  Synthetic oligonucleotide
taacagtgggcagtgggttctctctagttg

SEQ ID NO: 296903 - DNA, 30 bp, Artificial Sequence
  Synthetic oligonucleotide
tagtccacttattccgacactgtgtagttg

SEQ ID NO: 296904 - DNA, 30 bp, Artificial Sequence
  Synthetic oligonucleotide
tttacaacgctaggataattcttgtagttg

SEQ ID NO: 296905 - DNA, 30 bp, Artificial Sequence
  Synthetic oligonucleotide
gcgttctcattaagacggattggttagttg

SEQ ID NO: 296906 - DNA, 30 bp, Artificial Sequence
  Synthetic oligonucleotide
gtcaatgcaggaataatgtcgcaaacgttg

SEQ ID NO: 296907 - DNA, 31 bp, Artificial Sequence
  Synthetic oligonucleotide
cccctataattcggctgacttttaaacgttg

SEQ ID NO: 296908 - DNA, 30 bp, Artificial Sequence
  Synthetic oligonucleotide
tctttacgagtggctcgtagtcacacgttg

SEQ ID NO: 296909 - DNA, 30 bp, Artificial Sequence
  Synthetic oligonucleotide
attttgagtaggcacgcatggaggacgttg

SEQ ID NO: 296910 - DNA, 30 bp, Artificial Sequence
  Synthetic oligonucleotide
ggacgacttcgggctacaaactgcccgttg

SEQ ID NO: 296911 - DNA, 31 bp, Artificial Sequence
  Synthetic oligonucleotide
ttcggcgtcgagcataatcgaaatgccgttg

SEQ ID NO: 296912 - DNA, 30 bp, Artificial Sequence
  Synthetic oligonucleotide
agtcggacgaccgtcgtaccgagagcgttg

SEQ ID NO: 296913 - DNA, 30 bp, Artificial Sequence
  Synthetic oligonucleotide
gattggcttcctaacttgatcgaggcgttg

SEQ ID NO: 296914 - DNA, 30 bp, Artificial Sequence
  Synthetic oligonucleotide
gttgactaaatggaacgagctctggcgttg

SEQ ID NO: 296915 - DNA, 30 bp, Artificial Sequence
  Synthetic oligonucleotide
aagggattgggcctgaagataaaatcgttg

SEQ ID NO: 296916 - DNA, 30 bp, Artificial Sequence
  Synthetic oligonucleotide
cggttgcggtacgacctccttaaatcgttg

SEQ ID NO: 296917 - DNA, 30 bp, Artificial Sequence
  Synthetic oligonucleotide
taacactgaggtacgcaccattgatcgttg

SEQ ID NO: 296918 - DNA, 30 bp, Artificial Sequence
  Synthetic oligonucleotide
attaagcgagcttgaaaatgggggtcgttg

SEQ ID NO: 296919 - DNA, 30 bp, Artificial Sequence
  Synthetic oligonucleotide
ctggtatttggactcattacatacaggttg

SEQ ID NO: 296920 - DNA, 30 bp, Artificial Sequence
  Synthetic oligonucleotide
tcggagcagggatcagcatttcagaggttg

SEQ ID NO: 296921 - DNA, 30 bp, Artificial Sequence
  Synthetic oligonucleotide
gcggaccacccagaagcttcggataggttg

SEQ ID NO: 296922 - DNA, 30 bp, Artificial Sequence
  Synthetic oligonucleotide
ccggggtttcgagacgttaaggctaggttg

SEQ ID NO: 296923 - DNA, 30 bp, Artificial Sequence
  Synthetic oligonucleotide
gggctatgccgtgtaatcgtaaaacggttg

SEQ ID NO: 296924 - DNA, 30 bp, Artificial Sequence
  Synthetic oligonucleotide
gtgggttctcatgcgtggttcaaacggttg

SEQ ID NO: 296925 - DNA, 30 bp, Artificial Sequence
  Synthetic oligonucleotide
acatttacatttggggtctgaggacggttg

SEQ ID NO: 296926 - DNA, 30 bp, Artificial Sequence
  Synthetic oligonucleotide
cgtccataagtcggggcatctatacggttg

SEQ ID NO: 296927 - DNA, 30 bp, Artificial Sequence
  Synthetic oligonucleotide
aatcggcacagaaggccgcttaagcggttg

SEQ ID NO: 296928 - DNA, 30 bp, Artificial Sequence
  Synthetic oligonucleotide
tatagtacgttccaggttgatcagcggttg

SEQ ID NO: 296929 - DNA, 30 bp, Artificial Sequence
  Synthetic oligonucleotide
accatcgaatacgaacctagcacagggttg

SEQ ID NO: 296930 - DNA, 30 bp, Artificial Sequence
  Synthetic oligonucleotide
gaatgcccttatgagcagataaacgggttg

SEQ ID NO: 296931 - DNA, 30 bp, Artificial Sequence
  Synthetic oligonucleotide
aagcggctctagacgacgttacacgggttg

SEQ ID NO: 296932 - DNA, 30 bp, Artificial Sequence
  Synthetic oligonucleotide
ttcggtaaaggagtgttacgagacgggttg

SEQ ID NO: 296933 - DNA, 30 bp, Artificial Sequence
  Synthetic oligonucleotide
acgataggctttgtaggaactcgcgggttg

SEQ ID NO: 296934 - DNA, 30 bp, Artificial Sequence
  Synthetic oligonucleotide
ctggactgcggtctgcaccgtggcgggttg

SEQ ID NO: 296935 - DNA, 30 bp, Artificial Sequence
  Synthetic oligonucleotide
aatgtcgattgggactgcctttcggggttg

SEQ ID NO: 296936 - DNA, 30 bp, Artificial Sequence
  Synthetic oligonucleotide
ggcgacccccccgcgatctctttggggttg

SEQ ID NO: 296937 - DNA, 30 bp, Artificial Sequence
  Synthetic oligonucleotide
aggcggcattgctaatggtacaatgggttg

SEQ ID NO: 296938 - DNA, 30 bp, Artificial Sequence
  Synthetic oligonucleotide
ggtgcgggggccaatgcctttagtgggttg

SEQ ID NO: 296939 - DNA, 30 bp, Artificial Sequence
  Synthetic oligonucleotide
ggggagtcataggatatacggattgggttg

SEQ ID NO: 296940 - DNA, 30 bp, Artificial Sequence
  Synthetic oligonucleotide
gcttcgctaagagtctccggttcatggttg

SEQ ID NO: 296941 - DNA, 30 bp, Artificial Sequence
  Synthetic oligonucleotide
aaatctccgcgttttagcagtatatggttg

SEQ ID NO: 296942 - DNA, 30 bp, Artificial Sequence
  Synthetic oligonucleotide
gttggagaaagtctccagatggcctggttg

SEQ ID NO: 296943 - DNA, 30 bp, Artificial Sequence
  Synthetic oligonucleotide
aggatccaggccagtcgcaagcgctggttg

SEQ ID NO: 296944 - DNA, 30 bp, Artificial Sequence
  Synthetic oligonucleotide
agattcctagcagtctttgatgtctggttg

SEQ ID NO: 296945 - DNA, 30 bp, Artificial Sequence
  Synthetic oligonucleotide
gcgattcggcccggataatggttctggttg

SEQ ID NO: 296946 - DNA, 30 bp, Artificial Sequence
  Synthetic oligonucleotide
caagtgattctgccggaggctgtttggttg

SEQ ID NO: 296947 - DNA, 30 bp, Artificial Sequence
  Synthetic oligonucleotide
aagcgtttcacagactgtgtgggaatgttg

SEQ ID NO: 296948 - DNA, 30 bp, Artificial Sequence
  Synthetic oligonucleotide
cgttagcgctattaggggtgcctaatgttg

SEQ ID NO: 296949 - DNA, 30 bp, Artificial Sequence
  Synthetic oligonucleotide
ttctggtgagcagcgaaaaattagatgttg

SEQ ID NO: 296950 - DNA, 30 bp, Artificial Sequence
  Synthetic oligonucleotide
gagagatacccggtaaatctgcggatgttg

SEQ ID NO: 296951 - DNA, 30 bp, Artificial Sequence
  Synthetic oligonucleotide
gtggtacatcggtgcaaatggcatatgttg

SEQ ID NO: 296952 - DNA, 30 bp, Artificial Sequence
  Synthetic oligonucleotide
gggcgaggacacagaacccacgttatgttg

SEQ ID NO: 296953 - DNA, 30 bp, Artificial Sequence
  Synthetic oligonucleotide
agcaagtcttgtcggttccgctcactgttg

SEQ ID NO: 296954 - DNA, 30 bp, Artificial Sequence
  Synthetic oligonucleotide
tcatctctgggtcggtctcgatgcctgttg

SEQ ID NO: 296955 - DNA, 30 bp, Artificial Sequence
  Synthetic oligonucleotide
tggtcagcaatttcgtctttttcgctgttg

SEQ ID NO: 296956 - DNA, 30 bp, Artificial Sequence
  Synthetic oligonucleotide
acctccagccgagagaattattggctgttg

SEQ ID NO: 296957 - DNA, 30 bp, Artificial Sequence
  Synthetic oligonucleotide
aataaaggtgggctcaaaagaaatctgttg

SEQ ID NO: 296958 - DNA, 30 bp, Artificial Sequence
  Synthetic oligonucleotide
ttatgggccccaccatatcgagaagtgttg

SEQ ID NO: 296959 - DNA, 30 bp, Artificial Sequence
  Synthetic oligonucleotide
ccctatacggatgcggagggcatagtgttg

SEQ ID NO: 296960 - DNA, 30 bp, Artificial Sequence
  Synthetic oligonucleotide
tgatgtgtctgactggtgcacctagtgttg

SEQ ID NO: 296961 - DNA, 30 bp, Artificial Sequence
  Synthetic oligonucleotide
atcgacataacctcggtcatggtagtgttg

SEQ ID NO: 296962 - DNA, 30 bp, Artificial Sequence
  Synthetic oligonucleotide
caggaactaagctttgccgtattagtgttg

SEQ ID NO: 296963 - DNA, 30 bp, Artificial Sequence
  Synthetic oligonucleotide
tctcgaaaaatcacgcagtttggggtgttg

SEQ ID NO: 296964 - DNA, 30 bp, Artificial Sequence
  Synthetic oligonucleotide
aagcgttatgcgaactgatgtctggtgttg

SEQ ID NO: 296965 - DNA, 30 bp, Artificial Sequence
  Synthetic oligonucleotide
gtcggacgaggcacctgatttctggtgttg

SEQ ID NO: 296966 - DNA, 30 bp, Artificial Sequence
  Synthetic oligonucleotide
caagatcaattttaacctgtgcatgtgttg

SEQ ID NO: 296967 - DNA, 30 bp, Artificial Sequence
  Synthetic oligonucleotide
aattccagccgtgacctaggaaaattgttg

SEQ ID NO: 296968 - DNA, 30 bp, Artificial Sequence
  Synthetic oligonucleotide
aaccagatcaatgaaattctcacattgttg

SEQ ID NO: 296969 - DNA, 30 bp, Artificial Sequence
  Synthetic oligonucleotide
ccacctgggagattagattccaccttgttg

SEQ ID NO: 296970 - DNA, 30 bp, Artificial Sequence
  Synthetic oligonucleotide
ttgggcgcctcatggtataccagcttgttg

SEQ ID NO: 296971 - DNA, 30 bp, Artificial Sequence
  Synthetic oligonucleotide
gtcaattggggtccacttatttagttgttg

SEQ ID NO: 296972 - DNA, 30 bp, Artificial Sequence
  Synthetic oligonucleotide
aatcgttggtgaggcaactggtctttgttg

SEQ ID NO: 296973 - DNA, 30 bp, Artificial Sequence
  Synthetic oligonucleotide
aaacggcgtttttagccgaaagaaaatttg

SEQ ID NO: 296974 - DNA, 30 bp, Artificial Sequence
  Synthetic oligonucleotide
cccctatacctacgttgaaccgtaaatttg

SEQ ID NO: 296975 - DNA, 30 bp, Artificial Sequence
  Synthetic oligonucleotide
caaggcatcaggggcagccttcggaatttg

SEQ ID NO: 296976 - DNA, 30 bp, Artificial Sequence
  Synthetic oligonucleotide
ggacacccatgtttatgggaggtgaatttg

SEQ ID NO: 296977 - DNA, 30 bp, Artificial Sequence
  Synthetic oligonucleotide
gaagattcgtcttgagcctggccgcatttg

SEQ ID NO: 296978 - DNA, 30 bp, Artificial Sequence
  Synthetic oligonucleotide
agtcgacacgttgaaacagtttggcatttg

SEQ ID NO: 296979 - DNA, 30 bp, Artificial Sequence
  Synthetic oligonucleotide
gtgcatcaaaggtgcgaggggactcatttg

SEQ ID NO: 296980 - DNA, 30 bp, Artificial Sequence
  Synthetic oligonucleotide
agcgtgctgaagcttattcgttctcatttg

SEQ ID NO: 296981 - DNA, 30 bp, Artificial Sequence
  Synthetic oligonucleotide
tccgtacgttgcttagaatgttctcatttg

SEQ ID NO: 296982 - DNA, 30 bp, Artificial Sequence
  Synthetic oligonucleotide
gtcggcaacgtggatagttgctgtcatttg

SEQ ID NO: 296983 - DNA, 30 bp, Artificial Sequence
  Synthetic oligonucleotide
cgatcgcgaatacctacatggtttcatttg

SEQ ID NO: 296984 - DNA, 30 bp, Artificial Sequence
  Synthetic oligonucleotide
tgaaagtcatggataccgttgtaagatttg

SEQ ID NO: 296985 - DNA, 30 bp, Artificial Sequence
  Synthetic oligonucleotide
tgtgctcaattcaacctatttatcgatttg

SEQ ID NO: 296986 - DNA, 30 bp, Artificial Sequence
  Synthetic oligonucleotide
ccagcataacgcgagtacatccaggatttg

SEQ ID NO: 296987 - DNA, 30 bp, Artificial Sequence
  Synthetic oligonucleotide
ataacctatgagacccctaactaggatttg

SEQ ID NO: 296988 - DNA, 30 bp, Artificial Sequence
  Synthetic oligonucleotide
ccaggccgtacgcaaactgtctgggatttg

SEQ ID NO: 296989 - DNA, 30 bp, Artificial Sequence
  Synthetic oligonucleotide
tacaatggctgacagcacagcgtttatttg

SEQ ID NO: 296990 - DNA, 30 bp, Artificial Sequence
  Synthetic oligonucleotide
ggatggagatcgctaccatatccaactttg

SEQ ID NO: 296991 - DNA, 30 bp, Artificial Sequence
  Synthetic oligonucleotide
tactcagaccctggattcgctataactttg

SEQ ID NO: 296992 - DNA, 30 bp, Artificial Sequence
  Synthetic oligonucleotide
aaaatcagcgacaaggtcacggccactttg

SEQ ID NO: 296993 - DNA, 30 bp, Artificial Sequence
  Synthetic oligonucleotide
gagcgtcgtcccgctccacaacaacctttg

SEQ ID NO: 296994 - DNA, 30 bp, Artificial Sequence
  Synthetic oligonucleotide
tgggaactccatgtgaccgctagacctttg

SEQ ID NO: 296995 - DNA, 30 bp, Artificial Sequence
  Synthetic oligonucleotide
gtacgggaaacgaattataacttacctttg

SEQ ID NO: 296996 - DNA, 30 bp, Artificial Sequence
  Synthetic oligonucleotide
agttcaatagagataagaaaatgccctttg

SEQ ID NO: 296997 - DNA, 30 bp, Artificial Sequence
  Synthetic oligonucleotide
aatgatctgagtttactctactgtcctttg

SEQ ID NO: 296998 - DNA, 30 bp, Artificial Sequence
  Synthetic oligonucleotide
cccaagtgctccggagattctattcctttg

SEQ ID NO: 296999 - DNA, 30 bp, Artificial Sequence
  Synthetic oligonucleotide
tgcgcctcagtctggggcgtggttcctttg

SEQ ID NO: 297000 - DNA, 30 bp, Artificial Sequence
  Synthetic oligonucleotide
tgtatgtggcaggtaagaaacacagctttg

SEQ ID NO: 297001 - DNA, 30 bp, Artificial Sequence
  Synthetic oligonucleotide
gttcgcggagctagttacggaagagctttg

SEQ ID NO: 297002 - DNA, 30 bp, Artificial Sequence
  Synthetic oligonucleotide
aacaatcgggttacatcgcaagtcgctttg

SEQ ID NO: 297003 - DNA, 30 bp, Artificial Sequence
  Synthetic oligonucleotide
agacgaggccgagtgactccggcggctttg

SEQ ID NO: 297004 - DNA, 30 bp, Artificial Sequence
  Synthetic oligonucleotide
tcgattgcttagagcacccttttggctttg

SEQ ID NO: 297005 - DNA, 30 bp, Artificial Sequence
  Synthetic oligonucleotide
ggcgtcacctcgggtcaatacaatgctttg

SEQ ID NO: 297006 - DNA, 30 bp, Artificial Sequence
  Synthetic oligonucleotide
atctagtaggcggacccctcatatgctttg

SEQ ID NO: 297007 - DNA, 30 bp, Artificial Sequence
  Synthetic oligonucleotide
atcgctccagcagaatcccctcgtgctttg

SEQ ID NO: 297008 - DNA, 30 bp, Artificial Sequence
  Synthetic oligonucleotide
cggtctcagtagcaggtgtcctcctctttg

SEQ ID NO: 297009 - DNA, 30 bp, Artificial Sequence
  Synthetic oligonucleotide
aggaagatacgccaagcaggcggctctttg

SEQ ID NO: 297010 - DNA, 30 bp, Artificial Sequence
  Synthetic oligonucleotide
gagttaagttgtgctccgaaactctctttg

SEQ ID NO: 297011 - DNA, 30 bp, Artificial Sequence
  Synthetic oligonucleotide
aaactgtgccttcagggtaatgcgtctttg

SEQ ID NO: 297012 - DNA, 30 bp, Artificial Sequence
  Synthetic oligonucleotide
tgccttagcggatccaaatactcgtctttg

SEQ ID NO: 297013 - DNA, 30 bp, Artificial Sequence
  Synthetic oligonucleotide
caggagcaggcctaagtctaacggtctttg

SEQ ID NO: 297014 - DNA, 30 bp, Artificial Sequence
  Synthetic oligonucleotide
gttaagtggaaacgagactatcattctttg

SEQ ID NO: 297015 - DNA, 30 bp, Artificial Sequence
  Synthetic oligonucleotide
gagttactgggccgccgtgggcgaagtttg

SEQ ID NO: 297016 - DNA, 30 bp, Artificial Sequence
  Synthetic oligonucleotide
gctcgcgcgcgggcgaattcttgaagtttg

SEQ ID NO: 297017 - DNA, 30 bp, Artificial Sequence
  Synthetic oligonucleotide
ctgtagcgttggatacaattcctaagtttg

SEQ ID NO: 297018 - DNA, 30 bp, Artificial Sequence
  Synthetic oligonucleotide
ggcacgagagggagccaacctcacagtttg

SEQ ID NO: 297019 - DNA, 30 bp, Artificial Sequence
  Synthetic oligonucleotide
ctattaaggtaagcatcaatcaccagtttg

SEQ ID NO: 297020 - DNA, 30 bp, Artificial Sequence
  Synthetic oligonucleotide
aattaaagtgctatagagcaatccagtttg

SEQ ID NO: 297021 - DNA, 30 bp, Artificial Sequence
  Synthetic oligonucleotide
atgattatttcgtgaagtgcacaacgtttg

SEQ ID NO: 297022 - DNA, 30 bp, Artificial Sequence
  Synthetic oligonucleotide
ctgcgggaaacgccccggggagaacgtttg

SEQ ID NO: 297023 - DNA, 30 bp, Artificial Sequence
  Synthetic oligonucleotide
agctcgtgtacggttaggaaatcacgtttg

SEQ ID NO: 297024 - DNA, 30 bp, Artificial Sequence
  Synthetic oligonucleotide
atatagcagtaccactgaggccgacgtttg

SEQ ID NO: 297025 - DNA, 30 bp, Artificial Sequence
  Synthetic oligonucleotide
gcccaggatgtctcctggaagctacgtttg

SEQ ID NO: 297026 - DNA, 30 bp, Artificial Sequence
  Synthetic oligonucleotide
atctttaaggaaaccagcgtcccgcgtttg

SEQ ID NO: 297027 - DNA, 30 bp, Artificial Sequence
  Synthetic oligonucleotide
tcaggacccgaagtggcccacttgcgtttg

SEQ ID NO: 297028 - DNA, 30 bp, Artificial Sequence
  Synthetic oligonucleotide
tgtggtagggtgtgctttttgtgtcgtttg

SEQ ID NO: 297029 - DNA, 30 bp, Artificial Sequence
  Synthetic oligonucleotide
gctgacccactatacctcgagaaaggtttg

SEQ ID NO: 297030 - DNA, 30 bp, Artificial Sequence
  Synthetic oligonucleotide
gcattgtgcttataattttacataggtttg

SEQ ID NO: 297031 - DNA, 30 bp, Artificial Sequence
  Synthetic oligonucleotide
atcgactccaaaacacgcagttacggtttg

SEQ ID NO: 297032 - DNA, 30 bp, Artificial Sequence
  Synthetic oligonucleotide
atcgggccgtaacttaagaataagggtttg

SEQ ID NO: 297033 - DNA, 30 bp, Artificial Sequence
  Synthetic oligonucleotide
aagcatacccatctgactgggcagggtttg

SEQ ID NO: 297034 - DNA, 30 bp, Artificial Sequence
  Synthetic oligonucleotide
ttagtcgcgtaggtacagggagcgggtttg

SEQ ID NO: 297035 - DNA, 30 bp, Artificial Sequence
  Synthetic oligonucleotide
taaaacagggtccaccaccaacttggtttg

SEQ ID NO: 297036 - DNA, 30 bp, Artificial Sequence
  Synthetic oligonucleotide
ttaatcacctgggaaagatgtctatgtttg

SEQ ID NO: 297037 - DNA, 30 bp, Artificial Sequence
  Synthetic oligonucleotide
tgtctagtataaggccatgccatgtgtttg

SEQ ID NO: 297038 - DNA, 30 bp, Artificial Sequence
  Synthetic oligonucleotide
tttcaataaataatcatgtctacttgtttg

SEQ ID NO: 297039 - DNA, 30 bp, Artificial Sequence
  Synthetic oligonucleotide
atcgaaacctttgctccgattccttgtttg

SEQ ID NO: 297040 - DNA, 30 bp, Artificial Sequence
  Synthetic oligonucleotide
cacacataacaataatcgggggaaattttg

SEQ ID NO: 297041 - DNA, 30 bp, Artificial Sequence
  Synthetic oligonucleotide
cacttctgtacaaggtacgtgccaattttg

SEQ ID NO: 297042 - DNA, 30 bp, Artificial Sequence
  Synthetic oligonucleotide
ttacggttcacacccccgacgttaattttg

SEQ ID NO: 297043 - DNA, 30 bp, Artificial Sequence
  Synthetic oligonucleotide
aagtcaggtcaataagtaaggaggattttg

SEQ ID NO: 297044 - DNA, 30 bp, Artificial Sequence
  Synthetic oligonucleotide
caaacataccgcaccaacaaggtacttttg

SEQ ID NO: 297045 - DNA, 30 bp, Artificial Sequence
  Synthetic oligonucleotide
cccgcgtcattgaggaattcgtgccttttg

SEQ ID NO: 297046 - DNA, 30 bp, Artificial Sequence
  Synthetic oligonucleotide
atgcaactccgaccgcccaccgagcttttg

SEQ ID NO: 297047 - DNA, 30 bp, Artificial Sequence
  Synthetic oligonucleotide
gtgtgtaaaagacaaaaacgtgggcttttg

SEQ ID NO: 297048 - DNA, 30 bp, Artificial Sequence
  Synthetic oligonucleotide
cctaacgggaaccgctacaccgttcttttg

SEQ ID NO: 297049 - DNA, 30 bp, Artificial Sequence
  Synthetic oligonucleotide
tgcgcctactatataatgtttgcagttttg

SEQ ID NO: 297050 - DNA, 30 bp, Artificial Sequence
  Synthetic oligonucleotide
aacaggtacggacagcacgaatcagttttg

SEQ ID NO: 297051 - DNA, 30 bp, Artificial Sequence
  Synthetic oligonucleotide
aggggattttgaacaagcatagtagttttg

SEQ ID NO: 297052 - DNA, 30 bp, Artificial Sequence
  Synthetic oligonucleotide
atagggggataaagagtgaacaccgttttg

SEQ ID NO: 297053 - DNA, 30 bp, Artificial Sequence
  Synthetic oligonucleotide
ggcaaatactcgagttaaaactcggttttg

SEQ ID NO: 297054 - DNA, 30 bp, Artificial Sequence
  Synthetic oligonucleotide
cgtaagcaactcgcttctgttagtgttttg

SEQ ID NO: 297055 - DNA, 30 bp, Artificial Sequence
  Synthetic oligonucleotide
gcccaaggggtcactgtttgctgtgttttg

SEQ ID NO: 297056 - DNA, 30 bp, Artificial Sequence
  Synthetic oligonucleotide
gtagatggtggtggactcaatacatttttg

SEQ ID NO: 297057 - DNA, 30 bp, Artificial Sequence
  Synthetic oligonucleotide
tagtggaatggcgctaaatccatatttttg

SEQ ID NO: 297058 - DNA, 30 bp, Artificial Sequence
  Synthetic oligonucleotide
aacaaggcatttgattaggaattatttttg

SEQ ID NO: 297059 - DNA, 30 bp, Artificial Sequence
  Synthetic oligonucleotide
tcctttctggcaatacaaggagtctttttg

SEQ ID NO: 297060 - DNA, 30 bp, Artificial Sequence
  Synthetic oligonucleotide
tgggcgcagtaggtgacacgagggtttttg

SEQ ID NO: 297061 - DNA, 30 bp, Artificial Sequence
  Synthetic oligonucleotide
tgtcgatcttccgctaagaataattttttg

SEQ ID NO: 297062 - DNA, 30 bp, Artificial Sequence
  Synthetic oligonucleotide
ttggacgttgtggtatgaacgggttttttg

SEQ ID NO: 297063 - DNA, 30 bp, Artificial Sequence
  Synthetic oligonucleotide
cccagctaaaggcaactagccgaaaaaaat

SEQ ID NO: 297064 - DNA, 30 bp, Artificial Sequence
  Synthetic oligonucleotide
gggctgtcttgcgtgagtcccaccaaaaat

SEQ ID NO: 297065 - DNA, 30 bp, Artificial Sequence
  Synthetic oligonucleotide
tatgtccgtatcaaaggaaatccgaaaaat

SEQ ID NO: 297066 - DNA, 30 bp, Artificial Sequence
  Synthetic oligonucleotide
ggaactttacgttaggtctgcgcgaaaaat

SEQ ID NO: 297067 - DNA, 30 bp, Artificial Sequence
  Synthetic oligonucleotide
tcgcagggggaagccagcaatgttaaaaat

SEQ ID NO: 297068 - DNA, 30 bp, Artificial Sequence
  Synthetic oligonucleotide
gggcaggccgcaactcccagattacaaaat

SEQ ID NO: 297069 - DNA, 30 bp, Artificial Sequence
  Synthetic oligonucleotide
tcaaacgagcgagaaaagcgtgagcaaaat

SEQ ID NO: 297070 - DNA, 30 bp, Artificial Sequence
  Synthetic oligonucleotide
tttcgtgcagccatcggatcacggcaaaat

SEQ ID NO: 297071 - DNA, 30 bp, Artificial Sequence
  Synthetic oligonucleotide
gcgataatctatccgccgggtcatcaaaat

SEQ ID NO: 297072 - DNA, 30 bp, Artificial Sequence
  Synthetic oligonucleotide
ttggagatgtgtcatccgccaccagaaaat

SEQ ID NO: 297073 - DNA, 30 bp, Artificial Sequence
  Synthetic oligonucleotide
gcaatggcgagctacggaaagcgagaaaat

SEQ ID NO: 297074 - DNA, 31 bp, Artificial Sequence
  Synthetic oligonucleotide
gatgggtctgtgaattctggacaccgaaaat

SEQ ID NO: 297075 - DNA, 30 bp, Artificial Sequence
  Synthetic oligonucleotide
gagaaaggggatgacattagacgcgaaaat

SEQ ID NO: 297076 - DNA, 30 bp, Artificial Sequence
  Synthetic oligonucleotide
agatagttgttacagacagattcggaaaat

SEQ ID NO: 297077 - DNA, 30 bp, Artificial Sequence
  Synthetic oligonucleotide
atggtgccgcatcctaaataaggggaaaat

SEQ ID NO: 297078 - DNA, 30 bp, Artificial Sequence
  Synthetic oligonucleotide
ggaacgccccattagtgcgatcatgaaaat

SEQ ID NO: 297079 - DNA, 30 bp, Artificial Sequence
  Synthetic oligonucleotide
ctaacgtgcagttgacctttttatgaaaat

SEQ ID NO: 297080 - DNA, 30 bp, Artificial Sequence
  Synthetic oligonucleotide
ctagaccgacggctggaaagataataaaat

SEQ ID NO: 297081 - DNA, 30 bp, Artificial Sequence
  Synthetic oligonucleotide
ggaccggttgccattttgatcccctaaaat

SEQ ID NO: 297082 - DNA, 30 bp, Artificial Sequence
  Synthetic oligonucleotide
cctcgtgtaatacggcagtgttattaaaat

SEQ ID NO: 297083 - DNA, 30 bp, Artificial Sequence
  Synthetic oligonucleotide
gtaatcacggtgtctgagaaatcttaaaat

SEQ ID NO: 297084 - DNA, 30 bp, Artificial Sequence
  Synthetic oligonucleotide
aagacagatgcaaggcatatggtaacaaat

SEQ ID NO: 297085 - DNA, 30 bp, Artificial Sequence
  Synthetic oligonucleotide
tacctagggcactaaacgtgatagacaaat

SEQ ID NO: 297086 - DNA, 30 bp, Artificial Sequence
  Synthetic oligonucleotide
atcctgtaagcagaaccaataaggacaaat

SEQ ID NO: 297087 - DNA, 30 bp, Artificial Sequence
  Synthetic oligonucleotide
ttgaggacttattataggtaggatacaaat

SEQ ID NO: 297088 - DNA, 29 bp, Artificial Sequence
  Synthetic oligonucleotide
ggcgaaccttacacttgcctcctacaaat

SEQ ID NO: 297089 - DNA, 30 bp, Artificial Sequence
  Synthetic oligonucleotide
ttcgtaagttggagggggttgcacccaaat

SEQ ID NO: 297090 - DNA, 30 bp, Artificial Sequence
  Synthetic oligonucleotide
gatacggcgcaggataaaggcggcccaaat

SEQ ID NO: 297091 - DNA, 30 bp, Artificial Sequence
  Synthetic oligonucleotide
atgtgcccatgtgatcaatgcggcccaaat

SEQ ID NO: 297092 - DNA, 30 bp, Artificial Sequence
  Synthetic oligonucleotide
gattatgtcggcgaatgggaaacgccaaat

SEQ ID NO: 297093 - DNA, 30 bp, Artificial Sequence
  Synthetic oligonucleotide
gcatctctataaggccattcgccgccaaat

SEQ ID NO: 297094 - DNA, 30 bp, Artificial Sequence
  Synthetic oligonucleotide
cttatttccgtccgtctacgattgccaaat

SEQ ID NO: 297095 - DNA, 30 bp, Artificial Sequence
  Synthetic oligonucleotide
cctcaatctttcgaagcattgcctccaaat

SEQ ID NO: 297096 - DNA, 30 bp, Artificial Sequence
  Synthetic oligonucleotide
cggccaattcctaagtaggctacagcaaat

SEQ ID NO: 297097 - DNA, 30 bp, Artificial Sequence
  Synthetic oligonucleotide
gaaaaaggcctggacagtgacctagcaaat

SEQ ID NO: 297098 - DNA, 30 bp, Artificial Sequence
  Synthetic oligonucleotide
ctaagcgaaacgtcttaaatcgacgcaaat

SEQ ID NO: 297099 - DNA, 30 bp, Artificial Sequence
  Synthetic oligonucleotide
ggtttgagtaacccgcggtaacccgcaaat

SEQ ID NO: 297100 - DNA, 30 bp, Artificial Sequence
  Synthetic oligonucleotide
catcatttagggatgtatcatttcgcaaat

SEQ ID NO: 297101 - DNA, 30 bp, Artificial Sequence
  Synthetic oligonucleotide
ctcatgatgggggaagaagaggctgcaaat

SEQ ID NO: 297102 - DNA, 30 bp, Artificial Sequence
  Synthetic oligonucleotide
ggcagttacacgcatacggatagtgcaaat

SEQ ID NO: 297103 - DNA, 30 bp, Artificial Sequence
  Synthetic oligonucleotide
aatctatagaaaaataacctacgtgcaaat

SEQ ID NO: 297104 - DNA, 30 bp, Artificial Sequence
  Synthetic oligonucleotide
ctctaggataggcgatgtggggaatcaaat

SEQ ID NO: 297105 - DNA, 30 bp, Artificial Sequence
  Synthetic oligonucleotide
tctatgactaggctcaatagcgcatcaaat

SEQ ID NO: 297106 - DNA, 30 bp, Artificial Sequence
  Synthetic oligonucleotide
tacaaactatgtcgttaaagcggatcaaat

SEQ ID NO: 297107 - DNA, 30 bp, Artificial Sequence
  Synthetic oligonucleotide
tcttagtaggctatctagattgactcaaat

SEQ ID NO: 297108 - DNA, 30 bp, Artificial Sequence
  Synthetic oligonucleotide
cctagtgtagaatggcctcattgctcaaat

SEQ ID NO: 297109 - DNA, 30 bp, Artificial Sequence
  Synthetic oligonucleotide
ctttggaccgagccaatcatcaagtcaaat

SEQ ID NO: 297110 - DNA, 30 bp, Artificial Sequence
  Synthetic oligonucleotide
acaggctcgcaattcagtagccggtcaaat

SEQ ID NO: 297111 - DNA, 30 bp, Artificial Sequence
  Synthetic oligonucleotide
gttcccgaatatacaaagagcgtgtcaaat

SEQ ID NO: 297112 - DNA, 30 bp, Artificial Sequence
  Synthetic oligonucleotide
tcgttgacagctacgaacttcggttcaaat

SEQ ID NO: 297113 - DNA, 30 bp, Artificial Sequence
  Synthetic oligonucleotide
acgagcgaggcaatgaactgggaaagaaat

SEQ ID NO: 297114 - DNA, 30 bp, Artificial Sequence
  Synthetic oligonucleotide
aagtaaggaatggcattgaatgtcagaaat

SEQ ID NO: 297115 - DNA, 30 bp, Artificial Sequence
  Synthetic oligonucleotide
gtcaacatgcctctacaagtcaggagaaat

SEQ ID NO: 297116 - DNA, 30 bp, Artificial Sequence
  Synthetic oligonucleotide
ggttctactccactcaaataattgagaaat

SEQ ID NO: 297117 - DNA, 31 bp, Artificial Sequence
  Synthetic oligonucleotide
aacttgcctagggaaaatgagctatagaaat

SEQ ID NO: 297118 - DNA, 30 bp, Artificial Sequence
  Synthetic oligonucleotide
gggggctaattaaattaccgtactagaaat

SEQ ID NO: 297119 - DNA, 30 bp, Artificial Sequence
  Synthetic oligonucleotide
gcctggccaagggtgctcatgggacgaaat

SEQ ID NO: 297120 - DNA, 30 bp, Artificial Sequence
  Synthetic oligonucleotide
aggcagatcggtaggattaacggccgaaat

SEQ ID NO: 297121 - DNA, 30 bp, Artificial Sequence
  Synthetic oligonucleotide
ggatggggtaattacacatgcaggcgaaat

SEQ ID NO: 297122 - DNA, 30 bp, Artificial Sequence
  Synthetic oligonucleotide
ggccacgggataataaactttgggcgaaat

SEQ ID NO: 297123 - DNA, 30 bp, Artificial Sequence
  Synthetic oligonucleotide
caaataggccggaccatttaatatcgaaat

SEQ ID NO: 297124 - DNA, 30 bp, Artificial Sequence
  Synthetic oligonucleotide
gcataagggtgctacattggatttcgaaat

SEQ ID NO: 297125 - DNA, 30 bp, Artificial Sequence
  Synthetic oligonucleotide
gctagaatgtggatctaccataaaggaaat

SEQ ID NO: 297126 - DNA, 30 bp, Artificial Sequence
  Synthetic oligonucleotide
cctgcgtctaacacagagcttaaaggaaat

SEQ ID NO: 297127 - DNA, 30 bp, Artificial Sequence
  Synthetic oligonucleotide
tagtcgaggaaccaaccttcaggaggaaat

SEQ ID NO: 297128 - DNA, 30 bp, Artificial Sequence
  Synthetic oligonucleotide
tagcatgttcagcttgccctcttaggaaat

SEQ ID NO: 297129 - DNA, 30 bp, Artificial Sequence
  Synthetic oligonucleotide
tgggacatatctactgccgttaccggaaat

SEQ ID NO: 297130 - DNA, 30 bp, Artificial Sequence
  Synthetic oligonucleotide
caacttgctccgagctggccaacatgaaat

SEQ ID NO: 297131 - DNA, 30 bp, Artificial Sequence
  Synthetic oligonucleotide
tgaggattctcccctcgcgaatgatgaaat

SEQ ID NO: 297132 - DNA, 30 bp, Artificial Sequence
  Synthetic oligonucleotide
tctactgagcagggacttggacactgaaat

SEQ ID NO: 297133 - DNA, 30 bp, Artificial Sequence
  Synthetic oligonucleotide
aggctgacttaatggcctaatcgctgaaat

SEQ ID NO: 297134 - DNA, 30 bp, Artificial Sequence
  Synthetic oligonucleotide
cttcggacgcataaatgcggaaagtgaaat

SEQ ID NO: 297135 - DNA, 30 bp, Artificial Sequence
  Synthetic oligonucleotide
acgaggagcaagcaggctcttgcgtgaaat

SEQ ID NO: 297136 - DNA, 30 bp, Artificial Sequence
  Synthetic oligonucleotide
gaaaactcaaatcctggcaattcgtgaaat

SEQ ID NO: 297137 - DNA, 30 bp, Artificial Sequence
  Synthetic oligonucleotide
aaggcgaggaatgaggacgaaatgtgaaat

SEQ ID NO: 297138 - DNA, 30 bp, Artificial Sequence
  Synthetic oligonucleotide
tcactcctgcactttcgcgtggtgtgaaat

SEQ ID NO: 297139 - DNA, 30 bp, Artificial Sequence
  Synthetic oligonucleotide
tcaagtgtgccaacaacttcataaataaat

SEQ ID NO: 297140 - DNA, 30 bp, Artificial Sequence
  Synthetic oligonucleotide
agaacggcactggtgtgcgccgacataaat

SEQ ID NO: 297141 - DNA, 30 bp, Artificial Sequence
  Synthetic oligonucleotide
gcatggaacccaaaaatccaagcgataaat

SEQ ID NO: 297142 - DNA, 30 bp, Artificial Sequence
  Synthetic oligonucleotide
gtcctacaagctgctagttcgtcgataaat

SEQ ID NO: 297143 - DNA, 30 bp, Artificial Sequence
  Synthetic oligonucleotide
tcggacacgagcgagtgatgctggataaat

SEQ ID NO: 297144 - DNA, 30 bp, Artificial Sequence
  Synthetic oligonucleotide
gtattgtcctacagccacgatcctataaat

SEQ ID NO: 297145 - DNA, 30 bp, Artificial Sequence
  Synthetic oligonucleotide
ggtaatccccggagcttcaaaattataaat

SEQ ID NO: 297146 - DNA, 30 bp, Artificial Sequence
  Synthetic oligonucleotide
gacaatcggtgaactgtaaggtgactaaat

SEQ ID NO: 297147 - DNA, 30 bp, Artificial Sequence
  Synthetic oligonucleotide
tatgtagaaaatcaaaaatgacatctaaat

SEQ ID NO: 297148 - DNA, 30 bp, Artificial Sequence
  Synthetic oligonucleotide
tgttgggcacgcgaatcttagccagtaaat

SEQ ID NO: 297149 - DNA, 30 bp, Artificial Sequence
  Synthetic oligonucleotide
aacatgctaacgcataaattaagagtaaat

SEQ ID NO: 297150 - DNA, 30 bp, Artificial Sequence
  Synthetic oligonucleotide
ggcgcgataagaaaaatgtatagagtaaat

SEQ ID NO: 297151 - DNA, 30 bp, Artificial Sequence
  Synthetic oligonucleotide
cgactgttttgcccgtacgactgggtaaat

SEQ ID NO: 297152 - DNA, 30 bp, Artificial Sequence
  Synthetic oligonucleotide
tgtgggaaccggctacgcccgatggtaaat

SEQ ID NO: 297153 - DNA, 30 bp, Artificial Sequence
  Synthetic oligonucleotide
aatggacctgatgccgtgaagctggtaaat

SEQ ID NO: 297154 - DNA, 30 bp, Artificial Sequence
  Synthetic oligonucleotide
cgtcgaactctgcctctgagtttggtaaat

SEQ ID NO: 297155 - DNA, 30 bp, Artificial Sequence
  Synthetic oligonucleotide
acaatactgaatgctggcgttttggtaaat

SEQ ID NO: 297156 - DNA, 30 bp, Artificial Sequence
  Synthetic oligonucleotide
ctggggggccaactccacggcagtgtaaat

SEQ ID NO: 297157 - DNA, 30 bp, Artificial Sequence
  Synthetic oligonucleotide
gcaacggtgacgtacttggctagtgtaaat

SEQ ID NO: 297158 - DNA, 30 bp, Artificial Sequence
  Synthetic oligonucleotide
tccgggcaaagttgacggcttaaattaaat

SEQ ID NO: 297159 - DNA, 30 bp, Artificial Sequence
  Synthetic oligonucleotide
tggggttgagctggcgtcggcgtattaaat

SEQ ID NO: 297160 - DNA, 30 bp, Artificial Sequence
  Synthetic oligonucleotide
tggtggcacgacaatgcatgactcttaaat

SEQ ID NO: 297161 - DNA, 30 bp, Artificial Sequence
  Synthetic oligonucleotide
gttagaccgaatgtcatcgtcaagttaaat

SEQ ID NO: 297162 - DNA, 30 bp, Artificial Sequence
  Synthetic oligonucleotide
aacatagacagtctaagaacatggttaaat

SEQ ID NO: 297163 - DNA, 30 bp, Artificial Sequence
  Synthetic oligonucleotide
actcgtcatagggtagggacgtggttaaat

SEQ ID NO: 297164 - DNA, 30 bp, Artificial Sequence
  Synthetic oligonucleotide
tacaacgaggaggatttaccatatttaaat

SEQ ID NO: 297165 - DNA, 30 bp, Artificial Sequence
  Synthetic oligonucleotide
aagccttaaaacagattagctataaacaat

SEQ ID NO: 297166 - DNA, 30 bp, Artificial Sequence
  Synthetic oligonucleotide
agtaccaaaggcgcatgttatttaaacaat

SEQ ID NO: 297167 - DNA, 30 bp, Artificial Sequence
  Synthetic oligonucleotide
catttagcacttttccgccatatcaacaat

SEQ ID NO: 297168 - DNA, 30 bp, Artificial Sequence
  Synthetic oligonucleotide
acaattgatagggcagtctaaaagaacaat

SEQ ID NO: 297169 - DNA, 30 bp, Artificial Sequence
  Synthetic oligonucleotide
tctttcactaggcaacaccgctcgaacaat

SEQ ID NO: 297170 - DNA, 30 bp, Artificial Sequence
  Synthetic oligonucleotide
tcacgcttcaggatcccatatctgaacaat

SEQ ID NO: 297171 - DNA, 30 bp, Artificial Sequence
  Synthetic oligonucleotide
cctccgcagcctcaccagggattgaacaat

SEQ ID NO: 297172 - DNA, 30 bp, Artificial Sequence
  Synthetic oligonucleotide
gttttggtcatggaacgagaagataacaat

SEQ ID NO: 297173 - DNA, 30 bp, Artificial Sequence
  Synthetic oligonucleotide
ttgagggtttgaggccatcggtagcacaat

SEQ ID NO: 297174 - DNA, 30 bp, Artificial Sequence
  Synthetic oligonucleotide
aaacggagggcttaccatggagctcacaat

SEQ ID NO: 297175 - DNA, 30 bp, Artificial Sequence
  Synthetic oligonucleotide
ctggccgcgggatatccatgcgttcacaat

SEQ ID NO: 297176 - DNA, 30 bp, Artificial Sequence
  Synthetic oligonucleotide
gctatgtgtaccgtggtagtaaaagacaat

SEQ ID NO: 297177 - DNA, 30 bp, Artificial Sequence
  Synthetic oligonucleotide
cgtataacttagccgcggaaataagacaat

SEQ ID NO: 297178 - DNA, 30 bp, Artificial Sequence
  Synthetic oligonucleotide
tcgtggataaatttaagatccaccgacaat

SEQ ID NO: 297179 - DNA, 30 bp, Artificial Sequence
  Synthetic oligonucleotide
gtaaagcttcctgtaagcataggcgacaat

SEQ ID NO: 297180 - DNA, 30 bp, Artificial Sequence
  Synthetic oligonucleotide
tacggttagtgcccaaaacttggcgacaat

SEQ ID NO: 297181 - DNA, 30 bp, Artificial Sequence
  Synthetic oligonucleotide
tccggacgtggttaaaaacaacgggacaat

SEQ ID NO: 297182 - DNA, 30 bp, Artificial Sequence
  Synthetic oligonucleotide
aatcacgggtggtggtcgccactggacaat

SEQ ID NO: 297183 - DNA, 30 bp, Artificial Sequence
  Synthetic oligonucleotide
cgaccggtcactctctgcggacttgacaat

SEQ ID NO: 297184 - DNA, 30 bp, Artificial Sequence
  Synthetic oligonucleotide
cctgtgcgtcgtcgattcgcctcctacaat

SEQ ID NO: 297185 - DNA, 30 bp, Artificial Sequence
  Synthetic oligonucleotide
cgttcaccaacattactgccaggctacaat

SEQ ID NO: 297186 - DNA, 30 bp, Artificial Sequence
  Synthetic oligonucleotide
tgtgggctcgggtattgacgtggctacaat

SEQ ID NO: 297187 - DNA, 30 bp, Artificial Sequence
  Synthetic oligonucleotide
gcaatgtagtaatgtcgcgttggctacaat

SEQ ID NO: 297188 - DNA, 30 bp, Artificial Sequence
  Synthetic oligonucleotide
cgctagtatccgctcatggcgaggtacaat

SEQ ID NO: 297189 - DNA, 30 bp, Artificial Sequence
  Synthetic oligonucleotide
gcttcgaacctacgggcgagccggtacaat

SEQ ID NO: 297190 - DNA, 30 bp, Artificial Sequence
  Synthetic oligonucleotide
gcttttccaataagaaccaaggtttacaat

SEQ ID NO: 297191 - DNA, 30 bp, Artificial Sequence
  Synthetic oligonucleotide
gatggcatcctattcaggcggctcaccaat

SEQ ID NO: 297192 - DNA, 30 bp, Artificial Sequence
  Synthetic oligonucleotide
caggcagtagttggagagcacgtcaccaat

SEQ ID NO: 297193 - DNA, 30 bp, Artificial Sequence
  Synthetic oligonucleotide
aaaccggaaactagaagggatgataccaat

SEQ ID NO: 297194 - DNA, 30 bp, Artificial Sequence
  Synthetic oligonucleotide
tatcatctgttcgtaatatgtacacccaat

SEQ ID NO: 297195 - DNA, 30 bp, Artificial Sequence
  Synthetic oligonucleotide
ccaagcctgctgaataggatatcccccaat

SEQ ID NO: 297196 - DNA, 30 bp, Artificial Sequence
  Synthetic oligonucleotide
gaatgtagtcaaagtttgaagtggcccaat

SEQ ID NO: 297197 - DNA, 30 bp, Artificial Sequence
  Synthetic oligonucleotide
actcccattaacccgcggagcgtgcccaat

SEQ ID NO: 297198 - DNA, 30 bp, Artificial Sequence
  Synthetic oligonucleotide
ctgcaaggacgtatctgtcctaaagccaat

SEQ ID NO: 297199 - DNA, 30 bp, Artificial Sequence
  Synthetic oligonucleotide
tcgcgcttcccagggtaggactgagccaat

SEQ ID NO: 297200 - DNA, 30 bp, Artificial Sequence
  Synthetic oligonucleotide
aagcatacgtactgacacttgatcgccaat

SEQ ID NO: 297201 - DNA, 30 bp, Artificial Sequence
  Synthetic oligonucleotide
ctgaacctctccgatgtaaccagggccaat

SEQ ID NO: 297202 - DNA, 30 bp, Artificial Sequence
  Synthetic oligonucleotide
gagatgtaagaggattcagtttgggccaat

SEQ ID NO: 297203 - DNA, 30 bp, Artificial Sequence
  Synthetic oligonucleotide
gttacaagccatcttgcgcatatggccaat

SEQ ID NO: 297204 - DNA, 30 bp, Artificial Sequence
  Synthetic oligonucleotide
tatgggacggttccatcacaaactgccaat

SEQ ID NO: 297205 - DNA, 30 bp, Artificial Sequence
  Synthetic oligonucleotide
atgtccacccagggctcagcttcgtccaat

SEQ ID NO: 297206 - DNA, 30 bp, Artificial Sequence
  Synthetic oligonucleotide
atctcgacgatactaggactagcttccaat

SEQ ID NO: 297207 - DNA, 30 bp, Artificial Sequence
  Synthetic oligonucleotide
gaggacccaagagcacctactaaaagcaat

SEQ ID NO: 297208 - DNA, 30 bp, Artificial Sequence
  Synthetic oligonucleotide
ctgtataacatagtcgattagggaagcaat

SEQ ID NO: 297209 - DNA, 30 bp, Artificial Sequence
  Synthetic oligonucleotide
cgcggtggtagactaggtaggttaagcaat

SEQ ID NO: 297210 - DNA, 30 bp, Artificial Sequence
  Synthetic oligonucleotide
ccgatcttatacggcctggccgagagcaat

SEQ ID NO: 297211 - DNA, 30 bp, Artificial Sequence
  Synthetic oligonucleotide
cccaatgtgtattgggtgcatgagagcaat

SEQ ID NO: 297212 - DNA, 30 bp, Artificial Sequence
  Synthetic oligonucleotide
acataggttcctgtccgtgtttggagcaat

SEQ ID NO: 297213 - DNA, 30 bp, Artificial Sequence
  Synthetic oligonucleotide
gcacatactgagggtctatcctatagcaat

SEQ ID NO: 297214 - DNA, 30 bp, Artificial Sequence
  Synthetic oligonucleotide
ggaagtactcaagtccttaatactagcaat

SEQ ID NO: 297215 - DNA, 30 bp, Artificial Sequence
  Synthetic oligonucleotide
gaatgtgatcaattcggcgtctttagcaat

SEQ ID NO: 297216 - DNA, 30 bp, Artificial Sequence
  Synthetic oligonucleotide
accctagtgggggaccttcgtcaacgcaat

SEQ ID NO: 297217 - DNA, 30 bp, Artificial Sequence
  Synthetic oligonucleotide
agggtccggtacggggcttgcgaacgcaat

SEQ ID NO: 297218 - DNA, 30 bp, Artificial Sequence
  Synthetic oligonucleotide
atcaaagatggcctggggcaagcacgcaat

SEQ ID NO: 297219 - DNA, 30 bp, Artificial Sequence
  Synthetic oligonucleotide
tttcccgggagccacgacggaatacgcaat

SEQ ID NO: 297220 - DNA, 30 bp, Artificial Sequence
  Synthetic oligonucleotide
atcatgccttagacagcggagaaccgcaat

SEQ ID NO: 297221 - DNA, 30 bp, Artificial Sequence
  Synthetic oligonucleotide
aggtctgagttgtgggtgaaaagccgcaat

SEQ ID NO: 297222 - DNA, 30 bp, Artificial Sequence
  Synthetic oligonucleotide
tccgagagtcacacagtacgatcaggcaat

SEQ ID NO: 297223 - DNA, 30 bp, Artificial Sequence
  Synthetic oligonucleotide
gtcttgataaagtgatttggaaacggcaat

SEQ ID NO: 297224 - DNA, 30 bp, Artificial Sequence
  Synthetic oligonucleotide
cggttccctcgagaggccgtgttcggcaat

SEQ ID NO: 297225 - DNA, 30 bp, Artificial Sequence
  Synthetic oligonucleotide
tactgacgcaggggtggctgtaaatgcaat

SEQ ID NO: 297226 - DNA, 30 bp, Artificial Sequence
  Synthetic oligonucleotide
agttctgagttcatattcacttaatgcaat

SEQ ID NO: 297227 - DNA, 30 bp, Artificial Sequence
  Synthetic oligonucleotide
ataggcaactaggacagccttccatgcaat

SEQ ID NO: 297228 - DNA, 30 bp, Artificial Sequence
  Synthetic oligonucleotide
aggaatttccttgagattgtaagatgcaat

SEQ ID NO: 297229 - DNA, 30 bp, Artificial Sequence
  Synthetic oligonucleotide
gggatctgtgccagtatcatttattgcaat

SEQ ID NO: 297230 - DNA, 30 bp, Artificial Sequence
  Synthetic oligonucleotide
ccgcttcgtattcaccatgccacttgcaat

SEQ ID NO: 297231 - DNA, 25 bp, Artificial Sequence
  Synthetic oligonucleotide
ctactaagagaacaaaataatcaat

SEQ ID NO: 297232 - DNA, 30 bp, Artificial Sequence
  Synthetic oligonucleotide
ggcccgcaccggggtgacgtgctgatcaat

SEQ ID NO: 297233 - DNA, 30 bp, Artificial Sequence
  Synthetic oligonucleotide
tatccagacgacccagttctagtgatcaat

SEQ ID NO: 297234 - DNA, 30 bp, Artificial Sequence
  Synthetic oligonucleotide
tgggatacaagaaatgccagtagtatcaat

SEQ ID NO: 297235 - DNA, 30 bp, Artificial Sequence
  Synthetic oligonucleotide
gatcattaaagtgcatacgacttactcaat

SEQ ID NO: 297236 - DNA, 30 bp, Artificial Sequence
  Synthetic oligonucleotide
ccgatctactgcccgcgaaagaatctcaat

SEQ ID NO: 297237 - DNA, 30 bp, Artificial Sequence
  Synthetic oligonucleotide
acaatatcttaaaggcatagtcatctcaat

SEQ ID NO: 297238 - DNA, 30 bp, Artificial Sequence
  Synthetic oligonucleotide
agaggtggaaattcgcagattgatctcaat

SEQ ID NO: 297239 - DNA, 30 bp, Artificial Sequence
  Synthetic oligonucleotide
gcttgaaacggaacgatcccgaaggtcaat

SEQ ID NO: 297240 - DNA, 30 bp, Artificial Sequence
  Synthetic oligonucleotide
gcagagcatagacggggaacatttgtcaat

SEQ ID NO: 297241 - DNA, 30 bp, Artificial Sequence
  Synthetic oligonucleotide
aagcgcacctgaacctgccgatggttcaat

SEQ ID NO: 297242 - DNA, 30 bp, Artificial Sequence
  Synthetic oligonucleotide
ccatactaattagcggcgaaccgtttcaat

SEQ ID NO: 297243 - DNA, 30 bp, Artificial Sequence
  Synthetic oligonucleotide
gtagcatgaacttgtggcagtcgtttcaat

SEQ ID NO: 297244 - DNA, 30 bp, Artificial Sequence
  Synthetic oligonucleotide
gcgcaaatgcgtcgtatcggggttttcaat

SEQ ID NO: 297245 - DNA, 30 bp, Artificial Sequence
  Synthetic oligonucleotide
atcagccggtactcggtgagggaaaagaat

SEQ ID NO: 297246 - DNA, 30 bp, Artificial Sequence
  Synthetic oligonucleotide
tctatcttccttacattgagctcaaagaat

SEQ ID NO: 297247 - DNA, 30 bp, Artificial Sequence
  Synthetic oligonucleotide
aagaattcaattaaaaggggaataaagaat

SEQ ID NO: 297248 - DNA, 30 bp, Artificial Sequence
  Synthetic oligonucleotide
ctcagaactgatcgtctgtagtacaagaat

SEQ ID NO: 297249 - DNA, 30 bp, Artificial Sequence
  Synthetic oligonucleotide
gtcggtgaatgccaaggggtctgcaagaat

SEQ ID NO: 297250 - DNA, 30 bp, Artificial Sequence
  Synthetic oligonucleotide
cgacgatcctgctaaaattcactcaagaat

SEQ ID NO: 297251 - DNA, 30 bp, Artificial Sequence
  Synthetic oligonucleotide
gataacgcctgaaacaatatgtcgaagaat

SEQ ID NO: 297252 - DNA, 30 bp, Artificial Sequence
  Synthetic oligonucleotide
acttgtcggagatggaccagccggaagaat

SEQ ID NO: 297253 - DNA, 30 bp, Artificial Sequence
  Synthetic oligonucleotide
gactgagacacaacagcatgggggaagaat

SEQ ID NO: 297254 - DNA, 30 bp, Artificial Sequence
  Synthetic oligonucleotide
gaaaatggaagtaccccggagatgaagaat

SEQ ID NO: 297255 - DNA, 30 bp, Artificial Sequence
  Synthetic oligonucleotide
acctcatttgtacccgttaatctacagaat

SEQ ID NO: 297256 - DNA, 30 bp, Artificial Sequence
  Synthetic oligonucleotide
aacaccgcagaacactgataataccagaat

SEQ ID NO: 297257 - DNA, 30 bp, Artificial Sequence
  Synthetic oligonucleotide
tccataacctgagatttgtcctgccagaat

SEQ ID NO: 297258 - DNA, 30 bp, Artificial Sequence
  Synthetic oligonucleotide
tcatcgagttgattccgccatatccagaat

SEQ ID NO: 297259 - DNA, 30 bp, Artificial Sequence
  Synthetic oligonucleotide
ttgtcgcgtggtaaatagacaccgcagaat

SEQ ID NO: 297260 - DNA, 30 bp, Artificial Sequence
  Synthetic oligonucleotide
tgtaccgtgatgtttatctactggcagaat

SEQ ID NO: 297261 - DNA, 30 bp, Artificial Sequence
  Synthetic oligonucleotide
cgaatcgcccaacgtttccaccatcagaat

SEQ ID NO: 297262 - DNA, 30 bp, Artificial Sequence
  Synthetic oligonucleotide
tactaatgatatttacgcgatgctcagaat

SEQ ID NO: 297263 - DNA, 30 bp, Artificial Sequence
  Synthetic oligonucleotide
aagacgtagaatgtaatagtgagtcagaat

SEQ ID NO: 297264 - DNA, 30 bp, Artificial Sequence
  Synthetic oligonucleotide
gtgggccgtaagtttatcggatcagagaat

SEQ ID NO: 297265 - DNA, 31 bp, Artificial Sequence
  Synthetic oligonucleotide
gtcctcacggcattacgcgtgaagcgagaat

SEQ ID NO: 297266 - DNA, 30 bp, Artificial Sequence
  Synthetic oligonucleotide
gctggagtaaaaaaccacctattcgagaat

SEQ ID NO: 297267 - DNA, 30 bp, Artificial Sequence
  Synthetic oligonucleotide
agttcgcgtatagtggttggaccggagaat

SEQ ID NO: 297268 - DNA, 30 bp, Artificial Sequence
  Synthetic oligonucleotide
tagatatatatgagtgtaaatctggagaat

SEQ ID NO: 297269 - DNA, 30 bp, Artificial Sequence
  Synthetic oligonucleotide
atacgtcatcagaccgcgatatctgagaat

SEQ ID NO: 297270 - DNA, 30 bp, Artificial Sequence
  Synthetic oligonucleotide
ttctttggttagtattccgatattgagaat

SEQ ID NO: 297271 - DNA, 30 bp, Artificial Sequence
  Synthetic oligonucleotide
ttcgctaacagtcccaatattgaatagaat

SEQ ID NO: 297272 - DNA, 30 bp, Artificial Sequence
  Synthetic oligonucleotide
aggatttagtccggtagggagccatagaat

SEQ ID NO: 297273 - DNA, 30 bp, Artificial Sequence
  Synthetic oligonucleotide
ggagtacttagaacgagaggtatatagaat

SEQ ID NO: 297274 - DNA, 30 bp, Artificial Sequence
  Synthetic oligonucleotide
cttagatctccggagggtgggtcctagaat

SEQ ID NO: 297275 - DNA, 30 bp, Artificial Sequence
  Synthetic oligonucleotide
gttttaagctcggatccgaaccacacgaat

SEQ ID NO: 297276 - DNA, 30 bp, Artificial Sequence
  Synthetic oligonucleotide
gttccgtcaggaataatggggtagacgaat

SEQ ID NO: 297277 - DNA, 30 bp, Artificial Sequence
  Synthetic oligonucleotide
tatcagacgagcaacagttatgcgacgaat

SEQ ID NO: 297278 - DNA, 30 bp, Artificial Sequence
  Synthetic oligonucleotide
tgaagccgtaaaacgcttgggtcgacgaat

SEQ ID NO: 297279 - DNA, 30 bp, Artificial Sequence
  Synthetic oligonucleotide
ttgagattgagatggttttccaggacgaat

SEQ ID NO: 297280 - DNA, 30 bp, Artificial Sequence
  Synthetic oligonucleotide
cagctgatgaagtcgattcaaaaaccgaat

SEQ ID NO: 297281 - DNA, 30 bp, Artificial Sequence
  Synthetic oligonucleotide
acatagtcctcgcttgatcttagaccgaat

SEQ ID NO: 297282 - DNA, 30 bp, Artificial Sequence
  Synthetic oligonucleotide
gagaatgcataacgtttccgtgacccgaat

SEQ ID NO: 297283 - DNA, 30 bp, Artificial Sequence
  Synthetic oligonucleotide
acctaacattatagtgcgtgtcagccgaat

SEQ ID NO: 297284 - DNA, 30 bp, Artificial Sequence
  Synthetic oligonucleotide
aaatagaatgtcaccctgccgtcgccgaat

SEQ ID NO: 297285 - DNA, 30 bp, Artificial Sequence
  Synthetic oligonucleotide
atgcagccgctatgacttcgcgtgccgaat

SEQ ID NO: 297286 - DNA, 30 bp, Artificial Sequence
  Synthetic oligonucleotide
acatatgtcccccaagaccgagtagcgaat

SEQ ID NO: 297287 - DNA, 30 bp, Artificial Sequence
  Synthetic oligonucleotide
ggcgggtagagtccggaccgcgtagcgaat

SEQ ID NO: 297288 - DNA, 30 bp, Artificial Sequence
  Synthetic oligonucleotide
taaaatcagttatggcatactagcgcgaat

SEQ ID NO: 297289 - DNA, 30 bp, Artificial Sequence
  Synthetic oligonucleotide
gtccccgaacccgcgatatcaacggcgaat

SEQ ID NO: 297290 - DNA, 30 bp, Artificial Sequence
  Synthetic oligonucleotide
gtatgctttattccggaggggatggcgaat

SEQ ID NO: 297291 - DNA, 30 bp, Artificial Sequence
  Synthetic oligonucleotide
gtactcgaatgtgtgggtgcggaatcgaat

SEQ ID NO: 297292 - DNA, 30 bp, Artificial Sequence
  Synthetic oligonucleotide
cgtctgcgccagtctagagggagatcgaat

SEQ ID NO: 297293 - DNA, 30 bp, Artificial Sequence
  Synthetic oligonucleotide
gcatattcctggtttcgtgaacgatcgaat

SEQ ID NO: 297294 - DNA, 30 bp, Artificial Sequence
  Synthetic oligonucleotide
ccttgatgctgtcgccagatcccctcgaat

SEQ ID NO: 297295 - DNA, 30 bp, Artificial Sequence
  Synthetic oligonucleotide
tgagagacgaactatacaaggttctcgaat

SEQ ID NO: 297296 - DNA, 30 bp, Artificial Sequence
  Synthetic oligonucleotide
taaactggagtgatatcctcatagtcgaat

SEQ ID NO: 297297 - DNA, 30 bp, Artificial Sequence
  Synthetic oligonucleotide
gtcgccccgtcacggtcctatgtttcgaat

SEQ ID NO: 297298 - DNA, 30 bp, Artificial Sequence
  Synthetic oligonucleotide
tgtgacatgcggagtttgtcatgaaggaat

SEQ ID NO: 297299 - DNA, 29 bp, Artificial Sequence
  Synthetic oligonucleotide
atgtcaattatggcggagtaataaggaat

SEQ ID NO: 297300 - DNA, 30 bp, Artificial Sequence
  Synthetic oligonucleotide
tcgaaggccagggaggaagggcccaggaat

SEQ ID NO: 297301 - DNA, 30 bp, Artificial Sequence
  Synthetic oligonucleotide
agaagcttgcaaatagctacaatgaggaat

SEQ ID NO: 297302 - DNA, 30 bp, Artificial Sequence
  Synthetic oligonucleotide
attctacagacgacgatatttagtaggaat

SEQ ID NO: 297303 - DNA, 30 bp, Artificial Sequence
  Synthetic oligonucleotide
aaaccgttaagctcacatatggcacggaat

SEQ ID NO: 297304 - DNA, 30 bp, Artificial Sequence
  Synthetic oligonucleotide
atgtgttctggcacctaagcgaagcggaat

SEQ ID NO: 297305 - DNA, 30 bp, Artificial Sequence
  Synthetic oligonucleotide
aaaggcttttatagaaactatcatcggaat

SEQ ID NO: 297306 - DNA, 30 bp, Artificial Sequence
  Synthetic oligonucleotide
gtacaaaaccccaccgggcacatagggaat

SEQ ID NO: 297307 - DNA, 30 bp, Artificial Sequence
  Synthetic oligonucleotide
agcgtacaggaaacaaccgatatagggaat

SEQ ID NO: 297308 - DNA, 30 bp, Artificial Sequence
  Synthetic oligonucleotide
acatatcgcgttgctctctacttagggaat

SEQ ID NO: 297309 - DNA, 30 bp, Artificial Sequence
  Synthetic oligonucleotide
ctccattataactggaccagttaggggaat

SEQ ID NO: 297310 - DNA, 30 bp, Artificial Sequence
  Synthetic oligonucleotide
cgggatgtcaatgcgggaccaatggggaat

SEQ ID NO: 297311 - DNA, 30 bp, Artificial Sequence
  Synthetic oligonucleotide
tagttagcttcggcttgggcacgtgggaat

SEQ ID NO: 297312 - DNA, 30 bp, Artificial Sequence
  Synthetic oligonucleotide
gcaaaaatcccccgggccggccaatggaat

SEQ ID NO: 297313 - DNA, 30 bp, Artificial Sequence
  Synthetic oligonucleotide
atgccgcatcccgcccacacgggatggaat

SEQ ID NO: 297314 - DNA, 30 bp, Artificial Sequence
  Synthetic oligonucleotide
gggttaatcaagccaaatagttactggaat

SEQ ID NO: 297315 - DNA, 30 bp, Artificial Sequence
  Synthetic oligonucleotide
gttagagaaagttacgtgaagacctggaat

SEQ ID NO: 297316 - DNA, 30 bp, Artificial Sequence
  Synthetic oligonucleotide
agttttgatgccctgttaaggatctggaat

SEQ ID NO: 297317 - DNA, 30 bp, Artificial Sequence
  Synthetic oligonucleotide
gcctgcgtacactcctattcgcggtggaat

SEQ ID NO: 297318 - DNA, 30 bp, Artificial Sequence
  Synthetic oligonucleotide
tcgactctactttaacagtccgggtggaat

SEQ ID NO: 297319 - DNA, 30 bp, Artificial Sequence
  Synthetic oligonucleotide
aaaaacaagttgcgacatgccccttggaat

SEQ ID NO: 297320 - DNA, 30 bp, Artificial Sequence
  Synthetic oligonucleotide
tgtttgagggcgctccgatctagttggaat

SEQ ID NO: 297321 - DNA, 30 bp, Artificial Sequence
  Synthetic oligonucleotide
aaagaacatggaccgcgggccgtttggaat

SEQ ID NO: 297322 - DNA, 30 bp, Artificial Sequence
  Synthetic oligonucleotide
cactaaatcattaacaaatggtaaatgaat

SEQ ID NO: 297323 - DNA, 30 bp, Artificial Sequence
  Synthetic oligonucleotide
agttaagccgcatgcggtgttttaatgaat

SEQ ID NO: 297324 - DNA, 30 bp, Artificial Sequence
  Synthetic oligonucleotide
gaacccaccttgttaagcggcgacatgaat

SEQ ID NO: 297325 - DNA, 30 bp, Artificial Sequence
  Synthetic oligonucleotide
taacggcatattcacaatgctacgatgaat

SEQ ID NO: 297326 - DNA, 30 bp, Artificial Sequence
  Synthetic oligonucleotide
catcaccttggcgacgtaactggtatgaat

SEQ ID NO: 297327 - DNA, 30 bp, Artificial Sequence
  Synthetic oligonucleotide
catgtggcacagcgccatatccttatgaat

SEQ ID NO: 297328 - DNA, 30 bp, Artificial Sequence
  Synthetic oligonucleotide
ggactgtagttagaatgggacgtactgaat

SEQ ID NO: 297329 - DNA, 30 bp, Artificial Sequence
  Synthetic oligonucleotide
ttgtaagtccggcaacgaaggggtctgaat

SEQ ID NO: 297330 - DNA, 30 bp, Artificial Sequence
  Synthetic oligonucleotide
ttctcgtgatcagaagaaaccgttctgaat

SEQ ID NO: 297331 - DNA, 30 bp, Artificial Sequence
  Synthetic oligonucleotide
gggttggtaagcatagccggctcagtgaat

SEQ ID NO: 297332 - DNA, 30 bp, Artificial Sequence
  Synthetic oligonucleotide
cagagatgacaaccaggtttccaggtgaat

SEQ ID NO: 297333 - DNA, 30 bp, Artificial Sequence
  Synthetic oligonucleotide
acagatctattatatcggcaaaatgtgaat

SEQ ID NO: 297334 - DNA, 30 bp, Artificial Sequence
  Synthetic oligonucleotide
agattcctaccttggttggcccatgtgaat

SEQ ID NO: 297335 - DNA, 30 bp, Artificial Sequence
  Synthetic oligonucleotide
cgtgagtttcgcagcgtttgatatgtgaat

SEQ ID NO: 297336 - DNA, 30 bp, Artificial Sequence
  Synthetic oligonucleotide
gaaggtcgggacctgggaggaggtgtgaat

SEQ ID NO: 297337 - DNA, 30 bp, Artificial Sequence
  Synthetic oligonucleotide
ggacggcaaacaaatgagaactgtgtgaat

SEQ ID NO: 297338 - DNA, 30 bp, Artificial Sequence
  Synthetic oligonucleotide
acacgctgacggcctcaacaggttgtgaat

SEQ ID NO: 297339 - DNA, 30 bp, Artificial Sequence
  Synthetic oligonucleotide
aaggcaggggctaggatctaatttgtgaat

SEQ ID NO: 297340 - DNA, 30 bp, Artificial Sequence
  Synthetic oligonucleotide
cgcagtcgatgtccaggtaacaggttgaat

SEQ ID NO: 297341 - DNA, 30 bp, Artificial Sequence
  Synthetic oligonucleotide
ggattcccgccccgcggaaatcggttgaat

SEQ ID NO: 297342 - DNA, 30 bp, Artificial Sequence
  Synthetic oligonucleotide
ggcgcctaaatgaacgccttccctttgaat

SEQ ID NO: 297343 - DNA, 30 bp, Artificial Sequence
  Synthetic oligonucleotide
gcccaagttctcagaactcagccaaataat

SEQ ID NO: 297344 - DNA, 30 bp, Artificial Sequence
  Synthetic oligonucleotide
gatagacggtggacataatgagtaaataat

SEQ ID NO: 297345 - DNA, 30 bp, Artificial Sequence
  Synthetic oligonucleotide
gcgggctcgtcggattcggccgccaataat

SEQ ID NO: 297346 - DNA, 30 bp, Artificial Sequence
  Synthetic oligonucleotide
catgcttcgcggttaggaaaatccaataat

SEQ ID NO: 297347 - DNA, 30 bp, Artificial Sequence
  Synthetic oligonucleotide
aacccagcatgccacttcgtattcaataat

SEQ ID NO: 297348 - DNA, 30 bp, Artificial Sequence
  Synthetic oligonucleotide
tcgggcggtcactaggtaattgggaataat

SEQ ID NO: 297349 - DNA, 30 bp, Artificial Sequence
  Synthetic oligonucleotide
ttcttgcgcagcgtaaacacatggaataat

SEQ ID NO: 297350 - DNA, 30 bp, Artificial Sequence
  Synthetic oligonucleotide
gaaggatcttccggggttgggaataataat

SEQ ID NO: 297351 - DNA, 30 bp, Artificial Sequence
  Synthetic oligonucleotide
gctggaccgtatccaccagagtctaataat

SEQ ID NO: 297352 - DNA, 30 bp, Artificial Sequence
  Synthetic oligonucleotide
tgaccacaatgtgaggtcataattaataat

SEQ ID NO: 297353 - DNA, 30 bp, Artificial Sequence
  Synthetic oligonucleotide
ttctatcaacataaatagctgtaacataat

SEQ ID NO: 297354 - DNA, 30 bp, Artificial Sequence
  Synthetic oligonucleotide
cagcccgaaacgcctgcggacacacataat

SEQ ID NO: 297355 - DNA, 30 bp, Artificial Sequence
  Synthetic oligonucleotide
tatagagaccccggggtttgagcccataat

SEQ ID NO: 297356 - DNA, 30 bp, Artificial Sequence
  Synthetic oligonucleotide
gcccctctaccggcgacgaactgccataat

SEQ ID NO: 297357 - DNA, 30 bp, Artificial Sequence
  Synthetic oligonucleotide
acaagtcaccatcattcttgcgatcataat

SEQ ID NO: 297358 - DNA, 30 bp, Artificial Sequence
  Synthetic oligonucleotide
ggagactttccagtatttcaaactcataat

SEQ ID NO: 297359 - DNA, 30 bp, Artificial Sequence
  Synthetic oligonucleotide
ctataacatgtccgtgtggctgcagataat

SEQ ID NO: 297360 - DNA, 30 bp, Artificial Sequence
  Synthetic oligonucleotide
ggttcctccataaggtgaacaggagataat

SEQ ID NO: 297361 - DNA, 30 bp, Artificial Sequence
  Synthetic oligonucleotide
tggaaggatggatattacccagtagataat

SEQ ID NO: 297362 - DNA, 30 bp, Artificial Sequence
  Synthetic oligonucleotide
tcgtgaatttgagactgattattagataat

SEQ ID NO: 297363 - DNA, 30 bp, Artificial Sequence
  Synthetic oligonucleotide
tcttatagtggttatgctgtatccgataat

SEQ ID NO: 297364 - DNA, 30 bp, Artificial Sequence
  Synthetic oligonucleotide
ctctctcaccaaggggaatgggtcgataat

SEQ ID NO: 297365 - DNA, 30 bp, Artificial Sequence
  Synthetic oligonucleotide
ttagttggctaggcccgcgcattcgataat

SEQ ID NO: 297366 - DNA, 30 bp, Artificial Sequence
  Synthetic oligonucleotide
aatcgctgcaaagtggttgggaaggataat

SEQ ID NO: 297367 - DNA, 30 bp, Artificial Sequence
  Synthetic oligonucleotide
gttatccaggatgaactttcacgtgataat

SEQ ID NO: 297368 - DNA, 30 bp, Artificial Sequence
  Synthetic oligonucleotide
aactaggcagcatctcgaccgggatataat

SEQ ID NO: 297369 - DNA, 30 bp, Artificial Sequence
  Synthetic oligonucleotide
agggttcggggttatcacagggactataat

SEQ ID NO: 297370 - DNA, 30 bp, Artificial Sequence
  Synthetic oligonucleotide
cagctaatattgagtgtgagatcgtataat

SEQ ID NO: 297371 - DNA, 30 bp, Artificial Sequence
  Synthetic oligonucleotide
tttcaatcgcggggagagtctgtgtataat

SEQ ID NO: 297372 - DNA, 30 bp, Artificial Sequence
  Synthetic oligonucleotide
ggccctgtggcattttgctcggattataat

SEQ ID NO: 297373 - DNA, 30 bp, Artificial Sequence
  Synthetic oligonucleotide
aacgtcggggtgtaggagttccgttataat

SEQ ID NO: 297374 - DNA, 30 bp, Artificial Sequence
  Synthetic oligonucleotide
aaatgaatggaagcgtcgagggcaactaat

SEQ ID NO: 297375 - DNA, 30 bp, Artificial Sequence
  Synthetic oligonucleotide
tgggttggctggatgcactcgctaactaat

SEQ ID NO: 297376 - DNA, 30 bp, Artificial Sequence
  Synthetic oligonucleotide
ctgaagccggctttcagcatcggcactaat

SEQ ID NO: 297377 - DNA, 30 bp, Artificial Sequence
  Synthetic oligonucleotide
gcatcccctgcggtccaccaatcgactaat

SEQ ID NO: 297378 - DNA, 30 bp, Artificial Sequence
  Synthetic oligonucleotide
aaggaggacattcgcacacgcaatactaat

SEQ ID NO: 297379 - DNA, 30 bp, Artificial Sequence
  Synthetic oligonucleotide
gtgtcgggtggtcaagcgcgtcatcctaat

SEQ ID NO: 297380 - DNA, 30 bp, Artificial Sequence
  Synthetic oligonucleotide
cgggcgaatactgtccacggaactcctaat

SEQ ID NO: 297381 - DNA, 30 bp, Artificial Sequence
  Synthetic oligonucleotide
gtgtggcgagatagtacgatttaagctaat

SEQ ID NO: 297382 - DNA, 30 bp, Artificial Sequence
  Synthetic oligonucleotide
gactaatccaccggtcccaagagagctaat

SEQ ID NO: 297383 - DNA, 30 bp, Artificial Sequence
  Synthetic oligonucleotide
gaggatatgtcgttgcgctattaggctaat

SEQ ID NO: 297384 - DNA, 30 bp, Artificial Sequence
  Synthetic oligonucleotide
aaaaagtgatatcttatatgagctgctaat

SEQ ID NO: 297385 - DNA, 30 bp, Artificial Sequence
  Synthetic oligonucleotide
ggcgacactcggtcactatcacgtgctaat

SEQ ID NO: 297386 - DNA, 30 bp, Artificial Sequence
  Synthetic oligonucleotide
ctatggactccgcgtgaaagcgtatctaat

SEQ ID NO: 297387 - DNA, 30 bp, Artificial Sequence
  Synthetic oligonucleotide
ctaagggaaataaccgtggtaccctctaat

SEQ ID NO: 297388 - DNA, 30 bp, Artificial Sequence
  Synthetic oligonucleotide
tgtagacaacatcagagctttgagtctaat

SEQ ID NO: 297389 - DNA, 30 bp, Artificial Sequence
  Synthetic oligonucleotide
atggtatgggcgacaattcggtgttctaat

SEQ ID NO: 297390 - DNA, 30 bp, Artificial Sequence
  Synthetic oligonucleotide
tgagcgacgcatgaggccatgaaaagtaat

SEQ ID NO: 297391 - DNA, 30 bp, Artificial Sequence
  Synthetic oligonucleotide
gtaattttgccggtcgatgtaccaagtaat

SEQ ID NO: 297392 - DNA, 30 bp, Artificial Sequence
  Synthetic oligonucleotide
gagtagcgatctggcggaacaagcagtaat

SEQ ID NO: 297393 - DNA, 30 bp, Artificial Sequence
  Synthetic oligonucleotide
tatcgatgtcgggctacgatgagcagtaat

SEQ ID NO: 297394 - DNA, 30 bp, Artificial Sequence
  Synthetic oligonucleotide
acaagtatacaggaggaccggcgcagtaat

SEQ ID NO: 297395 - DNA, 30 bp, Artificial Sequence
  Synthetic oligonucleotide
cggtgatgagcaagatggcgctgcagtaat

SEQ ID NO: 297396 - DNA, 30 bp, Artificial Sequence
  Synthetic oligonucleotide
tgagtgagcaattaatattaacagagtaat

SEQ ID NO: 297397 - DNA, 30 bp, Artificial Sequence
  Synthetic oligonucleotide
acatcctggatgggtgtccgcaggagtaat

SEQ ID NO: 297398 - DNA, 30 bp, Artificial Sequence
  Synthetic oligonucleotide
aatgtcgatacttgccacttcgctagtaat

SEQ ID NO: 297399 - DNA, 30 bp, Artificial Sequence
  Synthetic oligonucleotide
tccaagctataattggctggactacgtaat

SEQ ID NO: 297400 - DNA, 30 bp, Artificial Sequence
  Synthetic oligonucleotide
tgaaaaactatgtcaaatacagtccgtaat

SEQ ID NO: 297401 - DNA, 30 bp, Artificial Sequence
  Synthetic oligonucleotide
tatgttggtcacactcgccgtaagcgtaat

SEQ ID NO: 297402 - DNA, 30 bp, Artificial Sequence
  Synthetic oligonucleotide
atcccaaggtctccaggacacccgcgtaat

SEQ ID NO: 297403 - DNA, 30 bp, Artificial Sequence
  Synthetic oligonucleotide
cgggggtgcgtctttgtacataggcgtaat

SEQ ID NO: 297404 - DNA, 30 bp, Artificial Sequence
  Synthetic oligonucleotide
taatgccatgcacacggaaggctgcgtaat

SEQ ID NO: 297405 - DNA, 30 bp, Artificial Sequence
  Synthetic oligonucleotide
aaatgtggtattggagcggttcatcgtaat

SEQ ID NO: 297406 - DNA, 30 bp, Artificial Sequence
  Synthetic oligonucleotide
accttagggactgatagggcaagtcgtaat

SEQ ID NO: 297407 - DNA, 30 bp, Artificial Sequence
  Synthetic oligonucleotide
ggatgagaatttctcgcgtctggtcgtaat

SEQ ID NO: 297408 - DNA, 30 bp, Artificial Sequence
  Synthetic oligonucleotide
aaaggaatcgtcagaaggccaccaggtaat

SEQ ID NO: 297409 - DNA, 30 bp, Artificial Sequence
  Synthetic oligonucleotide
tcccagaagcataaggtagtgttcggtaat

SEQ ID NO: 297410 - DNA, 30 bp, Artificial Sequence
  Synthetic oligonucleotide
acgctgaccgcagacccgtgagggggtaat

SEQ ID NO: 297411 - DNA, 30 bp, Artificial Sequence
  Synthetic oligonucleotide
acctaagaggcgtttcgaaggtggggtaat

SEQ ID NO: 297412 - DNA, 30 bp, Artificial Sequence
  Synthetic oligonucleotide
acaatacggctatgtaaccatgctggtaat

SEQ ID NO: 297413 - DNA, 30 bp, Artificial Sequence
  Synthetic oligonucleotide
ataagatcagcttagtactcgagtggtaat

SEQ ID NO: 297414 - DNA, 30 bp, Artificial Sequence
  Synthetic oligonucleotide
atattctgaggtcaggtgtgacaatgtaat

SEQ ID NO: 297415 - DNA, 30 bp, Artificial Sequence
  Synthetic oligonucleotide
aattgggacgaactcactggtagatgtaat

SEQ ID NO: 297416 - DNA, 30 bp, Artificial Sequence
  Synthetic oligonucleotide
ctagtaacacgtgagaatgtagtctgtaat

SEQ ID NO: 297417 - DNA, 30 bp, Artificial Sequence
  Synthetic oligonucleotide
agatctagttaaaatagctccgtctgtaat

SEQ ID NO: 297418 - DNA, 30 bp, Artificial Sequence
  Synthetic oligonucleotide
tgagattggtgagcggtaaaagattgtaat

SEQ ID NO: 297419 - DNA, 30 bp, Artificial Sequence
  Synthetic oligonucleotide
caggctgaaagatatccacctgattgtaat

SEQ ID NO: 297420 - DNA, 30 bp, Artificial Sequence
  Synthetic oligonucleotide
tccattggggatactatgtacctttgtaat

SEQ ID NO: 297421 - DNA, 30 bp, Artificial Sequence
  Synthetic oligonucleotide
cccgcaaatagtgagggggtaacaattaat

SEQ ID NO: 297422 - DNA, 30 bp, Artificial Sequence
  Synthetic oligonucleotide
gcgaattgaagtcttccatatctaattaat

SEQ ID NO: 297423 - DNA, 30 bp, Artificial Sequence
  Synthetic oligonucleotide
aaatatagtgctggagcgtctaccattaat

SEQ ID NO: 297424 - DNA, 30 bp, Artificial Sequence
  Synthetic oligonucleotide
gcgggttatgtgctatcccggggcattaat

SEQ ID NO: 297425 - DNA, 30 bp, Artificial Sequence
  Synthetic oligonucleotide
taaactgcaaggccgcccgatctcattaat

SEQ ID NO: 297426 - DNA, 30 bp, Artificial Sequence
  Synthetic oligonucleotide
gcagggttggccactggttatgtcattaat

SEQ ID NO: 297427 - DNA, 30 bp, Artificial Sequence
  Synthetic oligonucleotide
taagcgctttggacgtgagatcggattaat

SEQ ID NO: 297428 - DNA, 30 bp, Artificial Sequence
  Synthetic oligonucleotide
tgtcgacgaaactacgtcttagtgattaat

SEQ ID NO: 297429 - DNA, 30 bp, Artificial Sequence
  Synthetic oligonucleotide
gataagtaggtagaccatcggttgattaat

SEQ ID NO: 297430 - DNA, 30 bp, Artificial Sequence
  Synthetic oligonucleotide
atcactcgtctcgcgtctcccaatattaat

SEQ ID NO: 297431 - DNA, 30 bp, Artificial Sequence
  Synthetic oligonucleotide
cacgagctgcggattagtcaaattattaat

SEQ ID NO: 297432 - DNA, 30 bp, Artificial Sequence
  Synthetic oligonucleotide
aatccccgagggcctttaaacaaacttaat

SEQ ID NO: 297433 - DNA, 30 bp, Artificial Sequence
  Synthetic oligonucleotide
taaagacccttgattttacgggaacttaat

SEQ ID NO: 297434 - DNA, 30 bp, Artificial Sequence
  Synthetic oligonucleotide
agtcatgaaacctggacagccatccttaat

SEQ ID NO: 297435 - DNA, 30 bp, Artificial Sequence
  Synthetic oligonucleotide
accttggggattgccacgccaaggcttaat

SEQ ID NO: 297436 - DNA, 30 bp, Artificial Sequence
  Synthetic oligonucleotide
cttagggaaatggcccccgaccggcttaat

SEQ ID NO: 297437 - DNA, 30 bp, Artificial Sequence
  Synthetic oligonucleotide
gatcaagaactgccgaagtagttgcttaat

SEQ ID NO: 297438 - DNA, 30 bp, Artificial Sequence
  Synthetic oligonucleotide
aatgtaagttcgagaggcgccggtcttaat

SEQ ID NO: 297439 - DNA, 30 bp, Artificial Sequence
  Synthetic oligonucleotide
agatgaaccgacttcctgatgaccgttaat

SEQ ID NO: 297440 - DNA, 30 bp, Artificial Sequence
  Synthetic oligonucleotide
cgagtaacgaccctgtacagccgcgttaat

SEQ ID NO: 297441 - DNA, 30 bp, Artificial Sequence
  Synthetic oligonucleotide
cgtagggaccccgcaaagccgtgtgttaat

SEQ ID NO: 297442 - DNA, 30 bp, Artificial Sequence
  Synthetic oligonucleotide
gggtatagcgcaagtaatccgtttgttaat

SEQ ID NO: 297443 - DNA, 30 bp, Artificial Sequence
  Synthetic oligonucleotide
ggacgaaggcaacaagaacgttttgttaat

SEQ ID NO: 297444 - DNA, 30 bp, Artificial Sequence
  Synthetic oligonucleotide
cattgtgtcacctaaccagtagaatttaat

SEQ ID NO: 297445 - DNA, 30 bp, Artificial Sequence
  Synthetic oligonucleotide
ttacttctgttgatcttttttggatttaat

SEQ ID NO: 297446 - DNA, 30 bp, Artificial Sequence
  Synthetic oligonucleotide
gcaacgtgttagtgctgatgaaactttaat

SEQ ID NO: 297447 - DNA, 30 bp, Artificial Sequence
  Synthetic oligonucleotide
cgtagtgtaccatagcggcgaatgtttaat

SEQ ID NO: 297448 - DNA, 30 bp, Artificial Sequence
  Synthetic oligonucleotide
cgacgagcgctcgggtaacttaattttaat

SEQ ID NO: 297449 - DNA, 30 bp, Artificial Sequence
  Synthetic oligonucleotide
gcccaaatatcgctaagcgtagcttttaat

SEQ ID NO: 297450 - DNA, 30 bp, Artificial Sequence
  Synthetic oligonucleotide
ggaatctgggcacgtaggtttagaaaacat

SEQ ID NO: 297451 - DNA, 30 bp, Artificial Sequence
  Synthetic oligonucleotide
acttttaactagtgataccgaggaaaacat

SEQ ID NO: 297452 - DNA, 30 bp, Artificial Sequence
  Synthetic oligonucleotide
aagataggtttcaatccagactgcaaacat

SEQ ID NO: 297453 - DNA, 30 bp, Artificial Sequence
  Synthetic oligonucleotide
ctttaacataaccagggtagagtcaaacat

SEQ ID NO: 297454 - DNA, 30 bp, Artificial Sequence
  Synthetic oligonucleotide
caaaacttcgggcggacaaggttcaaacat

SEQ ID NO: 297455 - DNA, 30 bp, Artificial Sequence
  Synthetic oligonucleotide
ggtccgcaggcgccccctacagggaaacat

SEQ ID NO: 297456 - DNA, 30 bp, Artificial Sequence
  Synthetic oligonucleotide
ttctgtggtttactgccaatctggaaacat

SEQ ID NO: 297457 - DNA, 29 bp, Artificial Sequence
  Synthetic oligonucleotide
acccttaaaaactgtaatttctgaaacat

SEQ ID NO: 297458 - DNA, 30 bp, Artificial Sequence
  Synthetic oligonucleotide
tttactgcccaacggcaaaagggacaacat

SEQ ID NO: 297459 - DNA, 30 bp, Artificial Sequence
  Synthetic oligonucleotide
cacaaaattttccaaaaagatttacaacat

SEQ ID NO: 297460 - DNA, 30 bp, Artificial Sequence
  Synthetic oligonucleotide
gagaccgatgaattggtatgaacccaacat

SEQ ID NO: 297461 - DNA, 30 bp, Artificial Sequence
  Synthetic oligonucleotide
tgctagaatcagactatgaccacccaacat

SEQ ID NO: 297462 - DNA, 30 bp, Artificial Sequence
  Synthetic oligonucleotide
catttatgttcctgagaaattggccaacat

SEQ ID NO: 297463 - DNA, 30 bp, Artificial Sequence
  Synthetic oligonucleotide
ccgcgggatgtagaaacgcgggcgcaacat

SEQ ID NO: 297464 - DNA, 30 bp, Artificial Sequence
  Synthetic oligonucleotide
accggatatcgaataataatatctcaacat

SEQ ID NO: 297465 - DNA, 30 bp, Artificial Sequence
  Synthetic oligonucleotide
atgaacgtatcggaggaagcatgtcaacat

SEQ ID NO: 297466 - DNA, 30 bp, Artificial Sequence
  Synthetic oligonucleotide
cagtggcaggttatgcgcacaattcaacat

SEQ ID NO: 297467 - DNA, 30 bp, Artificial Sequence
  Synthetic oligonucleotide
tatgtcatacaatgtagactcgaagaacat

SEQ ID NO: 297468 - DNA, 30 bp, Artificial Sequence
  Synthetic oligonucleotide
cttcgagcggtgaatccagcttcagaacat

SEQ ID NO: 297469 - DNA, 30 bp, Artificial Sequence
  Synthetic oligonucleotide
aattcgctacaaacaatcccattagaacat

SEQ ID NO: 297470 - DNA, 30 bp, Artificial Sequence
  Synthetic oligonucleotide
gcgccgcttctttttgagcgagtcgaacat

SEQ ID NO: 297471 - DNA, 30 bp, Artificial Sequence
  Synthetic oligonucleotide
cgatactgtccgatgcaagtgcaggaacat

SEQ ID NO: 297472 - DNA, 30 bp, Artificial Sequence
  Synthetic oligonucleotide
cacgattatgcaggccccgcaggggaacat

SEQ ID NO: 297473 - DNA, 30 bp, Artificial Sequence
  Synthetic oligonucleotide
taggcaagcacccaatgaacggtataacat

SEQ ID NO: 297474 - DNA, 30 bp, Artificial Sequence
  Synthetic oligonucleotide
gttaataccttctcagacggttcctaacat

SEQ ID NO: 297475 - DNA, 30 bp, Artificial Sequence
  Synthetic oligonucleotide
ttgctgactgtggatggtgtaatctaacat

SEQ ID NO: 297476 - DNA, 30 bp, Artificial Sequence
  Synthetic oligonucleotide
ttcaacgcttatgcgggcgactagtaacat

SEQ ID NO: 297477 - DNA, 30 bp, Artificial Sequence
  Synthetic oligonucleotide
aaaagttgaaatctctagattaggtaacat

SEQ ID NO: 297478 - DNA, 30 bp, Artificial Sequence
  Synthetic oligonucleotide
gcctgctgttgcatagtttatatgtaacat

SEQ ID NO: 297479 - DNA, 30 bp, Artificial Sequence
  Synthetic oligonucleotide
gcccaagttgcgtttaatccaacttaacat

SEQ ID NO: 297480 - DNA, 30 bp, Artificial Sequence
  Synthetic oligonucleotide
gacccgacttcgtaatgcaaaaaaacacat

SEQ ID NO: 297481 - DNA, 30 bp, Artificial Sequence
  Synthetic oligonucleotide
cttatttccataagtgaccgcctaacacat

SEQ ID NO: 297482 - DNA, 30 bp, Artificial Sequence
  Synthetic oligonucleotide
ggatagatatcttcttgcgaggagacacat

SEQ ID NO: 297483 - DNA, 30 bp, Artificial Sequence
  Synthetic oligonucleotide
ctcaaggtcggtcgttgagatgcgacacat

SEQ ID NO: 297484 - DNA, 30 bp, Artificial Sequence
  Synthetic oligonucleotide
cgagctgttcgtttcgcaagtcggacacat

SEQ ID NO: 297485 - DNA, 30 bp, Artificial Sequence
  Synthetic oligonucleotide
tgcatctgccgagttggatttctgacacat

SEQ ID NO: 297486 - DNA, 30 bp, Artificial Sequence
  Synthetic oligonucleotide
cacggcgtcatctcgacctcgtaaccacat

SEQ ID NO: 297487 - DNA, 31 bp, Artificial Sequence
  Synthetic oligonucleotide
atcaaatgtcttcgtccgttatggaccacat

SEQ ID NO: 297488 - DNA, 30 bp, Artificial Sequence
  Synthetic oligonucleotide
agcgggaggaaccggttttgctccccacat

SEQ ID NO: 297489 - DNA, 30 bp, Artificial Sequence
  Synthetic oligonucleotide
ttttgggcaaggtgttccgctatgccacat

SEQ ID NO: 297490 - DNA, 30 bp, Artificial Sequence
  Synthetic oligonucleotide
tatgtatacagctactccatggaagcacat

SEQ ID NO: 297491 - DNA, 30 bp, Artificial Sequence
  Synthetic oligonucleotide
aaaaccagagcgatacagcgtacagcacat

SEQ ID NO: 297492 - DNA, 30 bp, Artificial Sequence
  Synthetic oligonucleotide
ggatttagtatatggaccagtaccgcacat

SEQ ID NO: 297493 - DNA, 30 bp, Artificial Sequence
  Synthetic oligonucleotide
aagcagctacggtctagtcagtccgcacat

SEQ ID NO: 297494 - DNA, 30 bp, Artificial Sequence
  Synthetic oligonucleotide
cccctcgtgtcaggtaacgttggcgcacat

SEQ ID NO: 297495 - DNA, 30 bp, Artificial Sequence
  Synthetic oligonucleotide
ggctcgctatgatttgactcatgcgcacat

SEQ ID NO: 297496 - DNA, 30 bp, Artificial Sequence
  Synthetic oligonucleotide
atggggccttttagctacacctgcgcacat

SEQ ID NO: 297497 - DNA, 30 bp, Artificial Sequence
  Synthetic oligonucleotide
tataaacagggtaaagacgccaaggcacat

SEQ ID NO: 297498 - DNA, 30 bp, Artificial Sequence
  Synthetic oligonucleotide
tcaccccgtgtttaatccaacactgcacat

SEQ ID NO: 297499 - DNA, 30 bp, Artificial Sequence
  Synthetic oligonucleotide
gcattggtcagtccagcagagactgcacat

SEQ ID NO: 297500 - DNA, 30 bp, Artificial Sequence
  Synthetic oligonucleotide
atcgtcagtacctgaggtccttctgcacat

SEQ ID NO: 297501 - DNA, 30 bp, Artificial Sequence
  Synthetic oligonucleotide
cgtccccgagtccgaagatttcgtgcacat

SEQ ID NO: 297502 - DNA, 30 bp, Artificial Sequence
  Synthetic oligonucleotide
caccgaaggattggattgcaacgatcacat

SEQ ID NO: 297503 - DNA, 30 bp, Artificial Sequence
  Synthetic oligonucleotide
gacctattcgagtatgttcgccgatcacat

SEQ ID NO: 297504 - DNA, 30 bp, Artificial Sequence
  Synthetic oligonucleotide
ttatagaattcaacacgactttactcacat

SEQ ID NO: 297505 - DNA, 30 bp, Artificial Sequence
  Synthetic oligonucleotide
ggcagttcaagttggtaagggtcctcacat

SEQ ID NO: 297506 - DNA, 30 bp, Artificial Sequence
  Synthetic oligonucleotide
tatcataactagagggtaatgcgctcacat

SEQ ID NO: 297507 - DNA, 30 bp, Artificial Sequence
  Synthetic oligonucleotide
ggtacgggaaagagaacaagacgttcacat

SEQ ID NO: 297508 - DNA, 30 bp, Artificial Sequence
  Synthetic oligonucleotide
cttctagtcggtgataatgcctgttcacat

SEQ ID NO: 297509 - DNA, 30 bp, Artificial Sequence
  Synthetic oligonucleotide
atagggggagttcgttcctactaaagacat

SEQ ID NO: 297510 - DNA, 30 bp, Artificial Sequence
  Synthetic oligonucleotide
ccgaggcacaaaatacctcgaccaagacat

SEQ ID NO: 297511 - DNA, 30 bp, Artificial Sequence
  Synthetic oligonucleotide
gcaaaggctacagcctgaaccagaagacat

SEQ ID NO: 297512 - DNA, 30 bp, Artificial Sequence
  Synthetic oligonucleotide
tagggggcgtttgccacaatgagaagacat

SEQ ID NO: 297513 - DNA, 30 bp, Artificial Sequence
  Synthetic oligonucleotide
gggtgaggccgttggtcatgagacagacat

SEQ ID NO: 297514 - DNA, 30 bp, Artificial Sequence
  Synthetic oligonucleotide
agtggcgacgtggtttgtcaagtcagacat

SEQ ID NO: 297515 - DNA, 30 bp, Artificial Sequence
  Synthetic oligonucleotide
tccggtccgtgaactttaaatggtagacat

SEQ ID NO: 297516 - DNA, 30 bp, Artificial Sequence
  Synthetic oligonucleotide
atcggtaggagtatttagggtggtagacat

SEQ ID NO: 297517 - DNA, 30 bp, Artificial Sequence
  Synthetic oligonucleotide
atggatattacaagctacattggtagacat

SEQ ID NO: 297518 - DNA, 30 bp, Artificial Sequence
  Synthetic oligonucleotide
gggcatctattctggcacggctgacgacat

SEQ ID NO: 297519 - DNA, 30 bp, Artificial Sequence
  Synthetic oligonucleotide
agctatggaattaattaggggatacgacat

SEQ ID NO: 297520 - DNA, 30 bp, Artificial Sequence
  Synthetic oligonucleotide
aaggcgttgggctggttcatagtacgacat

SEQ ID NO: 297521 - DNA, 30 bp, Artificial Sequence
  Synthetic oligonucleotide
cctttgtgccgttaaaagttccgccgacat

SEQ ID NO: 297522 - DNA, 30 bp, Artificial Sequence
  Synthetic oligonucleotide
ttaaatagtgctcaacgcaaaggccgacat

SEQ ID NO: 297523 - DNA, 30 bp, Artificial Sequence
  Synthetic oligonucleotide
ctcagttcgttaaagagactgcggcgacat

SEQ ID NO: 297524 - DNA, 30 bp, Artificial Sequence
  Synthetic oligonucleotide
taactaacgtgctgactgcgaatgcgacat

SEQ ID NO: 297525 - DNA, 30 bp, Artificial Sequence
  Synthetic oligonucleotide
agtgacgcttggttcggtgacgctcgacat

SEQ ID NO: 297526 - DNA, 30 bp, Artificial Sequence
  Synthetic oligonucleotide
tcattgtgtgctcgtcatgctgtcggacat

SEQ ID NO: 297527 - DNA, 30 bp, Artificial Sequence
  Synthetic oligonucleotide
ttagcgatcggttcccaggttccgggacat

SEQ ID NO: 297528 - DNA, 30 bp, Artificial Sequence
  Synthetic oligonucleotide
ttctaacatgatctacagaaatttggacat

SEQ ID NO: 297529 - DNA, 30 bp, Artificial Sequence
  Synthetic oligonucleotide
ataaggacaatgtccttgcatcgatgacat

SEQ ID NO: 297530 - DNA, 30 bp, Artificial Sequence
  Synthetic oligonucleotide
ccctacttaagcttccccgctatatgacat

SEQ ID NO: 297531 - DNA, 30 bp, Artificial Sequence
  Synthetic oligonucleotide
atgctaaagcggagccatcccagctgacat

SEQ ID NO: 297532 - DNA, 30 bp, Artificial Sequence
  Synthetic oligonucleotide
ggatggagtattgctggcttggggtgacat

SEQ ID NO: 297533 - DNA, 30 bp, Artificial Sequence
  Synthetic oligonucleotide
gtgtgcaccaaagttattccgatgtgacat

SEQ ID NO: 297534 - DNA, 30 bp, Artificial Sequence
  Synthetic oligonucleotide
tctgtgctcacaggggccaagtaaatacat

SEQ ID NO: 297535 - DNA, 30 bp, Artificial Sequence
  Synthetic oligonucleotide
ttgatcacgtgctcgctttgctgaatacat

SEQ ID NO: 297536 - DNA, 30 bp, Artificial Sequence
  Synthetic oligonucleotide
tcggtaacattagtatgctgcacgatacat

SEQ ID NO: 297537 - DNA, 30 bp, Artificial Sequence
  Synthetic oligonucleotide
cccccaggcacagtttagaatgggatacat

SEQ ID NO: 297538 - DNA, 30 bp, Artificial Sequence
  Synthetic oligonucleotide
cctattgtagacgaatcactccgtatacat

SEQ ID NO: 297539 - DNA, 30 bp, Artificial Sequence
  Synthetic oligonucleotide
tgtaaaggagtaactggcagtgaactacat

SEQ ID NO: 297540 - DNA, 30 bp, Artificial Sequence
  Synthetic oligonucleotide
ggcgcgagggtctcggtatgaccactacat

SEQ ID NO: 297541 - DNA, 30 bp, Artificial Sequence
  Synthetic oligonucleotide
tttcgagcgtataacgcgtatctactacat

SEQ ID NO: 297542 - DNA, 30 bp, Artificial Sequence
  Synthetic oligonucleotide
aggttcgatagcgagtgttcgaacctacat

SEQ ID NO: 297543 - DNA, 30 bp, Artificial Sequence
  Synthetic oligonucleotide
gcgcatcgcataagaccctgtgacctacat

SEQ ID NO: 297544 - DNA, 30 bp, Artificial Sequence
  Synthetic oligonucleotide
atggacaaacatgccctgcctatcctacat

SEQ ID NO: 297545 - DNA, 30 bp, Artificial Sequence
  Synthetic oligonucleotide
atgtaagccacactatgggaaaacgtacat

SEQ ID NO: 297546 - DNA, 30 bp, Artificial Sequence
  Synthetic oligonucleotide
taggaccggcatattaaggaccgcgtacat

SEQ ID NO: 297547 - DNA, 30 bp, Artificial Sequence
  Synthetic oligonucleotide
gtaataacgggcaaactagtaaaggtacat

SEQ ID NO: 297548 - DNA, 30 bp, Artificial Sequence
  Synthetic oligonucleotide
acacaagttggtactgaggccaatgtacat

SEQ ID NO: 297549 - DNA, 30 bp, Artificial Sequence
  Synthetic oligonucleotide
gtcagacaattataaagagcggatgtacat

SEQ ID NO: 297550 - DNA, 30 bp, Artificial Sequence
  Synthetic oligonucleotide
ttaatgcgtcgtcggttagtaattgtacat

SEQ ID NO: 297551 - DNA, 30 bp, Artificial Sequence
  Synthetic oligonucleotide
gatgggcgaagcacagataccgttgtacat

SEQ ID NO: 297552 - DNA, 30 bp, Artificial Sequence
  Synthetic oligonucleotide
ccccttgagggtctcgaacctgttgtacat

SEQ ID NO: 297553 - DNA, 30 bp, Artificial Sequence
  Synthetic oligonucleotide
cgggagcgattcgagacttttgttgtacat

SEQ ID NO: 297554 - DNA, 30 bp, Artificial Sequence
  Synthetic oligonucleotide
cctgtacggtgattgtagaataacttacat

SEQ ID NO: 297555 - DNA, 30 bp, Artificial Sequence
  Synthetic oligonucleotide
tagtcaaagggggtcacaagtaccttacat

SEQ ID NO: 297556 - DNA, 30 bp, Artificial Sequence
  Synthetic oligonucleotide
tgttttgaatcggacaggcttagcttacat

SEQ ID NO: 297557 - DNA, 30 bp, Artificial Sequence
  Synthetic oligonucleotide
agtcctaccccgccaagcctatgcttacat

SEQ ID NO: 297558 - DNA, 30 bp, Artificial Sequence
  Synthetic oligonucleotide
ggtcggggattctttagtgtgtgcttacat

SEQ ID NO: 297559 - DNA, 30 bp, Artificial Sequence
  Synthetic oligonucleotide
atttcgcgtatacgtccgatcgtcttacat

SEQ ID NO: 297560 - DNA, 30 bp, Artificial Sequence
  Synthetic oligonucleotide
gtacgcgcacgtgttatgcgaaagttacat

SEQ ID NO: 297561 - DNA, 30 bp, Artificial Sequence
  Synthetic oligonucleotide
acgctagagatttctgagtgctagttacat

SEQ ID NO: 297562 - DNA, 30 bp, Artificial Sequence
  Synthetic oligonucleotide
tgtcaggatcgaattcaagtttggttacat

SEQ ID NO: 297563 - DNA, 30 bp, Artificial Sequence
  Synthetic oligonucleotide
tcatggatgttgtgcaattactagaaccat

SEQ ID NO: 297564 - DNA, 30 bp, Artificial Sequence
  Synthetic oligonucleotide
taggctgatttccggtactcccggaaccat

SEQ ID NO: 297565 - DNA, 30 bp, Artificial Sequence
  Synthetic oligonucleotide
caccgggcccggcaccgtgcggataaccat

SEQ ID NO: 297566 - DNA, 30 bp, Artificial Sequence
  Synthetic oligonucleotide
ggttagttatagggaagtataatacaccat

SEQ ID NO: 297567 - DNA, 30 bp, Artificial Sequence
  Synthetic oligonucleotide
tgtcacatagcgttaacatgacatcaccat

SEQ ID NO: 297568 - DNA, 30 bp, Artificial Sequence
  Synthetic oligonucleotide
taaaaagaaagaagcgcccagggtcaccat

SEQ ID NO: 297569 - DNA, 30 bp, Artificial Sequence
  Synthetic oligonucleotide
ggtgacgagcgcctcgaaatctgtcaccat

SEQ ID NO: 297570 - DNA, 30 bp, Artificial Sequence
  Synthetic oligonucleotide
acctctcacggtttggttgcaggtgaccat

SEQ ID NO: 297571 - DNA, 30 bp, Artificial Sequence
  Synthetic oligonucleotide
gacgttatataagttcgtgcaattgaccat

SEQ ID NO: 297572 - DNA, 30 bp, Artificial Sequence
  Synthetic oligonucleotide
ataccggggtatgcctcagtctttgaccat

SEQ ID NO: 297573 - DNA, 30 bp, Artificial Sequence
  Synthetic oligonucleotide
gctagcactattattttcccagcctaccat

SEQ ID NO: 297574 - DNA, 30 bp, Artificial Sequence
  Synthetic oligonucleotide
ggtgcgtaggtatcactgttatcgtaccat

SEQ ID NO: 297575 - DNA, 30 bp, Artificial Sequence
  Synthetic oligonucleotide
atttaaactgccggccgtcaaccaacccat

SEQ ID NO: 297576 - DNA, 30 bp, Artificial Sequence
  Synthetic oligonucleotide
cttccggtgttcagtcggatctgaacccat

SEQ ID NO: 297577 - DNA, 30 bp, Artificial Sequence
  Synthetic oligonucleotide
gctactcacattcgtaaagttttaacccat

SEQ ID NO: 297578 - DNA, 30 bp, Artificial Sequence
  Synthetic oligonucleotide
cgttctgttatgaagtgggttgacacccat

SEQ ID NO: 297579 - DNA, 30 bp, Artificial Sequence
  Synthetic oligonucleotide
acttaaactctcattgcaaatcgcccccat

SEQ ID NO: 297580 - DNA, 30 bp, Artificial Sequence
  Synthetic oligonucleotide
gagaattgacttttatggaacacgccccat

SEQ ID NO: 297581 - DNA, 30 bp, Artificial Sequence
  Synthetic oligonucleotide
gcccggagacaaactggggttcggccccat

SEQ ID NO: 297582 - DNA, 30 bp, Artificial Sequence
  Synthetic oligonucleotide
tccagaatttggatacatggaattccccat

SEQ ID NO: 297583 - DNA, 30 bp, Artificial Sequence
  Synthetic oligonucleotide
agtgggtacccgagaattgtcagagcccat

SEQ ID NO: 297584 - DNA, 30 bp, Artificial Sequence
  Synthetic oligonucleotide
atacaagggagttgttcgcaggtcgcccat

SEQ ID NO: 297585 - DNA, 30 bp, Artificial Sequence
  Synthetic oligonucleotide
gatctacggcattatcatttgacggcccat

SEQ ID NO: 297586 - DNA, 30 bp, Artificial Sequence
  Synthetic oligonucleotide
taggcgtaaaaaggtgtctagaatgcccat

SEQ ID NO: 297587 - DNA, 30 bp, Artificial Sequence
  Synthetic oligonucleotide
ttccgatgatgtggtcgggtgtctgcccat

SEQ ID NO: 297588 - DNA, 30 bp, Artificial Sequence
  Synthetic oligonucleotide
taccggattagcggatctgtatgtgcccat

SEQ ID NO: 297589 - DNA, 30 bp, Artificial Sequence
  Synthetic oligonucleotide
cccaaacgacttcgtgtggaagttgcccat

SEQ ID NO: 297590 - DNA, 30 bp, Artificial Sequence
  Synthetic oligonucleotide
ggtcccaataaaacatcatccagatcccat

SEQ ID NO: 297591 - DNA, 30 bp, Artificial Sequence
  Synthetic oligonucleotide
gcctatatgcgacagcgttgctggtcccat

SEQ ID NO: 297592 - DNA, 30 bp, Artificial Sequence
  Synthetic oligonucleotide
ataaaatgtgggcacgtctcaagttcccat

SEQ ID NO: 297593 - DNA, 30 bp, Artificial Sequence
  Synthetic oligonucleotide
cgagagtcaagtcttagcagaggttcccat

SEQ ID NO: 297594 - DNA, 30 bp, Artificial Sequence
  Synthetic oligonucleotide
gaggttcaggtctgaagactggacagccat

SEQ ID NO: 297595 - DNA, 30 bp, Artificial Sequence
  Synthetic oligonucleotide
ctaactaggtcctcctaggattacagccat

SEQ ID NO: 297596 - DNA, 30 bp, Artificial Sequence
  Synthetic oligonucleotide
ccgagtggctttagacgaagtgggagccat

SEQ ID NO: 297597 - DNA, 30 bp, Artificial Sequence
  Synthetic oligonucleotide
tgcctccagcacagtagtcattggagccat

SEQ ID NO: 297598 - DNA, 30 bp, Artificial Sequence
  Synthetic oligonucleotide
aattttgttgaataactcaacgatagccat

SEQ ID NO: 297599 - DNA, 30 bp, Artificial Sequence
  Synthetic oligonucleotide
aaacttggttcacgaggttgtgcccgccat

SEQ ID NO: 297600 - DNA, 30 bp, Artificial Sequence
  Synthetic oligonucleotide
taagagtcaggtttacgcgcccggcgccat

SEQ ID NO: 297601 - DNA, 30 bp, Artificial Sequence
  Synthetic oligonucleotide
ggatcgtctgcgactgccatgattcgccat

SEQ ID NO: 297602 - DNA, 30 bp, Artificial Sequence
  Synthetic oligonucleotide
acagtaccaaagaatccgtagcttcgccat

SEQ ID NO: 297603 - DNA, 30 bp, Artificial Sequence
  Synthetic oligonucleotide
cgcggatttgtatggggcctccaaggccat

SEQ ID NO: 297604 - DNA, 30 bp, Artificial Sequence
  Synthetic oligonucleotide
cgccctgatcctgtgggaatttaaggccat

SEQ ID NO: 297605 - DNA, 30 bp, Artificial Sequence
  Synthetic oligonucleotide
tgagccagcgttagaactaaaaacggccat

SEQ ID NO: 297606 - DNA, 30 bp, Artificial Sequence
  Synthetic oligonucleotide
ggttttgaggccagagcagcgcacggccat

SEQ ID NO: 297607 - DNA, 30 bp, Artificial Sequence
  Synthetic oligonucleotide
ttcaatgccggtgtaaactcgcccggccat

SEQ ID NO: 297608 - DNA, 30 bp, Artificial Sequence
  Synthetic oligonucleotide
gccggcgggtagttttgaaggaagggccat

SEQ ID NO: 297609 - DNA, 30 bp, Artificial Sequence
  Synthetic oligonucleotide
ggcatccttggcaaccactcggatggccat

SEQ ID NO: 297610 - DNA, 30 bp, Artificial Sequence
  Synthetic oligonucleotide
catgtcgatagagttgcctggcgatgccat

SEQ ID NO: 297611 - DNA, 30 bp, Artificial Sequence
  Synthetic oligonucleotide
gaatgacgtgaaagagattagaagtgccat

SEQ ID NO: 297612 - DNA, 30 bp, Artificial Sequence
  Synthetic oligonucleotide
tgtaatttgagtggtaccgtgtaaatccat

SEQ ID NO: 297613 - DNA, 30 bp, Artificial Sequence
  Synthetic oligonucleotide
gttttcggggtacgtgatcagttaatccat

SEQ ID NO: 297614 - DNA, 30 bp, Artificial Sequence
  Synthetic oligonucleotide
cccgacgtttccatactgtcgaacatccat

SEQ ID NO: 297615 - DNA, 30 bp, Artificial Sequence
  Synthetic oligonucleotide
taggaccggccggcggtagatcttatccat

SEQ ID NO: 297616 - DNA, 30 bp, Artificial Sequence
  Synthetic oligonucleotide
ggcagcaaacaaaatgaatagatcctccat

SEQ ID NO: 297617 - DNA, 30 bp, Artificial Sequence
  Synthetic oligonucleotide
cgatggtcgaacaaatggcttctggtccat

SEQ ID NO: 297618 - DNA, 30 bp, Artificial Sequence
  Synthetic oligonucleotide
gtattgacattttaaataataaatgtccat

SEQ ID NO: 297619 - DNA, 30 bp, Artificial Sequence
  Synthetic oligonucleotide
cagtatggcagacagtattgtcatgtccat

SEQ ID NO: 297620 - DNA, 30 bp, Artificial Sequence
  Synthetic oligonucleotide
gcatgcccattggaaacggtcgcattccat

SEQ ID NO: 297621 - DNA, 30 bp, Artificial Sequence
  Synthetic oligonucleotide
aagctaggggtagggatcgtgagattccat

SEQ ID NO: 297622 - DNA, 30 bp, Artificial Sequence
  Synthetic oligonucleotide
gcatctgggatctgagtaatgcacttccat

SEQ ID NO: 297623 - DNA, 30 bp, Artificial Sequence
  Synthetic oligonucleotide
ttttctgtaggagaagatgcacccttccat

SEQ ID NO: 297624 - DNA, 30 bp, Artificial Sequence
  Synthetic oligonucleotide
gggaggggagacggctacagttggttccat

SEQ ID NO: 297625 - DNA, 30 bp, Artificial Sequence
  Synthetic oligonucleotide
acacttcacagtcgaaaggtagatttccat

SEQ ID NO: 297626 - DNA, 30 bp, Artificial Sequence
  Synthetic oligonucleotide
cctcctacaacagccatagcagcaaagcat

SEQ ID NO: 297627 - DNA, 30 bp, Artificial Sequence
  Synthetic oligonucleotide
gtgacgcacgagtacatcatgagaaagcat

SEQ ID NO: 297628 - DNA, 30 bp, Artificial Sequence
  Synthetic oligonucleotide
ttgagtaccggaggcccgcaacgaaagcat

SEQ ID NO: 297629 - DNA, 30 bp, Artificial Sequence
  Synthetic oligonucleotide
gtatagctaccagggtcagtccgaaagcat

SEQ ID NO: 297630 - DNA, 30 bp, Artificial Sequence
  Synthetic oligonucleotide
ctatggcgtcagtagggaggtttaaagcat

SEQ ID NO: 297631 - DNA, 30 bp, Artificial Sequence
  Synthetic oligonucleotide
catttgctcagagttactcgcaccaagcat

SEQ ID NO: 297632 - DNA, 30 bp, Artificial Sequence
  Synthetic oligonucleotide
aaagcgtgacaacagcggttggtcaagcat

SEQ ID NO: 297633 - DNA, 30 bp, Artificial Sequence
  Synthetic oligonucleotide
actctctacaagctaaattgaatgaagcat

SEQ ID NO: 297634 - DNA, 30 bp, Artificial Sequence
  Synthetic oligonucleotide
aggctcctatcggggtactaaactaagcat

SEQ ID NO: 297635 - DNA, 30 bp, Artificial Sequence
  Synthetic oligonucleotide
cttgacatactaggcacattgactaagcat

SEQ ID NO: 297636 - DNA, 30 bp, Artificial Sequence
  Synthetic oligonucleotide
gaagagaggacttataattaagttaagcat

SEQ ID NO: 297637 - DNA, 30 bp, Artificial Sequence
  Synthetic oligonucleotide
agagacaacgctctatattttaagcagcat

SEQ ID NO: 297638 - DNA, 30 bp, Artificial Sequence
  Synthetic oligonucleotide
ttaacgacaagcaataagggcgagcagcat

SEQ ID NO: 297639 - DNA, 30 bp, Artificial Sequence
  Synthetic oligonucleotide
ggaccagaccaattaggccttcctcagcat

SEQ ID NO: 297640 - DNA, 30 bp, Artificial Sequence
  Synthetic oligonucleotide
gcgcttagataagcaactaagggtcagcat

SEQ ID NO: 297641 - DNA, 30 bp, Artificial Sequence
  Synthetic oligonucleotide
aagccgtgcgatgcaaagtattaagagcat

SEQ ID NO: 297642 - DNA, 30 bp, Artificial Sequence
  Synthetic oligonucleotide
ggtggcatagtattgtaaaccagagagcat

SEQ ID NO: 297643 - DNA, 30 bp, Artificial Sequence
  Synthetic oligonucleotide
tgctaacgttgatgcgacttccgagagcat

SEQ ID NO: 297644 - DNA, 30 bp, Artificial Sequence
  Synthetic oligonucleotide
caaacaaatgttccgtgcaccatagagcat

SEQ ID NO: 297645 - DNA, 30 bp, Artificial Sequence
  Synthetic oligonucleotide
atcgacgcatggagggcggagctagagcat

SEQ ID NO: 297646 - DNA, 30 bp, Artificial Sequence
  Synthetic oligonucleotide
aggtgttcctggggccgtgcgttggagcat

SEQ ID NO: 297647 - DNA, 30 bp, Artificial Sequence
  Synthetic oligonucleotide
aacacgctgcattttgtggagtcatagcat

SEQ ID NO: 297648 - DNA, 30 bp, Artificial Sequence
  Synthetic oligonucleotide
tcccttgaagcaggggcaactaactagcat

SEQ ID NO: 297649 - DNA, 30 bp, Artificial Sequence
  Synthetic oligonucleotide
aagggtcgggagcaatcaaaagcctagcat

SEQ ID NO: 297650 - DNA, 30 bp, Artificial Sequence
  Synthetic oligonucleotide
atattaaagcgcagattcggataaacgcat

SEQ ID NO: 297651 - DNA, 30 bp, Artificial Sequence
  Synthetic oligonucleotide
ttgtgacacatacctgacggtcgaacgcat

SEQ ID NO: 297652 - DNA, 30 bp, Artificial Sequence
  Synthetic oligonucleotide
ttcatttagaaccagaatataggaacgcat

SEQ ID NO: 297653 - DNA, 30 bp, Artificial Sequence
  Synthetic oligonucleotide
gtgatgcgtttcacagcagttataacgcat

SEQ ID NO: 297654 - DNA, 30 bp, Artificial Sequence
  Synthetic oligonucleotide
aaaaaacgaccgttttgcgtgatcacgcat

SEQ ID NO: 297655 - DNA, 30 bp, Artificial Sequence
  Synthetic oligonucleotide
ggtgtgggctaggacgccaccacgccgcat

SEQ ID NO: 297656 - DNA, 30 bp, Artificial Sequence
  Synthetic oligonucleotide
tttcaattcaaagccacaccacgtccgcat

SEQ ID NO: 297657 - DNA, 30 bp, Artificial Sequence
  Synthetic oligonucleotide
ctgcacgcgagagggtcactgggtccgcat

SEQ ID NO: 297658 - DNA, 30 bp, Artificial Sequence
  Synthetic oligonucleotide
agtctaaaaggtaaaagaaccccagcgcat

SEQ ID NO: 297659 - DNA, 29 bp, Artificial Sequence
  Synthetic oligonucleotide
ttgtaccgttgggtgcaaagggcgcgcat

SEQ ID NO: 297660 - DNA, 30 bp, Artificial Sequence
  Synthetic oligonucleotide
ctgcgtgaatagcgtgagtcacgggcgcat

SEQ ID NO: 297661 - DNA, 30 bp, Artificial Sequence
  Synthetic oligonucleotide
tgtttcgtaaaaaaactaacccttgcgcat

SEQ ID NO: 297662 - DNA, 30 bp, Artificial Sequence
  Synthetic oligonucleotide
acgtggcctgacgatagtgaagcatcgcat

SEQ ID NO: 297663 - DNA, 30 bp, Artificial Sequence
  Synthetic oligonucleotide
cagtcaactatcggtactcgttcatcgcat

SEQ ID NO: 297664 - DNA, 30 bp, Artificial Sequence
  Synthetic oligonucleotide
ccacaggagagcggttcctataagtcgcat

SEQ ID NO: 297665 - DNA, 30 bp, Artificial Sequence
  Synthetic oligonucleotide
agcgtttgaatgtggtggggggagtcgcat

SEQ ID NO: 297666 - DNA, 30 bp, Artificial Sequence
  Synthetic oligonucleotide
ccgctcagtcttaaacgcggtttgtcgcat

SEQ ID NO: 297667 - DNA, 30 bp, Artificial Sequence
  Synthetic oligonucleotide
accgtgcgtctaccggtaccggtaaggcat

SEQ ID NO: 297668 - DNA, 30 bp, Artificial Sequence
  Synthetic oligonucleotide
taagttatcgtcgaaaaccttcccaggcat

SEQ ID NO: 297669 - DNA, 30 bp, Artificial Sequence
  Synthetic oligonucleotide
ggccagttcttaatatctcaagtcaggcat

SEQ ID NO: 297670 - DNA, 30 bp, Artificial Sequence
  Synthetic oligonucleotide
gtcaaagtttcaggccgctaccttaggcat

SEQ ID NO: 297671 - DNA, 30 bp, Artificial Sequence
  Synthetic oligonucleotide
tccaggtggattaactgtaggggacggcat

SEQ ID NO: 297672 - DNA, 30 bp, Artificial Sequence
  Synthetic oligonucleotide
acgggttctaaaagatgccggggccggcat

SEQ ID NO: 297673 - DNA, 30 bp, Artificial Sequence
  Synthetic oligonucleotide
gttattgatcatggaccatcgcggcggcat

SEQ ID NO: 297674 - DNA, 30 bp, Artificial Sequence
  Synthetic oligonucleotide
cccttgagtttggcatgattggggcggcat

SEQ ID NO: 297675 - DNA, 30 bp, Artificial Sequence
  Synthetic oligonucleotide
tacgctatcgatcttgttgagaatcggcat

SEQ ID NO: 297676 - DNA, 30 bp, Artificial Sequence
  Synthetic oligonucleotide
tagctcactactgtggcaattcatcggcat

SEQ ID NO: 297677 - DNA, 29 bp, Artificial Sequence
  Synthetic oligonucleotide
cctggtggccaacaaggggacctcggcat

SEQ ID NO: 297678 - DNA, 30 bp, Artificial Sequence
  Synthetic oligonucleotide
tatccgttagtaataaggcactcagggcat

SEQ ID NO: 297679 - DNA, 30 bp, Artificial Sequence
  Synthetic oligonucleotide
ccatatgcgcggatggagaactaggggcat

SEQ ID NO: 297680 - DNA, 30 bp, Artificial Sequence
  Synthetic oligonucleotide
gacccatcattcgatttcttagcggggcat

SEQ ID NO: 297681 - DNA, 30 bp, Artificial Sequence
  Synthetic oligonucleotide
cgactagatatgttagccacggatgggcat

SEQ ID NO: 297682 - DNA, 30 bp, Artificial Sequence
  Synthetic oligonucleotide
aggagtcgtctcagggccacgtaatggcat

SEQ ID NO: 297683 - DNA, 30 bp, Artificial Sequence
  Synthetic oligonucleotide
gaaccaggcaaatgacatgctttatggcat

SEQ ID NO: 297684 - DNA, 30 bp, Artificial Sequence
  Synthetic oligonucleotide
gatatgtggtcacgttgataaccctggcat

SEQ ID NO: 297685 - DNA, 30 bp, Artificial Sequence
  Synthetic oligonucleotide
tccggttaccacgtatcagactgctggcat

SEQ ID NO: 297686 - DNA, 30 bp, Artificial Sequence
  Synthetic oligonucleotide
tgtaagggccaacgtaaccctaattggcat

SEQ ID NO: 297687 - DNA, 30 bp, Artificial Sequence
  Synthetic oligonucleotide
gatactcaaaagatcagttaggcttggcat

SEQ ID NO: 297688 - DNA, 30 bp, Artificial Sequence
  Synthetic oligonucleotide
gcagcgtttcgatctataaagaaaatgcat

SEQ ID NO: 297689 - DNA, 30 bp, Artificial Sequence
  Synthetic oligonucleotide
ggcctcccacccacggaggacgcaatgcat

SEQ ID NO: 297690 - DNA, 30 bp, Artificial Sequence
  Synthetic oligonucleotide
acataagtctctcacggcaagcgaatgcat

SEQ ID NO: 297691 - DNA, 30 bp, Artificial Sequence
  Synthetic oligonucleotide
cgaatgcttttggtggtctccggcatgcat

SEQ ID NO: 297692 - DNA, 30 bp, Artificial Sequence
  Synthetic oligonucleotide
ggagcctcagtttcacggactttgatgcat

SEQ ID NO: 297693 - DNA, 30 bp, Artificial Sequence
  Synthetic oligonucleotide
aaagacggctgtgttgacgtgcgactgcat

SEQ ID NO: 297694 - DNA, 30 bp, Artificial Sequence
  Synthetic oligonucleotide
atcattgtgcaaactaacttgccgctgcat

SEQ ID NO: 297695 - DNA, 30 bp, Artificial Sequence
  Synthetic oligonucleotide
tagaattccggaacattgtcgcatctgcat

SEQ ID NO: 297696 - DNA, 30 bp, Artificial Sequence
  Synthetic oligonucleotide
cgtattatatatacctaagggtaggtgcat

SEQ ID NO: 297697 - DNA, 30 bp, Artificial Sequence
  Synthetic oligonucleotide
gtgacttctcaatggctggggtctgtgcat

SEQ ID NO: 297698 - DNA, 30 bp, Artificial Sequence
  Synthetic oligonucleotide
cctggggcagaacgaactttattattgcat

SEQ ID NO: 297699 - DNA, 30 bp, Artificial Sequence
  Synthetic oligonucleotide
gctgattaagtcatcgatgactacttgcat

SEQ ID NO: 297700 - DNA, 30 bp, Artificial Sequence
  Synthetic oligonucleotide
cttagtgttaggtgtaataagacgttgcat

SEQ ID NO: 297701 - DNA, 30 bp, Artificial Sequence
  Synthetic oligonucleotide
gggccgctactgatggttgagaatttgcat

SEQ ID NO: 297702 - DNA, 30 bp, Artificial Sequence
  Synthetic oligonucleotide
gagttcgcgtaaagatcgtaagatttgcat

SEQ ID NO: 297703 - DNA, 30 bp, Artificial Sequence
  Synthetic oligonucleotide
tcaggccacgggttaggtggcactttgcat

SEQ ID NO: 297704 - DNA, 30 bp, Artificial Sequence
  Synthetic oligonucleotide
aagtaagctgaacccgcttagtttttgcat

SEQ ID NO: 297705 - DNA, 30 bp, Artificial Sequence
  Synthetic oligonucleotide
aaagtatccggtatgtacagagaaaatcat

SEQ ID NO: 297706 - DNA, 30 bp, Artificial Sequence
  Synthetic oligonucleotide
ggacgactttgagattccgcactaaatcat

SEQ ID NO: 297707 - DNA, 30 bp, Artificial Sequence
  Synthetic oligonucleotide
tcacccaatagagacttgttcttaaatcat

SEQ ID NO: 297708 - DNA, 31 bp, Artificial Sequence
  Synthetic oligonucleotide
actgatggtgagctgttggatctacaatcat

SEQ ID NO: 297709 - DNA, 30 bp, Artificial Sequence
  Synthetic oligonucleotide
gcgatggtcatatttacaatctggaatcat

SEQ ID NO: 297710 - DNA, 30 bp, Artificial Sequence
  Synthetic oligonucleotide
gatggcccgcaataatgcccaaataatcat

SEQ ID NO: 297711 - DNA, 30 bp, Artificial Sequence
  Synthetic oligonucleotide
cacaacttcatagagtacagctctaatcat

SEQ ID NO: 297712 - DNA, 30 bp, Artificial Sequence
  Synthetic oligonucleotide
ggagatcaagaaaatcctccgcgtaatcat

SEQ ID NO: 297713 - DNA, 31 bp, Artificial Sequence
  Synthetic oligonucleotide
aataaggcgctgaatgcaacacaaacatcat

SEQ ID NO: 297714 - DNA, 30 bp, Artificial Sequence
  Synthetic oligonucleotide
ggatgccattagagagttttgccacatcat

SEQ ID NO: 297715 - DNA, 30 bp, Artificial Sequence
  Synthetic oligonucleotide
ttatcggagctttcaagctcgtagcatcat

SEQ ID NO: 297716 - DNA, 30 bp, Artificial Sequence
  Synthetic oligonucleotide
gacaaaggctaaagagttttggggcatcat

SEQ ID NO: 297717 - DNA, 30 bp, Artificial Sequence
  Synthetic oligonucleotide
tgatactggaaatcgctatattgtcatcat

SEQ ID NO: 297718 - DNA, 29 bp, Artificial Sequence
  Synthetic oligonucleotide
ttagttgcccgacataaaaggtagatcat

SEQ ID NO: 297719 - DNA, 30 bp, Artificial Sequence
  Synthetic oligonucleotide
cacatcagataatgaagttcgttagatcat

SEQ ID NO: 297720 - DNA, 30 bp, Artificial Sequence
  Synthetic oligonucleotide
cgccatccctctgataattaatgggatcat

SEQ ID NO: 297721 - DNA, 30 bp, Artificial Sequence
  Synthetic oligonucleotide
atcataaacagtcttttcatctttgatcat

SEQ ID NO: 297722 - DNA, 30 bp, Artificial Sequence
  Synthetic oligonucleotide
agatcaaaaaggaccctatgctaatatcat

SEQ ID NO: 297723 - DNA, 30 bp, Artificial Sequence
  Synthetic oligonucleotide
cgtggtagccggacacaggacacatatcat

SEQ ID NO: 297724 - DNA, 30 bp, Artificial Sequence
  Synthetic oligonucleotide
attcgagaggacgggacacgaggctatcat

SEQ ID NO: 297725 - DNA, 30 bp, Artificial Sequence
  Synthetic oligonucleotide
aaaagttaagcggtttccgcggtgtatcat

SEQ ID NO: 297726 - DNA, 30 bp, Artificial Sequence
  Synthetic oligonucleotide
ttttgcgttgtagcggaaccctattatcat

SEQ ID NO: 297727 - DNA, 30 bp, Artificial Sequence
  Synthetic oligonucleotide
acgacacatgtattgtagcgttattatcat

SEQ ID NO: 297728 - DNA, 30 bp, Artificial Sequence
  Synthetic oligonucleotide
agactagcccgaaactatttcggttatcat

SEQ ID NO: 297729 - DNA, 30 bp, Artificial Sequence
  Synthetic oligonucleotide
gtctcgagtcataagaacaagcaaactcat

SEQ ID NO: 297730 - DNA, 30 bp, Artificial Sequence
  Synthetic oligonucleotide
gggtagagtagcataaaacgaccgactcat

SEQ ID NO: 297731 - DNA, 30 bp, Artificial Sequence
  Synthetic oligonucleotide
gggtgtagggagtcgtgttagttgactcat

SEQ ID NO: 297732 - DNA, 30 bp, Artificial Sequence
  Synthetic oligonucleotide
ctccagagtaagcactccagatgtactcat

SEQ ID NO: 297733 - DNA, 30 bp, Artificial Sequence
  Synthetic oligonucleotide
atggcaagacgtgccacgtccgcccctcat

SEQ ID NO: 297734 - DNA, 30 bp, Artificial Sequence
  Synthetic oligonucleotide
tacggtctgttatcgcctgtgtcccctcat

SEQ ID NO: 297735 - DNA, 30 bp, Artificial Sequence
  Synthetic oligonucleotide
cggcgaaatgatgcattgggtaagcctcat

SEQ ID NO: 297736 - DNA, 30 bp, Artificial Sequence
  Synthetic oligonucleotide
ggggggaatgagccaagagtctagcctcat

SEQ ID NO: 297737 - DNA, 30 bp, Artificial Sequence
  Synthetic oligonucleotide
aatgacggcattatatcagtagctcctcat

SEQ ID NO: 297738 - DNA, 30 bp, Artificial Sequence
  Synthetic oligonucleotide
gctcggggcataggatagacaggtcctcat

SEQ ID NO: 297739 - DNA, 30 bp, Artificial Sequence
  Synthetic oligonucleotide
ctatctgtttcacactcgtaaaccgctcat

SEQ ID NO: 297740 - DNA, 30 bp, Artificial Sequence
  Synthetic oligonucleotide
aagcaaacaaggaacgcgccccccgctcat

SEQ ID NO: 297741 - DNA, 30 bp, Artificial Sequence
  Synthetic oligonucleotide
ggatcttccgcagctcatattagggctcat

SEQ ID NO: 297742 - DNA, 30 bp, Artificial Sequence
  Synthetic oligonucleotide
aggatcaattatgaaattggccgggctcat

SEQ ID NO: 297743 - DNA, 30 bp, Artificial Sequence
  Synthetic oligonucleotide
gatttcaatacccagtgaacctatgctcat

SEQ ID NO: 297744 - DNA, 30 bp, Artificial Sequence
  Synthetic oligonucleotide
caactaaggtaactcccttccgttgctcat

SEQ ID NO: 297745 - DNA, 30 bp, Artificial Sequence
  Synthetic oligonucleotide
ctaatcgtggtagattggaggcagtctcat

SEQ ID NO: 297746 - DNA, 30 bp, Artificial Sequence
  Synthetic oligonucleotide
caatatttggcgtaggctcacgcgtctcat

SEQ ID NO: 297747 - DNA, 30 bp, Artificial Sequence
  Synthetic oligonucleotide
caaacagagggagtgtgactttcttctcat

SEQ ID NO: 297748 - DNA, 30 bp, Artificial Sequence
  Synthetic oligonucleotide
aactagcctgcagtatgaatcgcaagtcat

SEQ ID NO: 297749 - DNA, 30 bp, Artificial Sequence
  Synthetic oligonucleotide
aagcaaagccactgtgagagtcacagtcat

SEQ ID NO: 297750 - DNA, 30 bp, Artificial Sequence
  Synthetic oligonucleotide
gtgggtggctgcaattagcgcgatagtcat

SEQ ID NO: 297751 - DNA, 30 bp, Artificial Sequence
  Synthetic oligonucleotide
atcgagacaataggttccgagtaacgtcat

SEQ ID NO: 297752 - DNA, 30 bp, Artificial Sequence
  Synthetic oligonucleotide
agatctcgtattagacgatatatacgtcat

SEQ ID NO: 297753 - DNA, 30 bp, Artificial Sequence
  Synthetic oligonucleotide
ttcaacctaagagtacatgggccccgtcat

SEQ ID NO: 297754 - DNA, 30 bp, Artificial Sequence
  Synthetic oligonucleotide
tggggcttggcagtgttgggagcccgtcat

SEQ ID NO: 297755 - DNA, 30 bp, Artificial Sequence
  Synthetic oligonucleotide
caagccggaacaatctcgccgctccgtcat

SEQ ID NO: 297756 - DNA, 30 bp, Artificial Sequence
  Synthetic oligonucleotide
tgtcaggggcatttgtgataaatgcgtcat

SEQ ID NO: 297757 - DNA, 30 bp, Artificial Sequence
  Synthetic oligonucleotide
gctgcattgaggtcgtcaacatacggtcat

SEQ ID NO: 297758 - DNA, 30 bp, Artificial Sequence
  Synthetic oligonucleotide
gactagaactcaccttggacatccggtcat

SEQ ID NO: 297759 - DNA, 30 bp, Artificial Sequence
  Synthetic oligonucleotide
cagagccgctaaatagcgtaaggcggtcat

SEQ ID NO: 297760 - DNA, 30 bp, Artificial Sequence
  Synthetic oligonucleotide
gggctcatagtcattatagaggcatgtcat

SEQ ID NO: 297761 - DNA, 30 bp, Artificial Sequence
  Synthetic oligonucleotide
aagcatgagatcgatgtcaggtcatgtcat

SEQ ID NO: 297762 - DNA, 30 bp, Artificial Sequence
  Synthetic oligonucleotide
ggccaaagcacggccgtaggcgactgtcat

SEQ ID NO: 297763 - DNA, 30 bp, Artificial Sequence
  Synthetic oligonucleotide
agacccactgataaatcgaaattctgtcat

SEQ ID NO: 297764 - DNA, 30 bp, Artificial Sequence
  Synthetic oligonucleotide
atcatctggataggcacactgcattgtcat

SEQ ID NO: 297765 - DNA, 30 bp, Artificial Sequence
  Synthetic oligonucleotide
gtgggacgtgcgttgggagtgcgaattcat

SEQ ID NO: 297766 - DNA, 30 bp, Artificial Sequence
  Synthetic oligonucleotide
gagacgtcgatcgtatcttatgatattcat

SEQ ID NO: 297767 - DNA, 30 bp, Artificial Sequence
  Synthetic oligonucleotide
cttgatcataggttgttactgtctattcat

SEQ ID NO: 297768 - DNA, 30 bp, Artificial Sequence
  Synthetic oligonucleotide
cctgacgggaaatgagacttttaacttcat

SEQ ID NO: 297769 - DNA, 30 bp, Artificial Sequence
  Synthetic oligonucleotide
tataacatcggctagataagttaccttcat

SEQ ID NO: 297770 - DNA, 30 bp, Artificial Sequence
  Synthetic oligonucleotide
gcaataagctcgagagcaaggtcccttcat

SEQ ID NO: 297771 - DNA, 30 bp, Artificial Sequence
  Synthetic oligonucleotide
ggttcaatcctaggcgacttccagcttcat

SEQ ID NO: 297772 - DNA, 30 bp, Artificial Sequence
  Synthetic oligonucleotide
agctgtcggggaaacggcgttacgcttcat

SEQ ID NO: 297773 - DNA, 30 bp, Artificial Sequence
  Synthetic oligonucleotide
cgtggcgagtgtgaaagccgggggcttcat

SEQ ID NO: 297774 - DNA, 30 bp, Artificial Sequence
  Synthetic oligonucleotide
ctatcccgaatgccattgtctgggcttcat

SEQ ID NO: 297775 - DNA, 30 bp, Artificial Sequence
  Synthetic oligonucleotide
ggtttcagaacgactgtccgaagtcttcat

SEQ ID NO: 297776 - DNA, 30 bp, Artificial Sequence
  Synthetic oligonucleotide
actcaaataaggcctctgatctttcttcat

SEQ ID NO: 297777 - DNA, 30 bp, Artificial Sequence
  Synthetic oligonucleotide
agggggagtaatagaaatctacaagttcat

SEQ ID NO: 297778 - DNA, 30 bp, Artificial Sequence
  Synthetic oligonucleotide
tgaaggttgcacctcccgagggaagttcat

SEQ ID NO: 297779 - DNA, 30 bp, Artificial Sequence
  Synthetic oligonucleotide
cccagacgttacacagcaataggagttcat

SEQ ID NO: 297780 - DNA, 30 bp, Artificial Sequence
  Synthetic oligonucleotide
agcccaagctaggaaggacggatagttcat

SEQ ID NO: 297781 - DNA, 30 bp, Artificial Sequence
  Synthetic oligonucleotide
tagcgcaatcttgattttccagccgttcat

SEQ ID NO: 297782 - DNA, 30 bp, Artificial Sequence
  Synthetic oligonucleotide
ctgagaagagaggtaaaagctgcggttcat

SEQ ID NO: 297783 - DNA, 30 bp, Artificial Sequence
  Synthetic oligonucleotide
ctaagtctggtgtaaggtggaactgttcat

SEQ ID NO: 297784 - DNA, 30 bp, Artificial Sequence
  Synthetic oligonucleotide
ataccggttcacatactccacacatttcat

SEQ ID NO: 297785 - DNA, 30 bp, Artificial Sequence
  Synthetic oligonucleotide
attgcgcaattagcaagtagctgatttcat

SEQ ID NO: 297786 - DNA, 30 bp, Artificial Sequence
  Synthetic oligonucleotide
ccgcgcggtgtcgtattgcacaactttcat

SEQ ID NO: 297787 - DNA, 30 bp, Artificial Sequence
  Synthetic oligonucleotide
ggtttgtcagattattagggtgtgtttcat

SEQ ID NO: 297788 - DNA, 30 bp, Artificial Sequence
  Synthetic oligonucleotide
ggagtccaaggatacctgggtgtgtttcat

SEQ ID NO: 297789 - DNA, 30 bp, Artificial Sequence
  Synthetic oligonucleotide
tgacgagagcgtatgaattctcaaaaagat

SEQ ID NO: 297790 - DNA, 30 bp, Artificial Sequence
  Synthetic oligonucleotide
gaactgttacattgagtggccgaaaaagat

SEQ ID NO: 297791 - DNA, 30 bp, Artificial Sequence
  Synthetic oligonucleotide
ggccaatagtaaaggttattgggaaaagat

SEQ ID NO: 297792 - DNA, 30 bp, Artificial Sequence
  Synthetic oligonucleotide
ctgtggtggctactaaaggcttgaaaagat

SEQ ID NO: 297793 - DNA, 30 bp, Artificial Sequence
  Synthetic oligonucleotide
ggggccgcttcccggggatgcataaaagat

SEQ ID NO: 297794 - DNA, 30 bp, Artificial Sequence
  Synthetic oligonucleotide
gttggttaggtcatacctcacaacaaagat

SEQ ID NO: 297795 - DNA, 30 bp, Artificial Sequence
  Synthetic oligonucleotide
acgtctctggtagctggtgccatcaaagat

SEQ ID NO: 297796 - DNA, 30 bp, Artificial Sequence
  Synthetic oligonucleotide
ccgttcacgtttcacagataggagaaagat

SEQ ID NO: 297797 - DNA, 30 bp, Artificial Sequence
  Synthetic oligonucleotide
gctggccatacaaaagtgctagataaagat

SEQ ID NO: 297798 - DNA, 30 bp, Artificial Sequence
  Synthetic oligonucleotide
cgttcagtaatgtatgctagtgataaagat

SEQ ID NO: 297799 - DNA, 30 bp, Artificial Sequence
  Synthetic oligonucleotide
ggtattccaatagacatccggagtaaagat

SEQ ID NO: 297800 - DNA, 30 bp, Artificial Sequence
  Synthetic oligonucleotide
ttttaaattgagaagccacggcgacaagat

SEQ ID NO: 297801 - DNA, 30 bp, Artificial Sequence
  Synthetic oligonucleotide
aggatattgtaatagccggtcatacaagat

SEQ ID NO: 297802 - DNA, 30 bp, Artificial Sequence
  Synthetic oligonucleotide
ccatgccaggtcggagtcaaagaccaagat

SEQ ID NO: 297803 - DNA, 30 bp, Artificial Sequence
  Synthetic oligonucleotide
aaaggccgttgcccttcgcaagaccaagat

SEQ ID NO: 297804 - DNA, 30 bp, Artificial Sequence
  Synthetic oligonucleotide
ttccggatgaaagaggactagatccaagat

SEQ ID NO: 297805 - DNA, 30 bp, Artificial Sequence
  Synthetic oligonucleotide
gcacttacaaaggtcgttcaaatgcaagat

SEQ ID NO: 297806 - DNA, 30 bp, Artificial Sequence
  Synthetic oligonucleotide
agacacgaatgctaataactatgtcaagat

SEQ ID NO: 297807 - DNA, 30 bp, Artificial Sequence
  Synthetic oligonucleotide
ctactgactaccgacggcctgtcagaagat

SEQ ID NO: 297808 - DNA, 30 bp, Artificial Sequence
  Synthetic oligonucleotide
ttggtccatgtactggaatgtagagaagat

SEQ ID NO: 297809 - DNA, 30 bp, Artificial Sequence
  Synthetic oligonucleotide
gctggagagatgagacgctgatgagaagat

SEQ ID NO: 297810 - DNA, 30 bp, Artificial Sequence
  Synthetic oligonucleotide
tagagccaatcgattcgtaccatcgaagat

SEQ ID NO: 297811 - DNA, 30 bp, Artificial Sequence
  Synthetic oligonucleotide
ggaatagattgcggcgatctgaatgaagat

SEQ ID NO: 297812 - DNA, 30 bp, Artificial Sequence
  Synthetic oligonucleotide
ccaattcaggcagggttctcacgtgaagat

SEQ ID NO: 297813 - DNA, 30 bp, Artificial Sequence
  Synthetic oligonucleotide
tcaaggtccatgaaagtgggtagataagat

SEQ ID NO: 297814 - DNA, 30 bp, Artificial Sequence
  Synthetic oligonucleotide
aacaaacacgcgggagggcccgtataagat

SEQ ID NO: 297815 - DNA, 30 bp, Artificial Sequence
  Synthetic oligonucleotide
caaactattgcgtctaggtggccgtaagat

SEQ ID NO: 297816 - DNA, 30 bp, Artificial Sequence
  Synthetic oligonucleotide
tcctaatcgccatcaccaaccttttaagat

SEQ ID NO: 297817 - DNA, 30 bp, Artificial Sequence
  Synthetic oligonucleotide
agtagagcggctatctaagtcacaacagat

SEQ ID NO: 297818 - DNA, 30 bp, Artificial Sequence
  Synthetic oligonucleotide
ggagtatttagtcgtgaaaggggcacagat

SEQ ID NO: 297819 - DNA, 30 bp, Artificial Sequence
  Synthetic oligonucleotide
tcgaatttcgtcgtggccaactcgacagat

SEQ ID NO: 297820 - DNA, 30 bp, Artificial Sequence
  Synthetic oligonucleotide
gaaatgccccgatctagaaggaggacagat

SEQ ID NO: 297821 - DNA, 30 bp, Artificial Sequence
  Synthetic oligonucleotide
atttctaggatgaataggttatggacagat

SEQ ID NO: 297822 - DNA, 30 bp, Artificial Sequence
  Synthetic oligonucleotide
ctgtggatacctcatagagttcccccagat

SEQ ID NO: 297823 - DNA, 30 bp, Artificial Sequence
  Synthetic oligonucleotide
atcctatgtatggagatagtcttcccagat

SEQ ID NO: 297824 - DNA, 30 bp, Artificial Sequence
  Synthetic oligonucleotide
gtcttcttgggagatagggaagttccagat

SEQ ID NO: 297825 - DNA, 30 bp, Artificial Sequence
  Synthetic oligonucleotide
gcacgggcgtgttaacgggggaacgcagat

SEQ ID NO: 297826 - DNA, 30 bp, Artificial Sequence
  Synthetic oligonucleotide
agggagatcgagtggtgttggtgggcagat

SEQ ID NO: 297827 - DNA, 30 bp, Artificial Sequence
  Synthetic oligonucleotide
cgtccgctggggcgccgtattgtggcagat

SEQ ID NO: 297828 - DNA, 30 bp, Artificial Sequence
  Synthetic oligonucleotide
ccagatgcgtctctgactaggtctgcagat

SEQ ID NO: 297829 - DNA, 30 bp, Artificial Sequence
  Synthetic oligonucleotide
tttgcccgtgggtcactttgccaatcagat

SEQ ID NO: 297830 - DNA, 30 bp, Artificial Sequence
  Synthetic oligonucleotide
gacataaccgtgtctttggtccgctcagat

SEQ ID NO: 297831 - DNA, 30 bp, Artificial Sequence
  Synthetic oligonucleotide
attgttgcgtatccacggtgatgctcagat

SEQ ID NO: 297832 - DNA, 30 bp, Artificial Sequence
  Synthetic oligonucleotide
ccagtggggtcctcaaagggcgtctcagat

SEQ ID NO: 297833 - DNA, 30 bp, Artificial Sequence
  Synthetic oligonucleotide
tagcacagagaaaccgatgtgttctcagat

SEQ ID NO: 297834 - DNA, 30 bp, Artificial Sequence
  Synthetic oligonucleotide
agttcaccgatcattgcgagatagtcagat

SEQ ID NO: 297835 - DNA, 30 bp, Artificial Sequence
  Synthetic oligonucleotide
ctaacgttaccagatgaacaatcgtcagat

SEQ ID NO: 297836 - DNA, 30 bp, Artificial Sequence
  Synthetic oligonucleotide
acgtaaagtagccatgtcctggggtcagat

SEQ ID NO: 297837 - DNA, 30 bp, Artificial Sequence
  Synthetic oligonucleotide
cgaaagagaccctatgtatatgggtcagat

SEQ ID NO: 297838 - DNA, 30 bp, Artificial Sequence
  Synthetic oligonucleotide
tgttagaggcgacctcaaggtctgtcagat

SEQ ID NO: 297839 - DNA, 30 bp, Artificial Sequence
  Synthetic oligonucleotide
aagtcctttcctattctggaaaattcagat

SEQ ID NO: 297840 - DNA, 30 bp, Artificial Sequence
  Synthetic oligonucleotide
agggtgtaagcttcctttatgtaaagagat

SEQ ID NO: 297841 - DNA, 30 bp, Artificial Sequence
  Synthetic oligonucleotide
acggcgcagcctttcacggactcaagagat

SEQ ID NO: 297842 - DNA, 30 bp, Artificial Sequence
  Synthetic oligonucleotide
cttcagaatcggccttctgggataagagat

SEQ ID NO: 297843 - DNA, 30 bp, Artificial Sequence
  Synthetic oligonucleotide
aacggtggaaccgggtagttcggcagagat

SEQ ID NO: 297844 - DNA, 30 bp, Artificial Sequence
  Synthetic oligonucleotide
ccaccgaaaattgaaacaggaatcagagat

SEQ ID NO: 297845 - DNA, 30 bp, Artificial Sequence
  Synthetic oligonucleotide
tccctcagacaataatcgcaagagagagat

SEQ ID NO: 297846 - DNA, 30 bp, Artificial Sequence
  Synthetic oligonucleotide
tcggccgtctagttggtttatggtagagat

SEQ ID NO: 297847 - DNA, 30 bp, Artificial Sequence
  Synthetic oligonucleotide
taaatagagcggaccacgaattaacgagat

SEQ ID NO: 297848 - DNA, 30 bp, Artificial Sequence
  Synthetic oligonucleotide
tatattcatcagtgggcaagtatacgagat

SEQ ID NO: 297849 - DNA, 30 bp, Artificial Sequence
  Synthetic oligonucleotide
agaccctcctggggagggctggtccgagat

SEQ ID NO: 297850 - DNA, 30 bp, Artificial Sequence
  Synthetic oligonucleotide
caatcagcactgtggagttggtggcgagat

SEQ ID NO: 297851 - DNA, 30 bp, Artificial Sequence
  Synthetic oligonucleotide
tgggataactatgttcctagaatgcgagat

SEQ ID NO: 297852 - DNA, 30 bp, Artificial Sequence
  Synthetic oligonucleotide
gtaacacgcaggaagttgtagattcgagat

SEQ ID NO: 297853 - DNA, 30 bp, Artificial Sequence
  Synthetic oligonucleotide
agtgataatgcctgaggactggttcgagat

SEQ ID NO: 297854 - DNA, 30 bp, Artificial Sequence
  Synthetic oligonucleotide
taatccgcgacgggatttacggcaggagat

SEQ ID NO: 297855 - DNA, 30 bp, Artificial Sequence
  Synthetic oligonucleotide
tattagaaacattggcccgcccccggagat

SEQ ID NO: 297856 - DNA, 30 bp, Artificial Sequence
  Synthetic oligonucleotide
cgaacctagacgcatgggtcaatgggagat

SEQ ID NO: 297857 - DNA, 30 bp, Artificial Sequence
  Synthetic oligonucleotide
gggcagatccctccataagttctgggagat

SEQ ID NO: 297858 - DNA, 30 bp, Artificial Sequence
  Synthetic oligonucleotide
tgcgacgtgtgataaagtgtttatggagat

SEQ ID NO: 297859 - DNA, 30 bp, Artificial Sequence
  Synthetic oligonucleotide
cgtagctaccccatgcaagtagaatgagat

SEQ ID NO: 297860 - DNA, 30 bp, Artificial Sequence
  Synthetic oligonucleotide
ggccatgtatacagggatggtccatgagat

SEQ ID NO: 297861 - DNA, 30 bp, Artificial Sequence
  Synthetic oligonucleotide
atcggcatctaaatagctgtaatatgagat

SEQ ID NO: 297862 - DNA, 30 bp, Artificial Sequence
  Synthetic oligonucleotide
acgctcccacggttgacatgtgtatgagat

SEQ ID NO: 297863 - DNA, 30 bp, Artificial Sequence
  Synthetic oligonucleotide
catgattatagggtgatggtctagtgagat

SEQ ID NO: 297864 - DNA, 30 bp, Artificial Sequence
  Synthetic oligonucleotide
cgaggatttattaagttctttccgtgagat

SEQ ID NO: 297865 - DNA, 30 bp, Artificial Sequence
  Synthetic oligonucleotide
tagactaccgtaggtcataacgcgtgagat

SEQ ID NO: 297866 - DNA, 30 bp, Artificial Sequence
  Synthetic oligonucleotide
tattgcggatgcgcagtaaagcggtgagat

SEQ ID NO: 297867 - DNA, 30 bp, Artificial Sequence
  Synthetic oligonucleotide
atcccagggtttacgccaaacggttgagat

SEQ ID NO: 297868 - DNA, 30 bp, Artificial Sequence
  Synthetic oligonucleotide
ttagttattggagccagaggagtttgagat

SEQ ID NO: 297869 - DNA, 30 bp, Artificial Sequence
  Synthetic oligonucleotide
gcgaattttagtggatcgcaataaatagat

SEQ ID NO: 297870 - DNA, 30 bp, Artificial Sequence
  Synthetic oligonucleotide
ctcgtgaacaagataactaattgaatagat

SEQ ID NO: 297871 - DNA, 30 bp, Artificial Sequence
  Synthetic oligonucleotide
tcagcagttgcagaaatgagttggatagat

SEQ ID NO: 297872 - DNA, 30 bp, Artificial Sequence
  Synthetic oligonucleotide
caggtggtgaccaattgctaatatatagat

SEQ ID NO: 297873 - DNA, 30 bp, Artificial Sequence
  Synthetic oligonucleotide
acctctcggatatattccttcgacctagat

SEQ ID NO: 297874 - DNA, 30 bp, Artificial Sequence
  Synthetic oligonucleotide
atgcacttcgcggtcactatttacctagat

SEQ ID NO: 297875 - DNA, 30 bp, Artificial Sequence
  Synthetic oligonucleotide
atacagtatgtctcagtggctagcctagat

SEQ ID NO: 297876 - DNA, 30 bp, Artificial Sequence
  Synthetic oligonucleotide
ctaggctggaaatatattaacgcgctagat

SEQ ID NO: 297877 - DNA, 30 bp, Artificial Sequence
  Synthetic oligonucleotide
gactttggagccaaatagatgcggctagat

SEQ ID NO: 297878 - DNA, 31 bp, Artificial Sequence
  Synthetic oligonucleotide
ggactaagtaaccccggagattgaagtagat

SEQ ID NO: 297879 - DNA, 30 bp, Artificial Sequence
  Synthetic oligonucleotide
gccgacggagcgacacaaggaatagtagat

SEQ ID NO: 297880 - DNA, 30 bp, Artificial Sequence
  Synthetic oligonucleotide
acctaaataggaacagtagttaaggtagat

SEQ ID NO: 297881 - DNA, 30 bp, Artificial Sequence
  Synthetic oligonucleotide
gccgggaaaccaagcgccctgagtgtagat

SEQ ID NO: 297882 - DNA, 30 bp, Artificial Sequence
  Synthetic oligonucleotide
cacgggaaaccgactcctcattaattagat

SEQ ID NO: 297883 - DNA, 30 bp, Artificial Sequence
  Synthetic oligonucleotide
atgatcttaacgaggctctcatagttagat

SEQ ID NO: 297884 - DNA, 30 bp, Artificial Sequence
  Synthetic oligonucleotide
cgtgcgttgatgccgcaatggtcgttagat

SEQ ID NO: 297885 - DNA, 30 bp, Artificial Sequence
  Synthetic oligonucleotide
cacccaacgtggcatgttatactgttagat

SEQ ID NO: 297886 - DNA, 30 bp, Artificial Sequence
  Synthetic oligonucleotide
agtttgttagaagctggtagaggtttagat

SEQ ID NO: 297887 - DNA, 30 bp, Artificial Sequence
  Synthetic oligonucleotide
gttcattgaagttggccgcgtggtttagat

SEQ ID NO: 297888 - DNA, 30 bp, Artificial Sequence
  Synthetic oligonucleotide
aggttcgtggcgggcaccacgttcaacgat

SEQ ID NO: 297889 - DNA, 30 bp, Artificial Sequence
  Synthetic oligonucleotide
acatctcaatgtaacccacttgcgaacgat

SEQ ID NO: 297890 - DNA, 30 bp, Artificial Sequence
  Synthetic oligonucleotide
aggtggattccagaggttggatcgaacgat

SEQ ID NO: 297891 - DNA, 30 bp, Artificial Sequence
  Synthetic oligonucleotide
tatggtggatctagtcctatggataacgat

SEQ ID NO: 297892 - DNA, 30 bp, Artificial Sequence
  Synthetic oligonucleotide
gggggtgcgaataaatgtcacggtaacgat

SEQ ID NO: 297893 - DNA, 30 bp, Artificial Sequence
  Synthetic oligonucleotide
attgtacttctgaaaagataaattaacgat

SEQ ID NO: 297894 - DNA, 30 bp, Artificial Sequence
  Synthetic oligonucleotide
gaccacattaccacgtgcgtaatacacgat

SEQ ID NO: 297895 - DNA, 30 bp, Artificial Sequence
  Synthetic oligonucleotide
agattcaggacacccaaggggccccacgat

SEQ ID NO: 297896 - DNA, 30 bp, Artificial Sequence
  Synthetic oligonucleotide
gcggaaggaactcacacaatggggcacgat

SEQ ID NO: 297897 - DNA, 30 bp, Artificial Sequence
  Synthetic oligonucleotide
tacatgagtcggtcaccgggcctgcacgat

SEQ ID NO: 297898 - DNA, 30 bp, Artificial Sequence
  Synthetic oligonucleotide
gaccgtccgggaagttagcagtatcacgat

SEQ ID NO: 297899 - DNA, 30 bp, Artificial Sequence
  Synthetic oligonucleotide
ttcctgacaagatgggccggcactcacgat

SEQ ID NO: 297900 - DNA, 30 bp, Artificial Sequence
  Synthetic oligonucleotide
acatgcaaggtcgccggaagtcctcacgat

SEQ ID NO: 297901 - DNA, 30 bp, Artificial Sequence
  Synthetic oligonucleotide
atgactttcaaaggacacgcgagtcacgat

SEQ ID NO: 297902 - DNA, 30 bp, Artificial Sequence
  Synthetic oligonucleotide
attctgcaagactacgaacgcattcacgat

SEQ ID NO: 297903 - DNA, 30 bp, Artificial Sequence
  Synthetic oligonucleotide
cgtcccacttgtggaggacacagagacgat

SEQ ID NO: 297904 - DNA, 30 bp, Artificial Sequence
  Synthetic oligonucleotide
gcgtaaagtatcatgtcggcagtagacgat

SEQ ID NO: 297905 - DNA, 30 bp, Artificial Sequence
  Synthetic oligonucleotide
gggagccgcgccattaaggttatcgacgat

SEQ ID NO: 297906 - DNA, 30 bp, Artificial Sequence
  Synthetic oligonucleotide
gcatggagtcccgcggggaagcaggacgat

SEQ ID NO: 297907 - DNA, 30 bp, Artificial Sequence
  Synthetic oligonucleotide
gccgcggtcgacgggtaatggtgggacgat

SEQ ID NO: 297908 - DNA, 30 bp, Artificial Sequence
  Synthetic oligonucleotide
tcacgagtggtgatatcgatcattgacgat

SEQ ID NO: 297909 - DNA, 30 bp, Artificial Sequence
  Synthetic oligonucleotide
gtaaagtaaacccttcgttgcaaatacgat

SEQ ID NO: 297910 - DNA, 30 bp, Artificial Sequence
  Synthetic oligonucleotide
ttaggccattgtctgaaaccaacctacgat

SEQ ID NO: 297911 - DNA, 30 bp, Artificial Sequence
  Synthetic oligonucleotide
atgatacagtccgtaaatcacgtgtacgat

SEQ ID NO: 297912 - DNA, 30 bp, Artificial Sequence
  Synthetic oligonucleotide
agcacggactcggggctggtattgtacgat

SEQ ID NO: 297913 - DNA, 30 bp, Artificial Sequence
  Synthetic oligonucleotide
aaacagggttggtttgccagaagttacgat

SEQ ID NO: 297914 - DNA, 30 bp, Artificial Sequence
  Synthetic oligonucleotide
gctaggtccaggcctgataccttttacgat

SEQ ID NO: 297915 - DNA, 30 bp, Artificial Sequence
  Synthetic oligonucleotide
aagcaatgagttcacaatatggtaaccgat

SEQ ID NO: 297916 - DNA, 30 bp, Artificial Sequence
  Synthetic oligonucleotide
gcagaatagggacaactctcttcgaccgat

SEQ ID NO: 297917 - DNA, 30 bp, Artificial Sequence
  Synthetic oligonucleotide
actgagttatatcgagtcacacggaccgat

SEQ ID NO: 297918 - DNA, 30 bp, Artificial Sequence
  Synthetic oligonucleotide
gatgcgaattagctgcagcgcatgaccgat

SEQ ID NO: 297919 - DNA, 30 bp, Artificial Sequence
  Synthetic oligonucleotide
ttatgcgtgccaaggaatcgcgaccccgat

SEQ ID NO: 297920 - DNA, 30 bp, Artificial Sequence
  Synthetic oligonucleotide
agtgtcaggaccgcgcattcctcggccgat

SEQ ID NO: 297921 - DNA, 30 bp, Artificial Sequence
  Synthetic oligonucleotide
ccgttgggagcaagggaggggctggccgat

SEQ ID NO: 297922 - DNA, 30 bp, Artificial Sequence
  Synthetic oligonucleotide
cctctcggtcttgaccgaccaagtgccgat

SEQ ID NO: 297923 - DNA, 30 bp, Artificial Sequence
  Synthetic oligonucleotide
gccaaacgctttccaagtggtgttgccgat

SEQ ID NO: 297924 - DNA, 30 bp, Artificial Sequence
  Synthetic oligonucleotide
gggaatatacgttcgcactattaatccgat

SEQ ID NO: 297925 - DNA, 30 bp, Artificial Sequence
  Synthetic oligonucleotide
ctacgtaacccatcttaagtatcatccgat

SEQ ID NO: 297926 - DNA, 30 bp, Artificial Sequence
  Synthetic oligonucleotide
acgctagaagaaatttggttaagatccgat

SEQ ID NO: 297927 - DNA, 30 bp, Artificial Sequence
  Synthetic oligonucleotide
tagtaaacaagcgtatatatttgatccgat

SEQ ID NO: 297928 - DNA, 30 bp, Artificial Sequence
  Synthetic oligonucleotide
taagtgtgggaaaatttacgatgctccgat

SEQ ID NO: 297929 - DNA, 30 bp, Artificial Sequence
  Synthetic oligonucleotide
gcacgttcgccgagtattgccgcgtccgat

SEQ ID NO: 297930 - DNA, 30 bp, Artificial Sequence
  Synthetic oligonucleotide
tgaggtatagctgaattcagttattccgat

SEQ ID NO: 297931 - DNA, 30 bp, Artificial Sequence
  Synthetic oligonucleotide
gttccggtgacttttacggttcaaagcgat

SEQ ID NO: 297932 - DNA, 30 bp, Artificial Sequence
  Synthetic oligonucleotide
cctactgtaaatattaagtcgatcagcgat

SEQ ID NO: 297933 - DNA, 30 bp, Artificial Sequence
  Synthetic oligonucleotide
cgggtaagtgttaaatgggtgaggagcgat

SEQ ID NO: 297934 - DNA, 30 bp, Artificial Sequence
  Synthetic oligonucleotide
tctaatcaagaatagagggctacacgcgat

SEQ ID NO: 297935 - DNA, 30 bp, Artificial Sequence
  Synthetic oligonucleotide
aatgtgtcgccggtaggaacaatacgcgat

SEQ ID NO: 297936 - DNA, 30 bp, Artificial Sequence
  Synthetic oligonucleotide
gggctgattgcgacgtggcgcctgcgcgat

SEQ ID NO: 297937 - DNA, 30 bp, Artificial Sequence
  Synthetic oligonucleotide
ggaattcccgtaagccacacgctaggcgat

SEQ ID NO: 297938 - DNA, 30 bp, Artificial Sequence
  Synthetic oligonucleotide
acagccgattagttgtttcgcgtcggcgat

SEQ ID NO: 297939 - DNA, 30 bp, Artificial Sequence
  Synthetic oligonucleotide
ccctcttatttcaaaatctaggtgggcgat

SEQ ID NO: 297940 - DNA, 30 bp, Artificial Sequence
  Synthetic oligonucleotide
accaggggttggaaggacatggatggcgat

SEQ ID NO: 297941 - DNA, 30 bp, Artificial Sequence
  Synthetic oligonucleotide
aagattaggccaaattcagcagttggcgat

SEQ ID NO: 297942 - DNA, 30 bp, Artificial Sequence
  Synthetic oligonucleotide
actaaataccctactatgccataatgcgat

SEQ ID NO: 297943 - DNA, 30 bp, Artificial Sequence
  Synthetic oligonucleotide
ggcggctaactattgctttaggactgcgat

SEQ ID NO: 297944 - DNA, 30 bp, Artificial Sequence
  Synthetic oligonucleotide
ctcagtcccggctggatacaagcttgcgat

SEQ ID NO: 297945 - DNA, 30 bp, Artificial Sequence
  Synthetic oligonucleotide
gaaaccagaccgttgtgcgtatgttgcgat

SEQ ID NO: 297946 - DNA, 30 bp, Artificial Sequence
  Synthetic oligonucleotide
agaatctcaacggctagatagctttgcgat

SEQ ID NO: 297947 - DNA, 30 bp, Artificial Sequence
  Synthetic oligonucleotide
gaagtgcgttcagattcgttacgaatcgat

SEQ ID NO: 297948 - DNA, 30 bp, Artificial Sequence
  Synthetic oligonucleotide
atcatggggcacaaacctggtcacatcgat

SEQ ID NO: 297949 - DNA, 30 bp, Artificial Sequence
  Synthetic oligonucleotide
gggattaggcaccgcttgtctatcatcgat

SEQ ID NO: 297950 - DNA, 30 bp, Artificial Sequence
  Synthetic oligonucleotide
acaacgcctgtggaaagacggtcgatcgat

SEQ ID NO: 297951 - DNA, 30 bp, Artificial Sequence
  Synthetic oligonucleotide
ggcttaacatcgatctacagggggatcgat

SEQ ID NO: 297952 - DNA, 30 bp, Artificial Sequence
  Synthetic oligonucleotide
gaatcgtattggcagtaccatttgatcgat

SEQ ID NO: 297953 - DNA, 30 bp, Artificial Sequence
  Synthetic oligonucleotide
agtgtacttagtgtgtaacgaactatcgat

SEQ ID NO: 297954 - DNA, 30 bp, Artificial Sequence
  Synthetic oligonucleotide
tgggctcttcggagcaagacaacactcgat

SEQ ID NO: 297955 - DNA, 30 bp, Artificial Sequence
  Synthetic oligonucleotide
acagctctggtgtaaagtacatgactcgat

SEQ ID NO: 297956 - DNA, 30 bp, Artificial Sequence
  Synthetic oligonucleotide
agactgagaacgtgttaaatttgactcgat

SEQ ID NO: 297957 - DNA, 30 bp, Artificial Sequence
  Synthetic oligonucleotide
gctactcagaaggcacacctcctcctcgat

SEQ ID NO: 297958 - DNA, 30 bp, Artificial Sequence
  Synthetic oligonucleotide
cggtcgccatttccaaacgtgtcgctcgat

SEQ ID NO: 297959 - DNA, 30 bp, Artificial Sequence
  Synthetic oligonucleotide
gaagctcacggagtcggactacggctcgat

SEQ ID NO: 297960 - DNA, 30 bp, Artificial Sequence
  Synthetic oligonucleotide
cacgctcccggacacctggggggtctcgat

SEQ ID NO: 297961 - DNA, 30 bp, Artificial Sequence
  Synthetic oligonucleotide
tccggtcgtctttactgtggtcttctcgat

SEQ ID NO: 297962 - DNA, 30 bp, Artificial Sequence
  Synthetic oligonucleotide
tgcatgtgacgtttatatgtaagggtcgat

SEQ ID NO: 297963 - DNA, 30 bp, Artificial Sequence
  Synthetic oligonucleotide
tatcatgattattacagatccgtggtcgat

SEQ ID NO: 297964 - DNA, 30 bp, Artificial Sequence
  Synthetic oligonucleotide
tcggcgtccgttcaacggacgactgtcgat

SEQ ID NO: 297965 - DNA, 30 bp, Artificial Sequence
  Synthetic oligonucleotide
taatatttcccccaccttaaggcattcgat

SEQ ID NO: 297966 - DNA, 30 bp, Artificial Sequence
  Synthetic oligonucleotide
agagcacgttatttcccagggtacttcgat

SEQ ID NO: 297967 - DNA, 30 bp, Artificial Sequence
  Synthetic oligonucleotide
ttcatccgtcaagtaggcaaaacgttcgat

SEQ ID NO: 297968 - DNA, 30 bp, Artificial Sequence
  Synthetic oligonucleotide
cgggtgtagcattcgtaaagccttttcgat

SEQ ID NO: 297969 - DNA, 30 bp, Artificial Sequence
  Synthetic oligonucleotide
gttctctgggcccgaatagtgtttttcgat

SEQ ID NO: 297970 - DNA, 30 bp, Artificial Sequence
  Synthetic oligonucleotide
ctcgggagtcggttgggaggccccaaggat

SEQ ID NO: 297971 - DNA, 30 bp, Artificial Sequence
  Synthetic oligonucleotide
ggcgcatgagcgaaattagatcgcaaggat

SEQ ID NO: 297972 - DNA, 30 bp, Artificial Sequence
  Synthetic oligonucleotide
atccgaactccgatacccaaaaagaaggat

SEQ ID NO: 297973 - DNA, 30 bp, Artificial Sequence
  Synthetic oligonucleotide
aatacgccaattccacgttcggggaaggat

SEQ ID NO: 297974 - DNA, 30 bp, Artificial Sequence
  Synthetic oligonucleotide
tctctgtcggttaaatgtgggaataaggat

SEQ ID NO: 297975 - DNA, 30 bp, Artificial Sequence
  Synthetic oligonucleotide
tctctagactgcatcagggttcataaggat

SEQ ID NO: 297976 - DNA, 30 bp, Artificial Sequence
  Synthetic oligonucleotide
attaaagggcctcgtggaccaagtaaggat

SEQ ID NO: 297977 - DNA, 30 bp, Artificial Sequence
  Synthetic oligonucleotide
acgccaaaggccgtgacctggtgacaggat

SEQ ID NO: 297978 - DNA, 30 bp, Artificial Sequence
  Synthetic oligonucleotide
agatatgcgcaggaacatagcctacaggat

SEQ ID NO: 297979 - DNA, 30 bp, Artificial Sequence
  Synthetic oligonucleotide
acaaaacctcctggcaaatacgaccaggat

SEQ ID NO: 297980 - DNA, 30 bp, Artificial Sequence
  Synthetic oligonucleotide
ttacagagatatggtggctgcgcccaggat

SEQ ID NO: 297981 - DNA, 30 bp, Artificial Sequence
  Synthetic oligonucleotide
tgcaaagaaggcagtcggacggcagaggat

SEQ ID NO: 297982 - DNA, 30 bp, Artificial Sequence
  Synthetic oligonucleotide
ttccacaggccgagagtgtctcacgaggat

SEQ ID NO: 297983 - DNA, 30 bp, Artificial Sequence
  Synthetic oligonucleotide
gaactcgcggcctgacgttttctggaggat

SEQ ID NO: 297984 - DNA, 30 bp, Artificial Sequence
  Synthetic oligonucleotide
ttcgtacgttggcaggctcattaataggat

SEQ ID NO: 297985 - DNA, 30 bp, Artificial Sequence
  Synthetic oligonucleotide
caaccaaaaggatgtgactattaataggat

SEQ ID NO: 297986 - DNA, 30 bp, Artificial Sequence
  Synthetic oligonucleotide
attctaaggactagcagccgccactaggat

SEQ ID NO: 297987 - DNA, 30 bp, Artificial Sequence
  Synthetic oligonucleotide
gagcaatgagcaataacaaggcactaggat

SEQ ID NO: 297988 - DNA, 30 bp, Artificial Sequence
  Synthetic oligonucleotide
ggccaataaaatagtccccgtatgtaggat

SEQ ID NO: 297989 - DNA, 30 bp, Artificial Sequence
  Synthetic oligonucleotide
tgaaatattgtggttagaaatacttaggat

SEQ ID NO: 297990 - DNA, 30 bp, Artificial Sequence
  Synthetic oligonucleotide
ttcgcctaggctctggatatcagttaggat

SEQ ID NO: 297991 - DNA, 30 bp, Artificial Sequence
  Synthetic oligonucleotide
ggagtgggagggcgcagcttgagttaggat

SEQ ID NO: 297992 - DNA, 30 bp, Artificial Sequence
  Synthetic oligonucleotide
ttgaaattgtgttgggtgaaagcaacggat

SEQ ID NO: 297993 - DNA, 30 bp, Artificial Sequence
  Synthetic oligonucleotide
caatatcgacacccccgcccgcgaacggat

SEQ ID NO: 297994 - DNA, 30 bp, Artificial Sequence
  Synthetic oligonucleotide
aaccataggtcgaagactaagcccacggat

SEQ ID NO: 297995 - DNA, 30 bp, Artificial Sequence
  Synthetic oligonucleotide
ttaactaggtctcataggcaaaggacggat

SEQ ID NO: 297996 - DNA, 30 bp, Artificial Sequence
  Synthetic oligonucleotide
gttaatataggtcggaaaacaaggacggat

SEQ ID NO: 297997 - DNA, 30 bp, Artificial Sequence
  Synthetic oligonucleotide
aaatgggcagcacaattctatactacggat

SEQ ID NO: 297998 - DNA, 30 bp, Artificial Sequence
  Synthetic oligonucleotide
atcggggaaacgagaagttgggttacggat

SEQ ID NO: 297999 - DNA, 30 bp, Artificial Sequence
  Synthetic oligonucleotide
ctgctaaagggttctcggccgaccccggat

SEQ ID NO: 298000 - DNA, 30 bp, Artificial Sequence
  Synthetic oligonucleotide
agtccgagggaaaaaatatatgggccggat

SEQ ID NO: 298001 - DNA, 30 bp, Artificial Sequence
  Synthetic oligonucleotide
taagaacggcagcatcggaacactccggat

SEQ ID NO: 298002 - DNA, 30 bp, Artificial Sequence
  Synthetic oligonucleotide
ccgtaggtcccatttaataatcgtccggat

SEQ ID NO: 298003 - DNA, 30 bp, Artificial Sequence
  Synthetic oligonucleotide
agtgggacagcacccactttactcgcggat

SEQ ID NO: 298004 - DNA, 30 bp, Artificial Sequence
  Synthetic oligonucleotide
gccgcaatgagttgcatattttgctcggat

SEQ ID NO: 298005 - DNA, 30 bp, Artificial Sequence
  Synthetic oligonucleotide
ctctaattgttgatgtatcctgtctcggat

SEQ ID NO: 298006 - DNA, 30 bp, Artificial Sequence
  Synthetic oligonucleotide
gctcagttcgctcgactggagtagtcggat

SEQ ID NO: 298007 - DNA, 30 bp, Artificial Sequence
  Synthetic oligonucleotide
tgcgggagaagcaaatgtatatacagggat

SEQ ID NO: 298008 - DNA, 30 bp, Artificial Sequence
  Synthetic oligonucleotide
gacacgtggtgcgacgcggataatagggat

SEQ ID NO: 298009 - DNA, 30 bp, Artificial Sequence
  Synthetic oligonucleotide
cgggttcgctatcatgagtacgatagggat

SEQ ID NO: 298010 - DNA, 30 bp, Artificial Sequence
  Synthetic oligonucleotide
cctcggtttgaattaggacagtctagggat

SEQ ID NO: 298011 - DNA, 30 bp, Artificial Sequence
  Synthetic oligonucleotide
ctgtgggtaaggttagtctgaagccgggat

SEQ ID NO: 298012 - DNA, 30 bp, Artificial Sequence
  Synthetic oligonucleotide
tggaggggggatgctgctggcgcgcgggat

SEQ ID NO: 298013 - DNA, 30 bp, Artificial Sequence
  Synthetic oligonucleotide
gtatatatgtgttctcgtgcgaatcgggat

SEQ ID NO: 298014 - DNA, 30 bp, Artificial Sequence
  Synthetic oligonucleotide
tgacactgacatccgagtcctgatcgggat

SEQ ID NO: 298015 - DNA, 30 bp, Artificial Sequence
  Synthetic oligonucleotide
gtcgcggctgaactatatgacactcgggat

SEQ ID NO: 298016 - DNA, 30 bp, Artificial Sequence
  Synthetic oligonucleotide
gccctcccgcatacataagtgggaggggat

SEQ ID NO: 298017 - DNA, 31 bp, Artificial Sequence
  Synthetic oligonucleotide
ggccatatggcaacttattgctggaggggat

SEQ ID NO: 298018 - DNA, 30 bp, Artificial Sequence
  Synthetic oligonucleotide
ggggttctggtcaggttaacgagcggggat

SEQ ID NO: 298019 - DNA, 30 bp, Artificial Sequence
  Synthetic oligonucleotide
ctaatcgcgcacgagttccgccttggggat

SEQ ID NO: 298020 - DNA, 30 bp, Artificial Sequence
  Synthetic oligonucleotide
ctacgacgaattggcgcatatcaatgggat

SEQ ID NO: 298021 - DNA, 30 bp, Artificial Sequence
  Synthetic oligonucleotide
tctagtgtatgaaggattgttcgatgggat

SEQ ID NO: 298022 - DNA, 30 bp, Artificial Sequence
  Synthetic oligonucleotide
agataagctcaggcgcaacacgtatgggat

SEQ ID NO: 298023 - DNA, 30 bp, Artificial Sequence
  Synthetic oligonucleotide
gatgatggcgtgtatctgaccctctgggat

SEQ ID NO: 298024 - DNA, 30 bp, Artificial Sequence
  Synthetic oligonucleotide
tcttaaatcgtgtcggccgatccgtgggat

SEQ ID NO: 298025 - DNA, 30 bp, Artificial Sequence
  Synthetic oligonucleotide
tggtcagccggtacgcaagtgtgttgggat

SEQ ID NO: 298026 - DNA, 30 bp, Artificial Sequence
  Synthetic oligonucleotide
ttctggccggggtacaccgtaaaaatggat

SEQ ID NO: 298027 - DNA, 30 bp, Artificial Sequence
  Synthetic oligonucleotide
tgactttggtgacttgcatgtgaaatggat

SEQ ID NO: 298028 - DNA, 30 bp, Artificial Sequence
  Synthetic oligonucleotide
ataactatagtcttagggaaggggatggat

SEQ ID NO: 298029 - DNA, 30 bp, Artificial Sequence
  Synthetic oligonucleotide
gttgcatccgaagccgaggacgccctggat

SEQ ID NO: 298030 - DNA, 30 bp, Artificial Sequence
  Synthetic oligonucleotide
caaccattcccacttagagagaagctggat

SEQ ID NO: 298031 - DNA, 30 bp, Artificial Sequence
  Synthetic oligonucleotide
caaacatcttctagcgccatgtagctggat

SEQ ID NO: 298032 - DNA, 30 bp, Artificial Sequence
  Synthetic oligonucleotide
ggtatactacgacaggcaaaagtgctggat

SEQ ID NO: 298033 - DNA, 30 bp, Artificial Sequence
  Synthetic oligonucleotide
agcatagtcacaatagctgtagaagtggat

SEQ ID NO: 298034 - DNA, 30 bp, Artificial Sequence
  Synthetic oligonucleotide
tgggaatttaaatagcgccaagtagtggat

SEQ ID NO: 298035 - DNA, 30 bp, Artificial Sequence
  Synthetic oligonucleotide
ctaaatgttggcctaaataagaccgtggat

SEQ ID NO: 298036 - DNA, 30 bp, Artificial Sequence
  Synthetic oligonucleotide
gcagtaaagaccttccacacaaatgtggat

SEQ ID NO: 298037 - DNA, 30 bp, Artificial Sequence
  Synthetic oligonucleotide
gcagtcccccagcataccctcgatgtggat

SEQ ID NO: 298038 - DNA, 30 bp, Artificial Sequence
  Synthetic oligonucleotide
atacctgatccgatagtgtccagattggat

SEQ ID NO: 298039 - DNA, 30 bp, Artificial Sequence
  Synthetic oligonucleotide
tttgcgtgcgggaactctgaccccttggat

SEQ ID NO: 298040 - DNA, 30 bp, Artificial Sequence
  Synthetic oligonucleotide
tcaaagatcctatggaacggtaggttggat

SEQ ID NO: 298041 - DNA, 30 bp, Artificial Sequence
  Synthetic oligonucleotide
gttgagccgcacatgtgaatatggttggat

SEQ ID NO: 298042 - DNA, 30 bp, Artificial Sequence
  Synthetic oligonucleotide
gaacgcttatactgagcacatcatttggat

SEQ ID NO: 298043 - DNA, 29 bp, Artificial Sequence
  Synthetic oligonucleotide
ccgttgagcctcgtgttcaagttttggat

SEQ ID NO: 298044 - DNA, 30 bp, Artificial Sequence
  Synthetic oligonucleotide
aagtcagacctcaaggttggacaaaatgat

SEQ ID NO: 298045 - DNA, 30 bp, Artificial Sequence
  Synthetic oligonucleotide
gcagattgtagcaattttaagcagaatgat

SEQ ID NO: 298046 - DNA, 30 bp, Artificial Sequence
  Synthetic oligonucleotide
attggatagttgcgtataccctgtaatgat

SEQ ID NO: 298047 - DNA, 30 bp, Artificial Sequence
  Synthetic oligonucleotide
tagccgccccaacacttgcatacccatgat

SEQ ID NO: 298048 - DNA, 30 bp, Artificial Sequence
  Synthetic oligonucleotide
agagaatcgtgctgtgactgtacgcatgat

SEQ ID NO: 298049 - DNA, 30 bp, Artificial Sequence
  Synthetic oligonucleotide
atgtcgtctcggacttcggtcactcatgat

SEQ ID NO: 298050 - DNA, 30 bp, Artificial Sequence
  Synthetic oligonucleotide
ttgtttggactacttatggggggtcatgat

SEQ ID NO: 298051 - DNA, 30 bp, Artificial Sequence
  Synthetic oligonucleotide
gccttaatgatccgatgtgcaccggatgat

SEQ ID NO: 298052 - DNA, 30 bp, Artificial Sequence
  Synthetic oligonucleotide
gtgtaacattcttggagcagcttggatgat

SEQ ID NO: 298053 - DNA, 30 bp, Artificial Sequence
  Synthetic oligonucleotide
ctccggactaacacgtgttatattgatgat

SEQ ID NO: 298054 - DNA, 30 bp, Artificial Sequence
  Synthetic oligonucleotide
ttaaatagggcaatgatagcggaatatgat

SEQ ID NO: 298055 - DNA, 30 bp, Artificial Sequence
  Synthetic oligonucleotide
tagtcccccagaggatagtctttgtatgat

SEQ ID NO: 298056 - DNA, 30 bp, Artificial Sequence
  Synthetic oligonucleotide
ttcctaactgcaactagtgattacactgat

SEQ ID NO: 298057 - DNA, 30 bp, Artificial Sequence
  Synthetic oligonucleotide
atgacgaggttcggctgattctccactgat

SEQ ID NO: 298058 - DNA, 30 bp, Artificial Sequence
  Synthetic oligonucleotide
agtcgcgatctttacatacaaggacctgat

SEQ ID NO: 298059 - DNA, 30 bp, Artificial Sequence
  Synthetic oligonucleotide
tggaataggggataaagtagcacgcctgat

SEQ ID NO: 298060 - DNA, 30 bp, Artificial Sequence
  Synthetic oligonucleotide
cttagagtttttggcatcagcccgcctgat

SEQ ID NO: 298061 - DNA, 30 bp, Artificial Sequence
  Synthetic oligonucleotide
gtgctggctggatagtaaaagcctcctgat

SEQ ID NO: 298062 - DNA, 30 bp, Artificial Sequence
  Synthetic oligonucleotide
cactctaaaactgcaagaggtgttcctgat

SEQ ID NO: 298063 - DNA, 30 bp, Artificial Sequence
  Synthetic oligonucleotide
taaaatgacgcgaacaggaaaaaagctgat

SEQ ID NO: 298064 - DNA, 30 bp, Artificial Sequence
  Synthetic oligonucleotide
tgggcttgtatatcaattatccgtgctgat

SEQ ID NO: 298065 - DNA, 30 bp, Artificial Sequence
  Synthetic oligonucleotide
acgcttcagtacttggtttaccttgctgat

SEQ ID NO: 298066 - DNA, 30 bp, Artificial Sequence
  Synthetic oligonucleotide
gtaccaagtgatagtcctattagatctgat

SEQ ID NO: 298067 - DNA, 30 bp, Artificial Sequence
  Synthetic oligonucleotide
cattggccaagcagttgcctaatctctgat

SEQ ID NO: 298068 - DNA, 30 bp, Artificial Sequence
  Synthetic oligonucleotide
ctcccatgaggcgcggggcaataaagtgat

SEQ ID NO: 298069 - DNA, 30 bp, Artificial Sequence
  Synthetic oligonucleotide
tgtcttggcctgggagtatgccagagtgat

SEQ ID NO: 298070 - DNA, 30 bp, Artificial Sequence
  Synthetic oligonucleotide
ctccatcattatcggccctccgtgagtgat

SEQ ID NO: 298071 - DNA, 30 bp, Artificial Sequence
  Synthetic oligonucleotide
aatcgttcattctgtaagatcgtgagtgat

SEQ ID NO: 298072 - DNA, 30 bp, Artificial Sequence
  Synthetic oligonucleotide
gctgggaaaacaagagattctggtagtgat

SEQ ID NO: 298073 - DNA, 30 bp, Artificial Sequence
  Synthetic oligonucleotide
gggtttatcggtcgtttaacgagacgtgat

SEQ ID NO: 298074 - DNA, 30 bp, Artificial Sequence
  Synthetic oligonucleotide
atggaaacgaacattcagtaggtaggtgat

SEQ ID NO: 298075 - DNA, 30 bp, Artificial Sequence
  Synthetic oligonucleotide
gaagatctatgatactgtggggccggtgat

SEQ ID NO: 298076 - DNA, 30 bp, Artificial Sequence
  Synthetic oligonucleotide
caggcgatagttagagatgtgtgcggtgat

SEQ ID NO: 298077 - DNA, 30 bp, Artificial Sequence
  Synthetic oligonucleotide
gtagtcacagggggcccggagttgggtgat

SEQ ID NO: 298078 - DNA, 30 bp, Artificial Sequence
  Synthetic oligonucleotide
atcaggtcatgccagatacagtatggtgat

SEQ ID NO: 298079 - DNA, 30 bp, Artificial Sequence
  Synthetic oligonucleotide
atgctttggacgtatattgcaagatgtgat

SEQ ID NO: 298080 - DNA, 30 bp, Artificial Sequence
  Synthetic oligonucleotide
atgaaggtgagtcgatcaggtatctgtgat

SEQ ID NO: 298081 - DNA, 30 bp, Artificial Sequence
  Synthetic oligonucleotide
atgggatcacccgatatttttacttgtgat

SEQ ID NO: 298082 - DNA, 30 bp, Artificial Sequence
  Synthetic oligonucleotide
tattcttaggcaacgggctgagtttgtgat

SEQ ID NO: 298083 - DNA, 30 bp, Artificial Sequence
  Synthetic oligonucleotide
aacttaggtgttcctactttataaattgat

SEQ ID NO: 298084 - DNA, 30 bp, Artificial Sequence
  Synthetic oligonucleotide
tgattaatatctggtcttgcaagcattgat

SEQ ID NO: 298085 - DNA, 30 bp, Artificial Sequence
  Synthetic oligonucleotide
cctgtactggtttggctggtaaagattgat

SEQ ID NO: 298086 - DNA, 30 bp, Artificial Sequence
  Synthetic oligonucleotide
cacacgataccatttccaaaggggattgat

SEQ ID NO: 298087 - DNA, 30 bp, Artificial Sequence
  Synthetic oligonucleotide
gttcgaacctgtacgaatcttatgattgat

SEQ ID NO: 298088 - DNA, 30 bp, Artificial Sequence
  Synthetic oligonucleotide
atagcgggacaacacttgaaatatattgat

SEQ ID NO: 298089 - DNA, 30 bp, Artificial Sequence
  Synthetic oligonucleotide
ggcgatatctgtcaacttcaaggccttgat

SEQ ID NO: 298090 - DNA, 30 bp, Artificial Sequence
  Synthetic oligonucleotide
caggtgggagaagggtcattaggccttgat

SEQ ID NO: 298091 - DNA, 30 bp, Artificial Sequence
  Synthetic oligonucleotide
ttagatcagcgcttttcgtcagtccttgat

SEQ ID NO: 298092 - DNA, 30 bp, Artificial Sequence
  Synthetic oligonucleotide
tacggtgaattcaaattctgcgtccttgat

SEQ ID NO: 298093 - DNA, 30 bp, Artificial Sequence
  Synthetic oligonucleotide
ttcgactcagggcccgggtgatagcttgat

SEQ ID NO: 298094 - DNA, 30 bp, Artificial Sequence
  Synthetic oligonucleotide
ctcatattgtcataaggtcacgggcttgat

SEQ ID NO: 298095 - DNA, 30 bp, Artificial Sequence
  Synthetic oligonucleotide
tgctctcgtataacttttgtggggcttgat

SEQ ID NO: 298096 - DNA, 30 bp, Artificial Sequence
  Synthetic oligonucleotide
gtggaaggccagcgttcacatcgtcttgat

SEQ ID NO: 298097 - DNA, 30 bp, Artificial Sequence
  Synthetic oligonucleotide
ccagtgctcctaccaaaactctaagttgat

SEQ ID NO: 298098 - DNA, 30 bp, Artificial Sequence
  Synthetic oligonucleotide
tttgccagtcattggttgaacgtcgttgat

SEQ ID NO: 298099 - DNA, 30 bp, Artificial Sequence
  Synthetic oligonucleotide
tctagaaatactagacctgtgtaggttgat

SEQ ID NO: 298100 - DNA, 30 bp, Artificial Sequence
  Synthetic oligonucleotide
tcatcgcgacgggcatgtggcagggttgat

SEQ ID NO: 298101 - DNA, 30 bp, Artificial Sequence
  Synthetic oligonucleotide
gggtaacacccatcacaactgtgggttgat

SEQ ID NO: 298102 - DNA, 30 bp, Artificial Sequence
  Synthetic oligonucleotide
tcggtatcattgaactccacagatgttgat

SEQ ID NO: 298103 - DNA, 30 bp, Artificial Sequence
  Synthetic oligonucleotide
ccaaaggttaagtgcggtacccctgttgat

SEQ ID NO: 298104 - DNA, 29 bp, Artificial Sequence
  Synthetic oligonucleotide
ccagtcgcacacgacgggcattatttgat

SEQ ID NO: 298105 - DNA, 30 bp, Artificial Sequence
  Synthetic oligonucleotide
tgagtaggtacgtccagatatgactttgat

SEQ ID NO: 298106 - DNA, 30 bp, Artificial Sequence
  Synthetic oligonucleotide
atgcgtatcgcatactataacacgtttgat

SEQ ID NO: 298107 - DNA, 30 bp, Artificial Sequence
  Synthetic oligonucleotide
cccagataacctggctatgtagtgtttgat

SEQ ID NO: 298108 - DNA, 30 bp, Artificial Sequence
  Synthetic oligonucleotide
taccgtgggaagcaaacccacgcaaaatat

SEQ ID NO: 298109 - DNA, 30 bp, Artificial Sequence
  Synthetic oligonucleotide
ttctagcaagtgctccaaggacgaaaatat

SEQ ID NO: 298110 - DNA, 30 bp, Artificial Sequence
  Synthetic oligonucleotide
actaaaccgagcacgaagtgaaacaaatat

SEQ ID NO: 298111 - DNA, 30 bp, Artificial Sequence
  Synthetic oligonucleotide
attgaagcattagaatcctgctagaaatat

SEQ ID NO: 298112 - DNA, 30 bp, Artificial Sequence
  Synthetic oligonucleotide
ttcgacattaaagcaactgacgggaaatat

SEQ ID NO: 298113 - DNA, 30 bp, Artificial Sequence
  Synthetic oligonucleotide
gctactggaatagaccaggtagataaatat

SEQ ID NO: 298114 - DNA, 30 bp, Artificial Sequence
  Synthetic oligonucleotide
catcaagacccatcttgtctggctaaatat

SEQ ID NO: 298115 - DNA, 30 bp, Artificial Sequence
  Synthetic oligonucleotide
gcctcatcttacatcggatttcttaaatat

SEQ ID NO: 298116 - DNA, 30 bp, Artificial Sequence
  Synthetic oligonucleotide
acttgcaccgctgcacggtaggcacaatat

SEQ ID NO: 298117 - DNA, 30 bp, Artificial Sequence
  Synthetic oligonucleotide
attcaatgaatgatgaatgactcacaatat

SEQ ID NO: 298118 - DNA, 30 bp, Artificial Sequence
  Synthetic oligonucleotide
accccacacgatgcgcactcgggacaatat

SEQ ID NO: 298119 - DNA, 30 bp, Artificial Sequence
  Synthetic oligonucleotide
cactacgggtcgaatgcagtagtacaatat

SEQ ID NO: 298120 - DNA, 30 bp, Artificial Sequence
  Synthetic oligonucleotide
tgtaagaaacggtattcagccgaccaatat

SEQ ID NO: 298121 - DNA, 30 bp, Artificial Sequence
  Synthetic oligonucleotide
agtatgccgattcggctcagagcccaatat

SEQ ID NO: 298122 - DNA, 30 bp, Artificial Sequence
  Synthetic oligonucleotide
accgtcagaatacgatttagggagcaatat

SEQ ID NO: 298123 - DNA, 30 bp, Artificial Sequence
  Synthetic oligonucleotide
tatctaaaccttgaagtacaccgagaatat

SEQ ID NO: 298124 - DNA, 30 bp, Artificial Sequence
  Synthetic oligonucleotide
tgttcatcgtgtacctgcccaggagaatat

SEQ ID NO: 298125 - DNA, 30 bp, Artificial Sequence
  Synthetic oligonucleotide
ggtacatggaaccgtagtacgatagaatat

SEQ ID NO: 298126 - DNA, 30 bp, Artificial Sequence
  Synthetic oligonucleotide
tatctttaggtacaaacctacgacgaatat

SEQ ID NO: 298127 - DNA, 30 bp, Artificial Sequence
  Synthetic oligonucleotide
attggtcctgttccttatccacccgaatat

SEQ ID NO: 298128 - DNA, 30 bp, Artificial Sequence
  Synthetic oligonucleotide
tcattttaagacggataggccagcgaatat

SEQ ID NO: 298129 - DNA, 30 bp, Artificial Sequence
  Synthetic oligonucleotide
agtatagccctctgatgcgcctaggaatat

SEQ ID NO: 298130 - DNA, 30 bp, Artificial Sequence
  Synthetic oligonucleotide
ttcgggcaattgcccgtacagagggaatat

SEQ ID NO: 298131 - DNA, 30 bp, Artificial Sequence
  Synthetic oligonucleotide
agacccaagaacaatttgcggatggaatat

SEQ ID NO: 298132 - DNA, 30 bp, Artificial Sequence
  Synthetic oligonucleotide
gtgcagggcacaattatcgccggtgaatat

SEQ ID NO: 298133 - DNA, 30 bp, Artificial Sequence
  Synthetic oligonucleotide
tctcgcttcggtaaccaagccgttgaatat

SEQ ID NO: 298134 - DNA, 30 bp, Artificial Sequence
  Synthetic oligonucleotide
gcgagctctattgtttaaatatttgaatat

SEQ ID NO: 298135 - DNA, 30 bp, Artificial Sequence
  Synthetic oligonucleotide
ccgggtcgtcgctaatgagtacgataatat

SEQ ID NO: 298136 - DNA, 30 bp, Artificial Sequence
  Synthetic oligonucleotide
tgatccatataacctgttcacgactaatat

SEQ ID NO: 298137 - DNA, 30 bp, Artificial Sequence
  Synthetic oligonucleotide
caaagggatatctgttccacaccctaatat

SEQ ID NO: 298138 - DNA, 30 bp, Artificial Sequence
  Synthetic oligonucleotide
cagaatcgcgtttttaagcaaaagtaatat

SEQ ID NO: 298139 - DNA, 31 bp, Artificial Sequence
  Synthetic oligonucleotide
ataccttggagaggtaccaaataagtaatat

SEQ ID NO: 298140 - DNA, 30 bp, Artificial Sequence
  Synthetic oligonucleotide
ggggatgctgactaagttgataagtaatat

SEQ ID NO: 298141 - DNA, 31 bp, Artificial Sequence
  Synthetic oligonucleotide
gaccgaaagactattgatcacagcgtaatat

SEQ ID NO: 298142 - DNA, 30 bp, Artificial Sequence
  Synthetic oligonucleotide
atttccggtaggcaaggtgtatgaacatat

SEQ ID NO: 298143 - DNA, 30 bp, Artificial Sequence
  Synthetic oligonucleotide
aagaagcccgggcctccactttacacatat

SEQ ID NO: 298144 - DNA, 30 bp, Artificial Sequence
  Synthetic oligonucleotide
tgacttagaatcccacctggccgcacatat

SEQ ID NO: 298145 - DNA, 30 bp, Artificial Sequence
  Synthetic oligonucleotide
tatcgcgtaattgtcagccacaagacatat

SEQ ID NO: 298146 - DNA, 30 bp, Artificial Sequence
  Synthetic oligonucleotide
cgtatgggccaggagttctgccagacatat

SEQ ID NO: 298147 - DNA, 30 bp, Artificial Sequence
  Synthetic oligonucleotide
ggtgtcttttatgctaccagtttgacatat

SEQ ID NO: 298148 - DNA, 30 bp, Artificial Sequence
  Synthetic oligonucleotide
cgtagggagctgggatccctggatacatat

SEQ ID NO: 298149 - DNA, 30 bp, Artificial Sequence
  Synthetic oligonucleotide
tggggtgcgagagagggacgctccccatat

SEQ ID NO: 298150 - DNA, 30 bp, Artificial Sequence
  Synthetic oligonucleotide
atacccgcacatctggaaatttggccatat

SEQ ID NO: 298151 - DNA, 30 bp, Artificial Sequence
  Synthetic oligonucleotide
aagggaatcggacttgcaaataatccatat

SEQ ID NO: 298152 - DNA, 30 bp, Artificial Sequence
  Synthetic oligonucleotide
tgctgcggtcggcctccgttcattccatat

SEQ ID NO: 298153 - DNA, 30 bp, Artificial Sequence
  Synthetic oligonucleotide
caccgcattctagtctcaaaggttccatat

SEQ ID NO: 298154 - DNA, 30 bp, Artificial Sequence
  Synthetic oligonucleotide
gagcacgtattttcagctgggtccgcatat

SEQ ID NO: 298155 - DNA, 30 bp, Artificial Sequence
  Synthetic oligonucleotide
aagattgtacaacagtgagggaaggcatat

SEQ ID NO: 298156 - DNA, 30 bp, Artificial Sequence
  Synthetic oligonucleotide
agagactgccactattactaatgtgcatat

SEQ ID NO: 298157 - DNA, 30 bp, Artificial Sequence
  Synthetic oligonucleotide
tccaaggaccttaagtgacggtgtgcatat

SEQ ID NO: 298158 - DNA, 30 bp, Artificial Sequence
  Synthetic oligonucleotide
atagggtagcaactgcattctacatcatat

SEQ ID NO: 298159 - DNA, 30 bp, Artificial Sequence
  Synthetic oligonucleotide
ggtatcagacggtgaccgacgagatcatat

SEQ ID NO: 298160 - DNA, 30 bp, Artificial Sequence
  Synthetic oligonucleotide
tacaggcaggatcgtagatacgtatcatat

SEQ ID NO: 298161 - DNA, 30 bp, Artificial Sequence
  Synthetic oligonucleotide
atcatgcgacacatgaaccgattatcatat

SEQ ID NO: 298162 - DNA, 30 bp, Artificial Sequence
  Synthetic oligonucleotide
ccagaaaatttcatcagagctagctcatat

SEQ ID NO: 298163 - DNA, 30 bp, Artificial Sequence
  Synthetic oligonucleotide
cacttcttgctggttagatctaattcatat

SEQ ID NO: 298164 - DNA, 30 bp, Artificial Sequence
  Synthetic oligonucleotide
attggggccagcgaagcatgccgttcatat

SEQ ID NO: 298165 - DNA, 30 bp, Artificial Sequence
  Synthetic oligonucleotide
agcgtaccaccctctagaatagtttcatat

SEQ ID NO: 298166 - DNA, 30 bp, Artificial Sequence
  Synthetic oligonucleotide
ctactgccaggtaggttatgcataagatat

SEQ ID NO: 298167 - DNA, 30 bp, Artificial Sequence
  Synthetic oligonucleotide
gcgtgatcgctgcgtaaatggcccagatat

SEQ ID NO: 298168 - DNA, 30 bp, Artificial Sequence
  Synthetic oligonucleotide
catggctcacccggcaatagcaaacgatat

SEQ ID NO: 298169 - DNA, 30 bp, Artificial Sequence
  Synthetic oligonucleotide
aatctagccaatacacttgccgaacgatat

SEQ ID NO: 298170 - DNA, 30 bp, Artificial Sequence
  Synthetic oligonucleotide
tgattcttaataaagggacctcggcgatat

SEQ ID NO: 298171 - DNA, 30 bp, Artificial Sequence
  Synthetic oligonucleotide
aacgaaaagctatcactgcggtgaggatat

SEQ ID NO: 298172 - DNA, 30 bp, Artificial Sequence
  Synthetic oligonucleotide
cccaatgcacttgtggtgccttgaggatat

SEQ ID NO: 298173 - DNA, 30 bp, Artificial Sequence
  Synthetic oligonucleotide
tgctagacttccttcagcctactaggatat

SEQ ID NO: 298174 - DNA, 30 bp, Artificial Sequence
  Synthetic oligonucleotide
ggtaatagccaggggcaccaccacggatat

SEQ ID NO: 298175 - DNA, 30 bp, Artificial Sequence
  Synthetic oligonucleotide
ttatacgtgacctgcgtaaaccgcggatat

SEQ ID NO: 298176 - DNA, 30 bp, Artificial Sequence
  Synthetic oligonucleotide
tattggtcacgcgaacctcagccgggatat

SEQ ID NO: 298177 - DNA, 30 bp, Artificial Sequence
  Synthetic oligonucleotide
ggtccccgcgtatacggttgcctgggatat

SEQ ID NO: 298178 - DNA, 30 bp, Artificial Sequence
  Synthetic oligonucleotide
agtcggggtcatggccaggtgctgggatat

SEQ ID NO: 298179 - DNA, 30 bp, Artificial Sequence
  Synthetic oligonucleotide
cggagaatgtggatacataaatatggatat

SEQ ID NO: 298180 - DNA, 30 bp, Artificial Sequence
  Synthetic oligonucleotide
ttacatcccgccatccggcaatcctgatat

SEQ ID NO: 298181 - DNA, 30 bp, Artificial Sequence
  Synthetic oligonucleotide
tagtggttcctatctcctgtagtctgatat

SEQ ID NO: 298182 - DNA, 30 bp, Artificial Sequence
  Synthetic oligonucleotide
gtcgtcacgtaaattgcacggcagtgatat

SEQ ID NO: 298183 - DNA, 29 bp, Artificial Sequence
  Synthetic oligonucleotide
actcgctttcttaagtgatggcgtgatat

SEQ ID NO: 298184 - DNA, 30 bp, Artificial Sequence
  Synthetic oligonucleotide
tcttaaccttccacgacattcctttgatat

SEQ ID NO: 298185 - DNA, 30 bp, Artificial Sequence
  Synthetic oligonucleotide
atgaaatcgcagagttctcagaccatatat

SEQ ID NO: 298186 - DNA, 30 bp, Artificial Sequence
  Synthetic oligonucleotide
attaatatcacaggccttagatccatatat

SEQ ID NO: 298187 - DNA, 30 bp, Artificial Sequence
  Synthetic oligonucleotide
ggggaagcggaggagtggaggcgcatatat

SEQ ID NO: 298188 - DNA, 30 bp, Artificial Sequence
  Synthetic oligonucleotide
cctattttgcattagcactgtatcatatat

SEQ ID NO: 298189 - DNA, 30 bp, Artificial Sequence
  Synthetic oligonucleotide
aagaacgccggagacgtcgaggggatatat

SEQ ID NO: 298190 - DNA, 30 bp, Artificial Sequence
  Synthetic oligonucleotide
agccccgttagatgggcctcgctgatatat

SEQ ID NO: 298191 - DNA, 30 bp, Artificial Sequence
  Synthetic oligonucleotide
acctaagcagtccctgacatgctgatatat

SEQ ID NO: 298192 - DNA, 30 bp, Artificial Sequence
  Synthetic oligonucleotide
ggacagaaaacctctcgcgagaatatatat

SEQ ID NO: 298193 - DNA, 30 bp, Artificial Sequence
  Synthetic oligonucleotide
agccactgtttagagcggactactatatat

SEQ ID NO: 298194 - DNA, 30 bp, Artificial Sequence
  Synthetic oligonucleotide
gatgagatcaggatgtaagggtgtatatat

SEQ ID NO: 298195 - DNA, 30 bp, Artificial Sequence
  Synthetic oligonucleotide
acttcagccattatccggtttccgctatat

SEQ ID NO: 298196 - DNA, 30 bp, Artificial Sequence
  Synthetic oligonucleotide
atgactgaatatgctaccaatgaagtatat

SEQ ID NO: 298197 - DNA, 30 bp, Artificial Sequence
  Synthetic oligonucleotide
cgaccagtcgtccaaaagactgaagtatat

SEQ ID NO: 298198 - DNA, 30 bp, Artificial Sequence
  Synthetic oligonucleotide
taacctgggtccggttacccaatagtatat

SEQ ID NO: 298199 - DNA, 30 bp, Artificial Sequence
  Synthetic oligonucleotide
ggcgagatataaaaattcaccgacgtatat

SEQ ID NO: 298200 - DNA, 30 bp, Artificial Sequence
  Synthetic oligonucleotide
ctccgaatgatggaattatggatggtatat

SEQ ID NO: 298201 - DNA, 30 bp, Artificial Sequence
  Synthetic oligonucleotide
gcgggtatgattagtgaaatacctgtatat

SEQ ID NO: 298202 - DNA, 30 bp, Artificial Sequence
  Synthetic oligonucleotide
acaaccccaactcgcgtgacaacattatat

SEQ ID NO: 298203 - DNA, 30 bp, Artificial Sequence
  Synthetic oligonucleotide
tgaaaatcgcacttagtaacgacattatat

SEQ ID NO: 298204 - DNA, 30 bp, Artificial Sequence
  Synthetic oligonucleotide
taggcggcacatcaactggactgattatat

SEQ ID NO: 298205 - DNA, 30 bp, Artificial Sequence
  Synthetic oligonucleotide
accttatggcccaggttaacgaaaaactat

SEQ ID NO: 298206 - DNA, 30 bp, Artificial Sequence
  Synthetic oligonucleotide
ctagggaacttttgccagctcacaaactat

SEQ ID NO: 298207 - DNA, 30 bp, Artificial Sequence
  Synthetic oligonucleotide
agcacatagttacagggccttgtcaactat

SEQ ID NO: 298208 - DNA, 30 bp, Artificial Sequence
  Synthetic oligonucleotide
cgcaggacttatcgagcaccattcaactat

SEQ ID NO: 298209 - DNA, 30 bp, Artificial Sequence
  Synthetic oligonucleotide
tcaggatactgtgtgaatgctgcgaactat

SEQ ID NO: 298210 - DNA, 30 bp, Artificial Sequence
  Synthetic oligonucleotide
ccaaggtgaggatcaccgcatgctaactat

SEQ ID NO: 298211 - DNA, 30 bp, Artificial Sequence
  Synthetic oligonucleotide
caattgttctagcgcatatttgttaactat

SEQ ID NO: 298212 - DNA, 30 bp, Artificial Sequence
  Synthetic oligonucleotide
gtgcggcgcgtctccctgtggtgacactat

SEQ ID NO: 298213 - DNA, 30 bp, Artificial Sequence
  Synthetic oligonucleotide
ctcggaagtgcacaatatagctagcactat

SEQ ID NO: 298214 - DNA, 30 bp, Artificial Sequence
  Synthetic oligonucleotide
attgattaagtggccgcgcggaggcactat

SEQ ID NO: 298215 - DNA, 30 bp, Artificial Sequence
  Synthetic oligonucleotide
gtggtcaatgggcggtggggatgtcactat

SEQ ID NO: 298216 - DNA, 30 bp, Artificial Sequence
  Synthetic oligonucleotide
gcgcggtatgttcgctgaaacattcactat

SEQ ID NO: 298217 - DNA, 30 bp, Artificial Sequence
  Synthetic oligonucleotide
tcatgctcgattttcccagtcggatactat

SEQ ID NO: 298218 - DNA, 30 bp, Artificial Sequence
  Synthetic oligonucleotide
gcatcagcgtggcaataagatagctactat

SEQ ID NO: 298219 - DNA, 30 bp, Artificial Sequence
  Synthetic oligonucleotide
tactatgtcgaacgtaaaaggtgctactat

SEQ ID NO: 298220 - DNA, 30 bp, Artificial Sequence
  Synthetic oligonucleotide
ccatctcgtgaatccaaagcggcttactat

SEQ ID NO: 298221 - DNA, 30 bp, Artificial Sequence
  Synthetic oligonucleotide
tctgccacaatagtcgctttcgccacctat

SEQ ID NO: 298222 - DNA, 30 bp, Artificial Sequence
  Synthetic oligonucleotide
ccgcaactggtggtgtaagaatcgacctat

SEQ ID NO: 298223 - DNA, 30 bp, Artificial Sequence
  Synthetic oligonucleotide
gtcggaccacgcgcgtggatgttgacctat

SEQ ID NO: 298224 - DNA, 30 bp, Artificial Sequence
  Synthetic oligonucleotide
tcatggcaatatgtgatgtagactacctat

SEQ ID NO: 298225 - DNA, 30 bp, Artificial Sequence
  Synthetic oligonucleotide
atactagtcttttgtaatttaagtacctat

SEQ ID NO: 298226 - DNA, 30 bp, Artificial Sequence
  Synthetic oligonucleotide
tctcgttacaagagggcatcttaaccctat

SEQ ID NO: 298227 - DNA, 30 bp, Artificial Sequence
  Synthetic oligonucleotide
cttcccacaggcgactgtggatcgccctat

SEQ ID NO: 298228 - DNA, 30 bp, Artificial Sequence
  Synthetic oligonucleotide
catcgatgtgtttacctggacaatccctat

SEQ ID NO: 298229 - DNA, 30 bp, Artificial Sequence
  Synthetic oligonucleotide
agtagctcctctgcaacgctacgtccctat

SEQ ID NO: 298230 - DNA, 30 bp, Artificial Sequence
  Synthetic oligonucleotide
ctagacaagttcactgcgacgtaagcctat

SEQ ID NO: 298231 - DNA, 30 bp, Artificial Sequence
  Synthetic oligonucleotide
caatgtttccaccataactcttatgcctat

SEQ ID NO: 298232 - DNA, 30 bp, Artificial Sequence
  Synthetic oligonucleotide
tttaggaggccaagtttttgttatgcctat

SEQ ID NO: 298233 - DNA, 31 bp, Artificial Sequence
  Synthetic oligonucleotide
tggggctgtatacattcttcgccgtgcctat

SEQ ID NO: 298234 - DNA, 30 bp, Artificial Sequence
  Synthetic oligonucleotide
ttgttgtgttctctttttgtgttctcctat

SEQ ID NO: 298235 - DNA, 30 bp, Artificial Sequence
  Synthetic oligonucleotide
acgtcatagataaccgagcgtgtgtcctat

SEQ ID NO: 298236 - DNA, 30 bp, Artificial Sequence
  Synthetic oligonucleotide
ttgttgtgttctctttttgtgtattcctat

SEQ ID NO: 298237 - DNA, 30 bp, Artificial Sequence
  Synthetic oligonucleotide
caaaattcttaagcatgcgtcggttcctat

SEQ ID NO: 298238 - DNA, 30 bp, Artificial Sequence
  Synthetic oligonucleotide
ggaactatcctacgaggggacatcagctat

SEQ ID NO: 298239 - DNA, 30 bp, Artificial Sequence
  Synthetic oligonucleotide
ttttcgagaatagtgggaccattcagctat

SEQ ID NO: 298240 - DNA, 30 bp, Artificial Sequence
  Synthetic oligonucleotide
ggagtcaatactgacccaaagaagagctat

SEQ ID NO: 298241 - DNA, 30 bp, Artificial Sequence
  Synthetic oligonucleotide
ctggtccgttaacctctcagcgggagctat

SEQ ID NO: 298242 - DNA, 30 bp, Artificial Sequence
  Synthetic oligonucleotide
gccttatccaaggtgtataaggttagctat

SEQ ID NO: 298243 - DNA, 30 bp, Artificial Sequence
  Synthetic oligonucleotide
gtagatggtagatcaattgtagaacgctat

SEQ ID NO: 298244 - DNA, 30 bp, Artificial Sequence
  Synthetic oligonucleotide
tggaagatctgcgggttagcggaacgctat

SEQ ID NO: 298245 - DNA, 30 bp, Artificial Sequence
  Synthetic oligonucleotide
atcagacatgggcaccaacttacacgctat

SEQ ID NO: 298246 - DNA, 30 bp, Artificial Sequence
  Synthetic oligonucleotide
atgcggctttatttccggggtgcacgctat

SEQ ID NO: 298247 - DNA, 30 bp, Artificial Sequence
  Synthetic oligonucleotide
gactcgaagtgattaggttatctacgctat

SEQ ID NO: 298248 - DNA, 30 bp, Artificial Sequence
  Synthetic oligonucleotide
ttgtcccccgcaagtaaaagagtacgctat

SEQ ID NO: 298249 - DNA, 30 bp, Artificial Sequence
  Synthetic oligonucleotide
aatgaaccagagttgtcatttcggcgctat

SEQ ID NO: 298250 - DNA, 30 bp, Artificial Sequence
  Synthetic oligonucleotide
ccgctatttgtgaaaccgatttttcgctat

SEQ ID NO: 298251 - DNA, 30 bp, Artificial Sequence
  Synthetic oligonucleotide
aaggatagactgagcagtagcgtcggctat

SEQ ID NO: 298252 - DNA, 30 bp, Artificial Sequence
  Synthetic oligonucleotide
agaagggggacctgcggcggtccgggctat

SEQ ID NO: 298253 - DNA, 30 bp, Artificial Sequence
  Synthetic oligonucleotide
caatatcttacagaaaagttaatgggctat

SEQ ID NO: 298254 - DNA, 30 bp, Artificial Sequence
  Synthetic oligonucleotide
aacgacagataagctgtaccgcctggctat

SEQ ID NO: 298255 - DNA, 31 bp, Artificial Sequence
  Synthetic oligonucleotide
gtgtcttccgcaggttatgatgggtggctat

SEQ ID NO: 298256 - DNA, 30 bp, Artificial Sequence
  Synthetic oligonucleotide
catccacagaagctcacatacgcatgctat

SEQ ID NO: 298257 - DNA, 30 bp, Artificial Sequence
  Synthetic oligonucleotide
agctatagacattgaggcaggtcatgctat

SEQ ID NO: 298258 - DNA, 30 bp, Artificial Sequence
  Synthetic oligonucleotide
gcatcgttaggcatgggagatcactgctat

SEQ ID NO: 298259 - DNA, 30 bp, Artificial Sequence
  Synthetic oligonucleotide
gaaaagcgccgttcatggtttagctgctat

SEQ ID NO: 298260 - DNA, 30 bp, Artificial Sequence
  Synthetic oligonucleotide
tgacagagaattcacatctaatgttgctat

SEQ ID NO: 298261 - DNA, 30 bp, Artificial Sequence
  Synthetic oligonucleotide
ctgcagctcggaggttagccgggaatctat

SEQ ID NO: 298262 - DNA, 30 bp, Artificial Sequence
  Synthetic oligonucleotide
ttgaaaggtgaaccgccagaaggtatctat

SEQ ID NO: 298263 - DNA, 30 bp, Artificial Sequence
  Synthetic oligonucleotide
gcggtctggtccgttcgctaccgactctat

SEQ ID NO: 298264 - DNA, 30 bp, Artificial Sequence
  Synthetic oligonucleotide
ttgaggggcttagcgctatatacgctctat

SEQ ID NO: 298265 - DNA, 30 bp, Artificial Sequence
  Synthetic oligonucleotide
gccgacatgcaacgtgttgggagagtctat

SEQ ID NO: 298266 - DNA, 30 bp, Artificial Sequence
  Synthetic oligonucleotide
tccatttacgaagaccatcgaaaggtctat

SEQ ID NO: 298267 - DNA, 30 bp, Artificial Sequence
  Synthetic oligonucleotide
acgtgactgagactcctattattggtctat

SEQ ID NO: 298268 - DNA, 30 bp, Artificial Sequence
  Synthetic oligonucleotide
aaggagaggaaccgcaggaaagctgtctat

SEQ ID NO: 298269 - DNA, 30 bp, Artificial Sequence
  Synthetic oligonucleotide
ggtggtagactggtactcaccagtgtctat

SEQ ID NO: 298270 - DNA, 30 bp, Artificial Sequence
  Synthetic oligonucleotide
agcactatgcctgaatgctccagtgtctat

SEQ ID NO: 298271 - DNA, 30 bp, Artificial Sequence
  Synthetic oligonucleotide
gaccgtacggcctcctacgatgccttctat

SEQ ID NO: 298272 - DNA, 30 bp, Artificial Sequence
  Synthetic oligonucleotide
gtaccggctgaaagcgacgaggagttctat

SEQ ID NO: 298273 - DNA, 30 bp, Artificial Sequence
  Synthetic oligonucleotide
taatgcagtggacttgcccggagaaagtat

SEQ ID NO: 298274 - DNA, 30 bp, Artificial Sequence
  Synthetic oligonucleotide
tacgaagttgtctagtggtctataaagtat

SEQ ID NO: 298275 - DNA, 30 bp, Artificial Sequence
  Synthetic oligonucleotide
aaatacgcgccggtaacaggcttaaagtat

SEQ ID NO: 298276 - DNA, 30 bp, Artificial Sequence
  Synthetic oligonucleotide
gttgactggtattccgagcgagtgaagtat

SEQ ID NO: 298277 - DNA, 30 bp, Artificial Sequence
  Synthetic oligonucleotide
aggattgaatttcatgaatacatacagtat

SEQ ID NO: 298278 - DNA, 30 bp, Artificial Sequence
  Synthetic oligonucleotide
ggttaaaacagatgggaaaccatacagtat

SEQ ID NO: 298279 - DNA, 30 bp, Artificial Sequence
  Synthetic oligonucleotide
ggacgaatataaaattaggagcggcagtat

SEQ ID NO: 298280 - DNA, 30 bp, Artificial Sequence
  Synthetic oligonucleotide
gaggttattgtcagaaagattgtgcagtat

SEQ ID NO: 298281 - DNA, 30 bp, Artificial Sequence
  Synthetic oligonucleotide
ttagaagtgtgtatttatgcctttcagtat

SEQ ID NO: 298282 - DNA, 30 bp, Artificial Sequence
  Synthetic oligonucleotide
gcgcgccgagccacaagctaagcagagtat

SEQ ID NO: 298283 - DNA, 30 bp, Artificial Sequence
  Synthetic oligonucleotide
gtatcttgttactgtatggcgtaggagtat

SEQ ID NO: 298284 - DNA, 30 bp, Artificial Sequence
  Synthetic oligonucleotide
taaatggtgtgcttgctcctttcggagtat

SEQ ID NO: 298285 - DNA, 30 bp, Artificial Sequence
  Synthetic oligonucleotide
gccaaggagagtttcccctggggatagtat

SEQ ID NO: 298286 - DNA, 30 bp, Artificial Sequence
  Synthetic oligonucleotide
atcatgggaatcccgaatgtgggatagtat

SEQ ID NO: 298287 - DNA, 30 bp, Artificial Sequence
  Synthetic oligonucleotide
actcctgacttctccacagccaactagtat

SEQ ID NO: 298288 - DNA, 30 bp, Artificial Sequence
  Synthetic oligonucleotide
ccctggtggcaaagtcacgtcgggtagtat

SEQ ID NO: 298289 - DNA, 30 bp, Artificial Sequence
  Synthetic oligonucleotide
gtgccaggtcatacctagatatattagtat

SEQ ID NO: 298290 - DNA, 30 bp, Artificial Sequence
  Synthetic oligonucleotide
taggtacaagatataaaactaccttagtat

SEQ ID NO: 298291 - DNA, 30 bp, Artificial Sequence
  Synthetic oligonucleotide
ttgactcccacgttatctggcggttagtat

SEQ ID NO: 298292 - DNA, 30 bp, Artificial Sequence
  Synthetic oligonucleotide
actttatgcgccaatctcaacaccacgtat

SEQ ID NO: 298293 - DNA, 30 bp, Artificial Sequence
  Synthetic oligonucleotide
gatcacgtataagaagatagatagacgtat

SEQ ID NO: 298294 - DNA, 30 bp, Artificial Sequence
  Synthetic oligonucleotide
taatgcttctcagagtttcaggcgacgtat

SEQ ID NO: 298295 - DNA, 30 bp, Artificial Sequence
  Synthetic oligonucleotide
caggtaggcaatagatgactgcctacgtat

SEQ ID NO: 298296 - DNA, 30 bp, Artificial Sequence
  Synthetic oligonucleotide
attcttgcataaaaactcgcctgtacgtat

SEQ ID NO: 298297 - DNA, 30 bp, Artificial Sequence
  Synthetic oligonucleotide
gaggaacttgctgactcaatagaaccgtat

SEQ ID NO: 298298 - DNA, 30 bp, Artificial Sequence
  Synthetic oligonucleotide
tacgcacacaagaaggttgcggagccgtat

SEQ ID NO: 298299 - DNA, 30 bp, Artificial Sequence
  Synthetic oligonucleotide
gctactacaacagtttttgcgttgccgtat

SEQ ID NO: 298300 - DNA, 30 bp, Artificial Sequence
  Synthetic oligonucleotide
atcccacgggttcgtagacagaatccgtat

SEQ ID NO: 298301 - DNA, 30 bp, Artificial Sequence
  Synthetic oligonucleotide
attctgctaaccgggaaaaaaggcgcgtat

SEQ ID NO: 298302 - DNA, 30 bp, Artificial Sequence
  Synthetic oligonucleotide
ggttcgtctgtccctccaatcccggcgtat

SEQ ID NO: 298303 - DNA, 30 bp, Artificial Sequence
  Synthetic oligonucleotide
taaggcaagcatacgaggacgaatgcgtat

SEQ ID NO: 298304 - DNA, 30 bp, Artificial Sequence
  Synthetic oligonucleotide
aacaggattccattaatgcgcaaatcgtat

SEQ ID NO: 298305 - DNA, 30 bp, Artificial Sequence
  Synthetic oligonucleotide
gaaaaaaatccaggttcgaagaaatcgtat

SEQ ID NO: 298306 - DNA, 30 bp, Artificial Sequence
  Synthetic oligonucleotide
catgtcaaatgcttccggcataaatcgtat

SEQ ID NO: 298307 - DNA, 30 bp, Artificial Sequence
  Synthetic oligonucleotide
gcctataacaggctgtgtgttacatcgtat

SEQ ID NO: 298308 - DNA, 30 bp, Artificial Sequence
  Synthetic oligonucleotide
ttccaccgctttaaccgggatatgtcgtat

SEQ ID NO: 298309 - DNA, 30 bp, Artificial Sequence
  Synthetic oligonucleotide
cagaccaggcggttagtcgtcaaaaggtat

SEQ ID NO: 298310 - DNA, 30 bp, Artificial Sequence
  Synthetic oligonucleotide
tctctcgctctgagaacgtctccaaggtat

SEQ ID NO: 298311 - DNA, 30 bp, Artificial Sequence
  Synthetic oligonucleotide
taggtaatgagccccagtaaggcaaggtat

SEQ ID NO: 298312 - DNA, 30 bp, Artificial Sequence
  Synthetic oligonucleotide
gctatccatcttaaacaagctagaaggtat

SEQ ID NO: 298313 - DNA, 30 bp, Artificial Sequence
  Synthetic oligonucleotide
tggaggggaattctctgggacccgaggtat

SEQ ID NO: 298314 - DNA, 30 bp, Artificial Sequence
  Synthetic oligonucleotide
atacttttaacattagccctagcgaggtat

SEQ ID NO: 298315 - DNA, 30 bp, Artificial Sequence
  Synthetic oligonucleotide
tgggtctaggacctaggttgcttgaggtat

SEQ ID NO: 298316 - DNA, 29 bp, Artificial Sequence
  Synthetic oligonucleotide
ggtcctgagatatacaatcggctaggtat

SEQ ID NO: 298317 - DNA, 30 bp, Artificial Sequence
  Synthetic oligonucleotide
cgcatatgatccggcatttatattaggtat

SEQ ID NO: 298318 - DNA, 30 bp, Artificial Sequence
  Synthetic oligonucleotide
agaagccttacgtgaagcttaaaacggtat

SEQ ID NO: 298319 - DNA, 30 bp, Artificial Sequence
  Synthetic oligonucleotide
aagatcctcaatggggtatccggacggtat

SEQ ID NO: 298320 - DNA, 30 bp, Artificial Sequence
  Synthetic oligonucleotide
cctattcaatctgtatccttattacggtat

SEQ ID NO: 298321 - DNA, 30 bp, Artificial Sequence
  Synthetic oligonucleotide
agaagattccaagtcttaaaaaaccggtat

SEQ ID NO: 298322 - DNA, 30 bp, Artificial Sequence
  Synthetic oligonucleotide
gcacgcatagactaatggcgcccccggtat

SEQ ID NO: 298323 - DNA, 30 bp, Artificial Sequence
  Synthetic oligonucleotide
tgcaaatgtacagcggataagttccggtat

SEQ ID NO: 298324 - DNA, 30 bp, Artificial Sequence
  Synthetic oligonucleotide
cataccagggactatgtgtagcagcggtat

SEQ ID NO: 298325 - DNA, 30 bp, Artificial Sequence
  Synthetic oligonucleotide
ccgtggtaagtaaaatctagatagcggtat

SEQ ID NO: 298326 - DNA, 30 bp, Artificial Sequence
  Synthetic oligonucleotide
tcatgtgttaaaggccgcagaaggcggtat

SEQ ID NO: 298327 - DNA, 30 bp, Artificial Sequence
  Synthetic oligonucleotide
tgccgacctctataactgggggatcggtat

SEQ ID NO: 298328 - DNA, 30 bp, Artificial Sequence
  Synthetic oligonucleotide
gtcaagcatggccatataactcaagggtat

SEQ ID NO: 298329 - DNA, 30 bp, Artificial Sequence
  Synthetic oligonucleotide
ctagggccaggatcccggacgtgagggtat

SEQ ID NO: 298330 - DNA, 30 bp, Artificial Sequence
  Synthetic oligonucleotide
cgattattctatcttgccgattccgggtat

SEQ ID NO: 298331 - DNA, 30 bp, Artificial Sequence
  Synthetic oligonucleotide
gacctagttgaacatgtcatttaggggtat

SEQ ID NO: 298332 - DNA, 30 bp, Artificial Sequence
  Synthetic oligonucleotide
cgggtcgtatccgagctgttcttggggtat

SEQ ID NO: 298333 - DNA, 30 bp, Artificial Sequence
  Synthetic oligonucleotide
cagaccagccgatcgcggtatacatggtat

SEQ ID NO: 298334 - DNA, 30 bp, Artificial Sequence
  Synthetic oligonucleotide
ttcgggttgtagcttgtgcattcatggtat

SEQ ID NO: 298335 - DNA, 30 bp, Artificial Sequence
  Synthetic oligonucleotide
tcagagacggggcctaagtgcacctggtat

SEQ ID NO: 298336 - DNA, 30 bp, Artificial Sequence
  Synthetic oligonucleotide
cacggcgtatgcagtactacggcttggtat

SEQ ID NO: 298337 - DNA, 30 bp, Artificial Sequence
  Synthetic oligonucleotide
cgcgcaggatctcacatcgaacgttggtat

SEQ ID NO: 298338 - DNA, 30 bp, Artificial Sequence
  Synthetic oligonucleotide
atgggtaatttaattcatcagcgttggtat

SEQ ID NO: 298339 - DNA, 30 bp, Artificial Sequence
  Synthetic oligonucleotide
tgcgtctgagtctaggaggaaggttggtat

SEQ ID NO: 298340 - DNA, 30 bp, Artificial Sequence
  Synthetic oligonucleotide
ttttctggggtacactggcgtctttggtat

SEQ ID NO: 298341 - DNA, 30 bp, Artificial Sequence
  Synthetic oligonucleotide
acaaacccttctttgtcatcggtttggtat

SEQ ID NO: 298342 - DNA, 30 bp, Artificial Sequence
  Synthetic oligonucleotide
acaacttttgatgatgaaggatgaatgtat

SEQ ID NO: 298343 - DNA, 30 bp, Artificial Sequence
  Synthetic oligonucleotide
cgagtagctatctatgttgagaccatgtat

SEQ ID NO: 298344 - DNA, 30 bp, Artificial Sequence
  Synthetic oligonucleotide
cataaggataacccaggacccaggatgtat

SEQ ID NO: 298345 - DNA, 30 bp, Artificial Sequence
  Synthetic oligonucleotide
gatcggagacataaccgatctgatatgtat

SEQ ID NO: 298346 - DNA, 30 bp, Artificial Sequence
  Synthetic oligonucleotide
tgtgcccgcgcgacacctgctattatgtat

SEQ ID NO: 298347 - DNA, 30 bp, Artificial Sequence
  Synthetic oligonucleotide
ctgagagcgagaaaccgggaaagactgtat

SEQ ID NO: 298348 - DNA, 30 bp, Artificial Sequence
  Synthetic oligonucleotide
tgtatggcctagaccagaccattactgtat

SEQ ID NO: 298349 - DNA, 30 bp, Artificial Sequence
  Synthetic oligonucleotide
caaggaactcttcctgacctggggctgtat

SEQ ID NO: 298350 - DNA, 30 bp, Artificial Sequence
  Synthetic oligonucleotide
tctgtatgagctggctcttaagttctgtat

SEQ ID NO: 298351 - DNA, 30 bp, Artificial Sequence
  Synthetic oligonucleotide
ctggaatacccggaggaccgtacagtgtat

SEQ ID NO: 298352 - DNA, 30 bp, Artificial Sequence
  Synthetic oligonucleotide
tcttatctgttgtgttttcctctagtgtat

SEQ ID NO: 298353 - DNA, 30 bp, Artificial Sequence
  Synthetic oligonucleotide
tcactcatgtcggaggttagtttagtgtat

SEQ ID NO: 298354 - DNA, 30 bp, Artificial Sequence
  Synthetic oligonucleotide
caataataaattagtgtgattcaggtgtat

SEQ ID NO: 298355 - DNA, 30 bp, Artificial Sequence
  Synthetic oligonucleotide
ctacatgtgcgaggttgggaattggtgtat

SEQ ID NO: 298356 - DNA, 30 bp, Artificial Sequence
  Synthetic oligonucleotide
ttcagtgcctaaaaactgctagatgtgtat

SEQ ID NO: 298357 - DNA, 30 bp, Artificial Sequence
  Synthetic oligonucleotide
tcttatctgttgtgttttcatcttgtgtat

SEQ ID NO: 298358 - DNA, 30 bp, Artificial Sequence
  Synthetic oligonucleotide
tcttatatgttgtgttttcctcttgtgtat

SEQ ID NO: 298359 - DNA, 30 bp, Artificial Sequence
  Synthetic oligonucleotide
tttacggagtttggggtagaggtattgtat

SEQ ID NO: 298360 - DNA, 30 bp, Artificial Sequence
  Synthetic oligonucleotide
ttgatttcgttcgcgccggcgtccttgtat

SEQ ID NO: 298361 - DNA, 30 bp, Artificial Sequence
  Synthetic oligonucleotide
cgacctctagatgtaacaccatatttgtat

SEQ ID NO: 298362 - DNA, 30 bp, Artificial Sequence
  Synthetic oligonucleotide
aagccgaacaagttagtgcatcacaattat

SEQ ID NO: 298363 - DNA, 30 bp, Artificial Sequence
  Synthetic oligonucleotide
acccgaggttactcaggaggagacaattat

SEQ ID NO: 298364 - DNA, 30 bp, Artificial Sequence
  Synthetic oligonucleotide
tcaacggaaccgttaactcgcatgaattat

SEQ ID NO: 298365 - DNA, 30 bp, Artificial Sequence
  Synthetic oligonucleotide
gtaatttgactttcaggggacttgaattat

SEQ ID NO: 298366 - DNA, 30 bp, Artificial Sequence
  Synthetic oligonucleotide
ccccgccagtaaaacctgtatttgaattat

SEQ ID NO: 298367 - DNA, 30 bp, Artificial Sequence
  Synthetic oligonucleotide
ctggagacaactagtcggccgttacattat

SEQ ID NO: 298368 - DNA, 30 bp, Artificial Sequence
  Synthetic oligonucleotide
tcaaaagcacgctcagaagcgccgcattat

SEQ ID NO: 298369 - DNA, 30 bp, Artificial Sequence
  Synthetic oligonucleotide
ttacgtgacttggctgggcgaagtcattat

SEQ ID NO: 298370 - DNA, 30 bp, Artificial Sequence
  Synthetic oligonucleotide
cgtcaagtaggtgcttatccttttcattat

SEQ ID NO: 298371 - DNA, 30 bp, Artificial Sequence
  Synthetic oligonucleotide
ccagagaaatagggtaaatacccggattat

SEQ ID NO: 298372 - DNA, 30 bp, Artificial Sequence
  Synthetic oligonucleotide
attggcgagttcaatcaccacacatattat

SEQ ID NO: 298373 - DNA, 30 bp, Artificial Sequence
  Synthetic oligonucleotide
gaggagctccgtggctaaggtttgtattat

SEQ ID NO: 298374 - DNA, 30 bp, Artificial Sequence
  Synthetic oligonucleotide
atagcagagagggtaacggtgcgttattat

SEQ ID NO: 298375 - DNA, 30 bp, Artificial Sequence
  Synthetic oligonucleotide
atataggtccgtagaaaccttcgttattat

SEQ ID NO: 298376 - DNA, 30 bp, Artificial Sequence
  Synthetic oligonucleotide
cctctgtaggtcacgtttcgagtttattat

SEQ ID NO: 298377 - DNA, 30 bp, Artificial Sequence
  Synthetic oligonucleotide
cccgagtgccccaccacatctaaaacttat

SEQ ID NO: 298378 - DNA, 30 bp, Artificial Sequence
  Synthetic oligonucleotide
acgcaatgcctagcaactgcgggaacttat

SEQ ID NO: 298379 - DNA, 30 bp, Artificial Sequence
  Synthetic oligonucleotide
taagcgtagcgggtaatatgaaggacttat

SEQ ID NO: 298380 - DNA, 30 bp, Artificial Sequence
  Synthetic oligonucleotide
aaatgcttaacccacctaaggatgacttat

SEQ ID NO: 298381 - DNA, 30 bp, Artificial Sequence
  Synthetic oligonucleotide
tcggaatttgtactccggcacgatacttat

SEQ ID NO: 298382 - DNA, 30 bp, Artificial Sequence
  Synthetic oligonucleotide
cctaaactataaaccacttgccctacttat

SEQ ID NO: 298383 - DNA, 30 bp, Artificial Sequence
  Synthetic oligonucleotide
atcaggcaggcttcccgcgcaccaccttat

SEQ ID NO: 298384 - DNA, 30 bp, Artificial Sequence
  Synthetic oligonucleotide
tgtgcctagagtcgttcagtgagaccttat

SEQ ID NO: 298385 - DNA, 30 bp, Artificial Sequence
  Synthetic oligonucleotide
agcaggcgatgtcccaatattggcccttat

SEQ ID NO: 298386 - DNA, 30 bp, Artificial Sequence
  Synthetic oligonucleotide
gagcgcacgcgttggaagttaatcccttat

SEQ ID NO: 298387 - DNA, 30 bp, Artificial Sequence
  Synthetic oligonucleotide
actattgaaagcatgctaagtactccttat

SEQ ID NO: 298388 - DNA, 30 bp, Artificial Sequence
  Synthetic oligonucleotide
gagacttaaggcatttcggtttgtccttat

SEQ ID NO: 298389 - DNA, 30 bp, Artificial Sequence
  Synthetic oligonucleotide
agctaaacatatgctactccttgagcttat

SEQ ID NO: 298390 - DNA, 30 bp, Artificial Sequence
  Synthetic oligonucleotide
tacaggatctctcagttccaactagcttat

SEQ ID NO: 298391 - DNA, 30 bp, Artificial Sequence
  Synthetic oligonucleotide
cgcgtccctggagaacgctctgccgcttat

SEQ ID NO: 298392 - DNA, 30 bp, Artificial Sequence
  Synthetic oligonucleotide
caatgttcggctataaatgatggcgcttat

SEQ ID NO: 298393 - DNA, 30 bp, Artificial Sequence
  Synthetic oligonucleotide
acacgcatgtagggaatcgtcagggcttat

SEQ ID NO: 298394 - DNA, 30 bp, Artificial Sequence
  Synthetic oligonucleotide
ggtcgcagttatgcgactactcaatcttat

SEQ ID NO: 298395 - DNA, 30 bp, Artificial Sequence
  Synthetic oligonucleotide
tcagagcctattcctgccaaatactcttat

SEQ ID NO: 298396 - DNA, 30 bp, Artificial Sequence
  Synthetic oligonucleotide
ccagtatatttgcaaatccggaagtcttat

SEQ ID NO: 298397 - DNA, 30 bp, Artificial Sequence
  Synthetic oligonucleotide
acacctggatcgaatacctccctgtcttat

SEQ ID NO: 298398 - DNA, 30 bp, Artificial Sequence
  Synthetic oligonucleotide
tgtgtttgcgttatggctaggccttcttat

SEQ ID NO: 298399 - DNA, 30 bp, Artificial Sequence
  Synthetic oligonucleotide
agcacgatgatttatgtgcatttttcttat

SEQ ID NO: 298400 - DNA, 30 bp, Artificial Sequence
  Synthetic oligonucleotide
taagggcctcgggattacactagaagttat

SEQ ID NO: 298401 - DNA, 30 bp, Artificial Sequence
  Synthetic oligonucleotide
ggtgttctgcaaggcacaatacgaagttat

SEQ ID NO: 298402 - DNA, 30 bp, Artificial Sequence
  Synthetic oligonucleotide
tgtagataaagccggtacaatcgaagttat

SEQ ID NO: 298403 - DNA, 30 bp, Artificial Sequence
  Synthetic oligonucleotide
ctctcgcacagaacgggtattataagttat

SEQ ID NO: 298404 - DNA, 30 bp, Artificial Sequence
  Synthetic oligonucleotide
ttggttttcaggcaacgggaagacagttat

SEQ ID NO: 298405 - DNA, 30 bp, Artificial Sequence
  Synthetic oligonucleotide
agtataatagctcaaggactgagacgttat

SEQ ID NO: 298406 - DNA, 30 bp, Artificial Sequence
  Synthetic oligonucleotide
taacgtgtgtgatttacgctccatcgttat

SEQ ID NO: 298407 - DNA, 30 bp, Artificial Sequence
  Synthetic oligonucleotide
gtggtaatttatactaagattcaaggttat

SEQ ID NO: 298408 - DNA, 30 bp, Artificial Sequence
  Synthetic oligonucleotide
taacaaggagttccctcgcagataggttat

SEQ ID NO: 298409 - DNA, 30 bp, Artificial Sequence
  Synthetic oligonucleotide
cccatgattttcaacgagggtctaggttat

SEQ ID NO: 298410 - DNA, 30 bp, Artificial Sequence
  Synthetic oligonucleotide
ggaagaatagggagcagcatggggggttat

SEQ ID NO: 298411 - DNA, 30 bp, Artificial Sequence
  Synthetic oligonucleotide
atgaaagaagttgggggattggggggttat

SEQ ID NO: 298412 - DNA, 30 bp, Artificial Sequence
  Synthetic oligonucleotide
cccgatcttggttcagctcacgtgggttat

SEQ ID NO: 298413 - DNA, 30 bp, Artificial Sequence
  Synthetic oligonucleotide
gggctcccatcatcgtctcgaaaatgttat

SEQ ID NO: 298414 - DNA, 30 bp, Artificial Sequence
  Synthetic oligonucleotide
tttgcagtgccgagggactttagctgttat

SEQ ID NO: 298415 - DNA, 30 bp, Artificial Sequence
  Synthetic oligonucleotide
ctgtgattgtccaacgagccatagtgttat

SEQ ID NO: 298416 - DNA, 30 bp, Artificial Sequence
  Synthetic oligonucleotide
agtacttcacgacaccgagattcgtgttat

SEQ ID NO: 298417 - DNA, 30 bp, Artificial Sequence
  Synthetic oligonucleotide
actgaaactggttagtgaaatatgtgttat

SEQ ID NO: 298418 - DNA, 30 bp, Artificial Sequence
  Synthetic oligonucleotide
ggctctgtatgttatgtaggactgtgttat

SEQ ID NO: 298419 - DNA, 30 bp, Artificial Sequence
  Synthetic oligonucleotide
gcatccgaaatgataaattttgtttgttat

SEQ ID NO: 298420 - DNA, 30 bp, Artificial Sequence
  Synthetic oligonucleotide
catagggtaatactggcctctccaatttat

SEQ ID NO: 298421 - DNA, 30 bp, Artificial Sequence
  Synthetic oligonucleotide
gatatctaggccaaggtttaacgaatttat

SEQ ID NO: 298422 - DNA, 30 bp, Artificial Sequence
  Synthetic oligonucleotide
taatagtgcacttcactaataggaatttat

SEQ ID NO: 298423 - DNA, 31 bp, Artificial Sequence
  Synthetic oligonucleotide
gcgactgtgagagtactactcttacatttat

SEQ ID NO: 298424 - DNA, 30 bp, Artificial Sequence
  Synthetic oligonucleotide
attgataagaacggggtccagacgatttat

SEQ ID NO: 298425 - DNA, 30 bp, Artificial Sequence
  Synthetic oligonucleotide
atagtggatggcagaagtcaatgtatttat

SEQ ID NO: 298426 - DNA, 30 bp, Artificial Sequence
  Synthetic oligonucleotide
tgacatctgccccctgtggcccagctttat

SEQ ID NO: 298427 - DNA, 30 bp, Artificial Sequence
  Synthetic oligonucleotide
aacacacgaaatggattatattggctttat

SEQ ID NO: 298428 - DNA, 30 bp, Artificial Sequence
  Synthetic oligonucleotide
cgtgttgtaaatatttttgtcatgctttat

SEQ ID NO: 298429 - DNA, 30 bp, Artificial Sequence
  Synthetic oligonucleotide
ctaaatgattcctccgtcattcttctttat

SEQ ID NO: 298430 - DNA, 30 bp, Artificial Sequence
  Synthetic oligonucleotide
acaaagacaaggcaggtaacttttctttat

SEQ ID NO: 298431 - DNA, 30 bp, Artificial Sequence
  Synthetic oligonucleotide
ccattcctaggacccttaagaatcgtttat

SEQ ID NO: 298432 - DNA, 30 bp, Artificial Sequence
  Synthetic oligonucleotide
ttcgcgacgtccagacacaagatcgtttat

SEQ ID NO: 298433 - DNA, 30 bp, Artificial Sequence
  Synthetic oligonucleotide
tgatgtgctttctcctcggtcatggtttat

SEQ ID NO: 298434 - DNA, 30 bp, Artificial Sequence
  Synthetic oligonucleotide
tacagacaaatgtgctttgactttgtttat

SEQ ID NO: 298435 - DNA, 30 bp, Artificial Sequence
  Synthetic oligonucleotide
ccgtattttctaaataaatagctattttat

SEQ ID NO: 298436 - DNA, 29 bp, Artificial Sequence
  Synthetic oligonucleotide
gttgaataagtcaagaacaaaacttttat

SEQ ID NO: 298437 - DNA, 30 bp, Artificial Sequence
  Synthetic oligonucleotide
agtaggatccatagtgaacgagacttttat

SEQ ID NO: 298438 - DNA, 30 bp, Artificial Sequence
  Synthetic oligonucleotide
gagggaatcggcaggaaaaagtacttttat

SEQ ID NO: 298439 - DNA, 30 bp, Artificial Sequence
  Synthetic oligonucleotide
atgattaataatagaaggataagcttttat

SEQ ID NO: 298440 - DNA, 30 bp, Artificial Sequence
  Synthetic oligonucleotide
cataggggtctacaagtattctcgttttat

SEQ ID NO: 298441 - DNA, 30 bp, Artificial Sequence
  Synthetic oligonucleotide
gacaggattgatcgtgctccggatttttat

SEQ ID NO: 298442 - DNA, 30 bp, Artificial Sequence
  Synthetic oligonucleotide
cgttaacgagcgaacgaacgggctttttat

SEQ ID NO: 298443 - DNA, 30 bp, Artificial Sequence
  Synthetic oligonucleotide
ggcacgaaccccctagtcgaaattttttat

SEQ ID NO: 298444 - DNA, 30 bp, Artificial Sequence
  Synthetic oligonucleotide
gatggataaacgcgacaggacagcaaaact

SEQ ID NO: 298445 - DNA, 30 bp, Artificial Sequence
  Synthetic oligonucleotide
gctgaagatattatgacggtacagaaaact

SEQ ID NO: 298446 - DNA, 30 bp, Artificial Sequence
  Synthetic oligonucleotide
tccacactgttgatatctggctagaaaact

SEQ ID NO: 298447 - DNA, 30 bp, Artificial Sequence
  Synthetic oligonucleotide
tctctcgtagaactgcccagtacgaaaact

SEQ ID NO: 298448 - DNA, 30 bp, Artificial Sequence
  Synthetic oligonucleotide
aagaaagtactaattagaatgaggaaaact

SEQ ID NO: 298449 - DNA, 30 bp, Artificial Sequence
  Synthetic oligonucleotide
cctgtcaaagtgtgagcaggtgggaaaact

SEQ ID NO: 298450 - DNA, 30 bp, Artificial Sequence
  Synthetic oligonucleotide
cctttggagaaacgccctggacataaaact

SEQ ID NO: 298451 - DNA, 30 bp, Artificial Sequence
  Synthetic oligonucleotide
taaaggagattcccaagccattataaaact

SEQ ID NO: 298452 - DNA, 30 bp, Artificial Sequence
  Synthetic oligonucleotide
agatgctgcaattcacgatggcctaaaact

SEQ ID NO: 298453 - DNA, 30 bp, Artificial Sequence
  Synthetic oligonucleotide
gtgcgtacacctttggtaatcacacaaact

SEQ ID NO: 298454 - DNA, 30 bp, Artificial Sequence
  Synthetic oligonucleotide
gataatattgtatgatacatcccacaaact

SEQ ID NO: 298455 - DNA, 30 bp, Artificial Sequence
  Synthetic oligonucleotide
tagaagaactcctagggatgaatccaaact

SEQ ID NO: 298456 - DNA, 30 bp, Artificial Sequence
  Synthetic oligonucleotide
cacgttggaaacccgcgcgtgctccaaact

SEQ ID NO: 298457 - DNA, 29 bp, Artificial Sequence
  Synthetic oligonucleotide
gatcggtagctgacgcccccgagcaaact

SEQ ID NO: 298458 - DNA, 30 bp, Artificial Sequence
  Synthetic oligonucleotide
tcattcgtgatatgctggaacccgcaaact

SEQ ID NO: 298459 - DNA, 30 bp, Artificial Sequence
  Synthetic oligonucleotide
gccgcagtttatagcgcaaggtcgcaaact

SEQ ID NO: 298460 - DNA, 30 bp, Artificial Sequence
  Synthetic oligonucleotide
ttgagcatggcaagccgtgtcaggcaaact

SEQ ID NO: 298461 - DNA, 30 bp, Artificial Sequence
  Synthetic oligonucleotide
atcagtggcgactgtagttataggcaaact

SEQ ID NO: 298462 - DNA, 30 bp, Artificial Sequence
  Synthetic oligonucleotide
caagttgcaaaagtgattgaagctcaaact

SEQ ID NO: 298463 - DNA, 30 bp, Artificial Sequence
  Synthetic oligonucleotide
ttgaaataagaggacagatagggtcaaact

SEQ ID NO: 298464 - DNA, 30 bp, Artificial Sequence
  Synthetic oligonucleotide
ggactcgaccttatataagcagaagaaact

SEQ ID NO: 298465 - DNA, 30 bp, Artificial Sequence
  Synthetic oligonucleotide
tgttcaagcttatgagcatgcccagaaact

SEQ ID NO: 298466 - DNA, 30 bp, Artificial Sequence
  Synthetic oligonucleotide
ccgcggtatataacgagtaaagcagaaact

SEQ ID NO: 298467 - DNA, 30 bp, Artificial Sequence
  Synthetic oligonucleotide
agggtattcgttcttggtaggctagaaact

SEQ ID NO: 298468 - DNA, 30 bp, Artificial Sequence
  Synthetic oligonucleotide
tcacggggtctgaattgagttttcgaaact

SEQ ID NO: 298469 - DNA, 30 bp, Artificial Sequence
  Synthetic oligonucleotide
tgcgcaacagtagttccggcagagtaaact

SEQ ID NO: 298470 - DNA, 30 bp, Artificial Sequence
  Synthetic oligonucleotide
gggttattagcgaataattgacattaaact

SEQ ID NO: 298471 - DNA, 30 bp, Artificial Sequence
  Synthetic oligonucleotide
gtcggacttacggcatcggtagtttaaact

SEQ ID NO: 298472 - DNA, 30 bp, Artificial Sequence
  Synthetic oligonucleotide
tctctaagcgggcaggcgttaaagacaact

SEQ ID NO: 298473 - DNA, 30 bp, Artificial Sequence
  Synthetic oligonucleotide
gtcccgaaccgcctacacatagggacaact

SEQ ID NO: 298474 - DNA, 30 bp, Artificial Sequence
  Synthetic oligonucleotide
ggtttctcagctatacgatacccaccaact

SEQ ID NO: 298475 - DNA, 30 bp, Artificial Sequence
  Synthetic oligonucleotide
ccgacgtagagtgcgtgggtctacccaact

SEQ ID NO: 298476 - DNA, 30 bp, Artificial Sequence
  Synthetic oligonucleotide
agacgtggaagaacggtgttccgcccaact

SEQ ID NO: 298477 - DNA, 30 bp, Artificial Sequence
  Synthetic oligonucleotide
agcccaggccgaggcaggtttggtccaact

SEQ ID NO: 298478 - DNA, 30 bp, Artificial Sequence
  Synthetic oligonucleotide
gtgtgtgttatatagctgataccagcaact

SEQ ID NO: 298479 - DNA, 40 bp, Artificial Sequence
  Synthetic oligonucleotide
tgatgctcgggctatctcagcttagggtcacctcgcaact

SEQ ID NO: 298480 - DNA, 30 bp, Artificial Sequence
  Synthetic oligonucleotide
ccaaagagacgtcctcgcccgactgcaact

SEQ ID NO: 298481 - DNA, 30 bp, Artificial Sequence
  Synthetic oligonucleotide
agcccagactaatgaccctgataatcaact

SEQ ID NO: 298482 - DNA, 30 bp, Artificial Sequence
  Synthetic oligonucleotide
ttgactggtggtgggctgggaatatcaact

SEQ ID NO: 298483 - DNA, 30 bp, Artificial Sequence
  Synthetic oligonucleotide
ttaccaggtaaatcgtcgaagccgtcaact

SEQ ID NO: 298484 - DNA, 30 bp, Artificial Sequence
  Synthetic oligonucleotide
cctcgggtgctgtgttttttcttgtcaact

SEQ ID NO: 298485 - DNA, 30 bp, Artificial Sequence
  Synthetic oligonucleotide
gcagtcggaagtgtgatgttcgcaagaact

SEQ ID NO: 298486 - DNA, 30 bp, Artificial Sequence
  Synthetic oligonucleotide
atgacacggcattatacgttgaggagaact

SEQ ID NO: 298487 - DNA, 30 bp, Artificial Sequence
  Synthetic oligonucleotide
tattaacccccatatcgaacacatagaact

SEQ ID NO: 298488 - DNA, 30 bp, Artificial Sequence
  Synthetic oligonucleotide
gtttacaccgtttacgactcttaacgaact

SEQ ID NO: 298489 - DNA, 30 bp, Artificial Sequence
  Synthetic oligonucleotide
agtcgcatcggaagttactactgacgaact

SEQ ID NO: 298490 - DNA, 30 bp, Artificial Sequence
  Synthetic oligonucleotide
tggacgccttaagcgagaaaacaccgaact

SEQ ID NO: 298491 - DNA, 30 bp, Artificial Sequence
  Synthetic oligonucleotide
ggtgatgtaggccctcaataacgccgaact

SEQ ID NO: 298492 - DNA, 30 bp, Artificial Sequence
  Synthetic oligonucleotide
taagcttcatgatatagctgagagcgaact

SEQ ID NO: 298493 - DNA, 30 bp, Artificial Sequence
  Synthetic oligonucleotide
gcaatgagcggtatcaagttaacgcgaact

SEQ ID NO: 298494 - DNA, 30 bp, Artificial Sequence
  Synthetic oligonucleotide
tagcaccatccggcccctcagtcgcgaact

SEQ ID NO: 298495 - DNA, 30 bp, Artificial Sequence
  Synthetic oligonucleotide
ttgtggtggtgcttatttgcagggcgaact

SEQ ID NO: 298496 - DNA, 30 bp, Artificial Sequence
  Synthetic oligonucleotide
cgttttcgacatgggtgaaggtatcgaact

SEQ ID NO: 298497 - DNA, 30 bp, Artificial Sequence
  Synthetic oligonucleotide
ttctaactcgcgttagcccatgcaggaact

SEQ ID NO: 298498 - DNA, 30 bp, Artificial Sequence
  Synthetic oligonucleotide
tgggtaggccccacatcgggttgaggaact

SEQ ID NO: 298499 - DNA, 30 bp, Artificial Sequence
  Synthetic oligonucleotide
acgagtcggagcgtaatagagcacggaact

SEQ ID NO: 298500 - DNA, 30 bp, Artificial Sequence
  Synthetic oligonucleotide
gtatgaggctactgtatatttacgggaact

SEQ ID NO: 298501 - DNA, 30 bp, Artificial Sequence
  Synthetic oligonucleotide
tacagctcactgccacaagcgtggggaact

SEQ ID NO: 298502 - DNA, 30 bp, Artificial Sequence
  Synthetic oligonucleotide
tccaagtgatagcttcgctgcttgggaact

SEQ ID NO: 298503 - DNA, 30 bp, Artificial Sequence
  Synthetic oligonucleotide
cagcgacgccatacgcgataagaatgaact

SEQ ID NO: 298504 - DNA, 30 bp, Artificial Sequence
  Synthetic oligonucleotide
attggcttctgacatgaaggacactgaact

SEQ ID NO: 298505 - DNA, 30 bp, Artificial Sequence
  Synthetic oligonucleotide
tggtctatgtgaacgctaagatggtgaact

SEQ ID NO: 298506 - DNA, 30 bp, Artificial Sequence
  Synthetic oligonucleotide
tgtagcctaactaagatggataattgaact

SEQ ID NO: 298507 - DNA, 30 bp, Artificial Sequence
  Synthetic oligonucleotide
cagtgctggcggagcttagggaaaataact

SEQ ID NO: 298508 - DNA, 30 bp, Artificial Sequence
  Synthetic oligonucleotide
acaacccggttgatcaaactaagaataact

SEQ ID NO: 298509 - DNA, 30 bp, Artificial Sequence
  Synthetic oligonucleotide
catatgagcggtttaggttggctaataact

SEQ ID NO: 298510 - DNA, 30 bp, Artificial Sequence
  Synthetic oligonucleotide
tcacatgggtctttgcagacgtgcataact

SEQ ID NO: 298511 - DNA, 30 bp, Artificial Sequence
  Synthetic oligonucleotide
ataagcgtcataacctaaaggcagataact

SEQ ID NO: 298512 - DNA, 30 bp, Artificial Sequence
  Synthetic oligonucleotide
cctcagtgtctcaataagaagactataact

SEQ ID NO: 298513 - DNA, 31 bp, Artificial Sequence
  Synthetic oligonucleotide
ggtgacacgctctgccttgcgtcgactaact

SEQ ID NO: 298514 - DNA, 30 bp, Artificial Sequence
  Synthetic oligonucleotide
ctcgccactcacgtcaattacatgctaact

SEQ ID NO: 298515 - DNA, 30 bp, Artificial Sequence
  Synthetic oligonucleotide
taaaggacgagcctctctcatagtctaact

SEQ ID NO: 298516 - DNA, 30 bp, Artificial Sequence
  Synthetic oligonucleotide
gaggattacgcctgcttgcgctacgtaact

SEQ ID NO: 298517 - DNA, 30 bp, Artificial Sequence
  Synthetic oligonucleotide
gaatacatagggctatcctggggcgtaact

SEQ ID NO: 298518 - DNA, 30 bp, Artificial Sequence
  Synthetic oligonucleotide
ttttgcgcaatgggaaggctaatcgtaact

SEQ ID NO: 298519 - DNA, 30 bp, Artificial Sequence
  Synthetic oligonucleotide
acgcctaatgttcagccggagttcgtaact

SEQ ID NO: 298520 - DNA, 30 bp, Artificial Sequence
  Synthetic oligonucleotide
ccgctgactcagtggtatcgccaggtaact

SEQ ID NO: 298521 - DNA, 30 bp, Artificial Sequence
  Synthetic oligonucleotide
ctatccgattattcacaacggcaggtaact

SEQ ID NO: 298522 - DNA, 30 bp, Artificial Sequence
  Synthetic oligonucleotide
catgttgtctggcacctggtagaggtaact

SEQ ID NO: 298523 - DNA, 30 bp, Artificial Sequence
  Synthetic oligonucleotide
caatcgactaaagcacccttattggtaact

SEQ ID NO: 298524 - DNA, 30 bp, Artificial Sequence
  Synthetic oligonucleotide
aacagtcgggctcgggaaacggatgtaact

SEQ ID NO: 298525 - DNA, 30 bp, Artificial Sequence
  Synthetic oligonucleotide
catgtctcctgcataaattgaactgtaact

SEQ ID NO: 298526 - DNA, 30 bp, Artificial Sequence
  Synthetic oligonucleotide
gtgccgtggcaaggagtgaagtgtgtaact

SEQ ID NO: 298527 - DNA, 30 bp, Artificial Sequence
  Synthetic oligonucleotide
cagcaggtcgagctaggagtagacttaact

SEQ ID NO: 298528 - DNA, 30 bp, Artificial Sequence
  Synthetic oligonucleotide
atcaaggtcacttgggtcgattagttaact

SEQ ID NO: 298529 - DNA, 30 bp, Artificial Sequence
  Synthetic oligonucleotide
gacaacatgcacaccgctaggcatttaact

SEQ ID NO: 298530 - DNA, 30 bp, Artificial Sequence
  Synthetic oligonucleotide
tgtcatcggttgatgcgaaacgttttaact

SEQ ID NO: 298531 - DNA, 30 bp, Artificial Sequence
  Synthetic oligonucleotide
atttcgggaggggagatatgcgctaacact

SEQ ID NO: 298532 - DNA, 30 bp, Artificial Sequence
  Synthetic oligonucleotide
tgacgcccataacttgggagtacacacact

SEQ ID NO: 298533 - DNA, 30 bp, Artificial Sequence
  Synthetic oligonucleotide
ctccggaatgatacaaccggaagacacact

SEQ ID NO: 298534 - DNA, 30 bp, Artificial Sequence
  Synthetic oligonucleotide
actcgaccctacgaataccgggtacacact

SEQ ID NO: 298535 - DNA, 30 bp, Artificial Sequence
  Synthetic oligonucleotide
tataattaaggccccactcagcagcacact

SEQ ID NO: 298536 - DNA, 30 bp, Artificial Sequence
  Synthetic oligonucleotide
gaacaacgccctggatactcataagacact

SEQ ID NO: 298537 - DNA, 30 bp, Artificial Sequence
  Synthetic oligonucleotide
cagcagtaagggttctcaaggtgagacact

SEQ ID NO: 298538 - DNA, 30 bp, Artificial Sequence
  Synthetic oligonucleotide
tctataaggttagagattccgatagacact

SEQ ID NO: 298539 - DNA, 30 bp, Artificial Sequence
  Synthetic oligonucleotide
tgccacaagtatcatttcaaccacgacact

SEQ ID NO: 298540 - DNA, 30 bp, Artificial Sequence
  Synthetic oligonucleotide
gcctcatggttgatggtggctgtcgacact

SEQ ID NO: 298541 - DNA, 30 bp, Artificial Sequence
  Synthetic oligonucleotide
atccgaaactacggatatccaagggacact

SEQ ID NO: 298542 - DNA, 30 bp, Artificial Sequence
  Synthetic oligonucleotide
agaaacacgcttacgtggatgtatgacact

SEQ ID NO: 298543 - DNA, 30 bp, Artificial Sequence
  Synthetic oligonucleotide
tggacacactcgcgcccctcccctgacact

SEQ ID NO: 298544 - DNA, 30 bp, Artificial Sequence
  Synthetic oligonucleotide
gtggggaggtgtaagacgcttgctgacact

SEQ ID NO: 298545 - DNA, 30 bp, Artificial Sequence
  Synthetic oligonucleotide
gatagactactaaaaggcacgattgacact

SEQ ID NO: 298546 - DNA, 30 bp, Artificial Sequence
  Synthetic oligonucleotide
gtagtcatgcagatggagcggaaatacact

SEQ ID NO: 298547 - DNA, 30 bp, Artificial Sequence
  Synthetic oligonucleotide
acctgcgtaaatagttggggatgatacact

SEQ ID NO: 298548 - DNA, 30 bp, Artificial Sequence
  Synthetic oligonucleotide
cccagtgtaggtgttagagagtggtacact

SEQ ID NO: 298549 - DNA, 30 bp, Artificial Sequence
  Synthetic oligonucleotide
atcagggtaagaagcgattgaaggaccact

SEQ ID NO: 298550 - DNA, 30 bp, Artificial Sequence
  Synthetic oligonucleotide
gtgtgtgtcggagacaagaaaactaccact

SEQ ID NO: 298551 - DNA, 30 bp, Artificial Sequence
  Synthetic oligonucleotide
catgttaaaatgataagttttatccccact

SEQ ID NO: 298552 - DNA, 30 bp, Artificial Sequence
  Synthetic oligonucleotide
cttattagtccgaccgggaatgatcccact

SEQ ID NO: 298553 - DNA, 30 bp, Artificial Sequence
  Synthetic oligonucleotide
gacgttgatcccggctgggcgtaagccact

SEQ ID NO: 298554 - DNA, 30 bp, Artificial Sequence
  Synthetic oligonucleotide
aaaatcagggattcggccatgacagccact

SEQ ID NO: 298555 - DNA, 30 bp, Artificial Sequence
  Synthetic oligonucleotide
ttcatcttacgtagttagagagccgccact

SEQ ID NO: 298556 - DNA, 30 bp, Artificial Sequence
  Synthetic oligonucleotide
gcagaggatgagatataatctagatccact

SEQ ID NO: 298557 - DNA, 30 bp, Artificial Sequence
  Synthetic oligonucleotide
taatggcgtttttgggactaagcctccact

SEQ ID NO: 298558 - DNA, 30 bp, Artificial Sequence
  Synthetic oligonucleotide
gcaatgtacctgtattcatagatctccact

SEQ ID NO: 298559 - DNA, 30 bp, Artificial Sequence
  Synthetic oligonucleotide
ttcgaaaaacatatcaagtgcacttccact

SEQ ID NO: 298560 - DNA, 30 bp, Artificial Sequence
  Synthetic oligonucleotide
cgtcccaattaatggcggctttgttccact

SEQ ID NO: 298561 - DNA, 30 bp, Artificial Sequence
  Synthetic oligonucleotide
tctaatggggaccactatggggtcagcact

SEQ ID NO: 298562 - DNA, 30 bp, Artificial Sequence
  Synthetic oligonucleotide
agcctcttggaacttattgggaatagcact

SEQ ID NO: 298563 - DNA, 30 bp, Artificial Sequence
  Synthetic oligonucleotide
agccaggttgtcctctgcaaccatagcact

SEQ ID NO: 298564 - DNA, 30 bp, Artificial Sequence
  Synthetic oligonucleotide
accagaaatactttcaagtattctagcact

SEQ ID NO: 298565 - DNA, 30 bp, Artificial Sequence
  Synthetic oligonucleotide
acacgccctataaggtttcaactacgcact

SEQ ID NO: 298566 - DNA, 30 bp, Artificial Sequence
  Synthetic oligonucleotide
agagacagaatcccataatgtgaccgcact

SEQ ID NO: 298567 - DNA, 30 bp, Artificial Sequence
  Synthetic oligonucleotide
tagaagattccaacacgaagtggccgcact

SEQ ID NO: 298568 - DNA, 30 bp, Artificial Sequence
  Synthetic oligonucleotide
agcccgagcgtctatggaagtcagcgcact

SEQ ID NO: 298569 - DNA, 30 bp, Artificial Sequence
  Synthetic oligonucleotide
gagcaaaccggtttccaggctgtaggcact

SEQ ID NO: 298570 - DNA, 30 bp, Artificial Sequence
  Synthetic oligonucleotide
ttggcacgatcaacgctgagtgggggcact

SEQ ID NO: 298571 - DNA, 30 bp, Artificial Sequence
  Synthetic oligonucleotide
tggatggatgggaccctactgtggggcact

SEQ ID NO: 298572 - DNA, 30 bp, Artificial Sequence
  Synthetic oligonucleotide
tcccacgtatcgttctcgtaactgggcact

SEQ ID NO: 298573 - DNA, 30 bp, Artificial Sequence
  Synthetic oligonucleotide
ggacttagaaattagtcccttctgggcact

SEQ ID NO: 298574 - DNA, 30 bp, Artificial Sequence
  Synthetic oligonucleotide
tcacaagcattgggcttcagaaatggcact

SEQ ID NO: 298575 - DNA, 29 bp, Artificial Sequence
  Synthetic oligonucleotide
tagcaattatggatgcgccgccatgcact

SEQ ID NO: 298576 - DNA, 30 bp, Artificial Sequence
  Synthetic oligonucleotide
gcaaaatgtacattttagcgattctgcact

SEQ ID NO: 298577 - DNA, 30 bp, Artificial Sequence
  Synthetic oligonucleotide
gcaaaagtgagaagcctcgggcattgcact

SEQ ID NO: 298578 - DNA, 30 bp, Artificial Sequence
  Synthetic oligonucleotide
atctgagtgccgctttatacccccatcact

SEQ ID NO: 298579 - DNA, 30 bp, Artificial Sequence
  Synthetic oligonucleotide
taaaggaaatgttggcaggtgtccatcact

SEQ ID NO: 298580 - DNA, 30 bp, Artificial Sequence
  Synthetic oligonucleotide
cttttagagggacttattggcttcatcact

SEQ ID NO: 298581 - DNA, 30 bp, Artificial Sequence
  Synthetic oligonucleotide
tgcggtacacgggagctactaatgatcact

SEQ ID NO: 298582 - DNA, 30 bp, Artificial Sequence
  Synthetic oligonucleotide
ctggttttgcaaaggtcaccctccctcact

SEQ ID NO: 298583 - DNA, 30 bp, Artificial Sequence
  Synthetic oligonucleotide
atatggcggcccaccaagtggctcctcact

SEQ ID NO: 298584 - DNA, 30 bp, Artificial Sequence
  Synthetic oligonucleotide
cctagcatgtttacataggttttcctcact

SEQ ID NO: 298585 - DNA, 30 bp, Artificial Sequence
  Synthetic oligonucleotide
ccatacccatagtattattcgcagctcact

SEQ ID NO: 298586 - DNA, 30 bp, Artificial Sequence
  Synthetic oligonucleotide
actagcgcatatgtagtatcgtagctcact

SEQ ID NO: 298587 - DNA, 30 bp, Artificial Sequence
  Synthetic oligonucleotide
agaatatacggggtttgcgtgtggctcact

SEQ ID NO: 298588 - DNA, 30 bp, Artificial Sequence
  Synthetic oligonucleotide
aggcgcagaagtctaacttcatccgtcact

SEQ ID NO: 298589 - DNA, 30 bp, Artificial Sequence
  Synthetic oligonucleotide
ttttctcggggttgtcggataccggtcact

SEQ ID NO: 298590 - DNA, 30 bp, Artificial Sequence
  Synthetic oligonucleotide
gtaagacaccagaggtagaaaattgtcact

SEQ ID NO: 298591 - DNA, 30 bp, Artificial Sequence
  Synthetic oligonucleotide
caggaagctttgcccaggccgcaattcact

SEQ ID NO: 298592 - DNA, 30 bp, Artificial Sequence
  Synthetic oligonucleotide
gcccgaggggttcgataggctagtttcact

SEQ ID NO: 298593 - DNA, 30 bp, Artificial Sequence
  Synthetic oligonucleotide
agacagggctgtcaatagacgcaaaagact

SEQ ID NO: 298594 - DNA, 30 bp, Artificial Sequence
  Synthetic oligonucleotide
ggatggtgcagtcgagacaatgtaaagact

SEQ ID NO: 298595 - DNA, 30 bp, Artificial Sequence
  Synthetic oligonucleotide
ggacatcacattaaaggttctattaagact

SEQ ID NO: 298596 - DNA, 30 bp, Artificial Sequence
  Synthetic oligonucleotide
tttattacaggctatgtatataaacagact

SEQ ID NO: 298597 - DNA, 30 bp, Artificial Sequence
  Synthetic oligonucleotide
catgggttccattcactgagttaacagact

SEQ ID NO: 298598 - DNA, 30 bp, Artificial Sequence
  Synthetic oligonucleotide
actagcgttgtggtatggcagtcccagact

SEQ ID NO: 298599 - DNA, 30 bp, Artificial Sequence
  Synthetic oligonucleotide
gcctacgagtgcgttaatgtaggagagact

SEQ ID NO: 298600 - DNA, 30 bp, Artificial Sequence
  Synthetic oligonucleotide
cctctgatgcgaatgtgggaactagagact

SEQ ID NO: 298601 - DNA, 30 bp, Artificial Sequence
  Synthetic oligonucleotide
aggttcggactgactgtacttcccgagact

SEQ ID NO: 298602 - DNA, 30 bp, Artificial Sequence
  Synthetic oligonucleotide
gatcgatattcgtggtttaacacggagact

SEQ ID NO: 298603 - DNA, 30 bp, Artificial Sequence
  Synthetic oligonucleotide
ggagggcttactgtctaggcgccggagact

SEQ ID NO: 298604 - DNA, 30 bp, Artificial Sequence
  Synthetic oligonucleotide
gagtattgtataaatgatatcagggagact

SEQ ID NO: 298605 - DNA, 30 bp, Artificial Sequence
  Synthetic oligonucleotide
gcgagtcgaactttcctagagttggagact

SEQ ID NO: 298606 - DNA, 30 bp, Artificial Sequence
  Synthetic oligonucleotide
actggggttaactcacgcgacagatagact

SEQ ID NO: 298607 - DNA, 30 bp, Artificial Sequence
  Synthetic oligonucleotide
atcgaataccgatcggtaaacggctagact

SEQ ID NO: 298608 - DNA, 30 bp, Artificial Sequence
  Synthetic oligonucleotide
cgtgattgcgtgtgtaacgattcttagact

SEQ ID NO: 298609 - DNA, 30 bp, Artificial Sequence
  Synthetic oligonucleotide
actcagacactgatgttccgcatttagact

SEQ ID NO: 298610 - DNA, 30 bp, Artificial Sequence
  Synthetic oligonucleotide
tcaatgtttgatacacagaggaaaacgact

SEQ ID NO: 298611 - DNA, 30 bp, Artificial Sequence
  Synthetic oligonucleotide
tacattaatcgcacaaatcacgccacgact

SEQ ID NO: 298612 - DNA, 30 bp, Artificial Sequence
  Synthetic oligonucleotide
atacacccatgacgggtccactgcacgact

SEQ ID NO: 298613 - DNA, 30 bp, Artificial Sequence
  Synthetic oligonucleotide
gtagaaagtatactgggtttaaagacgact

SEQ ID NO: 298614 - DNA, 30 bp, Artificial Sequence
  Synthetic oligonucleotide
agccgtgggtcgctgacattcgggacgact

SEQ ID NO: 298615 - DNA, 30 bp, Artificial Sequence
  Synthetic oligonucleotide
agtcttttgttttaacggatcgtaccgact

SEQ ID NO: 298616 - DNA, 30 bp, Artificial Sequence
  Synthetic oligonucleotide
aggctctggtgctgtgctgcggggccgact

SEQ ID NO: 298617 - DNA, 30 bp, Artificial Sequence
  Synthetic oligonucleotide
gctacagcgttgatctccgccagtccgact

SEQ ID NO: 298618 - DNA, 30 bp, Artificial Sequence
  Synthetic oligonucleotide
ggactcttaaccataaaggtcgaagcgact

SEQ ID NO: 298619 - DNA, 30 bp, Artificial Sequence
  Synthetic oligonucleotide
ggacacacgtggtcttaccgtcttgcgact

SEQ ID NO: 298620 - DNA, 30 bp, Artificial Sequence
  Synthetic oligonucleotide
gactaagggtagaggcggacagtatcgact

SEQ ID NO: 298621 - DNA, 30 bp, Artificial Sequence
  Synthetic oligonucleotide
ccacgaaagttacgggacaagacgtcgact

SEQ ID NO: 298622 - DNA, 30 bp, Artificial Sequence
  Synthetic oligonucleotide
gagcaggtatttacgtggttagggtcgact

SEQ ID NO: 298623 - DNA, 30 bp, Artificial Sequence
  Synthetic oligonucleotide
agcggatattataaaatttatggcaggact

SEQ ID NO: 298624 - DNA, 30 bp, Artificial Sequence
  Synthetic oligonucleotide
accattggtatgtcgatacaattcaggact

SEQ ID NO: 298625 - DNA, 30 bp, Artificial Sequence
  Synthetic oligonucleotide
gtggtagccagtcaagcctagatacggact

SEQ ID NO: 298626 - DNA, 30 bp, Artificial Sequence
  Synthetic oligonucleotide
gtctaacgggtgactattatcaagcggact

SEQ ID NO: 298627 - DNA, 26 bp, Artificial Sequence
  Synthetic oligonucleotide
gctcacgcccgggacggaagcggact

SEQ ID NO: 298628 - DNA, 30 bp, Artificial Sequence
  Synthetic oligonucleotide
gcaataatagtgaaatccggcctgcggact

SEQ ID NO: 298629 - DNA, 30 bp, Artificial Sequence
  Synthetic oligonucleotide
tgaaaggcggcacaccagctagctcggact

SEQ ID NO: 298630 - DNA, 30 bp, Artificial Sequence
  Synthetic oligonucleotide
ccacgtgatctcttaacggtgtttcggact

SEQ ID NO: 298631 - DNA, 30 bp, Artificial Sequence
  Synthetic oligonucleotide
ttggtaatagaggatctgtgatcagggact

SEQ ID NO: 298632 - DNA, 30 bp, Artificial Sequence
  Synthetic oligonucleotide
tgcgtacgatagtgaaagctttgagggact

SEQ ID NO: 298633 - DNA, 30 bp, Artificial Sequence
  Synthetic oligonucleotide
agagtacattccactcattgcctagggact

SEQ ID NO: 298634 - DNA, 30 bp, Artificial Sequence
  Synthetic oligonucleotide
gcctagatttgtgagtcaagaaacgggact

SEQ ID NO: 298635 - DNA, 30 bp, Artificial Sequence
  Synthetic oligonucleotide
gttaattcccggaataaaatgggcgggact

SEQ ID NO: 298636 - DNA, 30 bp, Artificial Sequence
  Synthetic oligonucleotide
gacagatttacgcaatgactggtcgggact

SEQ ID NO: 298637 - DNA, 30 bp, Artificial Sequence
  Synthetic oligonucleotide
gggtatatcacctccggagagaaggggact

SEQ ID NO: 298638 - DNA, 30 bp, Artificial Sequence
  Synthetic oligonucleotide
ggtgtactggctatgtatagctgggggact

SEQ ID NO: 298639 - DNA, 30 bp, Artificial Sequence
  Synthetic oligonucleotide
atccctagccgaggcaaagttatggggact

SEQ ID NO: 298640 - DNA, 30 bp, Artificial Sequence
  Synthetic oligonucleotide
gcttggtcaccagaactttaggatgggact

SEQ ID NO: 298641 - DNA, 30 bp, Artificial Sequence
  Synthetic oligonucleotide
gttagatgattgccttgctggcttgggact

SEQ ID NO: 298642 - DNA, 30 bp, Artificial Sequence
  Synthetic oligonucleotide
tatcgagctggactgtccataaaatggact

SEQ ID NO: 298643 - DNA, 30 bp, Artificial Sequence
  Synthetic oligonucleotide
cattgtggttaattcgcataggaatggact

SEQ ID NO: 298644 - DNA, 30 bp, Artificial Sequence
  Synthetic oligonucleotide
tactcggagaaggtacctggcggctggact

SEQ ID NO: 298645 - DNA, 30 bp, Artificial Sequence
  Synthetic oligonucleotide
ggaggacaccgtgaacatgaacggtggact

SEQ ID NO: 298646 - DNA, 30 bp, Artificial Sequence
  Synthetic oligonucleotide
gctctaagccaccaatgcaacatgtggact

SEQ ID NO: 298647 - DNA, 30 bp, Artificial Sequence
  Synthetic oligonucleotide
atcattgccggataagcgcctccaatgact

SEQ ID NO: 298648 - DNA, 30 bp, Artificial Sequence
  Synthetic oligonucleotide
ttggagatgcgaactctcttcaacatgact

SEQ ID NO: 298649 - DNA, 30 bp, Artificial Sequence
  Synthetic oligonucleotide
gttcgttattgagggccgcctgacatgact

SEQ ID NO: 298650 - DNA, 30 bp, Artificial Sequence
  Synthetic oligonucleotide
agcgtttactaaccaagatgcatcatgact

SEQ ID NO: 298651 - DNA, 30 bp, Artificial Sequence
  Synthetic oligonucleotide
ccctgattagccggatccaggcagatgact

SEQ ID NO: 298652 - DNA, 30 bp, Artificial Sequence
  Synthetic oligonucleotide
gtcgttaggggattggtccactatatgact

SEQ ID NO: 298653 - DNA, 30 bp, Artificial Sequence
  Synthetic oligonucleotide
gagtccgttatgagccctgccaagctgact

SEQ ID NO: 298654 - DNA, 30 bp, Artificial Sequence
  Synthetic oligonucleotide
cacactaaggcacaacaggtactggtgact

SEQ ID NO: 298655 - DNA, 30 bp, Artificial Sequence
  Synthetic oligonucleotide
ccgcatcttgacatgttttaccatgtgact

SEQ ID NO: 298656 - DNA, 30 bp, Artificial Sequence
  Synthetic oligonucleotide
acaatagcatcatacaattatcaattgact

SEQ ID NO: 298657 - DNA, 30 bp, Artificial Sequence
  Synthetic oligonucleotide
accgaaataaccatgttgaccacattgact

SEQ ID NO: 298658 - DNA, 30 bp, Artificial Sequence
  Synthetic oligonucleotide
agggtccagtataacaaggctttattgact

SEQ ID NO: 298659 - DNA, 30 bp, Artificial Sequence
  Synthetic oligonucleotide
gttacaaaaactacagtgctgatcttgact

SEQ ID NO: 298660 - DNA, 30 bp, Artificial Sequence
  Synthetic oligonucleotide
ccacatagctctaaaccgaaccggttgact

SEQ ID NO: 298661 - DNA, 30 bp, Artificial Sequence
  Synthetic oligonucleotide
tatagacttcccgagccagcgcaaaatact

SEQ ID NO: 298662 - DNA, 30 bp, Artificial Sequence
  Synthetic oligonucleotide
acattactcccgtttgggacaaccaatact

SEQ ID NO: 298663 - DNA, 30 bp, Artificial Sequence
  Synthetic oligonucleotide
agaggggcgccctctatatggcgcaatact

SEQ ID NO: 298664 - DNA, 30 bp, Artificial Sequence
  Synthetic oligonucleotide
attgtcgtggatagtaagttcatgaatact

SEQ ID NO: 298665 - DNA, 30 bp, Artificial Sequence
  Synthetic oligonucleotide
tgggtcctgatgacggagacactgaatact

SEQ ID NO: 298666 - DNA, 30 bp, Artificial Sequence
  Synthetic oligonucleotide
ttataagcgtagtgatgatgtcataatact

SEQ ID NO: 298667 - DNA, 30 bp, Artificial Sequence
  Synthetic oligonucleotide
tcgagaagcacatcaagcggtgttaatact

SEQ ID NO: 298668 - DNA, 30 bp, Artificial Sequence
  Synthetic oligonucleotide
actattcccagggcggatctgatccatact

SEQ ID NO: 298669 - DNA, 30 bp, Artificial Sequence
  Synthetic oligonucleotide
aatctagtgtacccgtatcgtgtccatact

SEQ ID NO: 298670 - DNA, 30 bp, Artificial Sequence
  Synthetic oligonucleotide
tgttcagtcaatataagcgtagagcatact

SEQ ID NO: 298671 - DNA, 30 bp, Artificial Sequence
  Synthetic oligonucleotide
gccggaaggtgttaacataaacggcatact

SEQ ID NO: 298672 - DNA, 30 bp, Artificial Sequence
  Synthetic oligonucleotide
caagtcttaagtagccatatctttcatact

SEQ ID NO: 298673 - DNA, 29 bp, Artificial Sequence
  Synthetic oligonucleotide
accatgtctgagtagcagtacgggatact

SEQ ID NO: 298674 - DNA, 30 bp, Artificial Sequence
  Synthetic oligonucleotide
atgggcccgagcaaaaatgggatggatact

SEQ ID NO: 298675 - DNA, 30 bp, Artificial Sequence
  Synthetic oligonucleotide
cccacgacttaacgataaaggacctatact

SEQ ID NO: 298676 - DNA, 30 bp, Artificial Sequence
  Synthetic oligonucleotide
ttaatcgtgattgggatcggcgcctatact

SEQ ID NO: 298677 - DNA, 30 bp, Artificial Sequence
  Synthetic oligonucleotide
aaatacccggatcgacactcgatctatact

SEQ ID NO: 298678 - DNA, 30 bp, Artificial Sequence
  Synthetic oligonucleotide
gacgaaatgacaagtaatacggattatact

SEQ ID NO: 298679 - DNA, 30 bp, Artificial Sequence
  Synthetic oligonucleotide
acggaaaccgtagagtgcgtcacttatact

SEQ ID NO: 298680 - DNA, 30 bp, Artificial Sequence
  Synthetic oligonucleotide
aacgacacgctccccgttaatagaactact

SEQ ID NO: 298681 - DNA, 30 bp, Artificial Sequence
  Synthetic oligonucleotide
gcgagtttataatgttcctattgaactact

SEQ ID NO: 298682 - DNA, 31 bp, Artificial Sequence
  Synthetic oligonucleotide
cggatgacgcgataccggagtaggtactact

SEQ ID NO: 298683 - DNA, 30 bp, Artificial Sequence
  Synthetic oligonucleotide
gcaagatattgggctcagccgacacctact

SEQ ID NO: 298684 - DNA, 30 bp, Artificial Sequence
  Synthetic oligonucleotide
tctagcgcgacagtcatcgtaggacctact

SEQ ID NO: 298685 - DNA, 30 bp, Artificial Sequence
  Synthetic oligonucleotide
tcctcgaggcgtataataaacggccctact

SEQ ID NO: 298686 - DNA, 30 bp, Artificial Sequence
  Synthetic oligonucleotide
aggcctcatccggctttataacctcctact

SEQ ID NO: 298687 - DNA, 30 bp, Artificial Sequence
  Synthetic oligonucleotide
ggtagaatgagccaagcaggcagtcctact

SEQ ID NO: 298688 - DNA, 30 bp, Artificial Sequence
  Synthetic oligonucleotide
tagcggggagcaccgcacatatgtcctact

SEQ ID NO: 298689 - DNA, 30 bp, Artificial Sequence
  Synthetic oligonucleotide
gggggctagggagttccaataccagctact

SEQ ID NO: 298690 - DNA, 30 bp, Artificial Sequence
  Synthetic oligonucleotide
ttcattatccggaggatgggggtagctact

SEQ ID NO: 298691 - DNA, 30 bp, Artificial Sequence
  Synthetic oligonucleotide
ggaccggttatagatattacgaaggctact

SEQ ID NO: 298692 - DNA, 30 bp, Artificial Sequence
  Synthetic oligonucleotide
ttgttcctggcggatccgtgcttggctact

SEQ ID NO: 298693 - DNA, 30 bp, Artificial Sequence
  Synthetic oligonucleotide
ctatacattcctggggcttgcaatgctact

SEQ ID NO: 298694 - DNA, 30 bp, Artificial Sequence
  Synthetic oligonucleotide
gaaacagggacatagaataagtatgctact

SEQ ID NO: 298695 - DNA, 30 bp, Artificial Sequence
  Synthetic oligonucleotide
gagggttgcacttccggctcacgtgctact

SEQ ID NO: 298696 - DNA, 30 bp, Artificial Sequence
  Synthetic oligonucleotide
tcgggttggtgtagtagccttgttgctact

SEQ ID NO: 298697 - DNA, 30 bp, Artificial Sequence
  Synthetic oligonucleotide
tttgaactccttctacaacctagatctact

SEQ ID NO: 298698 - DNA, 30 bp, Artificial Sequence
  Synthetic oligonucleotide
tcatggtcggtgcgcaatcgatgatctact

SEQ ID NO: 298699 - DNA, 30 bp, Artificial Sequence
  Synthetic oligonucleotide
tatccgtaagacgtgatcaacttgtctact

SEQ ID NO: 298700 - DNA, 30 bp, Artificial Sequence
  Synthetic oligonucleotide
acatggccgatatccaacaacaaaagtact

SEQ ID NO: 298701 - DNA, 30 bp, Artificial Sequence
  Synthetic oligonucleotide
accagatgaggtaagttgtaaagaagtact

SEQ ID NO: 298702 - DNA, 30 bp, Artificial Sequence
  Synthetic oligonucleotide
cggttctgtgcttcagcactacgaagtact

SEQ ID NO: 298703 - DNA, 30 bp, Artificial Sequence
  Synthetic oligonucleotide
actcgcacgagttcatcttgtggcagtact

SEQ ID NO: 298704 - DNA, 30 bp, Artificial Sequence
  Synthetic oligonucleotide
atcggtgtccagacagctgccgagagtact

SEQ ID NO: 298705 - DNA, 30 bp, Artificial Sequence
  Synthetic oligonucleotide
tagaagatcgatatgatatccccgagtact

SEQ ID NO: 298706 - DNA, 30 bp, Artificial Sequence
  Synthetic oligonucleotide
tctcggaatgattgcattaagtcgagtact

SEQ ID NO: 298707 - DNA, 30 bp, Artificial Sequence
  Synthetic oligonucleotide
atcagtggggggcaattgcaaggtcgtact

SEQ ID NO: 298708 - DNA, 30 bp, Artificial Sequence
  Synthetic oligonucleotide
gagtcgaaggatccaacgaatggtcgtact

SEQ ID NO: 298709 - DNA, 30 bp, Artificial Sequence
  Synthetic oligonucleotide
ctcatgaacacggttttcgtccaaggtact

SEQ ID NO: 298710 - DNA, 30 bp, Artificial Sequence
  Synthetic oligonucleotide
ctggattagttccttttttgaagaggtact

SEQ ID NO: 298711 - DNA, 30 bp, Artificial Sequence
  Synthetic oligonucleotide
accccaatggagagtggataagtaggtact

SEQ ID NO: 298712 - DNA, 30 bp, Artificial Sequence
  Synthetic oligonucleotide
ccgtagtttcttaagatggggaacggtact

SEQ ID NO: 298713 - DNA, 30 bp, Artificial Sequence
  Synthetic oligonucleotide
gcagcgcatccgacacagcggcagggtact

SEQ ID NO: 298714 - DNA, 30 bp, Artificial Sequence
  Synthetic oligonucleotide
ttcaggccataaccgtgtctccggggtact

SEQ ID NO: 298715 - DNA, 30 bp, Artificial Sequence
  Synthetic oligonucleotide
aagaccctacgtcagtagttagtatgtact

SEQ ID NO: 298716 - DNA, 30 bp, Artificial Sequence
  Synthetic oligonucleotide
cgagcaatcgtaccctattagttatgtact

SEQ ID NO: 298717 - DNA, 30 bp, Artificial Sequence
  Synthetic oligonucleotide
ccagcaacaggtctcagcacgaactgtact

SEQ ID NO: 298718 - DNA, 30 bp, Artificial Sequence
  Synthetic oligonucleotide
ctgagacattgaatcactgtgggctgtact

SEQ ID NO: 298719 - DNA, 30 bp, Artificial Sequence
  Synthetic oligonucleotide
gtgccgcggtgcgctgataatttgtgtact

SEQ ID NO: 298720 - DNA, 30 bp, Artificial Sequence
  Synthetic oligonucleotide
atctccgaaatatatgagtgttattgtact

SEQ ID NO: 298721 - DNA, 30 bp, Artificial Sequence
  Synthetic oligonucleotide
cacgactagcagctgaatataataattact

SEQ ID NO: 298722 - DNA, 30 bp, Artificial Sequence
  Synthetic oligonucleotide
gattacgatagcgatagttgccgcattact

SEQ ID NO: 298723 - DNA, 30 bp, Artificial Sequence
  Synthetic oligonucleotide
ccgcgtgtaagagggtaagtgtatattact

SEQ ID NO: 298724 - DNA, 30 bp, Artificial Sequence
  Synthetic oligonucleotide
caagaccaaattcgaaaacaccctattact

SEQ ID NO: 298725 - DNA, 30 bp, Artificial Sequence
  Synthetic oligonucleotide
gtgtcgttagatgaatgagaaggtcttact

SEQ ID NO: 298726 - DNA, 30 bp, Artificial Sequence
  Synthetic oligonucleotide
tgtggtggtccccggctaaccttcgttact

SEQ ID NO: 298727 - DNA, 30 bp, Artificial Sequence
  Synthetic oligonucleotide
ggaagggagtctgcccggggtaaggttact

SEQ ID NO: 298728 - DNA, 30 bp, Artificial Sequence
  Synthetic oligonucleotide
actcaagatccactagcttttaatgttact

SEQ ID NO: 298729 - DNA, 30 bp, Artificial Sequence
  Synthetic oligonucleotide
gcgaggctgtctcatgggaattatgttact

SEQ ID NO: 298730 - DNA, 30 bp, Artificial Sequence
  Synthetic oligonucleotide
cggagttaattaccttgcgacgttgttact

SEQ ID NO: 298731 - DNA, 30 bp, Artificial Sequence
  Synthetic oligonucleotide
gaagcggatcctgcgggtaagcactttact

SEQ ID NO: 298732 - DNA, 30 bp, Artificial Sequence
  Synthetic oligonucleotide
cactcacaattcggttgaggaccgtttact

SEQ ID NO: 298733 - DNA, 30 bp, Artificial Sequence
  Synthetic oligonucleotide
ctggaaaagtcatccgcgacggattttact

SEQ ID NO: 298734 - DNA, 30 bp, Artificial Sequence
  Synthetic oligonucleotide
gggcatgccaatgcggacggtaggaaacct

SEQ ID NO: 298735 - DNA, 30 bp, Artificial Sequence
  Synthetic oligonucleotide
aacggtgaatctcgcaccaatggtaaacct

SEQ ID NO: 298736 - DNA, 30 bp, Artificial Sequence
  Synthetic oligonucleotide
ggtccatcacatatgttccgcggacaacct

SEQ ID NO: 298737 - DNA, 30 bp, Artificial Sequence
  Synthetic oligonucleotide
gatgtatcgacagtttgaaataaccaacct

SEQ ID NO: 298738 - DNA, 30 bp, Artificial Sequence
  Synthetic oligonucleotide
tcccaacacgcgaggcataatgacgaacct

SEQ ID NO: 298739 - DNA, 30 bp, Artificial Sequence
  Synthetic oligonucleotide
aacaagtaacggaagaccattcccgaacct

SEQ ID NO: 298740 - DNA, 30 bp, Artificial Sequence
  Synthetic oligonucleotide
gatgtcaatcggaacatgtcgcaggaacct

SEQ ID NO: 298741 - DNA, 30 bp, Artificial Sequence
  Synthetic oligonucleotide
tacctcgccaaaatgtctgggcaggaacct

SEQ ID NO: 298742 - DNA, 30 bp, Artificial Sequence
  Synthetic oligonucleotide
tgattcggaggctgttaggcggaggaacct

SEQ ID NO: 298743 - DNA, 30 bp, Artificial Sequence
  Synthetic oligonucleotide
tgagggcccctgaaagcagagggggaacct

SEQ ID NO: 298744 - DNA, 30 bp, Artificial Sequence
  Synthetic oligonucleotide
tgctgacaacggcagttaaactgggaacct

SEQ ID NO: 298745 - DNA, 30 bp, Artificial Sequence
  Synthetic oligonucleotide
taggcatttatggacggacgctctgaacct

SEQ ID NO: 298746 - DNA, 30 bp, Artificial Sequence
  Synthetic oligonucleotide
cgtagcccggtagggcacaagaaataacct

SEQ ID NO: 298747 - DNA, 30 bp, Artificial Sequence
  Synthetic oligonucleotide
tggattgcataaatatttaaaacataacct

SEQ ID NO: 298748 - DNA, 30 bp, Artificial Sequence
  Synthetic oligonucleotide
cgtcgatacttgaccacttggtagtaacct

SEQ ID NO: 298749 - DNA, 30 bp, Artificial Sequence
  Synthetic oligonucleotide
gtcaaagacatcaacgactcggtgtaacct

SEQ ID NO: 298750 - DNA, 30 bp, Artificial Sequence
  Synthetic oligonucleotide
gactgcccttcttgggagaaagtttaacct

SEQ ID NO: 298751 - DNA, 30 bp, Artificial Sequence
  Synthetic oligonucleotide
acccctgtgatcatatcaaggaaaacacct

SEQ ID NO: 298752 - DNA, 30 bp, Artificial Sequence
  Synthetic oligonucleotide
gaacgataggctatcctgcgacagacacct

SEQ ID NO: 298753 - DNA, 30 bp, Artificial Sequence
  Synthetic oligonucleotide
tgaatacgggattgacagaacgttacacct

SEQ ID NO: 298754 - DNA, 30 bp, Artificial Sequence
  Synthetic oligonucleotide
ataacttgagccattcatcaacagccacct

SEQ ID NO: 298755 - DNA, 30 bp, Artificial Sequence
  Synthetic oligonucleotide
acgggttgtatccttgtggaccggccacct

SEQ ID NO: 298756 - DNA, 30 bp, Artificial Sequence
  Synthetic oligonucleotide
ctccggactaccaacgtgtagctgccacct

SEQ ID NO: 298757 - DNA, 30 bp, Artificial Sequence
  Synthetic oligonucleotide
tgaattgcgagaccatagacgcgtccacct

SEQ ID NO: 298758 - DNA, 30 bp, Artificial Sequence
  Synthetic oligonucleotide
tctaggactagcgccttatgtggagcacct

SEQ ID NO: 298759 - DNA, 30 bp, Artificial Sequence
  Synthetic oligonucleotide
caccggttgaacagacacggggtggcacct

SEQ ID NO: 298760 - DNA, 30 bp, Artificial Sequence
  Synthetic oligonucleotide
gatagggaaatgccggactacgaatcacct

SEQ ID NO: 298761 - DNA, 30 bp, Artificial Sequence
  Synthetic oligonucleotide
tggatcacattaataacctggccctcacct

SEQ ID NO: 298762 - DNA, 30 bp, Artificial Sequence
  Synthetic oligonucleotide
cacatctcatgcatgtcatgagcctcacct

SEQ ID NO: 298763 - DNA, 30 bp, Artificial Sequence
  Synthetic oligonucleotide
tctgggggacgacccgtttgcagctcacct

SEQ ID NO: 298764 - DNA, 30 bp, Artificial Sequence
  Synthetic oligonucleotide
tctgttttacgttctatgccatcttcacct

SEQ ID NO: 298765 - DNA, 30 bp, Artificial Sequence
  Synthetic oligonucleotide
tgttagcagggcacagtgcctcaaagacct

SEQ ID NO: 298766 - DNA, 30 bp, Artificial Sequence
  Synthetic oligonucleotide
atagcgggaaggtaaaaccatggaagacct

SEQ ID NO: 298767 - DNA, 30 bp, Artificial Sequence
  Synthetic oligonucleotide
acatccgcattggtatggttcaccagacct

SEQ ID NO: 298768 - DNA, 30 bp, Artificial Sequence
  Synthetic oligonucleotide
ttgctcctcgttcagaagggctgcagacct

SEQ ID NO: 298769 - DNA, 30 bp, Artificial Sequence
  Synthetic oligonucleotide
tcctgtgtggcgttacctcatctcagacct

SEQ ID NO: 298770 - DNA, 30 bp, Artificial Sequence
  Synthetic oligonucleotide
ctgggtgagtcgaagatatcggggagacct

SEQ ID NO: 298771 - DNA, 27 bp, Artificial Sequence
  Synthetic oligonucleotide
gtgcgcaatgaacttcaatggagacct

SEQ ID NO: 298772 - DNA, 30 bp, Artificial Sequence
  Synthetic oligonucleotide
cctgtacgttaccataccctgtatagacct

SEQ ID NO: 298773 - DNA, 30 bp, Artificial Sequence
  Synthetic oligonucleotide
gactcggaacatgcactttgtaaacgacct

SEQ ID NO: 298774 - DNA, 30 bp, Artificial Sequence
  Synthetic oligonucleotide
agattctcaaggtttgggtaggaacgacct

SEQ ID NO: 298775 - DNA, 30 bp, Artificial Sequence
  Synthetic oligonucleotide
agcaagtgatttcatcgcccattccgacct

SEQ ID NO: 298776 - DNA, 30 bp, Artificial Sequence
  Synthetic oligonucleotide
gcatatatgggaaatcagtaagcgcgacct

SEQ ID NO: 298777 - DNA, 30 bp, Artificial Sequence
  Synthetic oligonucleotide
ggcctccgtgcggcgcgccatttgcgacct

SEQ ID NO: 298778 - DNA, 30 bp, Artificial Sequence
  Synthetic oligonucleotide
tgttcggcgtacgtatggctctcaggacct

SEQ ID NO: 298779 - DNA, 30 bp, Artificial Sequence
  Synthetic oligonucleotide
ttaagatggaccgtctggaaccgaggacct

SEQ ID NO: 298780 - DNA, 30 bp, Artificial Sequence
  Synthetic oligonucleotide
ccacgaactaaattagaaccggtcggacct

SEQ ID NO: 298781 - DNA, 30 bp, Artificial Sequence
  Synthetic oligonucleotide
gtctcctgacatgtttatgcgtagggacct

SEQ ID NO: 298782 - DNA, 30 bp, Artificial Sequence
  Synthetic oligonucleotide
atttacacattaatcatagctattggacct

SEQ ID NO: 298783 - DNA, 30 bp, Artificial Sequence
  Synthetic oligonucleotide
ctactggccgcaaccgatgttgttggacct

SEQ ID NO: 298784 - DNA, 30 bp, Artificial Sequence
  Synthetic oligonucleotide
ctaatgttcaggaaccaaattaaatgacct

SEQ ID NO: 298785 - DNA, 30 bp, Artificial Sequence
  Synthetic oligonucleotide
agcttatgtgcacgggggtgtaagtgacct

SEQ ID NO: 298786 - DNA, 30 bp, Artificial Sequence
  Synthetic oligonucleotide
gtcagtgtcacttcgtagaaaacgtgacct

SEQ ID NO: 298787 - DNA, 30 bp, Artificial Sequence
  Synthetic oligonucleotide
gcgagcttgactgactttgtcagttgacct

SEQ ID NO: 298788 - DNA, 30 bp, Artificial Sequence
  Synthetic oligonucleotide
gctcatggatgtgaaatagccgctatacct

SEQ ID NO: 298789 - DNA, 30 bp, Artificial Sequence
  Synthetic oligonucleotide
tgagtatgtcgggacgggtactttatacct

SEQ ID NO: 298790 - DNA, 30 bp, Artificial Sequence
  Synthetic oligonucleotide
tcctcacgaaacactgtatacgcactacct

SEQ ID NO: 298791 - DNA, 30 bp, Artificial Sequence
  Synthetic oligonucleotide
cgatatcgtgcggcactttaaagcctacct

SEQ ID NO: 298792 - DNA, 30 bp, Artificial Sequence
  Synthetic oligonucleotide
gacggacggacggagaactattgagtacct

SEQ ID NO: 298793 - DNA, 30 bp, Artificial Sequence
  Synthetic oligonucleotide
attagatgaacctgatccgagttagtacct

SEQ ID NO: 298794 - DNA, 30 bp, Artificial Sequence
  Synthetic oligonucleotide
cagcaatgagagtctcggaagcacgtacct

SEQ ID NO: 298795 - DNA, 30 bp, Artificial Sequence
  Synthetic oligonucleotide
ttggcccagagaatatgtacacaggtacct

SEQ ID NO: 298796 - DNA, 30 bp, Artificial Sequence
  Synthetic oligonucleotide
agatagagtgcggctactttctaggtacct

SEQ ID NO: 298797 - DNA, 30 bp, Artificial Sequence
  Synthetic oligonucleotide
tcagatctagacagaagcgcttaggtacct

SEQ ID NO: 298798 - DNA, 30 bp, Artificial Sequence
  Synthetic oligonucleotide
gagacaatcttcggacatactagggtacct

SEQ ID NO: 298799 - DNA, 30 bp, Artificial Sequence
  Synthetic oligonucleotide
caacgttggttacttttaaagaatgtacct

SEQ ID NO: 298800 - DNA, 30 bp, Artificial Sequence
  Synthetic oligonucleotide
tccatcgccgctttaacgacatctgtacct

SEQ ID NO: 298801 - DNA, 30 bp, Artificial Sequence
  Synthetic oligonucleotide
ctgacgtcctccatacaaatgcagttacct

SEQ ID NO: 298802 - DNA, 30 bp, Artificial Sequence
  Synthetic oligonucleotide
tgtgagtattgcgaggcataccggttacct

SEQ ID NO: 298803 - DNA, 30 bp, Artificial Sequence
  Synthetic oligonucleotide
gttgctcaaaggggaaaaagatggttacct

SEQ ID NO: 298804 - DNA, 30 bp, Artificial Sequence
  Synthetic oligonucleotide
caacagactacacgccgggttgtgaaccct

SEQ ID NO: 298805 - DNA, 30 bp, Artificial Sequence
  Synthetic oligonucleotide
acgatggttctattgaacggaacccaccct

SEQ ID NO: 298806 - DNA, 30 bp, Artificial Sequence
  Synthetic oligonucleotide
caggttcaattttaatctaaaagccaccct

SEQ ID NO: 298807 - DNA, 30 bp, Artificial Sequence
  Synthetic oligonucleotide
atgaagtacctcattaggagacagcaccct

SEQ ID NO: 298808 - DNA, 30 bp, Artificial Sequence
  Synthetic oligonucleotide
gggtaactaaacatcgtaaatgcgcaccct

SEQ ID NO: 298809 - DNA, 30 bp, Artificial Sequence
  Synthetic oligonucleotide
cgtctggagatctatacacgtgttcaccct

SEQ ID NO: 298810 - DNA, 30 bp, Artificial Sequence
  Synthetic oligonucleotide
ggtatacatccccaataagtactggaccct

SEQ ID NO: 298811 - DNA, 30 bp, Artificial Sequence
  Synthetic oligonucleotide
tccgacccaagacctgacctccatgaccct

SEQ ID NO: 298812 - DNA, 30 bp, Artificial Sequence
  Synthetic oligonucleotide
tgttcatatgcagccgaactgagataccct

SEQ ID NO: 298813 - DNA, 30 bp, Artificial Sequence
  Synthetic oligonucleotide
attgagtggatcgcctattggacctaccct

SEQ ID NO: 298814 - DNA, 30 bp, Artificial Sequence
  Synthetic oligonucleotide
agcatgctcgagtcccgggcccacacccct

SEQ ID NO: 298815 - DNA, 30 bp, Artificial Sequence
  Synthetic oligonucleotide
actagacaagtttaatattgttcgccccct

SEQ ID NO: 298816 - DNA, 30 bp, Artificial Sequence
  Synthetic oligonucleotide
ccactcacactatggacacgaaatccccct

SEQ ID NO: 298817 - DNA, 30 bp, Artificial Sequence
  Synthetic oligonucleotide
ggggatggactgtgtgatccgatcgcccct

SEQ ID NO: 298818 - DNA, 30 bp, Artificial Sequence
  Synthetic oligonucleotide
aagtgtcctcggacgatctctaaggcccct

SEQ ID NO: 298819 - DNA, 31 bp, Artificial Sequence
  Synthetic oligonucleotide
acttcgtgtgataacacagggagcggcccct

SEQ ID NO: 298820 - DNA, 30 bp, Artificial Sequence
  Synthetic oligonucleotide
ttatagagatcctgcgctgagcgggcccct

SEQ ID NO: 298821 - DNA, 30 bp, Artificial Sequence
  Synthetic oligonucleotide
caagttagcggtaagtgcggatttgcccct

SEQ ID NO: 298822 - DNA, 30 bp, Artificial Sequence
  Synthetic oligonucleotide
agcgtacaacatccaccactgggctcccct

SEQ ID NO: 298823 - DNA, 30 bp, Artificial Sequence
  Synthetic oligonucleotide
tgcgggaggttactgtagccgtggtcccct

SEQ ID NO: 298824 - DNA, 30 bp, Artificial Sequence
  Synthetic oligonucleotide
ctcgccaactcatccgtgtataccagccct

SEQ ID NO: 298825 - DNA, 30 bp, Artificial Sequence
  Synthetic oligonucleotide
tccgattgcgtatggaggagatagagccct

SEQ ID NO: 298826 - DNA, 30 bp, Artificial Sequence
  Synthetic oligonucleotide
aggtgagttgaacaagggggtacgagccct

SEQ ID NO: 298827 - DNA, 30 bp, Artificial Sequence
  Synthetic oligonucleotide
catcagtttccaatggccaagcggagccct

SEQ ID NO: 298828 - DNA, 30 bp, Artificial Sequence
  Synthetic oligonucleotide
tactcgggtttataaggataagggagccct

SEQ ID NO: 298829 - DNA, 30 bp, Artificial Sequence
  Synthetic oligonucleotide
tgtaaatgcatgtatgtacgcttgagccct

SEQ ID NO: 298830 - DNA, 30 bp, Artificial Sequence
  Synthetic oligonucleotide
ctcaggcatctggcactcgattatagccct

SEQ ID NO: 298831 - DNA, 30 bp, Artificial Sequence
  Synthetic oligonucleotide
ctcattgctatcccgcctggtccccgccct

SEQ ID NO: 298832 - DNA, 30 bp, Artificial Sequence
  Synthetic oligonucleotide
tttcaataccacggcccaagtttgcgccct

SEQ ID NO: 298833 - DNA, 30 bp, Artificial Sequence
  Synthetic oligonucleotide
ccacgtcgactacctataaaggaaggccct

SEQ ID NO: 298834 - DNA, 30 bp, Artificial Sequence
  Synthetic oligonucleotide
ccgcgaagggcaccgctcggataaggccct

SEQ ID NO: 298835 - DNA, 30 bp, Artificial Sequence
  Synthetic oligonucleotide
gtcaggagtcccttggagttagcaggccct

SEQ ID NO: 298836 - DNA, 30 bp, Artificial Sequence
  Synthetic oligonucleotide
ggcaaggcaattggcacaacgtcatgccct

SEQ ID NO: 298837 - DNA, 30 bp, Artificial Sequence
  Synthetic oligonucleotide
ataatcggcaaaaaccgtacactatgccct

SEQ ID NO: 298838 - DNA, 30 bp, Artificial Sequence
  Synthetic oligonucleotide
gtatgcggcggccaagctcacctatgccct

SEQ ID NO: 298839 - DNA, 30 bp, Artificial Sequence
  Synthetic oligonucleotide
aatggcttaagaggcgcttatagctgccct

SEQ ID NO: 298840 - DNA, 30 bp, Artificial Sequence
  Synthetic oligonucleotide
catacgtttgatgtgactaagccgtgccct

SEQ ID NO: 298841 - DNA, 30 bp, Artificial Sequence
  Synthetic oligonucleotide
tagtcagctcaaatctacgggatgtgccct

SEQ ID NO: 298842 - DNA, 27 bp, Artificial Sequence
  Synthetic oligonucleotide
cccctctcgtctattcctttgtgccct

SEQ ID NO: 298843 - DNA, 30 bp, Artificial Sequence
  Synthetic oligonucleotide
gttaattgggaacaatgttaagattgccct

SEQ ID NO: 298844 - DNA, 30 bp, Artificial Sequence
  Synthetic oligonucleotide
ttggagggctctgatgactccacttgccct

SEQ ID NO: 298845 - DNA, 30 bp, Artificial Sequence
  Synthetic oligonucleotide
ctttaagtatactcttggcatatttgccct

SEQ ID NO: 298846 - DNA, 30 bp, Artificial Sequence
  Synthetic oligonucleotide
tcgattattcgtattattggcataatccct

SEQ ID NO: 298847 - DNA, 30 bp, Artificial Sequence
  Synthetic oligonucleotide
catgtgaaccttcggagcctgctcatccct

SEQ ID NO: 298848 - DNA, 30 bp, Artificial Sequence
  Synthetic oligonucleotide
ttaaccctactttatcagggaaggatccct

SEQ ID NO: 298849 - DNA, 30 bp, Artificial Sequence
  Synthetic oligonucleotide
ctagcccaactaccactcgagtggatccct

SEQ ID NO: 298850 - DNA, 30 bp, Artificial Sequence
  Synthetic oligonucleotide
agaagttagaagactgcactgaaactccct

SEQ ID NO: 298851 - DNA, 30 bp, Artificial Sequence
  Synthetic oligonucleotide
ttatagttatccgaggacaataccctccct

SEQ ID NO: 298852 - DNA, 30 bp, Artificial Sequence
  Synthetic oligonucleotide
gttagacagcgaattagcggactgctccct

SEQ ID NO: 298853 - DNA, 30 bp, Artificial Sequence
  Synthetic oligonucleotide
aggacagcggtcaccggtcaccttctccct

SEQ ID NO: 298854 - DNA, 30 bp, Artificial Sequence
  Synthetic oligonucleotide
gctgtttggtgggcacaccgactagtccct

SEQ ID NO: 298855 - DNA, 30 bp, Artificial Sequence
  Synthetic oligonucleotide
gaccatagctgtctttctggcctcgtccct

SEQ ID NO: 298856 - DNA, 30 bp, Artificial Sequence
  Synthetic oligonucleotide
ggaccttccgacggagttccattggtccct

SEQ ID NO: 298857 - DNA, 30 bp, Artificial Sequence
  Synthetic oligonucleotide
taaatctgttaaggtatttgtcatgtccct

SEQ ID NO: 298858 - DNA, 30 bp, Artificial Sequence
  Synthetic oligonucleotide
caagagacatcggagacgttttccttccct

SEQ ID NO: 298859 - DNA, 30 bp, Artificial Sequence
  Synthetic oligonucleotide
agatgagtaaacttcagccttggtttccct

SEQ ID NO: 298860 - DNA, 30 bp, Artificial Sequence
  Synthetic oligonucleotide
aggctgcggaccggagggaaccacaagcct

SEQ ID NO: 298861 - DNA, 30 bp, Artificial Sequence
  Synthetic oligonucleotide
ttagaaatagaatttcagcgaaagaagcct

SEQ ID NO: 298862 - DNA, 26 bp, Artificial Sequence
  Synthetic oligonucleotide
tgtggtgtgtggatgccattaagcct

SEQ ID NO: 298863 - DNA, 30 bp, Artificial Sequence
  Synthetic oligonucleotide
atagtctatgaaaccaacggatagcagcct

SEQ ID NO: 298864 - DNA, 30 bp, Artificial Sequence
  Synthetic oligonucleotide
cagggtgcaatctgtctgcattatcagcct

SEQ ID NO: 298865 - DNA, 30 bp, Artificial Sequence
  Synthetic oligonucleotide
gccgtcactacggaaggctcttaggagcct

SEQ ID NO: 298866 - DNA, 30 bp, Artificial Sequence
  Synthetic oligonucleotide
gctattgatcagcacgtgaggaaatagcct

SEQ ID NO: 298867 - DNA, 30 bp, Artificial Sequence
  Synthetic oligonucleotide
acggcagtatggcgcgttgacgagtagcct

SEQ ID NO: 298868 - DNA, 30 bp, Artificial Sequence
  Synthetic oligonucleotide
ggttccgaaagggttatattacattagcct

SEQ ID NO: 298869 - DNA, 30 bp, Artificial Sequence
  Synthetic oligonucleotide
aaggtaaattcctgcagtacgatttagcct

SEQ ID NO: 298870 - DNA, 30 bp, Artificial Sequence
  Synthetic oligonucleotide
tgacgtgcgttgagaatagtgtcaacgcct

SEQ ID NO: 298871 - DNA, 30 bp, Artificial Sequence
  Synthetic oligonucleotide
ggcgcaatagcctgagtttctgtcacgcct

SEQ ID NO: 298872 - DNA, 30 bp, Artificial Sequence
  Synthetic oligonucleotide
tgcgccaaacagaagtgaatcctgacgcct

SEQ ID NO: 298873 - DNA, 30 bp, Artificial Sequence
  Synthetic oligonucleotide
gtcgacgtgatgtgatactcttaaccgcct

SEQ ID NO: 298874 - DNA, 30 bp, Artificial Sequence
  Synthetic oligonucleotide
cgaggggggaggctgtatttcataccgcct

SEQ ID NO: 298875 - DNA, 30 bp, Artificial Sequence
  Synthetic oligonucleotide
caatgacacttatcggtggggataccgcct

SEQ ID NO: 298876 - DNA, 29 bp, Artificial Sequence
  Synthetic oligonucleotide
cgaacataaccggtgttgttctaccgcct

SEQ ID NO: 298877 - DNA, 30 bp, Artificial Sequence
  Synthetic oligonucleotide
cctttgcacccccgatagagcttaccgcct

SEQ ID NO: 298878 - DNA, 30 bp, Artificial Sequence
  Synthetic oligonucleotide
aggtggtagccggctggatgagacccgcct

SEQ ID NO: 298879 - DNA, 30 bp, Artificial Sequence
  Synthetic oligonucleotide
cagcaaacacagaatgtccagtccccgcct

SEQ ID NO: 298880 - DNA, 30 bp, Artificial Sequence
  Synthetic oligonucleotide
gattcacacagcagggagggacagccgcct

SEQ ID NO: 298881 - DNA, 30 bp, Artificial Sequence
  Synthetic oligonucleotide
gcaacctgtctaacgcggcatcgtccgcct

SEQ ID NO: 298882 - DNA, 30 bp, Artificial Sequence
  Synthetic oligonucleotide
aagctgaacaagaagtggcaggttccgcct

SEQ ID NO: 298883 - DNA, 30 bp, Artificial Sequence
  Synthetic oligonucleotide
ctacaagtgtgttcggtcatatgagcgcct

SEQ ID NO: 298884 - DNA, 30 bp, Artificial Sequence
  Synthetic oligonucleotide
agtccagaaacgaatccctcgaacgcgcct

SEQ ID NO: 298885 - DNA, 30 bp, Artificial Sequence
  Synthetic oligonucleotide
gttcaaccatgtggtttgagtaatgcgcct

SEQ ID NO: 298886 - DNA, 30 bp, Artificial Sequence
  Synthetic oligonucleotide
gggctagcgactgctctacggactgcgcct

SEQ ID NO: 298887 - DNA, 30 bp, Artificial Sequence
  Synthetic oligonucleotide
agtaggccgctcaaaatcgagtgatcgcct

SEQ ID NO: 298888 - DNA, 30 bp, Artificial Sequence
  Synthetic oligonucleotide
ggagactcggtcttacccatgtgctcgcct

SEQ ID NO: 298889 - DNA, 30 bp, Artificial Sequence
  Synthetic oligonucleotide
gcttgacaggcttgccaggtatagtcgcct

SEQ ID NO: 298890 - DNA, 30 bp, Artificial Sequence
  Synthetic oligonucleotide
tgcggacgcaccacattcacaacgtcgcct

SEQ ID NO: 298891 - DNA, 30 bp, Artificial Sequence
  Synthetic oligonucleotide
acggatggctgcgtggctagtacgtcgcct

SEQ ID NO: 298892 - DNA, 30 bp, Artificial Sequence
  Synthetic oligonucleotide
tgtgttctccaagagtagaaattaaggcct

SEQ ID NO: 298893 - DNA, 30 bp, Artificial Sequence
  Synthetic oligonucleotide
gggctcagttccagtctgatccccaggcct

SEQ ID NO: 298894 - DNA, 30 bp, Artificial Sequence
  Synthetic oligonucleotide
aagagtagacttgtagagctcgccaggcct

SEQ ID NO: 298895 - DNA, 30 bp, Artificial Sequence
  Synthetic oligonucleotide
taggaggtaagtgtggaacttgaacggcct

SEQ ID NO: 298896 - DNA, 30 bp, Artificial Sequence
  Synthetic oligonucleotide
gataatgtggtagctattatacgacggcct

SEQ ID NO: 298897 - DNA, 30 bp, Artificial Sequence
  Synthetic oligonucleotide
tcggcgcgatgtgcacttctatcgcggcct

SEQ ID NO: 298898 - DNA, 30 bp, Artificial Sequence
  Synthetic oligonucleotide
gaacaaggcacagactcggcccctcggcct

SEQ ID NO: 298899 - DNA, 30 bp, Artificial Sequence
  Synthetic oligonucleotide
accataggaatagtattcgaatgtcggcct

SEQ ID NO: 298900 - DNA, 30 bp, Artificial Sequence
  Synthetic oligonucleotide
cctacgttagcaggcgtgactctagggcct

SEQ ID NO: 298901 - DNA, 30 bp, Artificial Sequence
  Synthetic oligonucleotide
gtcatataggataccgtccatgatgggcct

SEQ ID NO: 298902 - DNA, 30 bp, Artificial Sequence
  Synthetic oligonucleotide
ataaagcaacggaacaacgtgtttgggcct

SEQ ID NO: 298903 - DNA, 30 bp, Artificial Sequence
  Synthetic oligonucleotide
tgacctaacttatacggccgtaaatggcct

SEQ ID NO: 298904 - DNA, 30 bp, Artificial Sequence
  Synthetic oligonucleotide
acagctttgaaggaatgctgagactggcct

SEQ ID NO: 298905 - DNA, 30 bp, Artificial Sequence
  Synthetic oligonucleotide
agttagcagctccaaagaagtccctggcct

SEQ ID NO: 298906 - DNA, 30 bp, Artificial Sequence
  Synthetic oligonucleotide
ggattaacatccgagttttgaacgtggcct

SEQ ID NO: 298907 - DNA, 30 bp, Artificial Sequence
  Synthetic oligonucleotide
agtattcggtcaaggtttgaactgtggcct

SEQ ID NO: 298908 - DNA, 30 bp, Artificial Sequence
  Synthetic oligonucleotide
ggtccggtaatccacgggtaatgaatgcct

SEQ ID NO: 298909 - DNA, 30 bp, Artificial Sequence
  Synthetic oligonucleotide
ttcagagtggtctttattcaaataatgcct

SEQ ID NO: 298910 - DNA, 30 bp, Artificial Sequence
  Synthetic oligonucleotide
acctggccaccataaggagacgtaatgcct

SEQ ID NO: 298911 - DNA, 30 bp, Artificial Sequence
  Synthetic oligonucleotide
aatgctgtatgcgagcctaccaacatgcct

SEQ ID NO: 298912 - DNA, 30 bp, Artificial Sequence
  Synthetic oligonucleotide
agtaaaatgtctcaggggagcaacatgcct

SEQ ID NO: 298913 - DNA, 30 bp, Artificial Sequence
  Synthetic oligonucleotide
atacagcgttacgggatcttaggcatgcct

SEQ ID NO: 298914 - DNA, 30 bp, Artificial Sequence
  Synthetic oligonucleotide
gttaggcgatctataacctcgcagatgcct

SEQ ID NO: 298915 - DNA, 30 bp, Artificial Sequence
  Synthetic oligonucleotide
gaactactaagtagtcgcggaccgatgcct

SEQ ID NO: 298916 - DNA, 30 bp, Artificial Sequence
  Synthetic oligonucleotide
ggtcacgtgtggcaagggttcaggatgcct

SEQ ID NO: 298917 - DNA, 30 bp, Artificial Sequence
  Synthetic oligonucleotide
ggttcctaaccacgtaccgtcttactgcct

SEQ ID NO: 298918 - DNA, 30 bp, Artificial Sequence
  Synthetic oligonucleotide
agtgaacctcggccttcggggaacctgcct

SEQ ID NO: 298919 - DNA, 30 bp, Artificial Sequence
  Synthetic oligonucleotide
tgcgggggctcggactcgtgcacgctgcct

SEQ ID NO: 298920 - DNA, 30 bp, Artificial Sequence
  Synthetic oligonucleotide
gataggcggtggccacgaaggtcgctgcct

SEQ ID NO: 298921 - DNA, 30 bp, Artificial Sequence
  Synthetic oligonucleotide
tggtctactctgacataaaagctgctgcct

SEQ ID NO: 298922 - DNA, 30 bp, Artificial Sequence
  Synthetic oligonucleotide
catctgaaccaggtaagagccaatctgcct

SEQ ID NO: 298923 - DNA, 30 bp, Artificial Sequence
  Synthetic oligonucleotide
tcggtaacgcccattgtcatcttagtgcct

SEQ ID NO: 298924 - DNA, 30 bp, Artificial Sequence
  Synthetic oligonucleotide
cgataatggtcaggggggcaccacgtgcct

SEQ ID NO: 298925 - DNA, 30 bp, Artificial Sequence
  Synthetic oligonucleotide
actatgagggacttcatatgaccggtgcct

SEQ ID NO: 298926 - DNA, 30 bp, Artificial Sequence
  Synthetic oligonucleotide
aaatgaatgtctctgtaggttgtggtgcct

SEQ ID NO: 298927 - DNA, 30 bp, Artificial Sequence
  Synthetic oligonucleotide
accattagatatacagcctgccgtgtgcct

SEQ ID NO: 298928 - DNA, 30 bp, Artificial Sequence
  Synthetic oligonucleotide
ctgctgatgcacgccatgtcgggattgcct

SEQ ID NO: 298929 - DNA, 30 bp, Artificial Sequence
  Synthetic oligonucleotide
gggagcccctagtgattacacccgttgcct

SEQ ID NO: 298930 - DNA, 30 bp, Artificial Sequence
  Synthetic oligonucleotide
cgtatccacttaacgcgataagggttgcct

SEQ ID NO: 298931 - DNA, 30 bp, Artificial Sequence
  Synthetic oligonucleotide
tgaaccgcaactattacaacccctttgcct

SEQ ID NO: 298932 - DNA, 30 bp, Artificial Sequence
  Synthetic oligonucleotide
tctcgttcgtgaataatcgcccaaaatcct

SEQ ID NO: 298933 - DNA, 30 bp, Artificial Sequence
  Synthetic oligonucleotide
acacgcgatgcaactttgtggcgcaatcct

SEQ ID NO: 298934 - DNA, 30 bp, Artificial Sequence
  Synthetic oligonucleotide
tgaagttgtgggcaacgggcccagaatcct

SEQ ID NO: 298935 - DNA, 30 bp, Artificial Sequence
  Synthetic oligonucleotide
gtcccgcaacgcgtcaaagaagggaatcct

SEQ ID NO: 298936 - DNA, 30 bp, Artificial Sequence
  Synthetic oligonucleotide
tgtttgtggaattcgacgccaatgaatcct

SEQ ID NO: 298937 - DNA, 30 bp, Artificial Sequence
  Synthetic oligonucleotide
tgtcgagcatatacgccacctttgaatcct

SEQ ID NO: 298938 - DNA, 30 bp, Artificial Sequence
  Synthetic oligonucleotide
agcgatgccaagctcatctcttgtaatcct

SEQ ID NO: 298939 - DNA, 30 bp, Artificial Sequence
  Synthetic oligonucleotide
gggatacgaatagtggtggaacttaatcct

SEQ ID NO: 298940 - DNA, 30 bp, Artificial Sequence
  Synthetic oligonucleotide
aatatgtgcacgctcttaaatgaacatcct

SEQ ID NO: 298941 - DNA, 30 bp, Artificial Sequence
  Synthetic oligonucleotide
ttcgatactacaacggcggtctcacatcct

SEQ ID NO: 298942 - DNA, 30 bp, Artificial Sequence
  Synthetic oligonucleotide
gtctttaatgccaaaatcctgttccatcct

SEQ ID NO: 298943 - DNA, 30 bp, Artificial Sequence
  Synthetic oligonucleotide
ggatgggatttaacgatttaatggcatcct

SEQ ID NO: 298944 - DNA, 30 bp, Artificial Sequence
  Synthetic oligonucleotide
gcacgctagtactagtcgataagagatcct

SEQ ID NO: 298945 - DNA, 30 bp, Artificial Sequence
  Synthetic oligonucleotide
gggatgagtcgtccttcatggctcgatcct

SEQ ID NO: 298946 - DNA, 30 bp, Artificial Sequence
  Synthetic oligonucleotide
ggtggcaattgtaagttactattggatcct

SEQ ID NO: 298947 - DNA, 30 bp, Artificial Sequence
  Synthetic oligonucleotide
atgagtttcgttgtttggccggatgatcct

SEQ ID NO: 298948 - DNA, 30 bp, Artificial Sequence
  Synthetic oligonucleotide
aagccataaagtttaggcgaatatgatcct

SEQ ID NO: 298949 - DNA, 31 bp, Artificial Sequence
  Synthetic oligonucleotide
tcgctgccacgtcacaaaacggggtgatcct

SEQ ID NO: 298950 - DNA, 30 bp, Artificial Sequence
  Synthetic oligonucleotide
caggaccgtgaaggaggtaccacatatcct

SEQ ID NO: 298951 - DNA, 30 bp, Artificial Sequence
  Synthetic oligonucleotide
tgctgtctttagcccctcagcctctatcct

SEQ ID NO: 298952 - DNA, 30 bp, Artificial Sequence
  Synthetic oligonucleotide
gaaaaagacgcctgataaacgtagtatcct

SEQ ID NO: 298953 - DNA, 30 bp, Artificial Sequence
  Synthetic oligonucleotide
ctctgatcactcgcgtattcgtcgtatcct

SEQ ID NO: 298954 - DNA, 30 bp, Artificial Sequence
  Synthetic oligonucleotide
ttgtcggcatcacagttggaattgtatcct

SEQ ID NO: 298955 - DNA, 30 bp, Artificial Sequence
  Synthetic oligonucleotide
aggcccacaataacctaactgatttatcct

SEQ ID NO: 298956 - DNA, 30 bp, Artificial Sequence
  Synthetic oligonucleotide
ttatgtggctttctgtgcggctacactcct

SEQ ID NO: 298957 - DNA, 30 bp, Artificial Sequence
  Synthetic oligonucleotide
aaataagatggttaacaccaaagacctcct

SEQ ID NO: 298958 - DNA, 30 bp, Artificial Sequence
  Synthetic oligonucleotide
tggagatgtatagtgaacgcacaccctcct

SEQ ID NO: 298959 - DNA, 30 bp, Artificial Sequence
  Synthetic oligonucleotide
gtccaatgtcaattcagaagtatccctcct

SEQ ID NO: 298960 - DNA, 30 bp, Artificial Sequence
  Synthetic oligonucleotide
tgaggagtcaatttagaccccgcgcctcct

SEQ ID NO: 298961 - DNA, 30 bp, Artificial Sequence
  Synthetic oligonucleotide
tgctcgcggggactaattcaatttcctcct

SEQ ID NO: 298962 - DNA, 30 bp, Artificial Sequence
  Synthetic oligonucleotide
cctaagggtcattagtggcgtgccgctcct

SEQ ID NO: 298963 - DNA, 30 bp, Artificial Sequence
  Synthetic oligonucleotide
ccacagagaattatgacatacgtcgctcct

SEQ ID NO: 298964 - DNA, 30 bp, Artificial Sequence
  Synthetic oligonucleotide
tatgttagtggaggaaaagtgggggctcct

SEQ ID NO: 298965 - DNA, 30 bp, Artificial Sequence
  Synthetic oligonucleotide
ctggttgagtcaaatcatctccgtgctcct

SEQ ID NO: 298966 - DNA, 30 bp, Artificial Sequence
  Synthetic oligonucleotide
gggtctagaacatgtttctggagatctcct

SEQ ID NO: 298967 - DNA, 30 bp, Artificial Sequence
  Synthetic oligonucleotide
aagaacccaccattatagtgaccttctcct

SEQ ID NO: 298968 - DNA, 30 bp, Artificial Sequence
  Synthetic oligonucleotide
gtgaaggtcctagttgttagtggttctcct

SEQ ID NO: 298969 - DNA, 30 bp, Artificial Sequence
  Synthetic oligonucleotide
ccgcgcataatcagttgtctaacaagtcct

SEQ ID NO: 298970 - DNA, 30 bp, Artificial Sequence
  Synthetic oligonucleotide
tatgcgggcatttgggattccttaagtcct

SEQ ID NO: 298971 - DNA, 30 bp, Artificial Sequence
  Synthetic oligonucleotide
cgggttgcttggaaaaggggtatcagtcct

SEQ ID NO: 298972 - DNA, 30 bp, Artificial Sequence
  Synthetic oligonucleotide
aacactatgaatatattttgggagagtcct

SEQ ID NO: 298973 - DNA, 30 bp, Artificial Sequence
  Synthetic oligonucleotide
cctagtatgacctacatagcatggagtcct

SEQ ID NO: 298974 - DNA, 30 bp, Artificial Sequence
  Synthetic oligonucleotide
catcactggcccagcaggtagactagtcct

SEQ ID NO: 298975 - DNA, 30 bp, Artificial Sequence
  Synthetic oligonucleotide
agagacagataccaaacgcagcgtagtcct

SEQ ID NO: 298976 - DNA, 30 bp, Artificial Sequence
  Synthetic oligonucleotide
cagggtaatatcaggctatacttacgtcct

SEQ ID NO: 298977 - DNA, 30 bp, Artificial Sequence
  Synthetic oligonucleotide
tctcaggaagcccgtaacctgtcccgtcct

SEQ ID NO: 298978 - DNA, 30 bp, Artificial Sequence
  Synthetic oligonucleotide
tgattccggtggcgtaatgctgctcgtcct

SEQ ID NO: 298979 - DNA, 30 bp, Artificial Sequence
  Synthetic oligonucleotide
tttatgcgccgttgatgggctcttcgtcct

SEQ ID NO: 298980 - DNA, 30 bp, Artificial Sequence
  Synthetic oligonucleotide
tgcccctagaatgcagaggccaaaggtcct

SEQ ID NO: 298981 - DNA, 30 bp, Artificial Sequence
  Synthetic oligonucleotide
acatcgcgcttggtcccgcgcggaggtcct

SEQ ID NO: 298982 - DNA, 30 bp, Artificial Sequence
  Synthetic oligonucleotide
atctcggccgcacgtggcgaaagtggtcct

SEQ ID NO: 298983 - DNA, 30 bp, Artificial Sequence
  Synthetic oligonucleotide
gtcgggtcagatttgcgcaataagtgtcct

SEQ ID NO: 298984 - DNA, 30 bp, Artificial Sequence
  Synthetic oligonucleotide
gacgagtctgtctcatcggccaattgtcct

SEQ ID NO: 298985 - DNA, 30 bp, Artificial Sequence
  Synthetic oligonucleotide
tgcgggtcacgcacgtcgacacattgtcct

SEQ ID NO: 298986 - DNA, 30 bp, Artificial Sequence
  Synthetic oligonucleotide
aggggccatctctcgtgtattctttgtcct

SEQ ID NO: 298987 - DNA, 30 bp, Artificial Sequence
  Synthetic oligonucleotide
tatgcccggaagggaggcacggtttgtcct

SEQ ID NO: 298988 - DNA, 30 bp, Artificial Sequence
  Synthetic oligonucleotide
catgtcgtgtgctagtcttgggtttgtcct

SEQ ID NO: 298989 - DNA, 30 bp, Artificial Sequence
  Synthetic oligonucleotide
gaatcaccagaatgtattttccgaattcct

SEQ ID NO: 298990 - DNA, 30 bp, Artificial Sequence
  Synthetic oligonucleotide
ctcgccgctcactttggtaatacacttcct

SEQ ID NO: 298991 - DNA, 30 bp, Artificial Sequence
  Synthetic oligonucleotide
ttgctctacacaacaggtatgtcacttcct

SEQ ID NO: 298992 - DNA, 30 bp, Artificial Sequence
  Synthetic oligonucleotide
tggaactgaccgcccacggcaggacttcct

SEQ ID NO: 298993 - DNA, 30 bp, Artificial Sequence
  Synthetic oligonucleotide
gagcgctggttcacggtcagcctccttcct

SEQ ID NO: 298994 - DNA, 30 bp, Artificial Sequence
  Synthetic oligonucleotide
ctcaagactgtaagcgggtcagctcttcct

SEQ ID NO: 298995 - DNA, 30 bp, Artificial Sequence
  Synthetic oligonucleotide
tctcgcttcaatgtcaagttcgtggttcct

SEQ ID NO: 298996 - DNA, 30 bp, Artificial Sequence
  Synthetic oligonucleotide
ccctaaggggtcgtagataagggtgttcct

SEQ ID NO: 298997 - DNA, 30 bp, Artificial Sequence
  Synthetic oligonucleotide
cacgcgggaggaagagtacgtgaatttcct

SEQ ID NO: 298998 - DNA, 30 bp, Artificial Sequence
  Synthetic oligonucleotide
tcagtgatgccaaaagggacaagctttcct

SEQ ID NO: 298999 - DNA, 30 bp, Artificial Sequence
  Synthetic oligonucleotide
acggatcacggatggactgttcgttttcct

SEQ ID NO: 299000 - DNA, 30 bp, Artificial Sequence
  Synthetic oligonucleotide
tacctcatgtctgcacgacgaatttttcct

SEQ ID NO: 299001 - DNA, 30 bp, Artificial Sequence
  Synthetic oligonucleotide
ggaggtacagcccttaccatggacaaagct

SEQ ID NO: 299002 - DNA, 30 bp, Artificial Sequence
  Synthetic oligonucleotide
tatcatggtatagtagcctcgtccaaagct

SEQ ID NO: 299003 - DNA, 31 bp, Artificial Sequence
  Synthetic oligonucleotide
ttcaacaagacaggcccagcgcgcgaaagct

SEQ ID NO: 299004 - DNA, 30 bp, Artificial Sequence
  Synthetic oligonucleotide
tcctatcgctctgtatgcccatggaaagct

SEQ ID NO: 299005 - DNA, 30 bp, Artificial Sequence
  Synthetic oligonucleotide
caccgaatgtaggatgttacgcataaagct

SEQ ID NO: 299006 - DNA, 30 bp, Artificial Sequence
  Synthetic oligonucleotide
ttccccttgccatagggcggtgataaagct

SEQ ID NO: 299007 - DNA, 30 bp, Artificial Sequence
  Synthetic oligonucleotide
acgtacatgaataaagacgccgcccaagct

SEQ ID NO: 299008 - DNA, 30 bp, Artificial Sequence
  Synthetic oligonucleotide
tttcgggtggggatagatctatcccaagct

SEQ ID NO: 299009 - DNA, 30 bp, Artificial Sequence
  Synthetic oligonucleotide
cggaccggacaacggtttacgaagcaagct

SEQ ID NO: 299010 - DNA, 30 bp, Artificial Sequence
  Synthetic oligonucleotide
aatctggctctaaaacgagaagggcaagct

SEQ ID NO: 299011 - DNA, 30 bp, Artificial Sequence
  Synthetic oligonucleotide
ggagctgacgagctaggatatatgcaagct

SEQ ID NO: 299012 - DNA, 30 bp, Artificial Sequence
  Synthetic oligonucleotide
acatacagactgttaagtaggcgtcaagct

SEQ ID NO: 299013 - DNA, 30 bp, Artificial Sequence
  Synthetic oligonucleotide
ggtctaagagtaatcatgaaagcagaagct

SEQ ID NO: 299014 - DNA, 30 bp, Artificial Sequence
  Synthetic oligonucleotide
agaaaatgtctgaaaaggagcttcgaagct

SEQ ID NO: 299015 - DNA, 30 bp, Artificial Sequence
  Synthetic oligonucleotide
aaccttagcggggttaataagtcggaagct

SEQ ID NO: 299016 - DNA, 30 bp, Artificial Sequence
  Synthetic oligonucleotide
gggagtttcaccaaagctaatcatgaagct

SEQ ID NO: 299017 - DNA, 30 bp, Artificial Sequence
  Synthetic oligonucleotide
tatgaaccttcggtgaaccatgatgaagct

SEQ ID NO: 299018 - DNA, 30 bp, Artificial Sequence
  Synthetic oligonucleotide
aaggcaggaagggattctccgggtgaagct

SEQ ID NO: 299019 - DNA, 30 bp, Artificial Sequence
  Synthetic oligonucleotide
gcttcaagtataataccgacttcataagct

SEQ ID NO: 299020 - DNA, 30 bp, Artificial Sequence
  Synthetic oligonucleotide
ccattggtggtcgtggtacccagataagct

SEQ ID NO: 299021 - DNA, 30 bp, Artificial Sequence
  Synthetic oligonucleotide
ttcgccattcgactaatgccatactaagct

SEQ ID NO: 299022 - DNA, 30 bp, Artificial Sequence
  Synthetic oligonucleotide
actcactttataacccacttttcctaagct

SEQ ID NO: 299023 - DNA, 30 bp, Artificial Sequence
  Synthetic oligonucleotide
gggggtcacagacaccgcacggagtaagct

SEQ ID NO: 299024 - DNA, 30 bp, Artificial Sequence
  Synthetic oligonucleotide
cgttggtaagtttcgagacggtagtaagct

SEQ ID NO: 299025 - DNA, 30 bp, Artificial Sequence
  Synthetic oligonucleotide
gcttcgggtgaggaaagcgacacgtaagct

SEQ ID NO: 299026 - DNA, 30 bp, Artificial Sequence
  Synthetic oligonucleotide
ggcaaggtaaggtttcgatacacgtaagct

SEQ ID NO: 299027 - DNA, 30 bp, Artificial Sequence
  Synthetic oligonucleotide
gtccgactgccctcgtcccaagcgtaagct

SEQ ID NO: 299028 - DNA, 30 bp, Artificial Sequence
  Synthetic oligonucleotide
gcggtacattgcactgacggcgtttaagct

SEQ ID NO: 299029 - DNA, 30 bp, Artificial Sequence
  Synthetic oligonucleotide
tactggagttgtagaagcacacccacagct

SEQ ID NO: 299030 - DNA, 30 bp, Artificial Sequence
  Synthetic oligonucleotide
tctatgctcggctgacctcaaagcccagct

SEQ ID NO: 299031 - DNA, 30 bp, Artificial Sequence
  Synthetic oligonucleotide
gttcgaacggcgctcaggtattgcccagct

SEQ ID NO: 299032 - DNA, 30 bp, Artificial Sequence
  Synthetic oligonucleotide
cacacctgccagtcggctaggatagcagct

SEQ ID NO: 299033 - DNA, 30 bp, Artificial Sequence
  Synthetic oligonucleotide
gaataaggcggccgtagccttatagcagct

SEQ ID NO: 299034 - DNA, 30 bp, Artificial Sequence
  Synthetic oligonucleotide
ggccgagccaaaaaaccggtccccgcagct

SEQ ID NO: 299035 - DNA, 30 bp, Artificial Sequence
  Synthetic oligonucleotide
aaggtgagatgaaaaggaggcgccgcagct

SEQ ID NO: 299036 - DNA, 31 bp, Artificial Sequence
  Synthetic oligonucleotide
ttccactgcgtaatccaaagtaagggcagct

SEQ ID NO: 299037 - DNA, 30 bp, Artificial Sequence
  Synthetic oligonucleotide
acatactcttttcacttgggcagggcagct

SEQ ID NO: 299038 - DNA, 30 bp, Artificial Sequence
  Synthetic oligonucleotide
tactcatctccaggacaccgtatggcagct

SEQ ID NO: 299039 - DNA, 30 bp, Artificial Sequence
  Synthetic oligonucleotide
acagaggtatcatccaaatgtaactcagct

SEQ ID NO: 299040 - DNA, 30 bp, Artificial Sequence
  Synthetic oligonucleotide
tttgcccaagagtcattaacggcctcagct

SEQ ID NO: 299041 - DNA, 30 bp, Artificial Sequence
  Synthetic oligonucleotide
gtctggttaggacgtccgcgaagttcagct

SEQ ID NO: 299042 - DNA, 30 bp, Artificial Sequence
  Synthetic oligonucleotide
gtgacctagcgcgggtcttgaatttcagct

SEQ ID NO: 299043 - DNA, 30 bp, Artificial Sequence
  Synthetic oligonucleotide
ctctaccctataagattccccctttcagct

SEQ ID NO: 299044 - DNA, 30 bp, Artificial Sequence
  Synthetic oligonucleotide
aaggagggtttggcgttgaaggacagagct

SEQ ID NO: 299045 - DNA, 30 bp, Artificial Sequence
  Synthetic oligonucleotide
gaaagtgggccttctacagttacgagagct

SEQ ID NO: 299046 - DNA, 30 bp, Artificial Sequence
  Synthetic oligonucleotide
gccagaccatgagcggtattttggagagct

SEQ ID NO: 299047 - DNA, 30 bp, Artificial Sequence
  Synthetic oligonucleotide
gggctttgatggagggatcccatacgagct

SEQ ID NO: 299048 - DNA, 30 bp, Artificial Sequence
  Synthetic oligonucleotide
tagtgttcaggttgctctggtaaccgagct

SEQ ID NO: 299049 - DNA, 30 bp, Artificial Sequence
  Synthetic oligonucleotide
ccggggaagtaagagcgaaccgggcgagct

SEQ ID NO: 299050 - DNA, 30 bp, Artificial Sequence
  Synthetic oligonucleotide
taggaactgacggggaaacctcatcgagct

SEQ ID NO: 299051 - DNA, 30 bp, Artificial Sequence
  Synthetic oligonucleotide
cacaccacctgtcagatggagtttcgagct

SEQ ID NO: 299052 - DNA, 30 bp, Artificial Sequence
  Synthetic oligonucleotide
ccgaacgtaaagggagcctggacaggagct

SEQ ID NO: 299053 - DNA, 30 bp, Artificial Sequence
  Synthetic oligonucleotide
tcgggtacgttaagctaatagacgggagct

SEQ ID NO: 299054 - DNA, 30 bp, Artificial Sequence
  Synthetic oligonucleotide
caagttcgcctggtacggagtcggggagct

SEQ ID NO: 299055 - DNA, 30 bp, Artificial Sequence
  Synthetic oligonucleotide
tgaaaagtatcaaggacaggatatggagct

SEQ ID NO: 299056 - DNA, 30 bp, Artificial Sequence
  Synthetic oligonucleotide
gccaatattttgcggaaattaagtggagct

SEQ ID NO: 299057 - DNA, 30 bp, Artificial Sequence
  Synthetic oligonucleotide
tgttcataacccaagttgcctagtggagct

SEQ ID NO: 299058 - DNA, 30 bp, Artificial Sequence
  Synthetic oligonucleotide
gagaaaagattcaaaagggcgattggagct

SEQ ID NO: 299059 - DNA, 30 bp, Artificial Sequence
  Synthetic oligonucleotide
gcaatttgcctcgtgaccgattgatgagct

SEQ ID NO: 299060 - DNA, 30 bp, Artificial Sequence
  Synthetic oligonucleotide
gtgcattaagtgtagattgggtcttgagct

SEQ ID NO: 299061 - DNA, 30 bp, Artificial Sequence
  Synthetic oligonucleotide
agggttttaggtcctccaaaaacgatagct

SEQ ID NO: 299062 - DNA, 30 bp, Artificial Sequence
  Synthetic oligonucleotide
aacggacatataattgttttcgctatagct

SEQ ID NO: 299063 - DNA, 30 bp, Artificial Sequence
  Synthetic oligonucleotide
tcagactcgagttgtgtgggggctatagct

SEQ ID NO: 299064 - DNA, 30 bp, Artificial Sequence
  Synthetic oligonucleotide
ttgtgttcgagagagttaagtacactagct

SEQ ID NO: 299065 - DNA, 30 bp, Artificial Sequence
  Synthetic oligonucleotide
ttcggaaccgtggctgactcagtactagct

SEQ ID NO: 299066 - DNA, 30 bp, Artificial Sequence
  Synthetic oligonucleotide
agattaggtgaatgactgagatacctagct

SEQ ID NO: 299067 - DNA, 30 bp, Artificial Sequence
  Synthetic oligonucleotide
cggtgtgatcaggttgtaacctccctagct

SEQ ID NO: 299068 - DNA, 30 bp, Artificial Sequence
  Synthetic oligonucleotide
ctcgcgttaatgcgggaatagtagctagct

SEQ ID NO: 299069 - DNA, 30 bp, Artificial Sequence
  Synthetic oligonucleotide
agtctagcgagaccgttaatcaggctagct

SEQ ID NO: 299070 - DNA, 30 bp, Artificial Sequence
  Synthetic oligonucleotide
tagactgtacgcgggaaaagtgatctagct

SEQ ID NO: 299071 - DNA, 30 bp, Artificial Sequence
  Synthetic oligonucleotide
gcgcgacgtgcgtgtttagaaattctagct

SEQ ID NO: 299072 - DNA, 30 bp, Artificial Sequence
  Synthetic oligonucleotide
cgaccagcacttgagtttagtcttctagct

SEQ ID NO: 299073 - DNA, 30 bp, Artificial Sequence
  Synthetic oligonucleotide
ataggccatccgttggagtgggaagtagct

SEQ ID NO: 299074 - DNA, 30 bp, Artificial Sequence
  Synthetic oligonucleotide
gaaaagccatagatgtggggattagtagct

SEQ ID NO: 299075 - DNA, 30 bp, Artificial Sequence
  Synthetic oligonucleotide
gcagcactggaggcacgagtggagttagct

SEQ ID NO: 299076 - DNA, 30 bp, Artificial Sequence
  Synthetic oligonucleotide
gacgtcgttgcatcaatgaagaaaaacgct

SEQ ID NO: 299077 - DNA, 30 bp, Artificial Sequence
  Synthetic oligonucleotide
caaaaatacttgggagaaatctagaacgct

SEQ ID NO: 299078 - DNA, 30 bp, Artificial Sequence
  Synthetic oligonucleotide
caggaaagatgctaagtccgtgggaacgct

SEQ ID NO: 299079 - DNA, 30 bp, Artificial Sequence
  Synthetic oligonucleotide
gtacaggcctggtgcgcattggctaacgct

SEQ ID NO: 299080 - DNA, 30 bp, Artificial Sequence
  Synthetic oligonucleotide
gctaaacaaggatcacggtactgacacgct

SEQ ID NO: 299081 - DNA, 30 bp, Artificial Sequence
  Synthetic oligonucleotide
ctctcgttgtttacaacgttacaccacgct

SEQ ID NO: 299082 - DNA, 30 bp, Artificial Sequence
  Synthetic oligonucleotide
ccaggcgaaggcaataacatgacccacgct

SEQ ID NO: 299083 - DNA, 30 bp, Artificial Sequence
  Synthetic oligonucleotide
ctgggatcgggtggatttgtggcccacgct

SEQ ID NO: 299084 - DNA, 30 bp, Artificial Sequence
  Synthetic oligonucleotide
tgattgttaggtcgtatcctcaggcacgct

SEQ ID NO: 299085 - DNA, 30 bp, Artificial Sequence
  Synthetic oligonucleotide
agggaaacttgcaaggtggaggggcacgct

SEQ ID NO: 299086 - DNA, 30 bp, Artificial Sequence
  Synthetic oligonucleotide
agaatgacaggaaaattcctggaagacgct

SEQ ID NO: 299087 - DNA, 30 bp, Artificial Sequence
  Synthetic oligonucleotide
tcgtctggccaatgtaacggcaccgacgct

SEQ ID NO: 299088 - DNA, 30 bp, Artificial Sequence
  Synthetic oligonucleotide
cgtcccacctaggccggttaacgggacgct

SEQ ID NO: 299089 - DNA, 30 bp, Artificial Sequence
  Synthetic oligonucleotide
gtgttaagatccaaacagctataatacgct

SEQ ID NO: 299090 - DNA, 30 bp, Artificial Sequence
  Synthetic oligonucleotide
tgcagctacaaatccttcttctactacgct

SEQ ID NO: 299091 - DNA, 30 bp, Artificial Sequence
  Synthetic oligonucleotide
accaagagggttgaagtgagtccctacgct

SEQ ID NO: 299092 - DNA, 30 bp, Artificial Sequence
  Synthetic oligonucleotide
caacggtatctgtgacccgcgacaaccgct

SEQ ID NO: 299093 - DNA, 30 bp, Artificial Sequence
  Synthetic oligonucleotide
atcttcggtttttctttaattacccccgct

SEQ ID NO: 299094 - DNA, 30 bp, Artificial Sequence
  Synthetic oligonucleotide
aggtccaacttgacattattctgccccgct

SEQ ID NO: 299095 - DNA, 30 bp, Artificial Sequence
  Synthetic oligonucleotide
tggacctaggttaattgagcggttcccgct

SEQ ID NO: 299096 - DNA, 30 bp, Artificial Sequence
  Synthetic oligonucleotide
atgcaattattatctatgcgcacagccgct

SEQ ID NO: 299097 - DNA, 30 bp, Artificial Sequence
  Synthetic oligonucleotide
gttggcccaaggcacttgagcccagccgct

SEQ ID NO: 299098 - DNA, 30 bp, Artificial Sequence
  Synthetic oligonucleotide
ttaaactcccaacggggtaggttagccgct

SEQ ID NO: 299099 - DNA, 30 bp, Artificial Sequence
  Synthetic oligonucleotide
attcccttgccaacttgaataaacgccgct

SEQ ID NO: 299100 - DNA, 30 bp, Artificial Sequence
  Synthetic oligonucleotide
attatggagtgatttagccgccacgccgct

SEQ ID NO: 299101 - DNA, 30 bp, Artificial Sequence
  Synthetic oligonucleotide
agttaacgccatagtcgaacttgggccgct

SEQ ID NO: 299102 - DNA, 29 bp, Artificial Sequence
  Synthetic oligonucleotide
caaactgctttcaccatccctgtgccgct

SEQ ID NO: 299103 - DNA, 30 bp, Artificial Sequence
  Synthetic oligonucleotide
tagtgatttgagcaacgcctgaagtccgct

SEQ ID NO: 299104 - DNA, 30 bp, Artificial Sequence
  Synthetic oligonucleotide
tagcagttcggggtagcgatgacaagcgct

SEQ ID NO: 299105 - DNA, 30 bp, Artificial Sequence
  Synthetic oligonucleotide
gcgttaacttctcactcagactacagcgct

SEQ ID NO: 299106 - DNA, 30 bp, Artificial Sequence
  Synthetic oligonucleotide
tgaggactcggaacagacgtaggcagcgct

SEQ ID NO: 299107 - DNA, 30 bp, Artificial Sequence
  Synthetic oligonucleotide
tagtcggttcgcgggacccagaagagcgct

SEQ ID NO: 299108 - DNA, 30 bp, Artificial Sequence
  Synthetic oligonucleotide
tgtaacattggactccacggactgagcgct

SEQ ID NO: 299109 - DNA, 30 bp, Artificial Sequence
  Synthetic oligonucleotide
ttttagtggcgttgttatctgatacgcgct

SEQ ID NO: 299110 - DNA, 30 bp, Artificial Sequence
  Synthetic oligonucleotide
ggacgacgccaggtcaaaacatatcgcgct

SEQ ID NO: 299111 - DNA, 30 bp, Artificial Sequence
  Synthetic oligonucleotide
cacgaagctcataggcagtgcataggcgct

SEQ ID NO: 299112 - DNA, 30 bp, Artificial Sequence
  Synthetic oligonucleotide
ataagcattaaagggctcaggttaggcgct

SEQ ID NO: 299113 - DNA, 30 bp, Artificial Sequence
  Synthetic oligonucleotide
acagcattaacatagatcagtcacggcgct

SEQ ID NO: 299114 - DNA, 30 bp, Artificial Sequence
  Synthetic oligonucleotide
aggggagaattccaatcaagtcccggcgct

SEQ ID NO: 299115 - DNA, 30 bp, Artificial Sequence
  Synthetic oligonucleotide
aggatcagacgcatgtctctttgcggcgct

SEQ ID NO: 299116 - DNA, 30 bp, Artificial Sequence
  Synthetic oligonucleotide
gagcgcccaggctctttccgagtcggcgct

SEQ ID NO: 299117 - DNA, 30 bp, Artificial Sequence
  Synthetic oligonucleotide
gaacagaggcacgctaaaaggtcgggcgct

SEQ ID NO: 299118 - DNA, 30 bp, Artificial Sequence
  Synthetic oligonucleotide
agacgttgaggtactaagccgcatggcgct

SEQ ID NO: 299119 - DNA, 30 bp, Artificial Sequence
  Synthetic oligonucleotide
gcgtggacggtcttgcgtataacatgcgct

SEQ ID NO: 299120 - DNA, 30 bp, Artificial Sequence
  Synthetic oligonucleotide
ctgtccggtgtgtccgtagccagatgcgct

SEQ ID NO: 299121 - DNA, 30 bp, Artificial Sequence
  Synthetic oligonucleotide
accagatttgggaagaacggatcctgcgct

SEQ ID NO: 299122 - DNA, 30 bp, Artificial Sequence
  Synthetic oligonucleotide
atccttaagcgtcacaaccctagctgcgct

SEQ ID NO: 299123 - DNA, 30 bp, Artificial Sequence
  Synthetic oligonucleotide
attcgcactacagtcatataatcgtgcgct

SEQ ID NO: 299124 - DNA, 30 bp, Artificial Sequence
  Synthetic oligonucleotide
acaagttggggatcccggttggattgcgct

SEQ ID NO: 299125 - DNA, 30 bp, Artificial Sequence
  Synthetic oligonucleotide
caggcgagcgacgaataagtggagatcgct

SEQ ID NO: 299126 - DNA, 30 bp, Artificial Sequence
  Synthetic oligonucleotide
gatacgattcggttcaggccttatatcgct

SEQ ID NO: 299127 - DNA, 30 bp, Artificial Sequence
  Synthetic oligonucleotide
cgtagcgcaggctcctcgctacaactcgct

SEQ ID NO: 299128 - DNA, 30 bp, Artificial Sequence
  Synthetic oligonucleotide
cgggctagtagactggtacagcaactcgct

SEQ ID NO: 299129 - DNA, 30 bp, Artificial Sequence
  Synthetic oligonucleotide
tttaacctgaaagggggccatccgctcgct

SEQ ID NO: 299130 - DNA, 30 bp, Artificial Sequence
  Synthetic oligonucleotide
gatgttagcggcataaattcaggagtcgct

SEQ ID NO: 299131 - DNA, 30 bp, Artificial Sequence
  Synthetic oligonucleotide
atataggaggtgggtgtaccccacgtcgct

SEQ ID NO: 299132 - DNA, 30 bp, Artificial Sequence
  Synthetic oligonucleotide
atgagtgatagtgccagtggttgcgtcgct

SEQ ID NO: 299133 - DNA, 30 bp, Artificial Sequence
  Synthetic oligonucleotide
tggttctgggctgttctccctgcggtcgct

SEQ ID NO: 299134 - DNA, 30 bp, Artificial Sequence
  Synthetic oligonucleotide
tgcgccgggtgaagctgccccatggtcgct

SEQ ID NO: 299135 - DNA, 25 bp, Artificial Sequence
  Synthetic oligonucleotide
ggcccccctaaagcgaggtgtcgct

SEQ ID NO: 299136 - DNA, 30 bp, Artificial Sequence
  Synthetic oligonucleotide
agaaggcttccacatactatatggttcgct

SEQ ID NO: 299137 - DNA, 30 bp, Artificial Sequence
  Synthetic oligonucleotide
ggatcggttgacaaacagtttgatttcgct

SEQ ID NO: 299138 - DNA, 30 bp, Artificial Sequence
  Synthetic oligonucleotide
gcatttaggtctagtcaacagtttttcgct

SEQ ID NO: 299139 - DNA, 30 bp, Artificial Sequence
  Synthetic oligonucleotide
tgactttaccatgtagtgggcgaaaaggct

SEQ ID NO: 299140 - DNA, 30 bp, Artificial Sequence
  Synthetic oligonucleotide
acgagtacaagctggcatccgtcaaaggct

SEQ ID NO: 299141 - DNA, 29 bp, Artificial Sequence
  Synthetic oligonucleotide
cgcgtgaggaaggttagggagtcaaggct

SEQ ID NO: 299142 - DNA, 30 bp, Artificial Sequence
  Synthetic oligonucleotide
gatctatcccataggacttagaagaaggct

SEQ ID NO: 299143 - DNA, 30 bp, Artificial Sequence
  Synthetic oligonucleotide
accatacttataggagtatataagaaggct

SEQ ID NO: 299144 - DNA, 30 bp, Artificial Sequence
  Synthetic oligonucleotide
tgtagttgttgaaaatgacgtaggaaggct

SEQ ID NO: 299145 - DNA, 30 bp, Artificial Sequence
  Synthetic oligonucleotide
tagcctagtaagagattaatcgtgaaggct

SEQ ID NO: 299146 - DNA, 30 bp, Artificial Sequence
  Synthetic oligonucleotide
gctagacgggagctttgctgctaccaggct

SEQ ID NO: 299147 - DNA, 35 bp, Artificial Sequence
  Synthetic oligonucleotide
tgcctgaggtgcctggctccggccgagggcaggct

SEQ ID NO: 299148 - DNA, 30 bp, Artificial Sequence
  Synthetic oligonucleotide
gtttcttcatattaggtaagcgaggaggct

SEQ ID NO: 299149 - DNA, 30 bp, Artificial Sequence
  Synthetic oligonucleotide
agaaagtccaaatttcaacgactggaggct

SEQ ID NO: 299150 - DNA, 30 bp, Artificial Sequence
  Synthetic oligonucleotide
aatgttagacgggtaaggcgagtggaggct

SEQ ID NO: 299151 - DNA, 30 bp, Artificial Sequence
  Synthetic oligonucleotide
gcgcaattgaggaccccattttgtgaggct

SEQ ID NO: 299152 - DNA, 30 bp, Artificial Sequence
  Synthetic oligonucleotide
tctctagaatcacaggttgaagaataggct

SEQ ID NO: 299153 - DNA, 30 bp, Artificial Sequence
  Synthetic oligonucleotide
tcattatttcattcaagggaaccataggct

SEQ ID NO: 299154 - DNA, 30 bp, Artificial Sequence
  Synthetic oligonucleotide
aaattagaggacctggacaccgcataggct

SEQ ID NO: 299155 - DNA, 30 bp, Artificial Sequence
  Synthetic oligonucleotide
ctctagtatggatgacaaggcaactaggct

SEQ ID NO: 299156 - DNA, 30 bp, Artificial Sequence
  Synthetic oligonucleotide
ctcaaaaggtctgtacgtaacccgtaggct

SEQ ID NO: 299157 - DNA, 30 bp, Artificial Sequence
  Synthetic oligonucleotide
taagcgaggatcggtgcacccccgtaggct

SEQ ID NO: 299158 - DNA, 30 bp, Artificial Sequence
  Synthetic oligonucleotide
tcagaacaaccaatgggcggaaattaggct

SEQ ID NO: 299159 - DNA, 30 bp, Artificial Sequence
  Synthetic oligonucleotide
agctataaacggggtttcaagcgaacggct

SEQ ID NO: 299160 - DNA, 30 bp, Artificial Sequence
  Synthetic oligonucleotide
atcggaacttgttgggtatacaagacggct

SEQ ID NO: 299161 - DNA, 30 bp, Artificial Sequence
  Synthetic oligonucleotide
gcgcaagcaggtatgcggccttcgacggct

SEQ ID NO: 299162 - DNA, 30 bp, Artificial Sequence
  Synthetic oligonucleotide
aagtccctagcacgcatgcttctgacggct

SEQ ID NO: 299163 - DNA, 30 bp, Artificial Sequence
  Synthetic oligonucleotide
aaggaacaagctcgagtttgacctacggct

SEQ ID NO: 299164 - DNA, 30 bp, Artificial Sequence
  Synthetic oligonucleotide
tcaagcgggtcgttattcctgaaaccggct

SEQ ID NO: 299165 - DNA, 30 bp, Artificial Sequence
  Synthetic oligonucleotide
acgtggagagatacctgttccagaccggct

SEQ ID NO: 299166 - DNA, 30 bp, Artificial Sequence
  Synthetic oligonucleotide
ctatgcttagtgagtgcacatgcagcggct

SEQ ID NO: 299167 - DNA, 30 bp, Artificial Sequence
  Synthetic oligonucleotide
gtcaaacgctcgacaaatgtaaacgcggct

SEQ ID NO: 299168 - DNA, 30 bp, Artificial Sequence
  Synthetic oligonucleotide
taatgggtggataaactgtttagggcggct

SEQ ID NO: 299169 - DNA, 30 bp, Artificial Sequence
  Synthetic oligonucleotide
taaaggatatcgtccctgacagtggcggct

SEQ ID NO: 299170 - DNA, 30 bp, Artificial Sequence
  Synthetic oligonucleotide
ttgtgaacgcgatttgagatgtatgcggct

SEQ ID NO: 299171 - DNA, 30 bp, Artificial Sequence
  Synthetic oligonucleotide
gaagagccctttggacacttcgctgcggct

SEQ ID NO: 299172 - DNA, 30 bp, Artificial Sequence
  Synthetic oligonucleotide
cacaggagcggttgtatgacccttgcggct

SEQ ID NO: 299173 - DNA, 30 bp, Artificial Sequence
  Synthetic oligonucleotide
tgaagacaagggctgcatcacggcagggct

SEQ ID NO: 299174 - DNA, 30 bp, Artificial Sequence
  Synthetic oligonucleotide
gcaggccgctatgggaagatcatcagggct

SEQ ID NO: 299175 - DNA, 30 bp, Artificial Sequence
  Synthetic oligonucleotide
gagatgcctctaggcatcagtctgagggct

SEQ ID NO: 299176 - DNA, 30 bp, Artificial Sequence
  Synthetic oligonucleotide
cagatattgaactattggtatgtgagggct

SEQ ID NO: 299177 - DNA, 30 bp, Artificial Sequence
  Synthetic oligonucleotide
agaatcagaaaaaattttggttaacgggct

SEQ ID NO: 299178 - DNA, 30 bp, Artificial Sequence
  Synthetic oligonucleotide
gcaatgctgataaggggctctaaccgggct

SEQ ID NO: 299179 - DNA, 30 bp, Artificial Sequence
  Synthetic oligonucleotide
agtgtccaccaactcattttgtcccgggct

SEQ ID NO: 299180 - DNA, 30 bp, Artificial Sequence
  Synthetic oligonucleotide
cgacgaccgctgcgtacatctaaaggggct

SEQ ID NO: 299181 - DNA, 30 bp, Artificial Sequence
  Synthetic oligonucleotide
ggatgcgggcgggtgcccattcaaggggct

SEQ ID NO: 299182 - DNA, 30 bp, Artificial Sequence
  Synthetic oligonucleotide
tctcgacggagtaagaacatggaaggggct

SEQ ID NO: 299183 - DNA, 30 bp, Artificial Sequence
  Synthetic oligonucleotide
ctgaaacgttcggaactccggtaaggggct

SEQ ID NO: 299184 - DNA, 30 bp, Artificial Sequence
  Synthetic oligonucleotide
ataggcgtttaaagccatggtcgaggggct

SEQ ID NO: 299185 - DNA, 30 bp, Artificial Sequence
  Synthetic oligonucleotide
gatgacatgggtaccatgggatacggggct

SEQ ID NO: 299186 - DNA, 30 bp, Artificial Sequence
  Synthetic oligonucleotide
tccgtgcagctaatgtcgaaagtcggggct

SEQ ID NO: 299187 - DNA, 30 bp, Artificial Sequence
  Synthetic oligonucleotide
aagcattctggcctattgtaattcggggct

SEQ ID NO: 299188 - DNA, 30 bp, Artificial Sequence
  Synthetic oligonucleotide
tctgaagaatacaattacactatgggggct

SEQ ID NO: 299189 - DNA, 30 bp, Artificial Sequence
  Synthetic oligonucleotide
gcgacgtgcgtgtgcgacaacgaatgggct

SEQ ID NO: 299190 - DNA, 30 bp, Artificial Sequence
  Synthetic oligonucleotide
caaactaattcttgtgcacagcgatgggct

SEQ ID NO: 299191 - DNA, 30 bp, Artificial Sequence
  Synthetic oligonucleotide
taataatgctcgcgtggcattatatgggct

SEQ ID NO: 299192 - DNA, 30 bp, Artificial Sequence
  Synthetic oligonucleotide
gcggagacagaacaatgtcgtatgtgggct

SEQ ID NO: 299193 - DNA, 30 bp, Artificial Sequence
  Synthetic oligonucleotide
agcgctgcgggactgtgtttacgttgggct

SEQ ID NO: 299194 - DNA, 30 bp, Artificial Sequence
  Synthetic oligonucleotide
cggctgacggtgcgaagggttaaaatggct

SEQ ID NO: 299195 - DNA, 30 bp, Artificial Sequence
  Synthetic oligonucleotide
agagctatccgctgcgacgaatcaatggct

SEQ ID NO: 299196 - DNA, 30 bp, Artificial Sequence
  Synthetic oligonucleotide
tggcgctcgggagctgagacctcaatggct

SEQ ID NO: 299197 - DNA, 30 bp, Artificial Sequence
  Synthetic oligonucleotide
ccgtccagaatcgtgtatcaaccgatggct

SEQ ID NO: 299198 - DNA, 30 bp, Artificial Sequence
  Synthetic oligonucleotide
acccaatgaaatgacgtatttcggatggct

SEQ ID NO: 299199 - DNA, 30 bp, Artificial Sequence
  Synthetic oligonucleotide
tgccgcccacaagagatccacgggatggct

SEQ ID NO: 299200 - DNA, 30 bp, Artificial Sequence
  Synthetic oligonucleotide
atatggcacactaagtctattagtatggct

SEQ ID NO: 299201 - DNA, 30 bp, Artificial Sequence
  Synthetic oligonucleotide
ctgcataagcggcgtacagtacggctggct

SEQ ID NO: 299202 - DNA, 30 bp, Artificial Sequence
  Synthetic oligonucleotide
ccgtgcgattgccaagagaactctctggct

SEQ ID NO: 299203 - DNA, 30 bp, Artificial Sequence
  Synthetic oligonucleotide
gtgagagacagaagtacggtttctctggct

SEQ ID NO: 299204 - DNA, 30 bp, Artificial Sequence
  Synthetic oligonucleotide
cgcatctggtcttcgaacttcagagtggct

SEQ ID NO: 299205 - DNA, 30 bp, Artificial Sequence
  Synthetic oligonucleotide
gtgctgtcgatcagagtgcagctagtggct

SEQ ID NO: 299206 - DNA, 30 bp, Artificial Sequence
  Synthetic oligonucleotide
cataggacgggttcaaataaggctgtggct

SEQ ID NO: 299207 - DNA, 30 bp, Artificial Sequence
  Synthetic oligonucleotide
gttgcagatagtatatccacttttgtggct

SEQ ID NO: 299208 - DNA, 30 bp, Artificial Sequence
  Synthetic oligonucleotide
cggcgggcctcctcatgctctaacttggct

SEQ ID NO: 299209 - DNA, 30 bp, Artificial Sequence
  Synthetic oligonucleotide
ataagctaatgtcgagcagaattgttggct

SEQ ID NO: 299210 - DNA, 30 bp, Artificial Sequence
  Synthetic oligonucleotide
aggttaatttgaccagaatgcaggaatgct

SEQ ID NO: 299211 - DNA, 30 bp, Artificial Sequence
  Synthetic oligonucleotide
aacatgtacattgacgaaagggataatgct

SEQ ID NO: 299212 - DNA, 30 bp, Artificial Sequence
  Synthetic oligonucleotide
gcggatactgtagtgataatagctaatgct

SEQ ID NO: 299213 - DNA, 30 bp, Artificial Sequence
  Synthetic oligonucleotide
cggttgggtgcggactcgcttcaacatgct

SEQ ID NO: 299214 - DNA, 30 bp, Artificial Sequence
  Synthetic oligonucleotide
acaatattagaataagacccgctacatgct

SEQ ID NO: 299215 - DNA, 30 bp, Artificial Sequence
  Synthetic oligonucleotide
ttgcagaactctgaggtcgcgtaccatgct

SEQ ID NO: 299216 - DNA, 30 bp, Artificial Sequence
  Synthetic oligonucleotide
gtacagactaatgtttgaatcgggcatgct

SEQ ID NO: 299217 - DNA, 30 bp, Artificial Sequence
  Synthetic oligonucleotide
ttcagatggaaggtgcatgtggggcatgct

SEQ ID NO: 299218 - DNA, 30 bp, Artificial Sequence
  Synthetic oligonucleotide
aatgaatacgaatacagtcataatcatgct

SEQ ID NO: 299219 - DNA, 30 bp, Artificial Sequence
  Synthetic oligonucleotide
agccagtaacgaagacgaggcggtcatgct

SEQ ID NO: 299220 - DNA, 30 bp, Artificial Sequence
  Synthetic oligonucleotide
tcaactgacgggaggacaacgggtcatgct

SEQ ID NO: 299221 - DNA, 30 bp, Artificial Sequence
  Synthetic oligonucleotide
attccaagaagaagaaggatccaagatgct

SEQ ID NO: 299222 - DNA, 30 bp, Artificial Sequence
  Synthetic oligonucleotide
gcgagccgatgcaataaaaggtgagatgct

SEQ ID NO: 299223 - DNA, 29 bp, Artificial Sequence
  Synthetic oligonucleotide
tgaagccaggagtttcatggcgcgatgct

SEQ ID NO: 299224 - DNA, 30 bp, Artificial Sequence
  Synthetic oligonucleotide
catgggggctccagggcaacgggcgatgct

SEQ ID NO: 299225 - DNA, 30 bp, Artificial Sequence
  Synthetic oligonucleotide
aggtcagggaaagctcgacaatttgatgct

SEQ ID NO: 299226 - DNA, 30 bp, Artificial Sequence
  Synthetic oligonucleotide
gtatccgatgcatggtcgacgatatatgct

SEQ ID NO: 299227 - DNA, 30 bp, Artificial Sequence
  Synthetic oligonucleotide
atggggtactaatagatacgacactatgct

SEQ ID NO: 299228 - DNA, 30 bp, Artificial Sequence
  Synthetic oligonucleotide
acgtaatgcgtagttatgcgatgctatgct

SEQ ID NO: 299229 - DNA, 30 bp, Artificial Sequence
  Synthetic oligonucleotide
tccaaggggaggacgaaggcatagtatgct

SEQ ID NO: 299230 - DNA, 30 bp, Artificial Sequence
  Synthetic oligonucleotide
gctgagcaacgcgtagatgctatgtatgct

SEQ ID NO: 299231 - DNA, 30 bp, Artificial Sequence
  Synthetic oligonucleotide
ttgcgtggtgtccactatcgacttactgct

SEQ ID NO: 299232 - DNA, 30 bp, Artificial Sequence
  Synthetic oligonucleotide
tgcaacctgtatcttatggcagaacctgct

SEQ ID NO: 299233 - DNA, 30 bp, Artificial Sequence
  Synthetic oligonucleotide
cctccatcttgtaactatcatgggcctgct

SEQ ID NO: 299234 - DNA, 30 bp, Artificial Sequence
  Synthetic oligonucleotide
aggactgactaaatttgcagccttcctgct

SEQ ID NO: 299235 - DNA, 30 bp, Artificial Sequence
  Synthetic oligonucleotide
tgaggctgcttgaattgattgacagctgct

SEQ ID NO: 299236 - DNA, 30 bp, Artificial Sequence
  Synthetic oligonucleotide
agaaaagtctgatatgtagggtcagctgct

SEQ ID NO: 299237 - DNA, 30 bp, Artificial Sequence
  Synthetic oligonucleotide
aaactcgttttgtattcagagaaggctgct

SEQ ID NO: 299238 - DNA, 30 bp, Artificial Sequence
  Synthetic oligonucleotide
taatagtctgggatacctccggatgctgct

SEQ ID NO: 299239 - DNA, 30 bp, Artificial Sequence
  Synthetic oligonucleotide
gtgcacaagtattcatcgcatgaatctgct

SEQ ID NO: 299240 - DNA, 30 bp, Artificial Sequence
  Synthetic oligonucleotide
aagtaattgtccagagcgcatccatctgct

SEQ ID NO: 299241 - DNA, 30 bp, Artificial Sequence
  Synthetic oligonucleotide
cacctattggcattattgccaatctctgct

SEQ ID NO: 299242 - DNA, 30 bp, Artificial Sequence
  Synthetic oligonucleotide
cgaaatgttttaacggctgagttctctgct

SEQ ID NO: 299243 - DNA, 30 bp, Artificial Sequence
  Synthetic oligonucleotide
tgtcttagaagtttcattatggcgtctgct

SEQ ID NO: 299244 - DNA, 30 bp, Artificial Sequence
  Synthetic oligonucleotide
tggtagacaaccagttgtgggaggtctgct

SEQ ID NO: 299245 - DNA, 30 bp, Artificial Sequence
  Synthetic oligonucleotide
ttgcgtgttatcgcaccgaaatggtctgct

SEQ ID NO: 299246 - DNA, 30 bp, Artificial Sequence
  Synthetic oligonucleotide
cagggaataaataagtcaaagcattctgct

SEQ ID NO: 299247 - DNA, 30 bp, Artificial Sequence
  Synthetic oligonucleotide
acacttcacttgtggtctttctattctgct

SEQ ID NO: 299248 - DNA, 30 bp, Artificial Sequence
  Synthetic oligonucleotide
gggggctaggtttacatcatatcttctgct

SEQ ID NO: 299249 - DNA, 30 bp, Artificial Sequence
  Synthetic oligonucleotide
atgtcagtaagttacccaactggttctgct

SEQ ID NO: 299250 - DNA, 30 bp, Artificial Sequence
  Synthetic oligonucleotide
accctagatgtgtctatgcgactaagtgct

SEQ ID NO: 299251 - DNA, 30 bp, Artificial Sequence
  Synthetic oligonucleotide
gattcagagatttgcaggggaagacgtgct

SEQ ID NO: 299252 - DNA, 30 bp, Artificial Sequence
  Synthetic oligonucleotide
tagaccggttacactacaaccggacgtgct

SEQ ID NO: 299253 - DNA, 30 bp, Artificial Sequence
  Synthetic oligonucleotide
taaggcaagcatgttgcttgtatgcgtgct

SEQ ID NO: 299254 - DNA, 30 bp, Artificial Sequence
  Synthetic oligonucleotide
tattcacacggagggtgcgggcatcgtgct

SEQ ID NO: 299255 - DNA, 30 bp, Artificial Sequence
  Synthetic oligonucleotide
gtgtaaatacagagatgtaaccctcgtgct

SEQ ID NO: 299256 - DNA, 30 bp, Artificial Sequence
  Synthetic oligonucleotide
cgcccgagctcgtcatttgcatcaggtgct

SEQ ID NO: 299257 - DNA, 30 bp, Artificial Sequence
  Synthetic oligonucleotide
aacgttggatacttcaaatgtttgggtgct

SEQ ID NO: 299258 - DNA, 30 bp, Artificial Sequence
  Synthetic oligonucleotide
cacagtgacgagttaggtcctgctggtgct

SEQ ID NO: 299259 - DNA, 30 bp, Artificial Sequence
  Synthetic oligonucleotide
tcaacaacctacgttataggttgtggtgct

SEQ ID NO: 299260 - DNA, 30 bp, Artificial Sequence
  Synthetic oligonucleotide
gcaacacgaccccgtttaatacgctgtgct

SEQ ID NO: 299261 - DNA, 30 bp, Artificial Sequence
  Synthetic oligonucleotide
tcatcccctcgtcgcgagaactcaattgct

SEQ ID NO: 299262 - DNA, 30 bp, Artificial Sequence
  Synthetic oligonucleotide
aaaagtgttcgtgtgtgtaagagaattgct

SEQ ID NO: 299263 - DNA, 30 bp, Artificial Sequence
  Synthetic oligonucleotide
tcgcgaagctaatcaattccgagaattgct

SEQ ID NO: 299264 - DNA, 30 bp, Artificial Sequence
  Synthetic oligonucleotide
ctgcactcccggttcggcatgcggattgct

SEQ ID NO: 299265 - DNA, 30 bp, Artificial Sequence
  Synthetic oligonucleotide
cggaggtagcggccactttagatgattgct

SEQ ID NO: 299266 - DNA, 30 bp, Artificial Sequence
  Synthetic oligonucleotide
tggaagtctagtttatggtatctgattgct

SEQ ID NO: 299267 - DNA, 30 bp, Artificial Sequence
  Synthetic oligonucleotide
gagcaatagtggaaactaatagatattgct

SEQ ID NO: 299268 - DNA, 30 bp, Artificial Sequence
  Synthetic oligonucleotide
tgcggtactatttggagaagttatattgct

SEQ ID NO: 299269 - DNA, 30 bp, Artificial Sequence
  Synthetic oligonucleotide
atctaacggggccaaacgcggggtattgct

SEQ ID NO: 299270 - DNA, 30 bp, Artificial Sequence
  Synthetic oligonucleotide
ctccaaatgcagaaggttgcgtaacttgct

SEQ ID NO: 299271 - DNA, 30 bp, Artificial Sequence
  Synthetic oligonucleotide
ggagcacggtcggacgtcgatagtcttgct

SEQ ID NO: 299272 - DNA, 30 bp, Artificial Sequence
  Synthetic oligonucleotide
caaactgacgcagaacgggaggaagttgct

SEQ ID NO: 299273 - DNA, 30 bp, Artificial Sequence
  Synthetic oligonucleotide
aaaacccatcatccatcgcatgcagttgct

SEQ ID NO: 299274 - DNA, 30 bp, Artificial Sequence
  Synthetic oligonucleotide
tcttagtagaggtgtgtacatgtagttgct

SEQ ID NO: 299275 - DNA, 30 bp, Artificial Sequence
  Synthetic oligonucleotide
cattacatatcacgtgcagtgttcgttgct

SEQ ID NO: 299276 - DNA, 30 bp, Artificial Sequence
  Synthetic oligonucleotide
cgtgggcggatgcagtctcaagaggttgct

SEQ ID NO: 299277 - DNA, 30 bp, Artificial Sequence
  Synthetic oligonucleotide
tatctaaagggaattgggccgatggttgct

SEQ ID NO: 299278 - DNA, 30 bp, Artificial Sequence
  Synthetic oligonucleotide
gggcatcagcgatattttaaatctgttgct

SEQ ID NO: 299279 - DNA, 30 bp, Artificial Sequence
  Synthetic oligonucleotide
gctcaacgtttccatgctcgcctatttgct

SEQ ID NO: 299280 - DNA, 30 bp, Artificial Sequence
  Synthetic oligonucleotide
gtcgctcaccgagggcataacttatttgct

SEQ ID NO: 299281 - DNA, 30 bp, Artificial Sequence
  Synthetic oligonucleotide
ttctgtgtggactgcgttcaaggctttgct

SEQ ID NO: 299282 - DNA, 30 bp, Artificial Sequence
  Synthetic oligonucleotide
atcagagtacacccagcacagtcgtttgct

SEQ ID NO: 299283 - DNA, 30 bp, Artificial Sequence
  Synthetic oligonucleotide
cttgagcaggcaatcactgagaattttgct

SEQ ID NO: 299284 - DNA, 30 bp, Artificial Sequence
  Synthetic oligonucleotide
acatttctcgtttcagggctgtcttttgct

SEQ ID NO: 299285 - DNA, 30 bp, Artificial Sequence
  Synthetic oligonucleotide
gatggctgtccgacacggtagtgttttgct

SEQ ID NO: 299286 - DNA, 30 bp, Artificial Sequence
  Synthetic oligonucleotide
acggttcgccctagttacagaaaaaaatct

SEQ ID NO: 299287 - DNA, 30 bp, Artificial Sequence
  Synthetic oligonucleotide
cgccttgacaaccaagagactataaaatct

SEQ ID NO: 299288 - DNA, 30 bp, Artificial Sequence
  Synthetic oligonucleotide
gtgggcctacctgcttctccacacaaatct

SEQ ID NO: 299289 - DNA, 30 bp, Artificial Sequence
  Synthetic oligonucleotide
tctgcatcatctaccaaaacaaccaaatct

SEQ ID NO: 299290 - DNA, 30 bp, Artificial Sequence
  Synthetic oligonucleotide
ctgtaatcgtacaggtctcggaccaaatct

SEQ ID NO: 299291 - DNA, 30 bp, Artificial Sequence
  Synthetic oligonucleotide
gtaatgttgtgatcgcataggtccaaatct

SEQ ID NO: 299292 - DNA, 30 bp, Artificial Sequence
  Synthetic oligonucleotide
cactaacgaaagcccacacggggcaaatct

SEQ ID NO: 299293 - DNA, 30 bp, Artificial Sequence
  Synthetic oligonucleotide
cgttgatgtgctttctcgtacttcaaatct

SEQ ID NO: 299294 - DNA, 30 bp, Artificial Sequence
  Synthetic oligonucleotide
gtctacgcgattgactacattcggaaatct

SEQ ID NO: 299295 - DNA, 30 bp, Artificial Sequence
  Synthetic oligonucleotide
caaatcgggaatgatggccccgtgaaatct

SEQ ID NO: 299296 - DNA, 30 bp, Artificial Sequence
  Synthetic oligonucleotide
gggagtataccgtaacaattcggtaaatct

SEQ ID NO: 299297 - DNA, 30 bp, Artificial Sequence
  Synthetic oligonucleotide
ccccgagccagcaaatcatcttttaaatct

SEQ ID NO: 299298 - DNA, 30 bp, Artificial Sequence
  Synthetic oligonucleotide
gcttggcgggtctatcaagggaaacaatct

SEQ ID NO: 299299 - DNA, 30 bp, Artificial Sequence
  Synthetic oligonucleotide
acccagtaacataaggttattccacaatct

SEQ ID NO: 299300 - DNA, 30 bp, Artificial Sequence
  Synthetic oligonucleotide
atagacatcagaacttatgttttccaatct

SEQ ID NO: 299301 - DNA, 30 bp, Artificial Sequence
  Synthetic oligonucleotide
tttaggcacgttttagtcgcgggagaatct

SEQ ID NO: 299302 - DNA, 30 bp, Artificial Sequence
  Synthetic oligonucleotide
ggggtgtcagctctgaacatggtagaatct

SEQ ID NO: 299303 - DNA, 30 bp, Artificial Sequence
  Synthetic oligonucleotide
aatacatctgaggtcacccggtgcgaatct

SEQ ID NO: 299304 - DNA, 30 bp, Artificial Sequence
  Synthetic oligonucleotide
atgtgggcttcggagcccacaaaggaatct

SEQ ID NO: 299305 - DNA, 30 bp, Artificial Sequence
  Synthetic oligonucleotide
gggcgcttatgataggaggggaaggaatct

SEQ ID NO: 299306 - DNA, 30 bp, Artificial Sequence
  Synthetic oligonucleotide
cggctagcgatcagtcacgattaggaatct

SEQ ID NO: 299307 - DNA, 30 bp, Artificial Sequence
  Synthetic oligonucleotide
gcttaatcgtaaatcgaatggcgggaatct

SEQ ID NO: 299308 - DNA, 30 bp, Artificial Sequence
  Synthetic oligonucleotide
aagacgatccattaatatggtatggaatct

SEQ ID NO: 299309 - DNA, 30 bp, Artificial Sequence
  Synthetic oligonucleotide
cacacaggtgtatcattggtcctggaatct

SEQ ID NO: 299310 - DNA, 30 bp, Artificial Sequence
  Synthetic oligonucleotide
tactagtcgagaacatcatttagataatct

SEQ ID NO: 299311 - DNA, 30 bp, Artificial Sequence
  Synthetic oligonucleotide
tcgtctgaggacggtggcggggtctaatct

SEQ ID NO: 299312 - DNA, 30 bp, Artificial Sequence
  Synthetic oligonucleotide
gaataacgaagtgtgtttgccctgtaatct

SEQ ID NO: 299313 - DNA, 30 bp, Artificial Sequence
  Synthetic oligonucleotide
aagacgcaccctcggtttggcccttaatct

SEQ ID NO: 299314 - DNA, 30 bp, Artificial Sequence
  Synthetic oligonucleotide
ggttatgagcagtttcggtggcaaacatct

SEQ ID NO: 299315 - DNA, 30 bp, Artificial Sequence
  Synthetic oligonucleotide
aacacggcgcgctgaggtataacaacatct

SEQ ID NO: 299316 - DNA, 30 bp, Artificial Sequence
  Synthetic oligonucleotide
gtcaacagccgatattttgcggacacatct

SEQ ID NO: 299317 - DNA, 30 bp, Artificial Sequence
  Synthetic oligonucleotide
gatccatcatccttgcgccaccccacatct

SEQ ID NO: 299318 - DNA, 30 bp, Artificial Sequence
  Synthetic oligonucleotide
cgttgcaaacactgttcgaacaagacatct

SEQ ID NO: 299319 - DNA, 30 bp, Artificial Sequence
  Synthetic oligonucleotide
agacgttcatagtaactgccgactacatct

SEQ ID NO: 299320 - DNA, 30 bp, Artificial Sequence
  Synthetic oligonucleotide
ctacctaggttgggtctttggtcaccatct

SEQ ID NO: 299321 - DNA, 30 bp, Artificial Sequence
  Synthetic oligonucleotide
gctcggaggcactcattaagggatccatct

SEQ ID NO: 299322 - DNA, 30 bp, Artificial Sequence
  Synthetic oligonucleotide
aaatctggcgagcaccacccagaagcatct

SEQ ID NO: 299323 - DNA, 30 bp, Artificial Sequence
  Synthetic oligonucleotide
gaactagggcaaaaatcaacgtaagcatct

SEQ ID NO: 299324 - DNA, 30 bp, Artificial Sequence
  Synthetic oligonucleotide
gtagttctagagtcgcttaccacagcatct

SEQ ID NO: 299325 - DNA, 30 bp, Artificial Sequence
  Synthetic oligonucleotide
gccgtgactgttggtaagaggttagcatct

SEQ ID NO: 299326 - DNA, 30 bp, Artificial Sequence
  Synthetic oligonucleotide
tgtggttagggcgatagattcagcgcatct

SEQ ID NO: 299327 - DNA, 30 bp, Artificial Sequence
  Synthetic oligonucleotide
gggggttcgggatggtcgcagattgcatct

SEQ ID NO: 299328 - DNA, 30 bp, Artificial Sequence
  Synthetic oligonucleotide
cttaatcgttgtataatgatgccctcatct

SEQ ID NO: 299329 - DNA, 30 bp, Artificial Sequence
  Synthetic oligonucleotide
aattgttgattctttcccccgccgtcatct

SEQ ID NO: 299330 - DNA, 30 bp, Artificial Sequence
  Synthetic oligonucleotide
caggtttcgtgacaaacttttcggtcatct

SEQ ID NO: 299331 - DNA, 30 bp, Artificial Sequence
  Synthetic oligonucleotide
gatcaaaacttgttctccgtgtattcatct

SEQ ID NO: 299332 - DNA, 30 bp, Artificial Sequence
  Synthetic oligonucleotide
ccacaaaaattaggttcctaacgttcatct

SEQ ID NO: 299333 - DNA, 30 bp, Artificial Sequence
  Synthetic oligonucleotide
ggaaatatagtatcgacagcacgaagatct

SEQ ID NO: 299334 - DNA, 30 bp, Artificial Sequence
  Synthetic oligonucleotide
ccggaccggcttcctacactgaccagatct

SEQ ID NO: 299335 - DNA, 30 bp, Artificial Sequence
  Synthetic oligonucleotide
actcatgtcaattgtgacttatgcagatct

SEQ ID NO: 299336 - DNA, 30 bp, Artificial Sequence
  Synthetic oligonucleotide
aaatactcccgggtaacaacgcgtagatct

SEQ ID NO: 299337 - DNA, 30 bp, Artificial Sequence
  Synthetic oligonucleotide
ttatttcgggttcatgggagcggacgatct

SEQ ID NO: 299338 - DNA, 30 bp, Artificial Sequence
  Synthetic oligonucleotide
gcctctgtcaatagtgcactcggccgatct

SEQ ID NO: 299339 - DNA, 30 bp, Artificial Sequence
  Synthetic oligonucleotide
gaattactagaataaactctcaatcgatct

SEQ ID NO: 299340 - DNA, 30 bp, Artificial Sequence
  Synthetic oligonucleotide
ttaggtaaaccgccacggaaatctcgatct

SEQ ID NO: 299341 - DNA, 30 bp, Artificial Sequence
  Synthetic oligonucleotide
tgtttcgagtagaggtaaccttcaggatct

SEQ ID NO: 299342 - DNA, 30 bp, Artificial Sequence
  Synthetic oligonucleotide
gggtataggtatagataaccccgaggatct

SEQ ID NO: 299343 - DNA, 30 bp, Artificial Sequence
  Synthetic oligonucleotide
gcgcaaaggccgtcagggcaagcgggatct

SEQ ID NO: 299344 - DNA, 30 bp, Artificial Sequence
  Synthetic oligonucleotide
ggctggccgggcgagctgttcggtggatct

SEQ ID NO: 299345 - DNA, 30 bp, Artificial Sequence
  Synthetic oligonucleotide
cctacaggctgataaccttccgaatgatct

SEQ ID NO: 299346 - DNA, 30 bp, Artificial Sequence
  Synthetic oligonucleotide
tcgacgcgtgcatctggagcagcgtgatct

SEQ ID NO: 299347 - DNA, 30 bp, Artificial Sequence
  Synthetic oligonucleotide
taagcagcgatggcgcttctgacaatatct

SEQ ID NO: 299348 - DNA, 30 bp, Artificial Sequence
  Synthetic oligonucleotide
tccggccaattcgaggggtaactaatatct

SEQ ID NO: 299349 - DNA, 31 bp, Artificial Sequence
  Synthetic oligonucleotide
ggctacaggaaatagcatggtccagatatct

SEQ ID NO: 299350 - DNA, 30 bp, Artificial Sequence
  Synthetic oligonucleotide
tggaacaaccattttccggcctagatatct

SEQ ID NO: 299351 - DNA, 30 bp, Artificial Sequence
  Synthetic oligonucleotide
tacccgcctggataacaaagacatatatct

SEQ ID NO: 299352 - DNA, 30 bp, Artificial Sequence
  Synthetic oligonucleotide
acaaccatatcatatataacttatatatct

SEQ ID NO: 299353 - DNA, 30 bp, Artificial Sequence
  Synthetic oligonucleotide
accttaagacaccgtggtccttgtatatct

SEQ ID NO: 299354 - DNA, 30 bp, Artificial Sequence
  Synthetic oligonucleotide
ccagaactaacaattgggacatcactatct

SEQ ID NO: 299355 - DNA, 30 bp, Artificial Sequence
  Synthetic oligonucleotide
gaaataaattacagatgagcgtgactatct

SEQ ID NO: 299356 - DNA, 30 bp, Artificial Sequence
  Synthetic oligonucleotide
tgacttatgggtttcccgcgcctactatct

SEQ ID NO: 299357 - DNA, 30 bp, Artificial Sequence
  Synthetic oligonucleotide
ttaagaagccaggaatcgatcgtgctatct

SEQ ID NO: 299358 - DNA, 30 bp, Artificial Sequence
  Synthetic oligonucleotide
cacatgtgatgcattggtttagatctatct

SEQ ID NO: 299359 - DNA, 30 bp, Artificial Sequence
  Synthetic oligonucleotide
acagtggacgcgcattttttcaaagtatct

SEQ ID NO: 299360 - DNA, 30 bp, Artificial Sequence
  Synthetic oligonucleotide
ctcatccaaagtcatgagcgttaggtatct

SEQ ID NO: 299361 - DNA, 30 bp, Artificial Sequence
  Synthetic oligonucleotide
aggcgctaggcacttgcgcggtgggtatct

SEQ ID NO: 299362 - DNA, 30 bp, Artificial Sequence
  Synthetic oligonucleotide
attcgagtgaccgatattgactgtgtatct

SEQ ID NO: 299363 - DNA, 30 bp, Artificial Sequence
  Synthetic oligonucleotide
gagggcgtgcttaagcgccccattgtatct

SEQ ID NO: 299364 - DNA, 30 bp, Artificial Sequence
  Synthetic oligonucleotide
tcacagagagcagttgtccggcgattatct

SEQ ID NO: 299365 - DNA, 30 bp, Artificial Sequence
  Synthetic oligonucleotide
gtactcaatatcaaggccattggattatct

SEQ ID NO: 299366 - DNA, 30 bp, Artificial Sequence
  Synthetic oligonucleotide
gcaacgttctatataccacggaacttatct

SEQ ID NO: 299367 - DNA, 30 bp, Artificial Sequence
  Synthetic oligonucleotide
actcacctttatgctcttccaatcttatct

SEQ ID NO: 299368 - DNA, 30 bp, Artificial Sequence
  Synthetic oligonucleotide
ctgcgcctgtgagggtcatcgccgttatct

SEQ ID NO: 299369 - DNA, 30 bp, Artificial Sequence
  Synthetic oligonucleotide
tcagtcgagtcataggacagccatttatct

SEQ ID NO: 299370 - DNA, 30 bp, Artificial Sequence
  Synthetic oligonucleotide
ttcgaccagctggcacctgacactttatct

SEQ ID NO: 299371 - DNA, 30 bp, Artificial Sequence
  Synthetic oligonucleotide
tagctcaaaattaagtgacatgctttatct

SEQ ID NO: 299372 - DNA, 30 bp, Artificial Sequence
  Synthetic oligonucleotide
tccagggaaagtccgtctttacggaactct

SEQ ID NO: 299373 - DNA, 30 bp, Artificial Sequence
  Synthetic oligonucleotide
gtgcattatgtgataacaaatagtaactct

SEQ ID NO: 299374 - DNA, 30 bp, Artificial Sequence
  Synthetic oligonucleotide
ggctcgacgctctatcgcgcgattaactct

SEQ ID NO: 299375 - DNA, 30 bp, Artificial Sequence
  Synthetic oligonucleotide
acatacccggcccgtccaactaaacactct

SEQ ID NO: 299376 - DNA, 30 bp, Artificial Sequence
  Synthetic oligonucleotide
ctggcttgtcgcttatcgtggcaacactct

SEQ ID NO: 299377 - DNA, 30 bp, Artificial Sequence
  Synthetic oligonucleotide
tgtgagggtaagttggcacgcggacactct

SEQ ID NO: 299378 - DNA, 30 bp, Artificial Sequence
  Synthetic oligonucleotide
aacacgagggacgtatatttatcccactct

SEQ ID NO: 299379 - DNA, 30 bp, Artificial Sequence
  Synthetic oligonucleotide
accgtcgtggatctccaaacggtccactct

SEQ ID NO: 299380 - DNA, 30 bp, Artificial Sequence
  Synthetic oligonucleotide
acagaagttataggcctattcgatcactct

SEQ ID NO: 299381 - DNA, 30 bp, Artificial Sequence
  Synthetic oligonucleotide
accaactgatcgtatggccatagtcactct

SEQ ID NO: 299382 - DNA, 30 bp, Artificial Sequence
  Synthetic oligonucleotide
gaaaagctaaaatccgtcctcacagactct

SEQ ID NO: 299383 - DNA, 30 bp, Artificial Sequence
  Synthetic oligonucleotide
ataacagcaggtttgagactgtgagactct

SEQ ID NO: 299384 - DNA, 30 bp, Artificial Sequence
  Synthetic oligonucleotide
tcttgctattataatctgacaatagactct

SEQ ID NO: 299385 - DNA, 30 bp, Artificial Sequence
  Synthetic oligonucleotide
ctcaatggtgtctagagagattaggactct

SEQ ID NO: 299386 - DNA, 30 bp, Artificial Sequence
  Synthetic oligonucleotide
gcatatacagaaggatctgatctggactct

SEQ ID NO: 299387 - DNA, 30 bp, Artificial Sequence
  Synthetic oligonucleotide
tatttccaatattctgtctgtattgactct

SEQ ID NO: 299388 - DNA, 30 bp, Artificial Sequence
  Synthetic oligonucleotide
agtgaaggcccatctatatgcgggtactct

SEQ ID NO: 299389 - DNA, 30 bp, Artificial Sequence
  Synthetic oligonucleotide
agaccgtaccccgcattcccacgttactct

SEQ ID NO: 299390 - DNA, 30 bp, Artificial Sequence
  Synthetic oligonucleotide
gaagggcggcaaatggatgcggaaacctct

SEQ ID NO: 299391 - DNA, 30 bp, Artificial Sequence
  Synthetic oligonucleotide
tctctagagcaccgagatgaaccaacctct

SEQ ID NO: 299392 - DNA, 30 bp, Artificial Sequence
  Synthetic oligonucleotide
ggatgattgctacgccgaacctgaacctct

SEQ ID NO: 299393 - DNA, 30 bp, Artificial Sequence
  Synthetic oligonucleotide
gcacaggacaataatcagggcgtaacctct

SEQ ID NO: 299394 - DNA, 30 bp, Artificial Sequence
  Synthetic oligonucleotide
cggtgtcaccccaccgggctccacacctct

SEQ ID NO: 299395 - DNA, 30 bp, Artificial Sequence
  Synthetic oligonucleotide
agttcgctggctgagcgccaacatacctct

SEQ ID NO: 299396 - DNA, 30 bp, Artificial Sequence
  Synthetic oligonucleotide
tcgcgatgctgtgtatagtgaaaaccctct

SEQ ID NO: 299397 - DNA, 30 bp, Artificial Sequence
  Synthetic oligonucleotide
atgatacgccctgctatggacgatccctct

SEQ ID NO: 299398 - DNA, 30 bp, Artificial Sequence
  Synthetic oligonucleotide
gtatatgattacgtactaatccgtccctct

SEQ ID NO: 299399 - DNA, 30 bp, Artificial Sequence
  Synthetic oligonucleotide
aagcagtactcgagacagcgaaaagcctct

SEQ ID NO: 299400 - DNA, 30 bp, Artificial Sequence
  Synthetic oligonucleotide
taggacttacctccgagatacagagcctct

SEQ ID NO: 299401 - DNA, 30 bp, Artificial Sequence
  Synthetic oligonucleotide
ttgttgtgttctctttttgtgttttcctct

SEQ ID NO: 299402 - DNA, 30 bp, Artificial Sequence
  Synthetic oligonucleotide
ggctctgtaattagtataaaccacagctct

SEQ ID NO: 299403 - DNA, 30 bp, Artificial Sequence
  Synthetic oligonucleotide
gacttctttttgagtacgttagcgagctct

SEQ ID NO: 299404 - DNA, 30 bp, Artificial Sequence
  Synthetic oligonucleotide
gtttcggataggaccagaaacattagctct

SEQ ID NO: 299405 - DNA, 30 bp, Artificial Sequence
  Synthetic oligonucleotide
caacttcaacgggttactatccaacgctct

SEQ ID NO: 299406 - DNA, 30 bp, Artificial Sequence
  Synthetic oligonucleotide
gacgcgttacaagagggcaaattaggctct

SEQ ID NO: 299407 - DNA, 30 bp, Artificial Sequence
  Synthetic oligonucleotide
ggttgaacataccgcagtaactgcggctct

SEQ ID NO: 299408 - DNA, 30 bp, Artificial Sequence
  Synthetic oligonucleotide
agatcttgatcgatagagggcgtcggctct

SEQ ID NO: 299409 - DNA, 30 bp, Artificial Sequence
  Synthetic oligonucleotide
cgatggtagagccctacccacagtggctct

SEQ ID NO: 299410 - DNA, 30 bp, Artificial Sequence
  Synthetic oligonucleotide
tgcggcatcgacacaattagatgatgctct

SEQ ID NO: 299411 - DNA, 30 bp, Artificial Sequence
  Synthetic oligonucleotide
ttaccctatggtaacggcgctttctgctct

SEQ ID NO: 299412 - DNA, 30 bp, Artificial Sequence
  Synthetic oligonucleotide
actgagctgacgtcaatgccaaattgctct

SEQ ID NO: 299413 - DNA, 30 bp, Artificial Sequence
  Synthetic oligonucleotide
acggagaaccctgttatgtaataaatctct

SEQ ID NO: 299414 - DNA, 30 bp, Artificial Sequence
  Synthetic oligonucleotide
acgtggttcctggaggtgttggacatctct

SEQ ID NO: 299415 - DNA, 30 bp, Artificial Sequence
  Synthetic oligonucleotide
cacccctggaaaaatcgctatcccatctct

SEQ ID NO: 299416 - DNA, 30 bp, Artificial Sequence
  Synthetic oligonucleotide
gaggggtggattggggctccttccatctct

SEQ ID NO: 299417 - DNA, 30 bp, Artificial Sequence
  Synthetic oligonucleotide
gcgtctcgcaataaacgcgtctcgatctct

SEQ ID NO: 299418 - DNA, 30 bp, Artificial Sequence
  Synthetic oligonucleotide
gcccgttttagttcacatagtcggatctct

SEQ ID NO: 299419 - DNA, 31 bp, Artificial Sequence
  Synthetic oligonucleotide
atctagacagggacgcaacttggttatctct

SEQ ID NO: 299420 - DNA, 30 bp, Artificial Sequence
  Synthetic oligonucleotide
ctcggtctggtagaagcggtgaaactctct

SEQ ID NO: 299421 - DNA, 30 bp, Artificial Sequence
  Synthetic oligonucleotide
atgggtgatttcggtctaagatacctctct

SEQ ID NO: 299422 - DNA, 30 bp, Artificial Sequence
  Synthetic oligonucleotide
gaggggtacgggacctatagttccctctct

SEQ ID NO: 299423 - DNA, 30 bp, Artificial Sequence
  Synthetic oligonucleotide
gaagcactcgtactgtacagcgatctctct

SEQ ID NO: 299424 - DNA, 30 bp, Artificial Sequence
  Synthetic oligonucleotide
tgaacacttattactctcccctatctctct

SEQ ID NO: 299425 - DNA, 30 bp, Artificial Sequence
  Synthetic oligonucleotide
ctcggagggaagctaacggaccacgtctct

SEQ ID NO: 299426 - DNA, 30 bp, Artificial Sequence
  Synthetic oligonucleotide
aatacatgaatgcggtacaagtccgtctct

SEQ ID NO: 299427 - DNA, 30 bp, Artificial Sequence
  Synthetic oligonucleotide
ctagagcgcggaagataattactggtctct

SEQ ID NO: 299428 - DNA, 30 bp, Artificial Sequence
  Synthetic oligonucleotide
gcacgcgttgcggccaacgggtttgtctct

SEQ ID NO: 299429 - DNA, 30 bp, Artificial Sequence
  Synthetic oligonucleotide
gtaggccgcaatatcgcgaccctattctct

SEQ ID NO: 299430 - DNA, 30 bp, Artificial Sequence
  Synthetic oligonucleotide
ccacttcaaaacatcttaagttacttctct

SEQ ID NO: 299431 - DNA, 30 bp, Artificial Sequence
  Synthetic oligonucleotide
aatgctaaccgctaacaatttaggttctct

SEQ ID NO: 299432 - DNA, 30 bp, Artificial Sequence
  Synthetic oligonucleotide
cttcagaggttagcagccaactaaaagtct

SEQ ID NO: 299433 - DNA, 30 bp, Artificial Sequence
  Synthetic oligonucleotide
gagtgcgagattacgaatactggaaagtct

SEQ ID NO: 299434 - DNA, 30 bp, Artificial Sequence
  Synthetic oligonucleotide
atacagccagtcggccaatatgacaagtct

SEQ ID NO: 299435 - DNA, 30 bp, Artificial Sequence
  Synthetic oligonucleotide
cactgtgatgaattaggtggggtcaagtct

SEQ ID NO: 299436 - DNA, 30 bp, Artificial Sequence
  Synthetic oligonucleotide
gcttcctcggcaataagttgcttgaagtct

SEQ ID NO: 299437 - DNA, 30 bp, Artificial Sequence
  Synthetic oligonucleotide
gacgtgcgcgtaaatgcagaatttaagtct

SEQ ID NO: 299438 - DNA, 30 bp, Artificial Sequence
  Synthetic oligonucleotide
cgcactagtgtttttggacgaaaccagtct

SEQ ID NO: 299439 - DNA, 30 bp, Artificial Sequence
  Synthetic oligonucleotide
atcgtttatagagatatttcgtggcagtct

SEQ ID NO: 299440 - DNA, 30 bp, Artificial Sequence
  Synthetic oligonucleotide
ctgaccctagttgaggaacttcatcagtct

SEQ ID NO: 299441 - DNA, 30 bp, Artificial Sequence
  Synthetic oligonucleotide
cctgtcactacccgtatctgggttcagtct

SEQ ID NO: 299442 - DNA, 30 bp, Artificial Sequence
  Synthetic oligonucleotide
caccagtcatacgaccactcggaagagtct

SEQ ID NO: 299443 - DNA, 30 bp, Artificial Sequence
  Synthetic oligonucleotide
atcattatcggatactacaagtaagagtct

SEQ ID NO: 299444 - DNA, 30 bp, Artificial Sequence
  Synthetic oligonucleotide
gggctgcacgagaggggtcgactagagtct

SEQ ID NO: 299445 - DNA, 29 bp, Artificial Sequence
  Synthetic oligonucleotide
aggttttgtaggaggagtgagtcgagtct

SEQ ID NO: 299446 - DNA, 30 bp, Artificial Sequence
  Synthetic oligonucleotide
ccgttgccattttgaccgatcgcggagtct

SEQ ID NO: 299447 - DNA, 30 bp, Artificial Sequence
  Synthetic oligonucleotide
taccaaaataacgcttgttgatctgagtct

SEQ ID NO: 299448 - DNA, 30 bp, Artificial Sequence
  Synthetic oligonucleotide
cttcagggagttaatataccatttgagtct

SEQ ID NO: 299449 - DNA, 30 bp, Artificial Sequence
  Synthetic oligonucleotide
tcaggctggcttggggcgaagtcatagtct

SEQ ID NO: 299450 - DNA, 30 bp, Artificial Sequence
  Synthetic oligonucleotide
acggactatctcgtacctgctaagtagtct

SEQ ID NO: 299451 - DNA, 30 bp, Artificial Sequence
  Synthetic oligonucleotide
ccttggagcaaaattgtattatgttagtct

SEQ ID NO: 299452 - DNA, 30 bp, Artificial Sequence
  Synthetic oligonucleotide
aaataggaatattttgcctcaccaacgtct

SEQ ID NO: 299453 - DNA, 30 bp, Artificial Sequence
  Synthetic oligonucleotide
cctcgtaaacttcctccacccttaacgtct

SEQ ID NO: 299454 - DNA, 30 bp, Artificial Sequence
  Synthetic oligonucleotide
gggaacaattacttcacgaatcccacgtct

SEQ ID NO: 299455 - DNA, 30 bp, Artificial Sequence
  Synthetic oligonucleotide
cgggtccgcctctatgacgaacggacgtct

SEQ ID NO: 299456 - DNA, 30 bp, Artificial Sequence
  Synthetic oligonucleotide
gaagggggtcaacgcatcgttcgaccgtct

SEQ ID NO: 299457 - DNA, 30 bp, Artificial Sequence
  Synthetic oligonucleotide
ctacggcttcggatttctaagggaccgtct

SEQ ID NO: 299458 - DNA, 30 bp, Artificial Sequence
  Synthetic oligonucleotide
gccgcatcgctctgtcgggagtccccgtct

SEQ ID NO: 299459 - DNA, 30 bp, Artificial Sequence
  Synthetic oligonucleotide
cttaaagacaacttgttcagaagtccgtct

SEQ ID NO: 299460 - DNA, 30 bp, Artificial Sequence
  Synthetic oligonucleotide
cgcgtggcagttcactgcggcgacgcgtct

SEQ ID NO: 299461 - DNA, 30 bp, Artificial Sequence
  Synthetic oligonucleotide
cagataaacaaggttatattatacgcgtct

SEQ ID NO: 299462 - DNA, 30 bp, Artificial Sequence
  Synthetic oligonucleotide
caaaccgcgtcggaaggcagtcaggcgtct

SEQ ID NO: 299463 - DNA, 30 bp, Artificial Sequence
  Synthetic oligonucleotide
ctaatgacgatcatttgggggatggcgtct

SEQ ID NO: 299464 - DNA, 30 bp, Artificial Sequence
  Synthetic oligonucleotide
ttcctttgcaaaggcaatatccttgcgtct

SEQ ID NO: 299465 - DNA, 30 bp, Artificial Sequence
  Synthetic oligonucleotide
ttagagataaccacaagcgtcgttgcgtct

SEQ ID NO: 299466 - DNA, 30 bp, Artificial Sequence
  Synthetic oligonucleotide
tgtagaactcgatagtctatcgaatcgtct

SEQ ID NO: 299467 - DNA, 30 bp, Artificial Sequence
  Synthetic oligonucleotide
agtttagatgaaatagggatattatcgtct

SEQ ID NO: 299468 - DNA, 30 bp, Artificial Sequence
  Synthetic oligonucleotide
tggagttgaagcactgcctagttctcgtct

SEQ ID NO: 299469 - DNA, 30 bp, Artificial Sequence
  Synthetic oligonucleotide
gcttcgtgtagccttaatcagtagtcgtct

SEQ ID NO: 299470 - DNA, 30 bp, Artificial Sequence
  Synthetic oligonucleotide
ctatagaactaaacaatcggaagaaggtct

SEQ ID NO: 299471 - DNA, 30 bp, Artificial Sequence
  Synthetic oligonucleotide
agatcactacaatttgatctacttaggtct

SEQ ID NO: 299472 - DNA, 30 bp, Artificial Sequence
  Synthetic oligonucleotide
attccatagtgaaacacgcgtcaacggtct

SEQ ID NO: 299473 - DNA, 30 bp, Artificial Sequence
  Synthetic oligonucleotide
cggaggggtgcgacatgggacacacggtct

SEQ ID NO: 299474 - DNA, 30 bp, Artificial Sequence
  Synthetic oligonucleotide
taatacatcgccgccggaggggcacggtct

SEQ ID NO: 299475 - DNA, 30 bp, Artificial Sequence
  Synthetic oligonucleotide
gtcgacaatcaattgtacggcacccggtct

SEQ ID NO: 299476 - DNA, 30 bp, Artificial Sequence
  Synthetic oligonucleotide
tgattcaggatagaaaaattactccggtct

SEQ ID NO: 299477 - DNA, 30 bp, Artificial Sequence
  Synthetic oligonucleotide
ggtgtgcgggcctgccttactcaagggtct

SEQ ID NO: 299478 - DNA, 31 bp, Artificial Sequence
  Synthetic oligonucleotide
aatacgaattatgtccaaagcggaagggtct

SEQ ID NO: 299479 - DNA, 30 bp, Artificial Sequence
  Synthetic oligonucleotide
atctgacaatatgactcataggacgggtct

SEQ ID NO: 299480 - DNA, 30 bp, Artificial Sequence
  Synthetic oligonucleotide
gtggtgaattacctgggtcaaaaatggtct

SEQ ID NO: 299481 - DNA, 30 bp, Artificial Sequence
  Synthetic oligonucleotide
agattacaattgggctgtaagtgctggtct

SEQ ID NO: 299482 - DNA, 30 bp, Artificial Sequence
  Synthetic oligonucleotide
catggttacattttgcagacaaggtggtct

SEQ ID NO: 299483 - DNA, 30 bp, Artificial Sequence
  Synthetic oligonucleotide
cagctagcggtaggagggaaatgttggtct

SEQ ID NO: 299484 - DNA, 30 bp, Artificial Sequence
  Synthetic oligonucleotide
tgttcatggagcgacccaaccatttggtct

SEQ ID NO: 299485 - DNA, 30 bp, Artificial Sequence
  Synthetic oligonucleotide
aaaactactaggagtgcggatccaatgtct

SEQ ID NO: 299486 - DNA, 30 bp, Artificial Sequence
  Synthetic oligonucleotide
gggggcgtcgttcattttgccaacatgtct

SEQ ID NO: 299487 - DNA, 30 bp, Artificial Sequence
  Synthetic oligonucleotide
acgtagcaaaccaaggcaaggagcatgtct

SEQ ID NO: 299488 - DNA, 30 bp, Artificial Sequence
  Synthetic oligonucleotide
gtcgtaatggtacttcgcgctcgcatgtct

SEQ ID NO: 299489 - DNA, 30 bp, Artificial Sequence
  Synthetic oligonucleotide
gttctgtgggcgtaaaggggcaagatgtct

SEQ ID NO: 299490 - DNA, 30 bp, Artificial Sequence
  Synthetic oligonucleotide
aatactgaaggggtaagataggggatgtct

SEQ ID NO: 299491 - DNA, 30 bp, Artificial Sequence
  Synthetic oligonucleotide
cagtgaggcctccgtggatccctactgtct

SEQ ID NO: 299492 - DNA, 30 bp, Artificial Sequence
  Synthetic oligonucleotide
ctgattggcaagtccaaatatctcctgtct

SEQ ID NO: 299493 - DNA, 30 bp, Artificial Sequence
  Synthetic oligonucleotide
agagtctgcactggacggtcccagctgtct

SEQ ID NO: 299494 - DNA, 30 bp, Artificial Sequence
  Synthetic oligonucleotide
aaaaaagggtcaaacaaggactcagtgtct

SEQ ID NO: 299495 - DNA, 30 bp, Artificial Sequence
  Synthetic oligonucleotide
tgcgggcttggataattgtccatagtgtct

SEQ ID NO: 299496 - DNA, 30 bp, Artificial Sequence
  Synthetic oligonucleotide
gcgtcagttgtaaagagggcaggggtgtct

SEQ ID NO: 299497 - DNA, 30 bp, Artificial Sequence
  Synthetic oligonucleotide
ggccaatccgacgcatgatgcatggtgtct

SEQ ID NO: 299498 - DNA, 30 bp, Artificial Sequence
  Synthetic oligonucleotide
aagcgggtaacactagggtcacccttgtct

SEQ ID NO: 299499 - DNA, 30 bp, Artificial Sequence
  Synthetic oligonucleotide
cgaacgggtaaaggctaccggctcttgtct

SEQ ID NO: 299500 - DNA, 30 bp, Artificial Sequence
  Synthetic oligonucleotide
gcttcgggttggcatgcagtttcgttgtct

SEQ ID NO: 299501 - DNA, 30 bp, Artificial Sequence
  Synthetic oligonucleotide
taggaaagctctccctaatgggtgttgtct

SEQ ID NO: 299502 - DNA, 30 bp, Artificial Sequence
  Synthetic oligonucleotide
catcgtagcgtaaccgcaataggtttgtct

SEQ ID NO: 299503 - DNA, 30 bp, Artificial Sequence
  Synthetic oligonucleotide
aaaacggacgccagtctttcctgtttgtct

SEQ ID NO: 299504 - DNA, 30 bp, Artificial Sequence
  Synthetic oligonucleotide
tctactcccgtaaaataggacggaaattct

SEQ ID NO: 299505 - DNA, 30 bp, Artificial Sequence
  Synthetic oligonucleotide
ggaagactccattatctcctgataaattct

SEQ ID NO: 299506 - DNA, 30 bp, Artificial Sequence
  Synthetic oligonucleotide
tccataattagcgcgcaccatcgcaattct

SEQ ID NO: 299507 - DNA, 30 bp, Artificial Sequence
  Synthetic oligonucleotide
ctcccagcatggagcacaagttagaattct

SEQ ID NO: 299508 - DNA, 30 bp, Artificial Sequence
  Synthetic oligonucleotide
tttttgcggtagatcggaatcaataattct

SEQ ID NO: 299509 - DNA, 30 bp, Artificial Sequence
  Synthetic oligonucleotide
tcgtatggaccttattacataggtaattct

SEQ ID NO: 299510 - DNA, 30 bp, Artificial Sequence
  Synthetic oligonucleotide
gggatcgtaaaagccgtaaatccgcattct

SEQ ID NO: 299511 - DNA, 30 bp, Artificial Sequence
  Synthetic oligonucleotide
aaaaaaacgggactagtacgtttagattct

SEQ ID NO: 299512 - DNA, 30 bp, Artificial Sequence
  Synthetic oligonucleotide
ataaatcacagcgacatggtgcaggattct

SEQ ID NO: 299513 - DNA, 30 bp, Artificial Sequence
  Synthetic oligonucleotide
gactcgagagtcaggacaggttctgattct

SEQ ID NO: 299514 - DNA, 30 bp, Artificial Sequence
  Synthetic oligonucleotide
atacgggtcgcgtgtgaatgctaatattct

SEQ ID NO: 299515 - DNA, 30 bp, Artificial Sequence
  Synthetic oligonucleotide
gccattggaccgaccatggtatcatattct

SEQ ID NO: 299516 - DNA, 29 bp, Artificial Sequence
  Synthetic oligonucleotide
cgcaacctttagtggaatcaaactattct

SEQ ID NO: 299517 - DNA, 30 bp, Artificial Sequence
  Synthetic oligonucleotide
tctactggggtggaatgtgaggaaacttct

SEQ ID NO: 299518 - DNA, 30 bp, Artificial Sequence
  Synthetic oligonucleotide
tcaagaatagaggtccatacagcaacttct

SEQ ID NO: 299519 - DNA, 30 bp, Artificial Sequence
  Synthetic oligonucleotide
taccaaatcccatatggctccttaacttct

SEQ ID NO: 299520 - DNA, 30 bp, Artificial Sequence
  Synthetic oligonucleotide
agtgaccgctttggagttaggggcacttct

SEQ ID NO: 299521 - DNA, 30 bp, Artificial Sequence
  Synthetic oligonucleotide
cgttactatggaatatgggtacgtacttct

SEQ ID NO: 299522 - DNA, 30 bp, Artificial Sequence
  Synthetic oligonucleotide
aacttctgactgtttgggcctcgtacttct

SEQ ID NO: 299523 - DNA, 30 bp, Artificial Sequence
  Synthetic oligonucleotide
gtacacctcctacctcgtctcacaccttct

SEQ ID NO: 299524 - DNA, 30 bp, Artificial Sequence
  Synthetic oligonucleotide
agacatgtattcaggcatgaatcaccttct

SEQ ID NO: 299525 - DNA, 30 bp, Artificial Sequence
  Synthetic oligonucleotide
cagatgtctaggccttgccctaatccttct

SEQ ID NO: 299526 - DNA, 30 bp, Artificial Sequence
  Synthetic oligonucleotide
gctcttaggtcggagaactcgagtccttct

SEQ ID NO: 299527 - DNA, 30 bp, Artificial Sequence
  Synthetic oligonucleotide
ataacttaaattagaaactttaacgcttct

SEQ ID NO: 299528 - DNA, 30 bp, Artificial Sequence
  Synthetic oligonucleotide
atttgggaattctcacatttactggcttct

SEQ ID NO: 299529 - DNA, 30 bp, Artificial Sequence
  Synthetic oligonucleotide
gagaatcctatgcccggccggcgtgcttct

SEQ ID NO: 299530 - DNA, 30 bp, Artificial Sequence
  Synthetic oligonucleotide
tactaagaattttagtattggaaatcttct

SEQ ID NO: 299531 - DNA, 30 bp, Artificial Sequence
  Synthetic oligonucleotide
gatctctgaggtcaaacacgcccttcttct

SEQ ID NO: 299532 - DNA, 30 bp, Artificial Sequence
  Synthetic oligonucleotide
ggaaagcattactatatgaaagaaagttct

SEQ ID NO: 299533 - DNA, 30 bp, Artificial Sequence
  Synthetic oligonucleotide
gcggtattgctgtcaaagagaccaagttct

SEQ ID NO: 299534 - DNA, 30 bp, Artificial Sequence
  Synthetic oligonucleotide
atccctaagcgaattactaggataagttct

SEQ ID NO: 299535 - DNA, 30 bp, Artificial Sequence
  Synthetic oligonucleotide
gctttcgtaaggtgcgcaattcacagttct

SEQ ID NO: 299536 - DNA, 30 bp, Artificial Sequence
  Synthetic oligonucleotide
atacgccttcatcaacctttgactagttct

SEQ ID NO: 299537 - DNA, 30 bp, Artificial Sequence
  Synthetic oligonucleotide
atgttccggtaatgtctgtatagtagttct

SEQ ID NO: 299538 - DNA, 30 bp, Artificial Sequence
  Synthetic oligonucleotide
tatagaccaaatggccctgaacgtagttct

SEQ ID NO: 299539 - DNA, 30 bp, Artificial Sequence
  Synthetic oligonucleotide
cattcatacacctctaagcgtatacgttct

SEQ ID NO: 299540 - DNA, 30 bp, Artificial Sequence
  Synthetic oligonucleotide
gtattggggaggggtgcacggctgcgttct

SEQ ID NO: 299541 - DNA, 30 bp, Artificial Sequence
  Synthetic oligonucleotide
cggatcgctttgggtcggaaagaaggttct

SEQ ID NO: 299542 - DNA, 30 bp, Artificial Sequence
  Synthetic oligonucleotide
acacgcggttagagattgtctgcgggttct

SEQ ID NO: 299543 - DNA, 30 bp, Artificial Sequence
  Synthetic oligonucleotide
ccttttcggagattgcaaagggatggttct

SEQ ID NO: 299544 - DNA, 30 bp, Artificial Sequence
  Synthetic oligonucleotide
tagacttagtgtcgtgtcccctttggttct

SEQ ID NO: 299545 - DNA, 30 bp, Artificial Sequence
  Synthetic oligonucleotide
atgtcccgtaatattgaacattaatgttct

SEQ ID NO: 299546 - DNA, 30 bp, Artificial Sequence
  Synthetic oligonucleotide
actattcccgtacgaaccggtctatgttct

SEQ ID NO: 299547 - DNA, 30 bp, Artificial Sequence
  Synthetic oligonucleotide
cggttaattttggatattgaggagtgttct

SEQ ID NO: 299548 - DNA, 30 bp, Artificial Sequence
  Synthetic oligonucleotide
tttgcgacatggctaaaccagtatatttct

SEQ ID NO: 299549 - DNA, 30 bp, Artificial Sequence
  Synthetic oligonucleotide
taatcagggcaactgaaattgtgtatttct

SEQ ID NO: 299550 - DNA, 30 bp, Artificial Sequence
  Synthetic oligonucleotide
tcctccgggacggttaatagtctcctttct

SEQ ID NO: 299551 - DNA, 30 bp, Artificial Sequence
  Synthetic oligonucleotide
gcgataacagccaaggtaatagcgctttct

SEQ ID NO: 299552 - DNA, 30 bp, Artificial Sequence
  Synthetic oligonucleotide
tcggactaattatagcggaagactctttct

SEQ ID NO: 299553 - DNA, 30 bp, Artificial Sequence
  Synthetic oligonucleotide
acataccggtctagagttcgatttctttct

SEQ ID NO: 299554 - DNA, 30 bp, Artificial Sequence
  Synthetic oligonucleotide
ctggactggctaatgcgaaagtttctttct

SEQ ID NO: 299555 - DNA, 30 bp, Artificial Sequence
  Synthetic oligonucleotide
caattgaacagactcatcaagcgagtttct

SEQ ID NO: 299556 - DNA, 30 bp, Artificial Sequence
  Synthetic oligonucleotide
tttccaaggctatataaaccatgcgtttct

SEQ ID NO: 299557 - DNA, 30 bp, Artificial Sequence
  Synthetic oligonucleotide
gctcaacgtaaaagcggcgggcaggtttct

SEQ ID NO: 299558 - DNA, 30 bp, Artificial Sequence
  Synthetic oligonucleotide
tgagtgatatggtagagttacgaggtttct

SEQ ID NO: 299559 - DNA, 30 bp, Artificial Sequence
  Synthetic oligonucleotide
ctggaagggccagggccaactccggtttct

SEQ ID NO: 299560 - DNA, 30 bp, Artificial Sequence
  Synthetic oligonucleotide
gcatacggaatacgtcacacatgggtttct

SEQ ID NO: 299561 - DNA, 30 bp, Artificial Sequence
  Synthetic oligonucleotide
gtacttcagagctacgaaaacatggtttct

SEQ ID NO: 299562 - DNA, 30 bp, Artificial Sequence
  Synthetic oligonucleotide
caactaaagggatcgtaatagcctgtttct

SEQ ID NO: 299563 - DNA, 30 bp, Artificial Sequence
  Synthetic oligonucleotide
aggctttgggttgtctctagaaccttttct

SEQ ID NO: 299564 - DNA, 30 bp, Artificial Sequence
  Synthetic oligonucleotide
ttcggccgtgatcaacatacgaccttttct

SEQ ID NO: 299565 - DNA, 30 bp, Artificial Sequence
  Synthetic oligonucleotide
gaaatggccagtgggggctaaggcttttct

SEQ ID NO: 299566 - DNA, 30 bp, Artificial Sequence
  Synthetic oligonucleotide
cacgcgacgatattagttaccgtcttttct

SEQ ID NO: 299567 - DNA, 30 bp, Artificial Sequence
  Synthetic oligonucleotide
ccggcgttgcagagctaccattgtttttct

SEQ ID NO: 299568 - DNA, 30 bp, Artificial Sequence
  Synthetic oligonucleotide
attgtgcaagataagcccgggataaaaagt

SEQ ID NO: 299569 - DNA, 30 bp, Artificial Sequence
  Synthetic oligonucleotide
tgggcaagtaggtcaaaagcgcacaaaagt

SEQ ID NO: 299570 - DNA, 30 bp, Artificial Sequence
  Synthetic oligonucleotide
gcgcggccttaactgcgagtttccaaaagt

SEQ ID NO: 299571 - DNA, 30 bp, Artificial Sequence
  Synthetic oligonucleotide
tgtcaggctccgtatcctccaagcaaaagt

SEQ ID NO: 299572 - DNA, 30 bp, Artificial Sequence
  Synthetic oligonucleotide
ttaataacagagatcaggagatagaaaagt

SEQ ID NO: 299573 - DNA, 30 bp, Artificial Sequence
  Synthetic oligonucleotide
ctggttgggaaaactagcttaccccaaagt

SEQ ID NO: 299574 - DNA, 30 bp, Artificial Sequence
  Synthetic oligonucleotide
ggggcatcacgggctggcttacggcaaagt

SEQ ID NO: 299575 - DNA, 30 bp, Artificial Sequence
  Synthetic oligonucleotide
gatcaggtgctcatcaccagttgtcaaagt

SEQ ID NO: 299576 - DNA, 30 bp, Artificial Sequence
  Synthetic oligonucleotide
gcatcagaatattcgaagtaacttcaaagt

SEQ ID NO: 299577 - DNA, 30 bp, Artificial Sequence
  Synthetic oligonucleotide
aagcaggaaaggtcatgacatcttcaaagt

SEQ ID NO: 299578 - DNA, 30 bp, Artificial Sequence
  Synthetic oligonucleotide
gaggaaagaacttccacgcgccacgaaagt

SEQ ID NO: 299579 - DNA, 30 bp, Artificial Sequence
  Synthetic oligonucleotide
ggtgctggagggcgagttctaggcgaaagt

SEQ ID NO: 299580 - DNA, 30 bp, Artificial Sequence
  Synthetic oligonucleotide
cgcccggatattgattaagccggggaaagt

SEQ ID NO: 299581 - DNA, 29 bp, Artificial Sequence
  Synthetic oligonucleotide
acgaccaatgctcagacgccgctgaaagt

SEQ ID NO: 299582 - DNA, 30 bp, Artificial Sequence
  Synthetic oligonucleotide
tagtgttgcgagacgggggcaaagtaaagt

SEQ ID NO: 299583 - DNA, 30 bp, Artificial Sequence
  Synthetic oligonucleotide
actggagagtcatggctgcaagcgtaaagt

SEQ ID NO: 299584 - DNA, 30 bp, Artificial Sequence
  Synthetic oligonucleotide
aatcagaggaacgaggcacacatgtaaagt

SEQ ID NO: 299585 - DNA, 30 bp, Artificial Sequence
  Synthetic oligonucleotide
cttcgaatccgagtaacgggccattaaagt

SEQ ID NO: 299586 - DNA, 30 bp, Artificial Sequence
  Synthetic oligonucleotide
atacggttacagtggctgcccgcaacaagt

SEQ ID NO: 299587 - DNA, 30 bp, Artificial Sequence
  Synthetic oligonucleotide
actgggcaagtcgaggtctattccacaagt

SEQ ID NO: 299588 - DNA, 30 bp, Artificial Sequence
  Synthetic oligonucleotide
taccatgtgacattaccgggttccacaagt

SEQ ID NO: 299589 - DNA, 30 bp, Artificial Sequence
  Synthetic oligonucleotide
cgttcaggtattcccctgggggacccaagt

SEQ ID NO: 299590 - DNA, 30 bp, Artificial Sequence
  Synthetic oligonucleotide
tgtaggctcatgcacctttaatacccaagt

SEQ ID NO: 299591 - DNA, 30 bp, Artificial Sequence
  Synthetic oligonucleotide
cgggggtggaccatatttgatcagccaagt

SEQ ID NO: 299592 - DNA, 30 bp, Artificial Sequence
  Synthetic oligonucleotide
aatgaccaacgggtcctgtttgcgccaagt

SEQ ID NO: 299593 - DNA, 30 bp, Artificial Sequence
  Synthetic oligonucleotide
atcgtttattgacaacccactgggccaagt

SEQ ID NO: 299594 - DNA, 30 bp, Artificial Sequence
  Synthetic oligonucleotide
tatcctgaaacgcggaatctgatgccaagt

SEQ ID NO: 299595 - DNA, 30 bp, Artificial Sequence
  Synthetic oligonucleotide
catgccatggtctagtgaccgaatccaagt

SEQ ID NO: 299596 - DNA, 30 bp, Artificial Sequence
  Synthetic oligonucleotide
ggggcattggatcacgccctggatccaagt

SEQ ID NO: 299597 - DNA, 30 bp, Artificial Sequence
  Synthetic oligonucleotide
tcgagccgtaaaacactgagttttccaagt

SEQ ID NO: 299598 - DNA, 30 bp, Artificial Sequence
  Synthetic oligonucleotide
agcgtattaacgaagttgttcggggcaagt

SEQ ID NO: 299599 - DNA, 30 bp, Artificial Sequence
  Synthetic oligonucleotide
gcctaacactcccgccaacaaggatcaagt

SEQ ID NO: 299600 - DNA, 30 bp, Artificial Sequence
  Synthetic oligonucleotide
agagagggacgcaatagcgctggatcaagt

SEQ ID NO: 299601 - DNA, 30 bp, Artificial Sequence
  Synthetic oligonucleotide
ttcgtggggccacctatgaagatctcaagt

SEQ ID NO: 299602 - DNA, 30 bp, Artificial Sequence
  Synthetic oligonucleotide
aagcaccagttcgaatcagcgttctcaagt

SEQ ID NO: 299603 - DNA, 30 bp, Artificial Sequence
  Synthetic oligonucleotide
aggacttgagaatcaatccgattgtcaagt

SEQ ID NO: 299604 - DNA, 30 bp, Artificial Sequence
  Synthetic oligonucleotide
tccaacaccgcaaccaattgtttgtcaagt

SEQ ID NO: 299605 - DNA, 30 bp, Artificial Sequence
  Synthetic oligonucleotide
gtaagcaggcgctgttgaccatgttcaagt

SEQ ID NO: 299606 - DNA, 30 bp, Artificial Sequence
  Synthetic oligonucleotide
aacgatttcccatgttggtggcaaagaagt

SEQ ID NO: 299607 - DNA, 30 bp, Artificial Sequence
  Synthetic oligonucleotide
tagcaaaccctaatggacactccaagaagt

SEQ ID NO: 299608 - DNA, 30 bp, Artificial Sequence
  Synthetic oligonucleotide
atacttacagaagatgttatcgccagaagt

SEQ ID NO: 299609 - DNA, 30 bp, Artificial Sequence
  Synthetic oligonucleotide
tttgactgatggcaaattaaagtcagaagt

SEQ ID NO: 299610 - DNA, 30 bp, Artificial Sequence
  Synthetic oligonucleotide
agtttcgcactagacagatcacggagaagt

SEQ ID NO: 299611 - DNA, 30 bp, Artificial Sequence
  Synthetic oligonucleotide
agacgttaaggacactctgctgggagaagt

SEQ ID NO: 299612 - DNA, 30 bp, Artificial Sequence
  Synthetic oligonucleotide
tgccaattacagggtatgatcatgagaagt

SEQ ID NO: 299613 - DNA, 30 bp, Artificial Sequence
  Synthetic oligonucleotide
aacaacagcccgtatgtatttggtagaagt

SEQ ID NO: 299614 - DNA, 30 bp, Artificial Sequence
  Synthetic oligonucleotide
gccactcgtgaggggactgaagttagaagt

SEQ ID NO: 299615 - DNA, 30 bp, Artificial Sequence
  Synthetic oligonucleotide
atgtattggacccctcacagctttagaagt

SEQ ID NO: 299616 - DNA, 30 bp, Artificial Sequence
  Synthetic oligonucleotide
cgtccacaatatagtacaagcctacgaagt

SEQ ID NO: 299617 - DNA, 30 bp, Artificial Sequence
  Synthetic oligonucleotide
cattaattgctaccaaaaaatgcccgaagt

SEQ ID NO: 299618 - DNA, 30 bp, Artificial Sequence
  Synthetic oligonucleotide
tgaaaccactttaagggttcgacgcgaagt

SEQ ID NO: 299619 - DNA, 30 bp, Artificial Sequence
  Synthetic oligonucleotide
cggcactccgattggattatgaggcgaagt

SEQ ID NO: 299620 - DNA, 30 bp, Artificial Sequence
  Synthetic oligonucleotide
atattgtcacaaaactccccatggcgaagt

SEQ ID NO: 299621 - DNA, 30 bp, Artificial Sequence
  Synthetic oligonucleotide
ttctacttttgtgaatggtcgatgcgaagt

SEQ ID NO: 299622 - DNA, 30 bp, Artificial Sequence
  Synthetic oligonucleotide
caaacttgcggtaaccttgggatgcgaagt

SEQ ID NO: 299623 - DNA, 30 bp, Artificial Sequence
  Synthetic oligonucleotide
aggctgataaccatcagatcccgtcgaagt

SEQ ID NO: 299624 - DNA, 30 bp, Artificial Sequence
  Synthetic oligonucleotide
gggtactactgcctcgaaaggtaaggaagt

SEQ ID NO: 299625 - DNA, 30 bp, Artificial Sequence
  Synthetic oligonucleotide
gtgagcataccttgcaatctgacaggaagt

SEQ ID NO: 299626 - DNA, 30 bp, Artificial Sequence
  Synthetic oligonucleotide
gcatcccatagacggagccagtacggaagt

SEQ ID NO: 299627 - DNA, 30 bp, Artificial Sequence
  Synthetic oligonucleotide
taatatgatgggttgttcccgagatgaagt

SEQ ID NO: 299628 - DNA, 30 bp, Artificial Sequence
  Synthetic oligonucleotide
tgtcctttgcagtctgagggatactgaagt

SEQ ID NO: 299629 - DNA, 30 bp, Artificial Sequence
  Synthetic oligonucleotide
catttcatccggggctgcatagcctgaagt

SEQ ID NO: 299630 - DNA, 30 bp, Artificial Sequence
  Synthetic oligonucleotide
gtctgaaaggcccattcgcacggctgaagt

SEQ ID NO: 299631 - DNA, 30 bp, Artificial Sequence
  Synthetic oligonucleotide
gtttcgtcggaaaataacttagcgtgaagt

SEQ ID NO: 299632 - DNA, 30 bp, Artificial Sequence
  Synthetic oligonucleotide
caactacacaaaactaggacacaaataagt

SEQ ID NO: 299633 - DNA, 30 bp, Artificial Sequence
  Synthetic oligonucleotide
aaactttcacggggacctgaaatcataagt

SEQ ID NO: 299634 - DNA, 30 bp, Artificial Sequence
  Synthetic oligonucleotide
ggctggcctgaccaatgactagtcataagt

SEQ ID NO: 299635 - DNA, 30 bp, Artificial Sequence
  Synthetic oligonucleotide
actgcggttttcagaatgggtgagataagt

SEQ ID NO: 299636 - DNA, 30 bp, Artificial Sequence
  Synthetic oligonucleotide
cccggctaaacgtaacttctatcgataagt

SEQ ID NO: 299637 - DNA, 30 bp, Artificial Sequence
  Synthetic oligonucleotide
gtagtggaccgttaccgtgctaatataagt

SEQ ID NO: 299638 - DNA, 30 bp, Artificial Sequence
  Synthetic oligonucleotide
tccccccaccacaggattaattctataagt

SEQ ID NO: 299639 - DNA, 30 bp, Artificial Sequence
  Synthetic oligonucleotide
ggtatgggcctaggtgtaccgtgtctaagt

SEQ ID NO: 299640 - DNA, 30 bp, Artificial Sequence
  Synthetic oligonucleotide
aagacttctatctagctcgccgaagtaagt

SEQ ID NO: 299641 - DNA, 30 bp, Artificial Sequence
  Synthetic oligonucleotide
ggtcgcaaaacgaattgtttaacagtaagt

SEQ ID NO: 299642 - DNA, 30 bp, Artificial Sequence
  Synthetic oligonucleotide
atgccatccggggtcaataacggagtaagt

SEQ ID NO: 299643 - DNA, 30 bp, Artificial Sequence
  Synthetic oligonucleotide
gtaggggttccaactccactgctagtaagt

SEQ ID NO: 299644 - DNA, 30 bp, Artificial Sequence
  Synthetic oligonucleotide
tgtagaagcctgcccgtcaataacgtaagt

SEQ ID NO: 299645 - DNA, 30 bp, Artificial Sequence
  Synthetic oligonucleotide
gcgcatcgcacaacaagtgcgatcgtaagt

SEQ ID NO: 299646 - DNA, 30 bp, Artificial Sequence
  Synthetic oligonucleotide
agctgttcacgatcccctcgtatcgtaagt

SEQ ID NO: 299647 - DNA, 30 bp, Artificial Sequence
  Synthetic oligonucleotide
gcgctactctgtttgggatatcaggtaagt

SEQ ID NO: 299648 - DNA, 30 bp, Artificial Sequence
  Synthetic oligonucleotide
ttacgcaaacgttattttttaccggtaagt

SEQ ID NO: 299649 - DNA, 30 bp, Artificial Sequence
  Synthetic oligonucleotide
aggtttggacgcgttaatggttctgtaagt

SEQ ID NO: 299650 - DNA, 30 bp, Artificial Sequence
  Synthetic oligonucleotide
tggcaggaatatgtttggtggagattaagt

SEQ ID NO: 299651 - DNA, 30 bp, Artificial Sequence
  Synthetic oligonucleotide
gcagccgtctgtctatgcagacgattaagt

SEQ ID NO: 299652 - DNA, 30 bp, Artificial Sequence
  Synthetic oligonucleotide
tggttttcgggatatagatggatcttaagt

SEQ ID NO: 299653 - DNA, 30 bp, Artificial Sequence
  Synthetic oligonucleotide
acctttacatctaaacgcgtggtcttaagt

SEQ ID NO: 299654 - DNA, 30 bp, Artificial Sequence
  Synthetic oligonucleotide
acgtggagtgtcagtagtctagagttaagt

SEQ ID NO: 299655 - DNA, 30 bp, Artificial Sequence
  Synthetic oligonucleotide
aactcaagccctgtactctcaaatttaagt

SEQ ID NO: 299656 - DNA, 30 bp, Artificial Sequence
  Synthetic oligonucleotide
cggggtactccataatgtgcagaaaacagt

SEQ ID NO: 299657 - DNA, 30 bp, Artificial Sequence
  Synthetic oligonucleotide
actcgcaaactagtaagtgaattcaacagt

SEQ ID NO: 299658 - DNA, 30 bp, Artificial Sequence
  Synthetic oligonucleotide
tacaactgtgtacaatacaggatacacagt

SEQ ID NO: 299659 - DNA, 30 bp, Artificial Sequence
  Synthetic oligonucleotide
tgtgacagtgtcgtactttctctccacagt

SEQ ID NO: 299660 - DNA, 30 bp, Artificial Sequence
  Synthetic oligonucleotide
tagcgggggtgcaggcacggatggcacagt

SEQ ID NO: 299661 - DNA, 30 bp, Artificial Sequence
  Synthetic oligonucleotide
tccacggcggttacgggataggtgcacagt

SEQ ID NO: 299662 - DNA, 30 bp, Artificial Sequence
  Synthetic oligonucleotide
caaacaatcgaccgaaacgcttatcacagt

SEQ ID NO: 299663 - DNA, 30 bp, Artificial Sequence
  Synthetic oligonucleotide
gccgggtaggcctacaggtgttttcacagt

SEQ ID NO: 299664 - DNA, 30 bp, Artificial Sequence
  Synthetic oligonucleotide
taggcactgccctcgtgatcttcagacagt

SEQ ID NO: 299665 - DNA, 30 bp, Artificial Sequence
  Synthetic oligonucleotide
gtcccgggacaaccgtcaacagacgacagt

SEQ ID NO: 299666 - DNA, 30 bp, Artificial Sequence
  Synthetic oligonucleotide
ttcaaacggtgtcattcgctagacgacagt

SEQ ID NO: 299667 - DNA, 30 bp, Artificial Sequence
  Synthetic oligonucleotide
acgatgcaggaacctatgaaataggacagt

SEQ ID NO: 299668 - DNA, 30 bp, Artificial Sequence
  Synthetic oligonucleotide
gtgatattaggggatactgtatatgacagt

SEQ ID NO: 299669 - DNA, 30 bp, Artificial Sequence
  Synthetic oligonucleotide
tggcgatgccaccttgcactcagtgacagt

SEQ ID NO: 299670 - DNA, 30 bp, Artificial Sequence
  Synthetic oligonucleotide
agttatggtagcctataatacacgtacagt

SEQ ID NO: 299671 - DNA, 30 bp, Artificial Sequence
  Synthetic oligonucleotide
gctggcaatccgtaaaacgcaatgtacagt

SEQ ID NO: 299672 - DNA, 30 bp, Artificial Sequence
  Synthetic oligonucleotide
gcatacggcataacgcaccatccttacagt

SEQ ID NO: 299673 - DNA, 30 bp, Artificial Sequence
  Synthetic oligonucleotide
ggtcttgagaccgaggaattcagttacagt

SEQ ID NO: 299674 - DNA, 30 bp, Artificial Sequence
  Synthetic oligonucleotide
ggaccacaatattcagtgggtttttacagt

SEQ ID NO: 299675 - DNA, 30 bp, Artificial Sequence
  Synthetic oligonucleotide
tgcttggttaaagcgagagttttttacagt

SEQ ID NO: 299676 - DNA, 30 bp, Artificial Sequence
  Synthetic oligonucleotide
cggttctgtactaacttcgtcggaaccagt

SEQ ID NO: 299677 - DNA, 30 bp, Artificial Sequence
  Synthetic oligonucleotide
tgtagatcgtcgcgccaagacctaaccagt

SEQ ID NO: 299678 - DNA, 30 bp, Artificial Sequence
  Synthetic oligonucleotide
gagtcgtctgataggggtgagggcaccagt

SEQ ID NO: 299679 - DNA, 30 bp, Artificial Sequence
  Synthetic oligonucleotide
cggttaaatcgcctagactgatgcaccagt

SEQ ID NO: 299680 - DNA, 30 bp, Artificial Sequence
  Synthetic oligonucleotide
agtcgaagtttggccgggccgacgaccagt

SEQ ID NO: 299681 - DNA, 30 bp, Artificial Sequence
  Synthetic oligonucleotide
ttacttggggtagcctcatggctgaccagt

SEQ ID NO: 299682 - DNA, 30 bp, Artificial Sequence
  Synthetic oligonucleotide
ctagcgaggaggtagcccctcgctaccagt

SEQ ID NO: 299683 - DNA, 30 bp, Artificial Sequence
  Synthetic oligonucleotide
gtcaactttgaaaagcttcgaggacccagt

SEQ ID NO: 299684 - DNA, 30 bp, Artificial Sequence
  Synthetic oligonucleotide
gtgacaccaatatgcgcaactggacccagt

SEQ ID NO: 299685 - DNA, 30 bp, Artificial Sequence
  Synthetic oligonucleotide
tgtgcttctgtgtggtgcaaattacccagt

SEQ ID NO: 299686 - DNA, 30 bp, Artificial Sequence
  Synthetic oligonucleotide
cctctgtccattatgtgtggaacgcccagt

SEQ ID NO: 299687 - DNA, 30 bp, Artificial Sequence
  Synthetic oligonucleotide
gctctattgtacgaagttagagcgcccagt

SEQ ID NO: 299688 - DNA, 30 bp, Artificial Sequence
  Synthetic oligonucleotide
ggccttgctgacttaacaccactcgccagt

SEQ ID NO: 299689 - DNA, 30 bp, Artificial Sequence
  Synthetic oligonucleotide
tccaaaaccggcgtggagccgctcgccagt

SEQ ID NO: 299690 - DNA, 30 bp, Artificial Sequence
  Synthetic oligonucleotide
gaagcagggtcacctccggtgggggccagt

SEQ ID NO: 299691 - DNA, 30 bp, Artificial Sequence
  Synthetic oligonucleotide
cgcaggatagacggtagcctacatgccagt

SEQ ID NO: 299692 - DNA, 30 bp, Artificial Sequence
  Synthetic oligonucleotide
aacgaaggtcggcgcttcgacggtgccagt

SEQ ID NO: 299693 - DNA, 30 bp, Artificial Sequence
  Synthetic oligonucleotide
ttcaacaggccgggggctggcgttgccagt

SEQ ID NO: 299694 - DNA, 30 bp, Artificial Sequence
  Synthetic oligonucleotide
cgctgggcaaaactcaataagtttgccagt

SEQ ID NO: 299695 - DNA, 30 bp, Artificial Sequence
  Synthetic oligonucleotide
ggattaccaggcagtcgtaatgcatccagt

SEQ ID NO: 299696 - DNA, 30 bp, Artificial Sequence
  Synthetic oligonucleotide
ggaagactagatccggtttctacgtccagt

SEQ ID NO: 299697 - DNA, 30 bp, Artificial Sequence
  Synthetic oligonucleotide
atgagcttggagcaaggagactcaagcagt

SEQ ID NO: 299698 - DNA, 30 bp, Artificial Sequence
  Synthetic oligonucleotide
aaaagtcgactatgttactcacgaagcagt

SEQ ID NO: 299699 - DNA, 30 bp, Artificial Sequence
  Synthetic oligonucleotide
accccacaataagctcgctcaataagcagt

SEQ ID NO: 299700 - DNA, 30 bp, Artificial Sequence
  Synthetic oligonucleotide
taagactcttggcttcatgcgttaagcagt

SEQ ID NO: 299701 - DNA, 30 bp, Artificial Sequence
  Synthetic oligonucleotide
gtcgcttcaatcctacgtggtcacagcagt

SEQ ID NO: 299702 - DNA, 30 bp, Artificial Sequence
  Synthetic oligonucleotide
gatcaaggattaataccgggccagagcagt

SEQ ID NO: 299703 - DNA, 30 bp, Artificial Sequence
  Synthetic oligonucleotide
gctagggggtgctcctgtcactagagcagt

SEQ ID NO: 299704 - DNA, 30 bp, Artificial Sequence
  Synthetic oligonucleotide
cacggacgaggttattgggtctggagcagt

SEQ ID NO: 299705 - DNA, 30 bp, Artificial Sequence
  Synthetic oligonucleotide
agagcccagagtgccgtcatccatagcagt

SEQ ID NO: 299706 - DNA, 30 bp, Artificial Sequence
  Synthetic oligonucleotide
atcgcatgaagcagccagaattgacgcagt

SEQ ID NO: 299707 - DNA, 30 bp, Artificial Sequence
  Synthetic oligonucleotide
gggaaaagtaacatatctgattaccgcagt

SEQ ID NO: 299708 - DNA, 30 bp, Artificial Sequence
  Synthetic oligonucleotide
gtttaatagttacaccgtcccgagcgcagt

SEQ ID NO: 299709 - DNA, 30 bp, Artificial Sequence
  Synthetic oligonucleotide
ataggtcgtaaactttgtccttagcgcagt

SEQ ID NO: 299710 - DNA, 30 bp, Artificial Sequence
  Synthetic oligonucleotide
gttgctttcaaacgaaacccgtcgcgcagt

SEQ ID NO: 299711 - DNA, 30 bp, Artificial Sequence
  Synthetic oligonucleotide
ggaacaagttaagttaccaccgctcgcagt

SEQ ID NO: 299712 - DNA, 30 bp, Artificial Sequence
  Synthetic oligonucleotide
catcttgccatccgtgaccccgaaggcagt

SEQ ID NO: 299713 - DNA, 30 bp, Artificial Sequence
  Synthetic oligonucleotide
acagcgtcttttgctccatcgcacggcagt

SEQ ID NO: 299714 - DNA, 30 bp, Artificial Sequence
  Synthetic oligonucleotide
aagtcaggatttaagtgtagttacggcagt

SEQ ID NO: 299715 - DNA, 30 bp, Artificial Sequence
  Synthetic oligonucleotide
ctgtatgtcacattctttattgccggcagt

SEQ ID NO: 299716 - DNA, 30 bp, Artificial Sequence
  Synthetic oligonucleotide
tgtagattcgtcaactattttgagggcagt

SEQ ID NO: 299717 - DNA, 30 bp, Artificial Sequence
  Synthetic oligonucleotide
cgtacgccgaaattgttatgagggggcagt

SEQ ID NO: 299718 - DNA, 31 bp, Artificial Sequence
  Synthetic oligonucleotide
ggtatctttggacacttgattatatggcagt

SEQ ID NO: 299719 - DNA, 30 bp, Artificial Sequence
  Synthetic oligonucleotide
cgactggatttgtttaatccccactgcagt

SEQ ID NO: 299720 - DNA, 30 bp, Artificial Sequence
  Synthetic oligonucleotide
agcctacggacatataggtcgtactgcagt

SEQ ID NO: 299721 - DNA, 30 bp, Artificial Sequence
  Synthetic oligonucleotide
acagggatagaactggtgggttcctgcagt

SEQ ID NO: 299722 - DNA, 30 bp, Artificial Sequence
  Synthetic oligonucleotide
agagaatacgtgaacgtcgttgtctgcagt

SEQ ID NO: 299723 - DNA, 30 bp, Artificial Sequence
  Synthetic oligonucleotide
ctatcgtggtctcgttacaggtggtgcagt

SEQ ID NO: 299724 - DNA, 30 bp, Artificial Sequence
  Synthetic oligonucleotide
tgcctcagtaaagggcaaaagctaatcagt

SEQ ID NO: 299725 - DNA, 30 bp, Artificial Sequence
  Synthetic oligonucleotide
gtcaaacactgaatattatcgctaatcagt

SEQ ID NO: 299726 - DNA, 30 bp, Artificial Sequence
  Synthetic oligonucleotide
attgtcggaactctgaaaaggttaatcagt

SEQ ID NO: 299727 - DNA, 30 bp, Artificial Sequence
  Synthetic oligonucleotide
tcaaacgggtccgagcaagggcccatcagt

SEQ ID NO: 299728 - DNA, 30 bp, Artificial Sequence
  Synthetic oligonucleotide
tttccgcttgtcgtaaggatacagatcagt

SEQ ID NO: 299729 - DNA, 30 bp, Artificial Sequence
  Synthetic oligonucleotide
gaatataaatcaaggtcttcatagatcagt

SEQ ID NO: 299730 - DNA, 30 bp, Artificial Sequence
  Synthetic oligonucleotide
taacgactgttcggcaaacctccgatcagt

SEQ ID NO: 299731 - DNA, 30 bp, Artificial Sequence
  Synthetic oligonucleotide
gaccttcccacataagacaacaccctcagt

SEQ ID NO: 299732 - DNA, 30 bp, Artificial Sequence
  Synthetic oligonucleotide
aaggtagacaagtctggcgattgcctcagt

SEQ ID NO: 299733 - DNA, 30 bp, Artificial Sequence
  Synthetic oligonucleotide
tgctcgcttttacgtcgtctttagctcagt

SEQ ID NO: 299734 - DNA, 30 bp, Artificial Sequence
  Synthetic oligonucleotide
gacagcttcttagggttagctaggctcagt

SEQ ID NO: 299735 - DNA, 30 bp, Artificial Sequence
  Synthetic oligonucleotide
atcaagatccaagcttaaagaggtctcagt

SEQ ID NO: 299736 - DNA, 30 bp, Artificial Sequence
  Synthetic oligonucleotide
ccgggagtggacccatactcacttctcagt

SEQ ID NO: 299737 - DNA, 30 bp, Artificial Sequence
  Synthetic oligonucleotide
ttcaaccatacagaaaaagactaagtcagt

SEQ ID NO: 299738 - DNA, 30 bp, Artificial Sequence
  Synthetic oligonucleotide
ggccggcctcatctgagccgcagagtcagt

SEQ ID NO: 299739 - DNA, 30 bp, Artificial Sequence
  Synthetic oligonucleotide
cataatgacccccctgtcagtcaggtcagt

SEQ ID NO: 299740 - DNA, 30 bp, Artificial Sequence
  Synthetic oligonucleotide
gccttaaagtcggcaatggagtcggtcagt

SEQ ID NO: 299741 - DNA, 30 bp, Artificial Sequence
  Synthetic oligonucleotide
ggttaccgtcgacaggcatcaggattcagt

SEQ ID NO: 299742 - DNA, 30 bp, Artificial Sequence
  Synthetic oligonucleotide
gaagatctatcgtatagcttaagcttcagt

SEQ ID NO: 299743 - DNA, 30 bp, Artificial Sequence
  Synthetic oligonucleotide
tatggaacttacttagaatatgcgttcagt

SEQ ID NO: 299744 - DNA, 30 bp, Artificial Sequence
  Synthetic oligonucleotide
tcactactgtagacgcgcggcgcaaagagt

SEQ ID NO: 299745 - DNA, 30 bp, Artificial Sequence
  Synthetic oligonucleotide
ctgtccatcgcagacactaacggaaagagt

SEQ ID NO: 299746 - DNA, 30 bp, Artificial Sequence
  Synthetic oligonucleotide
gttccgtcgattgcctagtggcgcaagagt

SEQ ID NO: 299747 - DNA, 30 bp, Artificial Sequence
  Synthetic oligonucleotide
tttaatcatcgctaaagaaacaaacagagt

SEQ ID NO: 299748 - DNA, 30 bp, Artificial Sequence
  Synthetic oligonucleotide
ggaagtctgagtccatatatatgacagagt

SEQ ID NO: 299749 - DNA, 30 bp, Artificial Sequence
  Synthetic oligonucleotide
gtccagacccgttttcaatgggtgcagagt

SEQ ID NO: 299750 - DNA, 30 bp, Artificial Sequence
  Synthetic oligonucleotide
ggataagcaggggttctcccattgcagagt

SEQ ID NO: 299751 - DNA, 30 bp, Artificial Sequence
  Synthetic oligonucleotide
agcgccgttggcttcgttactccagagagt

SEQ ID NO: 299752 - DNA, 30 bp, Artificial Sequence
  Synthetic oligonucleotide
gctggcatcacttttgtgaattacgagagt

SEQ ID NO: 299753 - DNA, 30 bp, Artificial Sequence
  Synthetic oligonucleotide
gtcagagttcatctgtagtgctccgagagt

SEQ ID NO: 299754 - DNA, 30 bp, Artificial Sequence
  Synthetic oligonucleotide
aaatatctacgtgaatacaagcgcgagagt

SEQ ID NO: 299755 - DNA, 30 bp, Artificial Sequence
  Synthetic oligonucleotide
ccagctgactacgctgggcctgtcgagagt

SEQ ID NO: 299756 - DNA, 30 bp, Artificial Sequence
  Synthetic oligonucleotide
aaatccaaaagcatacgttccttcgagagt

SEQ ID NO: 299757 - DNA, 30 bp, Artificial Sequence
  Synthetic oligonucleotide
gtctaaatttcgttcagtagagcggagagt

SEQ ID NO: 299758 - DNA, 30 bp, Artificial Sequence
  Synthetic oligonucleotide
acttgcggaactcggggccgtttggagagt

SEQ ID NO: 299759 - DNA, 30 bp, Artificial Sequence
  Synthetic oligonucleotide
taattgcaaagcggcaaaggcatatagagt

SEQ ID NO: 299760 - DNA, 30 bp, Artificial Sequence
  Synthetic oligonucleotide
gccagcatatgtagcggcttttactagagt

SEQ ID NO: 299761 - DNA, 30 bp, Artificial Sequence
  Synthetic oligonucleotide
agtatattatacaaacatacttgctagagt

SEQ ID NO: 299762 - DNA, 30 bp, Artificial Sequence
  Synthetic oligonucleotide
attccccatcaatctgaagccaagtagagt

SEQ ID NO: 299763 - DNA, 30 bp, Artificial Sequence
  Synthetic oligonucleotide
tttaacctctcgtcagtgaggaattagagt

SEQ ID NO: 299764 - DNA, 30 bp, Artificial Sequence
  Synthetic oligonucleotide
ccgtacctatggtagtcgctagattagagt

SEQ ID NO: 299765 - DNA, 30 bp, Artificial Sequence
  Synthetic oligonucleotide
cacggtgtagagaacttggttgattagagt

SEQ ID NO: 299766 - DNA, 30 bp, Artificial Sequence
  Synthetic oligonucleotide
cacattgttcaaaccgacctgacttagagt

SEQ ID NO: 299767 - DNA, 30 bp, Artificial Sequence
  Synthetic oligonucleotide
gcgcggccgtgagcgttgttaaaaacgagt

SEQ ID NO: 299768 - DNA, 30 bp, Artificial Sequence
  Synthetic oligonucleotide
agacggtggagagtgggacgaccaacgagt

SEQ ID NO: 299769 - DNA, 30 bp, Artificial Sequence
  Synthetic oligonucleotide
tgcacggttagggcgatcctctgcacgagt

SEQ ID NO: 299770 - DNA, 31 bp, Artificial Sequence
  Synthetic oligonucleotide
cctctatagggccagaagtggacagacgagt

SEQ ID NO: 299771 - DNA, 30 bp, Artificial Sequence
  Synthetic oligonucleotide
gtgccgaacctggtctattgtccgacgagt

SEQ ID NO: 299772 - DNA, 30 bp, Artificial Sequence
  Synthetic oligonucleotide
cttaataaactgattccgtattatacgagt

SEQ ID NO: 299773 - DNA, 30 bp, Artificial Sequence
  Synthetic oligonucleotide
cataggacctggttgaataactagccgagt

SEQ ID NO: 299774 - DNA, 30 bp, Artificial Sequence
  Synthetic oligonucleotide
ttgtgtggtcactaggcgatacggccgagt

SEQ ID NO: 299775 - DNA, 30 bp, Artificial Sequence
  Synthetic oligonucleotide
tgaacggacactgcctaatgggatccgagt

SEQ ID NO: 299776 - DNA, 30 bp, Artificial Sequence
  Synthetic oligonucleotide
ggctcacgagcaggtatctgcacagcgagt

SEQ ID NO: 299777 - DNA, 30 bp, Artificial Sequence
  Synthetic oligonucleotide
agcagctcaacgtagaagcgctcagcgagt

SEQ ID NO: 299778 - DNA, 30 bp, Artificial Sequence
  Synthetic oligonucleotide
agtctagtttgggacgaaagcatagcgagt

SEQ ID NO: 299779 - DNA, 30 bp, Artificial Sequence
  Synthetic oligonucleotide
tataagttgcaacacctatgcgccgcgagt

SEQ ID NO: 299780 - DNA, 30 bp, Artificial Sequence
  Synthetic oligonucleotide
ctacggtgcaaccccttaacctccgcgagt

SEQ ID NO: 299781 - DNA, 30 bp, Artificial Sequence
  Synthetic oligonucleotide
aaccgatgccaagtgcagtagcttgcgagt

SEQ ID NO: 299782 - DNA, 30 bp, Artificial Sequence
  Synthetic oligonucleotide
ttcaagtccgtaaaaacgctcccctcgagt

SEQ ID NO: 299783 - DNA, 30 bp, Artificial Sequence
  Synthetic oligonucleotide
gttacttgccaatccctagagccctcgagt

SEQ ID NO: 299784 - DNA, 30 bp, Artificial Sequence
  Synthetic oligonucleotide
cgggtgggcgggtaggtgggtatctcgagt

SEQ ID NO: 299785 - DNA, 30 bp, Artificial Sequence
  Synthetic oligonucleotide
cccgaggccaaaaagctatttaagtcgagt

SEQ ID NO: 299786 - DNA, 30 bp, Artificial Sequence
  Synthetic oligonucleotide
ggttgctgcaatgtggttcgcaggtcgagt

SEQ ID NO: 299787 - DNA, 30 bp, Artificial Sequence
  Synthetic oligonucleotide
ttcaactgcgtaactccctgcgccaggagt

SEQ ID NO: 299788 - DNA, 31 bp, Artificial Sequence
  Synthetic oligonucleotide
gtcacaatgtgtgtcatatcacggcaggagt

SEQ ID NO: 299789 - DNA, 30 bp, Artificial Sequence
  Synthetic oligonucleotide
tcgggagattgcatgcgtttggagaggagt

SEQ ID NO: 299790 - DNA, 30 bp, Artificial Sequence
  Synthetic oligonucleotide
gacagatccaagacgcgcaattagaggagt

SEQ ID NO: 299791 - DNA, 30 bp, Artificial Sequence
  Synthetic oligonucleotide
ggttagtgatgtgccacgggtgctaggagt

SEQ ID NO: 299792 - DNA, 30 bp, Artificial Sequence
  Synthetic oligonucleotide
tgatgccttccaggagacactatacggagt

SEQ ID NO: 299793 - DNA, 30 bp, Artificial Sequence
  Synthetic oligonucleotide
aagtggagacctttccttaataagcggagt

SEQ ID NO: 299794 - DNA, 30 bp, Artificial Sequence
  Synthetic oligonucleotide
agaggtggaaagtgcatgcgtacgcggagt

SEQ ID NO: 299795 - DNA, 30 bp, Artificial Sequence
  Synthetic oligonucleotide
ttcgtgggtatggttgctccatcgcggagt

SEQ ID NO: 299796 - DNA, 30 bp, Artificial Sequence
  Synthetic oligonucleotide
ggctgaggaggacctttgttacggcggagt

SEQ ID NO: 299797 - DNA, 30 bp, Artificial Sequence
  Synthetic oligonucleotide
gggaaagtttattgattgctaatagggagt

SEQ ID NO: 299798 - DNA, 30 bp, Artificial Sequence
  Synthetic oligonucleotide
gtataagactcatcgtggaagttcgggagt

SEQ ID NO: 299799 - DNA, 30 bp, Artificial Sequence
  Synthetic oligonucleotide
gcaaaaagctctaacccatgtaaggggagt

SEQ ID NO: 299800 - DNA, 30 bp, Artificial Sequence
  Synthetic oligonucleotide
ggcctcaagctagtagagggaccggggagt

SEQ ID NO: 299801 - DNA, 30 bp, Artificial Sequence
  Synthetic oligonucleotide
gaccaaactaagtgaggcagtatggggagt

SEQ ID NO: 299802 - DNA, 30 bp, Artificial Sequence
  Synthetic oligonucleotide
tgcttactttataatgttgggaatgggagt

SEQ ID NO: 299803 - DNA, 30 bp, Artificial Sequence
  Synthetic oligonucleotide
ctttatggaacgcgttcgagaggtgggagt

SEQ ID NO: 299804 - DNA, 30 bp, Artificial Sequence
  Synthetic oligonucleotide
tgggttattacggacggaaaagaatggagt

SEQ ID NO: 299805 - DNA, 30 bp, Artificial Sequence
  Synthetic oligonucleotide
cgtacattgtaaatcgcggacatctggagt

SEQ ID NO: 299806 - DNA, 29 bp, Artificial Sequence
  Synthetic oligonucleotide
ttactacggtgcgacccaatatctggagt

SEQ ID NO: 299807 - DNA, 30 bp, Artificial Sequence
  Synthetic oligonucleotide
agtgtccactggccctgcagtttctggagt

SEQ ID NO: 299808 - DNA, 30 bp, Artificial Sequence
  Synthetic oligonucleotide
ttgttagcaagcatcgaggtctcgtggagt

SEQ ID NO: 299809 - DNA, 30 bp, Artificial Sequence
  Synthetic oligonucleotide
agacgcgttactatgtctagtctgtggagt

SEQ ID NO: 299810 - DNA, 30 bp, Artificial Sequence
  Synthetic oligonucleotide
gggaatgaagttgacgttcaccagatgagt

SEQ ID NO: 299811 - DNA, 30 bp, Artificial Sequence
  Synthetic oligonucleotide
ctagtccttatcaccacgcgaatgatgagt

SEQ ID NO: 299812 - DNA, 30 bp, Artificial Sequence
  Synthetic oligonucleotide
aaatgacagtttgaccgatgcgctatgagt

SEQ ID NO: 299813 - DNA, 30 bp, Artificial Sequence
  Synthetic oligonucleotide
ccttgcagctgtggctcaagctgtatgagt

SEQ ID NO: 299814 - DNA, 30 bp, Artificial Sequence
  Synthetic oligonucleotide
agtttagttctgtatttcagacgactgagt

SEQ ID NO: 299815 - DNA, 30 bp, Artificial Sequence
  Synthetic oligonucleotide
aatcagacgacggctagacatgagctgagt

SEQ ID NO: 299816 - DNA, 30 bp, Artificial Sequence
  Synthetic oligonucleotide
cgggatttcattttgtcctagcaagtgagt

SEQ ID NO: 299817 - DNA, 30 bp, Artificial Sequence
  Synthetic oligonucleotide
gtaaagcgttccatggctcctcaagtgagt

SEQ ID NO: 299818 - DNA, 30 bp, Artificial Sequence
  Synthetic oligonucleotide
ttctgtgtgcctttcaacagtagagtgagt

SEQ ID NO: 299819 - DNA, 30 bp, Artificial Sequence
  Synthetic oligonucleotide
gtctacgaagctactgcgataagcgtgagt

SEQ ID NO: 299820 - DNA, 30 bp, Artificial Sequence
  Synthetic oligonucleotide
attctgaagccatccgcggcggtggtgagt

SEQ ID NO: 299821 - DNA, 30 bp, Artificial Sequence
  Synthetic oligonucleotide
tcaagagaacgtggacctatgtccttgagt

SEQ ID NO: 299822 - DNA, 30 bp, Artificial Sequence
  Synthetic oligonucleotide
gttgcgcacgttgcaacgtaggtcttgagt

SEQ ID NO: 299823 - DNA, 30 bp, Artificial Sequence
  Synthetic oligonucleotide
cattgtcgaggccacgtgcggataaatagt

SEQ ID NO: 299824 - DNA, 30 bp, Artificial Sequence
  Synthetic oligonucleotide
cagctcaaggtcaccagaagtcacaatagt

SEQ ID NO: 299825 - DNA, 30 bp, Artificial Sequence
  Synthetic oligonucleotide
gcgcgatagttaagtcctgcctagaatagt

SEQ ID NO: 299826 - DNA, 30 bp, Artificial Sequence
  Synthetic oligonucleotide
agtaaagagtcgcttagttgagggaatagt

SEQ ID NO: 299827 - DNA, 30 bp, Artificial Sequence
  Synthetic oligonucleotide
agagaaataagattagtgcatcctaatagt

SEQ ID NO: 299828 - DNA, 30 bp, Artificial Sequence
  Synthetic oligonucleotide
ccgccggaaccgttattgactgctaatagt

SEQ ID NO: 299829 - DNA, 30 bp, Artificial Sequence
  Synthetic oligonucleotide
ccgcgctaacattcaagatgaacacatagt

SEQ ID NO: 299830 - DNA, 30 bp, Artificial Sequence
  Synthetic oligonucleotide
tacatgaagaagtctgtgaaggcccatagt

SEQ ID NO: 299831 - DNA, 30 bp, Artificial Sequence
  Synthetic oligonucleotide
ggtacagcggagcatcgcactgtccatagt

SEQ ID NO: 299832 - DNA, 30 bp, Artificial Sequence
  Synthetic oligonucleotide
gaaggcgatccgagcaatcatccgcatagt

SEQ ID NO: 299833 - DNA, 31 bp, Artificial Sequence
  Synthetic oligonucleotide
cacatcggcaaattacacgtggtttcatagt

SEQ ID NO: 299834 - DNA, 30 bp, Artificial Sequence
  Synthetic oligonucleotide
attgttcctccgtgctgaaaaaaagatagt

SEQ ID NO: 299835 - DNA, 30 bp, Artificial Sequence
  Synthetic oligonucleotide
gggatttgagtagttggagtggcagatagt

SEQ ID NO: 299836 - DNA, 30 bp, Artificial Sequence
  Synthetic oligonucleotide
ggcaataaaatattggcaacgggagatagt

SEQ ID NO: 299837 - DNA, 30 bp, Artificial Sequence
  Synthetic oligonucleotide
agtgcgactagcggttaccgggtagatagt

SEQ ID NO: 299838 - DNA, 30 bp, Artificial Sequence
  Synthetic oligonucleotide
tctttgtcaacagtagacaagagcgatagt

SEQ ID NO: 299839 - DNA, 30 bp, Artificial Sequence
  Synthetic oligonucleotide
ttcatactagcttgaaagtttttcgatagt

SEQ ID NO: 299840 - DNA, 30 bp, Artificial Sequence
  Synthetic oligonucleotide
aatctccgagagtcacgtggtcgggatagt

SEQ ID NO: 299841 - DNA, 30 bp, Artificial Sequence
  Synthetic oligonucleotide
ccaggcggagtgtccacctgtatggatagt

SEQ ID NO: 299842 - DNA, 30 bp, Artificial Sequence
  Synthetic oligonucleotide
gggcatagtcaaactattggtctatatagt

SEQ ID NO: 299843 - DNA, 30 bp, Artificial Sequence
  Synthetic oligonucleotide
cagccaaaaggccgcaattgtgtatatagt

SEQ ID NO: 299844 - DNA, 30 bp, Artificial Sequence
  Synthetic oligonucleotide
tccctagttacagcaagacatgcctatagt

SEQ ID NO: 299845 - DNA, 30 bp, Artificial Sequence
  Synthetic oligonucleotide
cagtcaggctcaggaccgcgactctatagt

SEQ ID NO: 299846 - DNA, 30 bp, Artificial Sequence
  Synthetic oligonucleotide
atgacggggtgccattgagagtagtatagt

SEQ ID NO: 299847 - DNA, 30 bp, Artificial Sequence
  Synthetic oligonucleotide
gtcagcccagactggcaagttccgtatagt

SEQ ID NO: 299848 - DNA, 30 bp, Artificial Sequence
  Synthetic oligonucleotide
tcaggcaacagtaatggtggtgtgtatagt

SEQ ID NO: 299849 - DNA, 30 bp, Artificial Sequence
  Synthetic oligonucleotide
ggggtctagaacatcctaatcacttatagt

SEQ ID NO: 299850 - DNA, 30 bp, Artificial Sequence
  Synthetic oligonucleotide
cgccctaggagcatgacccgaatttatagt

SEQ ID NO: 299851 - DNA, 30 bp, Artificial Sequence
  Synthetic oligonucleotide
cgaatagggcgacaaggtcggttttatagt

SEQ ID NO: 299852 - DNA, 30 bp, Artificial Sequence
  Synthetic oligonucleotide
ctagcatgcggcctaaaggacacaactagt

SEQ ID NO: 299853 - DNA, 30 bp, Artificial Sequence
  Synthetic oligonucleotide
gagatttaggcttatggacatcacactagt

SEQ ID NO: 299854 - DNA, 30 bp, Artificial Sequence
  Synthetic oligonucleotide
aaagtagcacagaccgcggagtaccctagt

SEQ ID NO: 299855 - DNA, 31 bp, Artificial Sequence
  Synthetic oligonucleotide
ttggaacaacgagccaggagggttgcctagt

SEQ ID NO: 299856 - DNA, 30 bp, Artificial Sequence
  Synthetic oligonucleotide
cctacgtaggcttcactactgttgcctagt

SEQ ID NO: 299857 - DNA, 30 bp, Artificial Sequence
  Synthetic oligonucleotide
atggttcattagcccgagggcgttcctagt

SEQ ID NO: 299858 - DNA, 30 bp, Artificial Sequence
  Synthetic oligonucleotide
aggctcaggtctttttctacgttggctagt

SEQ ID NO: 299859 - DNA, 30 bp, Artificial Sequence
  Synthetic oligonucleotide
ttaaggtgacgattaattctgctatctagt

SEQ ID NO: 299860 - DNA, 30 bp, Artificial Sequence
  Synthetic oligonucleotide
cgttagttgcgaccagaatcgcactctagt

SEQ ID NO: 299861 - DNA, 31 bp, Artificial Sequence
  Synthetic oligonucleotide
attaaacaggcactgagggttctcgtctagt

SEQ ID NO: 299862 - DNA, 30 bp, Artificial Sequence
  Synthetic oligonucleotide
tttagctggtgttcacagttatcaagtagt

SEQ ID NO: 299863 - DNA, 30 bp, Artificial Sequence
  Synthetic oligonucleotide
aagccctcatctaaccattccagcagtagt

SEQ ID NO: 299864 - DNA, 30 bp, Artificial Sequence
  Synthetic oligonucleotide
aggattttggtcagggttcatggcagtagt

SEQ ID NO: 299865 - DNA, 30 bp, Artificial Sequence
  Synthetic oligonucleotide
aaggagcagcatatagagaatatcagtagt

SEQ ID NO: 299866 - DNA, 30 bp, Artificial Sequence
  Synthetic oligonucleotide
gtacgacgtcctgggggacagagacgtagt

SEQ ID NO: 299867 - DNA, 30 bp, Artificial Sequence
  Synthetic oligonucleotide
gctaatatcgtaatactgctcatacgtagt

SEQ ID NO: 299868 - DNA, 30 bp, Artificial Sequence
  Synthetic oligonucleotide
ggaatttagaaaaggcaacaggtccgtagt

SEQ ID NO: 299869 - DNA, 30 bp, Artificial Sequence
  Synthetic oligonucleotide
ttctggatcccccgctaaaagattcgtagt

SEQ ID NO: 299870 - DNA, 30 bp, Artificial Sequence
  Synthetic oligonucleotide
tgagaatagctctggtgtgaaaccggtagt

SEQ ID NO: 299871 - DNA, 30 bp, Artificial Sequence
  Synthetic oligonucleotide
cccgattccctaagcgtagcagatggtagt

SEQ ID NO: 299872 - DNA, 30 bp, Artificial Sequence
  Synthetic oligonucleotide
gatcacgtaaactacgataaaagtggtagt

SEQ ID NO: 299873 - DNA, 30 bp, Artificial Sequence
  Synthetic oligonucleotide
gcgactgacttaagtctcgatagtggtagt

SEQ ID NO: 299874 - DNA, 30 bp, Artificial Sequence
  Synthetic oligonucleotide
atttaatcattgaggtagaaaaaatgtagt

SEQ ID NO: 299875 - DNA, 30 bp, Artificial Sequence
  Synthetic oligonucleotide
tgatcatatggaagcgctgaaacatgtagt

SEQ ID NO: 299876 - DNA, 30 bp, Artificial Sequence
  Synthetic oligonucleotide
tatagggatagcagactccagctatgtagt

SEQ ID NO: 299877 - DNA, 30 bp, Artificial Sequence
  Synthetic oligonucleotide
gttgtcgctctcgggatctgaaactgtagt

SEQ ID NO: 299878 - DNA, 30 bp, Artificial Sequence
  Synthetic oligonucleotide
atgtatatcgctatggacgtaacctgtagt

SEQ ID NO: 299879 - DNA, 30 bp, Artificial Sequence
  Synthetic oligonucleotide
atccagaaggggtcatcccatagctgtagt

SEQ ID NO: 299880 - DNA, 30 bp, Artificial Sequence
  Synthetic oligonucleotide
aagtatagatggcggacgtgcttgtgtagt

SEQ ID NO: 299881 - DNA, 30 bp, Artificial Sequence
  Synthetic oligonucleotide
cctttggtgtgatcgagctaagtaattagt

SEQ ID NO: 299882 - DNA, 30 bp, Artificial Sequence
  Synthetic oligonucleotide
gcgcttttttcggatacaatatgcattagt

SEQ ID NO: 299883 - DNA, 31 bp, Artificial Sequence
  Synthetic oligonucleotide
gctcgataaatcaaaggagccacagattagt

SEQ ID NO: 299884 - DNA, 30 bp, Artificial Sequence
  Synthetic oligonucleotide
atcaaaccagtagcaacctgttatattagt

SEQ ID NO: 299885 - DNA, 30 bp, Artificial Sequence
  Synthetic oligonucleotide
atatactgatggaatgtacacactattagt

SEQ ID NO: 299886 - DNA, 30 bp, Artificial Sequence
  Synthetic oligonucleotide
agtttaatgaatgaatgagactaacttagt

SEQ ID NO: 299887 - DNA, 30 bp, Artificial Sequence
  Synthetic oligonucleotide
atagcaaatagataagctacgccacttagt

SEQ ID NO: 299888 - DNA, 30 bp, Artificial Sequence
  Synthetic oligonucleotide
acgatatacatgaggcgattgccccttagt

SEQ ID NO: 299889 - DNA, 30 bp, Artificial Sequence
  Synthetic oligonucleotide
ttgccatgcggaacggtttcattccttagt

SEQ ID NO: 299890 - DNA, 30 bp, Artificial Sequence
  Synthetic oligonucleotide
agttgtggtgaggtgcgttcaaagcttagt

SEQ ID NO: 299891 - DNA, 30 bp, Artificial Sequence
  Synthetic oligonucleotide
cgctgtgaaatcttgacacgcggtcttagt

SEQ ID NO: 299892 - DNA, 30 bp, Artificial Sequence
  Synthetic oligonucleotide
gtccgtctgcccaagagagttgtcgttagt

SEQ ID NO: 299893 - DNA, 30 bp, Artificial Sequence
  Synthetic oligonucleotide
ttaagcctccgactgtggggccaggttagt

SEQ ID NO: 299894 - DNA, 30 bp, Artificial Sequence
  Synthetic oligonucleotide
ggcttgtggtatttcacgcattgggttagt

SEQ ID NO: 299895 - DNA, 30 bp, Artificial Sequence
  Synthetic oligonucleotide
tttggtcaggagggttcacctagatttagt

SEQ ID NO: 299896 - DNA, 30 bp, Artificial Sequence
  Synthetic oligonucleotide
ggcacaaaacattcgaagcaaatatttagt

SEQ ID NO: 299897 - DNA, 30 bp, Artificial Sequence
  Synthetic oligonucleotide
actgcgtcttttggtcacaatcgctttagt

SEQ ID NO: 299898 - DNA, 30 bp, Artificial Sequence
  Synthetic oligonucleotide
taatatatgttgatctaagagacaaaacgt

SEQ ID NO: 299899 - DNA, 30 bp, Artificial Sequence
  Synthetic oligonucleotide
tggattggccacaaggcatgtttaaaacgt

SEQ ID NO: 299900 - DNA, 30 bp, Artificial Sequence
  Synthetic oligonucleotide
cgttgaacgtccgttgctcaaccgaaacgt

SEQ ID NO: 299901 - DNA, 30 bp, Artificial Sequence
  Synthetic oligonucleotide
cgcggctagcgagttctctttaataaacgt

SEQ ID NO: 299902 - DNA, 30 bp, Artificial Sequence
  Synthetic oligonucleotide
gccggtaaagtatctgagtgagataaacgt

SEQ ID NO: 299903 - DNA, 30 bp, Artificial Sequence
  Synthetic oligonucleotide
tgcgtatgtatattgttttattataaacgt

SEQ ID NO: 299904 - DNA, 30 bp, Artificial Sequence
  Synthetic oligonucleotide
ttgacagatcctgatagtcaacctaaacgt

SEQ ID NO: 299905 - DNA, 30 bp, Artificial Sequence
  Synthetic oligonucleotide
aggcggatttgctacattagctgacaacgt

SEQ ID NO: 299906 - DNA, 30 bp, Artificial Sequence
  Synthetic oligonucleotide
ctggttttgccagggcactgtatacaacgt

SEQ ID NO: 299907 - DNA, 30 bp, Artificial Sequence
  Synthetic oligonucleotide
ctcgattgctcaaatgatagtccccaacgt

SEQ ID NO: 299908 - DNA, 30 bp, Artificial Sequence
  Synthetic oligonucleotide
ccccgcatgtcttcggggggaatccaacgt

SEQ ID NO: 299909 - DNA, 30 bp, Artificial Sequence
  Synthetic oligonucleotide
ttcttgattatatgtcgtgaactccaacgt

SEQ ID NO: 299910 - DNA, 30 bp, Artificial Sequence
  Synthetic oligonucleotide
acccctgtgagtagacatattatgcaacgt

SEQ ID NO: 299911 - DNA, 30 bp, Artificial Sequence
  Synthetic oligonucleotide
gcttcgtaaacccgattgtatagtcaacgt

SEQ ID NO: 299912 - DNA, 30 bp, Artificial Sequence
  Synthetic oligonucleotide
gtcgtagggacgatgcctctagttcaacgt

SEQ ID NO: 299913 - DNA, 30 bp, Artificial Sequence
  Synthetic oligonucleotide
attactgactcgtgagggcggcacgaacgt

SEQ ID NO: 299914 - DNA, 30 bp, Artificial Sequence
  Synthetic oligonucleotide
caaattgactaattcttggatcacgaacgt

SEQ ID NO: 299915 - DNA, 30 bp, Artificial Sequence
  Synthetic oligonucleotide
tgggtgatggaatgacggtctgccgaacgt

SEQ ID NO: 299916 - DNA, 30 bp, Artificial Sequence
  Synthetic oligonucleotide
tgggatcactggctgtctagcagcgaacgt

SEQ ID NO: 299917 - DNA, 30 bp, Artificial Sequence
  Synthetic oligonucleotide
aaggccggggcttcggcgtgatgcgaacgt

SEQ ID NO: 299918 - DNA, 30 bp, Artificial Sequence
  Synthetic oligonucleotide
atcggaggataagtatccgctctcgaacgt

SEQ ID NO: 299919 - DNA, 30 bp, Artificial Sequence
  Synthetic oligonucleotide
agacggtatgagctacccgttgaggaacgt

SEQ ID NO: 299920 - DNA, 30 bp, Artificial Sequence
  Synthetic oligonucleotide
tgtgagtgattgtgtccaatataggaacgt

SEQ ID NO: 299921 - DNA, 30 bp, Artificial Sequence
  Synthetic oligonucleotide
cttctgatcgatgacaccaaatatgaacgt

SEQ ID NO: 299922 - DNA, 30 bp, Artificial Sequence
  Synthetic oligonucleotide
cctaagcagcctgtgactacagtataacgt

SEQ ID NO: 299923 - DNA, 30 bp, Artificial Sequence
  Synthetic oligonucleotide
acggcagtagcaaaacgcctgttgtaacgt

SEQ ID NO: 299924 - DNA, 30 bp, Artificial Sequence
  Synthetic oligonucleotide
tgctcagccaagatttctgctacttaacgt

SEQ ID NO: 299925 - DNA, 30 bp, Artificial Sequence
  Synthetic oligonucleotide
gacgcttaatttagttcgaagagttaacgt

SEQ ID NO: 299926 - DNA, 30 bp, Artificial Sequence
  Synthetic oligonucleotide
atgtatgtgaaactccagcaaggttaacgt

SEQ ID NO: 299927 - DNA, 30 bp, Artificial Sequence
  Synthetic oligonucleotide
agaaaagccgcggggtgcgagggttaacgt

SEQ ID NO: 299928 - DNA, 30 bp, Artificial Sequence
  Synthetic oligonucleotide
ggtaatcttcatcaatcgagggccacacgt

SEQ ID NO: 299929 - DNA, 30 bp, Artificial Sequence
  Synthetic oligonucleotide
gcgcgggaggattaaacttctaggacacgt

SEQ ID NO: 299930 - DNA, 30 bp, Artificial Sequence
  Synthetic oligonucleotide
gggcgagcgaagatggaattgcggacacgt

SEQ ID NO: 299931 - DNA, 30 bp, Artificial Sequence
  Synthetic oligonucleotide
tttgataactgactaagcgcctcaccacgt

SEQ ID NO: 299932 - DNA, 30 bp, Artificial Sequence
  Synthetic oligonucleotide
aggattttggagtgattcctagggccacgt

SEQ ID NO: 299933 - DNA, 30 bp, Artificial Sequence
  Synthetic oligonucleotide
cagtaatttgggaacagtgcgtatccacgt

SEQ ID NO: 299934 - DNA, 30 bp, Artificial Sequence
  Synthetic oligonucleotide
cgtgtaaacccaagaccaatgcgtccacgt

SEQ ID NO: 299935 - DNA, 30 bp, Artificial Sequence
  Synthetic oligonucleotide
acacatattcggaatattctgaaagcacgt

SEQ ID NO: 299936 - DNA, 30 bp, Artificial Sequence
  Synthetic oligonucleotide
ttaaggcgttctgggcaagtatcggcacgt

SEQ ID NO: 299937 - DNA, 30 bp, Artificial Sequence
  Synthetic oligonucleotide
accgtggtccattacttattctgggcacgt

SEQ ID NO: 299938 - DNA, 30 bp, Artificial Sequence
  Synthetic oligonucleotide
cttataggcgcgtactagtcacatgcacgt

SEQ ID NO: 299939 - DNA, 30 bp, Artificial Sequence
  Synthetic oligonucleotide
taccaagaagcactttagtttacatcacgt

SEQ ID NO: 299940 - DNA, 30 bp, Artificial Sequence
  Synthetic oligonucleotide
tactaataaatctgtcttgaaaactcacgt

SEQ ID NO: 299941 - DNA, 30 bp, Artificial Sequence
  Synthetic oligonucleotide
acagtagtgtacatggaaacagtttcacgt

SEQ ID NO: 299942 - DNA, 30 bp, Artificial Sequence
  Synthetic oligonucleotide
ccgtcacggcctgcgcgttctggaagacgt

SEQ ID NO: 299943 - DNA, 30 bp, Artificial Sequence
  Synthetic oligonucleotide
cagaaaccaagactttacattaggagacgt

SEQ ID NO: 299944 - DNA, 30 bp, Artificial Sequence
  Synthetic oligonucleotide
cgagtaaaaggtgggcggttaatgagacgt

SEQ ID NO: 299945 - DNA, 30 bp, Artificial Sequence
  Synthetic oligonucleotide
tgactatgttctccatcaagatatagacgt

SEQ ID NO: 299946 - DNA, 30 bp, Artificial Sequence
  Synthetic oligonucleotide
ttcgaccgtcaacatcagttgcttagacgt

SEQ ID NO: 299947 - DNA, 30 bp, Artificial Sequence
  Synthetic oligonucleotide
ctcaatggctctcagaatagccaacgacgt

SEQ ID NO: 299948 - DNA, 30 bp, Artificial Sequence
  Synthetic oligonucleotide
gccctgtgtaagtctataaccgcccgacgt

SEQ ID NO: 299949 - DNA, 30 bp, Artificial Sequence
  Synthetic oligonucleotide
tggtgattatcgctgattaggcagcgacgt

SEQ ID NO: 299950 - DNA, 30 bp, Artificial Sequence
  Synthetic oligonucleotide
gaaaaggtgatgggagggtccgtgcgacgt

SEQ ID NO: 299951 - DNA, 30 bp, Artificial Sequence
  Synthetic oligonucleotide
cctgaggactggtgactgacaattcgacgt

SEQ ID NO: 299952 - DNA, 30 bp, Artificial Sequence
  Synthetic oligonucleotide
tgatctcctgaggattaattttgaggacgt

SEQ ID NO: 299953 - DNA, 30 bp, Artificial Sequence
  Synthetic oligonucleotide
ttcgacaaagtgtgtcccatcgacggacgt

SEQ ID NO: 299954 - DNA, 30 bp, Artificial Sequence
  Synthetic oligonucleotide
agaccttgtcgacgcactgatcgcggacgt

SEQ ID NO: 299955 - DNA, 30 bp, Artificial Sequence
  Synthetic oligonucleotide
caagctagttattctcccaagatgggacgt

SEQ ID NO: 299956 - DNA, 30 bp, Artificial Sequence
  Synthetic oligonucleotide
ttccgtagttgacatgggggtatgggacgt

SEQ ID NO: 299957 - DNA, 30 bp, Artificial Sequence
  Synthetic oligonucleotide
gcgctacgattgagttgttcgctgggacgt

SEQ ID NO: 299958 - DNA, 30 bp, Artificial Sequence
  Synthetic oligonucleotide
cggtaactgcattgtttttacaatggacgt

SEQ ID NO: 299959 - DNA, 30 bp, Artificial Sequence
  Synthetic oligonucleotide
agtcgattgtaagttactatgacatgacgt

SEQ ID NO: 299960 - DNA, 30 bp, Artificial Sequence
  Synthetic oligonucleotide
tcatgacagcagtcattgcgcacttgacgt

SEQ ID NO: 299961 - DNA, 30 bp, Artificial Sequence
  Synthetic oligonucleotide
actttgcggagtttttgtttcgaaatacgt

SEQ ID NO: 299962 - DNA, 30 bp, Artificial Sequence
  Synthetic oligonucleotide
gtcgtgggggtattcgctaccgacatacgt

SEQ ID NO: 299963 - DNA, 30 bp, Artificial Sequence
  Synthetic oligonucleotide
gtaaaatgtagcttaccgcacttcatacgt

SEQ ID NO: 299964 - DNA, 30 bp, Artificial Sequence
  Synthetic oligonucleotide
gcttattgatacaagactatagatatacgt

SEQ ID NO: 299965 - DNA, 30 bp, Artificial Sequence
  Synthetic oligonucleotide
gtgaaaatatggctcgtggtcggtatacgt

SEQ ID NO: 299966 - DNA, 30 bp, Artificial Sequence
  Synthetic oligonucleotide
gcaccgtaagcgccaaccctgtgtatacgt

SEQ ID NO: 299967 - DNA, 30 bp, Artificial Sequence
  Synthetic oligonucleotide
acacgatcacgcggcgtttggagactacgt

SEQ ID NO: 299968 - DNA, 30 bp, Artificial Sequence
  Synthetic oligonucleotide
gaccgaataagcgggacatcaggcctacgt

SEQ ID NO: 299969 - DNA, 30 bp, Artificial Sequence
  Synthetic oligonucleotide
gtacggctcgcggtaggcctatggctacgt

SEQ ID NO: 299970 - DNA, 30 bp, Artificial Sequence
  Synthetic oligonucleotide
acgaaactccgtagcctgacgcgagtacgt

SEQ ID NO: 299971 - DNA, 30 bp, Artificial Sequence
  Synthetic oligonucleotide
ccaaccctaggcaaatcactataggtacgt

SEQ ID NO: 299972 - DNA, 30 bp, Artificial Sequence
  Synthetic oligonucleotide
acgtctatagggttttcagggcatgtacgt

SEQ ID NO: 299973 - DNA, 30 bp, Artificial Sequence
  Synthetic oligonucleotide
gaaatcccagttactcttcgcggtgtacgt

SEQ ID NO: 299974 - DNA, 30 bp, Artificial Sequence
  Synthetic oligonucleotide
acgctgatcagaattttcgttgttgtacgt

SEQ ID NO: 299975 - DNA, 30 bp, Artificial Sequence
  Synthetic oligonucleotide
taataccgggccatgcgtgtaaaattacgt

SEQ ID NO: 299976 - DNA, 30 bp, Artificial Sequence
  Synthetic oligonucleotide
tgcttcttgattaggccgaattcattacgt

SEQ ID NO: 299977 - DNA, 30 bp, Artificial Sequence
  Synthetic oligonucleotide
agaaggaactggatccccattggattacgt

SEQ ID NO: 299978 - DNA, 30 bp, Artificial Sequence
  Synthetic oligonucleotide
gacaatagattgaaccgtatccccttacgt

SEQ ID NO: 299979 - DNA, 30 bp, Artificial Sequence
  Synthetic oligonucleotide
aatgcatgtacccccaaatagttgttacgt

SEQ ID NO: 299980 - DNA, 30 bp, Artificial Sequence
  Synthetic oligonucleotide
cttgcataggacatcgagataaatttacgt

SEQ ID NO: 299981 - DNA, 30 bp, Artificial Sequence
  Synthetic oligonucleotide
gaataaatcgtgccggacacttatttacgt

SEQ ID NO: 299982 - DNA, 30 bp, Artificial Sequence
  Synthetic oligonucleotide
gttgacttgggatctgtcggttatttacgt

SEQ ID NO: 299983 - DNA, 30 bp, Artificial Sequence
  Synthetic oligonucleotide
caaggggggaggtattccaatcctttacgt

SEQ ID NO: 299984 - DNA, 30 bp, Artificial Sequence
  Synthetic oligonucleotide
taggtaccgttcacatgattgtgaaaccgt

SEQ ID NO: 299985 - DNA, 30 bp, Artificial Sequence
  Synthetic oligonucleotide
cctgggacgagggtatggatcagcaaccgt

SEQ ID NO: 299986 - DNA, 30 bp, Artificial Sequence
  Synthetic oligonucleotide
atttcactattatcgggtatcagtaaccgt

SEQ ID NO: 299987 - DNA, 30 bp, Artificial Sequence
  Synthetic oligonucleotide
cgacagggagcccgagtgattattaaccgt

SEQ ID NO: 299988 - DNA, 30 bp, Artificial Sequence
  Synthetic oligonucleotide
aagaagttcttagcccatgctccgcaccgt

SEQ ID NO: 299989 - DNA, 30 bp, Artificial Sequence
  Synthetic oligonucleotide
attctccgccttcgtccaggggatcaccgt

SEQ ID NO: 299990 - DNA, 30 bp, Artificial Sequence
  Synthetic oligonucleotide
caatatgccttggtgtaaccctaagaccgt

SEQ ID NO: 299991 - DNA, 30 bp, Artificial Sequence
  Synthetic oligonucleotide
tgcgcttctaatatatgagctgtcgaccgt

SEQ ID NO: 299992 - DNA, 30 bp, Artificial Sequence
  Synthetic oligonucleotide
agtgtctgcgtaggacgacacatggaccgt

SEQ ID NO: 299993 - DNA, 30 bp, Artificial Sequence
  Synthetic oligonucleotide
ccatacatgccataaaccccccatgaccgt

SEQ ID NO: 299994 - DNA, 30 bp, Artificial Sequence
  Synthetic oligonucleotide
ggcggatgacctttacgtcaaactgaccgt

SEQ ID NO: 299995 - DNA, 30 bp, Artificial Sequence
  Synthetic oligonucleotide
atatatggcctgaagccctgcgttgaccgt

SEQ ID NO: 299996 - DNA, 30 bp, Artificial Sequence
  Synthetic oligonucleotide
gcaagaagtcgagtatgctatgttgaccgt

SEQ ID NO: 299997 - DNA, 30 bp, Artificial Sequence
  Synthetic oligonucleotide
ggcataattctcttagattgcacataccgt

SEQ ID NO: 299998 - DNA, 30 bp, Artificial Sequence
  Synthetic oligonucleotide
gtcgaccgatgttcaacactgtcataccgt

SEQ ID NO: 299999 - DNA, 30 bp, Artificial Sequence
  Synthetic oligonucleotide
gtggtatctacaaagtagaatggataccgt

SEQ ID NO: 300000 - DNA, 30 bp, Artificial Sequence
  Synthetic oligonucleotide
tcacggccgttgtcgggtcaccgctaccgt

SEQ ID NO: 300001 - DNA, 30 bp, Artificial Sequence
  Synthetic oligonucleotide
cttgccgcaattacgaaaaccttaacccgt

SEQ ID NO: 300002 - DNA, 30 bp, Artificial Sequence
  Synthetic oligonucleotide
ggcgagggttgtcctgcccacgccacccgt

SEQ ID NO: 300003 - DNA, 30 bp, Artificial Sequence
  Synthetic oligonucleotide
gctcggctttctcaagcacgactcacccgt

SEQ ID NO: 300004 - DNA, 30 bp, Artificial Sequence
  Synthetic oligonucleotide
cttcatgaggacgtgaaaaaaccgacccgt

SEQ ID NO: 300005 - DNA, 30 bp, Artificial Sequence
  Synthetic oligonucleotide
aagatgcttcgcattttgaaggggacccgt

SEQ ID NO: 300006 - DNA, 30 bp, Artificial Sequence
  Synthetic oligonucleotide
agttgcttacatcgcactagcttgccccgt

SEQ ID NO: 300007 - DNA, 30 bp, Artificial Sequence
  Synthetic oligonucleotide
acgtttatctagtctccctaaattccccgt

SEQ ID NO: 300008 - DNA, 30 bp, Artificial Sequence
  Synthetic oligonucleotide
tgcgtcagtcaactagcttagatagcccgt

SEQ ID NO: 300009 - DNA, 30 bp, Artificial Sequence
  Synthetic oligonucleotide
ttctgcacattatggagtagagtcgcccgt

SEQ ID NO: 300010 - DNA, 30 bp, Artificial Sequence
  Synthetic oligonucleotide
attgtgttctttacgaaactccgggcccgt

SEQ ID NO: 300011 - DNA, 30 bp, Artificial Sequence
  Synthetic oligonucleotide
acggcgcttgaattagctcgcctggcccgt

SEQ ID NO: 300012 - DNA, 30 bp, Artificial Sequence
  Synthetic oligonucleotide
aacccagcctctcacaacctgacatcccgt

SEQ ID NO: 300013 - DNA, 30 bp, Artificial Sequence
  Synthetic oligonucleotide
gcgacggactatgattaggccgcatcccgt

SEQ ID NO: 300014 - DNA, 30 bp, Artificial Sequence
  Synthetic oligonucleotide
gcggaggagtgaaacctaaaaggatcccgt

SEQ ID NO: 300015 - DNA, 30 bp, Artificial Sequence
  Synthetic oligonucleotide
atagtcttgaaagcgatgctcccctcccgt

SEQ ID NO: 300016 - DNA, 30 bp, Artificial Sequence
  Synthetic oligonucleotide
gcatatttaaagaatgctgagggctcccgt

SEQ ID NO: 300017 - DNA, 30 bp, Artificial Sequence
  Synthetic oligonucleotide
ggtgctgacacgtctggacaatgttcccgt

SEQ ID NO: 300018 - DNA, 30 bp, Artificial Sequence
  Synthetic oligonucleotide
actgctatgtggactgcacgtggaagccgt

SEQ ID NO: 300019 - DNA, 30 bp, Artificial Sequence
  Synthetic oligonucleotide
aaaataatcacgttcttaccgcacagccgt

SEQ ID NO: 300020 - DNA, 30 bp, Artificial Sequence
  Synthetic oligonucleotide
gcaagctgtcagacttgcccgcgccgccgt

SEQ ID NO: 300021 - DNA, 30 bp, Artificial Sequence
  Synthetic oligonucleotide
ttgaagatacttactataagtaagcgccgt

SEQ ID NO: 300022 - DNA, 30 bp, Artificial Sequence
  Synthetic oligonucleotide
tgattacgattcacacctcaccgaggccgt

SEQ ID NO: 300023 - DNA, 30 bp, Artificial Sequence
  Synthetic oligonucleotide
agcatgaaagtccaaaacttgaccggccgt

SEQ ID NO: 300024 - DNA, 30 bp, Artificial Sequence
  Synthetic oligonucleotide
aacggacgtattacccagtatggcggccgt

SEQ ID NO: 300025 - DNA, 30 bp, Artificial Sequence
  Synthetic oligonucleotide
cattcacaatgaggacctaacctcggccgt

SEQ ID NO: 300026 - DNA, 30 bp, Artificial Sequence
  Synthetic oligonucleotide
gcgcacagaggagggatgactctgggccgt

SEQ ID NO: 300027 - DNA, 30 bp, Artificial Sequence
  Synthetic oligonucleotide
gaccatgatgcgtcgtaacacagtggccgt

SEQ ID NO: 300028 - DNA, 30 bp, Artificial Sequence
  Synthetic oligonucleotide
gtatcggcacatgagggatgtgttggccgt

SEQ ID NO: 300029 - DNA, 30 bp, Artificial Sequence
  Synthetic oligonucleotide
atacgggttcttagtccgccttttggccgt

SEQ ID NO: 300030 - DNA, 30 bp, Artificial Sequence
  Synthetic oligonucleotide
acggcaaattacgctgacggcacatgccgt

SEQ ID NO: 300031 - DNA, 30 bp, Artificial Sequence
  Synthetic oligonucleotide
cgcaaacctgaagattttgaaaattgccgt

SEQ ID NO: 300032 - DNA, 30 bp, Artificial Sequence
  Synthetic oligonucleotide
attacttgaatgttttagacagattgccgt

SEQ ID NO: 300033 - DNA, 30 bp, Artificial Sequence
  Synthetic oligonucleotide
tatgccacaacagaataaggaacttgccgt

SEQ ID NO: 300034 - DNA, 30 bp, Artificial Sequence
  Synthetic oligonucleotide
cagaaaacttaacatctatcaggttgccgt

SEQ ID NO: 300035 - DNA, 30 bp, Artificial Sequence
  Synthetic oligonucleotide
agaattggggtaaagacaacaggaatccgt

SEQ ID NO: 300036 - DNA, 30 bp, Artificial Sequence
  Synthetic oligonucleotide
tggtttaccgggcagcctttcgacatccgt

SEQ ID NO: 300037 - DNA, 30 bp, Artificial Sequence
  Synthetic oligonucleotide
gtatagtagttgcaggagttgttcatccgt

SEQ ID NO: 300038 - DNA, 30 bp, Artificial Sequence
  Synthetic oligonucleotide
gcaatctaactacctaaacgtaggatccgt

SEQ ID NO: 300039 - DNA, 30 bp, Artificial Sequence
  Synthetic oligonucleotide
actcatgtggttatagtgaatcggatccgt

SEQ ID NO: 300040 - DNA, 30 bp, Artificial Sequence
  Synthetic oligonucleotide
ctgaagaaacgagtcaaacgtccagtccgt

SEQ ID NO: 300041 - DNA, 30 bp, Artificial Sequence
  Synthetic oligonucleotide
gtggaaggcctggtaacaactgacgtccgt

SEQ ID NO: 300042 - DNA, 30 bp, Artificial Sequence
  Synthetic oligonucleotide
tgaataaagcttgagtatgtccccgtccgt

SEQ ID NO: 300043 - DNA, 30 bp, Artificial Sequence
  Synthetic oligonucleotide
cgcctttctataagggtaaaaagtgtccgt

SEQ ID NO: 300044 - DNA, 30 bp, Artificial Sequence
  Synthetic oligonucleotide
tggtttatagaactgctaaagcttgtccgt

SEQ ID NO: 300045 - DNA, 30 bp, Artificial Sequence
  Synthetic oligonucleotide
aacccgacgttcacatgcactaacttccgt

SEQ ID NO: 300046 - DNA, 30 bp, Artificial Sequence
  Synthetic oligonucleotide
acgtaatcatgcaatggaatagttttccgt

SEQ ID NO: 300047 - DNA, 30 bp, Artificial Sequence
  Synthetic oligonucleotide
attagttgtcgcaccgcgtcgacaaagcgt

SEQ ID NO: 300048 - DNA, 30 bp, Artificial Sequence
  Synthetic oligonucleotide
tgcaatgtgtcttgcctaagcatcaagcgt

SEQ ID NO: 300049 - DNA, 30 bp, Artificial Sequence
  Synthetic oligonucleotide
cttgagcagtgtacatggtgatgtaagcgt

SEQ ID NO: 300050 - DNA, 30 bp, Artificial Sequence
  Synthetic oligonucleotide
gtggacgttatcgcatagtgcattcagcgt

SEQ ID NO: 300051 - DNA, 30 bp, Artificial Sequence
  Synthetic oligonucleotide
gttctcggctgagttcacaagcccgagcgt

SEQ ID NO: 300052 - DNA, 30 bp, Artificial Sequence
  Synthetic oligonucleotide
attagtgtggctacttaagttcgcgagcgt

SEQ ID NO: 300053 - DNA, 30 bp, Artificial Sequence
  Synthetic oligonucleotide
ttgggctgtccgttcgactgtttcgagcgt

SEQ ID NO: 300054 - DNA, 30 bp, Artificial Sequence
  Synthetic oligonucleotide
ggtgtaaagcggcggaaactagatgagcgt

SEQ ID NO: 300055 - DNA, 30 bp, Artificial Sequence
  Synthetic oligonucleotide
atctatccagactatacacaatctgagcgt

SEQ ID NO: 300056 - DNA, 30 bp, Artificial Sequence
  Synthetic oligonucleotide
cagtgaaccgaataggtttgtctctagcgt

SEQ ID NO: 300057 - DNA, 30 bp, Artificial Sequence
  Synthetic oligonucleotide
tgtctggtgtaggtggtatgggagtagcgt

SEQ ID NO: 300058 - DNA, 30 bp, Artificial Sequence
  Synthetic oligonucleotide
gggccactgactcactgggcttagtagcgt

SEQ ID NO: 300059 - DNA, 30 bp, Artificial Sequence
  Synthetic oligonucleotide
ccgcgatcacaatgggataaggcgtagcgt

SEQ ID NO: 300060 - DNA, 30 bp, Artificial Sequence
  Synthetic oligonucleotide
cacgggtcaagatcaccgcggcggtagcgt

SEQ ID NO: 300061 - DNA, 30 bp, Artificial Sequence
  Synthetic oligonucleotide
cctaaattggccatgaagattggcacgcgt

SEQ ID NO: 300062 - DNA, 30 bp, Artificial Sequence
  Synthetic oligonucleotide
cgaaatggatttctgcaaagaatcacgcgt

SEQ ID NO: 300063 - DNA, 30 bp, Artificial Sequence
  Synthetic oligonucleotide
tagaacgttatgttctggtcttctacgcgt

SEQ ID NO: 300064 - DNA, 30 bp, Artificial Sequence
  Synthetic oligonucleotide
acgcacggtctactgagtttgcgtacgcgt

SEQ ID NO: 300065 - DNA, 30 bp, Artificial Sequence
  Synthetic oligonucleotide
agtggatagagcggtttaattgtcccgcgt

SEQ ID NO: 300066 - DNA, 30 bp, Artificial Sequence
  Synthetic oligonucleotide
taatgagtgcgactcatacgtacgccgcgt

SEQ ID NO: 300067 - DNA, 30 bp, Artificial Sequence
  Synthetic oligonucleotide
aaccatcagccgatcgggcgtacgccgcgt

SEQ ID NO: 300068 - DNA, 30 bp, Artificial Sequence
  Synthetic oligonucleotide
ctgaacacacagaatatacctaggccgcgt

SEQ ID NO: 300069 - DNA, 30 bp, Artificial Sequence
  Synthetic oligonucleotide
gattacggcgaaatggactagactccgcgt

SEQ ID NO: 300070 - DNA, 30 bp, Artificial Sequence
  Synthetic oligonucleotide
ccgattgcacgggagaacggggaagcgcgt

SEQ ID NO: 300071 - DNA, 30 bp, Artificial Sequence
  Synthetic oligonucleotide
tgagcgtaatatgtaatgctgctggcgcgt

SEQ ID NO: 300072 - DNA, 30 bp, Artificial Sequence
  Synthetic oligonucleotide
ttatcgtgcagccccagtcaggtggcgcgt

SEQ ID NO: 300073 - DNA, 30 bp, Artificial Sequence
  Synthetic oligonucleotide
ccggaggccgcaaaacgtacggtggcgcgt

SEQ ID NO: 300074 - DNA, 30 bp, Artificial Sequence
  Synthetic oligonucleotide
ctgccccatgacgggagtacctctgcgcgt

SEQ ID NO: 300075 - DNA, 30 bp, Artificial Sequence
  Synthetic oligonucleotide
caggtgtaagcagcataggattctgcgcgt

SEQ ID NO: 300076 - DNA, 30 bp, Artificial Sequence
  Synthetic oligonucleotide
agccggctggcaatcggtatggactcgcgt

SEQ ID NO: 300077 - DNA, 30 bp, Artificial Sequence
  Synthetic oligonucleotide
cagacagaatggcaatagcacctctcgcgt

SEQ ID NO: 300078 - DNA, 30 bp, Artificial Sequence
  Synthetic oligonucleotide
ggctggtcaagacaacttttttagtcgcgt

SEQ ID NO: 300079 - DNA, 30 bp, Artificial Sequence
  Synthetic oligonucleotide
tacgaaggacccggtatataagtgtcgcgt

SEQ ID NO: 300080 - DNA, 30 bp, Artificial Sequence
  Synthetic oligonucleotide
gctaggaaatcaatcacctctgattcgcgt

SEQ ID NO: 300081 - DNA, 30 bp, Artificial Sequence
  Synthetic oligonucleotide
cacatgaaaagctatcgtcccacttcgcgt

SEQ ID NO: 300082 - DNA, 30 bp, Artificial Sequence
  Synthetic oligonucleotide
ttacaaggacgcgggtatttctacaggcgt

SEQ ID NO: 300083 - DNA, 30 bp, Artificial Sequence
  Synthetic oligonucleotide
gcaagcatttccgccgacaccaagaggcgt

SEQ ID NO: 300084 - DNA, 30 bp, Artificial Sequence
  Synthetic oligonucleotide
taccaaagttactgctataacagacggcgt

SEQ ID NO: 300085 - DNA, 30 bp, Artificial Sequence
  Synthetic oligonucleotide
agtattccaggacaattccaatcccggcgt

SEQ ID NO: 300086 - DNA, 30 bp, Artificial Sequence
  Synthetic oligonucleotide
gcaagatagccaaggggcgagttcgggcgt

SEQ ID NO: 300087 - DNA, 30 bp, Artificial Sequence
  Synthetic oligonucleotide
caaggcacggagaaaacgccagaggggcgt

SEQ ID NO: 300088 - DNA, 30 bp, Artificial Sequence
  Synthetic oligonucleotide
atttagcaaacgtcgggaactgaggggcgt

SEQ ID NO: 300089 - DNA, 30 bp, Artificial Sequence
  Synthetic oligonucleotide
tgtgagcagggtcccgcgaagagggggcgt

SEQ ID NO: 300090 - DNA, 30 bp, Artificial Sequence
  Synthetic oligonucleotide
gtaggaaataagattctatcgcaatggcgt

SEQ ID NO: 300091 - DNA, 30 bp, Artificial Sequence
  Synthetic oligonucleotide
atttcataggtaatgagtcagacctggcgt

SEQ ID NO: 300092 - DNA, 30 bp, Artificial Sequence
  Synthetic oligonucleotide
gggattcccagacttacgtcggcctggcgt

SEQ ID NO: 300093 - DNA, 30 bp, Artificial Sequence
  Synthetic oligonucleotide
ctcctcaatcaacccatagagtgctggcgt

SEQ ID NO: 300094 - DNA, 30 bp, Artificial Sequence
  Synthetic oligonucleotide
cgaagattcttaggttaacaggtctggcgt

SEQ ID NO: 300095 - DNA, 30 bp, Artificial Sequence
  Synthetic oligonucleotide
ggttccttcttggataatgtagggtggcgt

SEQ ID NO: 300096 - DNA, 30 bp, Artificial Sequence
  Synthetic oligonucleotide
gaaagctcggtgatcttgttgaattggcgt

SEQ ID NO: 300097 - DNA, 30 bp, Artificial Sequence
  Synthetic oligonucleotide
cgactcgcagtaaaacattcgcattggcgt

SEQ ID NO: 300098 - DNA, 30 bp, Artificial Sequence
  Synthetic oligonucleotide
ttggaccgcgggggcatagtaacttggcgt

SEQ ID NO: 300099 - DNA, 30 bp, Artificial Sequence
  Synthetic oligonucleotide
aacttcgacacaggtaatcgcgcttggcgt

SEQ ID NO: 300100 - DNA, 30 bp, Artificial Sequence
  Synthetic oligonucleotide
gactccatgtgtatgcaaaaagtaatgcgt

SEQ ID NO: 300101 - DNA, 30 bp, Artificial Sequence
  Synthetic oligonucleotide
ttaggtgtctgcaggtgaaggtacatgcgt

SEQ ID NO: 300102 - DNA, 30 bp, Artificial Sequence
  Synthetic oligonucleotide
caatgggtagaactacggctacgcatgcgt

SEQ ID NO: 300103 - DNA, 30 bp, Artificial Sequence
  Synthetic oligonucleotide
tcgactcggggttatagtgatgtcatgcgt

SEQ ID NO: 300104 - DNA, 30 bp, Artificial Sequence
  Synthetic oligonucleotide
taggtgggtttaaggtctagaaagatgcgt

SEQ ID NO: 300105 - DNA, 30 bp, Artificial Sequence
  Synthetic oligonucleotide
gcactggtgtaacataaactggagatgcgt

SEQ ID NO: 300106 - DNA, 30 bp, Artificial Sequence
  Synthetic oligonucleotide
gcgctttaacaatctaggaaggggatgcgt

SEQ ID NO: 300107 - DNA, 30 bp, Artificial Sequence
  Synthetic oligonucleotide
cacccctattggagtcccgaagatatgcgt

SEQ ID NO: 300108 - DNA, 30 bp, Artificial Sequence
  Synthetic oligonucleotide
tatacttgagtgagtcgagaatgtatgcgt

SEQ ID NO: 300109 - DNA, 30 bp, Artificial Sequence
  Synthetic oligonucleotide
gggccttattgcattattctgtgtatgcgt

SEQ ID NO: 300110 - DNA, 30 bp, Artificial Sequence
  Synthetic oligonucleotide
gtatgccgagaatacacacctcttatgcgt

SEQ ID NO: 300111 - DNA, 30 bp, Artificial Sequence
  Synthetic oligonucleotide
aatcgtatcgtaagcgggttggagctgcgt

SEQ ID NO: 300112 - DNA, 30 bp, Artificial Sequence
  Synthetic oligonucleotide
ctactcaatggactggcggcaatgctgcgt

SEQ ID NO: 300113 - DNA, 30 bp, Artificial Sequence
  Synthetic oligonucleotide
tgtctgagtagttattgagggagtctgcgt

SEQ ID NO: 300114 - DNA, 30 bp, Artificial Sequence
  Synthetic oligonucleotide
attcgggaagctggcgtcggaattctgcgt

SEQ ID NO: 300115 - DNA, 30 bp, Artificial Sequence
  Synthetic oligonucleotide
gccgtgaataacggagcttgcgttctgcgt

SEQ ID NO: 300116 - DNA, 30 bp, Artificial Sequence
  Synthetic oligonucleotide
gattcgaatatgtcttcagaaccagtgcgt

SEQ ID NO: 300117 - DNA, 30 bp, Artificial Sequence
  Synthetic oligonucleotide
tcagtcagctcgttgtctttgccagtgcgt

SEQ ID NO: 300118 - DNA, 30 bp, Artificial Sequence
  Synthetic oligonucleotide
agatctccttcagactcaaagatcgtgcgt

SEQ ID NO: 300119 - DNA, 30 bp, Artificial Sequence
  Synthetic oligonucleotide
tagccggaccgctatgagtcaaaggtgcgt

SEQ ID NO: 300120 - DNA, 30 bp, Artificial Sequence
  Synthetic oligonucleotide
aagggcttttctggaaatactacggtgcgt

SEQ ID NO: 300121 - DNA, 30 bp, Artificial Sequence
  Synthetic oligonucleotide
tatcggtcggagtgatatgtttcggtgcgt

SEQ ID NO: 300122 - DNA, 30 bp, Artificial Sequence
  Synthetic oligonucleotide
cagccgcattggcaaaagtggtgggtgcgt

SEQ ID NO: 300123 - DNA, 30 bp, Artificial Sequence
  Synthetic oligonucleotide
gagaagtgagttagtttaacaggcttgcgt

SEQ ID NO: 300124 - DNA, 30 bp, Artificial Sequence
  Synthetic oligonucleotide
ttcggtgacctctggctgggctaaaatcgt

SEQ ID NO: 300125 - DNA, 30 bp, Artificial Sequence
  Synthetic oligonucleotide
acgcgccctttctgacccgcccacaatcgt

SEQ ID NO: 300126 - DNA, 30 bp, Artificial Sequence
  Synthetic oligonucleotide
atcttatcgtagataatacataccaatcgt

SEQ ID NO: 300127 - DNA, 30 bp, Artificial Sequence
  Synthetic oligonucleotide
gcggtgattcattagtgtcggttcaatcgt

SEQ ID NO: 300128 - DNA, 30 bp, Artificial Sequence
  Synthetic oligonucleotide
ccgaattactgatcccgggtttagaatcgt

SEQ ID NO: 300129 - DNA, 30 bp, Artificial Sequence
  Synthetic oligonucleotide
gtgtaactaccgggtttggggggccatcgt

SEQ ID NO: 300130 - DNA, 30 bp, Artificial Sequence
  Synthetic oligonucleotide
gaatcagtcaagcatggtcgcaacgatcgt

SEQ ID NO: 300131 - DNA, 30 bp, Artificial Sequence
  Synthetic oligonucleotide
attagtgagcattactatctcgacgatcgt

SEQ ID NO: 300132 - DNA, 30 bp, Artificial Sequence
  Synthetic oligonucleotide
tatttggcgaaaacactgtcttaggatcgt

SEQ ID NO: 300133 - DNA, 30 bp, Artificial Sequence
  Synthetic oligonucleotide
ttacactcgagctatgttcgaggggatcgt

SEQ ID NO: 300134 - DNA, 30 bp, Artificial Sequence
  Synthetic oligonucleotide
atagacctatagcgtggtgtttaatatcgt

SEQ ID NO: 300135 - DNA, 30 bp, Artificial Sequence
  Synthetic oligonucleotide
aacggtatagagttggggcgactatatcgt

SEQ ID NO: 300136 - DNA, 30 bp, Artificial Sequence
  Synthetic oligonucleotide
tcattgtactagacatatgcacgctatcgt

SEQ ID NO: 300137 - DNA, 30 bp, Artificial Sequence
  Synthetic oligonucleotide
cagcaagtggcaacaatgaccgggtatcgt

SEQ ID NO: 300138 - DNA, 30 bp, Artificial Sequence
  Synthetic oligonucleotide
tcgaggggatcaattcaccatttttatcgt

SEQ ID NO: 300139 - DNA, 30 bp, Artificial Sequence
  Synthetic oligonucleotide
aaataccagtcgttacatggacgaactcgt

SEQ ID NO: 300140 - DNA, 30 bp, Artificial Sequence
  Synthetic oligonucleotide
tgagtaggtgcgttcttcccaggacctcgt

SEQ ID NO: 300141 - DNA, 30 bp, Artificial Sequence
  Synthetic oligonucleotide
aaggttgagcttccggtagagcaagctcgt

SEQ ID NO: 300142 - DNA, 30 bp, Artificial Sequence
  Synthetic oligonucleotide
ccaacgacggcgaggcaggtttaatctcgt

SEQ ID NO: 300143 - DNA, 30 bp, Artificial Sequence
  Synthetic oligonucleotide
gacgttcgaagccatgattttctttctcgt

SEQ ID NO: 300144 - DNA, 30 bp, Artificial Sequence
  Synthetic oligonucleotide
ttgtatgcaagtggacacggcataagtcgt

SEQ ID NO: 300145 - DNA, 30 bp, Artificial Sequence
  Synthetic oligonucleotide
gcgtaggtgagcggcagtgacagcagtcgt

SEQ ID NO: 300146 - DNA, 30 bp, Artificial Sequence
  Synthetic oligonucleotide
cgtgcacactctgtactcttgaagagtcgt

SEQ ID NO: 300147 - DNA, 30 bp, Artificial Sequence
  Synthetic oligonucleotide
agtagccctaactcacatgtaacgagtcgt

SEQ ID NO: 300148 - DNA, 30 bp, Artificial Sequence
  Synthetic oligonucleotide
gcgtttgataccgttcgaatcattagtcgt

SEQ ID NO: 300149 - DNA, 30 bp, Artificial Sequence
  Synthetic oligonucleotide
ctgccacgacacccaggtcgcttccgtcgt

SEQ ID NO: 300150 - DNA, 30 bp, Artificial Sequence
  Synthetic oligonucleotide
cagtaacagtgtgaaagacatcaaggtcgt

SEQ ID NO: 300151 - DNA, 30 bp, Artificial Sequence
  Synthetic oligonucleotide
gtgggcactaaattgtctcctagaggtcgt

SEQ ID NO: 300152 - DNA, 30 bp, Artificial Sequence
  Synthetic oligonucleotide
acacgcgtggtaaaccacattcgaggtcgt

SEQ ID NO: 300153 - DNA, 30 bp, Artificial Sequence
  Synthetic oligonucleotide
atgaaacatgcctggataaactgaggtcgt

SEQ ID NO: 300154 - DNA, 30 bp, Artificial Sequence
  Synthetic oligonucleotide
ctgaacaacccttttcattgggggggtcgt

SEQ ID NO: 300155 - DNA, 30 bp, Artificial Sequence
  Synthetic oligonucleotide
gtataactgtcatgataaggacttggtcgt

SEQ ID NO: 300156 - DNA, 30 bp, Artificial Sequence
  Synthetic oligonucleotide
gcgtcacaacattacacaacaggctgtcgt

SEQ ID NO: 300157 - DNA, 30 bp, Artificial Sequence
  Synthetic oligonucleotide
tatggagcgtgttaatcatttctgtgtcgt

SEQ ID NO: 300158 - DNA, 30 bp, Artificial Sequence
  Synthetic oligonucleotide
gcaattcgggagcgccattgacattgtcgt

SEQ ID NO: 300159 - DNA, 30 bp, Artificial Sequence
  Synthetic oligonucleotide
ggtacgaacctccaaatattggtttgtcgt

SEQ ID NO: 300160 - DNA, 30 bp, Artificial Sequence
  Synthetic oligonucleotide
tcgccacgcaatctctcgtgctaaattcgt

SEQ ID NO: 300161 - DNA, 31 bp, Artificial Sequence
  Synthetic oligonucleotide
gtacaaacattacaacttaagacgaattcgt

SEQ ID NO: 300162 - DNA, 30 bp, Artificial Sequence
  Synthetic oligonucleotide
gcctcgtataaagtatcctagggcattcgt

SEQ ID NO: 300163 - DNA, 30 bp, Artificial Sequence
  Synthetic oligonucleotide
tatccgcacccaagtttcaccttcattcgt

SEQ ID NO: 300164 - DNA, 30 bp, Artificial Sequence
  Synthetic oligonucleotide
cggtctctcacgctagtccacaagattcgt

SEQ ID NO: 300165 - DNA, 30 bp, Artificial Sequence
  Synthetic oligonucleotide
ccgatagtccatcgcgttgaccggattcgt

SEQ ID NO: 300166 - DNA, 30 bp, Artificial Sequence
  Synthetic oligonucleotide
accagggtgaacaggtctgacattcttcgt

SEQ ID NO: 300167 - DNA, 30 bp, Artificial Sequence
  Synthetic oligonucleotide
gtatttgtggggaccagacggtcagttcgt

SEQ ID NO: 300168 - DNA, 30 bp, Artificial Sequence
  Synthetic oligonucleotide
tggatatttgaatgagaaaaaaccgttcgt

SEQ ID NO: 300169 - DNA, 30 bp, Artificial Sequence
  Synthetic oligonucleotide
tcccactttactcagagtctatcggttcgt

SEQ ID NO: 300170 - DNA, 30 bp, Artificial Sequence
  Synthetic oligonucleotide
tgaacttatcgggtgtacgcactggttcgt

SEQ ID NO: 300171 - DNA, 30 bp, Artificial Sequence
  Synthetic oligonucleotide
tgaaggtccagtgtaatccgcacatttcgt

SEQ ID NO: 300172 - DNA, 30 bp, Artificial Sequence
  Synthetic oligonucleotide
agaacctagtccgtatatcgcctatttcgt

SEQ ID NO: 300173 - DNA, 30 bp, Artificial Sequence
  Synthetic oligonucleotide
ctgtaccctatagccaccaccaggtttcgt

SEQ ID NO: 300174 - DNA, 30 bp, Artificial Sequence
  Synthetic oligonucleotide
tatgcgttccgcacctgggataacaaaggt

SEQ ID NO: 300175 - DNA, 30 bp, Artificial Sequence
  Synthetic oligonucleotide
ttaccatggatcgaccgcaaggtcaaaggt

SEQ ID NO: 300176 - DNA, 30 bp, Artificial Sequence
  Synthetic oligonucleotide
cagctcaatttatcaccgtactcgaaaggt

SEQ ID NO: 300177 - DNA, 30 bp, Artificial Sequence
  Synthetic oligonucleotide
attctactatagaacacaaaatggaaaggt

SEQ ID NO: 300178 - DNA, 30 bp, Artificial Sequence
  Synthetic oligonucleotide
gataactttcaggaggtaacagataaaggt

SEQ ID NO: 300179 - DNA, 30 bp, Artificial Sequence
  Synthetic oligonucleotide
gttaccagggcttagctcctagataaaggt

SEQ ID NO: 300180 - DNA, 30 bp, Artificial Sequence
  Synthetic oligonucleotide
ataaaatccatagcgaatcatgttaaaggt

SEQ ID NO: 300181 - DNA, 30 bp, Artificial Sequence
  Synthetic oligonucleotide
ttaaggtgtcccatgaaaatagcacaaggt

SEQ ID NO: 300182 - DNA, 30 bp, Artificial Sequence
  Synthetic oligonucleotide
aggcgatcggtattaacacaactacaaggt

SEQ ID NO: 300183 - DNA, 30 bp, Artificial Sequence
  Synthetic oligonucleotide
tgtggggtgaacacccaggccccccaaggt

SEQ ID NO: 300184 - DNA, 30 bp, Artificial Sequence
  Synthetic oligonucleotide
tagtatgcacttaggtgccagtgccaaggt

SEQ ID NO: 300185 - DNA, 30 bp, Artificial Sequence
  Synthetic oligonucleotide
caaccgggtagtggtcaaagggagcaaggt

SEQ ID NO: 300186 - DNA, 30 bp, Artificial Sequence
  Synthetic oligonucleotide
gtacggcccggtactctaccgccgcaaggt

SEQ ID NO: 300187 - DNA, 30 bp, Artificial Sequence
  Synthetic oligonucleotide
gagcggctcaggtttcatctcaggcaaggt

SEQ ID NO: 300188 - DNA, 30 bp, Artificial Sequence
  Synthetic oligonucleotide
caacctgcgtcattcaataagagagaaggt

SEQ ID NO: 300189 - DNA, 30 bp, Artificial Sequence
  Synthetic oligonucleotide
gttttcgatacgttaagtccaggagaaggt

SEQ ID NO: 300190 - DNA, 30 bp, Artificial Sequence
  Synthetic oligonucleotide
cggtggggcatgggcatatcaacggaaggt

SEQ ID NO: 300191 - DNA, 30 bp, Artificial Sequence
  Synthetic oligonucleotide
acactgaccaaaccgcgacacccctaaggt

SEQ ID NO: 300192 - DNA, 30 bp, Artificial Sequence
  Synthetic oligonucleotide
tataatggtggccaccgtagcacgtaaggt

SEQ ID NO: 300193 - DNA, 30 bp, Artificial Sequence
  Synthetic oligonucleotide
cgtaagaggaacggtagtggaaggtaaggt

SEQ ID NO: 300194 - DNA, 30 bp, Artificial Sequence
  Synthetic oligonucleotide
ccccgaaggatgtaaaggatctgttaaggt

SEQ ID NO: 300195 - DNA, 30 bp, Artificial Sequence
  Synthetic oligonucleotide
aggacatataggatggagccaacaacaggt

SEQ ID NO: 300196 - DNA, 30 bp, Artificial Sequence
  Synthetic oligonucleotide
caaaatatttgcttagacacacggacaggt

SEQ ID NO: 300197 - DNA, 30 bp, Artificial Sequence
  Synthetic oligonucleotide
tgccaccccctactcctcaatctgacaggt

SEQ ID NO: 300198 - DNA, 30 bp, Artificial Sequence
  Synthetic oligonucleotide
tagatccccgaggccaggtagaatacaggt

SEQ ID NO: 300199 - DNA, 30 bp, Artificial Sequence
  Synthetic oligonucleotide
gcctacaagaaggggaactattctacaggt

SEQ ID NO: 300200 - DNA, 30 bp, Artificial Sequence
  Synthetic oligonucleotide
ttggttgagtatatatgtcaggttacaggt

SEQ ID NO: 300201 - DNA, 30 bp, Artificial Sequence
  Synthetic oligonucleotide
gggaagacctgggacgtgcttaaaccaggt

SEQ ID NO: 300202 - DNA, 30 bp, Artificial Sequence
  Synthetic oligonucleotide
aaaacgattgcagttctaccgtggccaggt

SEQ ID NO: 300203 - DNA, 30 bp, Artificial Sequence
  Synthetic oligonucleotide
gctttctattatttgcggccagttccaggt

SEQ ID NO: 300204 - DNA, 30 bp, Artificial Sequence
  Synthetic oligonucleotide
aaagatttgactgtgagcatctttccaggt

SEQ ID NO: 300205 - DNA, 30 bp, Artificial Sequence
  Synthetic oligonucleotide
cttgagcgtctttcaacgctggaagcaggt

SEQ ID NO: 300206 - DNA, 30 bp, Artificial Sequence
  Synthetic oligonucleotide
cgcgagactctgggctacaagccagcaggt

SEQ ID NO: 300207 - DNA, 30 bp, Artificial Sequence
  Synthetic oligonucleotide
tgaccagatctccctgaatcagccgcaggt

SEQ ID NO: 300208 - DNA, 30 bp, Artificial Sequence
  Synthetic oligonucleotide
taatcgacaacggtgcaatgatctgcaggt

SEQ ID NO: 300209 - DNA, 30 bp, Artificial Sequence
  Synthetic oligonucleotide
ttgatctgaaatggctaatggcgatcaggt

SEQ ID NO: 300210 - DNA, 30 bp, Artificial Sequence
  Synthetic oligonucleotide
gcaacgttatagatggaagatcgatcaggt

SEQ ID NO: 300211 - DNA, 30 bp, Artificial Sequence
  Synthetic oligonucleotide
aagagaaacgcgcctcctgtaaagtcaggt

SEQ ID NO: 300212 - DNA, 30 bp, Artificial Sequence
  Synthetic oligonucleotide
cggaaggtacgactgtttatccggtcaggt

SEQ ID NO: 300213 - DNA, 30 bp, Artificial Sequence
  Synthetic oligonucleotide
ccagcatggcgtcctgtctatcggtcaggt

SEQ ID NO: 300214 - DNA, 30 bp, Artificial Sequence
  Synthetic oligonucleotide
ttaccgacagtgagggggtttctgtcaggt

SEQ ID NO: 300215 - DNA, 30 bp, Artificial Sequence
  Synthetic oligonucleotide
caacttgggtcattagtacggcattcaggt

SEQ ID NO: 300216 - DNA, 30 bp, Artificial Sequence
  Synthetic oligonucleotide
tccgaataggtcacgaaaactgtttcaggt

SEQ ID NO: 300217 - DNA, 30 bp, Artificial Sequence
  Synthetic oligonucleotide
gggagttttttctgggagcttgcaagaggt

SEQ ID NO: 300218 - DNA, 30 bp, Artificial Sequence
  Synthetic oligonucleotide
actgcaagtcgtatgcaacttcgaagaggt

SEQ ID NO: 300219 - DNA, 30 bp, Artificial Sequence
  Synthetic oligonucleotide
ggatgctcgtctgacactacggagagaggt

SEQ ID NO: 300220 - DNA, 30 bp, Artificial Sequence
  Synthetic oligonucleotide
ccaccagagactatctaaactcatagaggt

SEQ ID NO: 300221 - DNA, 30 bp, Artificial Sequence
  Synthetic oligonucleotide
gatagcgcatgacccaccctcgatagaggt

SEQ ID NO: 300222 - DNA, 30 bp, Artificial Sequence
  Synthetic oligonucleotide
ttccaaacgaacgccgacttgagtagaggt

SEQ ID NO: 300223 - DNA, 30 bp, Artificial Sequence
  Synthetic oligonucleotide
gatggccatgcggttgtgggcggacgaggt

SEQ ID NO: 300224 - DNA, 30 bp, Artificial Sequence
  Synthetic oligonucleotide
tgtcttgcagtgtttcgtgacggtcgaggt

SEQ ID NO: 300225 - DNA, 30 bp, Artificial Sequence
  Synthetic oligonucleotide
attagggtttgggatatgcaaccctgaggt

SEQ ID NO: 300226 - DNA, 30 bp, Artificial Sequence
  Synthetic oligonucleotide
gttctgactgatgcccatccatggtgaggt

SEQ ID NO: 300227 - DNA, 30 bp, Artificial Sequence
  Synthetic oligonucleotide
atgccccgcattgaactctgacattgaggt

SEQ ID NO: 300228 - DNA, 30 bp, Artificial Sequence
  Synthetic oligonucleotide
tcgctcacttggtatacgtgccgcataggt

SEQ ID NO: 300229 - DNA, 30 bp, Artificial Sequence
  Synthetic oligonucleotide
aaaatccaaggatggcaaagaggcataggt

SEQ ID NO: 300230 - DNA, 30 bp, Artificial Sequence
  Synthetic oligonucleotide
tcttcttaagtatgagtacaagggataggt

SEQ ID NO: 300231 - DNA, 30 bp, Artificial Sequence
  Synthetic oligonucleotide
cctaaacttaggaatgccgtgtgtataggt

SEQ ID NO: 300232 - DNA, 30 bp, Artificial Sequence
  Synthetic oligonucleotide
acagatcgtggcgcgatgggttgtataggt

SEQ ID NO: 300233 - DNA, 30 bp, Artificial Sequence
  Synthetic oligonucleotide
gctatcataagctacttcggggttataggt

SEQ ID NO: 300234 - DNA, 30 bp, Artificial Sequence
  Synthetic oligonucleotide
tcagctttctagaatcacacaagcctaggt

SEQ ID NO: 300235 - DNA, 30 bp, Artificial Sequence
  Synthetic oligonucleotide
aagtaagcgctacatgatggggtcctaggt

SEQ ID NO: 300236 - DNA, 29 bp, Artificial Sequence
  Synthetic oligonucleotide
tactagggaaatcatggtccaggctaggt

SEQ ID NO: 300237 - DNA, 30 bp, Artificial Sequence
  Synthetic oligonucleotide
gtcaatgcattctaatccggaatgctaggt

SEQ ID NO: 300238 - DNA, 30 bp, Artificial Sequence
  Synthetic oligonucleotide
atatcagatctttgcgccgtgactctaggt

SEQ ID NO: 300239 - DNA, 30 bp, Artificial Sequence
  Synthetic oligonucleotide
ggtacgacccgtgggcgtgattaagtaggt

SEQ ID NO: 300240 - DNA, 30 bp, Artificial Sequence
  Synthetic oligonucleotide
ggagagttcatgattgacttatgagtaggt

SEQ ID NO: 300241 - DNA, 30 bp, Artificial Sequence
  Synthetic oligonucleotide
gctggtagtcactagatgtgttacgtaggt

SEQ ID NO: 300242 - DNA, 30 bp, Artificial Sequence
  Synthetic oligonucleotide
tcactcgagataccagccgccgtcgtaggt

SEQ ID NO: 300243 - DNA, 30 bp, Artificial Sequence
  Synthetic oligonucleotide
tgaacggggcttgcaattacagtggtaggt

SEQ ID NO: 300244 - DNA, 30 bp, Artificial Sequence
  Synthetic oligonucleotide
tggttcaacgagcatgcatgttgtgtaggt

SEQ ID NO: 300245 - DNA, 30 bp, Artificial Sequence
  Synthetic oligonucleotide
aagagcggcacccctcgagtggaattaggt

SEQ ID NO: 300246 - DNA, 30 bp, Artificial Sequence
  Synthetic oligonucleotide
taaatcaaacaggcgatccaatgattaggt

SEQ ID NO: 300247 - DNA, 30 bp, Artificial Sequence
  Synthetic oligonucleotide
acgcaaacactgatcttgctactcttaggt

SEQ ID NO: 300248 - DNA, 30 bp, Artificial Sequence
  Synthetic oligonucleotide
cgggttaggcgccgccagcctacgttaggt

SEQ ID NO: 300249 - DNA, 30 bp, Artificial Sequence
  Synthetic oligonucleotide
gatgtgcgcttactacctcaatcgttaggt

SEQ ID NO: 300250 - DNA, 30 bp, Artificial Sequence
  Synthetic oligonucleotide
gagcccatagaaaatcagccccggttaggt

SEQ ID NO: 300251 - DNA, 30 bp, Artificial Sequence
  Synthetic oligonucleotide
aatgtcaatgacgaagcccttagaaacggt

SEQ ID NO: 300252 - DNA, 30 bp, Artificial Sequence
  Synthetic oligonucleotide
tagcaaactacatcttcattccgaaacggt

SEQ ID NO: 300253 - DNA, 30 bp, Artificial Sequence
  Synthetic oligonucleotide
ctcgtaaggcgattatttgacaacaacggt

SEQ ID NO: 300254 - DNA, 30 bp, Artificial Sequence
  Synthetic oligonucleotide
gttagtgcaaaccatgggtaaaccaacggt

SEQ ID NO: 300255 - DNA, 29 bp, Artificial Sequence
  Synthetic oligonucleotide
aggcttgccacacaataatgctcaacggt

SEQ ID NO: 300256 - DNA, 30 bp, Artificial Sequence
  Synthetic oligonucleotide
gttaactggctaaaccagaacaagaacggt

SEQ ID NO: 300257 - DNA, 30 bp, Artificial Sequence
  Synthetic oligonucleotide
tatcaggataatatatctaacaagaacggt

SEQ ID NO: 300258 - DNA, 30 bp, Artificial Sequence
  Synthetic oligonucleotide
ccgagtcgacttccgaaaatttcgaacggt

SEQ ID NO: 300259 - DNA, 30 bp, Artificial Sequence
  Synthetic oligonucleotide
taagggaaagttagcttcgccaataacggt

SEQ ID NO: 300260 - DNA, 30 bp, Artificial Sequence
  Synthetic oligonucleotide
ttagaggtcgtcaagtggctctataacggt

SEQ ID NO: 300261 - DNA, 30 bp, Artificial Sequence
  Synthetic oligonucleotide
cacgcatagtcgctgtggcatattaacggt

SEQ ID NO: 300262 - DNA, 30 bp, Artificial Sequence
  Synthetic oligonucleotide
gaggcgttatcaaagcaatcgttacacggt

SEQ ID NO: 300263 - DNA, 30 bp, Artificial Sequence
  Synthetic oligonucleotide
gaactcgtcctaaagcagaaatagcacggt

SEQ ID NO: 300264 - DNA, 30 bp, Artificial Sequence
  Synthetic oligonucleotide
gtcgagacgcgaaagcgcaatcctcacggt

SEQ ID NO: 300265 - DNA, 30 bp, Artificial Sequence
  Synthetic oligonucleotide
atagactatcaggtaagcagttgtcacggt

SEQ ID NO: 300266 - DNA, 30 bp, Artificial Sequence
  Synthetic oligonucleotide
gccaacatcgctaagtcgcctcaagacggt

SEQ ID NO: 300267 - DNA, 30 bp, Artificial Sequence
  Synthetic oligonucleotide
cctaactttgttaacccgatactagacggt

SEQ ID NO: 300268 - DNA, 30 bp, Artificial Sequence
  Synthetic oligonucleotide
cccgtaaagcgaccttacaggcccgacggt

SEQ ID NO: 300269 - DNA, 30 bp, Artificial Sequence
  Synthetic oligonucleotide
tcgccgtctagtcactcatcttccgacggt

SEQ ID NO: 300270 - DNA, 30 bp, Artificial Sequence
  Synthetic oligonucleotide
gggtgagtaaaaggtattgaaaaatacggt

SEQ ID NO: 300271 - DNA, 30 bp, Artificial Sequence
  Synthetic oligonucleotide
gggcaacggtgccgtatacacaaatacggt

SEQ ID NO: 300272 - DNA, 30 bp, Artificial Sequence
  Synthetic oligonucleotide
gataatgatacatgctgtcagcaatacggt

SEQ ID NO: 300273 - DNA, 30 bp, Artificial Sequence
  Synthetic oligonucleotide
tagcttgaggccttctatgaaacatacggt

SEQ ID NO: 300274 - DNA, 30 bp, Artificial Sequence
  Synthetic oligonucleotide
agagtcgctgacggcatttgacgctacggt

SEQ ID NO: 300275 - DNA, 30 bp, Artificial Sequence
  Synthetic oligonucleotide
gcagtcccaactcgtcgtatcaagtacggt

SEQ ID NO: 300276 - DNA, 30 bp, Artificial Sequence
  Synthetic oligonucleotide
atatcatactttgaataagtaatgtacggt

SEQ ID NO: 300277 - DNA, 30 bp, Artificial Sequence
  Synthetic oligonucleotide
gaatcctcaagttattcgagaaacaccggt

SEQ ID NO: 300278 - DNA, 30 bp, Artificial Sequence
  Synthetic oligonucleotide
gtggagtgggagtgtaatgttaataccggt

SEQ ID NO: 300279 - DNA, 30 bp, Artificial Sequence
  Synthetic oligonucleotide
tacagggtaggaacgccaggaattaccggt

SEQ ID NO: 300280 - DNA, 30 bp, Artificial Sequence
  Synthetic oligonucleotide
aaagtactggaggcgatttcgaaacccggt

SEQ ID NO: 300281 - DNA, 30 bp, Artificial Sequence
  Synthetic oligonucleotide
gtagacagttcctctaatataatacccggt

SEQ ID NO: 300282 - DNA, 30 bp, Artificial Sequence
  Synthetic oligonucleotide
acggatcactagtactactacccccccggt

SEQ ID NO: 300283 - DNA, 30 bp, Artificial Sequence
  Synthetic oligonucleotide
gcggaaccgtcgctgtattggccccccggt

SEQ ID NO: 300284 - DNA, 30 bp, Artificial Sequence
  Synthetic oligonucleotide
cttatgaggcgccatggtgctgtccccggt

SEQ ID NO: 300285 - DNA, 30 bp, Artificial Sequence
  Synthetic oligonucleotide
atgaaccacctggggaaaacaccgcccggt

SEQ ID NO: 300286 - DNA, 30 bp, Artificial Sequence
  Synthetic oligonucleotide
ggaatacgcgagttagagcaggggcccggt

SEQ ID NO: 300287 - DNA, 30 bp, Artificial Sequence
  Synthetic oligonucleotide
catagtgcaccttttttactgtggcccggt

SEQ ID NO: 300288 - DNA, 30 bp, Artificial Sequence
  Synthetic oligonucleotide
tgtattgttacaattctttaggcagccggt

SEQ ID NO: 300289 - DNA, 30 bp, Artificial Sequence
  Synthetic oligonucleotide
ggtaaagtctatcgatgagcaagcgccggt

SEQ ID NO: 300290 - DNA, 30 bp, Artificial Sequence
  Synthetic oligonucleotide
tgttccctgatatcgcttaagtgcgccggt

SEQ ID NO: 300291 - DNA, 30 bp, Artificial Sequence
  Synthetic oligonucleotide
cggaatattaagcttcgccaccaatccggt

SEQ ID NO: 300292 - DNA, 30 bp, Artificial Sequence
  Synthetic oligonucleotide
gaacaatatcaggattccttgaactccggt

SEQ ID NO: 300293 - DNA, 30 bp, Artificial Sequence
  Synthetic oligonucleotide
agactgaccccaatggcatcggcctccggt

SEQ ID NO: 300294 - DNA, 30 bp, Artificial Sequence
  Synthetic oligonucleotide
ttaccaaaagcagtcatatacaaaagcggt

SEQ ID NO: 300295 - DNA, 30 bp, Artificial Sequence
  Synthetic oligonucleotide
aagtttacacgtagggtttgtcgaagcggt

SEQ ID NO: 300296 - DNA, 30 bp, Artificial Sequence
  Synthetic oligonucleotide
caatcataaattacttgaggatgcagcggt

SEQ ID NO: 300297 - DNA, 30 bp, Artificial Sequence
  Synthetic oligonucleotide
gtcgatcacccagggcaatcttagagcggt

SEQ ID NO: 300298 - DNA, 30 bp, Artificial Sequence
  Synthetic oligonucleotide
atcctcaaatgatctacctttcatagcggt

SEQ ID NO: 300299 - DNA, 30 bp, Artificial Sequence
  Synthetic oligonucleotide
aaccattctcttacaaactggagtagcggt

SEQ ID NO: 300300 - DNA, 30 bp, Artificial Sequence
  Synthetic oligonucleotide
accggatatgggcttagatggtcacgcggt

SEQ ID NO: 300301 - DNA, 29 bp, Artificial Sequence
  Synthetic oligonucleotide
ttaagcccggtacagcacgtaagcgcggt

SEQ ID NO: 300302 - DNA, 30 bp, Artificial Sequence
  Synthetic oligonucleotide
aagttatccgactgtctaaggtcgcgcggt

SEQ ID NO: 300303 - DNA, 30 bp, Artificial Sequence
  Synthetic oligonucleotide
atgtgtcgtagacccaaggtaaggcgcggt

SEQ ID NO: 300304 - DNA, 30 bp, Artificial Sequence
  Synthetic oligonucleotide
atcagtttttgagtaacgggataaggcggt

SEQ ID NO: 300305 - DNA, 30 bp, Artificial Sequence
  Synthetic oligonucleotide
gtgagaagctgaacgtagatggcaggcggt

SEQ ID NO: 300306 - DNA, 30 bp, Artificial Sequence
  Synthetic oligonucleotide
tatatgctagactcggacaaaatgggcggt

SEQ ID NO: 300307 - DNA, 30 bp, Artificial Sequence
  Synthetic oligonucleotide
aatggttcatccttcaagcgtctgggcggt

SEQ ID NO: 300308 - DNA, 30 bp, Artificial Sequence
  Synthetic oligonucleotide
acattagctggatatcggaaattgggcggt

SEQ ID NO: 300309 - DNA, 30 bp, Artificial Sequence
  Synthetic oligonucleotide
cgacggctggcagatctggatttgggcggt

SEQ ID NO: 300310 - DNA, 30 bp, Artificial Sequence
  Synthetic oligonucleotide
gatggctagggtggtctgtaagatggcggt

SEQ ID NO: 300311 - DNA, 30 bp, Artificial Sequence
  Synthetic oligonucleotide
cgagattattcatatcacttgcgctgcggt

SEQ ID NO: 300312 - DNA, 30 bp, Artificial Sequence
  Synthetic oligonucleotide
acacagcactgctaagtaatgtacatcggt

SEQ ID NO: 300313 - DNA, 30 bp, Artificial Sequence
  Synthetic oligonucleotide
gagattcaggtacgccgggtgctcatcggt

SEQ ID NO: 300314 - DNA, 30 bp, Artificial Sequence
  Synthetic oligonucleotide
ctatgtcctgtagcacatgcatctatcggt

SEQ ID NO: 300315 - DNA, 30 bp, Artificial Sequence
  Synthetic oligonucleotide
caaacgtttataacaggatcgtgactcggt

SEQ ID NO: 300316 - DNA, 30 bp, Artificial Sequence
  Synthetic oligonucleotide
gctgatattttcgctacaacggtactcggt

SEQ ID NO: 300317 - DNA, 30 bp, Artificial Sequence
  Synthetic oligonucleotide
tagatgattaggagttttattaacctcggt

SEQ ID NO: 300318 - DNA, 30 bp, Artificial Sequence
  Synthetic oligonucleotide
tcgaagcagtatgtccttctagtcctcggt

SEQ ID NO: 300319 - DNA, 30 bp, Artificial Sequence
  Synthetic oligonucleotide
ccaattcggttcacctcgcgcaacgtcggt

SEQ ID NO: 300320 - DNA, 30 bp, Artificial Sequence
  Synthetic oligonucleotide
agagatacaaccggcgatatggccgtcggt

SEQ ID NO: 300321 - DNA, 30 bp, Artificial Sequence
  Synthetic oligonucleotide
tgggacggagtaattcaccagacggtcggt

SEQ ID NO: 300322 - DNA, 30 bp, Artificial Sequence
  Synthetic oligonucleotide
tccgctggctatgactttgatggggtcggt

SEQ ID NO: 300323 - DNA, 30 bp, Artificial Sequence
  Synthetic oligonucleotide
taccataaatccacttcaaagatggtcggt

SEQ ID NO: 300324 - DNA, 30 bp, Artificial Sequence
  Synthetic oligonucleotide
gtggtggacgtgagtatttcgggtgtcggt

SEQ ID NO: 300325 - DNA, 30 bp, Artificial Sequence
  Synthetic oligonucleotide
gtcattagttagctagtaacggtattcggt

SEQ ID NO: 300326 - DNA, 30 bp, Artificial Sequence
  Synthetic oligonucleotide
tgtgtaagcatcaaagggattctgttcggt

SEQ ID NO: 300327 - DNA, 30 bp, Artificial Sequence
  Synthetic oligonucleotide
gcggacggggcgcgagtgggacctttcggt

SEQ ID NO: 300328 - DNA, 30 bp, Artificial Sequence
  Synthetic oligonucleotide
gcttcgacatcgtgccactattcaaagggt

SEQ ID NO: 300329 - DNA, 30 bp, Artificial Sequence
  Synthetic oligonucleotide
tcatgtgcagcagcatcacactacaagggt

SEQ ID NO: 300330 - DNA, 30 bp, Artificial Sequence
  Synthetic oligonucleotide
acgcatggtattagtgactgcgtcaagggt

SEQ ID NO: 300331 - DNA, 30 bp, Artificial Sequence
  Synthetic oligonucleotide
ttaaagtgtgcctgtgacggaactaagggt

SEQ ID NO: 300332 - DNA, 31 bp, Artificial Sequence
  Synthetic oligonucleotide
tgcgagcgggaacaatatctcacgtaagggt

SEQ ID NO: 300333 - DNA, 30 bp, Artificial Sequence
  Synthetic oligonucleotide
gtgggtctgttttgtagaaattgtaagggt

SEQ ID NO: 300334 - DNA, 30 bp, Artificial Sequence
  Synthetic oligonucleotide
aaacagacacgagagagtcgatttaagggt

SEQ ID NO: 300335 - DNA, 30 bp, Artificial Sequence
  Synthetic oligonucleotide
ccacgaaggacgtttttaccgacacagggt

SEQ ID NO: 300336 - DNA, 30 bp, Artificial Sequence
  Synthetic oligonucleotide
gatggataggcagtagagattggacagggt

SEQ ID NO: 300337 - DNA, 30 bp, Artificial Sequence
  Synthetic oligonucleotide
tttcgtaaccgtggatcagagtaccagggt

SEQ ID NO: 300338 - DNA, 30 bp, Artificial Sequence
  Synthetic oligonucleotide
ttccaaaagacgttcgggcgacgccagggt

SEQ ID NO: 300339 - DNA, 30 bp, Artificial Sequence
  Synthetic oligonucleotide
tgagcaaacaagcatatgcatctccagggt

SEQ ID NO: 300340 - DNA, 30 bp, Artificial Sequence
  Synthetic oligonucleotide
gcactagaccttactttcgtcgatcagggt

SEQ ID NO: 300341 - DNA, 30 bp, Artificial Sequence
  Synthetic oligonucleotide
aaagtcggtagttcagtctatcaagagggt

SEQ ID NO: 300342 - DNA, 31 bp, Artificial Sequence
  Synthetic oligonucleotide
tacgggtatacgttacggatatcacgagggt

SEQ ID NO: 300343 - DNA, 30 bp, Artificial Sequence
  Synthetic oligonucleotide
tgtcaggagctactacatcagagatagggt

SEQ ID NO: 300344 - DNA, 30 bp, Artificial Sequence
  Synthetic oligonucleotide
aagaaaaagaaacgacggataggatagggt

SEQ ID NO: 300345 - DNA, 30 bp, Artificial Sequence
  Synthetic oligonucleotide
cgtaaatagcagtgctctatgaagtagggt

SEQ ID NO: 300346 - DNA, 30 bp, Artificial Sequence
  Synthetic oligonucleotide
attgagatattatcatatgtgacgtagggt

SEQ ID NO: 300347 - DNA, 30 bp, Artificial Sequence
  Synthetic oligonucleotide
cctgaagaatgcctatctgtcacttagggt

SEQ ID NO: 300348 - DNA, 30 bp, Artificial Sequence
  Synthetic oligonucleotide
gccacactttaaacgaggtagtgttagggt

SEQ ID NO: 300349 - DNA, 30 bp, Artificial Sequence
  Synthetic oligonucleotide
cctttacgaggccgactcatctccacgggt

SEQ ID NO: 300350 - DNA, 31 bp, Artificial Sequence
  Synthetic oligonucleotide
acatcatttctcgagtgctcgccgcacgggt

SEQ ID NO: 300351 - DNA, 30 bp, Artificial Sequence
  Synthetic oligonucleotide
gccgcgatggactccttgctgtatacgggt

SEQ ID NO: 300352 - DNA, 30 bp, Artificial Sequence
  Synthetic oligonucleotide
agtctggaatgggttcggcccgctacgggt

SEQ ID NO: 300353 - DNA, 30 bp, Artificial Sequence
  Synthetic oligonucleotide
atgcttactgtagaggctggaagaccgggt

SEQ ID NO: 300354 - DNA, 30 bp, Artificial Sequence
  Synthetic oligonucleotide
gttacagcaaggtcgtcccttctgccgggt

SEQ ID NO: 300355 - DNA, 30 bp, Artificial Sequence
  Synthetic oligonucleotide
tagtgacagaggcgcttaagggtgccgggt

SEQ ID NO: 300356 - DNA, 30 bp, Artificial Sequence
  Synthetic oligonucleotide
acttatcattatgaagaaggtggtccgggt

SEQ ID NO: 300357 - DNA, 30 bp, Artificial Sequence
  Synthetic oligonucleotide
aagcggccattttttctaataaaagcgggt

SEQ ID NO: 300358 - DNA, 30 bp, Artificial Sequence
  Synthetic oligonucleotide
aagcaccaaagaatactaaatcccgcgggt

SEQ ID NO: 300359 - DNA, 30 bp, Artificial Sequence
  Synthetic oligonucleotide
gctaagagcggcgagtacgcgctcgcgggt

SEQ ID NO: 300360 - DNA, 30 bp, Artificial Sequence
  Synthetic oligonucleotide
gaccgcaaaattttggaatcgagggcgggt

SEQ ID NO: 300361 - DNA, 30 bp, Artificial Sequence
  Synthetic oligonucleotide
tctttctgttggacaggcataaatgcgggt

SEQ ID NO: 300362 - DNA, 30 bp, Artificial Sequence
  Synthetic oligonucleotide
atgatacctatgcaacccaagcatgcgggt

SEQ ID NO: 300363 - DNA, 30 bp, Artificial Sequence
  Synthetic oligonucleotide
gctccagatattcactttgaatatgcgggt

SEQ ID NO: 300364 - DNA, 30 bp, Artificial Sequence
  Synthetic oligonucleotide
ggtctggagggcagatcaagccctgcgggt

SEQ ID NO: 300365 - DNA, 30 bp, Artificial Sequence
  Synthetic oligonucleotide
gaggctttcagaaatcacagtcgtgcgggt

SEQ ID NO: 300366 - DNA, 30 bp, Artificial Sequence
  Synthetic oligonucleotide
tctataatggacgaattaccgtaatcgggt

SEQ ID NO: 300367 - DNA, 30 bp, Artificial Sequence
  Synthetic oligonucleotide
cgtaatagaggagatctgatttgatcgggt

SEQ ID NO: 300368 - DNA, 30 bp, Artificial Sequence
  Synthetic oligonucleotide
ggatctcatttttagctaatgagctcgggt

SEQ ID NO: 300369 - DNA, 30 bp, Artificial Sequence
  Synthetic oligonucleotide
atttgccatcctttggcccgatgctcgggt

SEQ ID NO: 300370 - DNA, 30 bp, Artificial Sequence
  Synthetic oligonucleotide
cggggattcgctctcggcgttggttcgggt

SEQ ID NO: 300371 - DNA, 30 bp, Artificial Sequence
  Synthetic oligonucleotide
cgtgaatgttataaagcatcactaaggggt

SEQ ID NO: 300372 - DNA, 30 bp, Artificial Sequence
  Synthetic oligonucleotide
tgtgcgtgaagtgccataatattaaggggt

SEQ ID NO: 300373 - DNA, 30 bp, Artificial Sequence
  Synthetic oligonucleotide
ggcagtgactaagcagccgagtgcaggggt

SEQ ID NO: 300374 - DNA, 30 bp, Artificial Sequence
  Synthetic oligonucleotide
gtggtccatggaacgtgctcactcaggggt

SEQ ID NO: 300375 - DNA, 30 bp, Artificial Sequence
  Synthetic oligonucleotide
acttcatgcaccttctaaaacaggaggggt

SEQ ID NO: 300376 - DNA, 30 bp, Artificial Sequence
  Synthetic oligonucleotide
gagacgcgagaggatagtcataataggggt

SEQ ID NO: 300377 - DNA, 30 bp, Artificial Sequence
  Synthetic oligonucleotide
ctgggtggtgtctcgtgtaacagtaggggt

SEQ ID NO: 300378 - DNA, 30 bp, Artificial Sequence
  Synthetic oligonucleotide
cgaaaaaagtctagttccccttgtaggggt

SEQ ID NO: 300379 - DNA, 30 bp, Artificial Sequence
  Synthetic oligonucleotide
gagtacagagggatgtggccacaacggggt

SEQ ID NO: 300380 - DNA, 30 bp, Artificial Sequence
  Synthetic oligonucleotide
ccggtcctagcgtaagcgcggtgacggggt

SEQ ID NO: 300381 - DNA, 30 bp, Artificial Sequence
  Synthetic oligonucleotide
cggagaaaagttatcctctgtgagcggggt

SEQ ID NO: 300382 - DNA, 30 bp, Artificial Sequence
  Synthetic oligonucleotide
agacaatgaggcacctcccacttgcggggt

SEQ ID NO: 300383 - DNA, 30 bp, Artificial Sequence
  Synthetic oligonucleotide
tcgtaagtaaacctcgctccccgtcggggt

SEQ ID NO: 300384 - DNA, 30 bp, Artificial Sequence
  Synthetic oligonucleotide
cggaagctgatgaacatcgcttgtcggggt

SEQ ID NO: 300385 - DNA, 30 bp, Artificial Sequence
  Synthetic oligonucleotide
tgcgaaccaaagggttctgttgaagggggt

SEQ ID NO: 300386 - DNA, 30 bp, Artificial Sequence
  Synthetic oligonucleotide
tgagaaattgatacaaagaatccagggggt

SEQ ID NO: 300387 - DNA, 30 bp, Artificial Sequence
  Synthetic oligonucleotide
atagcatgactggcaacgacgttagggggt

SEQ ID NO: 300388 - DNA, 30 bp, Artificial Sequence
  Synthetic oligonucleotide
tatacaaaaggagcgtacaattaggggggt

SEQ ID NO: 300389 - DNA, 30 bp, Artificial Sequence
  Synthetic oligonucleotide
ggagtgttgtaatggccaacggctgggggt

SEQ ID NO: 300390 - DNA, 30 bp, Artificial Sequence
  Synthetic oligonucleotide
acatttatggagcagccccgtagatggggt

SEQ ID NO: 300391 - DNA, 30 bp, Artificial Sequence
  Synthetic oligonucleotide
tccgtaagcacattagtggttaagtggggt

SEQ ID NO: 300392 - DNA, 30 bp, Artificial Sequence
  Synthetic oligonucleotide
tacttgcggtagattgtgtcattgtggggt

SEQ ID NO: 300393 - DNA, 30 bp, Artificial Sequence
  Synthetic oligonucleotide
catttacatagcgcactccctcattggggt

SEQ ID NO: 300394 - DNA, 30 bp, Artificial Sequence
  Synthetic oligonucleotide
tgttggggtgtagcagtcaccgattggggt

SEQ ID NO: 300395 - DNA, 30 bp, Artificial Sequence
  Synthetic oligonucleotide
tagacgatttcaacgacgtattaaatgggt

SEQ ID NO: 300396 - DNA, 30 bp, Artificial Sequence
  Synthetic oligonucleotide
ttgtcccattaggaacccagcgtaatgggt

SEQ ID NO: 300397 - DNA, 30 bp, Artificial Sequence
  Synthetic oligonucleotide
gcgactattactttatcggttgtaatgggt

SEQ ID NO: 300398 - DNA, 30 bp, Artificial Sequence
  Synthetic oligonucleotide
atatacgggagtgcgtatcgtcccatgggt

SEQ ID NO: 300399 - DNA, 30 bp, Artificial Sequence
  Synthetic oligonucleotide
gggttggaattagttaaccgctccatgggt

SEQ ID NO: 300400 - DNA, 30 bp, Artificial Sequence
  Synthetic oligonucleotide
tgggcgctacgaacctacgggaagatgggt

SEQ ID NO: 300401 - DNA, 30 bp, Artificial Sequence
  Synthetic oligonucleotide
gccgtcgtccaagcagcacacgcgatgggt

SEQ ID NO: 300402 - DNA, 30 bp, Artificial Sequence
  Synthetic oligonucleotide
tgatagtatggtgtaagaagtctgatgggt

SEQ ID NO: 300403 - DNA, 30 bp, Artificial Sequence
  Synthetic oligonucleotide
agttgggacggcggtcaaaggtaactgggt

SEQ ID NO: 300404 - DNA, 30 bp, Artificial Sequence
  Synthetic oligonucleotide
cctatcacttgagtaccgttcgacctgggt

SEQ ID NO: 300405 - DNA, 30 bp, Artificial Sequence
  Synthetic oligonucleotide
aggccacttaaagtgtgctcacccctgggt

SEQ ID NO: 300406 - DNA, 30 bp, Artificial Sequence
  Synthetic oligonucleotide
gacgcgtccgcctgaatcaagggtctgggt

SEQ ID NO: 300407 - DNA, 30 bp, Artificial Sequence
  Synthetic oligonucleotide
gactagacgcatttatctactaccgtgggt

SEQ ID NO: 300408 - DNA, 30 bp, Artificial Sequence
  Synthetic oligonucleotide
ggtatttctctttcgttcccggcggtgggt

SEQ ID NO: 300409 - DNA, 30 bp, Artificial Sequence
  Synthetic oligonucleotide
atcaaggttcactcctaggaatgattgggt

SEQ ID NO: 300410 - DNA, 30 bp, Artificial Sequence
  Synthetic oligonucleotide
cgattgaattaagcgaagcgtggcttgggt

SEQ ID NO: 300411 - DNA, 30 bp, Artificial Sequence
  Synthetic oligonucleotide
cttcagtaacgctactgcggatgcttgggt

SEQ ID NO: 300412 - DNA, 30 bp, Artificial Sequence
  Synthetic oligonucleotide
ctttgggggaacaggcacaagtaaaatggt

SEQ ID NO: 300413 - DNA, 30 bp, Artificial Sequence
  Synthetic oligonucleotide
gagcgtctttttgactggtgggcaaatggt

SEQ ID NO: 300414 - DNA, 30 bp, Artificial Sequence
  Synthetic oligonucleotide
atatctagtaattaaggctcattaaatggt

SEQ ID NO: 300415 - DNA, 30 bp, Artificial Sequence
  Synthetic oligonucleotide
ccgtacaaaaccgcggttatccgcaatggt

SEQ ID NO: 300416 - DNA, 31 bp, Artificial Sequence
  Synthetic oligonucleotide
ggcggaatctcagggattccccatgaatggt

SEQ ID NO: 300417 - DNA, 30 bp, Artificial Sequence
  Synthetic oligonucleotide
tggaccagctaagtgcgttaggataatggt

SEQ ID NO: 300418 - DNA, 30 bp, Artificial Sequence
  Synthetic oligonucleotide
tccagtcgaaaattccaaaagggacatggt

SEQ ID NO: 300419 - DNA, 30 bp, Artificial Sequence
  Synthetic oligonucleotide
ttagggttttagggaggtggcggccatggt

SEQ ID NO: 300420 - DNA, 31 bp, Artificial Sequence
  Synthetic oligonucleotide
cttcggtttaactttaatggaatgccatggt

SEQ ID NO: 300421 - DNA, 30 bp, Artificial Sequence
  Synthetic oligonucleotide
atggccgaaagtagatattgattccatggt

SEQ ID NO: 300422 - DNA, 30 bp, Artificial Sequence
  Synthetic oligonucleotide
ccactggtatggcggcccaaggtgcatggt

SEQ ID NO: 300423 - DNA, 30 bp, Artificial Sequence
  Synthetic oligonucleotide
cttacgatgaacataatacctttgcatggt

SEQ ID NO: 300424 - DNA, 30 bp, Artificial Sequence
  Synthetic oligonucleotide
catgttcatggccggatcggcattcatggt

SEQ ID NO: 300425 - DNA, 30 bp, Artificial Sequence
  Synthetic oligonucleotide
atccgtcctgagcgcagccctcttcatggt

SEQ ID NO: 300426 - DNA, 30 bp, Artificial Sequence
  Synthetic oligonucleotide
ttcaagaaagtcacaggcaggtacgatggt

SEQ ID NO: 300427 - DNA, 30 bp, Artificial Sequence
  Synthetic oligonucleotide
acggaccccccccaggcccaaagcgatggt

SEQ ID NO: 300428 - DNA, 30 bp, Artificial Sequence
  Synthetic oligonucleotide
acaggaacgcgataaacctaatgcgatggt

SEQ ID NO: 300429 - DNA, 30 bp, Artificial Sequence
  Synthetic oligonucleotide
ctgggagtatccgcaaaagcggtcgatggt

SEQ ID NO: 300430 - DNA, 30 bp, Artificial Sequence
  Synthetic oligonucleotide
tgccctgacctcctgcgtgcgtttgatggt

SEQ ID NO: 300431 - DNA, 30 bp, Artificial Sequence
  Synthetic oligonucleotide
aaatgacataagacgtgcaatcaatatggt

SEQ ID NO: 300432 - DNA, 30 bp, Artificial Sequence
  Synthetic oligonucleotide
taatgtgtttggacatccgtattatatggt

SEQ ID NO: 300433 - DNA, 30 bp, Artificial Sequence
  Synthetic oligonucleotide
atcggagtaataaggacgggcgtctatggt

SEQ ID NO: 300434 - DNA, 30 bp, Artificial Sequence
  Synthetic oligonucleotide
tatccaatgatgcagagcgggaggtatggt

SEQ ID NO: 300435 - DNA, 30 bp, Artificial Sequence
  Synthetic oligonucleotide
gcaatcggcgtggaagaatatgggtatggt

SEQ ID NO: 300436 - DNA, 30 bp, Artificial Sequence
  Synthetic oligonucleotide
cgagctctcctttaggccggcatgtatggt

SEQ ID NO: 300437 - DNA, 30 bp, Artificial Sequence
  Synthetic oligonucleotide
gcttacgatttaggatagagcttaactggt

SEQ ID NO: 300438 - DNA, 30 bp, Artificial Sequence
  Synthetic oligonucleotide
tgtgtcagacgactgtggactagcactggt

SEQ ID NO: 300439 - DNA, 30 bp, Artificial Sequence
  Synthetic oligonucleotide
tagtcttagacctgtattttgcgcactggt

SEQ ID NO: 300440 - DNA, 30 bp, Artificial Sequence
  Synthetic oligonucleotide
cctacggtgggtgaacggccacatactggt

SEQ ID NO: 300441 - DNA, 30 bp, Artificial Sequence
  Synthetic oligonucleotide
aaccgagaccggttcactatgtatactggt

SEQ ID NO: 300442 - DNA, 30 bp, Artificial Sequence
  Synthetic oligonucleotide
tatggtacaaatgtcagtcatgctactggt

SEQ ID NO: 300443 - DNA, 30 bp, Artificial Sequence
  Synthetic oligonucleotide
cgacgaccgtagtaggtcatacgtactggt

SEQ ID NO: 300444 - DNA, 30 bp, Artificial Sequence
  Synthetic oligonucleotide
gcgctactaacttcctgagcgaaccctggt

SEQ ID NO: 300445 - DNA, 30 bp, Artificial Sequence
  Synthetic oligonucleotide
gacttacagtagtcagcataacgccctggt

SEQ ID NO: 300446 - DNA, 30 bp, Artificial Sequence
  Synthetic oligonucleotide
gaaaagttccaggaggcaaaaggtcctggt

SEQ ID NO: 300447 - DNA, 30 bp, Artificial Sequence
  Synthetic oligonucleotide
cacaccagagttgctaggataccggctggt

SEQ ID NO: 300448 - DNA, 30 bp, Artificial Sequence
  Synthetic oligonucleotide
gtggatagaggcaacctcggttatgctggt

SEQ ID NO: 300449 - DNA, 30 bp, Artificial Sequence
  Synthetic oligonucleotide
aaacaggtgtctgacgtgctacctgctggt

SEQ ID NO: 300450 - DNA, 30 bp, Artificial Sequence
  Synthetic oligonucleotide
tcactcaaacgtaactgcgaagttgctggt

SEQ ID NO: 300451 - DNA, 30 bp, Artificial Sequence
  Synthetic oligonucleotide
ggttggagacccgccggtacgtttgctggt

SEQ ID NO: 300452 - DNA, 30 bp, Artificial Sequence
  Synthetic oligonucleotide
agtgattagcaactctttgtacaatctggt

SEQ ID NO: 300453 - DNA, 30 bp, Artificial Sequence
  Synthetic oligonucleotide
gatgggcccaaaggaatagaacgcagtggt

SEQ ID NO: 300454 - DNA, 30 bp, Artificial Sequence
  Synthetic oligonucleotide
gttactccacgtttggaagcgactagtggt

SEQ ID NO: 300455 - DNA, 30 bp, Artificial Sequence
  Synthetic oligonucleotide
ggtacatgggtttgacatggcattagtggt

SEQ ID NO: 300456 - DNA, 30 bp, Artificial Sequence
  Synthetic oligonucleotide
ccgacaatttgatgcgaagcgattagtggt

SEQ ID NO: 300457 - DNA, 30 bp, Artificial Sequence
  Synthetic oligonucleotide
ggtatttgcatctgttggctaacacgtggt

SEQ ID NO: 300458 - DNA, 30 bp, Artificial Sequence
  Synthetic oligonucleotide
ctatacagacggttgtggccatgacgtggt

SEQ ID NO: 300459 - DNA, 30 bp, Artificial Sequence
  Synthetic oligonucleotide
atcagtcggaccttcagttcaatgcgtggt

SEQ ID NO: 300460 - DNA, 30 bp, Artificial Sequence
  Synthetic oligonucleotide
tgctatcgcgcggatcaaaattcaggtggt

SEQ ID NO: 300461 - DNA, 30 bp, Artificial Sequence
  Synthetic oligonucleotide
aggatacccagattatctccgtacggtggt

SEQ ID NO: 300462 - DNA, 30 bp, Artificial Sequence
  Synthetic oligonucleotide
acacagcgatgaactaagacccggggtggt

SEQ ID NO: 300463 - DNA, 30 bp, Artificial Sequence
  Synthetic oligonucleotide
gctgggaccacaagtaggccatctggtggt

SEQ ID NO: 300464 - DNA, 30 bp, Artificial Sequence
  Synthetic oligonucleotide
tgcggcgggttgctggagggcggtggtggt

SEQ ID NO: 300465 - DNA, 30 bp, Artificial Sequence
  Synthetic oligonucleotide
tgacgaaattgtgttgtgaaggttggtggt

SEQ ID NO: 300466 - DNA, 30 bp, Artificial Sequence
  Synthetic oligonucleotide
cgaaactctagggtacggacagaatgtggt

SEQ ID NO: 300467 - DNA, 30 bp, Artificial Sequence
  Synthetic oligonucleotide
acaatagttctcgacaggttgcgatgtggt

SEQ ID NO: 300468 - DNA, 30 bp, Artificial Sequence
  Synthetic oligonucleotide
gataattgcgtatcagaaaggatatgtggt

SEQ ID NO: 300469 - DNA, 30 bp, Artificial Sequence
  Synthetic oligonucleotide
gttgaaactctaggtttggggatatgtggt

SEQ ID NO: 300470 - DNA, 30 bp, Artificial Sequence
  Synthetic oligonucleotide
ttgctacctatcgtctcgctgatctgtggt

SEQ ID NO: 300471 - DNA, 30 bp, Artificial Sequence
  Synthetic oligonucleotide
cgtaagattgtagatccaaacgtttgtggt

SEQ ID NO: 300472 - DNA, 30 bp, Artificial Sequence
  Synthetic oligonucleotide
agtttggatcgtctggtgcagggaattggt

SEQ ID NO: 300473 - DNA, 30 bp, Artificial Sequence
  Synthetic oligonucleotide
atgcgccctgtgctggtcagcttcattggt

SEQ ID NO: 300474 - DNA, 30 bp, Artificial Sequence
  Synthetic oligonucleotide
cgctatactcggacgcgtcggaaacttggt

SEQ ID NO: 300475 - DNA, 30 bp, Artificial Sequence
  Synthetic oligonucleotide
ctaactgtgatcaggagagaaagccttggt

SEQ ID NO: 300476 - DNA, 30 bp, Artificial Sequence
  Synthetic oligonucleotide
cgattagctttaatcgttggaagccttggt

SEQ ID NO: 300477 - DNA, 30 bp, Artificial Sequence
  Synthetic oligonucleotide
gtgcaccagggagaagcttggtgccttggt

SEQ ID NO: 300478 - DNA, 30 bp, Artificial Sequence
  Synthetic oligonucleotide
aggtaatacgtataagtctcagctcttggt

SEQ ID NO: 300479 - DNA, 30 bp, Artificial Sequence
  Synthetic oligonucleotide
tccgcgcctcgcgtcgagaggattcttggt

SEQ ID NO: 300480 - DNA, 30 bp, Artificial Sequence
  Synthetic oligonucleotide
ttccgatcagagttctgtaagagagttggt

SEQ ID NO: 300481 - DNA, 30 bp, Artificial Sequence
  Synthetic oligonucleotide
acactatccaccagtgggaaatgcgttggt

SEQ ID NO: 300482 - DNA, 30 bp, Artificial Sequence
  Synthetic oligonucleotide
gttccgtagttgaagttgtgcccggttggt

SEQ ID NO: 300483 - DNA, 30 bp, Artificial Sequence
  Synthetic oligonucleotide
aggctccctgagagaatatctcgggttggt

SEQ ID NO: 300484 - DNA, 30 bp, Artificial Sequence
  Synthetic oligonucleotide
cgtttagcttgcgtaggacagatggttggt

SEQ ID NO: 300485 - DNA, 30 bp, Artificial Sequence
  Synthetic oligonucleotide
ggtagctacaaatttgttaagactgttggt

SEQ ID NO: 300486 - DNA, 30 bp, Artificial Sequence
  Synthetic oligonucleotide
acttaagttggggttccgctgcctgttggt

SEQ ID NO: 300487 - DNA, 30 bp, Artificial Sequence
  Synthetic oligonucleotide
atgacagatggtataattcacattgttggt

SEQ ID NO: 300488 - DNA, 30 bp, Artificial Sequence
  Synthetic oligonucleotide
agtaccacgtagggggctataacatttggt

SEQ ID NO: 300489 - DNA, 30 bp, Artificial Sequence
  Synthetic oligonucleotide
tagtattataaggatggtcggagatttggt

SEQ ID NO: 300490 - DNA, 30 bp, Artificial Sequence
  Synthetic oligonucleotide
ttatcaaagatgccaatggactggtttggt

SEQ ID NO: 300491 - DNA, 30 bp, Artificial Sequence
  Synthetic oligonucleotide
ttattaagtagttagtgttttttgtttggt

SEQ ID NO: 300492 - DNA, 30 bp, Artificial Sequence
  Synthetic oligonucleotide
gcggcatacgtatggtgttacccttttggt

SEQ ID NO: 300493 - DNA, 30 bp, Artificial Sequence
  Synthetic oligonucleotide
tgattccgtgcgtgtctgccagtaaaatgt

SEQ ID NO: 300494 - DNA, 30 bp, Artificial Sequence
  Synthetic oligonucleotide
gatgcgccaggcgctctggccttaaaatgt

SEQ ID NO: 300495 - DNA, 30 bp, Artificial Sequence
  Synthetic oligonucleotide
gtcctacacccgatgcagggaggcaaatgt

SEQ ID NO: 300496 - DNA, 30 bp, Artificial Sequence
  Synthetic oligonucleotide
gattccggacatcgatacgatactaaatgt

SEQ ID NO: 300497 - DNA, 30 bp, Artificial Sequence
  Synthetic oligonucleotide
cgctcttcgacgtgacactgtattaaatgt

SEQ ID NO: 300498 - DNA, 30 bp, Artificial Sequence
  Synthetic oligonucleotide
tctaatccattcacatgtcatcaccaatgt

SEQ ID NO: 300499 - DNA, 30 bp, Artificial Sequence
  Synthetic oligonucleotide
ggccggctttacctggactttgcccaatgt

SEQ ID NO: 300500 - DNA, 30 bp, Artificial Sequence
  Synthetic oligonucleotide
gccggcaaaaactagatccgctgccaatgt

SEQ ID NO: 300501 - DNA, 30 bp, Artificial Sequence
  Synthetic oligonucleotide
agctattgaatcaaatagaggtgccaatgt

SEQ ID NO: 300502 - DNA, 30 bp, Artificial Sequence
  Synthetic oligonucleotide
cggaccgttgggggggtactgaggcaatgt

SEQ ID NO: 300503 - DNA, 30 bp, Artificial Sequence
  Synthetic oligonucleotide
atctgcttggtgaaattaagacggcaatgt

SEQ ID NO: 300504 - DNA, 30 bp, Artificial Sequence
  Synthetic oligonucleotide
tgattcgccaagacgcatggtcttcaatgt

SEQ ID NO: 300505 - DNA, 30 bp, Artificial Sequence
  Synthetic oligonucleotide
attcgtctgagaattggtgcgctagaatgt

SEQ ID NO: 300506 - DNA, 30 bp, Artificial Sequence
  Synthetic oligonucleotide
atgtaactgccgtcgtacgacaaggaatgt

SEQ ID NO: 300507 - DNA, 30 bp, Artificial Sequence
  Synthetic oligonucleotide
caactcgcccctatacgattctttgaatgt

SEQ ID NO: 300508 - DNA, 30 bp, Artificial Sequence
  Synthetic oligonucleotide
aacttccggtgtgagataaatcgctaatgt

SEQ ID NO: 300509 - DNA, 30 bp, Artificial Sequence
  Synthetic oligonucleotide
aaataggtgtctctctcccctaagtaatgt

SEQ ID NO: 300510 - DNA, 30 bp, Artificial Sequence
  Synthetic oligonucleotide
ccgggacaaaatagagcccacttttaatgt

SEQ ID NO: 300511 - DNA, 30 bp, Artificial Sequence
  Synthetic oligonucleotide
ggatctcgaccacgacaggttaaaacatgt

SEQ ID NO: 300512 - DNA, 30 bp, Artificial Sequence
  Synthetic oligonucleotide
cgaagtcattactgcaggaaccaaacatgt

SEQ ID NO: 300513 - DNA, 30 bp, Artificial Sequence
  Synthetic oligonucleotide
gcaaaatgctgacatatttttgcaacatgt

SEQ ID NO: 300514 - DNA, 30 bp, Artificial Sequence
  Synthetic oligonucleotide
tacaaacaaaacgtttgcataggcacatgt

SEQ ID NO: 300515 - DNA, 30 bp, Artificial Sequence
  Synthetic oligonucleotide
gccatcaaattcgtcctgaccaagacatgt

SEQ ID NO: 300516 - DNA, 30 bp, Artificial Sequence
  Synthetic oligonucleotide
ctatctgttaacggatcgcgatagacatgt

SEQ ID NO: 300517 - DNA, 30 bp, Artificial Sequence
  Synthetic oligonucleotide
aaacactgtacggacttactcacaccatgt

SEQ ID NO: 300518 - DNA, 30 bp, Artificial Sequence
  Synthetic oligonucleotide
tcaatgatttgtagaaatacgtcaccatgt

SEQ ID NO: 300519 - DNA, 30 bp, Artificial Sequence
  Synthetic oligonucleotide
gtccactatcgatacagggctcgaccatgt

SEQ ID NO: 300520 - DNA, 30 bp, Artificial Sequence
  Synthetic oligonucleotide
aacagcgggatctgaggtgggcacccatgt

SEQ ID NO: 300521 - DNA, 30 bp, Artificial Sequence
  Synthetic oligonucleotide
aaataatagacgcccagagtacgagcatgt

SEQ ID NO: 300522 - DNA, 30 bp, Artificial Sequence
  Synthetic oligonucleotide
atgaaggttttacggtttcttcgggcatgt

SEQ ID NO: 300523 - DNA, 30 bp, Artificial Sequence
  Synthetic oligonucleotide
gtatcttcatacattcgaggggatgcatgt

SEQ ID NO: 300524 - DNA, 30 bp, Artificial Sequence
  Synthetic oligonucleotide
acgctggcggatgcagtatcatttgcatgt

SEQ ID NO: 300525 - DNA, 30 bp, Artificial Sequence
  Synthetic oligonucleotide
tatacggatggacacttagttaaatcatgt

SEQ ID NO: 300526 - DNA, 30 bp, Artificial Sequence
  Synthetic oligonucleotide
ctcaacgggcttcgaataggctaatcatgt

SEQ ID NO: 300527 - DNA, 30 bp, Artificial Sequence
  Synthetic oligonucleotide
cacacgatctccgaaggaggatcatcatgt

SEQ ID NO: 300528 - DNA, 30 bp, Artificial Sequence
  Synthetic oligonucleotide
agaattgagggactgaggatcgtatcatgt

SEQ ID NO: 300529 - DNA, 30 bp, Artificial Sequence
  Synthetic oligonucleotide
acagctatgatctagaagtttgactcatgt

SEQ ID NO: 300530 - DNA, 30 bp, Artificial Sequence
  Synthetic oligonucleotide
ctttcttcgagtaacgtggacttctcatgt

SEQ ID NO: 300531 - DNA, 30 bp, Artificial Sequence
  Synthetic oligonucleotide
aagcctacttatacggaactcaagtcatgt

SEQ ID NO: 300532 - DNA, 30 bp, Artificial Sequence
  Synthetic oligonucleotide
gctaaacattcacgcatgcgtccaagatgt

SEQ ID NO: 300533 - DNA, 30 bp, Artificial Sequence
  Synthetic oligonucleotide
acgaaaggtgctatctggttattaagatgt

SEQ ID NO: 300534 - DNA, 30 bp, Artificial Sequence
  Synthetic oligonucleotide
cttgaaattgaaatgctatatcttagatgt

SEQ ID NO: 300535 - DNA, 30 bp, Artificial Sequence
  Synthetic oligonucleotide
ggcgggcaactatgtgagaacccccgatgt

SEQ ID NO: 300536 - DNA, 30 bp, Artificial Sequence
  Synthetic oligonucleotide
cgcaactaggtcgcgctggacctccgatgt

SEQ ID NO: 300537 - DNA, 30 bp, Artificial Sequence
  Synthetic oligonucleotide
gcacatgtatttggaggagtagtgcgatgt

SEQ ID NO: 300538 - DNA, 30 bp, Artificial Sequence
  Synthetic oligonucleotide
ttttaaaagccaacgagactgataggatgt

SEQ ID NO: 300539 - DNA, 30 bp, Artificial Sequence
  Synthetic oligonucleotide
aaaaagggtatatactgtcagaacggatgt

SEQ ID NO: 300540 - DNA, 30 bp, Artificial Sequence
  Synthetic oligonucleotide
cagaactcaacaacgttgcctatgggatgt

SEQ ID NO: 300541 - DNA, 30 bp, Artificial Sequence
  Synthetic oligonucleotide
ccaacactgtattttgtcggaactggatgt

SEQ ID NO: 300542 - DNA, 30 bp, Artificial Sequence
  Synthetic oligonucleotide
tcgggtatctattccggtcttgctggatgt

SEQ ID NO: 300543 - DNA, 30 bp, Artificial Sequence
  Synthetic oligonucleotide
tttgcgtgattaaattcttcgagtggatgt

SEQ ID NO: 300544 - DNA, 30 bp, Artificial Sequence
  Synthetic oligonucleotide
ggctggtagcttaatcaacatacatgatgt

SEQ ID NO: 300545 - DNA, 30 bp, Artificial Sequence
  Synthetic oligonucleotide
aatagaccaggaccgtttgccggatgatgt

SEQ ID NO: 300546 - DNA, 30 bp, Artificial Sequence
  Synthetic oligonucleotide
gatgcgggcatatgtatccgcccctgatgt

SEQ ID NO: 300547 - DNA, 30 bp, Artificial Sequence
  Synthetic oligonucleotide
acaggttctggggtacactcacgttgatgt

SEQ ID NO: 300548 - DNA, 30 bp, Artificial Sequence
  Synthetic oligonucleotide
ttgcccggggaacaatgtgcccaaatatgt

SEQ ID NO: 300549 - DNA, 30 bp, Artificial Sequence
  Synthetic oligonucleotide
tcatgtagacccgaacatgtcaacatatgt

SEQ ID NO: 300550 - DNA, 30 bp, Artificial Sequence
  Synthetic oligonucleotide
gaggagctttgctaatctagacacatatgt

SEQ ID NO: 300551 - DNA, 30 bp, Artificial Sequence
  Synthetic oligonucleotide
tattgcacttaacgacaaaaatacatatgt

SEQ ID NO: 300552 - DNA, 30 bp, Artificial Sequence
  Synthetic oligonucleotide
cttgttgctcccccaagatcaagcatatgt

SEQ ID NO: 300553 - DNA, 30 bp, Artificial Sequence
  Synthetic oligonucleotide
cacaggtattggtggacttgccttatatgt

SEQ ID NO: 300554 - DNA, 30 bp, Artificial Sequence
  Synthetic oligonucleotide
ctaatcagctatgcttcatcgaacctatgt

SEQ ID NO: 300555 - DNA, 30 bp, Artificial Sequence
  Synthetic oligonucleotide
gcggggaatgctttgctagggtgtctatgt

SEQ ID NO: 300556 - DNA, 30 bp, Artificial Sequence
  Synthetic oligonucleotide
gtaagtcaaagtaagggattgtacgtatgt

SEQ ID NO: 300557 - DNA, 30 bp, Artificial Sequence
  Synthetic oligonucleotide
gtccagactgatactcccctttacgtatgt

SEQ ID NO: 300558 - DNA, 30 bp, Artificial Sequence
  Synthetic oligonucleotide
ttggtggagtgttcttgatttgccgtatgt

SEQ ID NO: 300559 - DNA, 31 bp, Artificial Sequence
  Synthetic oligonucleotide
ctaccacttatgatccacttttcgcgtatgt

SEQ ID NO: 300560 - DNA, 30 bp, Artificial Sequence
  Synthetic oligonucleotide
agtactctatcgcgtcactgatgcgtatgt

SEQ ID NO: 300561 - DNA, 30 bp, Artificial Sequence
  Synthetic oligonucleotide
tcagtacaacgtcagaaatctggggtatgt

SEQ ID NO: 300562 - DNA, 30 bp, Artificial Sequence
  Synthetic oligonucleotide
cttcgagttaaagaaggcttcgtggtatgt

SEQ ID NO: 300563 - DNA, 30 bp, Artificial Sequence
  Synthetic oligonucleotide
gcatcaattgtcccatacgggcctgtatgt

SEQ ID NO: 300564 - DNA, 30 bp, Artificial Sequence
  Synthetic oligonucleotide
tgtttcggctgaagataagacgttgtatgt

SEQ ID NO: 300565 - DNA, 30 bp, Artificial Sequence
  Synthetic oligonucleotide
gtggtacggttgaaaaagttggttgtatgt

SEQ ID NO: 300566 - DNA, 30 bp, Artificial Sequence
  Synthetic oligonucleotide
gagaaacggtcgtaaggtactcaattatgt

SEQ ID NO: 300567 - DNA, 30 bp, Artificial Sequence
  Synthetic oligonucleotide
atccggggtcacgtaaatgggacattatgt

SEQ ID NO: 300568 - DNA, 30 bp, Artificial Sequence
  Synthetic oligonucleotide
gctcgaaagacaccacggcaattattatgt

SEQ ID NO: 300569 - DNA, 30 bp, Artificial Sequence
  Synthetic oligonucleotide
cggatcgcgtattctggagtctacttatgt

SEQ ID NO: 300570 - DNA, 30 bp, Artificial Sequence
  Synthetic oligonucleotide
ggagacaagcttagactatgcatcttatgt

SEQ ID NO: 300571 - DNA, 30 bp, Artificial Sequence
  Synthetic oligonucleotide
aatgtacatgaagaccttggtcagttatgt

SEQ ID NO: 300572 - DNA, 30 bp, Artificial Sequence
  Synthetic oligonucleotide
cgatactttctgcaatgtttttggttatgt

SEQ ID NO: 300573 - DNA, 30 bp, Artificial Sequence
  Synthetic oligonucleotide
cgtgacgagaatatttccgacagtttatgt

SEQ ID NO: 300574 - DNA, 30 bp, Artificial Sequence
  Synthetic oligonucleotide
ctttatgggagactgagtaggagtttatgt

SEQ ID NO: 300575 - DNA, 30 bp, Artificial Sequence
  Synthetic oligonucleotide
gggatcatcaagaagttcgtgattttatgt

SEQ ID NO: 300576 - DNA, 30 bp, Artificial Sequence
  Synthetic oligonucleotide
tagcaggtttagggtcggtttgaaaactgt

SEQ ID NO: 300577 - DNA, 30 bp, Artificial Sequence
  Synthetic oligonucleotide
gagttactgggccaagtatgttcaaactgt

SEQ ID NO: 300578 - DNA, 30 bp, Artificial Sequence
  Synthetic oligonucleotide
ctgcgtggaccaacagatcctccgaactgt

SEQ ID NO: 300579 - DNA, 31 bp, Artificial Sequence
  Synthetic oligonucleotide
tgttaacaaaaattcaaaccgtcttaactgt

SEQ ID NO: 300580 - DNA, 30 bp, Artificial Sequence
  Synthetic oligonucleotide
agagcaaaagttgttcacatggcacactgt

SEQ ID NO: 300581 - DNA, 30 bp, Artificial Sequence
  Synthetic oligonucleotide
agctgtatcaagacgcaaactcaccactgt

SEQ ID NO: 300582 - DNA, 30 bp, Artificial Sequence
  Synthetic oligonucleotide
tcttcccttgcgggcttaaatttccactgt

SEQ ID NO: 300583 - DNA, 30 bp, Artificial Sequence
  Synthetic oligonucleotide
ttctgtgagatgtggttatcattgcactgt

SEQ ID NO: 300584 - DNA, 30 bp, Artificial Sequence
  Synthetic oligonucleotide
aaaggttcgggcgcgggtgagtgcgactgt

SEQ ID NO: 300585 - DNA, 30 bp, Artificial Sequence
  Synthetic oligonucleotide
tcattcctacggagggaattaagtgactgt

SEQ ID NO: 300586 - DNA, 30 bp, Artificial Sequence
  Synthetic oligonucleotide
aataattaggctagtgagtcagttgactgt

SEQ ID NO: 300587 - DNA, 30 bp, Artificial Sequence
  Synthetic oligonucleotide
cttgatgacccctcgtgtcgagaatactgt

SEQ ID NO: 300588 - DNA, 30 bp, Artificial Sequence
  Synthetic oligonucleotide
catgggtgaccggcaaaacagctatactgt

SEQ ID NO: 300589 - DNA, 30 bp, Artificial Sequence
  Synthetic oligonucleotide
ggtagtccacatagggtaatctactactgt

SEQ ID NO: 300590 - DNA, 30 bp, Artificial Sequence
  Synthetic oligonucleotide
tacgaaatgggttacccctgcaagtactgt

SEQ ID NO: 300591 - DNA, 30 bp, Artificial Sequence
  Synthetic oligonucleotide
atgcatcgcattcaatgggtcacttactgt

SEQ ID NO: 300592 - DNA, 30 bp, Artificial Sequence
  Synthetic oligonucleotide
ttaaaaactcagtgtgtctcgaaaacctgt

SEQ ID NO: 300593 - DNA, 30 bp, Artificial Sequence
  Synthetic oligonucleotide
cgcgcccctgaacgtgtaccggaaacctgt

SEQ ID NO: 300594 - DNA, 30 bp, Artificial Sequence
  Synthetic oligonucleotide
tactagtctataacatccgtataaacctgt

SEQ ID NO: 300595 - DNA, 30 bp, Artificial Sequence
  Synthetic oligonucleotide
tttaggacgatcagtttcggggtaacctgt

SEQ ID NO: 300596 - DNA, 30 bp, Artificial Sequence
  Synthetic oligonucleotide
gcaaaggaatcagaatcgcacggcacctgt

SEQ ID NO: 300597 - DNA, 30 bp, Artificial Sequence
  Synthetic oligonucleotide
ggtgttcctactcgggttccacagacctgt

SEQ ID NO: 300598 - DNA, 30 bp, Artificial Sequence
  Synthetic oligonucleotide
cctctatttaaacgtggtcagtctacctgt

SEQ ID NO: 300599 - DNA, 30 bp, Artificial Sequence
  Synthetic oligonucleotide
caaaccagggtagttgtgttaagtacctgt

SEQ ID NO: 300600 - DNA, 30 bp, Artificial Sequence
  Synthetic oligonucleotide
cacggataaaggtgctaataaattacctgt

SEQ ID NO: 300601 - DNA, 30 bp, Artificial Sequence
  Synthetic oligonucleotide
caagactgtgcgacgattaggggaccctgt

SEQ ID NO: 300602 - DNA, 30 bp, Artificial Sequence
  Synthetic oligonucleotide
gttgagtgttaaacccgattttgaccctgt

SEQ ID NO: 300603 - DNA, 30 bp, Artificial Sequence
  Synthetic oligonucleotide
tttacatgcacctgaatcgaagacccctgt

SEQ ID NO: 300604 - DNA, 30 bp, Artificial Sequence
  Synthetic oligonucleotide
taaagtaatagccaacaaaacctcccctgt

SEQ ID NO: 300605 - DNA, 30 bp, Artificial Sequence
  Synthetic oligonucleotide
tgacacataaatcggttcatcgtgccctgt

SEQ ID NO: 300606 - DNA, 30 bp, Artificial Sequence
  Synthetic oligonucleotide
tatggtgtgccgggacaatggtatccctgt

SEQ ID NO: 300607 - DNA, 30 bp, Artificial Sequence
  Synthetic oligonucleotide
aataggtgctgggaactatactaagcctgt

SEQ ID NO: 300608 - DNA, 30 bp, Artificial Sequence
  Synthetic oligonucleotide
ggtggcctggggcccgccaaagaggcctgt

SEQ ID NO: 300609 - DNA, 30 bp, Artificial Sequence
  Synthetic oligonucleotide
aactaatgatctatgcctcacaatgcctgt

SEQ ID NO: 300610 - DNA, 30 bp, Artificial Sequence
  Synthetic oligonucleotide
gtacacatgcacacgtttgacgcatcctgt

SEQ ID NO: 300611 - DNA, 30 bp, Artificial Sequence
  Synthetic oligonucleotide
ttacaaggttagatcgattcggtatcctgt

SEQ ID NO: 300612 - DNA, 30 bp, Artificial Sequence
  Synthetic oligonucleotide
ccggtgcaaggccccccaaggacctcctgt

SEQ ID NO: 300613 - DNA, 30 bp, Artificial Sequence
  Synthetic oligonucleotide
tacgattaaatgttggaccgaatttcctgt

SEQ ID NO: 300614 - DNA, 30 bp, Artificial Sequence
  Synthetic oligonucleotide
tgccgttgttgaccgtatacaggaagctgt

SEQ ID NO: 300615 - DNA, 30 bp, Artificial Sequence
  Synthetic oligonucleotide
gagtaacaactttaaaggttgaccagctgt

SEQ ID NO: 300616 - DNA, 30 bp, Artificial Sequence
  Synthetic oligonucleotide
attgggttacgactcgaaggctatagctgt

SEQ ID NO: 300617 - DNA, 30 bp, Artificial Sequence
  Synthetic oligonucleotide
ttgaggtgaccggtccccggccgtagctgt

SEQ ID NO: 300618 - DNA, 30 bp, Artificial Sequence
  Synthetic oligonucleotide
cctcggctagcgcaagtgatatcccgctgt

SEQ ID NO: 300619 - DNA, 30 bp, Artificial Sequence
  Synthetic oligonucleotide
tgaaccatttggacaggaaaaaatcgctgt

SEQ ID NO: 300620 - DNA, 30 bp, Artificial Sequence
  Synthetic oligonucleotide
attgtataggaccaagcgatgtcaggctgt

SEQ ID NO: 300621 - DNA, 30 bp, Artificial Sequence
  Synthetic oligonucleotide
cgttgttcgtgggaaaatcggttaggctgt

SEQ ID NO: 300622 - DNA, 30 bp, Artificial Sequence
  Synthetic oligonucleotide
ggtcattaatgctatagcggccccggctgt

SEQ ID NO: 300623 - DNA, 30 bp, Artificial Sequence
  Synthetic oligonucleotide
cccgcctaaaagacagcggtgcatggctgt

SEQ ID NO: 300624 - DNA, 30 bp, Artificial Sequence
  Synthetic oligonucleotide
gcggtataagtgagcagcgtccctggctgt

SEQ ID NO: 300625 - DNA, 30 bp, Artificial Sequence
  Synthetic oligonucleotide
gcaccgttgaatggtgttctaattggctgt

SEQ ID NO: 300626 - DNA, 30 bp, Artificial Sequence
  Synthetic oligonucleotide
gagggttttgaaactcttgggctatgctgt

SEQ ID NO: 300627 - DNA, 30 bp, Artificial Sequence
  Synthetic oligonucleotide
tgcttctatttgaatcaaattccctgctgt

SEQ ID NO: 300628 - DNA, 30 bp, Artificial Sequence
  Synthetic oligonucleotide
agttagtgcctccgctgcctgcggtgctgt

SEQ ID NO: 300629 - DNA, 30 bp, Artificial Sequence
  Synthetic oligonucleotide
gtgagacgtagagatgcaaccaattgctgt

SEQ ID NO: 300630 - DNA, 30 bp, Artificial Sequence
  Synthetic oligonucleotide
tagactcgctgatgcgccctcgattgctgt

SEQ ID NO: 300631 - DNA, 30 bp, Artificial Sequence
  Synthetic oligonucleotide
ggttcgcgataaaagacgaacccttgctgt

SEQ ID NO: 300632 - DNA, 30 bp, Artificial Sequence
  Synthetic oligonucleotide
tgttgctagtattgcttagttaccatctgt

SEQ ID NO: 300633 - DNA, 30 bp, Artificial Sequence
  Synthetic oligonucleotide
gtcaagtggagaactgtcacatgcatctgt

SEQ ID NO: 300634 - DNA, 30 bp, Artificial Sequence
  Synthetic oligonucleotide
gatatactaggctcacggcgactcatctgt

SEQ ID NO: 300635 - DNA, 30 bp, Artificial Sequence
  Synthetic oligonucleotide
tacagctgtgcacgtaacgggtatatctgt

SEQ ID NO: 300636 - DNA, 30 bp, Artificial Sequence
  Synthetic oligonucleotide
tcccctatgaggtaggaggacgtactctgt

SEQ ID NO: 300637 - DNA, 30 bp, Artificial Sequence
  Synthetic oligonucleotide
tccttaaggttgcaatggccaggcctctgt

SEQ ID NO: 300638 - DNA, 30 bp, Artificial Sequence
  Synthetic oligonucleotide
agatcaacttaattggttttgcatctctgt

SEQ ID NO: 300639 - DNA, 30 bp, Artificial Sequence
  Synthetic oligonucleotide
ccgggaagcaaatgttacctgggtgtctgt

SEQ ID NO: 300640 - DNA, 30 bp, Artificial Sequence
  Synthetic oligonucleotide
aatacacgcgtttaggcggttcacttctgt

SEQ ID NO: 300641 - DNA, 30 bp, Artificial Sequence
  Synthetic oligonucleotide
ttggcacagggtaggcgtttaagcttctgt

SEQ ID NO: 300642 - DNA, 30 bp, Artificial Sequence
  Synthetic oligonucleotide
accggagtacaacttacaaacgtcttctgt

SEQ ID NO: 300643 - DNA, 30 bp, Artificial Sequence
  Synthetic oligonucleotide
tagggggcccagttttgcaagtatttctgt

SEQ ID NO: 300644 - DNA, 30 bp, Artificial Sequence
  Synthetic oligonucleotide
agcaccccatatgatatatcataaaagtgt

SEQ ID NO: 300645 - DNA, 30 bp, Artificial Sequence
  Synthetic oligonucleotide
ggtgttcggatggccttggagacaaagtgt

SEQ ID NO: 300646 - DNA, 30 bp, Artificial Sequence
  Synthetic oligonucleotide
cggtgtcaaaggaacctgtttctaaagtgt

SEQ ID NO: 300647 - DNA, 30 bp, Artificial Sequence
  Synthetic oligonucleotide
cgggttcaagtgtcttatggtgtaaagtgt

SEQ ID NO: 300648 - DNA, 30 bp, Artificial Sequence
  Synthetic oligonucleotide
gcagtaaaacaaactggtcacggcaagtgt

SEQ ID NO: 300649 - DNA, 30 bp, Artificial Sequence
  Synthetic oligonucleotide
tagggtcatgcgcaagagtacccgaagtgt

SEQ ID NO: 300650 - DNA, 30 bp, Artificial Sequence
  Synthetic oligonucleotide
taaaactaatgtaatgtctggtataagtgt

SEQ ID NO: 300651 - DNA, 30 bp, Artificial Sequence
  Synthetic oligonucleotide
tcttctgtacgaggctccgatcgacagtgt

SEQ ID NO: 300652 - DNA, 30 bp, Artificial Sequence
  Synthetic oligonucleotide
cctgatggatagagctaccacacccagtgt

SEQ ID NO: 300653 - DNA, 30 bp, Artificial Sequence
  Synthetic oligonucleotide
ggacgcctagccttaatcgtacatcagtgt

SEQ ID NO: 300654 - DNA, 30 bp, Artificial Sequence
  Synthetic oligonucleotide
atcgataccggtgacttacggatcgagtgt

SEQ ID NO: 300655 - DNA, 30 bp, Artificial Sequence
  Synthetic oligonucleotide
cgtgccacccagtcgagaaggagggagtgt

SEQ ID NO: 300656 - DNA, 30 bp, Artificial Sequence
  Synthetic oligonucleotide
ttaaacaactattgaggggccgctgagtgt

SEQ ID NO: 300657 - DNA, 30 bp, Artificial Sequence
  Synthetic oligonucleotide
aagtgagtgtcgggaggcaacattgagtgt

SEQ ID NO: 300658 - DNA, 30 bp, Artificial Sequence
  Synthetic oligonucleotide
gataggctcgttcgtgggcccaaatagtgt

SEQ ID NO: 300659 - DNA, 30 bp, Artificial Sequence
  Synthetic oligonucleotide
tatgtagtaagctgggatatgcgatagtgt

SEQ ID NO: 300660 - DNA, 30 bp, Artificial Sequence
  Synthetic oligonucleotide
acagtcatggagggccaccctcactagtgt

SEQ ID NO: 300661 - DNA, 30 bp, Artificial Sequence
  Synthetic oligonucleotide
gtcaactacagaggtggagtttattagtgt

SEQ ID NO: 300662 - DNA, 30 bp, Artificial Sequence
  Synthetic oligonucleotide
cttatgagagaacttttcaccttaacgtgt

SEQ ID NO: 300663 - DNA, 30 bp, Artificial Sequence
  Synthetic oligonucleotide
gtggttacacaccatgttagcgatacgtgt

SEQ ID NO: 300664 - DNA, 30 bp, Artificial Sequence
  Synthetic oligonucleotide
ttaccaccagttgttctcgcatatacgtgt

SEQ ID NO: 300665 - DNA, 30 bp, Artificial Sequence
  Synthetic oligonucleotide
gaggctcgatggtgtcccatctatacgtgt

SEQ ID NO: 300666 - DNA, 30 bp, Artificial Sequence
  Synthetic oligonucleotide
tgaacccacttatgtccacgttctacgtgt

SEQ ID NO: 300667 - DNA, 30 bp, Artificial Sequence
  Synthetic oligonucleotide
acataacgcatctcgcttgcgagaccgtgt

SEQ ID NO: 300668 - DNA, 30 bp, Artificial Sequence
  Synthetic oligonucleotide
gatcgaatctaatgcctagtgcccccgtgt

SEQ ID NO: 300669 - DNA, 30 bp, Artificial Sequence
  Synthetic oligonucleotide
ggatcggttctccattactattgcccgtgt

SEQ ID NO: 300670 - DNA, 30 bp, Artificial Sequence
  Synthetic oligonucleotide
tttcgcaacgtcggatggagttcgccgtgt

SEQ ID NO: 300671 - DNA, 30 bp, Artificial Sequence
  Synthetic oligonucleotide
ttctcctacgagcctgacattcaagcgtgt

SEQ ID NO: 300672 - DNA, 30 bp, Artificial Sequence
  Synthetic oligonucleotide
tatggacgacggcggatgtgaggagcgtgt

SEQ ID NO: 300673 - DNA, 30 bp, Artificial Sequence
  Synthetic oligonucleotide
ctaacgcaagaccatcgtgaataggcgtgt

SEQ ID NO: 300674 - DNA, 30 bp, Artificial Sequence
  Synthetic oligonucleotide
agacagtacagctacgagtagtaggcgtgt

SEQ ID NO: 300675 - DNA, 30 bp, Artificial Sequence
  Synthetic oligonucleotide
acaacccctacagattcctgtcatgcgtgt

SEQ ID NO: 300676 - DNA, 30 bp, Artificial Sequence
  Synthetic oligonucleotide
ttgcttggtatagtaatattagtatcgtgt

SEQ ID NO: 300677 - DNA, 30 bp, Artificial Sequence
  Synthetic oligonucleotide
cgaaacctagtctaagttaggtgctcgtgt

SEQ ID NO: 300678 - DNA, 30 bp, Artificial Sequence
  Synthetic oligonucleotide
ggcccatgggtacctaattaacggtcgtgt

SEQ ID NO: 300679 - DNA, 30 bp, Artificial Sequence
  Synthetic oligonucleotide
acgatgcctgcgctagggagtgcaaggtgt

SEQ ID NO: 300680 - DNA, 30 bp, Artificial Sequence
  Synthetic oligonucleotide
tggcgtcgtagttcctcccctagaaggtgt

SEQ ID NO: 300681 - DNA, 30 bp, Artificial Sequence
  Synthetic oligonucleotide
ctaatagtggggtcatcaacccacaggtgt

SEQ ID NO: 300682 - DNA, 30 bp, Artificial Sequence
  Synthetic oligonucleotide
tatgatggatcctcatgacacgcgaggtgt

SEQ ID NO: 300683 - DNA, 30 bp, Artificial Sequence
  Synthetic oligonucleotide
ctattaaaaggatagcggaattcgaggtgt

SEQ ID NO: 300684 - DNA, 30 bp, Artificial Sequence
  Synthetic oligonucleotide
acgatagagcgacccacatatatgaggtgt

SEQ ID NO: 300685 - DNA, 30 bp, Artificial Sequence
  Synthetic oligonucleotide
ggcatcgatttgtcatatctcattaggtgt

SEQ ID NO: 300686 - DNA, 30 bp, Artificial Sequence
  Synthetic oligonucleotide
tgatagtaatcccaaggagcgtttaggtgt

SEQ ID NO: 300687 - DNA, 30 bp, Artificial Sequence
  Synthetic oligonucleotide
gaagtttcgttggggaatacttggcggtgt

SEQ ID NO: 300688 - DNA, 30 bp, Artificial Sequence
  Synthetic oligonucleotide
atataatcctattcgctataataagggtgt

SEQ ID NO: 300689 - DNA, 30 bp, Artificial Sequence
  Synthetic oligonucleotide
gacattttcatttttgaaacaacagggtgt

SEQ ID NO: 300690 - DNA, 30 bp, Artificial Sequence
  Synthetic oligonucleotide
acgctttatccgcactgcaagagagggtgt

SEQ ID NO: 300691 - DNA, 30 bp, Artificial Sequence
  Synthetic oligonucleotide
aatcccgcttatagccacaacgtagggtgt

SEQ ID NO: 300692 - DNA, 30 bp, Artificial Sequence
  Synthetic oligonucleotide
gccaccattgagcaaatcgatttagggtgt

SEQ ID NO: 300693 - DNA, 30 bp, Artificial Sequence
  Synthetic oligonucleotide
agaatttgaccttcgttgactgccgggtgt

SEQ ID NO: 300694 - DNA, 30 bp, Artificial Sequence
  Synthetic oligonucleotide
gcaccccgtaggaggggtaccgttgggtgt

SEQ ID NO: 300695 - DNA, 30 bp, Artificial Sequence
  Synthetic oligonucleotide
aaattgctcggagatggaagaggatggtgt

SEQ ID NO: 300696 - DNA, 30 bp, Artificial Sequence
  Synthetic oligonucleotide
tcacgatctctaagagtcccttgctggtgt

SEQ ID NO: 300697 - DNA, 30 bp, Artificial Sequence
  Synthetic oligonucleotide
tgctgcctcgcagcatgccgaatgtggtgt

SEQ ID NO: 300698 - DNA, 30 bp, Artificial Sequence
  Synthetic oligonucleotide
atcgccaaattgattgcgaggccttggtgt

SEQ ID NO: 300699 - DNA, 30 bp, Artificial Sequence
  Synthetic oligonucleotide
ggactcgttcttatcgatgttccttggtgt

SEQ ID NO: 300700 - DNA, 30 bp, Artificial Sequence
  Synthetic oligonucleotide
tgcgcgcttaaaagtcgttggtcttggtgt

SEQ ID NO: 300701 - DNA, 30 bp, Artificial Sequence
  Synthetic oligonucleotide
ccagaaggcggaggtggatccagttggtgt

SEQ ID NO: 300702 - DNA, 30 bp, Artificial Sequence
  Synthetic oligonucleotide
gaaacaagtacaaagaaaagttgttggtgt

SEQ ID NO: 300703 - DNA, 30 bp, Artificial Sequence
  Synthetic oligonucleotide
tctaaaaagttttcaatccacaaaatgtgt

SEQ ID NO: 300704 - DNA, 30 bp, Artificial Sequence
  Synthetic oligonucleotide
ggtgggcatgattaccagcaccccatgtgt

SEQ ID NO: 300705 - DNA, 30 bp, Artificial Sequence
  Synthetic oligonucleotide
tctagttacagcacagtaaaaggcatgtgt

SEQ ID NO: 300706 - DNA, 30 bp, Artificial Sequence
  Synthetic oligonucleotide
aggttcagccatgtgcgattcctcatgtgt

SEQ ID NO: 300707 - DNA, 30 bp, Artificial Sequence
  Synthetic oligonucleotide
gctcaccggtatgaaaacacggctatgtgt

SEQ ID NO: 300708 - DNA, 30 bp, Artificial Sequence
  Synthetic oligonucleotide
gaccgtgctaatcggctctactttatgtgt

SEQ ID NO: 300709 - DNA, 30 bp, Artificial Sequence
  Synthetic oligonucleotide
gagctccgtccatcggttgcgtgactgtgt

SEQ ID NO: 300710 - DNA, 30 bp, Artificial Sequence
  Synthetic oligonucleotide
tcaattcactattggcggggggacctgtgt

SEQ ID NO: 300711 - DNA, 30 bp, Artificial Sequence
  Synthetic oligonucleotide
ataagaaaagaatttcacttaagcgtgtgt

SEQ ID NO: 300712 - DNA, 30 bp, Artificial Sequence
  Synthetic oligonucleotide
caattgcagcgagtcgtgcacatcgtgtgt

SEQ ID NO: 300713 - DNA, 30 bp, Artificial Sequence
  Synthetic oligonucleotide
agatcgctggacaagattaattctgtgtgt

SEQ ID NO: 300714 - DNA, 30 bp, Artificial Sequence
  Synthetic oligonucleotide
catggttccttgtaatagtcgcttgtgtgt

SEQ ID NO: 300715 - DNA, 30 bp, Artificial Sequence
  Synthetic oligonucleotide
ttaggatctgatggctccaatccattgtgt

SEQ ID NO: 300716 - DNA, 30 bp, Artificial Sequence
  Synthetic oligonucleotide
ggcggcccctcctggtttaaaggattgtgt

SEQ ID NO: 300717 - DNA, 30 bp, Artificial Sequence
  Synthetic oligonucleotide
gcttagagtgactgagggtttttattgtgt

SEQ ID NO: 300718 - DNA, 30 bp, Artificial Sequence
  Synthetic oligonucleotide
gagtcagtgggaccggctgggggcttgtgt

SEQ ID NO: 300719 - DNA, 30 bp, Artificial Sequence
  Synthetic oligonucleotide
tcgtgccggtgactcgcctatttgttgtgt

SEQ ID NO: 300720 - DNA, 30 bp, Artificial Sequence
  Synthetic oligonucleotide
agtgtgttctatgcttagactgatttgtgt

SEQ ID NO: 300721 - DNA, 30 bp, Artificial Sequence
  Synthetic oligonucleotide
caatcagtgacgaattcaaacgaaaattgt

SEQ ID NO: 300722 - DNA, 30 bp, Artificial Sequence
  Synthetic oligonucleotide
actcggggaatggcggtaacatgcaattgt

SEQ ID NO: 300723 - DNA, 30 bp, Artificial Sequence
  Synthetic oligonucleotide
ttgcgtaatttgtgtggaggatctaattgt

SEQ ID NO: 300724 - DNA, 30 bp, Artificial Sequence
  Synthetic oligonucleotide
catgggtaaaactaaagatttgcacattgt

SEQ ID NO: 300725 - DNA, 30 bp, Artificial Sequence
  Synthetic oligonucleotide
acagactgagttggtcagttcagccattgt

SEQ ID NO: 300726 - DNA, 30 bp, Artificial Sequence
  Synthetic oligonucleotide
gtataccacgatggagaactgtagcattgt

SEQ ID NO: 300727 - DNA, 30 bp, Artificial Sequence
  Synthetic oligonucleotide
ggctcgaaggactcttgattcttgcattgt

SEQ ID NO: 300728 - DNA, 30 bp, Artificial Sequence
  Synthetic oligonucleotide
ataaaaaatcctcatgactagtcagattgt

SEQ ID NO: 300729 - DNA, 30 bp, Artificial Sequence
  Synthetic oligonucleotide
caaggcaaatagcaggttttctccgattgt

SEQ ID NO: 300730 - DNA, 30 bp, Artificial Sequence
  Synthetic oligonucleotide
ccgacggggttattccatgaagcggattgt

SEQ ID NO: 300731 - DNA, 30 bp, Artificial Sequence
  Synthetic oligonucleotide
cagtaactgaccgttacggcttcggattgt

SEQ ID NO: 300732 - DNA, 30 bp, Artificial Sequence
  Synthetic oligonucleotide
cttatactaaccgcccgcatagagtattgt

SEQ ID NO: 300733 - DNA, 30 bp, Artificial Sequence
  Synthetic oligonucleotide
gaataggtcattctttatatgatgtattgt

SEQ ID NO: 300734 - DNA, 30 bp, Artificial Sequence
  Synthetic oligonucleotide
agtacgctacgacaaatctccagttattgt

SEQ ID NO: 300735 - DNA, 30 bp, Artificial Sequence
  Synthetic oligonucleotide
atgacgcgtgtaagaatatccgaaacttgt

SEQ ID NO: 300736 - DNA, 30 bp, Artificial Sequence
  Synthetic oligonucleotide
aacaaaattcagattaacaagccaacttgt

SEQ ID NO: 300737 - DNA, 30 bp, Artificial Sequence
  Synthetic oligonucleotide
ttcattagcaattctattgtaagaacttgt

SEQ ID NO: 300738 - DNA, 30 bp, Artificial Sequence
  Synthetic oligonucleotide
aagcgaactaagctaactttggtaacttgt

SEQ ID NO: 300739 - DNA, 30 bp, Artificial Sequence
  Synthetic oligonucleotide
ccggacgggtactgatttgcagacacttgt

SEQ ID NO: 300740 - DNA, 30 bp, Artificial Sequence
  Synthetic oligonucleotide
gtgagcttccggcataagcaaaccacttgt

SEQ ID NO: 300741 - DNA, 30 bp, Artificial Sequence
  Synthetic oligonucleotide
cctttcgcgtggtgagtgcctccgacttgt

SEQ ID NO: 300742 - DNA, 30 bp, Artificial Sequence
  Synthetic oligonucleotide
tttggccgaacacagggacgatttacttgt

SEQ ID NO: 300743 - DNA, 30 bp, Artificial Sequence
  Synthetic oligonucleotide
tgctgcaatcagaatcggtgctttacttgt

SEQ ID NO: 300744 - DNA, 30 bp, Artificial Sequence
  Synthetic oligonucleotide
aaaaagggctatgagccaattgcaccttgt

SEQ ID NO: 300745 - DNA, 30 bp, Artificial Sequence
  Synthetic oligonucleotide
tcagggtagagaagtgcttcagacccttgt

SEQ ID NO: 300746 - DNA, 30 bp, Artificial Sequence
  Synthetic oligonucleotide
acaactattctagctcaacaagccccttgt

SEQ ID NO: 300747 - DNA, 30 bp, Artificial Sequence
  Synthetic oligonucleotide
gggtaaattcgtctcggcgcatgcccttgt

SEQ ID NO: 300748 - DNA, 30 bp, Artificial Sequence
  Synthetic oligonucleotide
aatgtagttcgatgaatcttgatgccttgt

SEQ ID NO: 300749 - DNA, 30 bp, Artificial Sequence
  Synthetic oligonucleotide
cgaaattgtgcaatccagggacacgcttgt

SEQ ID NO: 300750 - DNA, 30 bp, Artificial Sequence
  Synthetic oligonucleotide
gagcttaagctaatacttcaaatcgcttgt

SEQ ID NO: 300751 - DNA, 30 bp, Artificial Sequence
  Synthetic oligonucleotide
ggtgtgggcctcacctgtagaggggcttgt

SEQ ID NO: 300752 - DNA, 30 bp, Artificial Sequence
  Synthetic oligonucleotide
caaatgttaaagagtatctacgtatcttgt

SEQ ID NO: 300753 - DNA, 30 bp, Artificial Sequence
  Synthetic oligonucleotide
tgtcccctgagaacttctatatggtcttgt

SEQ ID NO: 300754 - DNA, 30 bp, Artificial Sequence
  Synthetic oligonucleotide
ggcgttcgagcgggttccacgcgttcttgt

SEQ ID NO: 300755 - DNA, 30 bp, Artificial Sequence
  Synthetic oligonucleotide
gacatacctggtcctttttatgccagttgt

SEQ ID NO: 300756 - DNA, 30 bp, Artificial Sequence
  Synthetic oligonucleotide
cgatttagtaccgtgtaggtttgcagttgt

SEQ ID NO: 300757 - DNA, 30 bp, Artificial Sequence
  Synthetic oligonucleotide
gggttgaaagtagtaatgaccggtagttgt

SEQ ID NO: 300758 - DNA, 30 bp, Artificial Sequence
  Synthetic oligonucleotide
ggtgcaattggttaatcaggggaacgttgt

SEQ ID NO: 300759 - DNA, 30 bp, Artificial Sequence
  Synthetic oligonucleotide
ataatggtataaaaccgcttagcacgttgt

SEQ ID NO: 300760 - DNA, 30 bp, Artificial Sequence
  Synthetic oligonucleotide
ggtgcatgaactccgatccgaggtcgttgt

SEQ ID NO: 300761 - DNA, 30 bp, Artificial Sequence
  Synthetic oligonucleotide
ggtatgcagattgcctttctatgtcgttgt

SEQ ID NO: 300762 - DNA, 30 bp, Artificial Sequence
  Synthetic oligonucleotide
tcaggctcccagaccaaccatgaaggttgt

SEQ ID NO: 300763 - DNA, 30 bp, Artificial Sequence
  Synthetic oligonucleotide
atgatgtcgctaagagcagcatgaggttgt

SEQ ID NO: 300764 - DNA, 30 bp, Artificial Sequence
  Synthetic oligonucleotide
gtcggcggtgaattagtgtgagccggttgt

SEQ ID NO: 300765 - DNA, 30 bp, Artificial Sequence
  Synthetic oligonucleotide
atgggttatgcgaccgacctagccggttgt

SEQ ID NO: 300766 - DNA, 30 bp, Artificial Sequence
  Synthetic oligonucleotide
aagacattgagtagacagacacgcggttgt

SEQ ID NO: 300767 - DNA, 30 bp, Artificial Sequence
  Synthetic oligonucleotide
gaggaaaggctataattcagagcgggttgt

SEQ ID NO: 300768 - DNA, 30 bp, Artificial Sequence
  Synthetic oligonucleotide
gatccttacttgacgtgagggttgggttgt

SEQ ID NO: 300769 - DNA, 30 bp, Artificial Sequence
  Synthetic oligonucleotide
cggcacataactacgatctgacatggttgt

SEQ ID NO: 300770 - DNA, 30 bp, Artificial Sequence
  Synthetic oligonucleotide
cgatctcgttgattaataacagctggttgt

SEQ ID NO: 300771 - DNA, 30 bp, Artificial Sequence
  Synthetic oligonucleotide
taggccaagggtctcagaagcgttggttgt

SEQ ID NO: 300772 - DNA, 30 bp, Artificial Sequence
  Synthetic oligonucleotide
tgatcacattcatcatgcaccaaatgttgt

SEQ ID NO: 300773 - DNA, 30 bp, Artificial Sequence
  Synthetic oligonucleotide
cggagctaaaacacgatgtctgaatgttgt

SEQ ID NO: 300774 - DNA, 30 bp, Artificial Sequence
  Synthetic oligonucleotide
acgcggcacttccacaggatcagatgttgt

SEQ ID NO: 300775 - DNA, 30 bp, Artificial Sequence
  Synthetic oligonucleotide
gggaaaagtcgacggttactgtggtgttgt

SEQ ID NO: 300776 - DNA, 30 bp, Artificial Sequence
  Synthetic oligonucleotide
attatgtttcaggcatgggctacttgttgt

SEQ ID NO: 300777 - DNA, 30 bp, Artificial Sequence
  Synthetic oligonucleotide
gtctgtaacgataagagggaaagaatttgt

SEQ ID NO: 300778 - DNA, 30 bp, Artificial Sequence
  Synthetic oligonucleotide
ctgatatgggatagtgttccttccatttgt

SEQ ID NO: 300779 - DNA, 30 bp, Artificial Sequence
  Synthetic oligonucleotide
cgcaggtacgtttaaagtgtggagatttgt

SEQ ID NO: 300780 - DNA, 30 bp, Artificial Sequence
  Synthetic oligonucleotide
catttattccgagcaaacgatgcgatttgt

SEQ ID NO: 300781 - DNA, 30 bp, Artificial Sequence
  Synthetic oligonucleotide
ggagtatggcatgtacggagtgatatttgt

SEQ ID NO: 300782 - DNA, 31 bp, Artificial Sequence
  Synthetic oligonucleotide
gggaatagatgtaactgacgtactactttgt

SEQ ID NO: 300783 - DNA, 30 bp, Artificial Sequence
  Synthetic oligonucleotide
catatcaagctgcctaacgcatatctttgt

SEQ ID NO: 300784 - DNA, 30 bp, Artificial Sequence
  Synthetic oligonucleotide
cacggagcgtatcgcaaaggtaaagtttgt

SEQ ID NO: 300785 - DNA, 30 bp, Artificial Sequence
  Synthetic oligonucleotide
aaggtgtgtcaggtaccttgagtagtttgt

SEQ ID NO: 300786 - DNA, 30 bp, Artificial Sequence
  Synthetic oligonucleotide
cacagtcgattcatgaaccaattcgtttgt

SEQ ID NO: 300787 - DNA, 30 bp, Artificial Sequence
  Synthetic oligonucleotide
cgtacagtcacgggttcggtcagtgtttgt

SEQ ID NO: 300788 - DNA, 30 bp, Artificial Sequence
  Synthetic oligonucleotide
agttcaccaaagatatcggccccattttgt

SEQ ID NO: 300789 - DNA, 30 bp, Artificial Sequence
  Synthetic oligonucleotide
ggccggacggatcacgagtagagattttgt

SEQ ID NO: 300790 - DNA, 30 bp, Artificial Sequence
  Synthetic oligonucleotide
taaaacatacgggttatatttagattttgt

SEQ ID NO: 300791 - DNA, 30 bp, Artificial Sequence
  Synthetic oligonucleotide
cgtcgggcgagcataagggtatacttttgt

SEQ ID NO: 300792 - DNA, 30 bp, Artificial Sequence
  Synthetic oligonucleotide
agacaagttacgcacttatactggttttgt

SEQ ID NO: 300793 - DNA, 30 bp, Artificial Sequence
  Synthetic oligonucleotide
agtccggcctggagtcagaatgctttttgt

SEQ ID NO: 300794 - DNA, 30 bp, Artificial Sequence
  Synthetic oligonucleotide
tctgacctagggataaattgagcaaaaatt

SEQ ID NO: 300795 - DNA, 30 bp, Artificial Sequence
  Synthetic oligonucleotide
cactgggcccaatacagcgtgggaaaaatt

SEQ ID NO: 300796 - DNA, 30 bp, Artificial Sequence
  Synthetic oligonucleotide
cgtgtgtcctggaaagtgggaataaaaatt

SEQ ID NO: 300797 - DNA, 30 bp, Artificial Sequence
  Synthetic oligonucleotide
tgcagctcggaactagtatagtccaaaatt

SEQ ID NO: 300798 - DNA, 30 bp, Artificial Sequence
  Synthetic oligonucleotide
agtccgattaaagccccctatcgcaaaatt

SEQ ID NO: 300799 - DNA, 30 bp, Artificial Sequence
  Synthetic oligonucleotide
acaggcgctgttacaacagtcatcaaaatt

SEQ ID NO: 300800 - DNA, 30 bp, Artificial Sequence
  Synthetic oligonucleotide
agtcgacgccccaagcgtatcgtcaaaatt

SEQ ID NO: 300801 - DNA, 30 bp, Artificial Sequence
  Synthetic oligonucleotide
ccataggcgcgtgtggcacatgcgaaaatt

SEQ ID NO: 300802 - DNA, 30 bp, Artificial Sequence
  Synthetic oligonucleotide
cggattgatgggcagaacgcacggaaaatt

SEQ ID NO: 300803 - DNA, 30 bp, Artificial Sequence
  Synthetic oligonucleotide
caggtctctaataagggtctcgataaaatt

SEQ ID NO: 300804 - DNA, 30 bp, Artificial Sequence
  Synthetic oligonucleotide
acttggaaagaatcaaagtcttaacaaatt

SEQ ID NO: 300805 - DNA, 30 bp, Artificial Sequence
  Synthetic oligonucleotide
gaccagccatttcaacaggcaggacaaatt

SEQ ID NO: 300806 - DNA, 30 bp, Artificial Sequence
  Synthetic oligonucleotide
agcagttaggatatctattcatgacaaatt

SEQ ID NO: 300807 - DNA, 30 bp, Artificial Sequence
  Synthetic oligonucleotide
aactggccccagccaaagcattgccaaatt

SEQ ID NO: 300808 - DNA, 30 bp, Artificial Sequence
  Synthetic oligonucleotide
gggctagcctcgctaagctcaacagaaatt

SEQ ID NO: 300809 - DNA, 30 bp, Artificial Sequence
  Synthetic oligonucleotide
ctgaagaatttatcccaagtccgagaaatt

SEQ ID NO: 300810 - DNA, 30 bp, Artificial Sequence
  Synthetic oligonucleotide
cttacaagaggattgaaactcctagaaatt

SEQ ID NO: 300811 - DNA, 30 bp, Artificial Sequence
  Synthetic oligonucleotide
ctgtgtgaaggtagttttcttgccgaaatt

SEQ ID NO: 300812 - DNA, 30 bp, Artificial Sequence
  Synthetic oligonucleotide
ggctatagaacgccatgggagacggaaatt

SEQ ID NO: 300813 - DNA, 30 bp, Artificial Sequence
  Synthetic oligonucleotide
gtttatcagttacgtaaacggggggaaatt

SEQ ID NO: 300814 - DNA, 30 bp, Artificial Sequence
  Synthetic oligonucleotide
gaagtaaatcaacagccataatgggaaatt

SEQ ID NO: 300815 - DNA, 30 bp, Artificial Sequence
  Synthetic oligonucleotide
gaaagttgctgttgccgttatatggaaatt

SEQ ID NO: 300816 - DNA, 30 bp, Artificial Sequence
  Synthetic oligonucleotide
ctcgaccacggtcaggaatatgcataaatt

SEQ ID NO: 300817 - DNA, 30 bp, Artificial Sequence
  Synthetic oligonucleotide
cgtgtttactttcagaacggcccctaaatt

SEQ ID NO: 300818 - DNA, 30 bp, Artificial Sequence
  Synthetic oligonucleotide
cctgtgcttaccagccgggccgtctaaatt

SEQ ID NO: 300819 - DNA, 30 bp, Artificial Sequence
  Synthetic oligonucleotide
caatgcagaccggttaccacatggtaaatt

SEQ ID NO: 300820 - DNA, 30 bp, Artificial Sequence
  Synthetic oligonucleotide
taggaaaatccatcaatgaatatttaaatt

SEQ ID NO: 300821 - DNA, 30 bp, Artificial Sequence
  Synthetic oligonucleotide
ggagtgtgacgggaagtaatcgcaacaatt

SEQ ID NO: 300822 - DNA, 30 bp, Artificial Sequence
  Synthetic oligonucleotide
ggccagttaaagagcaggaccagaacaatt

SEQ ID NO: 300823 - DNA, 30 bp, Artificial Sequence
  Synthetic oligonucleotide
gcagacgatcgtgggaatcatttaacaatt

SEQ ID NO: 300824 - DNA, 30 bp, Artificial Sequence
  Synthetic oligonucleotide
tacagaccaaatcaattcccgcacacaatt

SEQ ID NO: 300825 - DNA, 30 bp, Artificial Sequence
  Synthetic oligonucleotide
gggttaatcggcctctaagagctcacaatt

SEQ ID NO: 300826 - DNA, 30 bp, Artificial Sequence
  Synthetic oligonucleotide
gtatacactcttagaatggtagcaccaatt

SEQ ID NO: 300827 - DNA, 29 bp, Artificial Sequence
  Synthetic oligonucleotide
gatcgtctaaagaatacagtcgcccaatt

SEQ ID NO: 300828 - DNA, 30 bp, Artificial Sequence
  Synthetic oligonucleotide
ctgtctctcaggttacgttcggagccaatt

SEQ ID NO: 300829 - DNA, 30 bp, Artificial Sequence
  Synthetic oligonucleotide
ctaaaacagtcaggcaatggcaaagcaatt

SEQ ID NO: 300830 - DNA, 30 bp, Artificial Sequence
  Synthetic oligonucleotide
tcttgtgcacacgtccgttcccaagcaatt

SEQ ID NO: 300831 - DNA, 30 bp, Artificial Sequence
  Synthetic oligonucleotide
ggtgggactcaatggagtcgtcaagcaatt

SEQ ID NO: 300832 - DNA, 30 bp, Artificial Sequence
  Synthetic oligonucleotide
agcttgaactcttgcgtcctcccagcaatt

SEQ ID NO: 300833 - DNA, 30 bp, Artificial Sequence
  Synthetic oligonucleotide
tcacttatatactgccctcgctccgcaatt

SEQ ID NO: 300834 - DNA, 30 bp, Artificial Sequence
  Synthetic oligonucleotide
cgtacagtttaagatggttgttgcgcaatt

SEQ ID NO: 300835 - DNA, 30 bp, Artificial Sequence
  Synthetic oligonucleotide
cccttgatatatacgagccccgaggcaatt

SEQ ID NO: 300836 - DNA, 30 bp, Artificial Sequence
  Synthetic oligonucleotide
gacattctagacgcgacaacatcggcaatt

SEQ ID NO: 300837 - DNA, 30 bp, Artificial Sequence
  Synthetic oligonucleotide
cttaggactgttccggttaaggatgcaatt

SEQ ID NO: 300838 - DNA, 30 bp, Artificial Sequence
  Synthetic oligonucleotide
taatttagcctacgataaagtggtgcaatt

SEQ ID NO: 300839 - DNA, 30 bp, Artificial Sequence
  Synthetic oligonucleotide
ccaatgaggagcacgcactttcagtcaatt

SEQ ID NO: 300840 - DNA, 30 bp, Artificial Sequence
  Synthetic oligonucleotide
cattcgcagggtaaagtggacctaagaatt

SEQ ID NO: 300841 - DNA, 30 bp, Artificial Sequence
  Synthetic oligonucleotide
gtggggatcactataaaacagtacagaatt

SEQ ID NO: 300842 - DNA, 30 bp, Artificial Sequence
  Synthetic oligonucleotide
gacgcagtggcgacaaataagcgcagaatt

SEQ ID NO: 300843 - DNA, 30 bp, Artificial Sequence
  Synthetic oligonucleotide
agtgaagacacatgagaggtatagagaatt

SEQ ID NO: 300844 - DNA, 30 bp, Artificial Sequence
  Synthetic oligonucleotide
ttcgttaaggtaaacctcatgccgagaatt

SEQ ID NO: 300845 - DNA, 30 bp, Artificial Sequence
  Synthetic oligonucleotide
gcgggtactcaaacctcaatgaggagaatt

SEQ ID NO: 300846 - DNA, 30 bp, Artificial Sequence
  Synthetic oligonucleotide
acaggacctaagtgactaaatgggagaatt

SEQ ID NO: 300847 - DNA, 30 bp, Artificial Sequence
  Synthetic oligonucleotide
gcgagcgctaagtaagttaatgggagaatt

SEQ ID NO: 300848 - DNA, 30 bp, Artificial Sequence
  Synthetic oligonucleotide
tacggcggccacggacgcgtccctagaatt

SEQ ID NO: 300849 - DNA, 30 bp, Artificial Sequence
  Synthetic oligonucleotide
ggggaatccggcacatattacattagaatt

SEQ ID NO: 300850 - DNA, 30 bp, Artificial Sequence
  Synthetic oligonucleotide
agcaaactagtcctggcaaactttagaatt

SEQ ID NO: 300851 - DNA, 30 bp, Artificial Sequence
  Synthetic oligonucleotide
attaaacacaagtaatgacaagaacgaatt

SEQ ID NO: 300852 - DNA, 30 bp, Artificial Sequence
  Synthetic oligonucleotide
ctctccgcaattgcggtaaggaggcgaatt

SEQ ID NO: 300853 - DNA, 30 bp, Artificial Sequence
  Synthetic oligonucleotide
tgtctatatggcggatacagtgggcgaatt

SEQ ID NO: 300854 - DNA, 30 bp, Artificial Sequence
  Synthetic oligonucleotide
ttaaattaggaaggatcagatccaggaatt

SEQ ID NO: 300855 - DNA, 30 bp, Artificial Sequence
  Synthetic oligonucleotide
ggaacgtggccggggtcgacacgcggaatt

SEQ ID NO: 300856 - DNA, 30 bp, Artificial Sequence
  Synthetic oligonucleotide
catatgattctccgcagcggaggcggaatt

SEQ ID NO: 300857 - DNA, 30 bp, Artificial Sequence
  Synthetic oligonucleotide
agcgctgggacccgagactcgctcggaatt

SEQ ID NO: 300858 - DNA, 30 bp, Artificial Sequence
  Synthetic oligonucleotide
aaagttcactaaactgggaggctcggaatt

SEQ ID NO: 300859 - DNA, 30 bp, Artificial Sequence
  Synthetic oligonucleotide
ggatccaagttagccctcatagtcggaatt

SEQ ID NO: 300860 - DNA, 30 bp, Artificial Sequence
  Synthetic oligonucleotide
acaaaaccttttggccaactgaggggaatt

SEQ ID NO: 300861 - DNA, 30 bp, Artificial Sequence
  Synthetic oligonucleotide
agtgtgcttcgctatcgatcgatgggaatt

SEQ ID NO: 300862 - DNA, 30 bp, Artificial Sequence
  Synthetic oligonucleotide
atccgtactagttgagcagcgctgggaatt

SEQ ID NO: 300863 - DNA, 30 bp, Artificial Sequence
  Synthetic oligonucleotide
gaccacagtcggctcttgtcatgtggaatt

SEQ ID NO: 300864 - DNA, 30 bp, Artificial Sequence
  Synthetic oligonucleotide
ggaagttgacaagcttgcggttcgtgaatt

SEQ ID NO: 300865 - DNA, 30 bp, Artificial Sequence
  Synthetic oligonucleotide
ccggtaccacgtccagtatttcggtgaatt

SEQ ID NO: 300866 - DNA, 30 bp, Artificial Sequence
  Synthetic oligonucleotide
gcaagctaaacccggtcggagaattgaatt

SEQ ID NO: 300867 - DNA, 30 bp, Artificial Sequence
  Synthetic oligonucleotide
tcgaacacccggccccacgactcaataatt

SEQ ID NO: 300868 - DNA, 30 bp, Artificial Sequence
  Synthetic oligonucleotide
accgtatccagatttcgcacaaacataatt

SEQ ID NO: 300869 - DNA, 30 bp, Artificial Sequence
  Synthetic oligonucleotide
ttccttaaacacggaggccacaacataatt

SEQ ID NO: 300870 - DNA, 30 bp, Artificial Sequence
  Synthetic oligonucleotide
atcagcacgtcttatccatggcgcataatt

SEQ ID NO: 300871 - DNA, 30 bp, Artificial Sequence
  Synthetic oligonucleotide
cgaccataaaggaccgatagctagataatt

SEQ ID NO: 300872 - DNA, 30 bp, Artificial Sequence
  Synthetic oligonucleotide
gactttaagctaagcagtaggtggataatt

SEQ ID NO: 300873 - DNA, 30 bp, Artificial Sequence
  Synthetic oligonucleotide
gtaactatagaattgctaacgatgataatt

SEQ ID NO: 300874 - DNA, 30 bp, Artificial Sequence
  Synthetic oligonucleotide
agacaggtatatctcgctgcgtaactaatt

SEQ ID NO: 300875 - DNA, 30 bp, Artificial Sequence
  Synthetic oligonucleotide
ttagtcatcacctacatgattcgactaatt

SEQ ID NO: 300876 - DNA, 30 bp, Artificial Sequence
  Synthetic oligonucleotide
ggacccagctccatcatcaccgtactaatt

SEQ ID NO: 300877 - DNA, 30 bp, Artificial Sequence
  Synthetic oligonucleotide
cccttacagttgcaatagaggtgcctaatt

SEQ ID NO: 300878 - DNA, 31 bp, Artificial Sequence
  Synthetic oligonucleotide
gtcgtttccaactgtgggcagagggctaatt

SEQ ID NO: 300879 - DNA, 30 bp, Artificial Sequence
  Synthetic oligonucleotide
gagcgtactgccaggtaggattatctaatt

SEQ ID NO: 300880 - DNA, 30 bp, Artificial Sequence
  Synthetic oligonucleotide
ctattggcacgtggtcgcgaatttctaatt

SEQ ID NO: 300881 - DNA, 30 bp, Artificial Sequence
  Synthetic oligonucleotide
cacataacgggaagactcggaaaagtaatt

SEQ ID NO: 300882 - DNA, 30 bp, Artificial Sequence
  Synthetic oligonucleotide
ctaatccggatgcccggaaaactggtaatt

SEQ ID NO: 300883 - DNA, 30 bp, Artificial Sequence
  Synthetic oligonucleotide
cagtcagatgtacggtacccttgattaatt

SEQ ID NO: 300884 - DNA, 30 bp, Artificial Sequence
  Synthetic oligonucleotide
acgttcagtttatagtaagcaggcttaatt

SEQ ID NO: 300885 - DNA, 30 bp, Artificial Sequence
  Synthetic oligonucleotide
cggagcgaacgtatgagatataagttaatt

SEQ ID NO: 300886 - DNA, 30 bp, Artificial Sequence
  Synthetic oligonucleotide
taatggctcatcgaggggagtgagttaatt

SEQ ID NO: 300887 - DNA, 30 bp, Artificial Sequence
  Synthetic oligonucleotide
agacaatgtaccataaaggcatagttaatt

SEQ ID NO: 300888 - DNA, 30 bp, Artificial Sequence
  Synthetic oligonucleotide
acgcttaggtacagaactcgaccgttaatt

SEQ ID NO: 300889 - DNA, 30 bp, Artificial Sequence
  Synthetic oligonucleotide
cattgaaggtaggcttcttgactgttaatt

SEQ ID NO: 300890 - DNA, 31 bp, Artificial Sequence
  Synthetic oligonucleotide
agagcacgccttgtcgcaaatacttttaatt

SEQ ID NO: 300891 - DNA, 30 bp, Artificial Sequence
  Synthetic oligonucleotide
taaaattatatgaatattttcggaaacatt

SEQ ID NO: 300892 - DNA, 30 bp, Artificial Sequence
  Synthetic oligonucleotide
ggaaaccgatgtggatgaagaatcaacatt

SEQ ID NO: 300893 - DNA, 30 bp, Artificial Sequence
  Synthetic oligonucleotide
ggacaggtgggtcccggctgcattaacatt

SEQ ID NO: 300894 - DNA, 30 bp, Artificial Sequence
  Synthetic oligonucleotide
caaactcaataacgatttgagatacacatt

SEQ ID NO: 300895 - DNA, 30 bp, Artificial Sequence
  Synthetic oligonucleotide
cggcaattaggcaaacccgtctaccacatt

SEQ ID NO: 300896 - DNA, 30 bp, Artificial Sequence
  Synthetic oligonucleotide
cctgctgacatctgagatcaaacccacatt

SEQ ID NO: 300897 - DNA, 30 bp, Artificial Sequence
  Synthetic oligonucleotide
atatcccacgaatcgtgagttacccacatt

SEQ ID NO: 300898 - DNA, 30 bp, Artificial Sequence
  Synthetic oligonucleotide
cactcagcccgaggttacgacggccacatt

SEQ ID NO: 300899 - DNA, 30 bp, Artificial Sequence
  Synthetic oligonucleotide
acaatccgggccaagttcattctccacatt

SEQ ID NO: 300900 - DNA, 30 bp, Artificial Sequence
  Synthetic oligonucleotide
gctcaaagcattggttctaaacctcacatt

SEQ ID NO: 300901 - DNA, 30 bp, Artificial Sequence
  Synthetic oligonucleotide
taccatccagtcaccctgtatcctcacatt

SEQ ID NO: 300902 - DNA, 30 bp, Artificial Sequence
  Synthetic oligonucleotide
accaattcgaagaattcataagacgacatt

SEQ ID NO: 300903 - DNA, 30 bp, Artificial Sequence
  Synthetic oligonucleotide
tctgtcggccgagcaagccaggtcgacatt

SEQ ID NO: 300904 - DNA, 30 bp, Artificial Sequence
  Synthetic oligonucleotide
atctaaacgtgctcaaagcgccaggacatt

SEQ ID NO: 300905 - DNA, 31 bp, Artificial Sequence
  Synthetic oligonucleotide
gtccgaccaacgctcgcaagactaggacatt

SEQ ID NO: 300906 - DNA, 30 bp, Artificial Sequence
  Synthetic oligonucleotide
atactgcgccatatgctattagcggacatt

SEQ ID NO: 300907 - DNA, 30 bp, Artificial Sequence
  Synthetic oligonucleotide
ccttgcttccaactacgcgctggtgacatt

SEQ ID NO: 300908 - DNA, 30 bp, Artificial Sequence
  Synthetic oligonucleotide
gctggtcgctgctcacccacaggatacatt

SEQ ID NO: 300909 - DNA, 30 bp, Artificial Sequence
  Synthetic oligonucleotide
actccccagcgccactaggtactatacatt

SEQ ID NO: 300910 - DNA, 30 bp, Artificial Sequence
  Synthetic oligonucleotide
gggggggaaatccaagagttactatacatt

SEQ ID NO: 300911 - DNA, 30 bp, Artificial Sequence
  Synthetic oligonucleotide
agaatgccggcgtatcgggggtgctacatt

SEQ ID NO: 300912 - DNA, 30 bp, Artificial Sequence
  Synthetic oligonucleotide
tcaccacagtaactccatctcgggtacatt

SEQ ID NO: 300913 - DNA, 30 bp, Artificial Sequence
  Synthetic oligonucleotide
ttgcaacgttaagaacactggctgtacatt

SEQ ID NO: 300914 - DNA, 30 bp, Artificial Sequence
  Synthetic oligonucleotide
gaggcatcggaacccgccgcgtcttacatt

SEQ ID NO: 300915 - DNA, 30 bp, Artificial Sequence
  Synthetic oligonucleotide
ttggtgagaccccatcaggttatttacatt

SEQ ID NO: 300916 - DNA, 30 bp, Artificial Sequence
  Synthetic oligonucleotide
aggcaggtgccccccaaaccgcgaaccatt

SEQ ID NO: 300917 - DNA, 30 bp, Artificial Sequence
  Synthetic oligonucleotide
gtagcaacgttagaaggatcctacaccatt

SEQ ID NO: 300918 - DNA, 30 bp, Artificial Sequence
  Synthetic oligonucleotide
tgtcgatacactgtacgagtccccaccatt

SEQ ID NO: 300919 - DNA, 30 bp, Artificial Sequence
  Synthetic oligonucleotide
gtcgcttaaactgagacagcggtcaccatt

SEQ ID NO: 300920 - DNA, 30 bp, Artificial Sequence
  Synthetic oligonucleotide
tatgttacttagtgaggtaacacgaccatt

SEQ ID NO: 300921 - DNA, 30 bp, Artificial Sequence
  Synthetic oligonucleotide
cccatggtcacttttgttaggtgtaccatt

SEQ ID NO: 300922 - DNA, 30 bp, Artificial Sequence
  Synthetic oligonucleotide
tatgtgaacaactatgggcattttaccatt

SEQ ID NO: 300923 - DNA, 30 bp, Artificial Sequence
  Synthetic oligonucleotide
aggagattagacttttttacggtacccatt

SEQ ID NO: 300924 - DNA, 30 bp, Artificial Sequence
  Synthetic oligonucleotide
cagggagcattctccattggtaggcccatt

SEQ ID NO: 300925 - DNA, 30 bp, Artificial Sequence
  Synthetic oligonucleotide
ggcaaagttcggccctggaggaatcccatt

SEQ ID NO: 300926 - DNA, 30 bp, Artificial Sequence
  Synthetic oligonucleotide
cagtgaaggtacatacgaatacctcccatt

SEQ ID NO: 300927 - DNA, 30 bp, Artificial Sequence
  Synthetic oligonucleotide
gtgctcgaactttgactgcgacgagccatt

SEQ ID NO: 300928 - DNA, 30 bp, Artificial Sequence
  Synthetic oligonucleotide
tcacgattgttgtttctcttgtccgccatt

SEQ ID NO: 300929 - DNA, 30 bp, Artificial Sequence
  Synthetic oligonucleotide
cacgaattcgggttctttcacggcgccatt

SEQ ID NO: 300930 - DNA, 30 bp, Artificial Sequence
  Synthetic oligonucleotide
tctggagggtcgttagggggggaggccatt

SEQ ID NO: 300931 - DNA, 30 bp, Artificial Sequence
  Synthetic oligonucleotide
gccgccgggtcagagtacgtactggccatt

SEQ ID NO: 300932 - DNA, 30 bp, Artificial Sequence
  Synthetic oligonucleotide
catgtcattaccgctatcgaggttgccatt

SEQ ID NO: 300933 - DNA, 30 bp, Artificial Sequence
  Synthetic oligonucleotide
atgtatttgggctcgagtgttaaatccatt

SEQ ID NO: 300934 - DNA, 30 bp, Artificial Sequence
  Synthetic oligonucleotide
gcttgtgatggggataccgcgtcatccatt

SEQ ID NO: 300935 - DNA, 30 bp, Artificial Sequence
  Synthetic oligonucleotide
tcacgaagcacccactgatagcactccatt

SEQ ID NO: 300936 - DNA, 30 bp, Artificial Sequence
  Synthetic oligonucleotide
aatgtgcttttggagtgcccatactccatt

SEQ ID NO: 300937 - DNA, 30 bp, Artificial Sequence
  Synthetic oligonucleotide
cttacggaacctacagggggaggctccatt

SEQ ID NO: 300938 - DNA, 30 bp, Artificial Sequence
  Synthetic oligonucleotide
gcagaatgggaattgtttgttgggtccatt

SEQ ID NO: 300939 - DNA, 30 bp, Artificial Sequence
  Synthetic oligonucleotide
tccaggcattaggattacgggctgtccatt

SEQ ID NO: 300940 - DNA, 30 bp, Artificial Sequence
  Synthetic oligonucleotide
gccaatgacaacaatgccgaggtgtccatt

SEQ ID NO: 300941 - DNA, 30 bp, Artificial Sequence
  Synthetic oligonucleotide
gtcagccaagggatccccgtgaattccatt

SEQ ID NO: 300942 - DNA, 30 bp, Artificial Sequence
  Synthetic oligonucleotide
aaccgagcaatattgaaatcacattccatt

SEQ ID NO: 300943 - DNA, 30 bp, Artificial Sequence
  Synthetic oligonucleotide
tagtatgcaagagcaggggggcaaagcatt

SEQ ID NO: 300944 - DNA, 30 bp, Artificial Sequence
  Synthetic oligonucleotide
tgtgcgagcggcgccctatttagaagcatt

SEQ ID NO: 300945 - DNA, 30 bp, Artificial Sequence
  Synthetic oligonucleotide
catcgtctgtcggctactgtcgtaagcatt

SEQ ID NO: 300946 - DNA, 30 bp, Artificial Sequence
  Synthetic oligonucleotide
cgaatttagcacacgttgcattagagcatt

SEQ ID NO: 300947 - DNA, 30 bp, Artificial Sequence
  Synthetic oligonucleotide
gcggctatataagagaccgcaccgagcatt

SEQ ID NO: 300948 - DNA, 31 bp, Artificial Sequence
  Synthetic oligonucleotide
gcccctataaattggtattagtgctagcatt

SEQ ID NO: 300949 - DNA, 29 bp, Artificial Sequence
  Synthetic oligonucleotide
tttgagcggtggtgtatatcggtagcatt

SEQ ID NO: 300950 - DNA, 30 bp, Artificial Sequence
  Synthetic oligonucleotide
gagacacatagattcataacgattagcatt

SEQ ID NO: 300951 - DNA, 30 bp, Artificial Sequence
  Synthetic oligonucleotide
ggcgaggtgtctttttaagcacttagcatt

SEQ ID NO: 300952 - DNA, 30 bp, Artificial Sequence
  Synthetic oligonucleotide
caaagatttatactgcaaactcaccgcatt

SEQ ID NO: 300953 - DNA, 30 bp, Artificial Sequence
  Synthetic oligonucleotide
cagatgtggatatggcgggtcttccgcatt

SEQ ID NO: 300954 - DNA, 30 bp, Artificial Sequence
  Synthetic oligonucleotide
cacatgcggaaggtttcatagactcgcatt

SEQ ID NO: 300955 - DNA, 30 bp, Artificial Sequence
  Synthetic oligonucleotide
tgccgtcacgggtgaccttttggtcgcatt

SEQ ID NO: 300956 - DNA, 30 bp, Artificial Sequence
  Synthetic oligonucleotide
acaatgtatgatgattagttatgaggcatt

SEQ ID NO: 300957 - DNA, 30 bp, Artificial Sequence
  Synthetic oligonucleotide
ttcagaaataacggcaagtggaacggcatt

SEQ ID NO: 300958 - DNA, 30 bp, Artificial Sequence
  Synthetic oligonucleotide
ttcgcaaatatccatggaaactacggcatt

SEQ ID NO: 300959 - DNA, 30 bp, Artificial Sequence
  Synthetic oligonucleotide
gggtgtacgaacagggcgacaaatggcatt

SEQ ID NO: 300960 - DNA, 30 bp, Artificial Sequence
  Synthetic oligonucleotide
ctcatagctagccttatttgctatggcatt

SEQ ID NO: 300961 - DNA, 30 bp, Artificial Sequence
  Synthetic oligonucleotide
tcgacgctgtaatgaaacgagcctggcatt

SEQ ID NO: 300962 - DNA, 30 bp, Artificial Sequence
  Synthetic oligonucleotide
ttgggagtgaaaaaagttactcttggcatt

SEQ ID NO: 300963 - DNA, 30 bp, Artificial Sequence
  Synthetic oligonucleotide
cttatgcttaagtacagcggaaaatgcatt

SEQ ID NO: 300964 - DNA, 30 bp, Artificial Sequence
  Synthetic oligonucleotide
ttcacaacgacatgtcaagtcggatgcatt

SEQ ID NO: 300965 - DNA, 30 bp, Artificial Sequence
  Synthetic oligonucleotide
acagatcagtttatccgagacagctgcatt

SEQ ID NO: 300966 - DNA, 30 bp, Artificial Sequence
  Synthetic oligonucleotide
gtagtgatgtggtctgagtccgagtgcatt

SEQ ID NO: 300967 - DNA, 30 bp, Artificial Sequence
  Synthetic oligonucleotide
tgctctaaggtagcatccgccacgtgcatt

SEQ ID NO: 300968 - DNA, 30 bp, Artificial Sequence
  Synthetic oligonucleotide
gtctgccgtacccacataggttgttgcatt

SEQ ID NO: 300969 - DNA, 30 bp, Artificial Sequence
  Synthetic oligonucleotide
aggactgtatacgagactgttaagatcatt

SEQ ID NO: 300970 - DNA, 30 bp, Artificial Sequence
  Synthetic oligonucleotide
agtggcaagagcgtacgaaagacgatcatt

SEQ ID NO: 300971 - DNA, 30 bp, Artificial Sequence
  Synthetic oligonucleotide
taggaactatctcacaggagctggatcatt

SEQ ID NO: 300972 - DNA, 30 bp, Artificial Sequence
  Synthetic oligonucleotide
gcttctggagaagcgaagcgggctatcatt

SEQ ID NO: 300973 - DNA, 30 bp, Artificial Sequence
  Synthetic oligonucleotide
atgagggtataagatatctggctcctcatt

SEQ ID NO: 300974 - DNA, 30 bp, Artificial Sequence
  Synthetic oligonucleotide
tcaacatcaagcaccttttgccatctcatt

SEQ ID NO: 300975 - DNA, 30 bp, Artificial Sequence
  Synthetic oligonucleotide
acagcccgggtggcaaatctccatctcatt

SEQ ID NO: 300976 - DNA, 30 bp, Artificial Sequence
  Synthetic oligonucleotide
gacatatacgcctcacctaaggatctcatt

SEQ ID NO: 300977 - DNA, 30 bp, Artificial Sequence
  Synthetic oligonucleotide
ggaataaacaacggggttatctcagtcatt

SEQ ID NO: 300978 - DNA, 30 bp, Artificial Sequence
  Synthetic oligonucleotide
ggctgattgattccgttacgtgccgtcatt

SEQ ID NO: 300979 - DNA, 30 bp, Artificial Sequence
  Synthetic oligonucleotide
agtggctattagtgcaaagacttcgtcatt

SEQ ID NO: 300980 - DNA, 30 bp, Artificial Sequence
  Synthetic oligonucleotide
tgggtaacaatcgctaagttctcggtcatt

SEQ ID NO: 300981 - DNA, 30 bp, Artificial Sequence
  Synthetic oligonucleotide
actaagatacttagcgtacaagtggtcatt

SEQ ID NO: 300982 - DNA, 30 bp, Artificial Sequence
  Synthetic oligonucleotide
agcagtacattgagtcctggaacattcatt

SEQ ID NO: 300983 - DNA, 30 bp, Artificial Sequence
  Synthetic oligonucleotide
acagcgtgctattatcacacaaacttcatt

SEQ ID NO: 300984 - DNA, 30 bp, Artificial Sequence
  Synthetic oligonucleotide
cgctcagaagtaagattaaataacttcatt

SEQ ID NO: 300985 - DNA, 30 bp, Artificial Sequence
  Synthetic oligonucleotide
aagatagataccacagaaaggcacttcatt

SEQ ID NO: 300986 - DNA, 30 bp, Artificial Sequence
  Synthetic oligonucleotide
cgcgcgcaaggaatcgtaatttacttcatt

SEQ ID NO: 300987 - DNA, 30 bp, Artificial Sequence
  Synthetic oligonucleotide
gcttgccaaaattactagaagtcgttcatt

SEQ ID NO: 300988 - DNA, 30 bp, Artificial Sequence
  Synthetic oligonucleotide
tctagtattaatccaatcgattatttcatt

SEQ ID NO: 300989 - DNA, 30 bp, Artificial Sequence
  Synthetic oligonucleotide
gtgaagaacgtaaaacaatggtgtttcatt

SEQ ID NO: 300990 - DNA, 30 bp, Artificial Sequence
  Synthetic oligonucleotide
ctagtagctaggtagacagtagaaaagatt

SEQ ID NO: 300991 - DNA, 30 bp, Artificial Sequence
  Synthetic oligonucleotide
aatagaaaagtcaggcgtaatttaaagatt

SEQ ID NO: 300992 - DNA, 30 bp, Artificial Sequence
  Synthetic oligonucleotide
ataccagaccgtcaggccgcttataagatt

SEQ ID NO: 300993 - DNA, 30 bp, Artificial Sequence
  Synthetic oligonucleotide
ctgcccgacgcaccggggatgattaagatt

SEQ ID NO: 300994 - DNA, 30 bp, Artificial Sequence
  Synthetic oligonucleotide
tcgggccgatagggaaaatgctcacagatt

SEQ ID NO: 300995 - DNA, 30 bp, Artificial Sequence
  Synthetic oligonucleotide
catacagacgagatctatgaaatacagatt

SEQ ID NO: 300996 - DNA, 30 bp, Artificial Sequence
  Synthetic oligonucleotide
taggtaaacaagggccctcaaagccagatt

SEQ ID NO: 300997 - DNA, 30 bp, Artificial Sequence
  Synthetic oligonucleotide
ctcgtcggtgattttgaagcgacagagatt

SEQ ID NO: 300998 - DNA, 30 bp, Artificial Sequence
  Synthetic oligonucleotide
gccaaaaatcaaacgagttctgcagagatt

SEQ ID NO: 300999 - DNA, 30 bp, Artificial Sequence
  Synthetic oligonucleotide
attacagatatagcccctccgggagagatt

SEQ ID NO: 301000 - DNA, 30 bp, Artificial Sequence
  Synthetic oligonucleotide
tgtcgtactccgtgaaggctttacgagatt

SEQ ID NO: 301001 - DNA, 30 bp, Artificial Sequence
  Synthetic oligonucleotide
aatgtcagcgcagggagttgtcaggagatt

SEQ ID NO: 301002 - DNA, 30 bp, Artificial Sequence
  Synthetic oligonucleotide
ggtatagcggcttcagacattgcatagatt

SEQ ID NO: 301003 - DNA, 30 bp, Artificial Sequence
  Synthetic oligonucleotide
caaattgctattgacgatataatatagatt

SEQ ID NO: 301004 - DNA, 30 bp, Artificial Sequence
  Synthetic oligonucleotide
atttggcccaagggcattataaactagatt

SEQ ID NO: 301005 - DNA, 30 bp, Artificial Sequence
  Synthetic oligonucleotide
aagacaacgtgttcatggaggcactagatt

SEQ ID NO: 301006 - DNA, 30 bp, Artificial Sequence
  Synthetic oligonucleotide
agtctaaaggtctacgcggatggctagatt

SEQ ID NO: 301007 - DNA, 30 bp, Artificial Sequence
  Synthetic oligonucleotide
cttgggaaaattcttgaaagtatctagatt

SEQ ID NO: 301008 - DNA, 30 bp, Artificial Sequence
  Synthetic oligonucleotide
caaagctgacttccgacataaacgtagatt

SEQ ID NO: 301009 - DNA, 30 bp, Artificial Sequence
  Synthetic oligonucleotide
cccgggtcatcatactacatcgcgtagatt

SEQ ID NO: 301010 - DNA, 30 bp, Artificial Sequence
  Synthetic oligonucleotide
tcaacaacactgtacagtctgtcgtagatt

SEQ ID NO: 301011 - DNA, 30 bp, Artificial Sequence
  Synthetic oligonucleotide
agcccctaaccgacggatttcgtgtagatt

SEQ ID NO: 301012 - DNA, 30 bp, Artificial Sequence
  Synthetic oligonucleotide
ggcatcagagagtaactctctttgtagatt

SEQ ID NO: 301013 - DNA, 30 bp, Artificial Sequence
  Synthetic oligonucleotide
gcgaacaagattaatttattaagaacgatt

SEQ ID NO: 301014 - DNA, 30 bp, Artificial Sequence
  Synthetic oligonucleotide
tctccccgttagaatggcccactaacgatt

SEQ ID NO: 301015 - DNA, 30 bp, Artificial Sequence
  Synthetic oligonucleotide
cttttgcggccgaagtgaggatgcacgatt

SEQ ID NO: 301016 - DNA, 30 bp, Artificial Sequence
  Synthetic oligonucleotide
aggcatgtcgggtgctaaatactcacgatt

SEQ ID NO: 301017 - DNA, 30 bp, Artificial Sequence
  Synthetic oligonucleotide
ggcaagaactctgcgaagttgatgacgatt

SEQ ID NO: 301018 - DNA, 30 bp, Artificial Sequence
  Synthetic oligonucleotide
ccaaacatgtaagaacaaatcgttacgatt

SEQ ID NO: 301019 - DNA, 30 bp, Artificial Sequence
  Synthetic oligonucleotide
gtacagcaccaaagtccgctgacaccgatt

SEQ ID NO: 301020 - DNA, 30 bp, Artificial Sequence
  Synthetic oligonucleotide
gaaatcagaacacactacggaagaccgatt

SEQ ID NO: 301021 - DNA, 30 bp, Artificial Sequence
  Synthetic oligonucleotide
gcatggcatttgttttggttatgaccgatt

SEQ ID NO: 301022 - DNA, 30 bp, Artificial Sequence
  Synthetic oligonucleotide
gaaacatattgtagaatgtggggtccgatt

SEQ ID NO: 301023 - DNA, 30 bp, Artificial Sequence
  Synthetic oligonucleotide
gaggggtttccgcggaatgcgtgtccgatt

SEQ ID NO: 301024 - DNA, 30 bp, Artificial Sequence
  Synthetic oligonucleotide
agtgagtccctagggcctaccgaagcgatt

SEQ ID NO: 301025 - DNA, 30 bp, Artificial Sequence
  Synthetic oligonucleotide
gagattaggtggtaattttaaacagcgatt

SEQ ID NO: 301026 - DNA, 30 bp, Artificial Sequence
  Synthetic oligonucleotide
tcacacctacaatgtggaggcacagcgatt

SEQ ID NO: 301027 - DNA, 30 bp, Artificial Sequence
  Synthetic oligonucleotide
aagaagttcttggcagcaatcgtagcgatt

SEQ ID NO: 301028 - DNA, 30 bp, Artificial Sequence
  Synthetic oligonucleotide
tacgatgacgagcctctataacacgcgatt

SEQ ID NO: 301029 - DNA, 30 bp, Artificial Sequence
  Synthetic oligonucleotide
cgatcgtagcaaagtgtcttgatcgcgatt

SEQ ID NO: 301030 - DNA, 30 bp, Artificial Sequence
  Synthetic oligonucleotide
tggaggagcgccaaaccctgcaaggcgatt

SEQ ID NO: 301031 - DNA, 30 bp, Artificial Sequence
  Synthetic oligonucleotide
ctgtttgtatcaggtacagtggcggcgatt

SEQ ID NO: 301032 - DNA, 30 bp, Artificial Sequence
  Synthetic oligonucleotide
attccacttttcgggcccaagagggcgatt

SEQ ID NO: 301033 - DNA, 30 bp, Artificial Sequence
  Synthetic oligonucleotide
ccttggatctagggctcctgggatgcgatt

SEQ ID NO: 301034 - DNA, 30 bp, Artificial Sequence
  Synthetic oligonucleotide
ttatctcctgccgatagggcttcctcgatt

SEQ ID NO: 301035 - DNA, 30 bp, Artificial Sequence
  Synthetic oligonucleotide
ggatcgagagactacattggcttctcgatt

SEQ ID NO: 301036 - DNA, 30 bp, Artificial Sequence
  Synthetic oligonucleotide
cagcatgagaaagggttctatgagtcgatt

SEQ ID NO: 301037 - DNA, 30 bp, Artificial Sequence
  Synthetic oligonucleotide
aaaatggagtacccacagaactcgtcgatt

SEQ ID NO: 301038 - DNA, 30 bp, Artificial Sequence
  Synthetic oligonucleotide
cacagtgtggcgctacatgatccaaggatt

SEQ ID NO: 301039 - DNA, 30 bp, Artificial Sequence
  Synthetic oligonucleotide
atgcttagaattattggccgtggaaggatt

SEQ ID NO: 301040 - DNA, 30 bp, Artificial Sequence
  Synthetic oligonucleotide
ggaggccaggccaaatatccttgaaggatt

SEQ ID NO: 301041 - DNA, 30 bp, Artificial Sequence
  Synthetic oligonucleotide
cgaggttcgttccgtcgcatattaaggatt

SEQ ID NO: 301042 - DNA, 30 bp, Artificial Sequence
  Synthetic oligonucleotide
agccgcatgggtgcgcgagaacacaggatt

SEQ ID NO: 301043 - DNA, 30 bp, Artificial Sequence
  Synthetic oligonucleotide
acgcgcgctagtatatgagatgtcaggatt

SEQ ID NO: 301044 - DNA, 30 bp, Artificial Sequence
  Synthetic oligonucleotide
aggttacgttgaccagaaccgcggaggatt

SEQ ID NO: 301045 - DNA, 30 bp, Artificial Sequence
  Synthetic oligonucleotide
tacgatcgggtaccaggagtgcctaggatt

SEQ ID NO: 301046 - DNA, 30 bp, Artificial Sequence
  Synthetic oligonucleotide
cctgtcgagttacgttaggattctaggatt

SEQ ID NO: 301047 - DNA, 30 bp, Artificial Sequence
  Synthetic oligonucleotide
ggagggtcgtattattaggagcgtaggatt

SEQ ID NO: 301048 - DNA, 30 bp, Artificial Sequence
  Synthetic oligonucleotide
tgcatgatttgtcatttgactgttaggatt

SEQ ID NO: 301049 - DNA, 30 bp, Artificial Sequence
  Synthetic oligonucleotide
cggatgaccacactcaaacggacacggatt

SEQ ID NO: 301050 - DNA, 30 bp, Artificial Sequence
  Synthetic oligonucleotide
aggtccggcattcgggatcttgagcggatt

SEQ ID NO: 301051 - DNA, 29 bp, Artificial Sequence
  Synthetic oligonucleotide
tataagcgtaccaaaggcagcaagggatt

SEQ ID NO: 301052 - DNA, 30 bp, Artificial Sequence
  Synthetic oligonucleotide
acagaagccgtctttgtagatatagggatt

SEQ ID NO: 301053 - DNA, 30 bp, Artificial Sequence
  Synthetic oligonucleotide
gtcttcgtgtcacatgcattagacgggatt

SEQ ID NO: 301054 - DNA, 30 bp, Artificial Sequence
  Synthetic oligonucleotide
gattgtaaatagatagctgagtacgggatt

SEQ ID NO: 301055 - DNA, 30 bp, Artificial Sequence
  Synthetic oligonucleotide
agctggctatgtagaaggagcggggggatt

SEQ ID NO: 301056 - DNA, 30 bp, Artificial Sequence
  Synthetic oligonucleotide
agcgaagattgcttgcttctaagatggatt

SEQ ID NO: 301057 - DNA, 30 bp, Artificial Sequence
  Synthetic oligonucleotide
gtcgttcatgtagaacaccttcggtggatt

SEQ ID NO: 301058 - DNA, 30 bp, Artificial Sequence
  Synthetic oligonucleotide
agattttgagcaagaggggaactttggatt

SEQ ID NO: 301059 - DNA, 30 bp, Artificial Sequence
  Synthetic oligonucleotide
tcgaactggctaagtgaattgcagatgatt

SEQ ID NO: 301060 - DNA, 30 bp, Artificial Sequence
  Synthetic oligonucleotide
agattaatcatggaagagtgaccgatgatt

SEQ ID NO: 301061 - DNA, 30 bp, Artificial Sequence
  Synthetic oligonucleotide
aatagcactcttcaaactctgaggatgatt

SEQ ID NO: 301062 - DNA, 30 bp, Artificial Sequence
  Synthetic oligonucleotide
atttgtgtctgttgtccacataatatgatt

SEQ ID NO: 301063 - DNA, 30 bp, Artificial Sequence
  Synthetic oligonucleotide
ccatacactgcgaggaacgcccctatgatt

SEQ ID NO: 301064 - DNA, 30 bp, Artificial Sequence
  Synthetic oligonucleotide
tctacatttgtatgggcgttgagtatgatt

SEQ ID NO: 301065 - DNA, 30 bp, Artificial Sequence
  Synthetic oligonucleotide
agtaccccaccgataggttagcaactgatt

SEQ ID NO: 301066 - DNA, 30 bp, Artificial Sequence
  Synthetic oligonucleotide
tattatactattatggaggcgtcactgatt

SEQ ID NO: 301067 - DNA, 30 bp, Artificial Sequence
  Synthetic oligonucleotide
atcccggctacaacgagtgctgtactgatt

SEQ ID NO: 301068 - DNA, 30 bp, Artificial Sequence
  Synthetic oligonucleotide
atatcgacctgattgtatgctatcctgatt

SEQ ID NO: 301069 - DNA, 30 bp, Artificial Sequence
  Synthetic oligonucleotide
aatcgagcaaaatccgtacacccagtgatt

SEQ ID NO: 301070 - DNA, 30 bp, Artificial Sequence
  Synthetic oligonucleotide
tatagtctcagtgcaggagggggagtgatt

SEQ ID NO: 301071 - DNA, 30 bp, Artificial Sequence
  Synthetic oligonucleotide
atcaagagtcatataagacactacgtgatt

SEQ ID NO: 301072 - DNA, 30 bp, Artificial Sequence
  Synthetic oligonucleotide
atgggcaatttcggagggcttagcgtgatt

SEQ ID NO: 301073 - DNA, 30 bp, Artificial Sequence
  Synthetic oligonucleotide
taatacaattaaccgtatacatgggtgatt

SEQ ID NO: 301074 - DNA, 30 bp, Artificial Sequence
  Synthetic oligonucleotide
gaactagcaccgctggctcgaatggtgatt

SEQ ID NO: 301075 - DNA, 30 bp, Artificial Sequence
  Synthetic oligonucleotide
gttcatcggcactgaacaaaccctgtgatt

SEQ ID NO: 301076 - DNA, 30 bp, Artificial Sequence
  Synthetic oligonucleotide
cgcttcagtatgtgtccgccttgattgatt

SEQ ID NO: 301077 - DNA, 30 bp, Artificial Sequence
  Synthetic oligonucleotide
gtttactcgagttcgaccctgatgttgatt

SEQ ID NO: 301078 - DNA, 30 bp, Artificial Sequence
  Synthetic oligonucleotide
gggaactcgctcgagcccaagaatttgatt

SEQ ID NO: 301079 - DNA, 30 bp, Artificial Sequence
  Synthetic oligonucleotide
cgctatcggagaaaaactctgcttttgatt

SEQ ID NO: 301080 - DNA, 30 bp, Artificial Sequence
  Synthetic oligonucleotide
cattgcagtaactcgagagaggcaaatatt

SEQ ID NO: 301081 - DNA, 30 bp, Artificial Sequence
  Synthetic oligonucleotide
ccggttggatagaggattagcgtaaatatt

SEQ ID NO: 301082 - DNA, 30 bp, Artificial Sequence
  Synthetic oligonucleotide
actccctatttattcagcaatcagaatatt

SEQ ID NO: 301083 - DNA, 30 bp, Artificial Sequence
  Synthetic oligonucleotide
tggcaaaccggaggtatgccggagaatatt

SEQ ID NO: 301084 - DNA, 29 bp, Artificial Sequence
  Synthetic oligonucleotide
cacatcgtaggaacacccctgagaatatt

SEQ ID NO: 301085 - DNA, 30 bp, Artificial Sequence
  Synthetic oligonucleotide
ggatttcatgggctgagtaggagtaatatt

SEQ ID NO: 301086 - DNA, 30 bp, Artificial Sequence
  Synthetic oligonucleotide
aactgggataccaggtccaaggaccatatt

SEQ ID NO: 301087 - DNA, 30 bp, Artificial Sequence
  Synthetic oligonucleotide
ccacttaactgaaagtcgggaccgcatatt

SEQ ID NO: 301088 - DNA, 30 bp, Artificial Sequence
  Synthetic oligonucleotide
catgtcatcagtccacacacgtcgcatatt

SEQ ID NO: 301089 - DNA, 30 bp, Artificial Sequence
  Synthetic oligonucleotide
gcgatggagacgctaacaggcaggcatatt

SEQ ID NO: 301090 - DNA, 30 bp, Artificial Sequence
  Synthetic oligonucleotide
ctcgatcatgcgaaaaatcggcttcatatt

SEQ ID NO: 301091 - DNA, 30 bp, Artificial Sequence
  Synthetic oligonucleotide
cgcaagtaagggatttagatttttcatatt

SEQ ID NO: 301092 - DNA, 30 bp, Artificial Sequence
  Synthetic oligonucleotide
ctagtatcgttaatcgtggtccaagatatt

SEQ ID NO: 301093 - DNA, 30 bp, Artificial Sequence
  Synthetic oligonucleotide
taggacgaaactattgactgttaagatatt

SEQ ID NO: 301094 - DNA, 30 bp, Artificial Sequence
  Synthetic oligonucleotide
tcagcgtacctaggtaccatcagcgatatt

SEQ ID NO: 301095 - DNA, 30 bp, Artificial Sequence
  Synthetic oligonucleotide
ctttatgttcaggaccctatcatcgatatt

SEQ ID NO: 301096 - DNA, 30 bp, Artificial Sequence
  Synthetic oligonucleotide
gaagaacggcgcattgctacactcgatatt

SEQ ID NO: 301097 - DNA, 30 bp, Artificial Sequence
  Synthetic oligonucleotide
cacatactagactatatctagaaggatatt

SEQ ID NO: 301098 - DNA, 30 bp, Artificial Sequence
  Synthetic oligonucleotide
ttgagtttgcgaggtttaatgattgatatt

SEQ ID NO: 301099 - DNA, 30 bp, Artificial Sequence
  Synthetic oligonucleotide
gggactatatctgatcgaaaatgatatatt

SEQ ID NO: 301100 - DNA, 30 bp, Artificial Sequence
  Synthetic oligonucleotide
cactggctcaagcgacaaagcatatatatt

SEQ ID NO: 301101 - DNA, 30 bp, Artificial Sequence
  Synthetic oligonucleotide
ccgagcattcgaggagcggttctctatatt

SEQ ID NO: 301102 - DNA, 30 bp, Artificial Sequence
  Synthetic oligonucleotide
tcttctagagtgggctccttacagtatatt

SEQ ID NO: 301103 - DNA, 30 bp, Artificial Sequence
  Synthetic oligonucleotide
actctgtgacgatttagaatgaattatatt

SEQ ID NO: 301104 - DNA, 30 bp, Artificial Sequence
  Synthetic oligonucleotide
gctgaactattgttaccttgagcaactatt

SEQ ID NO: 301105 - DNA, 30 bp, Artificial Sequence
  Synthetic oligonucleotide
aatcgcatcagccgacacctatacactatt

SEQ ID NO: 301106 - DNA, 30 bp, Artificial Sequence
  Synthetic oligonucleotide
aatgagtcccgttaggtagaatgcactatt

SEQ ID NO: 301107 - DNA, 30 bp, Artificial Sequence
  Synthetic oligonucleotide
gtttgctgaataaatggttggaagactatt

SEQ ID NO: 301108 - DNA, 30 bp, Artificial Sequence
  Synthetic oligonucleotide
tgcgccagggactagcgctgagagactatt

SEQ ID NO: 301109 - DNA, 30 bp, Artificial Sequence
  Synthetic oligonucleotide
gaatgccgcacgtagtgtgctgagactatt

SEQ ID NO: 301110 - DNA, 30 bp, Artificial Sequence
  Synthetic oligonucleotide
ttttacctgaggtaggagggatagactatt

SEQ ID NO: 301111 - DNA, 30 bp, Artificial Sequence
  Synthetic oligonucleotide
tatctgggtgagagaagcctggcgactatt

SEQ ID NO: 301112 - DNA, 30 bp, Artificial Sequence
  Synthetic oligonucleotide
tatagcgcacagactccaaagcctactatt

SEQ ID NO: 301113 - DNA, 30 bp, Artificial Sequence
  Synthetic oligonucleotide
ttactattatggcgcacgggaagtactatt

SEQ ID NO: 301114 - DNA, 30 bp, Artificial Sequence
  Synthetic oligonucleotide
aatgggcatgggacgtttgagaaagctatt

SEQ ID NO: 301115 - DNA, 30 bp, Artificial Sequence
  Synthetic oligonucleotide
tcattaatcgatgcatcgggagaagctatt

SEQ ID NO: 301116 - DNA, 30 bp, Artificial Sequence
  Synthetic oligonucleotide
ttcattgtaacagccgaaaaaggagctatt

SEQ ID NO: 301117 - DNA, 30 bp, Artificial Sequence
  Synthetic oligonucleotide
tagaagcagtaaacccttggcctagctatt

SEQ ID NO: 301118 - DNA, 30 bp, Artificial Sequence
  Synthetic oligonucleotide
ggagtcgaggattcgggagtccaggctatt

SEQ ID NO: 301119 - DNA, 30 bp, Artificial Sequence
  Synthetic oligonucleotide
agcgtgagagtgcaagctctttaggctatt

SEQ ID NO: 301120 - DNA, 30 bp, Artificial Sequence
  Synthetic oligonucleotide
aatccaggcatgttgctgaacccggctatt

SEQ ID NO: 301121 - DNA, 30 bp, Artificial Sequence
  Synthetic oligonucleotide
cactcactacagtgtgagagctcggctatt

SEQ ID NO: 301122 - DNA, 30 bp, Artificial Sequence
  Synthetic oligonucleotide
gcgcttcaggtgtgtcatggggtggctatt

SEQ ID NO: 301123 - DNA, 30 bp, Artificial Sequence
  Synthetic oligonucleotide
gggcttacggtctggctctaaatatctatt

SEQ ID NO: 301124 - DNA, 30 bp, Artificial Sequence
  Synthetic oligonucleotide
ggaccagcacaccttgcacgtgggtctatt

SEQ ID NO: 301125 - DNA, 30 bp, Artificial Sequence
  Synthetic oligonucleotide
taggtaggcacgctgatagtacaaagtatt

SEQ ID NO: 301126 - DNA, 30 bp, Artificial Sequence
  Synthetic oligonucleotide
ttgcgtgtaagctttgctcaaacgagtatt

SEQ ID NO: 301127 - DNA, 30 bp, Artificial Sequence
  Synthetic oligonucleotide
tgcttcccgcaagggtttcctagtagtatt

SEQ ID NO: 301128 - DNA, 30 bp, Artificial Sequence
  Synthetic oligonucleotide
tgataatcttattatagatgttgacgtatt

SEQ ID NO: 301129 - DNA, 30 bp, Artificial Sequence
  Synthetic oligonucleotide
caaacggggcacaacacgtaccgccgtatt

SEQ ID NO: 301130 - DNA, 30 bp, Artificial Sequence
  Synthetic oligonucleotide
ctttggtactagtgacaatccccgcgtatt

SEQ ID NO: 301131 - DNA, 30 bp, Artificial Sequence
  Synthetic oligonucleotide
aaaatagtggcattcgtgtgaattcgtatt

SEQ ID NO: 301132 - DNA, 30 bp, Artificial Sequence
  Synthetic oligonucleotide
tatgcactctccctcttcgatattcgtatt

SEQ ID NO: 301133 - DNA, 30 bp, Artificial Sequence
  Synthetic oligonucleotide
gtcatatggatgatccatgatcttcgtatt

SEQ ID NO: 301134 - DNA, 30 bp, Artificial Sequence
  Synthetic oligonucleotide
gcgtatccagaagggcgggcagcaggtatt

SEQ ID NO: 301135 - DNA, 30 bp, Artificial Sequence
  Synthetic oligonucleotide
gagcgccctaattcatagggcagaggtatt

SEQ ID NO: 301136 - DNA, 30 bp, Artificial Sequence
  Synthetic oligonucleotide
tgttagagaggatctgtattgttaggtatt

SEQ ID NO: 301137 - DNA, 30 bp, Artificial Sequence
  Synthetic oligonucleotide
tgatggtcttaggtaccactgacgggtatt

SEQ ID NO: 301138 - DNA, 30 bp, Artificial Sequence
  Synthetic oligonucleotide
ttatatcgacctccgtcaaataggggtatt

SEQ ID NO: 301139 - DNA, 30 bp, Artificial Sequence
  Synthetic oligonucleotide
accgcagagctcatagaaccatttggtatt

SEQ ID NO: 301140 - DNA, 30 bp, Artificial Sequence
  Synthetic oligonucleotide
tgactgggccaatgcctggtggcatgtatt

SEQ ID NO: 301141 - DNA, 30 bp, Artificial Sequence
  Synthetic oligonucleotide
agaacacttgagactaatcgcggatgtatt

SEQ ID NO: 301142 - DNA, 30 bp, Artificial Sequence
  Synthetic oligonucleotide
cagggcccctgcagatgaaaactatgtatt

SEQ ID NO: 301143 - DNA, 30 bp, Artificial Sequence
  Synthetic oligonucleotide
tagtctcccaacgcgttggatgtatgtatt

SEQ ID NO: 301144 - DNA, 30 bp, Artificial Sequence
  Synthetic oligonucleotide
ggcgcaacggtttttcagaagatctgtatt

SEQ ID NO: 301145 - DNA, 30 bp, Artificial Sequence
  Synthetic oligonucleotide
acgccgatatgctaagtgcctctgtgtatt

SEQ ID NO: 301146 - DNA, 30 bp, Artificial Sequence
  Synthetic oligonucleotide
atatgcttatatgcaccattttattgtatt

SEQ ID NO: 301147 - DNA, 30 bp, Artificial Sequence
  Synthetic oligonucleotide
gacatcatcccactgtgatcgagttgtatt

SEQ ID NO: 301148 - DNA, 30 bp, Artificial Sequence
  Synthetic oligonucleotide
accatgttgtcccgtatagctatttgtatt

SEQ ID NO: 301149 - DNA, 30 bp, Artificial Sequence
  Synthetic oligonucleotide
tccggatgcagggatggccgatcaattatt

SEQ ID NO: 301150 - DNA, 30 bp, Artificial Sequence
  Synthetic oligonucleotide
atcccggggctgtgaggtttaataattatt

SEQ ID NO: 301151 - DNA, 30 bp, Artificial Sequence
  Synthetic oligonucleotide
gctaacaagctcccctctagattaattatt

SEQ ID NO: 301152 - DNA, 30 bp, Artificial Sequence
  Synthetic oligonucleotide
tcagtcaagcaaggccaatgcatcattatt

SEQ ID NO: 301153 - DNA, 30 bp, Artificial Sequence
  Synthetic oligonucleotide
aaatcgcaccaattcgacgactatattatt

SEQ ID NO: 301154 - DNA, 30 bp, Artificial Sequence
  Synthetic oligonucleotide
caaatcgagggtactagaaaatgtattatt

SEQ ID NO: 301155 - DNA, 30 bp, Artificial Sequence
  Synthetic oligonucleotide
gaacaacgaatatatggacgatttattatt

SEQ ID NO: 301156 - DNA, 30 bp, Artificial Sequence
  Synthetic oligonucleotide
ctcaaggtcaccgaaggagcataacttatt

SEQ ID NO: 301157 - DNA, 30 bp, Artificial Sequence
  Synthetic oligonucleotide
ttaacgggcaaataccgtcagcaccttatt

SEQ ID NO: 301158 - DNA, 30 bp, Artificial Sequence
  Synthetic oligonucleotide
gcagcctgctaggtgggaccggtccttatt

SEQ ID NO: 301159 - DNA, 30 bp, Artificial Sequence
  Synthetic oligonucleotide
agtaaggtgtatctgcgcaatcggcttatt

SEQ ID NO: 301160 - DNA, 30 bp, Artificial Sequence
  Synthetic oligonucleotide
agtcgtgggaaagtgcgcgctagtcttatt

SEQ ID NO: 301161 - DNA, 30 bp, Artificial Sequence
  Synthetic oligonucleotide
cgcaccgggtctccataactactagttatt

SEQ ID NO: 301162 - DNA, 30 bp, Artificial Sequence
  Synthetic oligonucleotide
ataagcaacaattcggagatcaacgttatt

SEQ ID NO: 301163 - DNA, 30 bp, Artificial Sequence
  Synthetic oligonucleotide
gtatagccgattttggggtttcgcgttatt

SEQ ID NO: 301164 - DNA, 30 bp, Artificial Sequence
  Synthetic oligonucleotide
gtcttcgggaggaacatcacgcaggttatt

SEQ ID NO: 301165 - DNA, 30 bp, Artificial Sequence
  Synthetic oligonucleotide
attggaactcgggataacggcaatgttatt

SEQ ID NO: 301166 - DNA, 30 bp, Artificial Sequence
  Synthetic oligonucleotide
tgaatagaatgtggaaaaggccctgttatt

SEQ ID NO: 301167 - DNA, 29 bp, Artificial Sequence
  Synthetic oligonucleotide
atggcatgagaataaacatgtcatttatt

SEQ ID NO: 301168 - DNA, 30 bp, Artificial Sequence
  Synthetic oligonucleotide
agccatcttgtactcgggcgacgatttatt

SEQ ID NO: 301169 - DNA, 30 bp, Artificial Sequence
  Synthetic oligonucleotide
gggacatggaaccgtaggctgcgatttatt

SEQ ID NO: 301170 - DNA, 30 bp, Artificial Sequence
  Synthetic oligonucleotide
ggaaaagtgtggccgctcgtttagtttatt

SEQ ID NO: 301171 - DNA, 30 bp, Artificial Sequence
  Synthetic oligonucleotide
tcggttagacgataggcaagaaggtttatt

SEQ ID NO: 301172 - DNA, 30 bp, Artificial Sequence
  Synthetic oligonucleotide
gtgggagtgtgctcgaagtacgtgtttatt

SEQ ID NO: 301173 - DNA, 30 bp, Artificial Sequence
  Synthetic oligonucleotide
cctccacaacgctcaacctgtgtgtttatt

SEQ ID NO: 301174 - DNA, 30 bp, Artificial Sequence
  Synthetic oligonucleotide
tcataaggggtataggacaggcgttttatt

SEQ ID NO: 301175 - DNA, 30 bp, Artificial Sequence
  Synthetic oligonucleotide
atggattcgcggtcgagtcctgaaaaactt

SEQ ID NO: 301176 - DNA, 30 bp, Artificial Sequence
  Synthetic oligonucleotide
ctagaagagtctgcccgccgatgcaaactt

SEQ ID NO: 301177 - DNA, 30 bp, Artificial Sequence
  Synthetic oligonucleotide
tcacttacactgagtctgagggtgaaactt

SEQ ID NO: 301178 - DNA, 30 bp, Artificial Sequence
  Synthetic oligonucleotide
taacatccgcatatagaaagccataaactt

SEQ ID NO: 301179 - DNA, 30 bp, Artificial Sequence
  Synthetic oligonucleotide
caagctataacccgtgtgatgtataaactt

SEQ ID NO: 301180 - DNA, 30 bp, Artificial Sequence
  Synthetic oligonucleotide
gtgtgtcaaaacggtctgaagacacaactt

SEQ ID NO: 301181 - DNA, 30 bp, Artificial Sequence
  Synthetic oligonucleotide
atactgagagattggaagggctgccaactt

SEQ ID NO: 301182 - DNA, 30 bp, Artificial Sequence
  Synthetic oligonucleotide
acggcgggtctcgctgaggcaaagcaactt

SEQ ID NO: 301183 - DNA, 30 bp, Artificial Sequence
  Synthetic oligonucleotide
tatcacggggtgacatgctgcaagcaactt

SEQ ID NO: 301184 - DNA, 30 bp, Artificial Sequence
  Synthetic oligonucleotide
atgttatctgttgagtccgtggggcaactt

SEQ ID NO: 301185 - DNA, 30 bp, Artificial Sequence
  Synthetic oligonucleotide
ggcgcgatacctatttaatacgatcaactt

SEQ ID NO: 301186 - DNA, 30 bp, Artificial Sequence
  Synthetic oligonucleotide
ggcgtgaaaggggaactaccctctcaactt

SEQ ID NO: 301187 - DNA, 30 bp, Artificial Sequence
  Synthetic oligonucleotide
ccgattgccttgattgaagtataagaactt

SEQ ID NO: 301188 - DNA, 30 bp, Artificial Sequence
  Synthetic oligonucleotide
ggaatgtctacgaccccaagaagagaactt

SEQ ID NO: 301189 - DNA, 30 bp, Artificial Sequence
  Synthetic oligonucleotide
acaccggattgaactctaagcagagaactt

SEQ ID NO: 301190 - DNA, 30 bp, Artificial Sequence
  Synthetic oligonucleotide
taggcaacgatcgtgcctgaaggagaactt

SEQ ID NO: 301191 - DNA, 30 bp, Artificial Sequence
  Synthetic oligonucleotide
acaagcagagtccatactcaacgtgaactt

SEQ ID NO: 301192 - DNA, 30 bp, Artificial Sequence
  Synthetic oligonucleotide
gcctgagtgtcggcaagttcgggtgaactt

SEQ ID NO: 301193 - DNA, 30 bp, Artificial Sequence
  Synthetic oligonucleotide
ctaagggccgccgttctacatcttgaactt

SEQ ID NO: 301194 - DNA, 30 bp, Artificial Sequence
  Synthetic oligonucleotide
ctcaagtctcgcctgccaacagttgaactt

SEQ ID NO: 301195 - DNA, 30 bp, Artificial Sequence
  Synthetic oligonucleotide
gtgaatcgatcgcatatgagctaataactt

SEQ ID NO: 301196 - DNA, 30 bp, Artificial Sequence
  Synthetic oligonucleotide
tatgacacgtttcaagttgagggataactt

SEQ ID NO: 301197 - DNA, 30 bp, Artificial Sequence
  Synthetic oligonucleotide
agtatgagaaactagcgttgaggctaactt

SEQ ID NO: 301198 - DNA, 30 bp, Artificial Sequence
  Synthetic oligonucleotide
cgggatatgtagcctgtctgacagtaactt

SEQ ID NO: 301199 - DNA, 30 bp, Artificial Sequence
  Synthetic oligonucleotide
tttccgggtcacatactcagagtgtaactt

SEQ ID NO: 301200 - DNA, 30 bp, Artificial Sequence
  Synthetic oligonucleotide
tgcaagttgaaagggcaccccaggacactt

SEQ ID NO: 301201 - DNA, 30 bp, Artificial Sequence
  Synthetic oligonucleotide
ggacaatacctgatgtttggcatcccactt

SEQ ID NO: 301202 - DNA, 30 bp, Artificial Sequence
  Synthetic oligonucleotide
gtgtaccgtcggttctgcactgggccactt

SEQ ID NO: 301203 - DNA, 30 bp, Artificial Sequence
  Synthetic oligonucleotide
gggcaactggtgtaaaatggatggccactt

SEQ ID NO: 301204 - DNA, 30 bp, Artificial Sequence
  Synthetic oligonucleotide
acaagtgttcgtatgagatgaaatccactt

SEQ ID NO: 301205 - DNA, 30 bp, Artificial Sequence
  Synthetic oligonucleotide
catatgtgcttagaatccaacgctccactt

SEQ ID NO: 301206 - DNA, 30 bp, Artificial Sequence
  Synthetic oligonucleotide
atcgaaaagacgatcacaaacctagcactt

SEQ ID NO: 301207 - DNA, 30 bp, Artificial Sequence
  Synthetic oligonucleotide
taaaattagatggttcaaaagtgcgcactt

SEQ ID NO: 301208 - DNA, 30 bp, Artificial Sequence
  Synthetic oligonucleotide
tatggtagggttctgtattcaacggcactt

SEQ ID NO: 301209 - DNA, 30 bp, Artificial Sequence
  Synthetic oligonucleotide
caaaagacactcggatgtcaaatggcactt

SEQ ID NO: 301210 - DNA, 30 bp, Artificial Sequence
  Synthetic oligonucleotide
cttttagggaacgaacaggctcatgcactt

SEQ ID NO: 301211 - DNA, 30 bp, Artificial Sequence
  Synthetic oligonucleotide
ctgtgggacgttaaagatatatgtgcactt

SEQ ID NO: 301212 - DNA, 30 bp, Artificial Sequence
  Synthetic oligonucleotide
caagctattttatcggcgacaaaatcactt

SEQ ID NO: 301213 - DNA, 30 bp, Artificial Sequence
  Synthetic oligonucleotide
aacatggtaccgaaagaacatatatcactt

SEQ ID NO: 301214 - DNA, 30 bp, Artificial Sequence
  Synthetic oligonucleotide
cgtgaatggcttgatgtacagcactcactt

SEQ ID NO: 301215 - DNA, 30 bp, Artificial Sequence
  Synthetic oligonucleotide
tatcttgcccagcgtctggacacctcactt

SEQ ID NO: 301216 - DNA, 30 bp, Artificial Sequence
  Synthetic oligonucleotide
tttccatgaggactgattccgaagtcactt

SEQ ID NO: 301217 - DNA, 30 bp, Artificial Sequence
  Synthetic oligonucleotide
gtttaaggtcaaccaaggtccacgtcactt

SEQ ID NO: 301218 - DNA, 30 bp, Artificial Sequence
  Synthetic oligonucleotide
gaaataagaggagatgaagaggcttcactt

SEQ ID NO: 301219 - DNA, 30 bp, Artificial Sequence
  Synthetic oligonucleotide
ttgcttgggcacgacgcatactgaagactt

SEQ ID NO: 301220 - DNA, 30 bp, Artificial Sequence
  Synthetic oligonucleotide
atagtagagaccgatagaagacggagactt

SEQ ID NO: 301221 - DNA, 30 bp, Artificial Sequence
  Synthetic oligonucleotide
tgtcgaccagccacgctttgacctagactt

SEQ ID NO: 301222 - DNA, 30 bp, Artificial Sequence
  Synthetic oligonucleotide
tccccacggtagcaatggccagagcgactt

SEQ ID NO: 301223 - DNA, 30 bp, Artificial Sequence
  Synthetic oligonucleotide
tgcgaaacgaactaagcaggcaaaggactt

SEQ ID NO: 301224 - DNA, 29 bp, Artificial Sequence
  Synthetic oligonucleotide
agctgagccgtcattcgggcacaggactt

SEQ ID NO: 301225 - DNA, 30 bp, Artificial Sequence
  Synthetic oligonucleotide
agtccgtgagtcgaggttggtcgaggactt

SEQ ID NO: 301226 - DNA, 30 bp, Artificial Sequence
  Synthetic oligonucleotide
ttcaaagttaggtacgatggaaacggactt

SEQ ID NO: 301227 - DNA, 30 bp, Artificial Sequence
  Synthetic oligonucleotide
cagctgacatcatgcgggtcacggggactt

SEQ ID NO: 301228 - DNA, 30 bp, Artificial Sequence
  Synthetic oligonucleotide
caacttgaacttatgttgtttgtatgactt

SEQ ID NO: 301229 - DNA, 30 bp, Artificial Sequence
  Synthetic oligonucleotide
cacccaaatgtaggccccctcagctgactt

SEQ ID NO: 301230 - DNA, 30 bp, Artificial Sequence
  Synthetic oligonucleotide
atctgattgggtcgcttacaacattgactt

SEQ ID NO: 301231 - DNA, 30 bp, Artificial Sequence
  Synthetic oligonucleotide
ggggtcttacggggtcttaatgtttgactt

SEQ ID NO: 301232 - DNA, 30 bp, Artificial Sequence
  Synthetic oligonucleotide
gaccagtaagctggctgcatcgcaatactt

SEQ ID NO: 301233 - DNA, 30 bp, Artificial Sequence
  Synthetic oligonucleotide
taggagtgtgaaggtattggaataatactt

SEQ ID NO: 301234 - DNA, 30 bp, Artificial Sequence
  Synthetic oligonucleotide
cgggctgcagcgttcttaaattacatactt

SEQ ID NO: 301235 - DNA, 30 bp, Artificial Sequence
  Synthetic oligonucleotide
ttaagagattaaaacacaagcaagatactt

SEQ ID NO: 301236 - DNA, 30 bp, Artificial Sequence
  Synthetic oligonucleotide
caaacttacggccattaatgacagatactt

SEQ ID NO: 301237 - DNA, 30 bp, Artificial Sequence
  Synthetic oligonucleotide
tgcgggacacggaagaacacgttgatactt

SEQ ID NO: 301238 - DNA, 30 bp, Artificial Sequence
  Synthetic oligonucleotide
aggtgaaccgacttgtcgatgattatactt

SEQ ID NO: 301239 - DNA, 30 bp, Artificial Sequence
  Synthetic oligonucleotide
gacaatctgcggagaaagcaggttatactt

SEQ ID NO: 301240 - DNA, 30 bp, Artificial Sequence
  Synthetic oligonucleotide
gaggaaacgcattcatgcagaagactactt

SEQ ID NO: 301241 - DNA, 30 bp, Artificial Sequence
  Synthetic oligonucleotide
ggaggtcagtaggcagtatgccacctactt

SEQ ID NO: 301242 - DNA, 30 bp, Artificial Sequence
  Synthetic oligonucleotide
catccatcgttagcatgagatgtcctactt

SEQ ID NO: 301243 - DNA, 30 bp, Artificial Sequence
  Synthetic oligonucleotide
gcgtagtccattttatacgaagtgctactt

SEQ ID NO: 301244 - DNA, 30 bp, Artificial Sequence
  Synthetic oligonucleotide
atgtacctaagcgcgaaccgacgcgtactt

SEQ ID NO: 301245 - DNA, 30 bp, Artificial Sequence
  Synthetic oligonucleotide
tcgtcatggtaatatcaatccctggtactt

SEQ ID NO: 301246 - DNA, 30 bp, Artificial Sequence
  Synthetic oligonucleotide
gccaaatgaagcccataggggtctgtactt

SEQ ID NO: 301247 - DNA, 30 bp, Artificial Sequence
  Synthetic oligonucleotide
gtggtaaacaacgcatgtactgaattactt

SEQ ID NO: 301248 - DNA, 30 bp, Artificial Sequence
  Synthetic oligonucleotide
acatccctgtccgctagtttagacttactt

SEQ ID NO: 301249 - DNA, 30 bp, Artificial Sequence
  Synthetic oligonucleotide
gggcagatccaggacgctaaatagttactt

SEQ ID NO: 301250 - DNA, 30 bp, Artificial Sequence
  Synthetic oligonucleotide
tcaccttctaaacagaggaagtttttactt

SEQ ID NO: 301251 - DNA, 30 bp, Artificial Sequence
  Synthetic oligonucleotide
ctatcctgccacctgaggatataccacctt

SEQ ID NO: 301252 - DNA, 30 bp, Artificial Sequence
  Synthetic oligonucleotide
cgaaaaggagttaacccgcgtagccacctt

SEQ ID NO: 301253 - DNA, 30 bp, Artificial Sequence
  Synthetic oligonucleotide
tctctgaagtgttaacttatacgccacctt

SEQ ID NO: 301254 - DNA, 30 bp, Artificial Sequence
  Synthetic oligonucleotide
cggccgagtcgtacccagtttgagcacctt

SEQ ID NO: 301255 - DNA, 30 bp, Artificial Sequence
  Synthetic oligonucleotide
cacaaatcagtctagctcgatacgcacctt

SEQ ID NO: 301256 - DNA, 30 bp, Artificial Sequence
  Synthetic oligonucleotide
tggcgccatatggtccaggaggctcacctt

SEQ ID NO: 301257 - DNA, 30 bp, Artificial Sequence
  Synthetic oligonucleotide
aggctagggcggcttgtggtatgtcacctt

SEQ ID NO: 301258 - DNA, 30 bp, Artificial Sequence
  Synthetic oligonucleotide
acaggcttaggtagatgcggacttcacctt

SEQ ID NO: 301259 - DNA, 30 bp, Artificial Sequence
  Synthetic oligonucleotide
cgcacacaatccgccgaaatacgagacctt

SEQ ID NO: 301260 - DNA, 30 bp, Artificial Sequence
  Synthetic oligonucleotide
tacagaccgattgagaactatctagacctt

SEQ ID NO: 301261 - DNA, 30 bp, Artificial Sequence
  Synthetic oligonucleotide
cactccggcctttatagagatcacgacctt

SEQ ID NO: 301262 - DNA, 30 bp, Artificial Sequence
  Synthetic oligonucleotide
gaagggggctcggaccgcagacccgacctt

SEQ ID NO: 301263 - DNA, 30 bp, Artificial Sequence
  Synthetic oligonucleotide
agcgatgactggtgaaaaggataggacctt

SEQ ID NO: 301264 - DNA, 30 bp, Artificial Sequence
  Synthetic oligonucleotide
cgggatgtcagcagagatggctgggacctt

SEQ ID NO: 301265 - DNA, 30 bp, Artificial Sequence
  Synthetic oligonucleotide
tgagaacgtgagttgggagctgtggacctt

SEQ ID NO: 301266 - DNA, 30 bp, Artificial Sequence
  Synthetic oligonucleotide
ggtcgcgtcgattttaggatcggatacctt

SEQ ID NO: 301267 - DNA, 30 bp, Artificial Sequence
  Synthetic oligonucleotide
cactaggcccctcagccaggagggtacctt

SEQ ID NO: 301268 - DNA, 30 bp, Artificial Sequence
  Synthetic oligonucleotide
aggtcggcgtgactttgggcgggaaccctt

SEQ ID NO: 301269 - DNA, 30 bp, Artificial Sequence
  Synthetic oligonucleotide
cagacgcgcgctgtgcgtatctctaccctt

SEQ ID NO: 301270 - DNA, 30 bp, Artificial Sequence
  Synthetic oligonucleotide
taaaagtatgcgtcccagtactcgcccctt

SEQ ID NO: 301271 - DNA, 30 bp, Artificial Sequence
  Synthetic oligonucleotide
ccgaagaggttacaggacagatttcccctt

SEQ ID NO: 301272 - DNA, 30 bp, Artificial Sequence
  Synthetic oligonucleotide
gggttctgaaaggtcaataagttcgccctt

SEQ ID NO: 301273 - DNA, 30 bp, Artificial Sequence
  Synthetic oligonucleotide
ctcccgattgatcgaatcatctaggccctt

SEQ ID NO: 301274 - DNA, 30 bp, Artificial Sequence
  Synthetic oligonucleotide
agttgactaatctaatagatctcggccctt

SEQ ID NO: 301275 - DNA, 30 bp, Artificial Sequence
  Synthetic oligonucleotide
cgtaatcatctcgttttttcatgtgccctt

SEQ ID NO: 301276 - DNA, 30 bp, Artificial Sequence
  Synthetic oligonucleotide
acacagtctaaccgtcgccgaaaatccctt

SEQ ID NO: 301277 - DNA, 30 bp, Artificial Sequence
  Synthetic oligonucleotide
ggatttgctgggacttcctgggactccctt

SEQ ID NO: 301278 - DNA, 30 bp, Artificial Sequence
  Synthetic oligonucleotide
gtggcaggcccccaattttttcgctccctt

SEQ ID NO: 301279 - DNA, 30 bp, Artificial Sequence
  Synthetic oligonucleotide
tatggacaaaggggaacacctaagtccctt

SEQ ID NO: 301280 - DNA, 30 bp, Artificial Sequence
  Synthetic oligonucleotide
tggaattagttgatgcgcgcaacttccctt

SEQ ID NO: 301281 - DNA, 30 bp, Artificial Sequence
  Synthetic oligonucleotide
ggcgcatataactatgttgatacaagcctt

SEQ ID NO: 301282 - DNA, 30 bp, Artificial Sequence
  Synthetic oligonucleotide
aatccgggacaacggtcgggttagagcctt

SEQ ID NO: 301283 - DNA, 30 bp, Artificial Sequence
  Synthetic oligonucleotide
gccatccgcattgataaccagcgccgcctt

SEQ ID NO: 301284 - DNA, 30 bp, Artificial Sequence
  Synthetic oligonucleotide
cactagaccaccgtagcacattagcgcctt

SEQ ID NO: 301285 - DNA, 30 bp, Artificial Sequence
  Synthetic oligonucleotide
caggtgtgccaggcactttattcgcgcctt

SEQ ID NO: 301286 - DNA, 30 bp, Artificial Sequence
  Synthetic oligonucleotide
ggggcgcgcggattacagtacgctcgcctt

SEQ ID NO: 301287 - DNA, 30 bp, Artificial Sequence
  Synthetic oligonucleotide
cgctacacatcagtacaggtggctcgcctt

SEQ ID NO: 301288 - DNA, 30 bp, Artificial Sequence
  Synthetic oligonucleotide
ctagcccttcgatcgtggccaccgggcctt

SEQ ID NO: 301289 - DNA, 30 bp, Artificial Sequence
  Synthetic oligonucleotide
tccaaccatagaacgtgtgtgttgggcctt

SEQ ID NO: 301290 - DNA, 30 bp, Artificial Sequence
  Synthetic oligonucleotide
tgtgcgctcgtatttgatcggggtggcctt

SEQ ID NO: 301291 - DNA, 30 bp, Artificial Sequence
  Synthetic oligonucleotide
acacaggatattccgtattcatgtggcctt

SEQ ID NO: 301292 - DNA, 30 bp, Artificial Sequence
  Synthetic oligonucleotide
ggatagcttagagtgagttcgtttggcctt

SEQ ID NO: 301293 - DNA, 30 bp, Artificial Sequence
  Synthetic oligonucleotide
gaagttaaatgcgcgaagagctcatgcctt

SEQ ID NO: 301294 - DNA, 30 bp, Artificial Sequence
  Synthetic oligonucleotide
aagcatacgagcttgccctagaagtgcctt

SEQ ID NO: 301295 - DNA, 30 bp, Artificial Sequence
  Synthetic oligonucleotide
tctccttaggagcagtgaggactgtgcctt

SEQ ID NO: 301296 - DNA, 30 bp, Artificial Sequence
  Synthetic oligonucleotide
tgtcaacattcagcaagtcctgcttgcctt

SEQ ID NO: 301297 - DNA, 30 bp, Artificial Sequence
  Synthetic oligonucleotide
caaagagacctgggcagtgtaggcatcctt

SEQ ID NO: 301298 - DNA, 30 bp, Artificial Sequence
  Synthetic oligonucleotide
tgtgcagatcaccctgggatcattatcctt

SEQ ID NO: 301299 - DNA, 30 bp, Artificial Sequence
  Synthetic oligonucleotide
catgaggcttcacgccggacgtttatcctt

SEQ ID NO: 301300 - DNA, 30 bp, Artificial Sequence
  Synthetic oligonucleotide
tgtcgggtgactactgcgagcactctcctt

SEQ ID NO: 301301 - DNA, 30 bp, Artificial Sequence
  Synthetic oligonucleotide
ccgagaccggtccggggtggttcagtcctt

SEQ ID NO: 301302 - DNA, 30 bp, Artificial Sequence
  Synthetic oligonucleotide
gcacaatacagcgcgactggcgtagtcctt

SEQ ID NO: 301303 - DNA, 30 bp, Artificial Sequence
  Synthetic oligonucleotide
cgatgtccatcgcagtcgacattagtcctt

SEQ ID NO: 301304 - DNA, 30 bp, Artificial Sequence
  Synthetic oligonucleotide
aagttctcctctgcgaaaatgtaattcctt

SEQ ID NO: 301305 - DNA, 30 bp, Artificial Sequence
  Synthetic oligonucleotide
ataacatctgacgaacctcggataaagctt

SEQ ID NO: 301306 - DNA, 30 bp, Artificial Sequence
  Synthetic oligonucleotide
cagggaattaaatcaaaaaagggcaagctt

SEQ ID NO: 301307 - DNA, 30 bp, Artificial Sequence
  Synthetic oligonucleotide
tttcgcttagtaaccgatccagtcaagctt

SEQ ID NO: 301308 - DNA, 30 bp, Artificial Sequence
  Synthetic oligonucleotide
ggaaatatagtgcacggcacgtagaagctt

SEQ ID NO: 301309 - DNA, 30 bp, Artificial Sequence
  Synthetic oligonucleotide
aggcatgtgtgtgtctcgtttcggaagctt

SEQ ID NO: 301310 - DNA, 30 bp, Artificial Sequence
  Synthetic oligonucleotide
tcttacgggtaactcctggtagtgaagctt

SEQ ID NO: 301311 - DNA, 30 bp, Artificial Sequence
  Synthetic oligonucleotide
atgggcatcttcatcacgggtcataagctt

SEQ ID NO: 301312 - DNA, 30 bp, Artificial Sequence
  Synthetic oligonucleotide
ccaactgggagcacgggccgacgacagctt

SEQ ID NO: 301313 - DNA, 30 bp, Artificial Sequence
  Synthetic oligonucleotide
gcctgcgaaaatactagaaggtgacagctt

SEQ ID NO: 301314 - DNA, 30 bp, Artificial Sequence
  Synthetic oligonucleotide
gtacaatacgacgtgcaataataccagctt

SEQ ID NO: 301315 - DNA, 30 bp, Artificial Sequence
  Synthetic oligonucleotide
agttaaactccttgacagatacggcagctt

SEQ ID NO: 301316 - DNA, 30 bp, Artificial Sequence
  Synthetic oligonucleotide
cccaggagctctggcgtagagttgcagctt

SEQ ID NO: 301317 - DNA, 30 bp, Artificial Sequence
  Synthetic oligonucleotide
agatgttgcatcgacggtgggcatcagctt

SEQ ID NO: 301318 - DNA, 30 bp, Artificial Sequence
  Synthetic oligonucleotide
gcccgaaggtcatggtccaccactcagctt

SEQ ID NO: 301319 - DNA, 30 bp, Artificial Sequence
  Synthetic oligonucleotide
cactgcacgggtttcgttattactcagctt

SEQ ID NO: 301320 - DNA, 29 bp, Artificial Sequence
  Synthetic oligonucleotide
aagtaggaacgtgtagcaaaagagagctt

SEQ ID NO: 301321 - DNA, 30 bp, Artificial Sequence
  Synthetic oligonucleotide
gtttatcaggcatttcgaaccctagagctt

SEQ ID NO: 301322 - DNA, 30 bp, Artificial Sequence
  Synthetic oligonucleotide
gtcgaatgggcatgtcgagaaaccgagctt

SEQ ID NO: 301323 - DNA, 30 bp, Artificial Sequence
  Synthetic oligonucleotide
gggggatgttcctatgggaagggcgagctt

SEQ ID NO: 301324 - DNA, 30 bp, Artificial Sequence
  Synthetic oligonucleotide
tattataaaaactggctgaaatttgagctt

SEQ ID NO: 301325 - DNA, 30 bp, Artificial Sequence
  Synthetic oligonucleotide
ggatttaagtatcgggaaggcctatagctt

SEQ ID NO: 301326 - DNA, 30 bp, Artificial Sequence
  Synthetic oligonucleotide
tcgggcccgcagccatctcgactaacgctt

SEQ ID NO: 301327 - DNA, 30 bp, Artificial Sequence
  Synthetic oligonucleotide
ctaatactcacagtcattcactccacgctt

SEQ ID NO: 301328 - DNA, 30 bp, Artificial Sequence
  Synthetic oligonucleotide
aattgacacagctatcaggtcagcacgctt

SEQ ID NO: 301329 - DNA, 30 bp, Artificial Sequence
  Synthetic oligonucleotide
agtggcgacggatctgatcgtgcgacgctt

SEQ ID NO: 301330 - DNA, 30 bp, Artificial Sequence
  Synthetic oligonucleotide
gaagctctggggctttcgcaatctacgctt

SEQ ID NO: 301331 - DNA, 30 bp, Artificial Sequence
  Synthetic oligonucleotide
tgtggtggctcacgagacgtttttacgctt

SEQ ID NO: 301332 - DNA, 30 bp, Artificial Sequence
  Synthetic oligonucleotide
aatgttccaggcaaacggttttttacgctt

SEQ ID NO: 301333 - DNA, 30 bp, Artificial Sequence
  Synthetic oligonucleotide
ttagtggtcagagttccgtgccaaccgctt

SEQ ID NO: 301334 - DNA, 30 bp, Artificial Sequence
  Synthetic oligonucleotide
actctcgtacttagcaaggactaaccgctt

SEQ ID NO: 301335 - DNA, 30 bp, Artificial Sequence
  Synthetic oligonucleotide
taccaactgaacatcatacaggtaccgctt

SEQ ID NO: 301336 - DNA, 30 bp, Artificial Sequence
  Synthetic oligonucleotide
caagtacactcgggaaatgtaagcccgctt

SEQ ID NO: 301337 - DNA, 30 bp, Artificial Sequence
  Synthetic oligonucleotide
tgtatgcccgtgagaggttcaaagccgctt

SEQ ID NO: 301338 - DNA, 30 bp, Artificial Sequence
  Synthetic oligonucleotide
tcccctaatcgcatcaggcggtgtccgctt

SEQ ID NO: 301339 - DNA, 30 bp, Artificial Sequence
  Synthetic oligonucleotide
tagaattcgagtccgtccggctaagcgctt

SEQ ID NO: 301340 - DNA, 30 bp, Artificial Sequence
  Synthetic oligonucleotide
cggtttgtagagactaatcgctccgcgctt

SEQ ID NO: 301341 - DNA, 30 bp, Artificial Sequence
  Synthetic oligonucleotide
atcatacgtaaagtcaggcgtttggcgctt

SEQ ID NO: 301342 - DNA, 30 bp, Artificial Sequence
  Synthetic oligonucleotide
actcggaagccctgcgttaagtatgcgctt

SEQ ID NO: 301343 - DNA, 30 bp, Artificial Sequence
  Synthetic oligonucleotide
ttccggaagagttaggtttaaaaatcgctt

SEQ ID NO: 301344 - DNA, 30 bp, Artificial Sequence
  Synthetic oligonucleotide
ttaatcgaatatccaagttttagatcgctt

SEQ ID NO: 301345 - DNA, 30 bp, Artificial Sequence
  Synthetic oligonucleotide
tgcctactaccgaagaggggtacctcgctt

SEQ ID NO: 301346 - DNA, 30 bp, Artificial Sequence
  Synthetic oligonucleotide
gcgtacccgttacgccacttccacaggctt

SEQ ID NO: 301347 - DNA, 30 bp, Artificial Sequence
  Synthetic oligonucleotide
gaatctcgtaataaaccttcgaagaggctt

SEQ ID NO: 301348 - DNA, 30 bp, Artificial Sequence
  Synthetic oligonucleotide
tttgcagcaaggatgtaattacagaggctt

SEQ ID NO: 301349 - DNA, 30 bp, Artificial Sequence
  Synthetic oligonucleotide
ttaagatgcgattaaaactgcgataggctt

SEQ ID NO: 301350 - DNA, 30 bp, Artificial Sequence
  Synthetic oligonucleotide
tcacgcggcgggctgatcaagcaacggctt

SEQ ID NO: 301351 - DNA, 30 bp, Artificial Sequence
  Synthetic oligonucleotide
aacgaccccaatgaagtgcctccacggctt

SEQ ID NO: 301352 - DNA, 30 bp, Artificial Sequence
  Synthetic oligonucleotide
ccacgagggcggagtggaaggctacggctt

SEQ ID NO: 301353 - DNA, 30 bp, Artificial Sequence
  Synthetic oligonucleotide
atacgacaggatgccgatctttcgcggctt

SEQ ID NO: 301354 - DNA, 30 bp, Artificial Sequence
  Synthetic oligonucleotide
catgttgagggaatcaatcgtctgcggctt

SEQ ID NO: 301355 - DNA, 30 bp, Artificial Sequence
  Synthetic oligonucleotide
cagagcgcatgtagatctcttgatcggctt

SEQ ID NO: 301356 - DNA, 30 bp, Artificial Sequence
  Synthetic oligonucleotide
cgcagagcgacaggaagtgatgcagggctt

SEQ ID NO: 301357 - DNA, 30 bp, Artificial Sequence
  Synthetic oligonucleotide
gtgagttgctgaaacaagattcacgggctt

SEQ ID NO: 301358 - DNA, 30 bp, Artificial Sequence
  Synthetic oligonucleotide
tcagtcgtagggtactttccgggcgggctt

SEQ ID NO: 301359 - DNA, 30 bp, Artificial Sequence
  Synthetic oligonucleotide
tctttaaacgggagtaagattggcgggctt

SEQ ID NO: 301360 - DNA, 30 bp, Artificial Sequence
  Synthetic oligonucleotide
cgtactattgctaacccttgaagtgggctt

SEQ ID NO: 301361 - DNA, 30 bp, Artificial Sequence
  Synthetic oligonucleotide
gatgatggatggcgccctttcaagtggctt

SEQ ID NO: 301362 - DNA, 30 bp, Artificial Sequence
  Synthetic oligonucleotide
tgtagtggttcgcgggaggtgaagtggctt

SEQ ID NO: 301363 - DNA, 30 bp, Artificial Sequence
  Synthetic oligonucleotide
cactacttaaaaccagttgtcatttggctt

SEQ ID NO: 301364 - DNA, 30 bp, Artificial Sequence
  Synthetic oligonucleotide
agctatatgcgaggtctcagttcaatgctt

SEQ ID NO: 301365 - DNA, 30 bp, Artificial Sequence
  Synthetic oligonucleotide
tgatagcagcgcagtgcgtataacatgctt

SEQ ID NO: 301366 - DNA, 30 bp, Artificial Sequence
  Synthetic oligonucleotide
tacagtgctcagtacaacatggacatgctt

SEQ ID NO: 301367 - DNA, 30 bp, Artificial Sequence
  Synthetic oligonucleotide
cccggacatggaactcgcaagtagatgctt

SEQ ID NO: 301368 - DNA, 30 bp, Artificial Sequence
  Synthetic oligonucleotide
gaacatattcaggccaagccggcactgctt

SEQ ID NO: 301369 - DNA, 30 bp, Artificial Sequence
  Synthetic oligonucleotide
tggtgcggaattttcaagtctagtctgctt

SEQ ID NO: 301370 - DNA, 30 bp, Artificial Sequence
  Synthetic oligonucleotide
gtccaccagttcgtcgcaagccaagtgctt

SEQ ID NO: 301371 - DNA, 30 bp, Artificial Sequence
  Synthetic oligonucleotide
gtacttaccttctgcttgacttaagtgctt

SEQ ID NO: 301372 - DNA, 30 bp, Artificial Sequence
  Synthetic oligonucleotide
taatgaaacgggcaccacttgatagtgctt

SEQ ID NO: 301373 - DNA, 30 bp, Artificial Sequence
  Synthetic oligonucleotide
attagacgatcgctctacacggtagtgctt

SEQ ID NO: 301374 - DNA, 30 bp, Artificial Sequence
  Synthetic oligonucleotide
ttggacttccatagtcggaaattagtgctt

SEQ ID NO: 301375 - DNA, 30 bp, Artificial Sequence
  Synthetic oligonucleotide
tgaggtccggccctcacagcagacgtgctt

SEQ ID NO: 301376 - DNA, 30 bp, Artificial Sequence
  Synthetic oligonucleotide
ttgagggtcgcattttcattaacggtgctt

SEQ ID NO: 301377 - DNA, 30 bp, Artificial Sequence
  Synthetic oligonucleotide
gtcgtcacgtaatatcacaaattggtgctt

SEQ ID NO: 301378 - DNA, 30 bp, Artificial Sequence
  Synthetic oligonucleotide
caaaatatcggagatggtcttattgtgctt

SEQ ID NO: 301379 - DNA, 30 bp, Artificial Sequence
  Synthetic oligonucleotide
gttgtcacatattgtcgcgatgacttgctt

SEQ ID NO: 301380 - DNA, 30 bp, Artificial Sequence
  Synthetic oligonucleotide
agttctcgacgtgcctgtattatgttgctt

SEQ ID NO: 301381 - DNA, 30 bp, Artificial Sequence
  Synthetic oligonucleotide
gaacatactagtgaattcatcctgttgctt

SEQ ID NO: 301382 - DNA, 30 bp, Artificial Sequence
  Synthetic oligonucleotide
agtccgggtggcgggcactcggctttgctt

SEQ ID NO: 301383 - DNA, 30 bp, Artificial Sequence
  Synthetic oligonucleotide
gaggattgtgcggtcatgtttgttttgctt

SEQ ID NO: 301384 - DNA, 30 bp, Artificial Sequence
  Synthetic oligonucleotide
ggccgcccgtggttgcccggggtaaatctt

SEQ ID NO: 301385 - DNA, 30 bp, Artificial Sequence
  Synthetic oligonucleotide
gcacccgtaaataggactcggatcaatctt

SEQ ID NO: 301386 - DNA, 30 bp, Artificial Sequence
  Synthetic oligonucleotide
cttgcgcgtggggttttgaaagtgaatctt

SEQ ID NO: 301387 - DNA, 30 bp, Artificial Sequence
  Synthetic oligonucleotide
gcaggtcttattctagtcacccgtaatctt

SEQ ID NO: 301388 - DNA, 30 bp, Artificial Sequence
  Synthetic oligonucleotide
gagggcgtgggttgctacgaaaaccatctt

SEQ ID NO: 301389 - DNA, 30 bp, Artificial Sequence
  Synthetic oligonucleotide
agctgtagaaaaggacgttttgtgcatctt

SEQ ID NO: 301390 - DNA, 30 bp, Artificial Sequence
  Synthetic oligonucleotide
atggtcaggtttatatccatgaatcatctt

SEQ ID NO: 301391 - DNA, 30 bp, Artificial Sequence
  Synthetic oligonucleotide
ggtcgggcgttcatgtggagcgaagatctt

SEQ ID NO: 301392 - DNA, 30 bp, Artificial Sequence
  Synthetic oligonucleotide
taagctcggcggtgtaagtgatatgatctt

SEQ ID NO: 301393 - DNA, 30 bp, Artificial Sequence
  Synthetic oligonucleotide
gtaagagcgcttcaacaagagaagtatctt

SEQ ID NO: 301394 - DNA, 30 bp, Artificial Sequence
  Synthetic oligonucleotide
actgtcccgcggttgcttattcagtatctt

SEQ ID NO: 301395 - DNA, 30 bp, Artificial Sequence
  Synthetic oligonucleotide
cccaccggataaacgaaatgtttgtatctt

SEQ ID NO: 301396 - DNA, 30 bp, Artificial Sequence
  Synthetic oligonucleotide
gcaaacaggtctcatgatctctcttatctt

SEQ ID NO: 301397 - DNA, 30 bp, Artificial Sequence
  Synthetic oligonucleotide
cacgatcctacgcggttcaacctttatctt

SEQ ID NO: 301398 - DNA, 30 bp, Artificial Sequence
  Synthetic oligonucleotide
taaacgtgatgtgggaaccagcgaactctt

SEQ ID NO: 301399 - DNA, 30 bp, Artificial Sequence
  Synthetic oligonucleotide
gggcaaaggaaggcaacagtgggcactctt

SEQ ID NO: 301400 - DNA, 30 bp, Artificial Sequence
  Synthetic oligonucleotide
tcgccttttcaatcgtcaggggttcctctt

SEQ ID NO: 301401 - DNA, 30 bp, Artificial Sequence
  Synthetic oligonucleotide
aggctttgggaacaatcacgtacggctctt

SEQ ID NO: 301402 - DNA, 30 bp, Artificial Sequence
  Synthetic oligonucleotide
caagttagggtccatcgcattccggctctt

SEQ ID NO: 301403 - DNA, 30 bp, Artificial Sequence
  Synthetic oligonucleotide
aggctaggcgggaacatacaagtggctctt

SEQ ID NO: 301404 - DNA, 30 bp, Artificial Sequence
  Synthetic oligonucleotide
tttagttgggccaactgcaccgactctctt

SEQ ID NO: 301405 - DNA, 30 bp, Artificial Sequence
  Synthetic oligonucleotide
aaagcggttctttatcacgttaccagtctt

SEQ ID NO: 301406 - DNA, 30 bp, Artificial Sequence
  Synthetic oligonucleotide
gaagtcgtacttgtgtgtcgggcgagtctt

SEQ ID NO: 301407 - DNA, 30 bp, Artificial Sequence
  Synthetic oligonucleotide
cacaacttaagatattgccgtaggagtctt

SEQ ID NO: 301408 - DNA, 30 bp, Artificial Sequence
  Synthetic oligonucleotide
cgcggccatacgttaggtgatgggagtctt

SEQ ID NO: 301409 - DNA, 30 bp, Artificial Sequence
  Synthetic oligonucleotide
gtggaagctggccgtgggagatttagtctt

SEQ ID NO: 301410 - DNA, 30 bp, Artificial Sequence
  Synthetic oligonucleotide
tggggcgtcgtcatcattattacacgtctt

SEQ ID NO: 301411 - DNA, 30 bp, Artificial Sequence
  Synthetic oligonucleotide
cgtcccgtttagagcgacaccgtacgtctt

SEQ ID NO: 301412 - DNA, 30 bp, Artificial Sequence
  Synthetic oligonucleotide
aaacttgaggacgcaactcaaaaccgtctt

SEQ ID NO: 301413 - DNA, 30 bp, Artificial Sequence
  Synthetic oligonucleotide
gactattagttgcgcctcggggaccgtctt

SEQ ID NO: 301414 - DNA, 30 bp, Artificial Sequence
  Synthetic oligonucleotide
taagacaacttttcgaaatacacgcgtctt

SEQ ID NO: 301415 - DNA, 30 bp, Artificial Sequence
  Synthetic oligonucleotide
gttaccaatcaaaatgcggcccgtcgtctt

SEQ ID NO: 301416 - DNA, 30 bp, Artificial Sequence
  Synthetic oligonucleotide
atggagccaattttttcgccgagaggtctt

SEQ ID NO: 301417 - DNA, 30 bp, Artificial Sequence
  Synthetic oligonucleotide
cgcgctcgggtgaacccactgtacggtctt

SEQ ID NO: 301418 - DNA, 30 bp, Artificial Sequence
  Synthetic oligonucleotide
aggatagtcatgctcccgcagtcgggtctt

SEQ ID NO: 301419 - DNA, 30 bp, Artificial Sequence
  Synthetic oligonucleotide
aacaccaccattgtgtcccgtcatggtctt

SEQ ID NO: 301420 - DNA, 30 bp, Artificial Sequence
  Synthetic oligonucleotide
gtacgggttttgtcgctgcgggatggtctt

SEQ ID NO: 301421 - DNA, 30 bp, Artificial Sequence
  Synthetic oligonucleotide
ttattgcacggcacaagattagaatgtctt

SEQ ID NO: 301422 - DNA, 30 bp, Artificial Sequence
  Synthetic oligonucleotide
catctgctgaatgttgatgagttatgtctt

SEQ ID NO: 301423 - DNA, 30 bp, Artificial Sequence
  Synthetic oligonucleotide
caaatgtcttaatgcatcctcggctgtctt

SEQ ID NO: 301424 - DNA, 30 bp, Artificial Sequence
  Synthetic oligonucleotide
cgatatttccggattaaacgctggtgtctt

SEQ ID NO: 301425 - DNA, 30 bp, Artificial Sequence
  Synthetic oligonucleotide
gcccagactctacagcgaagcaattgtctt

SEQ ID NO: 301426 - DNA, 30 bp, Artificial Sequence
  Synthetic oligonucleotide
tgagccgtgcgatatagatcggaaattctt

SEQ ID NO: 301427 - DNA, 30 bp, Artificial Sequence
  Synthetic oligonucleotide
atctcaacgttaggaaatttgcgaattctt

SEQ ID NO: 301428 - DNA, 30 bp, Artificial Sequence
  Synthetic oligonucleotide
gcataccatttggttagaccgtgaattctt

SEQ ID NO: 301429 - DNA, 30 bp, Artificial Sequence
  Synthetic oligonucleotide
agcacgactgtgcgggccaacgacattctt

SEQ ID NO: 301430 - DNA, 30 bp, Artificial Sequence
  Synthetic oligonucleotide
ctgatacgtggtagctggtttaccattctt

SEQ ID NO: 301431 - DNA, 30 bp, Artificial Sequence
  Synthetic oligonucleotide
ctgatgtgccactgcgcgaattagattctt

SEQ ID NO: 301432 - DNA, 30 bp, Artificial Sequence
  Synthetic oligonucleotide
gaaatcggcactagcaaggaataccttctt

SEQ ID NO: 301433 - DNA, 30 bp, Artificial Sequence
  Synthetic oligonucleotide
gcttgacacctaagtgatccggcccttctt

SEQ ID NO: 301434 - DNA, 30 bp, Artificial Sequence
  Synthetic oligonucleotide
cgcaacgcgcttagggcggtaacgcttctt

SEQ ID NO: 301435 - DNA, 30 bp, Artificial Sequence
  Synthetic oligonucleotide
gacgccagtttacaaaaggtttggcttctt

SEQ ID NO: 301436 - DNA, 30 bp, Artificial Sequence
  Synthetic oligonucleotide
accttaaactcagattttggatacgttctt

SEQ ID NO: 301437 - DNA, 30 bp, Artificial Sequence
  Synthetic oligonucleotide
gaaacataaacaccgcgtgctactgttctt

SEQ ID NO: 301438 - DNA, 30 bp, Artificial Sequence
  Synthetic oligonucleotide
gtaaggcccaagtgtctgctggctgttctt

SEQ ID NO: 301439 - DNA, 30 bp, Artificial Sequence
  Synthetic oligonucleotide
tcagctggcgtaagcgtggattactttctt

SEQ ID NO: 301440 - DNA, 30 bp, Artificial Sequence
  Synthetic oligonucleotide
tgaccactatgatcttgagttcagtttctt

SEQ ID NO: 301441 - DNA, 30 bp, Artificial Sequence
  Synthetic oligonucleotide
attgccacagtgaggggactatcgtttctt

SEQ ID NO: 301442 - DNA, 30 bp, Artificial Sequence
  Synthetic oligonucleotide
ccagcgttggccaagtaacaactgtttctt

SEQ ID NO: 301443 - DNA, 30 bp, Artificial Sequence
  Synthetic oligonucleotide
acatctacgcatggtttcgtcttaaaagtt

SEQ ID NO: 301444 - DNA, 30 bp, Artificial Sequence
  Synthetic oligonucleotide
agacctggtacggatgtacacgagaaagtt

SEQ ID NO: 301445 - DNA, 30 bp, Artificial Sequence
  Synthetic oligonucleotide
atggcttctgtaccgcgtatcaataaagtt

SEQ ID NO: 301446 - DNA, 30 bp, Artificial Sequence
  Synthetic oligonucleotide
gagccactcgaagggtaaaatggtaaagtt

SEQ ID NO: 301447 - DNA, 30 bp, Artificial Sequence
  Synthetic oligonucleotide
gaggcgatgtcgaggccctaaacgcaagtt

SEQ ID NO: 301448 - DNA, 30 bp, Artificial Sequence
  Synthetic oligonucleotide
tacttggcctaacttcagtaatcgcaagtt

SEQ ID NO: 301449 - DNA, 30 bp, Artificial Sequence
  Synthetic oligonucleotide
ctagtagtggattcttctagtaatcaagtt

SEQ ID NO: 301450 - DNA, 30 bp, Artificial Sequence
  Synthetic oligonucleotide
taccccaattgaactatatgtgttcaagtt

SEQ ID NO: 301451 - DNA, 30 bp, Artificial Sequence
  Synthetic oligonucleotide
tgtacagggataagggcaaactgagaagtt

SEQ ID NO: 301452 - DNA, 30 bp, Artificial Sequence
  Synthetic oligonucleotide
ataaccacagccccgagttgacacgaagtt

SEQ ID NO: 301453 - DNA, 30 bp, Artificial Sequence
  Synthetic oligonucleotide
tgcagaatgtgtatctaggtgtacgaagtt

SEQ ID NO: 301454 - DNA, 30 bp, Artificial Sequence
  Synthetic oligonucleotide
cagggatatatgtccatttgtcaggaagtt

SEQ ID NO: 301455 - DNA, 30 bp, Artificial Sequence
  Synthetic oligonucleotide
ggctcaaaatcattaccggtaccggaagtt

SEQ ID NO: 301456 - DNA, 30 bp, Artificial Sequence
  Synthetic oligonucleotide
tgcaaacgactaaaaatcgggtcggaagtt

SEQ ID NO: 301457 - DNA, 30 bp, Artificial Sequence
  Synthetic oligonucleotide
aaatctccgcagctcagtaagggggaagtt

SEQ ID NO: 301458 - DNA, 30 bp, Artificial Sequence
  Synthetic oligonucleotide
aggtcatgaggacgtgcatcaaaataagtt

SEQ ID NO: 301459 - DNA, 30 bp, Artificial Sequence
  Synthetic oligonucleotide
tagtgatatcgataagtacgaaaataagtt

SEQ ID NO: 301460 - DNA, 30 bp, Artificial Sequence
  Synthetic oligonucleotide
tgtcgtctcaccccgatatgcggataagtt

SEQ ID NO: 301461 - DNA, 30 bp, Artificial Sequence
  Synthetic oligonucleotide
tcgcaataagaaccctattaatgataagtt

SEQ ID NO: 301462 - DNA, 30 bp, Artificial Sequence
  Synthetic oligonucleotide
cagtggagagaaatgactcccccctaagtt

SEQ ID NO: 301463 - DNA, 30 bp, Artificial Sequence
  Synthetic oligonucleotide
tattagcatatcgtgttcgtaatctaagtt

SEQ ID NO: 301464 - DNA, 30 bp, Artificial Sequence
  Synthetic oligonucleotide
tgtagtcagcctagttgtttttagtaagtt

SEQ ID NO: 301465 - DNA, 30 bp, Artificial Sequence
  Synthetic oligonucleotide
tagatgtaggacggttaattactttaagtt

SEQ ID NO: 301466 - DNA, 30 bp, Artificial Sequence
  Synthetic oligonucleotide
aggagattaatgaacgcttggacaacagtt

SEQ ID NO: 301467 - DNA, 30 bp, Artificial Sequence
  Synthetic oligonucleotide
tgatcctgattattaacttggagaacagtt

SEQ ID NO: 301468 - DNA, 30 bp, Artificial Sequence
  Synthetic oligonucleotide
gctatacgggataacatcaactacacagtt

SEQ ID NO: 301469 - DNA, 30 bp, Artificial Sequence
  Synthetic oligonucleotide
gtctaatacaacagcgttgaatgcacagtt

SEQ ID NO: 301470 - DNA, 30 bp, Artificial Sequence
  Synthetic oligonucleotide
tgtggtgcacagccttcaattcgcccagtt

SEQ ID NO: 301471 - DNA, 30 bp, Artificial Sequence
  Synthetic oligonucleotide
gttcaggcatccactttacaacggccagtt

SEQ ID NO: 301472 - DNA, 30 bp, Artificial Sequence
  Synthetic oligonucleotide
cctcgtaacgtacctctcaaaatagcagtt

SEQ ID NO: 301473 - DNA, 30 bp, Artificial Sequence
  Synthetic oligonucleotide
tgggagaggccggcaaaatgagccgcagtt

SEQ ID NO: 301474 - DNA, 30 bp, Artificial Sequence
  Synthetic oligonucleotide
cggctttcctaaggaaaccggcgcgcagtt

SEQ ID NO: 301475 - DNA, 30 bp, Artificial Sequence
  Synthetic oligonucleotide
tgttcattggttatctatgaaagggcagtt

SEQ ID NO: 301476 - DNA, 30 bp, Artificial Sequence
  Synthetic oligonucleotide
aatcgcaaggagttattccgtacctcagtt

SEQ ID NO: 301477 - DNA, 30 bp, Artificial Sequence
  Synthetic oligonucleotide
gaacattccacctttatcaagttctcagtt

SEQ ID NO: 301478 - DNA, 30 bp, Artificial Sequence
  Synthetic oligonucleotide
ttaccggacaagcggtagcggacgtcagtt

SEQ ID NO: 301479 - DNA, 30 bp, Artificial Sequence
  Synthetic oligonucleotide
tctatcggagagagtccgcttcattcagtt

SEQ ID NO: 301480 - DNA, 30 bp, Artificial Sequence
  Synthetic oligonucleotide
acaaactagtaccgaagattcgaaagagtt

SEQ ID NO: 301481 - DNA, 30 bp, Artificial Sequence
  Synthetic oligonucleotide
agccatttgcgactcgactgaataagagtt

SEQ ID NO: 301482 - DNA, 30 bp, Artificial Sequence
  Synthetic oligonucleotide
aatcgagggccgtataacggtataagagtt

SEQ ID NO: 301483 - DNA, 30 bp, Artificial Sequence
  Synthetic oligonucleotide
ctcatagacaacccatcagtggtaagagtt

SEQ ID NO: 301484 - DNA, 30 bp, Artificial Sequence
  Synthetic oligonucleotide
tattggaaggttgatacgtttaccagagtt

SEQ ID NO: 301485 - DNA, 30 bp, Artificial Sequence
  Synthetic oligonucleotide
agattgcgtgccttgggtggccggagagtt

SEQ ID NO: 301486 - DNA, 30 bp, Artificial Sequence
  Synthetic oligonucleotide
gcgctggaattgctagagcccatgagagtt

SEQ ID NO: 301487 - DNA, 30 bp, Artificial Sequence
  Synthetic oligonucleotide
atacgtaaaaacatagattccatgagagtt

SEQ ID NO: 301488 - DNA, 30 bp, Artificial Sequence
  Synthetic oligonucleotide
aatgggggattttttggtgacttgagagtt

SEQ ID NO: 301489 - DNA, 30 bp, Artificial Sequence
  Synthetic oligonucleotide
aagctggagccagtttatttaaatagagtt

SEQ ID NO: 301490 - DNA, 30 bp, Artificial Sequence
  Synthetic oligonucleotide
gtaccccggtgtagcgtcaaatgacgagtt

SEQ ID NO: 301491 - DNA, 30 bp, Artificial Sequence
  Synthetic oligonucleotide
cgctgagtgatatttataatcgtacgagtt

SEQ ID NO: 301492 - DNA, 30 bp, Artificial Sequence
  Synthetic oligonucleotide
ctataaccaagggtcaattttgcgcgagtt

SEQ ID NO: 301493 - DNA, 30 bp, Artificial Sequence
  Synthetic oligonucleotide
ctgcaaacaataagtgttgcagatcgagtt

SEQ ID NO: 301494 - DNA, 30 bp, Artificial Sequence
  Synthetic oligonucleotide
actctacctctaactgtcatcgctcgagtt

SEQ ID NO: 301495 - DNA, 30 bp, Artificial Sequence
  Synthetic oligonucleotide
tgcgcgacctcctgcatccaaagtcgagtt

SEQ ID NO: 301496 - DNA, 30 bp, Artificial Sequence
  Synthetic oligonucleotide
cctggaccatgtcaggtagggataggagtt

SEQ ID NO: 301497 - DNA, 30 bp, Artificial Sequence
  Synthetic oligonucleotide
aagtgctcaaagcgggccaaagacggagtt

SEQ ID NO: 301498 - DNA, 30 bp, Artificial Sequence
  Synthetic oligonucleotide
cgatgcaagtactgctatctggtcggagtt

SEQ ID NO: 301499 - DNA, 30 bp, Artificial Sequence
  Synthetic oligonucleotide
gggctgcagtaccagcttccgtagggagtt

SEQ ID NO: 301500 - DNA, 29 bp, Artificial Sequence
  Synthetic oligonucleotide
aggtgaaacctgttaggcatcctggagtt

SEQ ID NO: 301501 - DNA, 30 bp, Artificial Sequence
  Synthetic oligonucleotide
aattacatgtggacagttggacgtggagtt

SEQ ID NO: 301502 - DNA, 30 bp, Artificial Sequence
  Synthetic oligonucleotide
aaacttgcatcgctaccgcagttatgagtt

SEQ ID NO: 301503 - DNA, 30 bp, Artificial Sequence
  Synthetic oligonucleotide
tagaatatttgcaaaggccatccctgagtt

SEQ ID NO: 301504 - DNA, 30 bp, Artificial Sequence
  Synthetic oligonucleotide
gccggtacgactcctgcttgtgcctgagtt

SEQ ID NO: 301505 - DNA, 30 bp, Artificial Sequence
  Synthetic oligonucleotide
atctggtctgttgacgtagaccagtgagtt

SEQ ID NO: 301506 - DNA, 30 bp, Artificial Sequence
  Synthetic oligonucleotide
tctggaattataggtatgtggctgtgagtt

SEQ ID NO: 301507 - DNA, 30 bp, Artificial Sequence
  Synthetic oligonucleotide
ggatcagtcatgctacggacgacttgagtt

SEQ ID NO: 301508 - DNA, 30 bp, Artificial Sequence
  Synthetic oligonucleotide
acatagggtctctacgggtagaaaatagtt

SEQ ID NO: 301509 - DNA, 30 bp, Artificial Sequence
  Synthetic oligonucleotide
tttatttgcatggcccgaataatcatagtt

SEQ ID NO: 301510 - DNA, 30 bp, Artificial Sequence
  Synthetic oligonucleotide
tcgcaacttcactttcgttccctcatagtt

SEQ ID NO: 301511 - DNA, 30 bp, Artificial Sequence
  Synthetic oligonucleotide
ccttgcttcgccaggggtaccaagatagtt

SEQ ID NO: 301512 - DNA, 30 bp, Artificial Sequence
  Synthetic oligonucleotide
atgaaaagttactcagttcggaggatagtt

SEQ ID NO: 301513 - DNA, 30 bp, Artificial Sequence
  Synthetic oligonucleotide
ggtaaagggtattataactgtgatatagtt

SEQ ID NO: 301514 - DNA, 30 bp, Artificial Sequence
  Synthetic oligonucleotide
gcccagccccaacgagccggttatatagtt

SEQ ID NO: 301515 - DNA, 30 bp, Artificial Sequence
  Synthetic oligonucleotide
tgtgttattttggtggatccccgtatagtt

SEQ ID NO: 301516 - DNA, 30 bp, Artificial Sequence
  Synthetic oligonucleotide
gacatactccctctcaacgcgattatagtt

SEQ ID NO: 301517 - DNA, 30 bp, Artificial Sequence
  Synthetic oligonucleotide
tcgtaccttcgaaagggacgatacctagtt

SEQ ID NO: 301518 - DNA, 30 bp, Artificial Sequence
  Synthetic oligonucleotide
atgtcaaagttacgtgtagttgtcctagtt

SEQ ID NO: 301519 - DNA, 30 bp, Artificial Sequence
  Synthetic oligonucleotide
tagaatcacacgctgggggacacgctagtt

SEQ ID NO: 301520 - DNA, 30 bp, Artificial Sequence
  Synthetic oligonucleotide
tgaattccccaggactggtaaccgctagtt

SEQ ID NO: 301521 - DNA, 30 bp, Artificial Sequence
  Synthetic oligonucleotide
ttacggtgccaaactcgtttagcgctagtt

SEQ ID NO: 301522 - DNA, 30 bp, Artificial Sequence
  Synthetic oligonucleotide
aatcccaacagtcgatataaggggctagtt

SEQ ID NO: 301523 - DNA, 30 bp, Artificial Sequence
  Synthetic oligonucleotide
gctgaaacttcatgttaatgggctctagtt

SEQ ID NO: 301524 - DNA, 30 bp, Artificial Sequence
  Synthetic oligonucleotide
tataattcccgcctgcaagtgacagtagtt

SEQ ID NO: 301525 - DNA, 30 bp, Artificial Sequence
  Synthetic oligonucleotide
aataacattgcgcaagtgcgaagagtagtt

SEQ ID NO: 301526 - DNA, 30 bp, Artificial Sequence
  Synthetic oligonucleotide
agtttcgttttgaacctggtgagcgtagtt

SEQ ID NO: 301527 - DNA, 30 bp, Artificial Sequence
  Synthetic oligonucleotide
cattcatatggaaattacgctatggtagtt

SEQ ID NO: 301528 - DNA, 30 bp, Artificial Sequence
  Synthetic oligonucleotide
gtgcggttaggaggcagattccctgtagtt

SEQ ID NO: 301529 - DNA, 30 bp, Artificial Sequence
  Synthetic oligonucleotide
gattcgtagcactcgatcgtctgtgtagtt

SEQ ID NO: 301530 - DNA, 30 bp, Artificial Sequence
  Synthetic oligonucleotide
cttgggataccaaaaggaacgttattagtt

SEQ ID NO: 301531 - DNA, 30 bp, Artificial Sequence
  Synthetic oligonucleotide
accgagtaccgttgtacatcacgcttagtt

SEQ ID NO: 301532 - DNA, 30 bp, Artificial Sequence
  Synthetic oligonucleotide
tagggagtgagacgtggtggctagttagtt

SEQ ID NO: 301533 - DNA, 30 bp, Artificial Sequence
  Synthetic oligonucleotide
agcctctaatatcgcgtattctatttagtt

SEQ ID NO: 301534 - DNA, 30 bp, Artificial Sequence
  Synthetic oligonucleotide
aagggatgtccaagtcttctcggtttagtt

SEQ ID NO: 301535 - DNA, 30 bp, Artificial Sequence
  Synthetic oligonucleotide
agggtagtaagtttggctatatttttagtt

SEQ ID NO: 301536 - DNA, 30 bp, Artificial Sequence
  Synthetic oligonucleotide
acaaggatatagtttcgagctaaaaacgtt

SEQ ID NO: 301537 - DNA, 30 bp, Artificial Sequence
  Synthetic oligonucleotide
tagatgaacatgtggcatccatggaacgtt

SEQ ID NO: 301538 - DNA, 30 bp, Artificial Sequence
  Synthetic oligonucleotide
ctgacattagggccggaagcgtggaacgtt

SEQ ID NO: 301539 - DNA, 30 bp, Artificial Sequence
  Synthetic oligonucleotide
atgtgtgcaatgatggaaatttggaacgtt

SEQ ID NO: 301540 - DNA, 30 bp, Artificial Sequence
  Synthetic oligonucleotide
agcttaagcattaatgaggaactgaacgtt

SEQ ID NO: 301541 - DNA, 30 bp, Artificial Sequence
  Synthetic oligonucleotide
taagtcgaagaatgggtccatcagcacgtt

SEQ ID NO: 301542 - DNA, 30 bp, Artificial Sequence
  Synthetic oligonucleotide
gacctcagattgattgctgtctctcacgtt

SEQ ID NO: 301543 - DNA, 31 bp, Artificial Sequence
  Synthetic oligonucleotide
ctagagcggatctgtgcagtcgctagacgtt

SEQ ID NO: 301544 - DNA, 30 bp, Artificial Sequence
  Synthetic oligonucleotide
gaagtgatagaagtaaagttaagcgacgtt

SEQ ID NO: 301545 - DNA, 30 bp, Artificial Sequence
  Synthetic oligonucleotide
ggcttattttctcataagggtgtcgacgtt

SEQ ID NO: 301546 - DNA, 30 bp, Artificial Sequence
  Synthetic oligonucleotide
atacctctttcataaactcgaacggacgtt

SEQ ID NO: 301547 - DNA, 30 bp, Artificial Sequence
  Synthetic oligonucleotide
tcacaagcgcgatgaacgattgttgacgtt

SEQ ID NO: 301548 - DNA, 30 bp, Artificial Sequence
  Synthetic oligonucleotide
agtcggatagagaagaggacctcatacgtt

SEQ ID NO: 301549 - DNA, 30 bp, Artificial Sequence
  Synthetic oligonucleotide
aagagacattccaaggtgatgagctacgtt

SEQ ID NO: 301550 - DNA, 30 bp, Artificial Sequence
  Synthetic oligonucleotide
gaggagtagaaatgatcgcctgattacgtt

SEQ ID NO: 301551 - DNA, 30 bp, Artificial Sequence
  Synthetic oligonucleotide
caagtcatcacgttgcgcaagcgttacgtt

SEQ ID NO: 301552 - DNA, 30 bp, Artificial Sequence
  Synthetic oligonucleotide
cacgacccacgacaaactgtcatttacgtt

SEQ ID NO: 301553 - DNA, 29 bp, Artificial Sequence
  Synthetic oligonucleotide
atcagcggagtcttactatactttacgtt

SEQ ID NO: 301554 - DNA, 30 bp, Artificial Sequence
  Synthetic oligonucleotide
gcagagatgccggccattcaaaccaccgtt

SEQ ID NO: 301555 - DNA, 30 bp, Artificial Sequence
  Synthetic oligonucleotide
attttggtatcggcgtaagtctccaccgtt

SEQ ID NO: 301556 - DNA, 30 bp, Artificial Sequence
  Synthetic oligonucleotide
cacttggccatcatacctctttgcaccgtt

SEQ ID NO: 301557 - DNA, 30 bp, Artificial Sequence
  Synthetic oligonucleotide
cccaactcaaactacgtcacatggaccgtt

SEQ ID NO: 301558 - DNA, 30 bp, Artificial Sequence
  Synthetic oligonucleotide
caccgagaaggacctgatttcgttaccgtt

SEQ ID NO: 301559 - DNA, 30 bp, Artificial Sequence
  Synthetic oligonucleotide
tcagtgattaccgtaaggcattaacccgtt

SEQ ID NO: 301560 - DNA, 30 bp, Artificial Sequence
  Synthetic oligonucleotide
aaatatacagtctgctggctaacacccgtt

SEQ ID NO: 301561 - DNA, 30 bp, Artificial Sequence
  Synthetic oligonucleotide
tgctagtcaaaaggcatctagaggcccgtt

SEQ ID NO: 301562 - DNA, 30 bp, Artificial Sequence
  Synthetic oligonucleotide
gattccacctgttcggtagcacttcccgtt

SEQ ID NO: 301563 - DNA, 30 bp, Artificial Sequence
  Synthetic oligonucleotide
ttaatggcggcaaagtacgagaaagccgtt

SEQ ID NO: 301564 - DNA, 30 bp, Artificial Sequence
  Synthetic oligonucleotide
ggtacgcctatttagcgtactttagccgtt

SEQ ID NO: 301565 - DNA, 30 bp, Artificial Sequence
  Synthetic oligonucleotide
gcaaggcctggaacacaggggcctgccgtt

SEQ ID NO: 301566 - DNA, 30 bp, Artificial Sequence
  Synthetic oligonucleotide
acaattttgggcagaaggtctgaatccgtt

SEQ ID NO: 301567 - DNA, 30 bp, Artificial Sequence
  Synthetic oligonucleotide
ttggggtgttaggtacgagttagatccgtt

SEQ ID NO: 301568 - DNA, 30 bp, Artificial Sequence
  Synthetic oligonucleotide
ccgtttgtgtcgaatgattagaagtccgtt

SEQ ID NO: 301569 - DNA, 30 bp, Artificial Sequence
  Synthetic oligonucleotide
cgccaattggggatagcaagccattccgtt

SEQ ID NO: 301570 - DNA, 30 bp, Artificial Sequence
  Synthetic oligonucleotide
gagacctggtcctttgcatgcccttccgtt

SEQ ID NO: 301571 - DNA, 30 bp, Artificial Sequence
  Synthetic oligonucleotide
aggcaggtcacatccggattcttttccgtt

SEQ ID NO: 301572 - DNA, 30 bp, Artificial Sequence
  Synthetic oligonucleotide
taggttcgtttgtcgtagaggcaaagcgtt

SEQ ID NO: 301573 - DNA, 30 bp, Artificial Sequence
  Synthetic oligonucleotide
ggacgaggttcgccgtggtatatgagcgtt

SEQ ID NO: 301574 - DNA, 30 bp, Artificial Sequence
  Synthetic oligonucleotide
tgtgttcgactcaatgggtatcatagcgtt

SEQ ID NO: 301575 - DNA, 30 bp, Artificial Sequence
  Synthetic oligonucleotide
accacacttagtgcagaagaggctagcgtt

SEQ ID NO: 301576 - DNA, 30 bp, Artificial Sequence
  Synthetic oligonucleotide
aatagcctaagtcgcaatcggcgtagcgtt

SEQ ID NO: 301577 - DNA, 30 bp, Artificial Sequence
  Synthetic oligonucleotide
ggagttaacaaggtactagtttgtagcgtt

SEQ ID NO: 301578 - DNA, 30 bp, Artificial Sequence
  Synthetic oligonucleotide
cataccaagctcaacgcgtatgaacgcgtt

SEQ ID NO: 301579 - DNA, 30 bp, Artificial Sequence
  Synthetic oligonucleotide
tatactcaagtatataggcggcgaggcgtt

SEQ ID NO: 301580 - DNA, 30 bp, Artificial Sequence
  Synthetic oligonucleotide
cccgaccacaactcccataaagacggcgtt

SEQ ID NO: 301581 - DNA, 30 bp, Artificial Sequence
  Synthetic oligonucleotide
gtagtgcgatacttcgggttcaagggcgtt

SEQ ID NO: 301582 - DNA, 30 bp, Artificial Sequence
  Synthetic oligonucleotide
ggcctaacaacaagggagttagggggcgtt

SEQ ID NO: 301583 - DNA, 30 bp, Artificial Sequence
  Synthetic oligonucleotide
atgtgaccctagcgcatgcttttgggcgtt

SEQ ID NO: 301584 - DNA, 30 bp, Artificial Sequence
  Synthetic oligonucleotide
ttacagcgaaaacggggccgggctggcgtt

SEQ ID NO: 301585 - DNA, 30 bp, Artificial Sequence
  Synthetic oligonucleotide
agagatcaataccgaagtgacagtggcgtt

SEQ ID NO: 301586 - DNA, 30 bp, Artificial Sequence
  Synthetic oligonucleotide
gttatgacaaggggtgttgagattggcgtt

SEQ ID NO: 301587 - DNA, 30 bp, Artificial Sequence
  Synthetic oligonucleotide
caactgcacggtctttgtaactcatgcgtt

SEQ ID NO: 301588 - DNA, 30 bp, Artificial Sequence
  Synthetic oligonucleotide
gttactacgggatacggatggccttgcgtt

SEQ ID NO: 301589 - DNA, 30 bp, Artificial Sequence
  Synthetic oligonucleotide
tagctcgggagcgccaggagccgaatcgtt

SEQ ID NO: 301590 - DNA, 30 bp, Artificial Sequence
  Synthetic oligonucleotide
attcattgttcagagacgtactgaatcgtt

SEQ ID NO: 301591 - DNA, 30 bp, Artificial Sequence
  Synthetic oligonucleotide
tgagtcagttaccgattcaggcgcatcgtt

SEQ ID NO: 301592 - DNA, 30 bp, Artificial Sequence
  Synthetic oligonucleotide
atacctcaatcaagctgccacgtgatcgtt

SEQ ID NO: 301593 - DNA, 30 bp, Artificial Sequence
  Synthetic oligonucleotide
aaaatgttcaacacagcgctcaagctcgtt

SEQ ID NO: 301594 - DNA, 30 bp, Artificial Sequence
  Synthetic oligonucleotide
tgaagcctctaggtatacctcatgctcgtt

SEQ ID NO: 301595 - DNA, 30 bp, Artificial Sequence
  Synthetic oligonucleotide
ccaccggatcctattataagcaatctcgtt

SEQ ID NO: 301596 - DNA, 30 bp, Artificial Sequence
  Synthetic oligonucleotide
gggagcagacatgtggtctttgatctcgtt

SEQ ID NO: 301597 - DNA, 30 bp, Artificial Sequence
  Synthetic oligonucleotide
cgtgtgtccaacatatgtcgctgagtcgtt

SEQ ID NO: 301598 - DNA, 30 bp, Artificial Sequence
  Synthetic oligonucleotide
aacggcgcgtctccattgaagcacgtcgtt

SEQ ID NO: 301599 - DNA, 30 bp, Artificial Sequence
  Synthetic oligonucleotide
cgaaagcattaggatagtttgcacgtcgtt

SEQ ID NO: 301600 - DNA, 30 bp, Artificial Sequence
  Synthetic oligonucleotide
gtcgacgagccgccaggtggccaggtcgtt

SEQ ID NO: 301601 - DNA, 30 bp, Artificial Sequence
  Synthetic oligonucleotide
gtacaaactctccagggggcatttgtcgtt

SEQ ID NO: 301602 - DNA, 30 bp, Artificial Sequence
  Synthetic oligonucleotide
taggtgccagacattttattccaattcgtt

SEQ ID NO: 301603 - DNA, 30 bp, Artificial Sequence
  Synthetic oligonucleotide
acgcggatctccgtgttagtgcgattcgtt

SEQ ID NO: 301604 - DNA, 30 bp, Artificial Sequence
  Synthetic oligonucleotide
acattagcatgtcaactctgcgtcttcgtt

SEQ ID NO: 301605 - DNA, 30 bp, Artificial Sequence
  Synthetic oligonucleotide
acaagtttagtttcagcatacgcgttcgtt

SEQ ID NO: 301606 - DNA, 30 bp, Artificial Sequence
  Synthetic oligonucleotide
tcctatcaatcggcatggaacactttcgtt

SEQ ID NO: 301607 - DNA, 30 bp, Artificial Sequence
  Synthetic oligonucleotide
aacgcaataacgaggagacgttctttcgtt

SEQ ID NO: 301608 - DNA, 30 bp, Artificial Sequence
  Synthetic oligonucleotide
atcattaaagaacatggaacttaaaaggtt

SEQ ID NO: 301609 - DNA, 30 bp, Artificial Sequence
  Synthetic oligonucleotide
ttcaaatagttggactgccagtcaaaggtt

SEQ ID NO: 301610 - DNA, 30 bp, Artificial Sequence
  Synthetic oligonucleotide
ttccgttcctggtgagggcacttaaaggtt

SEQ ID NO: 301611 - DNA, 30 bp, Artificial Sequence
  Synthetic oligonucleotide
ctgtcggggaagctagatacatgcaaggtt

SEQ ID NO: 301612 - DNA, 30 bp, Artificial Sequence
  Synthetic oligonucleotide
gaaacatagacgtgctaaatgcggaaggtt

SEQ ID NO: 301613 - DNA, 30 bp, Artificial Sequence
  Synthetic oligonucleotide
gggtcaccaacgtggctgttggggaaggtt

SEQ ID NO: 301614 - DNA, 30 bp, Artificial Sequence
  Synthetic oligonucleotide
tttgctactagtacagtactgtataaggtt

SEQ ID NO: 301615 - DNA, 30 bp, Artificial Sequence
  Synthetic oligonucleotide
ccaacctctgaaactgatattagtaaggtt

SEQ ID NO: 301616 - DNA, 30 bp, Artificial Sequence
  Synthetic oligonucleotide
gtgacagctttttcggcagtgcttaaggtt

SEQ ID NO: 301617 - DNA, 30 bp, Artificial Sequence
  Synthetic oligonucleotide
ttcatttaagttacacttggctttaaggtt

SEQ ID NO: 301618 - DNA, 30 bp, Artificial Sequence
  Synthetic oligonucleotide
cggcgccagaagtcccactcaacccaggtt

SEQ ID NO: 301619 - DNA, 30 bp, Artificial Sequence
  Synthetic oligonucleotide
catactctgggccaaaaggcagtccaggtt

SEQ ID NO: 301620 - DNA, 30 bp, Artificial Sequence
  Synthetic oligonucleotide
gacgtgaaggtttcagcttaccagcaggtt

SEQ ID NO: 301621 - DNA, 30 bp, Artificial Sequence
  Synthetic oligonucleotide
actgctaacttctcgatctatttagaggtt

SEQ ID NO: 301622 - DNA, 30 bp, Artificial Sequence
  Synthetic oligonucleotide
tgagaatgagatatcgacgtaatcgaggtt

SEQ ID NO: 301623 - DNA, 30 bp, Artificial Sequence
  Synthetic oligonucleotide
ataggcaaggcgcacgcgactagtgaggtt

SEQ ID NO: 301624 - DNA, 30 bp, Artificial Sequence
  Synthetic oligonucleotide
ctaacattacgctatcgtgagtaataggtt

SEQ ID NO: 301625 - DNA, 30 bp, Artificial Sequence
  Synthetic oligonucleotide
tgcatgtatgactgttgctgtatctaggtt

SEQ ID NO: 301626 - DNA, 30 bp, Artificial Sequence
  Synthetic oligonucleotide
gctggtcctaatagtaggcatgggtaggtt

SEQ ID NO: 301627 - DNA, 30 bp, Artificial Sequence
  Synthetic oligonucleotide
tatctaatgtagcgaatactgaggacggtt

SEQ ID NO: 301628 - DNA, 30 bp, Artificial Sequence
  Synthetic oligonucleotide
tacgaccacttcattatctccttaccggtt

SEQ ID NO: 301629 - DNA, 30 bp, Artificial Sequence
  Synthetic oligonucleotide
gaacgcggccggtcaggctgattcccggtt

SEQ ID NO: 301630 - DNA, 30 bp, Artificial Sequence
  Synthetic oligonucleotide
taaccgcaaggccccacctgggatccggtt

SEQ ID NO: 301631 - DNA, 30 bp, Artificial Sequence
  Synthetic oligonucleotide
atccgatcaatgatagttctgcgagcggtt

SEQ ID NO: 301632 - DNA, 30 bp, Artificial Sequence
  Synthetic oligonucleotide
atcctatgacagcgggtattgggagcggtt

SEQ ID NO: 301633 - DNA, 30 bp, Artificial Sequence
  Synthetic oligonucleotide
ggataaacgattgcagaatttcgcgcggtt

SEQ ID NO: 301634 - DNA, 30 bp, Artificial Sequence
  Synthetic oligonucleotide
ttgacgggccgagcagttgtctgggcggtt

SEQ ID NO: 301635 - DNA, 30 bp, Artificial Sequence
  Synthetic oligonucleotide
ggtggatgccaatggaaccgaagtgcggtt

SEQ ID NO: 301636 - DNA, 30 bp, Artificial Sequence
  Synthetic oligonucleotide
tcggggcaacatcaagggccaattgcggtt

SEQ ID NO: 301637 - DNA, 30 bp, Artificial Sequence
  Synthetic oligonucleotide
gaacatagtatagcattggtcgaatcggtt

SEQ ID NO: 301638 - DNA, 30 bp, Artificial Sequence
  Synthetic oligonucleotide
atgtaagtcggtgttcttcgccggtcggtt

SEQ ID NO: 301639 - DNA, 30 bp, Artificial Sequence
  Synthetic oligonucleotide
caagtcaggaagatatatatagggtcggtt

SEQ ID NO: 301640 - DNA, 30 bp, Artificial Sequence
  Synthetic oligonucleotide
taggcagattcttgacccgtaaattcggtt

SEQ ID NO: 301641 - DNA, 30 bp, Artificial Sequence
  Synthetic oligonucleotide
cgacgagaaaatatcggctccagttcggtt

SEQ ID NO: 301642 - DNA, 30 bp, Artificial Sequence
  Synthetic oligonucleotide
cagcatgaagccttactttgcatttcggtt

SEQ ID NO: 301643 - DNA, 30 bp, Artificial Sequence
  Synthetic oligonucleotide
gcgcagtggatcatggatatcctttcggtt

SEQ ID NO: 301644 - DNA, 30 bp, Artificial Sequence
  Synthetic oligonucleotide
gctgccgactgcagggcaggcggaagggtt

SEQ ID NO: 301645 - DNA, 30 bp, Artificial Sequence
  Synthetic oligonucleotide
ctgctaaagtaagtgtaagggaatagggtt

SEQ ID NO: 301646 - DNA, 31 bp, Artificial Sequence
  Synthetic oligonucleotide
tggtggtacactttcttcaattattagggtt

SEQ ID NO: 301647 - DNA, 30 bp, Artificial Sequence
  Synthetic oligonucleotide
ttgcacgttcggcttgacttgctacgggtt

SEQ ID NO: 301648 - DNA, 30 bp, Artificial Sequence
  Synthetic oligonucleotide
tgctccgtcagtccctcttgcgaccgggtt

SEQ ID NO: 301649 - DNA, 30 bp, Artificial Sequence
  Synthetic oligonucleotide
ggcgaccgtgtgggtagggcattccgggtt

SEQ ID NO: 301650 - DNA, 30 bp, Artificial Sequence
  Synthetic oligonucleotide
ccagtaacttatagagtgatttcgcgggtt

SEQ ID NO: 301651 - DNA, 30 bp, Artificial Sequence
  Synthetic oligonucleotide
ggaacacgtattattaatcttcggcgggtt

SEQ ID NO: 301652 - DNA, 30 bp, Artificial Sequence
  Synthetic oligonucleotide
cggtacgcgctacctcgataactgcgggtt

SEQ ID NO: 301653 - DNA, 30 bp, Artificial Sequence
  Synthetic oligonucleotide
cctctagaatagtactacctccgtcgggtt

SEQ ID NO: 301654 - DNA, 30 bp, Artificial Sequence
  Synthetic oligonucleotide
ctcgtggaccgtagggattaacgaggggtt

SEQ ID NO: 301655 - DNA, 30 bp, Artificial Sequence
  Synthetic oligonucleotide
cgctatgaagagcggcacgagctgggggtt

SEQ ID NO: 301656 - DNA, 30 bp, Artificial Sequence
  Synthetic oligonucleotide
gactgggtgttcatagtgatggatggggtt

SEQ ID NO: 301657 - DNA, 30 bp, Artificial Sequence
  Synthetic oligonucleotide
cccggtcgatacgcgacaatgagatgggtt

SEQ ID NO: 301658 - DNA, 30 bp, Artificial Sequence
  Synthetic oligonucleotide
ttcagatcggctattaaggtctagtgggtt

SEQ ID NO: 301659 - DNA, 30 bp, Artificial Sequence
  Synthetic oligonucleotide
tattaaatcgtatgtctcttcccgtgggtt

SEQ ID NO: 301660 - DNA, 30 bp, Artificial Sequence
  Synthetic oligonucleotide
gcttcgcaatttcatccgcttgcgtgggtt

SEQ ID NO: 301661 - DNA, 30 bp, Artificial Sequence
  Synthetic oligonucleotide
gggctcacggtaacggttcggaggtgggtt

SEQ ID NO: 301662 - DNA, 30 bp, Artificial Sequence
  Synthetic oligonucleotide
ggggagctttatacaatagccagttgggtt

SEQ ID NO: 301663 - DNA, 30 bp, Artificial Sequence
  Synthetic oligonucleotide
gatagggatttgtaaaaatcacgaatggtt

SEQ ID NO: 301664 - DNA, 30 bp, Artificial Sequence
  Synthetic oligonucleotide
gctcaccacagcgttataaggcgaatggtt

SEQ ID NO: 301665 - DNA, 30 bp, Artificial Sequence
  Synthetic oligonucleotide
tttaattagcgtgagtcaaattgaatggtt

SEQ ID NO: 301666 - DNA, 30 bp, Artificial Sequence
  Synthetic oligonucleotide
ttgcgatggacacaagccacattaatggtt

SEQ ID NO: 301667 - DNA, 30 bp, Artificial Sequence
  Synthetic oligonucleotide
acagttgagcatctgatagtcggcatggtt

SEQ ID NO: 301668 - DNA, 30 bp, Artificial Sequence
  Synthetic oligonucleotide
acaacattgggtcttctgtgagtgatggtt

SEQ ID NO: 301669 - DNA, 30 bp, Artificial Sequence
  Synthetic oligonucleotide
actgccttcgcataaaggtaaaaactggtt

SEQ ID NO: 301670 - DNA, 40 bp, Artificial Sequence
  Synthetic oligonucleotide
cctttatttaacaaatcaccatgcacccgaccaactggtt

SEQ ID NO: 301671 - DNA, 30 bp, Artificial Sequence
  Synthetic oligonucleotide
tgacggagcgtcccatgtgaagcactggtt

SEQ ID NO: 301672 - DNA, 30 bp, Artificial Sequence
  Synthetic oligonucleotide
agtggatgccgacaggggcaacgtctggtt

SEQ ID NO: 301673 - DNA, 30 bp, Artificial Sequence
  Synthetic oligonucleotide
accatccgatacacgacggcaattctggtt

SEQ ID NO: 301674 - DNA, 30 bp, Artificial Sequence
  Synthetic oligonucleotide
gtataaagttggggcaagatgtttctggtt

SEQ ID NO: 301675 - DNA, 30 bp, Artificial Sequence
  Synthetic oligonucleotide
gaggaccaactgaccgagttgcaagtggtt

SEQ ID NO: 301676 - DNA, 30 bp, Artificial Sequence
  Synthetic oligonucleotide
gatacagcacaacaatcgtgcgcagtggtt

SEQ ID NO: 301677 - DNA, 30 bp, Artificial Sequence
  Synthetic oligonucleotide
ggcggatatgcgcacacacgatcagtggtt

SEQ ID NO: 301678 - DNA, 30 bp, Artificial Sequence
  Synthetic oligonucleotide
gtcctgtcggggagtggttattgcgtggtt

SEQ ID NO: 301679 - DNA, 30 bp, Artificial Sequence
  Synthetic oligonucleotide
ggtggcgacatgatgctggttctcgtggtt

SEQ ID NO: 301680 - DNA, 30 bp, Artificial Sequence
  Synthetic oligonucleotide
cacgcctttaacacatgaatacctgtggtt

SEQ ID NO: 301681 - DNA, 30 bp, Artificial Sequence
  Synthetic oligonucleotide
ccctgctgctctagttcatttattgtggtt

SEQ ID NO: 301682 - DNA, 30 bp, Artificial Sequence
  Synthetic oligonucleotide
ttcatcactacatttcgacaactattggtt

SEQ ID NO: 301683 - DNA, 30 bp, Artificial Sequence
  Synthetic oligonucleotide
tgtccttcgcctagcagtcctctattggtt

SEQ ID NO: 301684 - DNA, 30 bp, Artificial Sequence
  Synthetic oligonucleotide
tatgcatgttggatcaaacagtgcttggtt

SEQ ID NO: 301685 - DNA, 30 bp, Artificial Sequence
  Synthetic oligonucleotide
agggataaacggctacggtatcagttggtt

SEQ ID NO: 301686 - DNA, 30 bp, Artificial Sequence
  Synthetic oligonucleotide
atacggaggggtctatcgccgcatttggtt

SEQ ID NO: 301687 - DNA, 30 bp, Artificial Sequence
  Synthetic oligonucleotide
ttagacttgcacagaacgtggtctttggtt

SEQ ID NO: 301688 - DNA, 30 bp, Artificial Sequence
  Synthetic oligonucleotide
caaccattgggttaataactcattttggtt

SEQ ID NO: 301689 - DNA, 30 bp, Artificial Sequence
  Synthetic oligonucleotide
ggatccgtgcacctacgacgttttttggtt

SEQ ID NO: 301690 - DNA, 30 bp, Artificial Sequence
  Synthetic oligonucleotide
ttgaagagtgcgcctgcactggacaatgtt

SEQ ID NO: 301691 - DNA, 30 bp, Artificial Sequence
  Synthetic oligonucleotide
taaactcacaatgttccctggttcaatgtt

SEQ ID NO: 301692 - DNA, 30 bp, Artificial Sequence
  Synthetic oligonucleotide
caaacggtcggtgatggttattggaatgtt

SEQ ID NO: 301693 - DNA, 30 bp, Artificial Sequence
  Synthetic oligonucleotide
aaagaccaaatcgctgaaggtgtgaatgtt

SEQ ID NO: 301694 - DNA, 30 bp, Artificial Sequence
  Synthetic oligonucleotide
gattgcgtggcgaagagttcagaacatgtt

SEQ ID NO: 301695 - DNA, 30 bp, Artificial Sequence
  Synthetic oligonucleotide
ctactttagtaaaatgttactagacatgtt

SEQ ID NO: 301696 - DNA, 30 bp, Artificial Sequence
  Synthetic oligonucleotide
gaagacaaggcaactacgtcggtacatgtt

SEQ ID NO: 301697 - DNA, 30 bp, Artificial Sequence
  Synthetic oligonucleotide
aaggaggtctattagatcctgaaccatgtt

SEQ ID NO: 301698 - DNA, 30 bp, Artificial Sequence
  Synthetic oligonucleotide
agcgactaactgtcggtccataagcatgtt

SEQ ID NO: 301699 - DNA, 30 bp, Artificial Sequence
  Synthetic oligonucleotide
ggcggaaacgggggtgattaattgcatgtt

SEQ ID NO: 301700 - DNA, 30 bp, Artificial Sequence
  Synthetic oligonucleotide
tattagaggcattccaagagggaagatgtt

SEQ ID NO: 301701 - DNA, 30 bp, Artificial Sequence
  Synthetic oligonucleotide
atctacaatcagtggggatagtacgatgtt

SEQ ID NO: 301702 - DNA, 30 bp, Artificial Sequence
  Synthetic oligonucleotide
aaaagcacgactttagattcaacggatgtt

SEQ ID NO: 301703 - DNA, 29 bp, Artificial Sequence
  Synthetic oligonucleotide
atgtccagacaggttttccaactgatgtt

SEQ ID NO: 301704 - DNA, 30 bp, Artificial Sequence
  Synthetic oligonucleotide
cgatatagaacagtagagtttggtgatgtt

SEQ ID NO: 301705 - DNA, 30 bp, Artificial Sequence
  Synthetic oligonucleotide
caggggtatcgtcgacgtcgtcttgatgtt

SEQ ID NO: 301706 - DNA, 30 bp, Artificial Sequence
  Synthetic oligonucleotide
tgctgaagtataaatcgtcagccctatgtt

SEQ ID NO: 301707 - DNA, 30 bp, Artificial Sequence
  Synthetic oligonucleotide
cagtacggttcgaaaccggcgtagtatgtt

SEQ ID NO: 301708 - DNA, 30 bp, Artificial Sequence
  Synthetic oligonucleotide
tgcctggctgtgccgttcagggggtatgtt

SEQ ID NO: 301709 - DNA, 30 bp, Artificial Sequence
  Synthetic oligonucleotide
gaatcattaattaggaccatgctgtatgtt

SEQ ID NO: 301710 - DNA, 30 bp, Artificial Sequence
  Synthetic oligonucleotide
gcgaattcaaggtcacgtaaattttatgtt

SEQ ID NO: 301711 - DNA, 30 bp, Artificial Sequence
  Synthetic oligonucleotide
tctggtagcaacgataggatccgaactgtt

SEQ ID NO: 301712 - DNA, 30 bp, Artificial Sequence
  Synthetic oligonucleotide
actagagctcaagatccgtgatacactgtt

SEQ ID NO: 301713 - DNA, 30 bp, Artificial Sequence
  Synthetic oligonucleotide
gagtctacccgggatagattgatgactgtt

SEQ ID NO: 301714 - DNA, 30 bp, Artificial Sequence
  Synthetic oligonucleotide
gctatctagtacaaatgatcatatactgtt

SEQ ID NO: 301715 - DNA, 30 bp, Artificial Sequence
  Synthetic oligonucleotide
ttatgcaagtcgttcctaacccaccctgtt

SEQ ID NO: 301716 - DNA, 30 bp, Artificial Sequence
  Synthetic oligonucleotide
ctagcgctccatgggtttgaaggccctgtt

SEQ ID NO: 301717 - DNA, 30 bp, Artificial Sequence
  Synthetic oligonucleotide
ccgggcaacggggggattaattctcctgtt

SEQ ID NO: 301718 - DNA, 30 bp, Artificial Sequence
  Synthetic oligonucleotide
gcggataaagttgtcttatacgttcctgtt

SEQ ID NO: 301719 - DNA, 30 bp, Artificial Sequence
  Synthetic oligonucleotide
ggctgacgcattcatcgcaatagagctgtt

SEQ ID NO: 301720 - DNA, 30 bp, Artificial Sequence
  Synthetic oligonucleotide
tcgcggcttagacggtaattaaaggctgtt

SEQ ID NO: 301721 - DNA, 30 bp, Artificial Sequence
  Synthetic oligonucleotide
accaatgcatctctagggcctagtgctgtt

SEQ ID NO: 301722 - DNA, 30 bp, Artificial Sequence
  Synthetic oligonucleotide
caaattctgtagccggttggggaatctgtt

SEQ ID NO: 301723 - DNA, 30 bp, Artificial Sequence
  Synthetic oligonucleotide
attaatctatgagagcagttgccatctgtt

SEQ ID NO: 301724 - DNA, 30 bp, Artificial Sequence
  Synthetic oligonucleotide
aatatcctattttaggtaactagatctgtt

SEQ ID NO: 301725 - DNA, 30 bp, Artificial Sequence
  Synthetic oligonucleotide
atcttcaatcataagcttttagagtctgtt

SEQ ID NO: 301726 - DNA, 26 bp, Artificial Sequence
  Synthetic oligonucleotide
tagtaatcgtaggaatgtggtctgtt

SEQ ID NO: 301727 - DNA, 30 bp, Artificial Sequence
  Synthetic oligonucleotide
attaggttatcggacataggggtttctgtt

SEQ ID NO: 301728 - DNA, 30 bp, Artificial Sequence
  Synthetic oligonucleotide
tgaagccttttacgcgggaggtgaagtgtt

SEQ ID NO: 301729 - DNA, 30 bp, Artificial Sequence
  Synthetic oligonucleotide
agataagaagaaggaccgggcgtaagtgtt

SEQ ID NO: 301730 - DNA, 30 bp, Artificial Sequence
  Synthetic oligonucleotide
gtcacgacgcacggatgccatcgcagtgtt

SEQ ID NO: 301731 - DNA, 30 bp, Artificial Sequence
  Synthetic oligonucleotide
caagagggtaggacgccggattagagtgtt

SEQ ID NO: 301732 - DNA, 30 bp, Artificial Sequence
  Synthetic oligonucleotide
agtcgcaacgaggtcgtcctccggagtgtt

SEQ ID NO: 301733 - DNA, 30 bp, Artificial Sequence
  Synthetic oligonucleotide
gatcgcaacgaccgagtacgtaaacgtgtt

SEQ ID NO: 301734 - DNA, 30 bp, Artificial Sequence
  Synthetic oligonucleotide
gtaactgggtataaactctaagaccgtgtt

SEQ ID NO: 301735 - DNA, 30 bp, Artificial Sequence
  Synthetic oligonucleotide
gtataaggcgtataggcggaaagccgtgtt

SEQ ID NO: 301736 - DNA, 30 bp, Artificial Sequence
  Synthetic oligonucleotide
aaccatcgtagtggtatatgtctccgtgtt

SEQ ID NO: 301737 - DNA, 30 bp, Artificial Sequence
  Synthetic oligonucleotide
ctctgctaaccatgctgctttgtccgtgtt

SEQ ID NO: 301738 - DNA, 30 bp, Artificial Sequence
  Synthetic oligonucleotide
catgacaaatagaaagtttttcaaggtgtt

SEQ ID NO: 301739 - DNA, 30 bp, Artificial Sequence
  Synthetic oligonucleotide
tttggctacttagtgcgctcactaggtgtt

SEQ ID NO: 301740 - DNA, 30 bp, Artificial Sequence
  Synthetic oligonucleotide
tagtctgatataacggttcagctaggtgtt

SEQ ID NO: 301741 - DNA, 30 bp, Artificial Sequence
  Synthetic oligonucleotide
acctggggaggctataatctcttaggtgtt

SEQ ID NO: 301742 - DNA, 30 bp, Artificial Sequence
  Synthetic oligonucleotide
gcaatgactgacactcttccgtgcggtgtt

SEQ ID NO: 301743 - DNA, 30 bp, Artificial Sequence
  Synthetic oligonucleotide
agggattgacgctcatagatgcttggtgtt

SEQ ID NO: 301744 - DNA, 30 bp, Artificial Sequence
  Synthetic oligonucleotide
ctgaatgcttgacagtgtaaatcatgtgtt

SEQ ID NO: 301745 - DNA, 30 bp, Artificial Sequence
  Synthetic oligonucleotide
acttggatacgagggttattaacctgtgtt

SEQ ID NO: 301746 - DNA, 30 bp, Artificial Sequence
  Synthetic oligonucleotide
gcacttgtgctcgagttcgtggcttgtgtt

SEQ ID NO: 301747 - DNA, 30 bp, Artificial Sequence
  Synthetic oligonucleotide
atacgacagccgggaaagcggacaattgtt

SEQ ID NO: 301748 - DNA, 30 bp, Artificial Sequence
  Synthetic oligonucleotide
ttaaaatcgtgtgcgcgtctaccaattgtt

SEQ ID NO: 301749 - DNA, 30 bp, Artificial Sequence
  Synthetic oligonucleotide
cggctgtaaaaagttcttcctggaattgtt

SEQ ID NO: 301750 - DNA, 30 bp, Artificial Sequence
  Synthetic oligonucleotide
cacacagggctctgggtaccatccattgtt

SEQ ID NO: 301751 - DNA, 30 bp, Artificial Sequence
  Synthetic oligonucleotide
ttagaaatctacacaaaatcgaagattgtt

SEQ ID NO: 301752 - DNA, 30 bp, Artificial Sequence
  Synthetic oligonucleotide
tgtgttagttcacccaaagaacagattgtt

SEQ ID NO: 301753 - DNA, 30 bp, Artificial Sequence
  Synthetic oligonucleotide
aggccactagcctgtggtcctcggattgtt

SEQ ID NO: 301754 - DNA, 30 bp, Artificial Sequence
  Synthetic oligonucleotide
gtaaaccgtagtaagacttgtgaacttgtt

SEQ ID NO: 301755 - DNA, 30 bp, Artificial Sequence
  Synthetic oligonucleotide
acatgggtctgaactgtggaatgacttgtt

SEQ ID NO: 301756 - DNA, 30 bp, Artificial Sequence
  Synthetic oligonucleotide
ttagccggacttcaggtgtttatccttgtt

SEQ ID NO: 301757 - DNA, 30 bp, Artificial Sequence
  Synthetic oligonucleotide
agtgcaacattggttatctctcggcttgtt

SEQ ID NO: 301758 - DNA, 30 bp, Artificial Sequence
  Synthetic oligonucleotide
gaagttatgaccccaggcgaaatgcttgtt

SEQ ID NO: 301759 - DNA, 30 bp, Artificial Sequence
  Synthetic oligonucleotide
gcggatcgcgaatagtccccattgcttgtt

SEQ ID NO: 301760 - DNA, 30 bp, Artificial Sequence
  Synthetic oligonucleotide
gggaaaggtatgtgggctattccagttgtt

SEQ ID NO: 301761 - DNA, 30 bp, Artificial Sequence
  Synthetic oligonucleotide
cgagcggttttttgataacgggtggttgtt

SEQ ID NO: 301762 - DNA, 30 bp, Artificial Sequence
  Synthetic oligonucleotide
tcgattatagtttcgtttaatatatttgtt

SEQ ID NO: 301763 - DNA, 30 bp, Artificial Sequence
  Synthetic oligonucleotide
ctaaggaattgctaaccaagggtatttgtt

SEQ ID NO: 301764 - DNA, 30 bp, Artificial Sequence
  Synthetic oligonucleotide
cctatgcgggaagcggacaggagctttgtt

SEQ ID NO: 301765 - DNA, 30 bp, Artificial Sequence
  Synthetic oligonucleotide
acgcaggttagagggtacctggtctttgtt

SEQ ID NO: 301766 - DNA, 30 bp, Artificial Sequence
  Synthetic oligonucleotide
atgaatcatctgttttaccgtttgtttgtt

SEQ ID NO: 301767 - DNA, 30 bp, Artificial Sequence
  Synthetic oligonucleotide
ccacattgttctacactctgtgtttttgtt

SEQ ID NO: 301768 - DNA, 30 bp, Artificial Sequence
  Synthetic oligonucleotide
cctctactggggtatcacgtgtcaaaattt

SEQ ID NO: 301769 - DNA, 30 bp, Artificial Sequence
  Synthetic oligonucleotide
cagtcattccttatgcattggaacaaattt

SEQ ID NO: 301770 - DNA, 30 bp, Artificial Sequence
  Synthetic oligonucleotide
aacactcacgaagatttgtgagaacaattt

SEQ ID NO: 301771 - DNA, 30 bp, Artificial Sequence
  Synthetic oligonucleotide
gcaattcccgtgttccgatagcgacaattt

SEQ ID NO: 301772 - DNA, 30 bp, Artificial Sequence
  Synthetic oligonucleotide
gttagtatctaaatatgataatgacaattt

SEQ ID NO: 301773 - DNA, 30 bp, Artificial Sequence
  Synthetic oligonucleotide
gaacccgctaaggtgagtatgggccaattt

SEQ ID NO: 301774 - DNA, 30 bp, Artificial Sequence
  Synthetic oligonucleotide
taagtaagttccgtgatacttatgcaattt

SEQ ID NO: 301775 - DNA, 30 bp, Artificial Sequence
  Synthetic oligonucleotide
ctcagtagtggaagtgttccgctgcaattt

SEQ ID NO: 301776 - DNA, 30 bp, Artificial Sequence
  Synthetic oligonucleotide
ttacagtaagaatacgtcgttactcaattt

SEQ ID NO: 301777 - DNA, 30 bp, Artificial Sequence
  Synthetic oligonucleotide
gcgagagggtacttgagagtcacagaattt

SEQ ID NO: 301778 - DNA, 30 bp, Artificial Sequence
  Synthetic oligonucleotide
agaagacattcaataactcagccagaattt

SEQ ID NO: 301779 - DNA, 30 bp, Artificial Sequence
  Synthetic oligonucleotide
tcagagacattatatggaaatccagaattt

SEQ ID NO: 301780 - DNA, 30 bp, Artificial Sequence
  Synthetic oligonucleotide
aaagtagcggttttacgttcatcagaattt

SEQ ID NO: 301781 - DNA, 30 bp, Artificial Sequence
  Synthetic oligonucleotide
gtaggagacggaagctgaaagtcagaattt

SEQ ID NO: 301782 - DNA, 30 bp, Artificial Sequence
  Synthetic oligonucleotide
agtcgtcactcagcaggcgacaaggaattt

SEQ ID NO: 301783 - DNA, 30 bp, Artificial Sequence
  Synthetic oligonucleotide
aacgtcgaggcagaagtgctgaaggaattt

SEQ ID NO: 301784 - DNA, 30 bp, Artificial Sequence
  Synthetic oligonucleotide
ccacgattgggtagcgtagtttaggaattt

SEQ ID NO: 301785 - DNA, 30 bp, Artificial Sequence
  Synthetic oligonucleotide
gggcttggtaactcagccaacgcggaattt

SEQ ID NO: 301786 - DNA, 30 bp, Artificial Sequence
  Synthetic oligonucleotide
ggtacacccgatgaacgcttagtggaattt

SEQ ID NO: 301787 - DNA, 30 bp, Artificial Sequence
  Synthetic oligonucleotide
gggggaagcgtatcactcttaaatgaattt

SEQ ID NO: 301788 - DNA, 30 bp, Artificial Sequence
  Synthetic oligonucleotide
agttccagagtaccacaggctcatgaattt

SEQ ID NO: 301789 - DNA, 30 bp, Artificial Sequence
  Synthetic oligonucleotide
ggaggtgccaggatatggcttcaataattt

SEQ ID NO: 301790 - DNA, 30 bp, Artificial Sequence
  Synthetic oligonucleotide
catgagtcgatgaggcctcaaacataattt

SEQ ID NO: 301791 - DNA, 30 bp, Artificial Sequence
  Synthetic oligonucleotide
caccacccgctagaccgtactatgtaattt

SEQ ID NO: 301792 - DNA, 30 bp, Artificial Sequence
  Synthetic oligonucleotide
tacggctgagaatttccgtgttattaattt

SEQ ID NO: 301793 - DNA, 30 bp, Artificial Sequence
  Synthetic oligonucleotide
accgccaaatagtactactaatcttaattt

SEQ ID NO: 301794 - DNA, 30 bp, Artificial Sequence
  Synthetic oligonucleotide
tcgcatgtcggcttaaatgcaagttaattt

SEQ ID NO: 301795 - DNA, 30 bp, Artificial Sequence
  Synthetic oligonucleotide
tcaatctgtatgtagatggtctgttaattt

SEQ ID NO: 301796 - DNA, 30 bp, Artificial Sequence
  Synthetic oligonucleotide
gacttcatgcggaatcagcgcacaacattt

SEQ ID NO: 301797 - DNA, 30 bp, Artificial Sequence
  Synthetic oligonucleotide
aaaacatcttggtgactaggagcaacattt

SEQ ID NO: 301798 - DNA, 30 bp, Artificial Sequence
  Synthetic oligonucleotide
aggtgtgaatttacaaaccaccgaacattt

SEQ ID NO: 301799 - DNA, 30 bp, Artificial Sequence
  Synthetic oligonucleotide
cacgggtggcatcgcgtgacgggaacattt

SEQ ID NO: 301800 - DNA, 30 bp, Artificial Sequence
  Synthetic oligonucleotide
ggcacacgggctatgggtgtgaacacattt

SEQ ID NO: 301801 - DNA, 30 bp, Artificial Sequence
  Synthetic oligonucleotide
cgcggctcgcccgtgggctcgaggacattt

SEQ ID NO: 301802 - DNA, 30 bp, Artificial Sequence
  Synthetic oligonucleotide
tgcgagtgggcgtcggcgctcaaagcattt

SEQ ID NO: 301803 - DNA, 30 bp, Artificial Sequence
  Synthetic oligonucleotide
taaacgctgaacggacctttggctgcattt

SEQ ID NO: 301804 - DNA, 30 bp, Artificial Sequence
  Synthetic oligonucleotide
aacgatgttgaatcgagtccttctgcattt

SEQ ID NO: 301805 - DNA, 30 bp, Artificial Sequence
  Synthetic oligonucleotide
gtcaacacgccttaggtaatctttgcattt

SEQ ID NO: 301806 - DNA, 30 bp, Artificial Sequence
  Synthetic oligonucleotide
cgtgtccgccgatctcggtccgcatcattt

SEQ ID NO: 301807 - DNA, 30 bp, Artificial Sequence
  Synthetic oligonucleotide
acctgtattaataggttaagtgactcattt

SEQ ID NO: 301808 - DNA, 30 bp, Artificial Sequence
  Synthetic oligonucleotide
ggaacaagaaagatggcgttgttgtcattt

SEQ ID NO: 301809 - DNA, 30 bp, Artificial Sequence
  Synthetic oligonucleotide
ggctagagtcccatcggacttacaagattt

SEQ ID NO: 301810 - DNA, 30 bp, Artificial Sequence
  Synthetic oligonucleotide
aggggggaaggttacatgacgctaagattt

SEQ ID NO: 301811 - DNA, 30 bp, Artificial Sequence
  Synthetic oligonucleotide
acccggaggaaaataaaacttatcagattt

SEQ ID NO: 301812 - DNA, 30 bp, Artificial Sequence
  Synthetic oligonucleotide
acgttggtgttgccgggcctgacgagattt

SEQ ID NO: 301813 - DNA, 30 bp, Artificial Sequence
  Synthetic oligonucleotide
ttaatcaccaaggggggtaataaacgattt

SEQ ID NO: 301814 - DNA, 30 bp, Artificial Sequence
  Synthetic oligonucleotide
tttacgtaaggtccgagtgtagaacgattt

SEQ ID NO: 301815 - DNA, 30 bp, Artificial Sequence
  Synthetic oligonucleotide
cattccgggttactataaaaagcacgattt

SEQ ID NO: 301816 - DNA, 30 bp, Artificial Sequence
  Synthetic oligonucleotide
tcgttaagtgtttaatccgccctacgattt

SEQ ID NO: 301817 - DNA, 30 bp, Artificial Sequence
  Synthetic oligonucleotide
tcaagatctaatctctcgtttctgcgattt

SEQ ID NO: 301818 - DNA, 30 bp, Artificial Sequence
  Synthetic oligonucleotide
tcagtaacacgtcttaagccggtgcgattt

SEQ ID NO: 301819 - DNA, 30 bp, Artificial Sequence
  Synthetic oligonucleotide
ttctcgtagggataccgtgtattgcgattt

SEQ ID NO: 301820 - DNA, 30 bp, Artificial Sequence
  Synthetic oligonucleotide
cactacctattcgctcccgtgcatcgattt

SEQ ID NO: 301821 - DNA, 30 bp, Artificial Sequence
  Synthetic oligonucleotide
ttgtctgaagaaatgaaagttgatcgattt

SEQ ID NO: 301822 - DNA, 30 bp, Artificial Sequence
  Synthetic oligonucleotide
aaagaaataagttcagaagcccaaggattt

SEQ ID NO: 301823 - DNA, 30 bp, Artificial Sequence
  Synthetic oligonucleotide
gtggggtggtgtgcgtactaagaaggattt

SEQ ID NO: 301824 - DNA, 30 bp, Artificial Sequence
  Synthetic oligonucleotide
actatgacccccaagaaaatggaaggattt

SEQ ID NO: 301825 - DNA, 30 bp, Artificial Sequence
  Synthetic oligonucleotide
atcgcggtggggtgttttacgtaaggattt

SEQ ID NO: 301826 - DNA, 30 bp, Artificial Sequence
  Synthetic oligonucleotide
ggataaacccgagactcttgaaacggattt

SEQ ID NO: 301827 - DNA, 30 bp, Artificial Sequence
  Synthetic oligonucleotide
gcgtcgcacccatcgagaggatgcggattt

SEQ ID NO: 301828 - DNA, 30 bp, Artificial Sequence
  Synthetic oligonucleotide
gaaagccgaacggtgaatcggctcggattt

SEQ ID NO: 301829 - DNA, 30 bp, Artificial Sequence
  Synthetic oligonucleotide
cgatgcgagtccctccggacaccgggattt

SEQ ID NO: 301830 - DNA, 30 bp, Artificial Sequence
  Synthetic oligonucleotide
aaaccacagtagacaatgcaaaggggattt

SEQ ID NO: 301831 - DNA, 30 bp, Artificial Sequence
  Synthetic oligonucleotide
ggtactacaggttcttaacatgatggattt

SEQ ID NO: 301832 - DNA, 30 bp, Artificial Sequence
  Synthetic oligonucleotide
ttccgttttcagaaagtcgtgtgtggattt

SEQ ID NO: 301833 - DNA, 30 bp, Artificial Sequence
  Synthetic oligonucleotide
attgatcgggggacatagtgaaaatgattt

SEQ ID NO: 301834 - DNA, 30 bp, Artificial Sequence
  Synthetic oligonucleotide
caaccggtgtcagcctgccgaccgtgattt

SEQ ID NO: 301835 - DNA, 30 bp, Artificial Sequence
  Synthetic oligonucleotide
gcgtagacttttagcaaaggtgattgattt

SEQ ID NO: 301836 - DNA, 30 bp, Artificial Sequence
  Synthetic oligonucleotide
cactaacagttgcacatcgtggtaatattt

SEQ ID NO: 301837 - DNA, 30 bp, Artificial Sequence
  Synthetic oligonucleotide
caacgaattcgtgcaaacccccgcatattt

SEQ ID NO: 301838 - DNA, 30 bp, Artificial Sequence
  Synthetic oligonucleotide
actttgtccagtgaacggcatttgatattt

SEQ ID NO: 301839 - DNA, 30 bp, Artificial Sequence
  Synthetic oligonucleotide
ttcgacctgcgatggagagtgggtatattt

SEQ ID NO: 301840 - DNA, 30 bp, Artificial Sequence
  Synthetic oligonucleotide
cacaactaactaggttagacgaagctattt

SEQ ID NO: 301841 - DNA, 30 bp, Artificial Sequence
  Synthetic oligonucleotide
agcccgtccatttcgaaggggagagtattt

SEQ ID NO: 301842 - DNA, 30 bp, Artificial Sequence
  Synthetic oligonucleotide
ccagatgagtcctcatagtgttgagtattt

SEQ ID NO: 301843 - DNA, 30 bp, Artificial Sequence
  Synthetic oligonucleotide
caatgttaagccaacaagaatagggtattt

SEQ ID NO: 301844 - DNA, 30 bp, Artificial Sequence
  Synthetic oligonucleotide
acatggatcatctagctacaacgggtattt

SEQ ID NO: 301845 - DNA, 30 bp, Artificial Sequence
  Synthetic oligonucleotide
ctagccggggttcgacggctacgtgtattt

SEQ ID NO: 301846 - DNA, 30 bp, Artificial Sequence
  Synthetic oligonucleotide
ccggtcccactctaaattcagattgtattt

SEQ ID NO: 301847 - DNA, 30 bp, Artificial Sequence
  Synthetic oligonucleotide
ccgctccagcgaatacaaaattacttattt

SEQ ID NO: 301848 - DNA, 30 bp, Artificial Sequence
  Synthetic oligonucleotide
tgactaaggccccgaccggaaacgttattt

SEQ ID NO: 301849 - DNA, 30 bp, Artificial Sequence
  Synthetic oligonucleotide
cgagtaacgtttccgaaccgctatttattt

SEQ ID NO: 301850 - DNA, 30 bp, Artificial Sequence
  Synthetic oligonucleotide
ggaagcatccaggtggacttgagtttattt

SEQ ID NO: 301851 - DNA, 30 bp, Artificial Sequence
  Synthetic oligonucleotide
tcaatctctaagacgggccttcacaacttt

SEQ ID NO: 301852 - DNA, 30 bp, Artificial Sequence
  Synthetic oligonucleotide
acagaatcgaagcgctcgatattcaacttt

SEQ ID NO: 301853 - DNA, 30 bp, Artificial Sequence
  Synthetic oligonucleotide
tatagggtattcgagcgtgtatcacacttt

SEQ ID NO: 301854 - DNA, 30 bp, Artificial Sequence
  Synthetic oligonucleotide
cagccatcagtaccgtttattgtacacttt

SEQ ID NO: 301855 - DNA, 30 bp, Artificial Sequence
  Synthetic oligonucleotide
gcacacagggaaaataaactcctccacttt

SEQ ID NO: 301856 - DNA, 30 bp, Artificial Sequence
  Synthetic oligonucleotide
ccatatgaagccctcagcaaaaagcacttt

SEQ ID NO: 301857 - DNA, 30 bp, Artificial Sequence
  Synthetic oligonucleotide
ttcgtggacctgaaagttacatggcacttt

SEQ ID NO: 301858 - DNA, 30 bp, Artificial Sequence
  Synthetic oligonucleotide
ggaatatgaacactggtcggttatcacttt

SEQ ID NO: 301859 - DNA, 30 bp, Artificial Sequence
  Synthetic oligonucleotide
acacagctgctcgtgcgggagtcggacttt

SEQ ID NO: 301860 - DNA, 30 bp, Artificial Sequence
  Synthetic oligonucleotide
gatcgaatcgacataggtgtcgatgacttt

SEQ ID NO: 301861 - DNA, 30 bp, Artificial Sequence
  Synthetic oligonucleotide
ttattcagtgaagcttatcatgatgacttt

SEQ ID NO: 301862 - DNA, 30 bp, Artificial Sequence
  Synthetic oligonucleotide
gaccatatagataccttttagggtgacttt

SEQ ID NO: 301863 - DNA, 30 bp, Artificial Sequence
  Synthetic oligonucleotide
aagccgtacttggtcaagtggctatacttt

SEQ ID NO: 301864 - DNA, 30 bp, Artificial Sequence
  Synthetic oligonucleotide
tcggagtgcatagatatcaaggcgtacttt

SEQ ID NO: 301865 - DNA, 30 bp, Artificial Sequence
  Synthetic oligonucleotide
gcagggctcgggtagttccgatcaaccttt

SEQ ID NO: 301866 - DNA, 30 bp, Artificial Sequence
  Synthetic oligonucleotide
cttcatgagttcatccaaagtcagaccttt

SEQ ID NO: 301867 - DNA, 30 bp, Artificial Sequence
  Synthetic oligonucleotide
ttcgtgggactacggtttaatccgaccttt

SEQ ID NO: 301868 - DNA, 30 bp, Artificial Sequence
  Synthetic oligonucleotide
aggccaggcgagtattagatcctgaccttt

SEQ ID NO: 301869 - DNA, 30 bp, Artificial Sequence
  Synthetic oligonucleotide
ccaaggtctagttagcgtgccaatcccttt

SEQ ID NO: 301870 - DNA, 30 bp, Artificial Sequence
  Synthetic oligonucleotide
ctggggtacgcgcttacgctacatcccttt

SEQ ID NO: 301871 - DNA, 30 bp, Artificial Sequence
  Synthetic oligonucleotide
gctacactctgttatgaccgccctcccttt

SEQ ID NO: 301872 - DNA, 30 bp, Artificial Sequence
  Synthetic oligonucleotide
catgctatagaatgttgccactttcccttt

SEQ ID NO: 301873 - DNA, 30 bp, Artificial Sequence
  Synthetic oligonucleotide
aaggtcttgactcttctgggatgcgccttt

SEQ ID NO: 301874 - DNA, 30 bp, Artificial Sequence
  Synthetic oligonucleotide
cgaatattagttgttatatttcaggccttt

SEQ ID NO: 301875 - DNA, 30 bp, Artificial Sequence
  Synthetic oligonucleotide
gatataacggatcaataaagcaaatccttt

SEQ ID NO: 301876 - DNA, 30 bp, Artificial Sequence
  Synthetic oligonucleotide
cctgggtctgaattccaggacggatccttt

SEQ ID NO: 301877 - DNA, 30 bp, Artificial Sequence
  Synthetic oligonucleotide
tgaggtaagtcagggattgagagctccttt

SEQ ID NO: 301878 - DNA, 30 bp, Artificial Sequence
  Synthetic oligonucleotide
taagtgctcgatcaagcgactaattccttt

SEQ ID NO: 301879 - DNA, 30 bp, Artificial Sequence
  Synthetic oligonucleotide
tgaatggtcagcatcgtgacgtgaagcttt

SEQ ID NO: 301880 - DNA, 30 bp, Artificial Sequence
  Synthetic oligonucleotide
ttcgtgtacttaaggggtaagcacagcttt

SEQ ID NO: 301881 - DNA, 30 bp, Artificial Sequence
  Synthetic oligonucleotide
gaaaccgtacggcctagcctggacagcttt

SEQ ID NO: 301882 - DNA, 30 bp, Artificial Sequence
  Synthetic oligonucleotide
gtaattgggctagtacgaaattacagcttt

SEQ ID NO: 301883 - DNA, 30 bp, Artificial Sequence
  Synthetic oligonucleotide
ttcaaaggcaaaggttattgcaccagcttt

SEQ ID NO: 301884 - DNA, 30 bp, Artificial Sequence
  Synthetic oligonucleotide
aagtgcttagagcacggaaatacgagcttt

SEQ ID NO: 301885 - DNA, 30 bp, Artificial Sequence
  Synthetic oligonucleotide
tttcgatgggagtacacaaggattagcttt

SEQ ID NO: 301886 - DNA, 30 bp, Artificial Sequence
  Synthetic oligonucleotide
agataaaaatgcgtctccctagaacgcttt

SEQ ID NO: 301887 - DNA, 30 bp, Artificial Sequence
  Synthetic oligonucleotide
ggcgtgccattaactcgccacgctcgcttt

SEQ ID NO: 301888 - DNA, 30 bp, Artificial Sequence
  Synthetic oligonucleotide
agttctaccttgtaagtgccaaagggcttt

SEQ ID NO: 301889 - DNA, 30 bp, Artificial Sequence
  Synthetic oligonucleotide
ggtctcggcgtggtgtgaatggagggcttt

SEQ ID NO: 301890 - DNA, 30 bp, Artificial Sequence
  Synthetic oligonucleotide
atcaaatcatgattgtcagattagggcttt

SEQ ID NO: 301891 - DNA, 30 bp, Artificial Sequence
  Synthetic oligonucleotide
ccggatttcacaagtctgctcactggcttt

SEQ ID NO: 301892 - DNA, 30 bp, Artificial Sequence
  Synthetic oligonucleotide
cctaaattatggaaagtctggactggcttt

SEQ ID NO: 301893 - DNA, 30 bp, Artificial Sequence
  Synthetic oligonucleotide
cgtcagacgagcaacactctaagtggcttt

SEQ ID NO: 301894 - DNA, 30 bp, Artificial Sequence
  Synthetic oligonucleotide
tgaggtactcgaaatgagcacgttggcttt

SEQ ID NO: 301895 - DNA, 30 bp, Artificial Sequence
  Synthetic oligonucleotide
gctgaacgacatattatccacgcatgcttt

SEQ ID NO: 301896 - DNA, 30 bp, Artificial Sequence
  Synthetic oligonucleotide
aaatcgatggcggaagtgagattatgcttt

SEQ ID NO: 301897 - DNA, 30 bp, Artificial Sequence
  Synthetic oligonucleotide
ttagtgacaaagatgtcacatacaatcttt

SEQ ID NO: 301898 - DNA, 30 bp, Artificial Sequence
  Synthetic oligonucleotide
agtcataccgaccaacatacgagcatcttt

SEQ ID NO: 301899 - DNA, 30 bp, Artificial Sequence
  Synthetic oligonucleotide
acggagcaatacaatggtttcatcatcttt

SEQ ID NO: 301900 - DNA, 30 bp, Artificial Sequence
  Synthetic oligonucleotide
gacgcatgtgtagtgcaagtaagtatcttt

SEQ ID NO: 301901 - DNA, 29 bp, Artificial Sequence
  Synthetic oligonucleotide
tctacttgcaattgggcgtacgactcttt

SEQ ID NO: 301902 - DNA, 30 bp, Artificial Sequence
  Synthetic oligonucleotide
ggaacagagtatttgcaataaatcctcttt

SEQ ID NO: 301903 - DNA, 30 bp, Artificial Sequence
  Synthetic oligonucleotide
aagtcaccgccatcaaacgtgaaagtcttt

SEQ ID NO: 301904 - DNA, 30 bp, Artificial Sequence
  Synthetic oligonucleotide
tatgtcccgccaaatatggtgagagtcttt

SEQ ID NO: 301905 - DNA, 30 bp, Artificial Sequence
  Synthetic oligonucleotide
cggagtcatcattaagtgaatgtagtcttt

SEQ ID NO: 301906 - DNA, 30 bp, Artificial Sequence
  Synthetic oligonucleotide
gatgatctctgggagattgaggacgtcttt

SEQ ID NO: 301907 - DNA, 30 bp, Artificial Sequence
  Synthetic oligonucleotide
atcgtcactttctaggacagtcaggtcttt

SEQ ID NO: 301908 - DNA, 30 bp, Artificial Sequence
  Synthetic oligonucleotide
tataaccgatcaatgttagcagccttcttt

SEQ ID NO: 301909 - DNA, 30 bp, Artificial Sequence
  Synthetic oligonucleotide
atagaggctccggcgattatgctcttcttt

SEQ ID NO: 301910 - DNA, 30 bp, Artificial Sequence
  Synthetic oligonucleotide
aatggatgtcttgagcacgatgtgttcttt

SEQ ID NO: 301911 - DNA, 30 bp, Artificial Sequence
  Synthetic oligonucleotide
gagacttagcagtgaatcggtcttttcttt

SEQ ID NO: 301912 - DNA, 30 bp, Artificial Sequence
  Synthetic oligonucleotide
caactggactgttcccgagctcgaaagttt

SEQ ID NO: 301913 - DNA, 30 bp, Artificial Sequence
  Synthetic oligonucleotide
tatactgaatgatatacttgcggaaagttt

SEQ ID NO: 301914 - DNA, 30 bp, Artificial Sequence
  Synthetic oligonucleotide
aaaccctcaaccactaatgtacacaagttt

SEQ ID NO: 301915 - DNA, 30 bp, Artificial Sequence
  Synthetic oligonucleotide
ggcactggctatcccgcccactccaagttt

SEQ ID NO: 301916 - DNA, 30 bp, Artificial Sequence
  Synthetic oligonucleotide
ttctctggaaatgacgagtggctcaagttt

SEQ ID NO: 301917 - DNA, 30 bp, Artificial Sequence
  Synthetic oligonucleotide
tgagcccatctgatctgtggctcgaagttt

SEQ ID NO: 301918 - DNA, 30 bp, Artificial Sequence
  Synthetic oligonucleotide
tagggtaggactttctgccgattgaagttt

SEQ ID NO: 301919 - DNA, 30 bp, Artificial Sequence
  Synthetic oligonucleotide
ggagcagcctcgtgtagttgccctaagttt

SEQ ID NO: 301920 - DNA, 30 bp, Artificial Sequence
  Synthetic oligonucleotide
tcgcctgggaggagttaacgacttaagttt

SEQ ID NO: 301921 - DNA, 30 bp, Artificial Sequence
  Synthetic oligonucleotide
acccgtgtgctgcttttagaagttaagttt

SEQ ID NO: 301922 - DNA, 30 bp, Artificial Sequence
  Synthetic oligonucleotide
gcgttggtatgctagagagcgagccagttt

SEQ ID NO: 301923 - DNA, 30 bp, Artificial Sequence
  Synthetic oligonucleotide
caaatatgaagacagagcttgttagagttt

SEQ ID NO: 301924 - DNA, 30 bp, Artificial Sequence
  Synthetic oligonucleotide
atacgtgcataaatgacaatgcgcgagttt

SEQ ID NO: 301925 - DNA, 30 bp, Artificial Sequence
  Synthetic oligonucleotide
aagcagaagcgaataccgctcctcgagttt

SEQ ID NO: 301926 - DNA, 30 bp, Artificial Sequence
  Synthetic oligonucleotide
ttcaacaattgtcgcggggaagaggagttt

SEQ ID NO: 301927 - DNA, 30 bp, Artificial Sequence
  Synthetic oligonucleotide
agagcgctgccggggcatccaccggagttt

SEQ ID NO: 301928 - DNA, 30 bp, Artificial Sequence
  Synthetic oligonucleotide
cttccaagttccattctataattggagttt

SEQ ID NO: 301929 - DNA, 30 bp, Artificial Sequence
  Synthetic oligonucleotide
aattcgctacgcccatcgtgccagtagttt

SEQ ID NO: 301930 - DNA, 31 bp, Artificial Sequence
  Synthetic oligonucleotide
taggtccgtccccaactataaatcgtagttt

SEQ ID NO: 301931 - DNA, 30 bp, Artificial Sequence
  Synthetic oligonucleotide
atgcaaagactgtggcggatgaggtagttt

SEQ ID NO: 301932 - DNA, 30 bp, Artificial Sequence
  Synthetic oligonucleotide
atcacataaatgcgatgcccaatgtagttt

SEQ ID NO: 301933 - DNA, 30 bp, Artificial Sequence
  Synthetic oligonucleotide
atattaattgcggaaactgtcttgtagttt

SEQ ID NO: 301934 - DNA, 30 bp, Artificial Sequence
  Synthetic oligonucleotide
tccagacaggcaacacctcagttgtagttt

SEQ ID NO: 301935 - DNA, 30 bp, Artificial Sequence
  Synthetic oligonucleotide
cttgctgaagaacaacgtccttattagttt

SEQ ID NO: 301936 - DNA, 30 bp, Artificial Sequence
  Synthetic oligonucleotide
aaaccggcctcactgtgctaatcttagttt

SEQ ID NO: 301937 - DNA, 30 bp, Artificial Sequence
  Synthetic oligonucleotide
gggattatatatccgtcacagtgttagttt

SEQ ID NO: 301938 - DNA, 30 bp, Artificial Sequence
  Synthetic oligonucleotide
gttccggtgtatgggtggtactcaacgttt

SEQ ID NO: 301939 - DNA, 30 bp, Artificial Sequence
  Synthetic oligonucleotide
aattaatcccggacgtcaattgtcacgttt

SEQ ID NO: 301940 - DNA, 30 bp, Artificial Sequence
  Synthetic oligonucleotide
aacaccactagcggagtctaaaagacgttt

SEQ ID NO: 301941 - DNA, 30 bp, Artificial Sequence
  Synthetic oligonucleotide
caccgcaaatcaaacagcttgcggacgttt

SEQ ID NO: 301942 - DNA, 30 bp, Artificial Sequence
  Synthetic oligonucleotide
ggcaacccatccaatcccgcacaaccgttt

SEQ ID NO: 301943 - DNA, 30 bp, Artificial Sequence
  Synthetic oligonucleotide
caaacaggcaagtattggaggctcccgttt

SEQ ID NO: 301944 - DNA, 30 bp, Artificial Sequence
  Synthetic oligonucleotide
ttatcctgttcaatttccgccaccgcgttt

SEQ ID NO: 301945 - DNA, 30 bp, Artificial Sequence
  Synthetic oligonucleotide
caactaactcgtcaaggatgtatcgcgttt

SEQ ID NO: 301946 - DNA, 30 bp, Artificial Sequence
  Synthetic oligonucleotide
aacaaaacaccgtcgattcttatcgcgttt

SEQ ID NO: 301947 - DNA, 30 bp, Artificial Sequence
  Synthetic oligonucleotide
tcacttagcttgaactacatgccggcgttt

SEQ ID NO: 301948 - DNA, 30 bp, Artificial Sequence
  Synthetic oligonucleotide
gttccgtgcgcatgtacctaccgttcgttt

SEQ ID NO: 301949 - DNA, 30 bp, Artificial Sequence
  Synthetic oligonucleotide
ttcgaatggccgagttaaatccgaaggttt

SEQ ID NO: 301950 - DNA, 30 bp, Artificial Sequence
  Synthetic oligonucleotide
ctgacgccggtgtgttctcagataaggttt

SEQ ID NO: 301951 - DNA, 30 bp, Artificial Sequence
  Synthetic oligonucleotide
accgcgaatcatacatgaatcatcaggttt

SEQ ID NO: 301952 - DNA, 30 bp, Artificial Sequence
  Synthetic oligonucleotide
gaagtcggcacgtgggttgagaagaggttt

SEQ ID NO: 301953 - DNA, 30 bp, Artificial Sequence
  Synthetic oligonucleotide
ctatgggtacgtgcaaggagacctaggttt

SEQ ID NO: 301954 - DNA, 30 bp, Artificial Sequence
  Synthetic oligonucleotide
ttctaccggtagaatttatcaagtaggttt

SEQ ID NO: 301955 - DNA, 30 bp, Artificial Sequence
  Synthetic oligonucleotide
tttgcaaacgcaattgcgctcaaacggttt

SEQ ID NO: 301956 - DNA, 30 bp, Artificial Sequence
  Synthetic oligonucleotide
gatatgaggctgccttgatatggacggttt

SEQ ID NO: 301957 - DNA, 30 bp, Artificial Sequence
  Synthetic oligonucleotide
aggtccggacagtgtgcatatttccggttt

SEQ ID NO: 301958 - DNA, 30 bp, Artificial Sequence
  Synthetic oligonucleotide
ctctaatcttctccagtggtgttgcggttt

SEQ ID NO: 301959 - DNA, 30 bp, Artificial Sequence
  Synthetic oligonucleotide
tgtaaccggtgagatgattgataagggttt

SEQ ID NO: 301960 - DNA, 30 bp, Artificial Sequence
  Synthetic oligonucleotide
aagaatgcaagagttttatacagagggttt

SEQ ID NO: 301961 - DNA, 30 bp, Artificial Sequence
  Synthetic oligonucleotide
gaaccggtatgaaaatgtacgtacgggttt

SEQ ID NO: 301962 - DNA, 30 bp, Artificial Sequence
  Synthetic oligonucleotide
tatgcctataaaccttgccggaaggggttt

SEQ ID NO: 301963 - DNA, 30 bp, Artificial Sequence
  Synthetic oligonucleotide
ctgtgtgatgaggtgtcgtgctgggggttt

SEQ ID NO: 301964 - DNA, 30 bp, Artificial Sequence
  Synthetic oligonucleotide
aagtgcgtgctaacggtgcttatggggttt

SEQ ID NO: 301965 - DNA, 30 bp, Artificial Sequence
  Synthetic oligonucleotide
ccactcgctggctaggggtgtaatgggttt

SEQ ID NO: 301966 - DNA, 30 bp, Artificial Sequence
  Synthetic oligonucleotide
tgcgtaataaaaagacctcaccgtgggttt

SEQ ID NO: 301967 - DNA, 30 bp, Artificial Sequence
  Synthetic oligonucleotide
aatcgcgcttgcgacactcatccatggttt

SEQ ID NO: 301968 - DNA, 30 bp, Artificial Sequence
  Synthetic oligonucleotide
agcaattttagtgtgcaatcaggatggttt

SEQ ID NO: 301969 - DNA, 30 bp, Artificial Sequence
  Synthetic oligonucleotide
tggtatttaggatagaatgaatgatggttt

SEQ ID NO: 301970 - DNA, 30 bp, Artificial Sequence
  Synthetic oligonucleotide
aagtgaatacagtttaaatcagtgtggttt

SEQ ID NO: 301971 - DNA, 30 bp, Artificial Sequence
  Synthetic oligonucleotide
tctagggaaaaatctggggaggcttggttt

SEQ ID NO: 301972 - DNA, 30 bp, Artificial Sequence
  Synthetic oligonucleotide
aataaaaactcaactctgcagtcttggttt

SEQ ID NO: 301973 - DNA, 30 bp, Artificial Sequence
  Synthetic oligonucleotide
ataccgacgcggggtgttcgggcgatgttt

SEQ ID NO: 301974 - DNA, 30 bp, Artificial Sequence
  Synthetic oligonucleotide
agatctggctctgtaagatggtcgatgttt

SEQ ID NO: 301975 - DNA, 30 bp, Artificial Sequence
  Synthetic oligonucleotide
aacatgcaacagtagggaattctgatgttt

SEQ ID NO: 301976 - DNA, 30 bp, Artificial Sequence
  Synthetic oligonucleotide
agtttaccggcactctccggaagtatgttt

SEQ ID NO: 301977 - DNA, 30 bp, Artificial Sequence
  Synthetic oligonucleotide
gcggatattatcaagcagcccgaactgttt

SEQ ID NO: 301978 - DNA, 30 bp, Artificial Sequence
  Synthetic oligonucleotide
agtaaaacattgttagcgctttgactgttt

SEQ ID NO: 301979 - DNA, 30 bp, Artificial Sequence
  Synthetic oligonucleotide
cacaaagattcttgtaatatacacctgttt

SEQ ID NO: 301980 - DNA, 31 bp, Artificial Sequence
  Synthetic oligonucleotide
gagttgcgaagacttgccggttaccctgttt

SEQ ID NO: 301981 - DNA, 30 bp, Artificial Sequence
  Synthetic oligonucleotide
tcgaacgaacattgcactgaagccctgttt

SEQ ID NO: 301982 - DNA, 30 bp, Artificial Sequence
  Synthetic oligonucleotide
ttcttgctccaaaggctgctcggcctgttt

SEQ ID NO: 301983 - DNA, 30 bp, Artificial Sequence
  Synthetic oligonucleotide
caatagcgctcctgcgtcgcgtcgctgttt

SEQ ID NO: 301984 - DNA, 31 bp, Artificial Sequence
  Synthetic oligonucleotide
atgtcggataactctacctttttatctgttt

SEQ ID NO: 301985 - DNA, 30 bp, Artificial Sequence
  Synthetic oligonucleotide
caaagatgttgaattccggaataagtgttt

SEQ ID NO: 301986 - DNA, 30 bp, Artificial Sequence
  Synthetic oligonucleotide
atgttacctcgaatcgtcctcggagtgttt

SEQ ID NO: 301987 - DNA, 30 bp, Artificial Sequence
  Synthetic oligonucleotide
ctaaggtccagtgtgagtactagcgtgttt

SEQ ID NO: 301988 - DNA, 30 bp, Artificial Sequence
  Synthetic oligonucleotide
gctggagggagtgtagttgcaacattgttt

SEQ ID NO: 301989 - DNA, 30 bp, Artificial Sequence
  Synthetic oligonucleotide
gtacgcgaataattaaattgttcattgttt

SEQ ID NO: 301990 - DNA, 30 bp, Artificial Sequence
  Synthetic oligonucleotide
cacttagtttgctttaatctgtacttgttt

SEQ ID NO: 301991 - DNA, 30 bp, Artificial Sequence
  Synthetic oligonucleotide
tgcgaagtcctcaggcaagtagcgttgttt

SEQ ID NO: 301992 - DNA, 30 bp, Artificial Sequence
  Synthetic oligonucleotide
tttatctggttgtatactgcatcgttgttt

SEQ ID NO: 301993 - DNA, 30 bp, Artificial Sequence
  Synthetic oligonucleotide
tgtcagggcctcgcaaccgaatatttgttt

SEQ ID NO: 301994 - DNA, 30 bp, Artificial Sequence
  Synthetic oligonucleotide
gagcctaaggggtgaattgtagaaaatttt

SEQ ID NO: 301995 - DNA, 30 bp, Artificial Sequence
  Synthetic oligonucleotide
gatagggagggtgcacaccttagcaatttt

SEQ ID NO: 301996 - DNA, 30 bp, Artificial Sequence
  Synthetic oligonucleotide
caagctcaatgatattgggatcagaatttt

SEQ ID NO: 301997 - DNA, 30 bp, Artificial Sequence
  Synthetic oligonucleotide
tttagtatgggccaaatcactcagaatttt

SEQ ID NO: 301998 - DNA, 30 bp, Artificial Sequence
  Synthetic oligonucleotide
gcgtgcctctcaacggtcacctcgaatttt

SEQ ID NO: 301999 - DNA, 30 bp, Artificial Sequence
  Synthetic oligonucleotide
atgtgcgttaactcaaggtcggaacatttt

SEQ ID NO: 302000 - DNA, 30 bp, Artificial Sequence
  Synthetic oligonucleotide
gcattaaatcgtcaaaccttggtacatttt

SEQ ID NO: 302001 - DNA, 30 bp, Artificial Sequence
  Synthetic oligonucleotide
ccggtgaggggggccatgatattccatttt

SEQ ID NO: 302002 - DNA, 30 bp, Artificial Sequence
  Synthetic oligonucleotide
tccgtggtacctgaggtacacaaagatttt

SEQ ID NO: 302003 - DNA, 30 bp, Artificial Sequence
  Synthetic oligonucleotide
cataaaagacgtctacttatgacagatttt

SEQ ID NO: 302004 - DNA, 30 bp, Artificial Sequence
  Synthetic oligonucleotide
ctcagagttgcagcatgtcaggtagatttt

SEQ ID NO: 302005 - DNA, 30 bp, Artificial Sequence
  Synthetic oligonucleotide
aagaagttctcggcgacatgcacggatttt

SEQ ID NO: 302006 - DNA, 30 bp, Artificial Sequence
  Synthetic oligonucleotide
ggggtaaattatgctctcccctcggatttt

SEQ ID NO: 302007 - DNA, 30 bp, Artificial Sequence
  Synthetic oligonucleotide
taaccctaggggacaaattgcctggatttt

SEQ ID NO: 302008 - DNA, 30 bp, Artificial Sequence
  Synthetic oligonucleotide
ggtgatagagctgtgcaggagtgtgatttt

SEQ ID NO: 302009 - DNA, 30 bp, Artificial Sequence
  Synthetic oligonucleotide
acggggatacaatggttgcgtccatatttt

SEQ ID NO: 302010 - DNA, 30 bp, Artificial Sequence
  Synthetic oligonucleotide
gtaccatcatgtgctatttttccctatttt

SEQ ID NO: 302011 - DNA, 30 bp, Artificial Sequence
  Synthetic oligonucleotide
tcgagctacttttcagctcagtcctatttt

SEQ ID NO: 302012 - DNA, 30 bp, Artificial Sequence
  Synthetic oligonucleotide
caacaagcgtctattcgttagcgctatttt

SEQ ID NO: 302013 - DNA, 30 bp, Artificial Sequence
  Synthetic oligonucleotide
agacattgggcaacgtttttcctctatttt

SEQ ID NO: 302014 - DNA, 30 bp, Artificial Sequence
  Synthetic oligonucleotide
gtttagcaaagcacgtattccgattatttt

SEQ ID NO: 302015 - DNA, 30 bp, Artificial Sequence
  Synthetic oligonucleotide
gggactgccgactgtattttaataactttt

SEQ ID NO: 302016 - DNA, 30 bp, Artificial Sequence
  Synthetic oligonucleotide
aacgaaggggattgctcgcgcataactttt

SEQ ID NO: 302017 - DNA, 30 bp, Artificial Sequence
  Synthetic oligonucleotide
acatagcataaaccaaaaggtgtcactttt

SEQ ID NO: 302018 - DNA, 30 bp, Artificial Sequence
  Synthetic oligonucleotide
cagaaacagcgccgactggctaggactttt

SEQ ID NO: 302019 - DNA, 30 bp, Artificial Sequence
  Synthetic oligonucleotide
tgccagagttcacagatgattgggactttt

SEQ ID NO: 302020 - DNA, 30 bp, Artificial Sequence
  Synthetic oligonucleotide
atcgagtcagattgtattgatgatactttt

SEQ ID NO: 302021 - DNA, 30 bp, Artificial Sequence
  Synthetic oligonucleotide
acagtacggggtcgtatgcttagtactttt

SEQ ID NO: 302022 - DNA, 30 bp, Artificial Sequence
  Synthetic oligonucleotide
ctatgccggctacgcttgaagattactttt

SEQ ID NO: 302023 - DNA, 30 bp, Artificial Sequence
  Synthetic oligonucleotide
aaatgtagagcactataagctgagcctttt

SEQ ID NO: 302024 - DNA, 30 bp, Artificial Sequence
  Synthetic oligonucleotide
tcgaaacgcacgagggggaataatcctttt

SEQ ID NO: 302025 - DNA, 30 bp, Artificial Sequence
  Synthetic oligonucleotide
atacgtacccgcagagacctagcagctttt

SEQ ID NO: 302026 - DNA, 30 bp, Artificial Sequence
  Synthetic oligonucleotide
tcggtcaatgcacgcttcagacgagctttt

SEQ ID NO: 302027 - DNA, 30 bp, Artificial Sequence
  Synthetic oligonucleotide
cgcaaggcagccagatcggtcctagctttt

SEQ ID NO: 302028 - DNA, 30 bp, Artificial Sequence
  Synthetic oligonucleotide
gtggtcgacccacctcgctccttagctttt

SEQ ID NO: 302029 - DNA, 30 bp, Artificial Sequence
  Synthetic oligonucleotide
tagcatgctcggtggacggggccggctttt

SEQ ID NO: 302030 - DNA, 30 bp, Artificial Sequence
  Synthetic oligonucleotide
ctgggaccgaattagtgtagcagttctttt

SEQ ID NO: 302031 - DNA, 30 bp, Artificial Sequence
  Synthetic oligonucleotide
tgagggccctcccgacatgttagttctttt

SEQ ID NO: 302032 - DNA, 30 bp, Artificial Sequence
  Synthetic oligonucleotide
accgggtttgtttctaatgtgccaagtttt

SEQ ID NO: 302033 - DNA, 30 bp, Artificial Sequence
  Synthetic oligonucleotide
aaacatatatttatcgtggatgtaagtttt

SEQ ID NO: 302034 - DNA, 30 bp, Artificial Sequence
  Synthetic oligonucleotide
tctaagtgtagtaacctacgctccagtttt

SEQ ID NO: 302035 - DNA, 30 bp, Artificial Sequence
  Synthetic oligonucleotide
ggttgtgtgtatctaatgcattctagtttt

SEQ ID NO: 302036 - DNA, 30 bp, Artificial Sequence
  Synthetic oligonucleotide
atgccccgagcttcttagtgttatcgtttt

SEQ ID NO: 302037 - DNA, 30 bp, Artificial Sequence
  Synthetic oligonucleotide
aaacatgaattaagaagggctacaggtttt

SEQ ID NO: 302038 - DNA, 30 bp, Artificial Sequence
  Synthetic oligonucleotide
gaatatgcaaagtaaaaggtatgcggtttt

SEQ ID NO: 302039 - DNA, 30 bp, Artificial Sequence
  Synthetic oligonucleotide
ggcgaaaccgtccgggccgcgtgcggtttt

SEQ ID NO: 302040 - DNA, 30 bp, Artificial Sequence
  Synthetic oligonucleotide
ccgtgggccccgatacaaatcgcgggtttt

SEQ ID NO: 302041 - DNA, 30 bp, Artificial Sequence
  Synthetic oligonucleotide
gccgaggggtgaggaattagggtgggtttt

SEQ ID NO: 302042 - DNA, 30 bp, Artificial Sequence
  Synthetic oligonucleotide
cacgctccatggctgtatacatgtggtttt

SEQ ID NO: 302043 - DNA, 30 bp, Artificial Sequence
  Synthetic oligonucleotide
cccgctcaggcaatcgacgatcttggtttt

SEQ ID NO: 302044 - DNA, 30 bp, Artificial Sequence
  Synthetic oligonucleotide
tgccaggaggaaagaaactgccaatgtttt

SEQ ID NO: 302045 - DNA, 30 bp, Artificial Sequence
  Synthetic oligonucleotide
atagcgaagggaatcagaagtttctgtttt

SEQ ID NO: 302046 - DNA, 30 bp, Artificial Sequence
  Synthetic oligonucleotide
tggcatattgtgatactcgaagaaattttt

SEQ ID NO: 302047 - DNA, 30 bp, Artificial Sequence
  Synthetic oligonucleotide
gaaccgcgttatgaattgataccaattttt

SEQ ID NO: 302048 - DNA, 30 bp, Artificial Sequence
  Synthetic oligonucleotide
aggccattatttctagtcatggcaattttt

SEQ ID NO: 302049 - DNA, 30 bp, Artificial Sequence
  Synthetic oligonucleotide
tcttgatgtcagccggcgctagagattttt

SEQ ID NO: 302050 - DNA, 30 bp, Artificial Sequence
  Synthetic oligonucleotide
ccgaaacctttgtcatttcgtccgattttt

SEQ ID NO: 302051 - DNA, 30 bp, Artificial Sequence
  Synthetic oligonucleotide
tattgcgggcattatagccgtgtgattttt

SEQ ID NO: 302052 - DNA, 30 bp, Artificial Sequence
  Synthetic oligonucleotide
taggaagtaaacatcgttggaagtattttt

SEQ ID NO: 302053 - DNA, 30 bp, Artificial Sequence
  Synthetic oligonucleotide
tctgtgcgttatggctaaaggttagttttt

SEQ ID NO: 302054 - DNA, 30 bp, Artificial Sequence
  Synthetic oligonucleotide
gcgctcgagactggatagtgtttagttttt

SEQ ID NO: 302055 - DNA, 30 bp, Artificial Sequence
  Synthetic oligonucleotide
gggagccccggttaactctaagccgttttt

SEQ ID NO: 302056 - DNA, 30 bp, Artificial Sequence
  Synthetic oligonucleotide
cgtttatagtaaagcatatgttaggttttt

SEQ ID NO: 302057 - DNA, 30 bp, Artificial Sequence
  Synthetic oligonucleotide
gatccataaggcatagatatgagggttttt

SEQ ID NO: 302058 - DNA, 30 bp, Artificial Sequence
  Synthetic oligonucleotide
agggcgattagagaggacacctgggttttt

SEQ ID NO: 302059 - DNA, 30 bp, Artificial Sequence
  Synthetic oligonucleotide
tgccgtgtgacaagtgatacacatgttttt

SEQ ID NO: 302060 - DNA, 30 bp, Artificial Sequence
  Synthetic oligonucleotide
ctcgccagtctctcgtccgtctctgttttt

SEQ ID NO: 302061 - DNA, 30 bp, Artificial Sequence
  Synthetic oligonucleotide
gaacaccgttaagggctgcctcgatttttt

SEQ ID NO: 302062 - DNA, 30 bp, Artificial Sequence
  Synthetic oligonucleotide
ctgctagttataccttctccttactttttt

SEQ ID NO: 302063 - DNA, 30 bp, Artificial Sequence
  Synthetic oligonucleotide
ctacataaccggcaccaacactcgtttttt

SEQ ID NO: 302064 - DNA, 30 bp, Artificial Sequence
  Synthetic oligonucleotide
atggggtgttaaagaaagagggattttttt

SEQ ID NO: 302065 - DNA, 30 bp, Artificial Sequence
  Synthetic oligonucleotide
gtgggcctgcgtgtaatgaagctaaaaaaa

SEQ ID NO: 302066 - DNA, 30 bp, Artificial Sequence
  Synthetic oligonucleotide
ggctcggcgccattagtgagggtaaaaaaa

SEQ ID NO: 302067 - DNA, 30 bp, Artificial Sequence
  Synthetic oligonucleotide
tgaaatgtcctaagcgcccgcgccaaaaaa

SEQ ID NO: 302068 - DNA, 30 bp, Artificial Sequence
  Synthetic oligonucleotide
atgctacgccttcgagcgcctatcaaaaaa

SEQ ID NO: 302069 - DNA, 30 bp, Artificial Sequence
  Synthetic oligonucleotide
tgccagaagtcaagtcagtggccgaaaaaa

SEQ ID NO: 302070 - DNA, 30 bp, Artificial Sequence
  Synthetic oligonucleotide
gtcaatggaaattcgtatagaaggaaaaaa

SEQ ID NO: 302071 - DNA, 30 bp, Artificial Sequence
  Synthetic oligonucleotide
cacagcgggcccgtaacgtctaaacaaaaa

SEQ ID NO: 302072 - DNA, 30 bp, Artificial Sequence
  Synthetic oligonucleotide
tagttcacggagggatgtagaatacaaaaa

SEQ ID NO: 302073 - DNA, 30 bp, Artificial Sequence
  Synthetic oligonucleotide
agtccctgtcctagatatgataaccaaaaa

SEQ ID NO: 302074 - DNA, 30 bp, Artificial Sequence
  Synthetic oligonucleotide
gaaagtgttaggctgcatgttgcccaaaaa

SEQ ID NO: 302075 - DNA, 30 bp, Artificial Sequence
  Synthetic oligonucleotide
cattgtcttaaattttggataaagcaaaaa

SEQ ID NO: 302076 - DNA, 30 bp, Artificial Sequence
  Synthetic oligonucleotide
tacggcgcactgctcccaccgcggcaaaaa

SEQ ID NO: 302077 - DNA, 30 bp, Artificial Sequence
  Synthetic oligonucleotide
tcggcgtggccctgatgtctaaatcaaaaa

SEQ ID NO: 302078 - DNA, 30 bp, Artificial Sequence
  Synthetic oligonucleotide
ctgttatctgccgttagagcgcgtcaaaaa

SEQ ID NO: 302079 - DNA, 30 bp, Artificial Sequence
  Synthetic oligonucleotide
cgtattacgattaggtaattacttcaaaaa

SEQ ID NO: 302080 - DNA, 30 bp, Artificial Sequence
  Synthetic oligonucleotide
acaccggctagctattgaccgaaagaaaaa

SEQ ID NO: 302081 - DNA, 30 bp, Artificial Sequence
  Synthetic oligonucleotide
ttaaataacgacattattaacagagaaaaa

SEQ ID NO: 302082 - DNA, 30 bp, Artificial Sequence
  Synthetic oligonucleotide
atccgtcggaaagagtctagtacggaaaaa

SEQ ID NO: 302083 - DNA, 30 bp, Artificial Sequence
  Synthetic oligonucleotide
tcctgaaaaagggtttattcgttggaaaaa

SEQ ID NO: 302084 - DNA, 30 bp, Artificial Sequence
  Synthetic oligonucleotide
aaaagagacagcagaaagcattgtgaaaaa

SEQ ID NO: 302085 - DNA, 30 bp, Artificial Sequence
  Synthetic oligonucleotide
taagctttctgtaccctataatttgaaaaa

SEQ ID NO: 302086 - DNA, 30 bp, Artificial Sequence
  Synthetic oligonucleotide
acatgaaggcagtcaggatccaaataaaaa

SEQ ID NO: 302087 - DNA, 30 bp, Artificial Sequence
  Synthetic oligonucleotide
ctggatagccctattggtctttgctaaaaa

SEQ ID NO: 302088 - DNA, 30 bp, Artificial Sequence
  Synthetic oligonucleotide
aatagctaggttagctctgaaatctaaaaa

SEQ ID NO: 302089 - DNA, 30 bp, Artificial Sequence
  Synthetic oligonucleotide
ctattccgcgaaaaaatacctatctaaaaa

SEQ ID NO: 302090 - DNA, 30 bp, Artificial Sequence
  Synthetic oligonucleotide
atgttgacgttggtgcatagcttctaaaaa

SEQ ID NO: 302091 - DNA, 30 bp, Artificial Sequence
  Synthetic oligonucleotide
gagtctcacgtcggagtaactacgtaaaaa

SEQ ID NO: 302092 - DNA, 30 bp, Artificial Sequence
  Synthetic oligonucleotide
gggccagggccaaaggttctagcgtaaaaa

SEQ ID NO: 302093 - DNA, 30 bp, Artificial Sequence
  Synthetic oligonucleotide
gaaacgcttccgaagacaaacaggtaaaaa

SEQ ID NO: 302094 - DNA, 30 bp, Artificial Sequence
  Synthetic oligonucleotide
attccgtgggtcttcagctataggtaaaaa

SEQ ID NO: 302095 - DNA, 30 bp, Artificial Sequence
  Synthetic oligonucleotide
ctcaatgatacccctaggttcaattaaaaa

SEQ ID NO: 302096 - DNA, 30 bp, Artificial Sequence
  Synthetic oligonucleotide
atcattcaggatgccgtcgcgtcttaaaaa

SEQ ID NO: 302097 - DNA, 30 bp, Artificial Sequence
  Synthetic oligonucleotide
atgcggttgattatttagagggaaacaaaa

SEQ ID NO: 302098 - DNA, 30 bp, Artificial Sequence
  Synthetic oligonucleotide
gtgtaaggtactcgcatcatgacaacaaaa

SEQ ID NO: 302099 - DNA, 30 bp, Artificial Sequence
  Synthetic oligonucleotide
tctcatgccgtaaaaagtagcataacaaaa

SEQ ID NO: 302100 - DNA, 30 bp, Artificial Sequence
  Synthetic oligonucleotide
aagtctaataagtaagcctttaacacaaaa

SEQ ID NO: 302101 - DNA, 30 bp, Artificial Sequence
  Synthetic oligonucleotide
acttttgccatcgcgaggcacaatacaaaa

SEQ ID NO: 302102 - DNA, 30 bp, Artificial Sequence
  Synthetic oligonucleotide
aaacggaaccataggtattaatttacaaaa

SEQ ID NO: 302103 - DNA, 30 bp, Artificial Sequence
  Synthetic oligonucleotide
gcttcagcgtcctagactaggctaccaaaa

SEQ ID NO: 302104 - DNA, 30 bp, Artificial Sequence
  Synthetic oligonucleotide
ctctcgcgaagaggtaagtggttaccaaaa

SEQ ID NO: 302105 - DNA, 30 bp, Artificial Sequence
  Synthetic oligonucleotide
actaatacaacccttccccctcacccaaaa

SEQ ID NO: 302106 - DNA, 30 bp, Artificial Sequence
  Synthetic oligonucleotide
agtaatcccttgtaggcaaagtacccaaaa

SEQ ID NO: 302107 - DNA, 30 bp, Artificial Sequence
  Synthetic oligonucleotide
tagtgacaccaaccacttctactgccaaaa

SEQ ID NO: 302108 - DNA, 30 bp, Artificial Sequence
  Synthetic oligonucleotide
taaacctttaatgacccgtcaggtccaaaa

SEQ ID NO: 302109 - DNA, 30 bp, Artificial Sequence
  Synthetic oligonucleotide
aaagatctgtctcccatggatcgcgcaaaa

SEQ ID NO: 302110 - DNA, 30 bp, Artificial Sequence
  Synthetic oligonucleotide
tattacaattcaggagccacgggggcaaaa

SEQ ID NO: 302111 - DNA, 30 bp, Artificial Sequence
  Synthetic oligonucleotide
gctctcaaatgtgaccggtgataatcaaaa

SEQ ID NO: 302112 - DNA, 30 bp, Artificial Sequence
  Synthetic oligonucleotide
tgtaactactcagtcgaaggcacatcaaaa

SEQ ID NO: 302113 - DNA, 30 bp, Artificial Sequence
  Synthetic oligonucleotide
cagtattagacagaatcgaagaactcaaaa

SEQ ID NO: 302114 - DNA, 30 bp, Artificial Sequence
  Synthetic oligonucleotide
gaaaaaataacaatgatatggaactcaaaa

SEQ ID NO: 302115 - DNA, 31 bp, Artificial Sequence
  Synthetic oligonucleotide
cgttgtagagggtactagaatagactcaaaa

SEQ ID NO: 302116 - DNA, 30 bp, Artificial Sequence
  Synthetic oligonucleotide
gacacctactctactgaccgctcgtcaaaa

SEQ ID NO: 302117 - DNA, 30 bp, Artificial Sequence
  Synthetic oligonucleotide
gtccaggccagggctataccgcggtcaaaa

SEQ ID NO: 302118 - DNA, 30 bp, Artificial Sequence
  Synthetic oligonucleotide
gctacagctctggtcccaatttattcaaaa

SEQ ID NO: 302119 - DNA, 30 bp, Artificial Sequence
  Synthetic oligonucleotide
aatggaaaaggctttgcctcattttcaaaa

SEQ ID NO: 302120 - DNA, 30 bp, Artificial Sequence
  Synthetic oligonucleotide
gacgccggcggttaagacctcaaaagaaaa

SEQ ID NO: 302121 - DNA, 30 bp, Artificial Sequence
  Synthetic oligonucleotide
gacatggcctggcagtatggtaaaagaaaa

SEQ ID NO: 302122 - DNA, 30 bp, Artificial Sequence
  Synthetic oligonucleotide
gcgcatgtatttagatagaagtcaagaaaa

SEQ ID NO: 302123 - DNA, 30 bp, Artificial Sequence
  Synthetic oligonucleotide
ggtggccaaaatcatcttgcttgaagaaaa

SEQ ID NO: 302124 - DNA, 30 bp, Artificial Sequence
  Synthetic oligonucleotide
cttaaccgcgccacaggaaatataagaaaa

SEQ ID NO: 302125 - DNA, 30 bp, Artificial Sequence
  Synthetic oligonucleotide
tgagttcgtagttagaactataccagaaaa

SEQ ID NO: 302126 - DNA, 30 bp, Artificial Sequence
  Synthetic oligonucleotide
gcgatgcctcttgacactgcgacgagaaaa

SEQ ID NO: 302127 - DNA, 30 bp, Artificial Sequence
  Synthetic oligonucleotide
tggaacgggccttaattgaatgcgagaaaa

SEQ ID NO: 302128 - DNA, 30 bp, Artificial Sequence
  Synthetic oligonucleotide
cccaatgtatgtcccctggtcgcccgaaaa

SEQ ID NO: 302129 - DNA, 30 bp, Artificial Sequence
  Synthetic oligonucleotide
cataacgcttgggattttaactcccgaaaa

SEQ ID NO: 302130 - DNA, 30 bp, Artificial Sequence
  Synthetic oligonucleotide
tatgccctgcagtgttcttaggcgcgaaaa

SEQ ID NO: 302131 - DNA, 30 bp, Artificial Sequence
  Synthetic oligonucleotide
ctatatctctattatgttatccctcgaaaa

SEQ ID NO: 302132 - DNA, 30 bp, Artificial Sequence
  Synthetic oligonucleotide
ggggaaccacatactttagattgtcgaaaa

SEQ ID NO: 302133 - DNA, 30 bp, Artificial Sequence
  Synthetic oligonucleotide
gccatgtccgccgtacgtacaaaaggaaaa

SEQ ID NO: 302134 - DNA, 30 bp, Artificial Sequence
  Synthetic oligonucleotide
gcgcaagtagagcacctcgatgcaggaaaa

SEQ ID NO: 302135 - DNA, 30 bp, Artificial Sequence
  Synthetic oligonucleotide
agaaatcaatactcggttcactcaggaaaa

SEQ ID NO: 302136 - DNA, 30 bp, Artificial Sequence
  Synthetic oligonucleotide
tcagctaaaattccatgacgcgacggaaaa

SEQ ID NO: 302137 - DNA, 30 bp, Artificial Sequence
  Synthetic oligonucleotide
gctacttttgatcaaccctgtaagggaaaa

SEQ ID NO: 302138 - DNA, 30 bp, Artificial Sequence
  Synthetic oligonucleotide
ttatgctgggtcatccggctcacgggaaaa

SEQ ID NO: 302139 - DNA, 30 bp, Artificial Sequence
  Synthetic oligonucleotide
tatttcgacgggccatgaaaactgggaaaa

SEQ ID NO: 302140 - DNA, 30 bp, Artificial Sequence
  Synthetic oligonucleotide
ttcatagctaatgggttgtgcctgggaaaa

SEQ ID NO: 302141 - DNA, 31 bp, Artificial Sequence
  Synthetic oligonucleotide
tctacgcctccaatgtgttgccggtggaaaa

SEQ ID NO: 302142 - DNA, 30 bp, Artificial Sequence
  Synthetic oligonucleotide
gaatacacagcaggaagcccaaaatgaaaa

SEQ ID NO: 302143 - DNA, 30 bp, Artificial Sequence
  Synthetic oligonucleotide
gaacgtatcaattgatcatggacatgaaaa

SEQ ID NO: 302144 - DNA, 30 bp, Artificial Sequence
  Synthetic oligonucleotide
gagttaccaacgacccaccagccctgaaaa

SEQ ID NO: 302145 - DNA, 30 bp, Artificial Sequence
  Synthetic oligonucleotide
attacgatataattatcagactgctgaaaa

SEQ ID NO: 302146 - DNA, 30 bp, Artificial Sequence
  Synthetic oligonucleotide
agactgtaaacggaggaactgccgtgaaaa

SEQ ID NO: 302147 - DNA, 30 bp, Artificial Sequence
  Synthetic oligonucleotide
ggataaggtagggctttgttaggttgaaaa

SEQ ID NO: 302148 - DNA, 30 bp, Artificial Sequence
  Synthetic oligonucleotide
tggtccgtctatttatgaattggttgaaaa

SEQ ID NO: 302149 - DNA, 30 bp, Artificial Sequence
  Synthetic oligonucleotide
ggggccgacttggtaaggagtaaaataaaa

SEQ ID NO: 302150 - DNA, 30 bp, Artificial Sequence
  Synthetic oligonucleotide
tgcagtttgagaatccgaccaggcataaaa

SEQ ID NO: 302151 - DNA, 30 bp, Artificial Sequence
  Synthetic oligonucleotide
cagagtgcttctcttttgagcctcataaaa

SEQ ID NO: 302152 - DNA, 30 bp, Artificial Sequence
  Synthetic oligonucleotide
gcatagggggtgattagtgagctcataaaa

SEQ ID NO: 302153 - DNA, 30 bp, Artificial Sequence
  Synthetic oligonucleotide
aacataatttaaacaaggggtttcataaaa

SEQ ID NO: 302154 - DNA, 30 bp, Artificial Sequence
  Synthetic oligonucleotide
accatgctaggtgggaggcagaagataaaa

SEQ ID NO: 302155 - DNA, 30 bp, Artificial Sequence
  Synthetic oligonucleotide
gtcataagtcaaacacatatttagataaaa

SEQ ID NO: 302156 - DNA, 30 bp, Artificial Sequence
  Synthetic oligonucleotide
ctttaagatatgtgtgatgagcctataaaa

SEQ ID NO: 302157 - DNA, 30 bp, Artificial Sequence
  Synthetic oligonucleotide
atcttcggagcattaaggtggattataaaa

SEQ ID NO: 302158 - DNA, 30 bp, Artificial Sequence
  Synthetic oligonucleotide
gcttgttgaggagggtcgctagccctaaaa

SEQ ID NO: 302159 - DNA, 30 bp, Artificial Sequence
  Synthetic oligonucleotide
gaggtatatcctaataacgctgccctaaaa

SEQ ID NO: 302160 - DNA, 30 bp, Artificial Sequence
  Synthetic oligonucleotide
gtcttttggtgagaaccgtaaacgctaaaa

SEQ ID NO: 302161 - DNA, 30 bp, Artificial Sequence
  Synthetic oligonucleotide
aattcgacgcaccagaggggagggctaaaa

SEQ ID NO: 302162 - DNA, 30 bp, Artificial Sequence
  Synthetic oligonucleotide
cagagatggccagttggtgacacagtaaaa

SEQ ID NO: 302163 - DNA, 30 bp, Artificial Sequence
  Synthetic oligonucleotide
cctttcaaagctagtactcgtatcgtaaaa

SEQ ID NO: 302164 - DNA, 30 bp, Artificial Sequence
  Synthetic oligonucleotide
aatcaggggtaggcgttacacacggtaaaa

SEQ ID NO: 302165 - DNA, 30 bp, Artificial Sequence
  Synthetic oligonucleotide
ggatggcatgggcccgggtatccggtaaaa

SEQ ID NO: 302166 - DNA, 30 bp, Artificial Sequence
  Synthetic oligonucleotide
gacgttgagattaaacagctatcggtaaaa

SEQ ID NO: 302167 - DNA, 30 bp, Artificial Sequence
  Synthetic oligonucleotide
gtgagatagctataggcttagggggtaaaa

SEQ ID NO: 302168 - DNA, 30 bp, Artificial Sequence
  Synthetic oligonucleotide
cgatatgactataccggtatggttgtaaaa

SEQ ID NO: 302169 - DNA, 30 bp, Artificial Sequence
  Synthetic oligonucleotide
ggttcagttactcagggtaagaaattaaaa

SEQ ID NO: 302170 - DNA, 30 bp, Artificial Sequence
  Synthetic oligonucleotide
cgagctatacggcggccagccaacttaaaa

SEQ ID NO: 302171 - DNA, 30 bp, Artificial Sequence
  Synthetic oligonucleotide
aggctgaaaatctcgggggttctgttaaaa

SEQ ID NO: 302172 - DNA, 30 bp, Artificial Sequence
  Synthetic oligonucleotide
ggaaacatgcggccagtaacatgtttaaaa

SEQ ID NO: 302173 - DNA, 30 bp, Artificial Sequence
  Synthetic oligonucleotide
agttgctttagtgtgcgtgggccaaacaaa

SEQ ID NO: 302174 - DNA, 30 bp, Artificial Sequence
  Synthetic oligonucleotide
gagtgatgtcctccgagtcgccgaaacaaa

SEQ ID NO: 302175 - DNA, 30 bp, Artificial Sequence
  Synthetic oligonucleotide
ggctttgtaacaagctttgcaataaacaaa

SEQ ID NO: 302176 - DNA, 31 bp, Artificial Sequence
  Synthetic oligonucleotide
gcgttgtgttccccgcaaagaaaaacacaaa

SEQ ID NO: 302177 - DNA, 30 bp, Artificial Sequence
  Synthetic oligonucleotide
aacagttagccagtggattgactccacaaa

SEQ ID NO: 302178 - DNA, 30 bp, Artificial Sequence
  Synthetic oligonucleotide
catacagtgaccctcgcagctaagcacaaa

SEQ ID NO: 302179 - DNA, 30 bp, Artificial Sequence
  Synthetic oligonucleotide
gtccatgcgacggctatgtcatagcacaaa

SEQ ID NO: 302180 - DNA, 30 bp, Artificial Sequence
  Synthetic oligonucleotide
aacacggtccaagcgcatatggctcacaaa

SEQ ID NO: 302181 - DNA, 30 bp, Artificial Sequence
  Synthetic oligonucleotide
agtcctgagtattattaagcaggtcacaaa

SEQ ID NO: 302182 - DNA, 30 bp, Artificial Sequence
  Synthetic oligonucleotide
tgaaactgtctagtcggattactagacaaa

SEQ ID NO: 302183 - DNA, 30 bp, Artificial Sequence
  Synthetic oligonucleotide
gcagcggcttgccatattcgcctcgacaaa

SEQ ID NO: 302184 - DNA, 30 bp, Artificial Sequence
  Synthetic oligonucleotide
gctgtgttaaggacacttctagcggacaaa

SEQ ID NO: 302185 - DNA, 30 bp, Artificial Sequence
  Synthetic oligonucleotide
aaacggtctgttttgagctgtatggacaaa

SEQ ID NO: 302186 - DNA, 30 bp, Artificial Sequence
  Synthetic oligonucleotide
cgggagtatgcgttccttcacgaatacaaa

SEQ ID NO: 302187 - DNA, 30 bp, Artificial Sequence
  Synthetic oligonucleotide
ccaggcttaagcacttaggcaccatacaaa

SEQ ID NO: 302188 - DNA, 30 bp, Artificial Sequence
  Synthetic oligonucleotide
ggcctccaggaatgggtatctctatacaaa

SEQ ID NO: 302189 - DNA, 30 bp, Artificial Sequence
  Synthetic oligonucleotide
ccccgccaacaaggtaggtttccctacaaa

SEQ ID NO: 302190 - DNA, 30 bp, Artificial Sequence
  Synthetic oligonucleotide
cacggtgtaattcacgtatcaaggtacaaa

SEQ ID NO: 302191 - DNA, 30 bp, Artificial Sequence
  Synthetic oligonucleotide
gcagactgctacaaaagcaatttgtacaaa

SEQ ID NO: 302192 - DNA, 30 bp, Artificial Sequence
  Synthetic oligonucleotide
tagctcttgacgtagtgaccccattacaaa

SEQ ID NO: 302193 - DNA, 30 bp, Artificial Sequence
  Synthetic oligonucleotide
ctcgttgtcaaggggggcggtatttacaaa

SEQ ID NO: 302194 - DNA, 30 bp, Artificial Sequence
  Synthetic oligonucleotide
ggaccgctgtgcttgttcgaatataccaaa

SEQ ID NO: 302195 - DNA, 30 bp, Artificial Sequence
  Synthetic oligonucleotide
atgatatgggcattcgggaaaggtaccaaa

SEQ ID NO: 302196 - DNA, 30 bp, Artificial Sequence
  Synthetic oligonucleotide
agttaacgagccgtggccctaattaccaaa

SEQ ID NO: 302197 - DNA, 30 bp, Artificial Sequence
  Synthetic oligonucleotide
gaagtgcctttcggtatccaagttaccaaa

SEQ ID NO: 302198 - DNA, 30 bp, Artificial Sequence
  Synthetic oligonucleotide
gtgtttattctcatgttggaaatacccaaa

SEQ ID NO: 302199 - DNA, 30 bp, Artificial Sequence
  Synthetic oligonucleotide
aactgttcattacctgccagaccccccaaa

SEQ ID NO: 302200 - DNA, 30 bp, Artificial Sequence
  Synthetic oligonucleotide
gaaaagtactgggggtggcactagcccaaa

SEQ ID NO: 302201 - DNA, 30 bp, Artificial Sequence
  Synthetic oligonucleotide
tacactacccaatctgcggaccttcccaaa

SEQ ID NO: 302202 - DNA, 30 bp, Artificial Sequence
  Synthetic oligonucleotide
atataagatatagggagtccagtagccaaa

SEQ ID NO: 302203 - DNA, 30 bp, Artificial Sequence
  Synthetic oligonucleotide
ttattatgacaagtgggaagtagcgccaaa

SEQ ID NO: 302204 - DNA, 30 bp, Artificial Sequence
  Synthetic oligonucleotide
tatgaagcatctgcttctagctatgccaaa

SEQ ID NO: 302205 - DNA, 30 bp, Artificial Sequence
  Synthetic oligonucleotide
caaatacgttgccgtggataatttgccaaa

SEQ ID NO: 302206 - DNA, 29 bp, Artificial Sequence
  Synthetic oligonucleotide
accataacgctcgggatagatttgccaaa

SEQ ID NO: 302207 - DNA, 30 bp, Artificial Sequence
  Synthetic oligonucleotide
ggcgatttgtcccgataaggaggttccaaa

SEQ ID NO: 302208 - DNA, 30 bp, Artificial Sequence
  Synthetic oligonucleotide
aaagtggaattgcgccttagtggttccaaa

SEQ ID NO: 302209 - DNA, 30 bp, Artificial Sequence
  Synthetic oligonucleotide
aatgggcgcccaaaaaggcgtttttccaaa

SEQ ID NO: 302210 - DNA, 30 bp, Artificial Sequence
  Synthetic oligonucleotide
caacagcgcaagcgctggcctcaaagcaaa

SEQ ID NO: 302211 - DNA, 30 bp, Artificial Sequence
  Synthetic oligonucleotide
ctcgacttccttagttggccaagcagcaaa

SEQ ID NO: 302212 - DNA, 30 bp, Artificial Sequence
  Synthetic oligonucleotide
caaggttcgacatccgtggacggcagcaaa

SEQ ID NO: 302213 - DNA, 30 bp, Artificial Sequence
  Synthetic oligonucleotide
gtggttttcaacttgagtgactagagcaaa

SEQ ID NO: 302214 - DNA, 30 bp, Artificial Sequence
  Synthetic oligonucleotide
tactctgggccggttgtttttgtgagcaaa

SEQ ID NO: 302215 - DNA, 30 bp, Artificial Sequence
  Synthetic oligonucleotide
aatactgataaaagacaggggattagcaaa

SEQ ID NO: 302216 - DNA, 30 bp, Artificial Sequence
  Synthetic oligonucleotide
agcactaccaaccttacaatttttagcaaa

SEQ ID NO: 302217 - DNA, 30 bp, Artificial Sequence
  Synthetic oligonucleotide
gattcgccgtaagtgcaaattgcacgcaaa

SEQ ID NO: 302218 - DNA, 30 bp, Artificial Sequence
  Synthetic oligonucleotide
gattcagcagaacatacagtggcccgcaaa

SEQ ID NO: 302219 - DNA, 29 bp, Artificial Sequence
  Synthetic oligonucleotide
accccgatttgttgtcgggttgccgcaaa

SEQ ID NO: 302220 - DNA, 30 bp, Artificial Sequence
  Synthetic oligonucleotide
acggggctggacaaatggggggctcgcaaa

SEQ ID NO: 302221 - DNA, 30 bp, Artificial Sequence
  Synthetic oligonucleotide
gtagtagatgttagtgaggcaagtcgcaaa

SEQ ID NO: 302222 - DNA, 30 bp, Artificial Sequence
  Synthetic oligonucleotide
gtagctcggggccgccaacgcattcgcaaa

SEQ ID NO: 302223 - DNA, 30 bp, Artificial Sequence
  Synthetic oligonucleotide
gcagcggcgtctaaacgtgaagttcgcaaa

SEQ ID NO: 302224 - DNA, 30 bp, Artificial Sequence
  Synthetic oligonucleotide
tgattcctcatttcggagcagtaaggcaaa

SEQ ID NO: 302225 - DNA, 30 bp, Artificial Sequence
  Synthetic oligonucleotide
ccaatgggatgtgcgttgacagtcggcaaa

SEQ ID NO: 302226 - DNA, 30 bp, Artificial Sequence
  Synthetic oligonucleotide
gaacctcgtctgtgaaaaaattcgggcaaa

SEQ ID NO: 302227 - DNA, 30 bp, Artificial Sequence
  Synthetic oligonucleotide
gtacgctcttcacgctcccctcggggcaaa

SEQ ID NO: 302228 - DNA, 30 bp, Artificial Sequence
  Synthetic oligonucleotide
gtgttcgaaattagattttgaaatggcaaa

SEQ ID NO: 302229 - DNA, 30 bp, Artificial Sequence
  Synthetic oligonucleotide
tgtaggtaaccatacatcgacaatggcaaa

SEQ ID NO: 302230 - DNA, 30 bp, Artificial Sequence
  Synthetic oligonucleotide
taacagcatgtccagtggtagagtggcaaa

SEQ ID NO: 302231 - DNA, 30 bp, Artificial Sequence
  Synthetic oligonucleotide
gaaaatgctatcttagcaaacgttggcaaa

SEQ ID NO: 302232 - DNA, 30 bp, Artificial Sequence
  Synthetic oligonucleotide
gacatactggctatcaccccgcactgcaaa

SEQ ID NO: 302233 - DNA, 30 bp, Artificial Sequence
  Synthetic oligonucleotide
acggatttcatgggacttgcccgctgcaaa

SEQ ID NO: 302234 - DNA, 30 bp, Artificial Sequence
  Synthetic oligonucleotide
tatcggaagtgtcgcactgaacagtgcaaa

SEQ ID NO: 302235 - DNA, 30 bp, Artificial Sequence
  Synthetic oligonucleotide
acttttattagcagtaaagctgagtgcaaa

SEQ ID NO: 302236 - DNA, 30 bp, Artificial Sequence
  Synthetic oligonucleotide
taactacggaggtgaagacattagtgcaaa

SEQ ID NO: 302237 - DNA, 30 bp, Artificial Sequence
  Synthetic oligonucleotide
gaggctttgaggacaatgcactaaatcaaa

SEQ ID NO: 302238 - DNA, 30 bp, Artificial Sequence
  Synthetic oligonucleotide
attatcctgagaccactaagccccatcaaa

SEQ ID NO: 302239 - DNA, 30 bp, Artificial Sequence
  Synthetic oligonucleotide
tcccggaatacgggttgccaaaggatcaaa

SEQ ID NO: 302240 - DNA, 30 bp, Artificial Sequence
  Synthetic oligonucleotide
gtgacagcccagagatcgcagctgatcaaa

SEQ ID NO: 302241 - DNA, 30 bp, Artificial Sequence
  Synthetic oligonucleotide
cgattaaaaccgcatttgttttgtatcaaa

SEQ ID NO: 302242 - DNA, 30 bp, Artificial Sequence
  Synthetic oligonucleotide
aactccgaaatccacattacggaactcaaa

SEQ ID NO: 302243 - DNA, 30 bp, Artificial Sequence
  Synthetic oligonucleotide
agctgaggccagtcaatggcgtcactcaaa

SEQ ID NO: 302244 - DNA, 30 bp, Artificial Sequence
  Synthetic oligonucleotide
aggataaagttggatagtccgcgactcaaa

SEQ ID NO: 302245 - DNA, 30 bp, Artificial Sequence
  Synthetic oligonucleotide
atatacgtcttaaaacacggagtactcaaa

SEQ ID NO: 302246 - DNA, 30 bp, Artificial Sequence
  Synthetic oligonucleotide
tcctagacaataacgttttgagggctcaaa

SEQ ID NO: 302247 - DNA, 30 bp, Artificial Sequence
  Synthetic oligonucleotide
acgatattccaaggtacgcgccttctcaaa

SEQ ID NO: 302248 - DNA, 30 bp, Artificial Sequence
  Synthetic oligonucleotide
gcattgtatgggtctaacgggttagtcaaa

SEQ ID NO: 302249 - DNA, 30 bp, Artificial Sequence
  Synthetic oligonucleotide
taaaaacgacgggatcaggaattggtcaaa

SEQ ID NO: 302250 - DNA, 30 bp, Artificial Sequence
  Synthetic oligonucleotide
tgcttcaagatgacaaggccgtctgtcaaa

SEQ ID NO: 302251 - DNA, 30 bp, Artificial Sequence
  Synthetic oligonucleotide
atcttataatatgaggttaaacgtgtcaaa

SEQ ID NO: 302252 - DNA, 31 bp, Artificial Sequence
  Synthetic oligonucleotide
acccaaatattcgtcaaatgtgacattcaaa

SEQ ID NO: 302253 - DNA, 30 bp, Artificial Sequence
  Synthetic oligonucleotide
gcctactaacgagtaaaggcgaagttcaaa

SEQ ID NO: 302254 - DNA, 30 bp, Artificial Sequence
  Synthetic oligonucleotide
gcacgagttgggatctgcctacagttcaaa

SEQ ID NO: 302255 - DNA, 30 bp, Artificial Sequence
  Synthetic oligonucleotide
atgcagcaactatctacactcacgttcaaa

SEQ ID NO: 302256 - DNA, 30 bp, Artificial Sequence
  Synthetic oligonucleotide
cgcttttcctgcacgggtcacatgttcaaa

SEQ ID NO: 302257 - DNA, 30 bp, Artificial Sequence
  Synthetic oligonucleotide
gtgtttcgtctgaaaaaggggactttcaaa

SEQ ID NO: 302258 - DNA, 30 bp, Artificial Sequence
  Synthetic oligonucleotide
gtgttgaaagtatgcgtcaggtgtttcaaa

SEQ ID NO: 302259 - DNA, 30 bp, Artificial Sequence
  Synthetic oligonucleotide
gaactggaccgcaagtgtctagaaaagaaa

SEQ ID NO: 302260 - DNA, 30 bp, Artificial Sequence
  Synthetic oligonucleotide
aatccgcgtgctgagttcagaccaaagaaa

SEQ ID NO: 302261 - DNA, 31 bp, Artificial Sequence
  Synthetic oligonucleotide
gagcacctagcgtaacatcagaggaaagaaa

SEQ ID NO: 302262 - DNA, 30 bp, Artificial Sequence
  Synthetic oligonucleotide
gggtggccccattgacatggcttcaagaaa

SEQ ID NO: 302263 - DNA, 30 bp, Artificial Sequence
  Synthetic oligonucleotide
atgcacgctaagttaacccggttcaagaaa

SEQ ID NO: 302264 - DNA, 30 bp, Artificial Sequence
  Synthetic oligonucleotide
tatagctgcagcggcatttggcagaagaaa

SEQ ID NO: 302265 - DNA, 30 bp, Artificial Sequence
  Synthetic oligonucleotide
tttaacatagggacttatagcgagaagaaa

SEQ ID NO: 302266 - DNA, 30 bp, Artificial Sequence
  Synthetic oligonucleotide
gacaagcgacgatcatcgtttccgaagaaa

SEQ ID NO: 302267 - DNA, 30 bp, Artificial Sequence
  Synthetic oligonucleotide
gactgcgagttgctcatatattcgaagaaa

SEQ ID NO: 302268 - DNA, 29 bp, Artificial Sequence
  Synthetic oligonucleotide
agctctaaggccctgtgaaggtgaagaaa

SEQ ID NO: 302269 - DNA, 30 bp, Artificial Sequence
  Synthetic oligonucleotide
tcttcgtggctatgggagtagaaacagaaa

SEQ ID NO: 302270 - DNA, 30 bp, Artificial Sequence
  Synthetic oligonucleotide
ggccctggcaacctgggcttaatacagaaa

SEQ ID NO: 302271 - DNA, 30 bp, Artificial Sequence
  Synthetic oligonucleotide
ggtttgtaggatggtctcaagggccagaaa

SEQ ID NO: 302272 - DNA, 30 bp, Artificial Sequence
  Synthetic oligonucleotide
gtatacacgatttaatacgtcttccagaaa

SEQ ID NO: 302273 - DNA, 30 bp, Artificial Sequence
  Synthetic oligonucleotide
aaaacgaggggctgattggttatgcagaaa

SEQ ID NO: 302274 - DNA, 30 bp, Artificial Sequence
  Synthetic oligonucleotide
agcgattattttctgaaaagcaaagagaaa

SEQ ID NO: 302275 - DNA, 30 bp, Artificial Sequence
  Synthetic oligonucleotide
tcccgagtgttctgccagttgacagagaaa

SEQ ID NO: 302276 - DNA, 31 bp, Artificial Sequence
  Synthetic oligonucleotide
aggtcatctttaaatacatctgggagagaaa

SEQ ID NO: 302277 - DNA, 30 bp, Artificial Sequence
  Synthetic oligonucleotide
tgacgtggtatataggcgctacccgagaaa

SEQ ID NO: 302278 - DNA, 30 bp, Artificial Sequence
  Synthetic oligonucleotide
gcagcagcaaagccgtacagcgccgagaaa

SEQ ID NO: 302279 - DNA, 30 bp, Artificial Sequence
  Synthetic oligonucleotide
ttccggaacgccggaggactggtcgagaaa

SEQ ID NO: 302280 - DNA, 30 bp, Artificial Sequence
  Synthetic oligonucleotide
tcgtcagcgaatcccggttctaaggagaaa

SEQ ID NO: 302281 - DNA, 30 bp, Artificial Sequence
  Synthetic oligonucleotide
tcccaaatgttctggccaatgcaggagaaa

SEQ ID NO: 302282 - DNA, 30 bp, Artificial Sequence
  Synthetic oligonucleotide
aacaagatatgtgtatgcagtcgggagaaa

SEQ ID NO: 302283 - DNA, 30 bp, Artificial Sequence
  Synthetic oligonucleotide
caaaggaggttgataggctaatgggagaaa

SEQ ID NO: 302284 - DNA, 30 bp, Artificial Sequence
  Synthetic oligonucleotide
aaccaccacgtctagttacgagtggagaaa

SEQ ID NO: 302285 - DNA, 30 bp, Artificial Sequence
  Synthetic oligonucleotide
tgccgattcatcgggaatgcattggagaaa

SEQ ID NO: 302286 - DNA, 30 bp, Artificial Sequence
  Synthetic oligonucleotide
aactacatctaaacatgccttcatgagaaa

SEQ ID NO: 302287 - DNA, 30 bp, Artificial Sequence
  Synthetic oligonucleotide
ctcttcaatatgtgtaacaaatatgagaaa

SEQ ID NO: 302288 - DNA, 30 bp, Artificial Sequence
  Synthetic oligonucleotide
tctttacctctaatatccacatcatagaaa

SEQ ID NO: 302289 - DNA, 30 bp, Artificial Sequence
  Synthetic oligonucleotide
cgcctagatacgagtcggtcaatatagaaa

SEQ ID NO: 302290 - DNA, 30 bp, Artificial Sequence
  Synthetic oligonucleotide
ggatgcaggcactatttttctaactagaaa

SEQ ID NO: 302291 - DNA, 30 bp, Artificial Sequence
  Synthetic oligonucleotide
attctgcttccgttaaaccagtactagaaa

SEQ ID NO: 302292 - DNA, 30 bp, Artificial Sequence
  Synthetic oligonucleotide
gcgccacaagagtggctcaggtgctagaaa

SEQ ID NO: 302293 - DNA, 30 bp, Artificial Sequence
  Synthetic oligonucleotide
aaagctgctaaaacaaggcctgtctagaaa

SEQ ID NO: 302294 - DNA, 30 bp, Artificial Sequence
  Synthetic oligonucleotide
tgggtgatcagaatacaaggcccgtagaaa

SEQ ID NO: 302295 - DNA, 30 bp, Artificial Sequence
  Synthetic oligonucleotide
cggcattgggctagaacacgggcgtagaaa

SEQ ID NO: 302296 - DNA, 30 bp, Artificial Sequence
  Synthetic oligonucleotide
tttccgtgattgcttttctccctgtagaaa

SEQ ID NO: 302297 - DNA, 30 bp, Artificial Sequence
  Synthetic oligonucleotide
acttgaacatgcagatcgggattaacgaaa

SEQ ID NO: 302298 - DNA, 30 bp, Artificial Sequence
  Synthetic oligonucleotide
aggacttggagggtgccagtcaccacgaaa

SEQ ID NO: 302299 - DNA, 30 bp, Artificial Sequence
  Synthetic oligonucleotide
tgacttctacggaaggtagttagcacgaaa

SEQ ID NO: 302300 - DNA, 30 bp, Artificial Sequence
  Synthetic oligonucleotide
gtaggagtctttgataacgctgggacgaaa

SEQ ID NO: 302301 - DNA, 30 bp, Artificial Sequence
  Synthetic oligonucleotide
tgcgactttagcctaaactggaatacgaaa

SEQ ID NO: 302302 - DNA, 30 bp, Artificial Sequence
  Synthetic oligonucleotide
atttgacctgaaaatgccccagatacgaaa

SEQ ID NO: 302303 - DNA, 30 bp, Artificial Sequence
  Synthetic oligonucleotide
agcggattgttgcaggcatcgggaccgaaa

SEQ ID NO: 302304 - DNA, 30 bp, Artificial Sequence
  Synthetic oligonucleotide
tctgactaaatcaattacgcgctaccgaaa

SEQ ID NO: 302305 - DNA, 30 bp, Artificial Sequence
  Synthetic oligonucleotide
gagcctagtttgagaccgcgtccgccgaaa

SEQ ID NO: 302306 - DNA, 30 bp, Artificial Sequence
  Synthetic oligonucleotide
tacaggggcggtcaagcgatacggccgaaa

SEQ ID NO: 302307 - DNA, 30 bp, Artificial Sequence
  Synthetic oligonucleotide
tcacgttcggtcggggtttgttgagcgaaa

SEQ ID NO: 302308 - DNA, 30 bp, Artificial Sequence
  Synthetic oligonucleotide
tttaagcttcagcccggatgctgggcgaaa

SEQ ID NO: 302309 - DNA, 30 bp, Artificial Sequence
  Synthetic oligonucleotide
tttcaggtaaacacaaggcccatggcgaaa

SEQ ID NO: 302310 - DNA, 30 bp, Artificial Sequence
  Synthetic oligonucleotide
aagagcgaattgcctctctaatatgcgaaa

SEQ ID NO: 302311 - DNA, 30 bp, Artificial Sequence
  Synthetic oligonucleotide
ttaacttatgcaacgtataagactgcgaaa

SEQ ID NO: 302312 - DNA, 30 bp, Artificial Sequence
  Synthetic oligonucleotide
acgcggttcacattacgacatcctgcgaaa

SEQ ID NO: 302313 - DNA, 30 bp, Artificial Sequence
  Synthetic oligonucleotide
taaccactaccacaccttaatgctgcgaaa

SEQ ID NO: 302314 - DNA, 30 bp, Artificial Sequence
  Synthetic oligonucleotide
tgaagatgttgacgacgtttaattgcgaaa

SEQ ID NO: 302315 - DNA, 30 bp, Artificial Sequence
  Synthetic oligonucleotide
aggcatgtcacggccctacggaaatcgaaa

SEQ ID NO: 302316 - DNA, 30 bp, Artificial Sequence
  Synthetic oligonucleotide
tgcaatgttgcaaaaactagttaatcgaaa

SEQ ID NO: 302317 - DNA, 30 bp, Artificial Sequence
  Synthetic oligonucleotide
tttgggctccactaattaaccagatcgaaa

SEQ ID NO: 302318 - DNA, 30 bp, Artificial Sequence
  Synthetic oligonucleotide
gggatgcgaatgtcgacgcgctgatcgaaa

SEQ ID NO: 302319 - DNA, 30 bp, Artificial Sequence
  Synthetic oligonucleotide
gccttaaagccttctgagcctctatcgaaa

SEQ ID NO: 302320 - DNA, 30 bp, Artificial Sequence
  Synthetic oligonucleotide
tatggtatcgtagagaacaattgctcgaaa

SEQ ID NO: 302321 - DNA, 30 bp, Artificial Sequence
  Synthetic oligonucleotide
gacgctacgcgcgatcaagcccggtcgaaa

SEQ ID NO: 302322 - DNA, 30 bp, Artificial Sequence
  Synthetic oligonucleotide
atggacctaggcacttacgttgggtcgaaa

SEQ ID NO: 302323 - DNA, 30 bp, Artificial Sequence
  Synthetic oligonucleotide
cggctccagagggtctacatactttcgaaa

SEQ ID NO: 302324 - DNA, 30 bp, Artificial Sequence
  Synthetic oligonucleotide
gacaagagcgcagtcgacattttttcgaaa

SEQ ID NO: 302325 - DNA, 30 bp, Artificial Sequence
  Synthetic oligonucleotide
accgcgacctggagcagtgcgtaaaggaaa

SEQ ID NO: 302326 - DNA, 30 bp, Artificial Sequence
  Synthetic oligonucleotide
tggtctaagctcaggtggtggtaaaggaaa

SEQ ID NO: 302327 - DNA, 30 bp, Artificial Sequence
  Synthetic oligonucleotide
cttgagctcattaatatgcaagtaaggaaa

SEQ ID NO: 302328 - DNA, 30 bp, Artificial Sequence
  Synthetic oligonucleotide
ttgcggctatgctggataacaaacaggaaa

SEQ ID NO: 302329 - DNA, 30 bp, Artificial Sequence
  Synthetic oligonucleotide
cttggcgatgtcagctggggtaacaggaaa

SEQ ID NO: 302330 - DNA, 30 bp, Artificial Sequence
  Synthetic oligonucleotide
aatagttacggttaacgggagcacaggaaa

SEQ ID NO: 302331 - DNA, 30 bp, Artificial Sequence
  Synthetic oligonucleotide
tgggccagagtccctgaactagtcaggaaa

SEQ ID NO: 302332 - DNA, 28 bp, Artificial Sequence
  Synthetic oligonucleotide
tggtcggtttgttaactggcagaggaaa

SEQ ID NO: 302333 - DNA, 30 bp, Artificial Sequence
  Synthetic oligonucleotide
tagatatagaagttctaattccggaggaaa

SEQ ID NO: 302334 - DNA, 30 bp, Artificial Sequence
  Synthetic oligonucleotide
cgcttagttgtctgggccgttcggaggaaa

SEQ ID NO: 302335 - DNA, 30 bp, Artificial Sequence
  Synthetic oligonucleotide
gtatggactggtctagggccttataggaaa

SEQ ID NO: 302336 - DNA, 30 bp, Artificial Sequence
  Synthetic oligonucleotide
cacttcctcctcccaaaattacgtaggaaa

SEQ ID NO: 302337 - DNA, 30 bp, Artificial Sequence
  Synthetic oligonucleotide
agttcagatgctggccgagctgttaggaaa

SEQ ID NO: 302338 - DNA, 30 bp, Artificial Sequence
  Synthetic oligonucleotide
cttgctccttcgacaatgacgaaacggaaa

SEQ ID NO: 302339 - DNA, 30 bp, Artificial Sequence
  Synthetic oligonucleotide
gaggtaggggttcctaacgtttaacggaaa

SEQ ID NO: 302340 - DNA, 30 bp, Artificial Sequence
  Synthetic oligonucleotide
aaagtacgtgtccggtgcatgagccggaaa

SEQ ID NO: 302341 - DNA, 30 bp, Artificial Sequence
  Synthetic oligonucleotide
gcgttttagaacgactgtacttcgcggaaa

SEQ ID NO: 302342 - DNA, 30 bp, Artificial Sequence
  Synthetic oligonucleotide
gggtcctacaaaaatcatttagacgggaaa

SEQ ID NO: 302343 - DNA, 30 bp, Artificial Sequence
  Synthetic oligonucleotide
taagcctaaagtcccgctgtgcgcgggaaa

SEQ ID NO: 302344 - DNA, 30 bp, Artificial Sequence
  Synthetic oligonucleotide
gggccatcaggtcagggatgccaggggaaa

SEQ ID NO: 302345 - DNA, 30 bp, Artificial Sequence
  Synthetic oligonucleotide
actcggtcggtgatgggctgataggggaaa

SEQ ID NO: 302346 - DNA, 30 bp, Artificial Sequence
  Synthetic oligonucleotide
gatatacctttttggcaacagtaggggaaa

SEQ ID NO: 302347 - DNA, 30 bp, Artificial Sequence
  Synthetic oligonucleotide
gttatgactggaacattgtaaccggggaaa

SEQ ID NO: 302348 - DNA, 30 bp, Artificial Sequence
  Synthetic oligonucleotide
tctttgagggaagaacatgaatgggggaaa

SEQ ID NO: 302349 - DNA, 30 bp, Artificial Sequence
  Synthetic oligonucleotide
aatgagccaagattggttaggactgggaaa

SEQ ID NO: 302350 - DNA, 30 bp, Artificial Sequence
  Synthetic oligonucleotide
gaatcaaaggaagttggtctgagtgggaaa

SEQ ID NO: 302351 - DNA, 30 bp, Artificial Sequence
  Synthetic oligonucleotide
tactccgaccggcaatgaccgagatggaaa

SEQ ID NO: 302352 - DNA, 30 bp, Artificial Sequence
  Synthetic oligonucleotide
tatgttggatcatgtttagagcactggaaa

SEQ ID NO: 302353 - DNA, 30 bp, Artificial Sequence
  Synthetic oligonucleotide
agtctacgtactaataagttaccctggaaa

SEQ ID NO: 302354 - DNA, 30 bp, Artificial Sequence
  Synthetic oligonucleotide
ggtatagcggcttcagaatgtaagtggaaa

SEQ ID NO: 302355 - DNA, 30 bp, Artificial Sequence
  Synthetic oligonucleotide
acgagactgcagatgttcaactagtggaaa

SEQ ID NO: 302356 - DNA, 30 bp, Artificial Sequence
  Synthetic oligonucleotide
acattaggacggcaacacacatcgtggaaa

SEQ ID NO: 302357 - DNA, 30 bp, Artificial Sequence
  Synthetic oligonucleotide
gggtattaagatatggccgtatggtggaaa

SEQ ID NO: 302358 - DNA, 30 bp, Artificial Sequence
  Synthetic oligonucleotide
aagctgagcgctcagtacgctaattggaaa

SEQ ID NO: 302359 - DNA, 30 bp, Artificial Sequence
  Synthetic oligonucleotide
tatggtctgaccaatgagctctattggaaa

SEQ ID NO: 302360 - DNA, 30 bp, Artificial Sequence
  Synthetic oligonucleotide
ctagacggggacttgcaccattattggaaa

SEQ ID NO: 302361 - DNA, 30 bp, Artificial Sequence
  Synthetic oligonucleotide
ctgtttctcgggtccgtgcgaggttggaaa

SEQ ID NO: 302362 - DNA, 30 bp, Artificial Sequence
  Synthetic oligonucleotide
aatgtaagaatttgtgccatcctttggaaa

SEQ ID NO: 302363 - DNA, 30 bp, Artificial Sequence
  Synthetic oligonucleotide
gggtgaggatcgtagaatcttgtttggaaa

SEQ ID NO: 302364 - DNA, 30 bp, Artificial Sequence
  Synthetic oligonucleotide
atataaccttgggtttctgagagaatgaaa

SEQ ID NO: 302365 - DNA, 30 bp, Artificial Sequence
  Synthetic oligonucleotide
gtgatacgaatttacagggccaacatgaaa

SEQ ID NO: 302366 - DNA, 29 bp, Artificial Sequence
  Synthetic oligonucleotide
gaaagcaagtgctgagtcattgcatgaaa

SEQ ID NO: 302367 - DNA, 30 bp, Artificial Sequence
  Synthetic oligonucleotide
gacatgatgacagtcatagctatcatgaaa

SEQ ID NO: 302368 - DNA, 30 bp, Artificial Sequence
  Synthetic oligonucleotide
gccattaggccgcatgagccactcatgaaa

SEQ ID NO: 302369 - DNA, 30 bp, Artificial Sequence
  Synthetic oligonucleotide
cgttatcttataccatcccacgctatgaaa

SEQ ID NO: 302370 - DNA, 30 bp, Artificial Sequence
  Synthetic oligonucleotide
cccggtaccgtcaaggatcacattatgaaa

SEQ ID NO: 302371 - DNA, 30 bp, Artificial Sequence
  Synthetic oligonucleotide
agactctatccatagccgtttcttatgaaa

SEQ ID NO: 302372 - DNA, 30 bp, Artificial Sequence
  Synthetic oligonucleotide
ccgtatgtgaaagtttgaggcttactgaaa

SEQ ID NO: 302373 - DNA, 30 bp, Artificial Sequence
  Synthetic oligonucleotide
ggctatcagtgatagcggctgagcctgaaa

SEQ ID NO: 302374 - DNA, 30 bp, Artificial Sequence
  Synthetic oligonucleotide
gagttcatggcataaaaaaggcatctgaaa

SEQ ID NO: 302375 - DNA, 30 bp, Artificial Sequence
  Synthetic oligonucleotide
caatcacagtcggtctctggggctctgaaa

SEQ ID NO: 302376 - DNA, 30 bp, Artificial Sequence
  Synthetic oligonucleotide
atgtctgaacgggatgatttgcgtctgaaa

SEQ ID NO: 302377 - DNA, 30 bp, Artificial Sequence
  Synthetic oligonucleotide
cttcgggaaatgcgagatcgctaagtgaaa

SEQ ID NO: 302378 - DNA, 30 bp, Artificial Sequence
  Synthetic oligonucleotide
cttgttccagtgcgccgacggaacgtgaaa

SEQ ID NO: 302379 - DNA, 30 bp, Artificial Sequence
  Synthetic oligonucleotide
gtaaacccgtttccggccgaggtcgtgaaa

SEQ ID NO: 302380 - DNA, 30 bp, Artificial Sequence
  Synthetic oligonucleotide
cagattggctcgttaaactgcaaggtgaaa

SEQ ID NO: 302381 - DNA, 30 bp, Artificial Sequence
  Synthetic oligonucleotide
gctaatcttctagcggaccggctggtgaaa

SEQ ID NO: 302382 - DNA, 30 bp, Artificial Sequence
  Synthetic oligonucleotide
tgatctgtgtgccaacaatgccaattgaaa

SEQ ID NO: 302383 - DNA, 30 bp, Artificial Sequence
  Synthetic oligonucleotide
ggctatgtgtacgtacttacaggattgaaa

SEQ ID NO: 302384 - DNA, 30 bp, Artificial Sequence
  Synthetic oligonucleotide
tgcattgtacatctcaacatcggattgaaa

SEQ ID NO: 302385 - DNA, 30 bp, Artificial Sequence
  Synthetic oligonucleotide
acagacaggactaatgtcggattattgaaa

SEQ ID NO: 302386 - DNA, 30 bp, Artificial Sequence
  Synthetic oligonucleotide
gatcgctggttgtgtgactaatacttgaaa

SEQ ID NO: 302387 - DNA, 30 bp, Artificial Sequence
  Synthetic oligonucleotide
gagtatcctaaagaaattattggcttgaaa

SEQ ID NO: 302388 - DNA, 30 bp, Artificial Sequence
  Synthetic oligonucleotide
gcgtagtctgcggcacgctttgagttgaaa

SEQ ID NO: 302389 - DNA, 30 bp, Artificial Sequence
  Synthetic oligonucleotide
gaaatagatgccaactatgccacgttgaaa

SEQ ID NO: 302390 - DNA, 30 bp, Artificial Sequence
  Synthetic oligonucleotide
gcgtgggcccgcaggacaagtgatttgaaa

SEQ ID NO: 302391 - DNA, 30 bp, Artificial Sequence
  Synthetic oligonucleotide
cctcaatattcctcatcgttagttttgaaa

SEQ ID NO: 302392 - DNA, 30 bp, Artificial Sequence
  Synthetic oligonucleotide
agctgccacaatttaattaaaataaataaa

SEQ ID NO: 302393 - DNA, 30 bp, Artificial Sequence
  Synthetic oligonucleotide
ccgaaagcagcaatgggaaagataaataaa

SEQ ID NO: 302394 - DNA, 30 bp, Artificial Sequence
  Synthetic oligonucleotide
acattaatgacggagtagtgggagaataaa

SEQ ID NO: 302395 - DNA, 30 bp, Artificial Sequence
  Synthetic oligonucleotide
taagttgtgaatacaaaaaaatagaataaa

SEQ ID NO: 302396 - DNA, 30 bp, Artificial Sequence
  Synthetic oligonucleotide
acgcaaatcattcagtcgtaaaggaataaa

SEQ ID NO: 302397 - DNA, 30 bp, Artificial Sequence
  Synthetic oligonucleotide
gagtttatagtattatgttaaaggaataaa

SEQ ID NO: 302398 - DNA, 30 bp, Artificial Sequence
  Synthetic oligonucleotide
attgcaatcttagatcgatatgggaataaa

SEQ ID NO: 302399 - DNA, 30 bp, Artificial Sequence
  Synthetic oligonucleotide
tcggtatcttcgtgtaagatatggaataaa

SEQ ID NO: 302400 - DNA, 30 bp, Artificial Sequence
  Synthetic oligonucleotide
ctcagctcgtaaagttagtatagtaataaa

SEQ ID NO: 302401 - DNA, 30 bp, Artificial Sequence
  Synthetic oligonucleotide
tcggttgtacacacgatgcgatttaataaa

SEQ ID NO: 302402 - DNA, 30 bp, Artificial Sequence
  Synthetic oligonucleotide
ctgggcttcttgtcacgatatccacataaa

SEQ ID NO: 302403 - DNA, 31 bp, Artificial Sequence
  Synthetic oligonucleotide
agatgttgcggctcaagatgaacgacataaa

SEQ ID NO: 302404 - DNA, 30 bp, Artificial Sequence
  Synthetic oligonucleotide
aaccagcagtaacggtggttaggacataaa

SEQ ID NO: 302405 - DNA, 30 bp, Artificial Sequence
  Synthetic oligonucleotide
gaatggcgcaacggctatcccgcccataaa

SEQ ID NO: 302406 - DNA, 30 bp, Artificial Sequence
  Synthetic oligonucleotide
ttaggcgagtggtaggatgtggagcataaa

SEQ ID NO: 302407 - DNA, 30 bp, Artificial Sequence
  Synthetic oligonucleotide
ggcggtcgagcgcaatatctatcgcataaa

SEQ ID NO: 302408 - DNA, 30 bp, Artificial Sequence
  Synthetic oligonucleotide
ggagggaagtctagctcagtggggcataaa

SEQ ID NO: 302409 - DNA, 30 bp, Artificial Sequence
  Synthetic oligonucleotide
aaagtgtacatatcaagtaatatgcataaa

SEQ ID NO: 302410 - DNA, 30 bp, Artificial Sequence
  Synthetic oligonucleotide
ctcaatctaaggcggttaacgtatcataaa

SEQ ID NO: 302411 - DNA, 30 bp, Artificial Sequence
  Synthetic oligonucleotide
ttgttcgagtctataatctcaactcataaa

SEQ ID NO: 302412 - DNA, 30 bp, Artificial Sequence
  Synthetic oligonucleotide
gaacacgatatattggtgaggagtcataaa

SEQ ID NO: 302413 - DNA, 30 bp, Artificial Sequence
  Synthetic oligonucleotide
agtaattgcgactaggatatgcgtcataaa

SEQ ID NO: 302414 - DNA, 30 bp, Artificial Sequence
  Synthetic oligonucleotide
taggcacacagattccgcctgttagataaa

SEQ ID NO: 302415 - DNA, 30 bp, Artificial Sequence
  Synthetic oligonucleotide
ttacctggaacgattgtgcatttagataaa

SEQ ID NO: 302416 - DNA, 30 bp, Artificial Sequence
  Synthetic oligonucleotide
acaatcttggggcgcgattttttagataaa

SEQ ID NO: 302417 - DNA, 30 bp, Artificial Sequence
  Synthetic oligonucleotide
caactaagttgagcctctgacaccgataaa

SEQ ID NO: 302418 - DNA, 30 bp, Artificial Sequence
  Synthetic oligonucleotide
ctcggtgaaacagcgttggcatcggataaa

SEQ ID NO: 302419 - DNA, 30 bp, Artificial Sequence
  Synthetic oligonucleotide
accagttcgggtgtaccattttcggataaa

SEQ ID NO: 302420 - DNA, 30 bp, Artificial Sequence
  Synthetic oligonucleotide
acataatggcggtaagtaggaagggataaa

SEQ ID NO: 302421 - DNA, 30 bp, Artificial Sequence
  Synthetic oligonucleotide
ggcctgggatggatataacgctgggataaa

SEQ ID NO: 302422 - DNA, 30 bp, Artificial Sequence
  Synthetic oligonucleotide
gaaagcatggcacgccgttacttggataaa

SEQ ID NO: 302423 - DNA, 30 bp, Artificial Sequence
  Synthetic oligonucleotide
ttatgtattatccccccaaacggtgataaa

SEQ ID NO: 302424 - DNA, 30 bp, Artificial Sequence
  Synthetic oligonucleotide
ctcgacagagtgcggcatcatagatataaa

SEQ ID NO: 302425 - DNA, 30 bp, Artificial Sequence
  Synthetic oligonucleotide
tcttcagagtgtgcccaggcgcgatataaa

SEQ ID NO: 302426 - DNA, 30 bp, Artificial Sequence
  Synthetic oligonucleotide
atagccaagtttgagtgttatcgctataaa

SEQ ID NO: 302427 - DNA, 30 bp, Artificial Sequence
  Synthetic oligonucleotide
ccagacaacctgaattcccttacgtataaa

SEQ ID NO: 302428 - DNA, 31 bp, Artificial Sequence
  Synthetic oligonucleotide
ccaccgcatgacccctactatcgcgtataaa

SEQ ID NO: 302429 - DNA, 30 bp, Artificial Sequence
  Synthetic oligonucleotide
tcggtcggcaatcgcgagcgcgattataaa

SEQ ID NO: 302430 - DNA, 30 bp, Artificial Sequence
  Synthetic oligonucleotide
gtgaaaatcgtgaggtcattggattataaa

SEQ ID NO: 302431 - DNA, 30 bp, Artificial Sequence
  Synthetic oligonucleotide
tgtgggcagtgcggaggtagaatttataaa

SEQ ID NO: 302432 - DNA, 30 bp, Artificial Sequence
  Synthetic oligonucleotide
acttgatgaagcgcgtaaagtgtttataaa

SEQ ID NO: 302433 - DNA, 30 bp, Artificial Sequence
  Synthetic oligonucleotide
atgatataaatcacggaaaggaaaactaaa

SEQ ID NO: 302434 - DNA, 30 bp, Artificial Sequence
  Synthetic oligonucleotide
taatgatgaccctggtcttttcaaactaaa

SEQ ID NO: 302435 - DNA, 30 bp, Artificial Sequence
  Synthetic oligonucleotide
cttagtgcaaagaatggcgacacaactaaa

SEQ ID NO: 302436 - DNA, 30 bp, Artificial Sequence
  Synthetic oligonucleotide
cgttattaccgatataaatcccttactaaa

SEQ ID NO: 302437 - DNA, 30 bp, Artificial Sequence
  Synthetic oligonucleotide
ccgggaacgtcatatgaggcttttactaaa

SEQ ID NO: 302438 - DNA, 30 bp, Artificial Sequence
  Synthetic oligonucleotide
ccatttcttagcacattcgtggtgcctaaa

SEQ ID NO: 302439 - DNA, 30 bp, Artificial Sequence
  Synthetic oligonucleotide
gcatacatatgttaaaaaagagatcctaaa

SEQ ID NO: 302440 - DNA, 30 bp, Artificial Sequence
  Synthetic oligonucleotide
actgcgataccacctggttggtatcctaaa

SEQ ID NO: 302441 - DNA, 30 bp, Artificial Sequence
  Synthetic oligonucleotide
cggtaaacggagattccatattctcctaaa

SEQ ID NO: 302442 - DNA, 30 bp, Artificial Sequence
  Synthetic oligonucleotide
tcaatcgtcgaaagtggaatttcagctaaa

SEQ ID NO: 302443 - DNA, 30 bp, Artificial Sequence
  Synthetic oligonucleotide
gagcatactgttcgtaaatgtagagctaaa

SEQ ID NO: 302444 - DNA, 30 bp, Artificial Sequence
  Synthetic oligonucleotide
cgtagcctttccgcggcacgatgagctaaa

SEQ ID NO: 302445 - DNA, 30 bp, Artificial Sequence
  Synthetic oligonucleotide
ttttgattgaaacgtggcagactagctaaa

SEQ ID NO: 302446 - DNA, 30 bp, Artificial Sequence
  Synthetic oligonucleotide
ctattttcgattacgtaggccgacgctaaa

SEQ ID NO: 302447 - DNA, 30 bp, Artificial Sequence
  Synthetic oligonucleotide
tgttcatatctctgggtggtatcggctaaa

SEQ ID NO: 302448 - DNA, 30 bp, Artificial Sequence
  Synthetic oligonucleotide
tatagcaaagcagcggagtggcgggctaaa

SEQ ID NO: 302449 - DNA, 30 bp, Artificial Sequence
  Synthetic oligonucleotide
tatacctggttacgaatattcactgctaaa

SEQ ID NO: 302450 - DNA, 30 bp, Artificial Sequence
  Synthetic oligonucleotide
cttaatggcacggcatctgtgaaatctaaa

SEQ ID NO: 302451 - DNA, 30 bp, Artificial Sequence
  Synthetic oligonucleotide
tagttcgtgagtggctacgattaatctaaa

SEQ ID NO: 302452 - DNA, 30 bp, Artificial Sequence
  Synthetic oligonucleotide
aatcaggagacatggtacattgcatctaaa

SEQ ID NO: 302453 - DNA, 30 bp, Artificial Sequence
  Synthetic oligonucleotide
cttctacttcgaggtctatccggatctaaa

SEQ ID NO: 302454 - DNA, 30 bp, Artificial Sequence
  Synthetic oligonucleotide
gtatggcatgataagcctagctgatctaaa

SEQ ID NO: 302455 - DNA, 30 bp, Artificial Sequence
  Synthetic oligonucleotide
gtggtcgagttattgggagtcgtatctaaa

SEQ ID NO: 302456 - DNA, 30 bp, Artificial Sequence
  Synthetic oligonucleotide
cctgaagacgaaaaatgtctcttatctaaa

SEQ ID NO: 302457 - DNA, 30 bp, Artificial Sequence
  Synthetic oligonucleotide
acgtaaggtgtcgcgccgccgttatctaaa

SEQ ID NO: 302458 - DNA, 30 bp, Artificial Sequence
  Synthetic oligonucleotide
tgatggggactgtttctcccctcctctaaa

SEQ ID NO: 302459 - DNA, 30 bp, Artificial Sequence
  Synthetic oligonucleotide
cctaccagattggaattggcagagtctaaa

SEQ ID NO: 302460 - DNA, 30 bp, Artificial Sequence
  Synthetic oligonucleotide
taaccggcgtagctactagtgtagtctaaa

SEQ ID NO: 302461 - DNA, 30 bp, Artificial Sequence
  Synthetic oligonucleotide
ttggtgtaccagcctagttggtcgtctaaa

SEQ ID NO: 302462 - DNA, 30 bp, Artificial Sequence
  Synthetic oligonucleotide
cgatcgcttgccagtcgcatggattctaaa

SEQ ID NO: 302463 - DNA, 30 bp, Artificial Sequence
  Synthetic oligonucleotide
agctagtaaaatcacatggggatttctaaa

SEQ ID NO: 302464 - DNA, 31 bp, Artificial Sequence
  Synthetic oligonucleotide
tagcctaccacaagtgttcatagtttctaaa

SEQ ID NO: 302465 - DNA, 30 bp, Artificial Sequence
  Synthetic oligonucleotide
gacggcaattgcctaggcatctacagtaaa

SEQ ID NO: 302466 - DNA, 30 bp, Artificial Sequence
  Synthetic oligonucleotide
tgataatttgacactgcgagttccagtaaa

SEQ ID NO: 302467 - DNA, 30 bp, Artificial Sequence
  Synthetic oligonucleotide
ggcgccattacgacggtaaatcgcagtaaa

SEQ ID NO: 302468 - DNA, 30 bp, Artificial Sequence
  Synthetic oligonucleotide
gaatcagtcagacgctacgaggaacgtaaa

SEQ ID NO: 302469 - DNA, 30 bp, Artificial Sequence
  Synthetic oligonucleotide
tagaatacaaggcgcagaagtccacgtaaa

SEQ ID NO: 302470 - DNA, 30 bp, Artificial Sequence
  Synthetic oligonucleotide
gtgtcgcggacaagtcaggaaggacgtaaa

SEQ ID NO: 302471 - DNA, 30 bp, Artificial Sequence
  Synthetic oligonucleotide
gtaactgtcccatttagcacaggacgtaaa

SEQ ID NO: 302472 - DNA, 30 bp, Artificial Sequence
  Synthetic oligonucleotide
tatcatttgggagccagtccgtgacgtaaa

SEQ ID NO: 302473 - DNA, 30 bp, Artificial Sequence
  Synthetic oligonucleotide
tggcagatacaaggtattgctgaccgtaaa

SEQ ID NO: 302474 - DNA, 30 bp, Artificial Sequence
  Synthetic oligonucleotide
agtctcgctcttttcaaggtatagcgtaaa

SEQ ID NO: 302475 - DNA, 30 bp, Artificial Sequence
  Synthetic oligonucleotide
gccctttaggtagcggttcggacgcgtaaa

SEQ ID NO: 302476 - DNA, 30 bp, Artificial Sequence
  Synthetic oligonucleotide
atttaccggatcgtaacacggcggcgtaaa

SEQ ID NO: 302477 - DNA, 30 bp, Artificial Sequence
  Synthetic oligonucleotide
catgactagtttgagtcgcattatcgtaaa

SEQ ID NO: 302478 - DNA, 30 bp, Artificial Sequence
  Synthetic oligonucleotide
tatcaaagacggtttgtaataggtcgtaaa

SEQ ID NO: 302479 - DNA, 30 bp, Artificial Sequence
  Synthetic oligonucleotide
aggtcaactatgaagaagacctttcgtaaa

SEQ ID NO: 302480 - DNA, 30 bp, Artificial Sequence
  Synthetic oligonucleotide
aacgcggtgcctcactctctccaaggtaaa

SEQ ID NO: 302481 - DNA, 30 bp, Artificial Sequence
  Synthetic oligonucleotide
tctatcctgagataggatccaaacggtaaa

SEQ ID NO: 302482 - DNA, 29 bp, Artificial Sequence
  Synthetic oligonucleotide
tgcgggagtcatcgtcggtatgcggtaaa

SEQ ID NO: 302483 - DNA, 30 bp, Artificial Sequence
  Synthetic oligonucleotide
agctccactcactcctcgggcctcggtaaa

SEQ ID NO: 302484 - DNA, 30 bp, Artificial Sequence
  Synthetic oligonucleotide
ctcaatacggacacacgtgtggtcggtaaa

SEQ ID NO: 302485 - DNA, 30 bp, Artificial Sequence
  Synthetic oligonucleotide
ttgaggtcgaaaaaaagccgcacgggtaaa

SEQ ID NO: 302486 - DNA, 30 bp, Artificial Sequence
  Synthetic oligonucleotide
accacggtctcaccatcagggaggggtaaa

SEQ ID NO: 302487 - DNA, 30 bp, Artificial Sequence
  Synthetic oligonucleotide
agacagcacagacaacgcgtggggggtaaa

SEQ ID NO: 302488 - DNA, 30 bp, Artificial Sequence
  Synthetic oligonucleotide
aagctgtaagaagccgctctgaatggtaaa

SEQ ID NO: 302489 - DNA, 30 bp, Artificial Sequence
  Synthetic oligonucleotide
cttagttgcacgtatgatccgcctggtaaa

SEQ ID NO: 302490 - DNA, 30 bp, Artificial Sequence
  Synthetic oligonucleotide
ctaatagaggcagggcaacaactatgtaaa

SEQ ID NO: 302491 - DNA, 30 bp, Artificial Sequence
  Synthetic oligonucleotide
acattgacgctagaggatagctactgtaaa

SEQ ID NO: 302492 - DNA, 30 bp, Artificial Sequence
  Synthetic oligonucleotide
gctcttagttcttagggacgagcgtgtaaa

SEQ ID NO: 302493 - DNA, 30 bp, Artificial Sequence
  Synthetic oligonucleotide
gtaagccgtcccatgatacgtaggtgtaaa

SEQ ID NO: 302494 - DNA, 30 bp, Artificial Sequence
  Synthetic oligonucleotide
gatcacgttggagcatcgctagggtgtaaa

SEQ ID NO: 302495 - DNA, 30 bp, Artificial Sequence
  Synthetic oligonucleotide
atgacttttcagccctcatactggtgtaaa

SEQ ID NO: 302496 - DNA, 30 bp, Artificial Sequence
  Synthetic oligonucleotide
ggggattcgcgatgaaagttttggtgtaaa

SEQ ID NO: 302497 - DNA, 30 bp, Artificial Sequence
  Synthetic oligonucleotide
cgacaccattggcgagtaagacattgtaaa

SEQ ID NO: 302498 - DNA, 30 bp, Artificial Sequence
  Synthetic oligonucleotide
gtatccagatccagtatgcatggttgtaaa

SEQ ID NO: 302499 - DNA, 30 bp, Artificial Sequence
  Synthetic oligonucleotide
cttgcgaactcgcctactttgatttgtaaa

SEQ ID NO: 302500 - DNA, 30 bp, Artificial Sequence
  Synthetic oligonucleotide
tctacaaggtaatggctgattatttgtaaa

SEQ ID NO: 302501 - DNA, 30 bp, Artificial Sequence
  Synthetic oligonucleotide
ctcaggatggagtccatgtgtcaaattaaa

SEQ ID NO: 302502 - DNA, 30 bp, Artificial Sequence
  Synthetic oligonucleotide
gctaataagcgagactttggagaaattaaa

SEQ ID NO: 302503 - DNA, 30 bp, Artificial Sequence
  Synthetic oligonucleotide
ttcagagaatctcagaagtctcgaattaaa

SEQ ID NO: 302504 - DNA, 30 bp, Artificial Sequence
  Synthetic oligonucleotide
gtggagtccgggttagtatcgtgaattaaa

SEQ ID NO: 302505 - DNA, 30 bp, Artificial Sequence
  Synthetic oligonucleotide
aagcaccgagattcaactaatatcattaaa

SEQ ID NO: 302506 - DNA, 30 bp, Artificial Sequence
  Synthetic oligonucleotide
aaaggcaattggtcatctaatatcattaaa

SEQ ID NO: 302507 - DNA, 30 bp, Artificial Sequence
  Synthetic oligonucleotide
atgtttaagaccagatcctaagtcattaaa

SEQ ID NO: 302508 - DNA, 30 bp, Artificial Sequence
  Synthetic oligonucleotide
aaaaggcgtatgggtttaagcgagattaaa

SEQ ID NO: 302509 - DNA, 30 bp, Artificial Sequence
  Synthetic oligonucleotide
ggcatcgatgataggcatgtaggacttaaa

SEQ ID NO: 302510 - DNA, 30 bp, Artificial Sequence
  Synthetic oligonucleotide
ttttagcaaatagtgggcgtcggccttaaa

SEQ ID NO: 302511 - DNA, 30 bp, Artificial Sequence
  Synthetic oligonucleotide
cgttcttaatctatggggcggtgccttaaa

SEQ ID NO: 302512 - DNA, 30 bp, Artificial Sequence
  Synthetic oligonucleotide
agagtatgaaatgactcttaggcgcttaaa

SEQ ID NO: 302513 - DNA, 30 bp, Artificial Sequence
  Synthetic oligonucleotide
ttcctctgagtaacgtcgactatgcttaaa

SEQ ID NO: 302514 - DNA, 30 bp, Artificial Sequence
  Synthetic oligonucleotide
ccgcccagccagaagacatgaaaagttaaa

SEQ ID NO: 302515 - DNA, 30 bp, Artificial Sequence
  Synthetic oligonucleotide
agctagctcggcacctgtaaacgagttaaa

SEQ ID NO: 302516 - DNA, 30 bp, Artificial Sequence
  Synthetic oligonucleotide
cagtgtcagtccagttattcatgagttaaa

SEQ ID NO: 302517 - DNA, 30 bp, Artificial Sequence
  Synthetic oligonucleotide
tatcgaattgttggattttcaatagttaaa

SEQ ID NO: 302518 - DNA, 30 bp, Artificial Sequence
  Synthetic oligonucleotide
gtctcaagtaggtatgactcatacgttaaa

SEQ ID NO: 302519 - DNA, 30 bp, Artificial Sequence
  Synthetic oligonucleotide
aggtacagtggcttttctaaagtggttaaa

SEQ ID NO: 302520 - DNA, 30 bp, Artificial Sequence
  Synthetic oligonucleotide
gaccccgtctggtcgttacgtgtggttaaa

SEQ ID NO: 302521 - DNA, 30 bp, Artificial Sequence
  Synthetic oligonucleotide
ataacgaccacatttttaaacttggttaaa

SEQ ID NO: 302522 - DNA, 30 bp, Artificial Sequence
  Synthetic oligonucleotide
aacgtatatctatggaggagcaatgttaaa

SEQ ID NO: 302523 - DNA, 30 bp, Artificial Sequence
  Synthetic oligonucleotide
agaatagcttgtcgtacaacgtaatttaaa

SEQ ID NO: 302524 - DNA, 30 bp, Artificial Sequence
  Synthetic oligonucleotide
tgtcgaccgagggcttggatcatctttaaa

SEQ ID NO: 302525 - DNA, 30 bp, Artificial Sequence
  Synthetic oligonucleotide
cctgcgccggtactcttaacgaattttaaa

SEQ ID NO: 302526 - DNA, 30 bp, Artificial Sequence
  Synthetic oligonucleotide
gggaagtgctggggcaagcttacttttaaa

SEQ ID NO: 302527 - DNA, 30 bp, Artificial Sequence
  Synthetic oligonucleotide
tccgggacgttgggggtgtgaagttttaaa

SEQ ID NO: 302528 - DNA, 30 bp, Artificial Sequence
  Synthetic oligonucleotide
ggtattacaatcctacgacaattttttaaa

SEQ ID NO: 302529 - DNA, 30 bp, Artificial Sequence
  Synthetic oligonucleotide
tccgggtccgttgatgcgctactaaaacaa

SEQ ID NO: 302530 - DNA, 30 bp, Artificial Sequence
  Synthetic oligonucleotide
ctcacaaccgtgttagagaccgtaaaacaa

SEQ ID NO: 302531 - DNA, 30 bp, Artificial Sequence
  Synthetic oligonucleotide
gaagctaaagtccagggttaattaaaacaa

SEQ ID NO: 302532 - DNA, 30 bp, Artificial Sequence
  Synthetic oligonucleotide
tggggtctttgcgcaggtcttaacaaacaa

SEQ ID NO: 302533 - DNA, 30 bp, Artificial Sequence
  Synthetic oligonucleotide
gcttcctatggtgaggtctttcgcaaacaa

SEQ ID NO: 302534 - DNA, 30 bp, Artificial Sequence
  Synthetic oligonucleotide
tcatcgatctttatttcttcgacgaaacaa

SEQ ID NO: 302535 - DNA, 30 bp, Artificial Sequence
  Synthetic oligonucleotide
tgtttaaactcggtcggcccccggaaacaa

SEQ ID NO: 302536 - DNA, 30 bp, Artificial Sequence
  Synthetic oligonucleotide
ctgttcagaaaaatatcaggcgtgaaacaa

SEQ ID NO: 302537 - DNA, 30 bp, Artificial Sequence
  Synthetic oligonucleotide
gggagcggcaggattttaagtagacaacaa

SEQ ID NO: 302538 - DNA, 30 bp, Artificial Sequence
  Synthetic oligonucleotide
aatggtttgcattgatagcgtcaccaacaa

SEQ ID NO: 302539 - DNA, 30 bp, Artificial Sequence
  Synthetic oligonucleotide
tgatagtcatccggcggccctaggcaacaa

SEQ ID NO: 302540 - DNA, 30 bp, Artificial Sequence
  Synthetic oligonucleotide
ccgcccttgcctgactgaacattgcaacaa

SEQ ID NO: 302541 - DNA, 30 bp, Artificial Sequence
  Synthetic oligonucleotide
gatggttagtgtgacatctctcatcaacaa

SEQ ID NO: 302542 - DNA, 30 bp, Artificial Sequence
  Synthetic oligonucleotide
caagtcaatccgcaaagcaccgatcaacaa

SEQ ID NO: 302543 - DNA, 30 bp, Artificial Sequence
  Synthetic oligonucleotide
agtgaggatgcagacgttgtcgctcaacaa

SEQ ID NO: 302544 - DNA, 30 bp, Artificial Sequence
  Synthetic oligonucleotide
gtcaataatgtgaatatctcagaagaacaa

SEQ ID NO: 302545 - DNA, 30 bp, Artificial Sequence
  Synthetic oligonucleotide
aaaaaaagacaagaggctttaacagaacaa

SEQ ID NO: 302546 - DNA, 30 bp, Artificial Sequence
  Synthetic oligonucleotide
cacattcgcaaaacttgttttcgcgaacaa

SEQ ID NO: 302547 - DNA, 30 bp, Artificial Sequence
  Synthetic oligonucleotide
gagcacagattatgccacgtcggcgaacaa

SEQ ID NO: 302548 - DNA, 30 bp, Artificial Sequence
  Synthetic oligonucleotide
ttgtcacattccgaggggttctaggaacaa

SEQ ID NO: 302549 - DNA, 30 bp, Artificial Sequence
  Synthetic oligonucleotide
aacaaataatcttgtaccatagtggaacaa

SEQ ID NO: 302550 - DNA, 30 bp, Artificial Sequence
  Synthetic oligonucleotide
tataaccttgcacaacacataacgtaacaa

SEQ ID NO: 302551 - DNA, 30 bp, Artificial Sequence
  Synthetic oligonucleotide
gcgcatacctaacctcgtttaatgtaacaa

SEQ ID NO: 302552 - DNA, 30 bp, Artificial Sequence
  Synthetic oligonucleotide
cgctaatccggttcaggatacctgtaacaa

SEQ ID NO: 302553 - DNA, 30 bp, Artificial Sequence
  Synthetic oligonucleotide
gcttgttccagacggaaccgtggttaacaa

SEQ ID NO: 302554 - DNA, 30 bp, Artificial Sequence
  Synthetic oligonucleotide
gtttgatccccatgaaaattgccaacacaa

SEQ ID NO: 302555 - DNA, 30 bp, Artificial Sequence
  Synthetic oligonucleotide
atccgtgctagggagaggcgcaacacacaa

SEQ ID NO: 302556 - DNA, 30 bp, Artificial Sequence
  Synthetic oligonucleotide
ataagctctataatgggaatgagtacacaa

SEQ ID NO: 302557 - DNA, 30 bp, Artificial Sequence
  Synthetic oligonucleotide
atacgggagtagtcggtcatgctaccacaa

SEQ ID NO: 302558 - DNA, 30 bp, Artificial Sequence
  Synthetic oligonucleotide
gagccggtgttattgtaatcggcgccacaa

SEQ ID NO: 302559 - DNA, 30 bp, Artificial Sequence
  Synthetic oligonucleotide
tgcgggtttctacacttctacgggccacaa

SEQ ID NO: 302560 - DNA, 30 bp, Artificial Sequence
  Synthetic oligonucleotide
cccatggcccctacggttagaaatccacaa

SEQ ID NO: 302561 - DNA, 30 bp, Artificial Sequence
  Synthetic oligonucleotide
attcggccgacgatctgagcttctccacaa

SEQ ID NO: 302562 - DNA, 30 bp, Artificial Sequence
  Synthetic oligonucleotide
caggagcgtgcctttgtaagataagcacaa

SEQ ID NO: 302563 - DNA, 30 bp, Artificial Sequence
  Synthetic oligonucleotide
gttaaccaaataacgcctctccgagcacaa

SEQ ID NO: 302564 - DNA, 30 bp, Artificial Sequence
  Synthetic oligonucleotide
catctctcgtcggcggtatccgacgcacaa

SEQ ID NO: 302565 - DNA, 30 bp, Artificial Sequence
  Synthetic oligonucleotide
tcgtacgtagtaacagataggcccgcacaa

SEQ ID NO: 302566 - DNA, 30 bp, Artificial Sequence
  Synthetic oligonucleotide
acggataatgtaatcgcttcgaatgcacaa

SEQ ID NO: 302567 - DNA, 30 bp, Artificial Sequence
  Synthetic oligonucleotide
agaagcggaaacatccgcacgagtgcacaa

SEQ ID NO: 302568 - DNA, 30 bp, Artificial Sequence
  Synthetic oligonucleotide
gagagtcaaggaaatccatacggctcacaa

SEQ ID NO: 302569 - DNA, 30 bp, Artificial Sequence
  Synthetic oligonucleotide
gagtgtattcatgctgggacagagtcacaa

SEQ ID NO: 302570 - DNA, 30 bp, Artificial Sequence
  Synthetic oligonucleotide
agtaacgtgaaacgtcgaacgctttcacaa

SEQ ID NO: 302571 - DNA, 30 bp, Artificial Sequence
  Synthetic oligonucleotide
atatatccggtcgtcggggggttaagacaa

SEQ ID NO: 302572 - DNA, 30 bp, Artificial Sequence
  Synthetic oligonucleotide
gacgttgggtaatacgatcccaacagacaa

SEQ ID NO: 302573 - DNA, 30 bp, Artificial Sequence
  Synthetic oligonucleotide
tgccactgttgatagtaacgacccagacaa

SEQ ID NO: 302574 - DNA, 30 bp, Artificial Sequence
  Synthetic oligonucleotide
ccagctagacccgtctccgcattcagacaa

SEQ ID NO: 302575 - DNA, 30 bp, Artificial Sequence
  Synthetic oligonucleotide
agtcctggcctaaaaggcgtaacgagacaa

SEQ ID NO: 302576 - DNA, 30 bp, Artificial Sequence
  Synthetic oligonucleotide
atacgcacgctggggcccccaatgagacaa

SEQ ID NO: 302577 - DNA, 30 bp, Artificial Sequence
  Synthetic oligonucleotide
catcatactcgagtgctaacgacacgacaa

SEQ ID NO: 302578 - DNA, 30 bp, Artificial Sequence
  Synthetic oligonucleotide
agtataagaagatcgatcgcgccacgacaa

SEQ ID NO: 302579 - DNA, 30 bp, Artificial Sequence
  Synthetic oligonucleotide
taaataggaatcatgtcggcgaggcgacaa

SEQ ID NO: 302580 - DNA, 30 bp, Artificial Sequence
  Synthetic oligonucleotide
cactcggagtcattgttattggatcgacaa

SEQ ID NO: 302581 - DNA, 30 bp, Artificial Sequence
  Synthetic oligonucleotide
cgttgtatacatgcgtagactgatcgacaa

SEQ ID NO: 302582 - DNA, 30 bp, Artificial Sequence
  Synthetic oligonucleotide
gaaattcgtcgataaaaacgaattcgacaa

SEQ ID NO: 302583 - DNA, 30 bp, Artificial Sequence
  Synthetic oligonucleotide
cctttatccctccatatctgttttcgacaa

SEQ ID NO: 302584 - DNA, 30 bp, Artificial Sequence
  Synthetic oligonucleotide
ggaatgtatgccaggggtgacgagggacaa

SEQ ID NO: 302585 - DNA, 30 bp, Artificial Sequence
  Synthetic oligonucleotide
tgcagatagtgcatccaacactcgggacaa

SEQ ID NO: 302586 - DNA, 30 bp, Artificial Sequence
  Synthetic oligonucleotide
gactgtcttccttaaagataattgggacaa

SEQ ID NO: 302587 - DNA, 30 bp, Artificial Sequence
  Synthetic oligonucleotide
atctgtttttaactttatagagctggacaa

SEQ ID NO: 302588 - DNA, 30 bp, Artificial Sequence
  Synthetic oligonucleotide
catcctggtgcaacggacggaagtggacaa

SEQ ID NO: 302589 - DNA, 30 bp, Artificial Sequence
  Synthetic oligonucleotide
aattcgagattggcaataggatttggacaa

SEQ ID NO: 302590 - DNA, 30 bp, Artificial Sequence
  Synthetic oligonucleotide
gtcggggtctccttaaggatgtaatgacaa

SEQ ID NO: 302591 - DNA, 30 bp, Artificial Sequence
  Synthetic oligonucleotide
gacatgtggcttttttatcataactgacaa

SEQ ID NO: 302592 - DNA, 30 bp, Artificial Sequence
  Synthetic oligonucleotide
tgtaatctgaaacggatatgcatctgacaa

SEQ ID NO: 302593 - DNA, 30 bp, Artificial Sequence
  Synthetic oligonucleotide
acagcgcccgcatcccacatggtctgacaa

SEQ ID NO: 302594 - DNA, 30 bp, Artificial Sequence
  Synthetic oligonucleotide
cttctcgataccggcttgcaagagtgacaa

SEQ ID NO: 302595 - DNA, 30 bp, Artificial Sequence
  Synthetic oligonucleotide
acgactggaattaattgctgggagtgacaa

SEQ ID NO: 302596 - DNA, 30 bp, Artificial Sequence
  Synthetic oligonucleotide
aagttaatccggcagtcgttcttttgacaa

SEQ ID NO: 302597 - DNA, 30 bp, Artificial Sequence
  Synthetic oligonucleotide
cagaacgtgcgccaagccatttaaatacaa

SEQ ID NO: 302598 - DNA, 30 bp, Artificial Sequence
  Synthetic oligonucleotide
ccttcagggggggctctgttgacaatacaa

SEQ ID NO: 302599 - DNA, 30 bp, Artificial Sequence
  Synthetic oligonucleotide
gggcagagtaaatattatggcagcatacaa

SEQ ID NO: 302600 - DNA, 30 bp, Artificial Sequence
  Synthetic oligonucleotide
ttcgtagccaatgcgggcggtgtcatacaa

SEQ ID NO: 302601 - DNA, 30 bp, Artificial Sequence
  Synthetic oligonucleotide
aatgagtaaggcaatgcatcccggatacaa

SEQ ID NO: 302602 - DNA, 30 bp, Artificial Sequence
  Synthetic oligonucleotide
accagcccgataagtctaattatgatacaa

SEQ ID NO: 302603 - DNA, 30 bp, Artificial Sequence
  Synthetic oligonucleotide
aaagtacagtcatgccaagtactgatacaa

SEQ ID NO: 302604 - DNA, 30 bp, Artificial Sequence
  Synthetic oligonucleotide
tctcaggggagcctttcccagcctatacaa

SEQ ID NO: 302605 - DNA, 30 bp, Artificial Sequence
  Synthetic oligonucleotide
taacgctatcctagccacctcgctatacaa

SEQ ID NO: 302606 - DNA, 30 bp, Artificial Sequence
  Synthetic oligonucleotide
atattaaatgctaatccgagtccactacaa

SEQ ID NO: 302607 - DNA, 30 bp, Artificial Sequence
  Synthetic oligonucleotide
gttacccacagacttgaaagtcgactacaa

SEQ ID NO: 302608 - DNA, 30 bp, Artificial Sequence
  Synthetic oligonucleotide
cccactataaggcgatccagggtactacaa

SEQ ID NO: 302609 - DNA, 30 bp, Artificial Sequence
  Synthetic oligonucleotide
ccgaggtgaaaggtcctggtgtagctacaa

SEQ ID NO: 302610 - DNA, 30 bp, Artificial Sequence
  Synthetic oligonucleotide
gagaattctcgtgaagatgagcgcgtacaa

SEQ ID NO: 302611 - DNA, 30 bp, Artificial Sequence
  Synthetic oligonucleotide
atacgtagtgattcgcggcgattggtacaa

SEQ ID NO: 302612 - DNA, 30 bp, Artificial Sequence
  Synthetic oligonucleotide
tgcttgtactagctccaaagggaattacaa

SEQ ID NO: 302613 - DNA, 30 bp, Artificial Sequence
  Synthetic oligonucleotide
ccaaaagctgtctatccacggccattacaa

SEQ ID NO: 302614 - DNA, 30 bp, Artificial Sequence
  Synthetic oligonucleotide
agccagaggatcgaatacgcaagattacaa

SEQ ID NO: 302615 - DNA, 30 bp, Artificial Sequence
  Synthetic oligonucleotide
atcgcagcggtgacattgcatatcttacaa

SEQ ID NO: 302616 - DNA, 30 bp, Artificial Sequence
  Synthetic oligonucleotide
cgtatgtgatgtagtgtgtccttcttacaa

SEQ ID NO: 302617 - DNA, 30 bp, Artificial Sequence
  Synthetic oligonucleotide
catatggaatcagttataacatcgttacaa

SEQ ID NO: 302618 - DNA, 30 bp, Artificial Sequence
  Synthetic oligonucleotide
gtcgccctcgtgtctagccgttcgttacaa

SEQ ID NO: 302619 - DNA, 30 bp, Artificial Sequence
  Synthetic oligonucleotide
taccctggacacacagggggagggttacaa

SEQ ID NO: 302620 - DNA, 30 bp, Artificial Sequence
  Synthetic oligonucleotide
agacaaagaacagggggggttttgttacaa

SEQ ID NO: 302621 - DNA, 30 bp, Artificial Sequence
  Synthetic oligonucleotide
gtgatatgagaggttgatcaggatttacaa

SEQ ID NO: 302622 - DNA, 30 bp, Artificial Sequence
  Synthetic oligonucleotide
gcacgagatgacacacatgggtatttacaa

SEQ ID NO: 302623 - DNA, 30 bp, Artificial Sequence
  Synthetic oligonucleotide
ctcgggcccggcaaagaatcccctttacaa

SEQ ID NO: 302624 - DNA, 30 bp, Artificial Sequence
  Synthetic oligonucleotide
agacgaatatctctcgcttgtataaaccaa

SEQ ID NO: 302625 - DNA, 30 bp, Artificial Sequence
  Synthetic oligonucleotide
catcttttaagaataaataaaaagaaccaa

SEQ ID NO: 302626 - DNA, 30 bp, Artificial Sequence
  Synthetic oligonucleotide
tctgccaaggcaaggctattttagaaccaa

SEQ ID NO: 302627 - DNA, 30 bp, Artificial Sequence
  Synthetic oligonucleotide
cgtaattatggggggagtatcacgaaccaa

SEQ ID NO: 302628 - DNA, 30 bp, Artificial Sequence
  Synthetic oligonucleotide
aaggctacagaaatcagaggtcaacaccaa

SEQ ID NO: 302629 - DNA, 30 bp, Artificial Sequence
  Synthetic oligonucleotide
ttcgggaatcttcaggcacccaaccaccaa

SEQ ID NO: 302630 - DNA, 30 bp, Artificial Sequence
  Synthetic oligonucleotide
ttgtcgatagcaatatacggcacgcaccaa

SEQ ID NO: 302631 - DNA, 30 bp, Artificial Sequence
  Synthetic oligonucleotide
gtcaggagaccggaacgcctgacgcaccaa

SEQ ID NO: 302632 - DNA, 30 bp, Artificial Sequence
  Synthetic oligonucleotide
gcaggtcggacggtagttttgtgtcaccaa

SEQ ID NO: 302633 - DNA, 30 bp, Artificial Sequence
  Synthetic oligonucleotide
tcaccaaacgcaggcagcgataaagaccaa

SEQ ID NO: 302634 - DNA, 30 bp, Artificial Sequence
  Synthetic oligonucleotide
tgaccccgaccgcaagaacagaccgaccaa

SEQ ID NO: 302635 - DNA, 30 bp, Artificial Sequence
  Synthetic oligonucleotide
cataatgttatttttgttggtgtcgaccaa

SEQ ID NO: 302636 - DNA, 30 bp, Artificial Sequence
  Synthetic oligonucleotide
gccgtggccaatttcgtagatcgataccaa

SEQ ID NO: 302637 - DNA, 30 bp, Artificial Sequence
  Synthetic oligonucleotide
tatggactattgctagactctgtataccaa

SEQ ID NO: 302638 - DNA, 30 bp, Artificial Sequence
  Synthetic oligonucleotide
caaccagcgtagtctcggaccacgtaccaa

SEQ ID NO: 302639 - DNA, 30 bp, Artificial Sequence
  Synthetic oligonucleotide
gcgcgccaattagatccttaacggtaccaa

SEQ ID NO: 302640 - DNA, 30 bp, Artificial Sequence
  Synthetic oligonucleotide
aggttggggtgtcggttcttggtaacccaa

SEQ ID NO: 302641 - DNA, 30 bp, Artificial Sequence
  Synthetic oligonucleotide
ccttttggcagggcatcgccttccacccaa

SEQ ID NO: 302642 - DNA, 30 bp, Artificial Sequence
  Synthetic oligonucleotide
aaatgcacgattaggtgccgggtcacccaa

SEQ ID NO: 302643 - DNA, 30 bp, Artificial Sequence
  Synthetic oligonucleotide
tagtaaaatgcctgtgatattacgacccaa

SEQ ID NO: 302644 - DNA, 30 bp, Artificial Sequence
  Synthetic oligonucleotide
tgtatggagttcttagagacatatacccaa

SEQ ID NO: 302645 - DNA, 30 bp, Artificial Sequence
  Synthetic oligonucleotide
acagataagcattaagcttcgcgtacccaa

SEQ ID NO: 302646 - DNA, 30 bp, Artificial Sequence
  Synthetic oligonucleotide
gagggggcatgtccccttctctaaccccaa

SEQ ID NO: 302647 - DNA, 30 bp, Artificial Sequence
  Synthetic oligonucleotide
cttcctgaggacaacacagaagatccccaa

SEQ ID NO: 302648 - DNA, 30 bp, Artificial Sequence
  Synthetic oligonucleotide
tcagtggaccgctatagcaacacagcccaa

SEQ ID NO: 302649 - DNA, 30 bp, Artificial Sequence
  Synthetic oligonucleotide
tactagaaatagggcagacatagagcccaa

SEQ ID NO: 302650 - DNA, 30 bp, Artificial Sequence
  Synthetic oligonucleotide
tgcctgacacctataaccgaacgcgcccaa

SEQ ID NO: 302651 - DNA, 30 bp, Artificial Sequence
  Synthetic oligonucleotide
atatgtctaggtttgaagtccaaatcccaa

SEQ ID NO: 302652 - DNA, 30 bp, Artificial Sequence
  Synthetic oligonucleotide
agggaaggtttgcgttcctccggatcccaa

SEQ ID NO: 302653 - DNA, 30 bp, Artificial Sequence
  Synthetic oligonucleotide
cgcacccgcgtactcgttagaccctcccaa

SEQ ID NO: 302654 - DNA, 30 bp, Artificial Sequence
  Synthetic oligonucleotide
cggccgaagttggctctatggctctcccaa

SEQ ID NO: 302655 - DNA, 30 bp, Artificial Sequence
  Synthetic oligonucleotide
ggattgtaaatatatcaaaacttctcccaa

SEQ ID NO: 302656 - DNA, 30 bp, Artificial Sequence
  Synthetic oligonucleotide
gaacacatttagtacaaagtagggtcccaa

SEQ ID NO: 302657 - DNA, 30 bp, Artificial Sequence
  Synthetic oligonucleotide
acctcgccctatcgaaaaggcaattcccaa

SEQ ID NO: 302658 - DNA, 30 bp, Artificial Sequence
  Synthetic oligonucleotide
ttttcgtaagtggcgtcaacaacaagccaa

SEQ ID NO: 302659 - DNA, 30 bp, Artificial Sequence
  Synthetic oligonucleotide
atcacctgtactcagagactggcaagccaa

SEQ ID NO: 302660 - DNA, 30 bp, Artificial Sequence
  Synthetic oligonucleotide
tcgcaggtctacatgaatatacccagccaa

SEQ ID NO: 302661 - DNA, 30 bp, Artificial Sequence
  Synthetic oligonucleotide
ttggatcacatcgtctcgcagggtagccaa

SEQ ID NO: 302662 - DNA, 30 bp, Artificial Sequence
  Synthetic oligonucleotide
acggtgaaaacatccatgactcaccgccaa

SEQ ID NO: 302663 - DNA, 30 bp, Artificial Sequence
  Synthetic oligonucleotide
atgcggatcgctatagagcttgctcgccaa

SEQ ID NO: 302664 - DNA, 30 bp, Artificial Sequence
  Synthetic oligonucleotide
acgggcgcctgtgtactgtaccgaggccaa

SEQ ID NO: 302665 - DNA, 30 bp, Artificial Sequence
  Synthetic oligonucleotide
aatattatagccctacgaagccgaggccaa

SEQ ID NO: 302666 - DNA, 30 bp, Artificial Sequence
  Synthetic oligonucleotide
gaagccaatacaagatgtgccataggccaa

SEQ ID NO: 302667 - DNA, 30 bp, Artificial Sequence
  Synthetic oligonucleotide
gttgatggaagatgtgggagtctaggccaa

SEQ ID NO: 302668 - DNA, 30 bp, Artificial Sequence
  Synthetic oligonucleotide
aaatgcacacgagtacaacgtgtgggccaa

SEQ ID NO: 302669 - DNA, 30 bp, Artificial Sequence
  Synthetic oligonucleotide
gtcgggggtaaatcgcttatcccatgccaa

SEQ ID NO: 302670 - DNA, 30 bp, Artificial Sequence
  Synthetic oligonucleotide
gcgggcgattttaaggaaagcttctgccaa

SEQ ID NO: 302671 - DNA, 30 bp, Artificial Sequence
  Synthetic oligonucleotide
agtcctagagagtccgcaggcaagtgccaa

SEQ ID NO: 302672 - DNA, 30 bp, Artificial Sequence
  Synthetic oligonucleotide
agccctttaactaagacaagaaattgccaa

SEQ ID NO: 302673 - DNA, 30 bp, Artificial Sequence
  Synthetic oligonucleotide
tgcagatatagtacaacagtaccttgccaa

SEQ ID NO: 302674 - DNA, 30 bp, Artificial Sequence
  Synthetic oligonucleotide
gcgacggctgctgcagccactcagatccaa

SEQ ID NO: 302675 - DNA, 30 bp, Artificial Sequence
  Synthetic oligonucleotide
tattatacaaaatatgtcgtcacgatccaa

SEQ ID NO: 302676 - DNA, 30 bp, Artificial Sequence
  Synthetic oligonucleotide
cagtaggttatcagttgagctttgatccaa

SEQ ID NO: 302677 - DNA, 30 bp, Artificial Sequence
  Synthetic oligonucleotide
agataagcacgtttcccacccgctatccaa

SEQ ID NO: 302678 - DNA, 30 bp, Artificial Sequence
  Synthetic oligonucleotide
ctagagaattagcattcgacgacactccaa

SEQ ID NO: 302679 - DNA, 30 bp, Artificial Sequence
  Synthetic oligonucleotide
cttagttaaggctcccatgtttacctccaa

SEQ ID NO: 302680 - DNA, 30 bp, Artificial Sequence
  Synthetic oligonucleotide
tattaaccatgtgcgtgatctcggctccaa

SEQ ID NO: 302681 - DNA, 30 bp, Artificial Sequence
  Synthetic oligonucleotide
cgaacgactcccggttatgctatgctccaa

SEQ ID NO: 302682 - DNA, 30 bp, Artificial Sequence
  Synthetic oligonucleotide
tatggtgacaacaatagcctcgaagtccaa

SEQ ID NO: 302683 - DNA, 30 bp, Artificial Sequence
  Synthetic oligonucleotide
ccatactcgagcgatgctttaagagtccaa

SEQ ID NO: 302684 - DNA, 30 bp, Artificial Sequence
  Synthetic oligonucleotide
tgaccgaaatcatgaccgaaccaggtccaa

SEQ ID NO: 302685 - DNA, 30 bp, Artificial Sequence
  Synthetic oligonucleotide
gacggtcggcgctgaatatagatggtccaa

SEQ ID NO: 302686 - DNA, 30 bp, Artificial Sequence
  Synthetic oligonucleotide
aggtctgcatggggcggttcatttgtccaa

SEQ ID NO: 302687 - DNA, 30 bp, Artificial Sequence
  Synthetic oligonucleotide
gaacagacacggatgagtaaacaattccaa

SEQ ID NO: 302688 - DNA, 30 bp, Artificial Sequence
  Synthetic oligonucleotide
agccacggtccttaactgcttagattccaa

SEQ ID NO: 302689 - DNA, 30 bp, Artificial Sequence
  Synthetic oligonucleotide
tttaaaaagagagaccgtcgggacttccaa

SEQ ID NO: 302690 - DNA, 30 bp, Artificial Sequence
  Synthetic oligonucleotide
aaggttccgcgagtcggaacatggttccaa

SEQ ID NO: 302691 - DNA, 30 bp, Artificial Sequence
  Synthetic oligonucleotide
gtttcgggtaggcgcaatcagctgttccaa

SEQ ID NO: 302692 - DNA, 30 bp, Artificial Sequence
  Synthetic oligonucleotide
tgcgaccaagatacatagagggttttccaa

SEQ ID NO: 302693 - DNA, 30 bp, Artificial Sequence
  Synthetic oligonucleotide
gctaagctccagttcgagagcaaaaagcaa

SEQ ID NO: 302694 - DNA, 30 bp, Artificial Sequence
  Synthetic oligonucleotide
ttgtgttacgcgtttcagcgcgtaaagcaa

SEQ ID NO: 302695 - DNA, 30 bp, Artificial Sequence
  Synthetic oligonucleotide
ggtggcaggattctgccacctcgcaagcaa

SEQ ID NO: 302696 - DNA, 30 bp, Artificial Sequence
  Synthetic oligonucleotide
ttaaactcatggtctacagagatcaagcaa

SEQ ID NO: 302697 - DNA, 30 bp, Artificial Sequence
  Synthetic oligonucleotide
tgtattgccatatccaaaagccttaagcaa

SEQ ID NO: 302698 - DNA, 30 bp, Artificial Sequence
  Synthetic oligonucleotide
taattcccttggtatcggagttttaagcaa

SEQ ID NO: 302699 - DNA, 30 bp, Artificial Sequence
  Synthetic oligonucleotide
aactacaaagggggccaatgtgaacagcaa

SEQ ID NO: 302700 - DNA, 30 bp, Artificial Sequence
  Synthetic oligonucleotide
ccgttattaggtaattggaccggacagcaa

SEQ ID NO: 302701 - DNA, 30 bp, Artificial Sequence
  Synthetic oligonucleotide
atcgcccatggtttgctgctctgacagcaa

SEQ ID NO: 302702 - DNA, 30 bp, Artificial Sequence
  Synthetic oligonucleotide
taaggagcccggacacgtatcacccagcaa

SEQ ID NO: 302703 - DNA, 30 bp, Artificial Sequence
  Synthetic oligonucleotide
aattgtatatcagtagccgcggtccagcaa

SEQ ID NO: 302704 - DNA, 30 bp, Artificial Sequence
  Synthetic oligonucleotide
cccttaaaatccataatactagacgagcaa

SEQ ID NO: 302705 - DNA, 30 bp, Artificial Sequence
  Synthetic oligonucleotide
aatcacaaaggtcaggtacgatcggagcaa

SEQ ID NO: 302706 - DNA, 30 bp, Artificial Sequence
  Synthetic oligonucleotide
actccaattctagagttttgcgaatagcaa

SEQ ID NO: 302707 - DNA, 30 bp, Artificial Sequence
  Synthetic oligonucleotide
gcaggataactagggcacccaaactagcaa

SEQ ID NO: 302708 - DNA, 30 bp, Artificial Sequence
  Synthetic oligonucleotide
agtttagctctgggcttgttcagctagcaa

SEQ ID NO: 302709 - DNA, 30 bp, Artificial Sequence
  Synthetic oligonucleotide
ttccgggtactaacagttaagatttagcaa

SEQ ID NO: 302710 - DNA, 30 bp, Artificial Sequence
  Synthetic oligonucleotide
tagccctgtcttactagaccggaaacgcaa

SEQ ID NO: 302711 - DNA, 30 bp, Artificial Sequence
  Synthetic oligonucleotide
tttatggtactctgccgagcggcaacgcaa

SEQ ID NO: 302712 - DNA, 30 bp, Artificial Sequence
  Synthetic oligonucleotide
aggcagtttcttccgtggaatataacgcaa

SEQ ID NO: 302713 - DNA, 30 bp, Artificial Sequence
  Synthetic oligonucleotide
ggctgtatgtccaacattcgctccacgcaa

SEQ ID NO: 302714 - DNA, 30 bp, Artificial Sequence
  Synthetic oligonucleotide
gaagtttaatcataattacagcgcacgcaa

SEQ ID NO: 302715 - DNA, 30 bp, Artificial Sequence
  Synthetic oligonucleotide
tctttcaaggcggggtgcgttccgacgcaa

SEQ ID NO: 302716 - DNA, 30 bp, Artificial Sequence
  Synthetic oligonucleotide
ccaaatcggcctagtcttaatgtaccgcaa

SEQ ID NO: 302717 - DNA, 30 bp, Artificial Sequence
  Synthetic oligonucleotide
gcttggactgttaaattcactccgccgcaa

SEQ ID NO: 302718 - DNA, 30 bp, Artificial Sequence
  Synthetic oligonucleotide
catcatgatgcttatagtggaattccgcaa

SEQ ID NO: 302719 - DNA, 30 bp, Artificial Sequence
  Synthetic oligonucleotide
aagctttccagttaaaatagggcagcgcaa

SEQ ID NO: 302720 - DNA, 30 bp, Artificial Sequence
  Synthetic oligonucleotide
tcttgatgaactgtacccgattgcgcgcaa

SEQ ID NO: 302721 - DNA, 30 bp, Artificial Sequence
  Synthetic oligonucleotide
tagaaaggtcccggtgtttcttgcgcgcaa

SEQ ID NO: 302722 - DNA, 30 bp, Artificial Sequence
  Synthetic oligonucleotide
tatctggcctacggacttttggcggcgcaa

SEQ ID NO: 302723 - DNA, 30 bp, Artificial Sequence
  Synthetic oligonucleotide
ggtagggtcaaagtttgtctttcggcgcaa

SEQ ID NO: 302724 - DNA, 30 bp, Artificial Sequence
  Synthetic oligonucleotide
cgatagtcagctccccctttctctgcgcaa

SEQ ID NO: 302725 - DNA, 30 bp, Artificial Sequence
  Synthetic oligonucleotide
ctgtgacggagtgggttcactattgcgcaa

SEQ ID NO: 302726 - DNA, 30 bp, Artificial Sequence
  Synthetic oligonucleotide
ggtgttggaattcagttaaacgttgcgcaa

SEQ ID NO: 302727 - DNA, 30 bp, Artificial Sequence
  Synthetic oligonucleotide
ccgttagggttttgggaaacgcaatcgcaa

SEQ ID NO: 302728 - DNA, 30 bp, Artificial Sequence
  Synthetic oligonucleotide
gtatcatttccctagatcggaagctcgcaa

SEQ ID NO: 302729 - DNA, 30 bp, Artificial Sequence
  Synthetic oligonucleotide
gaaaggagacatcatccaaaactctcgcaa

SEQ ID NO: 302730 - DNA, 30 bp, Artificial Sequence
  Synthetic oligonucleotide
tacctgggtaaaagattatgtctctcgcaa

SEQ ID NO: 302731 - DNA, 30 bp, Artificial Sequence
  Synthetic oligonucleotide
gctaaaagtttctgaaatgcatacaggcaa

SEQ ID NO: 302732 - DNA, 30 bp, Artificial Sequence
  Synthetic oligonucleotide
tcatcgtgttcccctttatgaccgaggcaa

SEQ ID NO: 302733 - DNA, 30 bp, Artificial Sequence
  Synthetic oligonucleotide
tccacgtacaagatggactgcaggaggcaa

SEQ ID NO: 302734 - DNA, 30 bp, Artificial Sequence
  Synthetic oligonucleotide
cagttagtgtcctcggcaaaaagtaggcaa

SEQ ID NO: 302735 - DNA, 30 bp, Artificial Sequence
  Synthetic oligonucleotide
tcttcatccgtgatagtcttaatacggcaa

SEQ ID NO: 302736 - DNA, 30 bp, Artificial Sequence
  Synthetic oligonucleotide
tctacacgggctacatcataactacggcaa

SEQ ID NO: 302737 - DNA, 30 bp, Artificial Sequence
  Synthetic oligonucleotide
cgttcattgtgtacgaatataaaccggcaa

SEQ ID NO: 302738 - DNA, 30 bp, Artificial Sequence
  Synthetic oligonucleotide
taaatgaataaacggatcgcttggcggcaa

SEQ ID NO: 302739 - DNA, 30 bp, Artificial Sequence
  Synthetic oligonucleotide
gctaactgtagatgtcttttagatcggcaa

SEQ ID NO: 302740 - DNA, 30 bp, Artificial Sequence
  Synthetic oligonucleotide
tatattcttactgttagtgtgacagggcaa

SEQ ID NO: 302741 - DNA, 30 bp, Artificial Sequence
  Synthetic oligonucleotide
cccacacaatatgaatactactcagggcaa

SEQ ID NO: 302742 - DNA, 30 bp, Artificial Sequence
  Synthetic oligonucleotide
tttgaaagtgtcaaatagagcaacgggcaa

SEQ ID NO: 302743 - DNA, 30 bp, Artificial Sequence
  Synthetic oligonucleotide
cccttggagtcttttcctagtgacgggcaa

SEQ ID NO: 302744 - DNA, 30 bp, Artificial Sequence
  Synthetic oligonucleotide
ggcgcctgttttagggcatggagcgggcaa

SEQ ID NO: 302745 - DNA, 30 bp, Artificial Sequence
  Synthetic oligonucleotide
ggacgaacccctaaactgaaacgcgggcaa

SEQ ID NO: 302746 - DNA, 30 bp, Artificial Sequence
  Synthetic oligonucleotide
tgatatcgattgctttacttacgcgggcaa

SEQ ID NO: 302747 - DNA, 30 bp, Artificial Sequence
  Synthetic oligonucleotide
aagtatagcacgaaactacggtgcgggcaa

SEQ ID NO: 302748 - DNA, 30 bp, Artificial Sequence
  Synthetic oligonucleotide
aagacgcaaaccccttcgattctcgggcaa

SEQ ID NO: 302749 - DNA, 30 bp, Artificial Sequence
  Synthetic oligonucleotide
ggacctcggaaacacccccggtaggggcaa

SEQ ID NO: 302750 - DNA, 30 bp, Artificial Sequence
  Synthetic oligonucleotide
gtttgtcagctcagtacaaggcctgggcaa

SEQ ID NO: 302751 - DNA, 30 bp, Artificial Sequence
  Synthetic oligonucleotide
gacaaatatgatatcttgcggaactggcaa

SEQ ID NO: 302752 - DNA, 30 bp, Artificial Sequence
  Synthetic oligonucleotide
acggttgctgctaaggttcggtgctggcaa

SEQ ID NO: 302753 - DNA, 30 bp, Artificial Sequence
  Synthetic oligonucleotide
aaatagtatgagttctaatgggtctggcaa

SEQ ID NO: 302754 - DNA, 29 bp, Artificial Sequence
  Synthetic oligonucleotide
ttaacggcgtggatgtgatttaaatgcaa

SEQ ID NO: 302755 - DNA, 30 bp, Artificial Sequence
  Synthetic oligonucleotide
gtgatccggagtcgcgtcataaccatgcaa

SEQ ID NO: 302756 - DNA, 30 bp, Artificial Sequence
  Synthetic oligonucleotide
tagcacccacattgtcatttacccatgcaa

SEQ ID NO: 302757 - DNA, 31 bp, Artificial Sequence
  Synthetic oligonucleotide
gagtggtttagaagacggtgtgatcatgcaa

SEQ ID NO: 302758 - DNA, 30 bp, Artificial Sequence
  Synthetic oligonucleotide
tcgatctttgggatagtggaatggatgcaa

SEQ ID NO: 302759 - DNA, 30 bp, Artificial Sequence
  Synthetic oligonucleotide
taagggtaattaagaccactccttatgcaa

SEQ ID NO: 302760 - DNA, 30 bp, Artificial Sequence
  Synthetic oligonucleotide
gtactgtatcagattcgggtataactgcaa

SEQ ID NO: 302761 - DNA, 30 bp, Artificial Sequence
  Synthetic oligonucleotide
gaagcagtgtgacaagacacccgactgcaa

SEQ ID NO: 302762 - DNA, 30 bp, Artificial Sequence
  Synthetic oligonucleotide
caatgtggttgtttactataggtactgcaa

SEQ ID NO: 302763 - DNA, 30 bp, Artificial Sequence
  Synthetic oligonucleotide
cagttgtgtgaggcatgccgtgtcctgcaa

SEQ ID NO: 302764 - DNA, 30 bp, Artificial Sequence
  Synthetic oligonucleotide
ataaataaaagacctggacagttgctgcaa

SEQ ID NO: 302765 - DNA, 30 bp, Artificial Sequence
  Synthetic oligonucleotide
acgagcgtcagttgcgagcactatctgcaa

SEQ ID NO: 302766 - DNA, 30 bp, Artificial Sequence
  Synthetic oligonucleotide
ccaacaagctcatcattagtatttctgcaa

SEQ ID NO: 302767 - DNA, 30 bp, Artificial Sequence
  Synthetic oligonucleotide
gagcgagaccctgttccgatggaagtgcaa

SEQ ID NO: 302768 - DNA, 31 bp, Artificial Sequence
  Synthetic oligonucleotide
gcatagtacctccgatgtcaagggggtgcaa

SEQ ID NO: 302769 - DNA, 30 bp, Artificial Sequence
  Synthetic oligonucleotide
attcaggtcagcatagtgcgtagattgcaa

SEQ ID NO: 302770 - DNA, 30 bp, Artificial Sequence
  Synthetic oligonucleotide
gttgtactctcgctctggccttacttgcaa

SEQ ID NO: 302771 - DNA, 30 bp, Artificial Sequence
  Synthetic oligonucleotide
aagtcacgacacaagtttgatgggttgcaa

SEQ ID NO: 302772 - DNA, 30 bp, Artificial Sequence
  Synthetic oligonucleotide
tccggccccattactgtggtaaaaaatcaa

SEQ ID NO: 302773 - DNA, 30 bp, Artificial Sequence
  Synthetic oligonucleotide
cttttagttcctgtgagcactttaaatcaa

SEQ ID NO: 302774 - DNA, 30 bp, Artificial Sequence
  Synthetic oligonucleotide
taaacgagcgtgggcagattgcagaatcaa

SEQ ID NO: 302775 - DNA, 30 bp, Artificial Sequence
  Synthetic oligonucleotide
gacttcccggcgtcttatttccggaatcaa

SEQ ID NO: 302776 - DNA, 30 bp, Artificial Sequence
  Synthetic oligonucleotide
acccgtgagggagcagtatggtataatcaa

SEQ ID NO: 302777 - DNA, 30 bp, Artificial Sequence
  Synthetic oligonucleotide
gttgtaagtaagccccaatacgttaatcaa

SEQ ID NO: 302778 - DNA, 30 bp, Artificial Sequence
  Synthetic oligonucleotide
gttgtacacggaacgaaacctggacatcaa

SEQ ID NO: 302779 - DNA, 30 bp, Artificial Sequence
  Synthetic oligonucleotide
atctagcgagtcaagctccaagttcatcaa

SEQ ID NO: 302780 - DNA, 30 bp, Artificial Sequence
  Synthetic oligonucleotide
ttggctagcaccaaactcgcaaaagatcaa

SEQ ID NO: 302781 - DNA, 30 bp, Artificial Sequence
  Synthetic oligonucleotide
ctgggcttctttaggcgacgttaagatcaa

SEQ ID NO: 302782 - DNA, 30 bp, Artificial Sequence
  Synthetic oligonucleotide
cggttgtaaatcagtgatggtgcagatcaa

SEQ ID NO: 302783 - DNA, 30 bp, Artificial Sequence
  Synthetic oligonucleotide
acaataattaaaatatactcttgagatcaa

SEQ ID NO: 302784 - DNA, 30 bp, Artificial Sequence
  Synthetic oligonucleotide
tttcaaggctgaatggttaaggtagatcaa

SEQ ID NO: 302785 - DNA, 30 bp, Artificial Sequence
  Synthetic oligonucleotide
tcaaatcagactaagttttttgaggatcaa

SEQ ID NO: 302786 - DNA, 30 bp, Artificial Sequence
  Synthetic oligonucleotide
gatttaggacgcgtacactcagatgatcaa

SEQ ID NO: 302787 - DNA, 30 bp, Artificial Sequence
  Synthetic oligonucleotide
catcctactcggcccgtgacggatgatcaa

SEQ ID NO: 302788 - DNA, 30 bp, Artificial Sequence
  Synthetic oligonucleotide
atctcatgttagaatgctggtgctgatcaa

SEQ ID NO: 302789 - DNA, 30 bp, Artificial Sequence
  Synthetic oligonucleotide
tcatttagaccttgtactagaaaatatcaa

SEQ ID NO: 302790 - DNA, 30 bp, Artificial Sequence
  Synthetic oligonucleotide
ctacgaaaaaatttagagcgtggctatcaa

SEQ ID NO: 302791 - DNA, 30 bp, Artificial Sequence
  Synthetic oligonucleotide
agaaagcggcagatgttggcgctctatcaa

SEQ ID NO: 302792 - DNA, 30 bp, Artificial Sequence
  Synthetic oligonucleotide
gacccggcggggagcttacaggcttatcaa

SEQ ID NO: 302793 - DNA, 30 bp, Artificial Sequence
  Synthetic oligonucleotide
ccatcatccccgcccagacgtcaaactcaa

SEQ ID NO: 302794 - DNA, 30 bp, Artificial Sequence
  Synthetic oligonucleotide
tgttttgcacaggcagaagcagtaactcaa

SEQ ID NO: 302795 - DNA, 30 bp, Artificial Sequence
  Synthetic oligonucleotide
tcaaaccacccagatggattctgcactcaa

SEQ ID NO: 302796 - DNA, 30 bp, Artificial Sequence
  Synthetic oligonucleotide
gaccgcgggtcccccaccagatggactcaa

SEQ ID NO: 302797 - DNA, 31 bp, Artificial Sequence
  Synthetic oligonucleotide
ctgtggaacttgaaacgtaggggtacctcaa

SEQ ID NO: 302798 - DNA, 30 bp, Artificial Sequence
  Synthetic oligonucleotide
caattaacgtcatacccagtctcgcctcaa

SEQ ID NO: 302799 - DNA, 30 bp, Artificial Sequence
  Synthetic oligonucleotide
ttgagatggagcataatgtatcggcctcaa

SEQ ID NO: 302800 - DNA, 30 bp, Artificial Sequence
  Synthetic oligonucleotide
aagtgctcacctggccgcttggttcctcaa

SEQ ID NO: 302801 - DNA, 31 bp, Artificial Sequence
  Synthetic oligonucleotide
tcttggaactgtcctcttggactaagctcaa

SEQ ID NO: 302802 - DNA, 30 bp, Artificial Sequence
  Synthetic oligonucleotide
aaacacgcccctttcaaaggatacgctcaa

SEQ ID NO: 302803 - DNA, 30 bp, Artificial Sequence
  Synthetic oligonucleotide
aacaataacacgtgaagagtattggctcaa

SEQ ID NO: 302804 - DNA, 30 bp, Artificial Sequence
  Synthetic oligonucleotide
atgtttctcgatggacgtgtcttggctcaa

SEQ ID NO: 302805 - DNA, 30 bp, Artificial Sequence
  Synthetic oligonucleotide
cgttattcaccggtgtgtggcggctctcaa

SEQ ID NO: 302806 - DNA, 30 bp, Artificial Sequence
  Synthetic oligonucleotide
caggagttcaattccgcatgcatctctcaa

SEQ ID NO: 302807 - DNA, 30 bp, Artificial Sequence
  Synthetic oligonucleotide
agatgggtaccgatttgttggtagtctcaa

SEQ ID NO: 302808 - DNA, 30 bp, Artificial Sequence
  Synthetic oligonucleotide
tcaggtcaacaggcgagtatgttttctcaa

SEQ ID NO: 302809 - DNA, 30 bp, Artificial Sequence
  Synthetic oligonucleotide
cggtcggagcctgcgggtatgggaagtcaa

SEQ ID NO: 302810 - DNA, 30 bp, Artificial Sequence
  Synthetic oligonucleotide
gttgcacttaaaacagattggtcgagtcaa

SEQ ID NO: 302811 - DNA, 30 bp, Artificial Sequence
  Synthetic oligonucleotide
cgtttagaacacgagtggcttatgagtcaa

SEQ ID NO: 302812 - DNA, 30 bp, Artificial Sequence
  Synthetic oligonucleotide
atcgaagagccatttgtgtatcttagtcaa

SEQ ID NO: 302813 - DNA, 30 bp, Artificial Sequence
  Synthetic oligonucleotide
aattgatcgggatgcaatacgtcacgtcaa

SEQ ID NO: 302814 - DNA, 30 bp, Artificial Sequence
  Synthetic oligonucleotide
tgggtttttctttggaaggtcgtgcgtcaa

SEQ ID NO: 302815 - DNA, 30 bp, Artificial Sequence
  Synthetic oligonucleotide
gatggtgtctaagggcccctcgcaggtcaa

SEQ ID NO: 302816 - DNA, 30 bp, Artificial Sequence
  Synthetic oligonucleotide
tgtgatcacggtgcagcggaaataggtcaa

SEQ ID NO: 302817 - DNA, 30 bp, Artificial Sequence
  Synthetic oligonucleotide
agtcttttacccgtgtatagattaggtcaa

SEQ ID NO: 302818 - DNA, 30 bp, Artificial Sequence
  Synthetic oligonucleotide
acgccccttattacctgaggacagggtcaa

SEQ ID NO: 302819 - DNA, 30 bp, Artificial Sequence
  Synthetic oligonucleotide
gcgactaagacctttccctaagggggtcaa

SEQ ID NO: 302820 - DNA, 30 bp, Artificial Sequence
  Synthetic oligonucleotide
gtttggtgattcctccagcgagaatgtcaa

SEQ ID NO: 302821 - DNA, 30 bp, Artificial Sequence
  Synthetic oligonucleotide
atcgacgaggtgggtatatgccgctgtcaa

SEQ ID NO: 302822 - DNA, 30 bp, Artificial Sequence
  Synthetic oligonucleotide
gtcactaatagttgggaagcactctgtcaa

SEQ ID NO: 302823 - DNA, 30 bp, Artificial Sequence
  Synthetic oligonucleotide
aaagtgtaggaatctattcggctgtgtcaa

SEQ ID NO: 302824 - DNA, 30 bp, Artificial Sequence
  Synthetic oligonucleotide
cgaaactcatggggtcttttatcttgtcaa

SEQ ID NO: 302825 - DNA, 30 bp, Artificial Sequence
  Synthetic oligonucleotide
ttcgttgcgcgaatgcttggcgaaattcaa

SEQ ID NO: 302826 - DNA, 30 bp, Artificial Sequence
  Synthetic oligonucleotide
cgtagagacaattaatacttggcaattcaa

SEQ ID NO: 302827 - DNA, 30 bp, Artificial Sequence
  Synthetic oligonucleotide
gtccgtcaccgcctcctacctcgaattcaa

SEQ ID NO: 302828 - DNA, 30 bp, Artificial Sequence
  Synthetic oligonucleotide
ttccggatcataagacttggtggaattcaa

SEQ ID NO: 302829 - DNA, 30 bp, Artificial Sequence
  Synthetic oligonucleotide
gcattcggtcgatccacattctgaattcaa

SEQ ID NO: 302830 - DNA, 30 bp, Artificial Sequence
  Synthetic oligonucleotide
ggttctaaggcatatgataggttaattcaa

SEQ ID NO: 302831 - DNA, 30 bp, Artificial Sequence
  Synthetic oligonucleotide
gaagaagggattcttgggaattagattcaa

SEQ ID NO: 302832 - DNA, 30 bp, Artificial Sequence
  Synthetic oligonucleotide
attaatagtcagcgaggggtcggtattcaa

SEQ ID NO: 302833 - DNA, 30 bp, Artificial Sequence
  Synthetic oligonucleotide
ccggtgatcggcgggacggatattattcaa

SEQ ID NO: 302834 - DNA, 30 bp, Artificial Sequence
  Synthetic oligonucleotide
aaaacgtgtagatattatctagcacttcaa

SEQ ID NO: 302835 - DNA, 30 bp, Artificial Sequence
  Synthetic oligonucleotide
gtaaacctcaaagctagagaatgacttcaa

SEQ ID NO: 302836 - DNA, 30 bp, Artificial Sequence
  Synthetic oligonucleotide
aaggcacggatggagacggcctaccttcaa

SEQ ID NO: 302837 - DNA, 30 bp, Artificial Sequence
  Synthetic oligonucleotide
cgctcatcgaggtatgctcagcagcttcaa

SEQ ID NO: 302838 - DNA, 30 bp, Artificial Sequence
  Synthetic oligonucleotide
cgaacacagcatcactattcttcagttcaa

SEQ ID NO: 302839 - DNA, 30 bp, Artificial Sequence
  Synthetic oligonucleotide
ttcaccatctcatgctattaccgcgttcaa

SEQ ID NO: 302840 - DNA, 30 bp, Artificial Sequence
  Synthetic oligonucleotide
ggattcaagttccctcgtaggatggttcaa

SEQ ID NO: 302841 - DNA, 30 bp, Artificial Sequence
  Synthetic oligonucleotide
gatgaggtatcgggtggaggggcatttcaa

SEQ ID NO: 302842 - DNA, 30 bp, Artificial Sequence
  Synthetic oligonucleotide
gtacggacctgaaccaagcttgtatttcaa

SEQ ID NO: 302843 - DNA, 30 bp, Artificial Sequence
  Synthetic oligonucleotide
gcagtaacctgtagactatgggactttcaa

SEQ ID NO: 302844 - DNA, 30 bp, Artificial Sequence
  Synthetic oligonucleotide
gcccgttagaacttgctgttaacctttcaa

SEQ ID NO: 302845 - DNA, 30 bp, Artificial Sequence
  Synthetic oligonucleotide
cagaagccctcgacgtaaatatgctttcaa

SEQ ID NO: 302846 - DNA, 30 bp, Artificial Sequence
  Synthetic oligonucleotide
tcccggcataggattacaccacattttcaa

SEQ ID NO: 302847 - DNA, 30 bp, Artificial Sequence
  Synthetic oligonucleotide
cgagctgtgaataataggtttccttttcaa

SEQ ID NO: 302848 - DNA, 30 bp, Artificial Sequence
  Synthetic oligonucleotide
ggagatatgatgtcgccaacgttttttcaa

SEQ ID NO: 302849 - DNA, 30 bp, Artificial Sequence
  Synthetic oligonucleotide
atcgaggtatgcgcaccgcatttttttcaa

SEQ ID NO: 302850 - DNA, 30 bp, Artificial Sequence
  Synthetic oligonucleotide
agcctaccgagttgggtacggccaaaagaa

SEQ ID NO: 302851 - DNA, 30 bp, Artificial Sequence
  Synthetic oligonucleotide
gcggcgtgtcgcaatggaaatataaaagaa

SEQ ID NO: 302852 - DNA, 30 bp, Artificial Sequence
  Synthetic oligonucleotide
gtatagcattcttgagagggtgtaaaagaa

SEQ ID NO: 302853 - DNA, 30 bp, Artificial Sequence
  Synthetic oligonucleotide
gttacgtatgcgacgtcaagaagcaaagaa

SEQ ID NO: 302854 - DNA, 30 bp, Artificial Sequence
  Synthetic oligonucleotide
ctgaccctccaagcacacaggatcaaagaa

SEQ ID NO: 302855 - DNA, 30 bp, Artificial Sequence
  Synthetic oligonucleotide
aagtatgacgaattattctcagagaaagaa

SEQ ID NO: 302856 - DNA, 30 bp, Artificial Sequence
  Synthetic oligonucleotide
gaatagttgccaggacatcggcggaaagaa

SEQ ID NO: 302857 - DNA, 30 bp, Artificial Sequence
  Synthetic oligonucleotide
tttctcagcgtactagactctcggaaagaa

SEQ ID NO: 302858 - DNA, 30 bp, Artificial Sequence
  Synthetic oligonucleotide
gaattaatgcgtaggcttgaggcacaagaa

SEQ ID NO: 302859 - DNA, 30 bp, Artificial Sequence
  Synthetic oligonucleotide
gacttagcgagtttctcgtcttaccaagaa

SEQ ID NO: 302860 - DNA, 30 bp, Artificial Sequence
  Synthetic oligonucleotide
atgttcgtaagtcccgtcatggcgcaagaa

SEQ ID NO: 302861 - DNA, 30 bp, Artificial Sequence
  Synthetic oligonucleotide
agtgtgccgacctctacacacggagaagaa

SEQ ID NO: 302862 - DNA, 30 bp, Artificial Sequence
  Synthetic oligonucleotide
gacgatcaattcccgtggacgtacgaagaa

SEQ ID NO: 302863 - DNA, 30 bp, Artificial Sequence
  Synthetic oligonucleotide
attcgatcggaatctagggtatgcgaagaa

SEQ ID NO: 302864 - DNA, 30 bp, Artificial Sequence
  Synthetic oligonucleotide
tcgagaactattttaattctgaatgaagaa

SEQ ID NO: 302865 - DNA, 30 bp, Artificial Sequence
  Synthetic oligonucleotide
tgtccgaatggctgctgagcgcatgaagaa

SEQ ID NO: 302866 - DNA, 30 bp, Artificial Sequence
  Synthetic oligonucleotide
aactccgcacaatgtcccataggtgaagaa

SEQ ID NO: 302867 - DNA, 30 bp, Artificial Sequence
  Synthetic oligonucleotide
ctacttgtatcctacaaacctatataagaa

SEQ ID NO: 302868 - DNA, 30 bp, Artificial Sequence
  Synthetic oligonucleotide
gttttgaatatgccagaaagcaactaagaa

SEQ ID NO: 302869 - DNA, 30 bp, Artificial Sequence
  Synthetic oligonucleotide
tccggaattctacgctgggaatactaagaa

SEQ ID NO: 302870 - DNA, 30 bp, Artificial Sequence
  Synthetic oligonucleotide
tgacttacctgtatacccaggacctaagaa

SEQ ID NO: 302871 - DNA, 30 bp, Artificial Sequence
  Synthetic oligonucleotide
tagttttgagctccgcggctcaagtaagaa

SEQ ID NO: 302872 - DNA, 30 bp, Artificial Sequence
  Synthetic oligonucleotide
gcctcaaatttcttaggaaaggcgtaagaa

SEQ ID NO: 302873 - DNA, 30 bp, Artificial Sequence
  Synthetic oligonucleotide
gcactggtgtcaggatcggggaggtaagaa

SEQ ID NO: 302874 - DNA, 30 bp, Artificial Sequence
  Synthetic oligonucleotide
aatgcagtggctcttgtgaggacttaagaa

SEQ ID NO: 302875 - DNA, 30 bp, Artificial Sequence
  Synthetic oligonucleotide
gaccctgttcgtagaaacgaaacaacagaa

SEQ ID NO: 302876 - DNA, 30 bp, Artificial Sequence
  Synthetic oligonucleotide
ataatcaaagagggcacactcggaacagaa

SEQ ID NO: 302877 - DNA, 30 bp, Artificial Sequence
  Synthetic oligonucleotide
gcatcacccagaagggtatagtggacagaa

SEQ ID NO: 302878 - DNA, 30 bp, Artificial Sequence
  Synthetic oligonucleotide
aggctctagctcctcagtattgtgacagaa

SEQ ID NO: 302879 - DNA, 30 bp, Artificial Sequence
  Synthetic oligonucleotide
cggttgcaacatacacgttccattacagaa

SEQ ID NO: 302880 - DNA, 30 bp, Artificial Sequence
  Synthetic oligonucleotide
gtttggtattgtgtgggtggcgttacagaa

SEQ ID NO: 302881 - DNA, 30 bp, Artificial Sequence
  Synthetic oligonucleotide
tctggatttgaggcaggggcggcaccagaa

SEQ ID NO: 302882 - DNA, 30 bp, Artificial Sequence
  Synthetic oligonucleotide
tcgtaaacgtacccattcggggtaccagaa

SEQ ID NO: 302883 - DNA, 30 bp, Artificial Sequence
  Synthetic oligonucleotide
gggatgcttcagcatctaggaagcccagaa

SEQ ID NO: 302884 - DNA, 30 bp, Artificial Sequence
  Synthetic oligonucleotide
gtccatcctccgctttacgcacagccagaa

SEQ ID NO: 302885 - DNA, 30 bp, Artificial Sequence
  Synthetic oligonucleotide
tacagtgaagaacatttgccaaaagcagaa

SEQ ID NO: 302886 - DNA, 30 bp, Artificial Sequence
  Synthetic oligonucleotide
cccggaatgaagagcagtaatgtcgcagaa

SEQ ID NO: 302887 - DNA, 30 bp, Artificial Sequence
  Synthetic oligonucleotide
ttcggcagccaatttgttcttagggcagaa

SEQ ID NO: 302888 - DNA, 30 bp, Artificial Sequence
  Synthetic oligonucleotide
atgactgcgatacatggcgtatatgcagaa

SEQ ID NO: 302889 - DNA, 30 bp, Artificial Sequence
  Synthetic oligonucleotide
gacccagtaaacggtgtggtatatgcagaa

SEQ ID NO: 302890 - DNA, 30 bp, Artificial Sequence
  Synthetic oligonucleotide
gagctcttgccaggcgatagacctgcagaa

SEQ ID NO: 302891 - DNA, 30 bp, Artificial Sequence
  Synthetic oligonucleotide
ggataaccatgccgctttcctacctcagaa

SEQ ID NO: 302892 - DNA, 30 bp, Artificial Sequence
  Synthetic oligonucleotide
atagcattaaaataatgttacggctcagaa

SEQ ID NO: 302893 - DNA, 30 bp, Artificial Sequence
  Synthetic oligonucleotide
tctatgatttagatacgtgtcggttcagaa

SEQ ID NO: 302894 - DNA, 30 bp, Artificial Sequence
  Synthetic oligonucleotide
gtcatataacagatcggtagcacaagagaa

SEQ ID NO: 302895 - DNA, 30 bp, Artificial Sequence
  Synthetic oligonucleotide
gaatatctagacttccatttaagaagagaa

SEQ ID NO: 302896 - DNA, 30 bp, Artificial Sequence
  Synthetic oligonucleotide
ttaaacggggaggtctccaacgagagagaa

SEQ ID NO: 302897 - DNA, 30 bp, Artificial Sequence
  Synthetic oligonucleotide
acactgcgtataatgcccggtcctagagaa

SEQ ID NO: 302898 - DNA, 30 bp, Artificial Sequence
  Synthetic oligonucleotide
ataaaaatctagggagtttttgttagagaa

SEQ ID NO: 302899 - DNA, 30 bp, Artificial Sequence
  Synthetic oligonucleotide
caacctctcttaaataacttgtttagagaa

SEQ ID NO: 302900 - DNA, 30 bp, Artificial Sequence
  Synthetic oligonucleotide
cgcctggcataggatggaatagcacgagaa

SEQ ID NO: 302901 - DNA, 30 bp, Artificial Sequence
  Synthetic oligonucleotide
gtgcacatcctagcgactacgctacgagaa

SEQ ID NO: 302902 - DNA, 30 bp, Artificial Sequence
  Synthetic oligonucleotide
acatttggtggtatgtcgaagacgcgagaa

SEQ ID NO: 302903 - DNA, 30 bp, Artificial Sequence
  Synthetic oligonucleotide
cggacccgctgctcatcgtctacgcgagaa

SEQ ID NO: 302904 - DNA, 30 bp, Artificial Sequence
  Synthetic oligonucleotide
ggccagcgcacctgggtctgcagtcgagaa

SEQ ID NO: 302905 - DNA, 30 bp, Artificial Sequence
  Synthetic oligonucleotide
ctgggagaaactcaaagtaaaggtcgagaa

SEQ ID NO: 302906 - DNA, 30 bp, Artificial Sequence
  Synthetic oligonucleotide
gacggcagttccgatctccgggaaggagaa

SEQ ID NO: 302907 - DNA, 30 bp, Artificial Sequence
  Synthetic oligonucleotide
gactgttgtaggcgcactcagcgaggagaa

SEQ ID NO: 302908 - DNA, 30 bp, Artificial Sequence
  Synthetic oligonucleotide
ttagatcatcgctctggcggtttaggagaa

SEQ ID NO: 302909 - DNA, 30 bp, Artificial Sequence
  Synthetic oligonucleotide
agcatcacactttatcctcttgagggagaa

SEQ ID NO: 302910 - DNA, 30 bp, Artificial Sequence
  Synthetic oligonucleotide
tcgtacgcacaggcgtattaatagggagaa

SEQ ID NO: 302911 - DNA, 30 bp, Artificial Sequence
  Synthetic oligonucleotide
aaatctttatattataggagtttgggagaa

SEQ ID NO: 302912 - DNA, 30 bp, Artificial Sequence
  Synthetic oligonucleotide
gcatgatttattgtatatgcacatggagaa

SEQ ID NO: 302913 - DNA, 30 bp, Artificial Sequence
  Synthetic oligonucleotide
taattaaggaaacacgttttggttggagaa

SEQ ID NO: 302914 - DNA, 30 bp, Artificial Sequence
  Synthetic oligonucleotide
agatgctgtcccagtacgtgttaatgagaa

SEQ ID NO: 302915 - DNA, 30 bp, Artificial Sequence
  Synthetic oligonucleotide
ggctcagacaatggagtcttcacatgagaa

SEQ ID NO: 302916 - DNA, 30 bp, Artificial Sequence
  Synthetic oligonucleotide
gtaggatgtgcgcagccgcgaatatgagaa

SEQ ID NO: 302917 - DNA, 30 bp, Artificial Sequence
  Synthetic oligonucleotide
ggtagtttaaccgtatgacgtctgtgagaa

SEQ ID NO: 302918 - DNA, 30 bp, Artificial Sequence
  Synthetic oligonucleotide
gcttgcacccctttaatactctcttgagaa

SEQ ID NO: 302919 - DNA, 30 bp, Artificial Sequence
  Synthetic oligonucleotide
tttgtcccgctttaccaatcaagttgagaa

SEQ ID NO: 302920 - DNA, 30 bp, Artificial Sequence
  Synthetic oligonucleotide
tccaaccaatctcgccaggtcgtttgagaa

SEQ ID NO: 302921 - DNA, 30 bp, Artificial Sequence
  Synthetic oligonucleotide
gcaccccaccgaaatgttctatcaatagaa

SEQ ID NO: 302922 - DNA, 30 bp, Artificial Sequence
  Synthetic oligonucleotide
ggtcatcttataactagtgtccacatagaa

SEQ ID NO: 302923 - DNA, 30 bp, Artificial Sequence
  Synthetic oligonucleotide
tacagtgggacgggcagcgtatagatagaa

SEQ ID NO: 302924 - DNA, 30 bp, Artificial Sequence
  Synthetic oligonucleotide
tctactagcgccctgacagcgaccctagaa

SEQ ID NO: 302925 - DNA, 30 bp, Artificial Sequence
  Synthetic oligonucleotide
aagaaaaatgtcttaggggcgaccctagaa

SEQ ID NO: 302926 - DNA, 30 bp, Artificial Sequence
  Synthetic oligonucleotide
gggattggaggtgtcctctcgcccctagaa

SEQ ID NO: 302927 - DNA, 30 bp, Artificial Sequence
  Synthetic oligonucleotide
aacactcatgtccgatatcgcccgctagaa

SEQ ID NO: 302928 - DNA, 30 bp, Artificial Sequence
  Synthetic oligonucleotide
aacggagatgtcccttccaaggatctagaa

SEQ ID NO: 302929 - DNA, 30 bp, Artificial Sequence
  Synthetic oligonucleotide
ccggaacctgtttcgcttattattctagaa

SEQ ID NO: 302930 - DNA, 30 bp, Artificial Sequence
  Synthetic oligonucleotide
gggtactgaaccacgcggcagaaagtagaa

SEQ ID NO: 302931 - DNA, 30 bp, Artificial Sequence
  Synthetic oligonucleotide
ctccgctcaacgttggggtttgaagtagaa

SEQ ID NO: 302932 - DNA, 30 bp, Artificial Sequence
  Synthetic oligonucleotide
tgttgtaacagccgtacaaattccgtagaa

SEQ ID NO: 302933 - DNA, 30 bp, Artificial Sequence
  Synthetic oligonucleotide
gggctcacggtcgggattgacttcgtagaa

SEQ ID NO: 302934 - DNA, 30 bp, Artificial Sequence
  Synthetic oligonucleotide
ccgatgttaggtactgatccaacggtagaa

SEQ ID NO: 302935 - DNA, 30 bp, Artificial Sequence
  Synthetic oligonucleotide
cctgcatcaaatcggtggttttgggtagaa

SEQ ID NO: 302936 - DNA, 30 bp, Artificial Sequence
  Synthetic oligonucleotide
tggtcatgaattatcgtacgtctggtagaa

SEQ ID NO: 302937 - DNA, 30 bp, Artificial Sequence
  Synthetic oligonucleotide
tttaatagaatagcggtgctccatgtagaa

SEQ ID NO: 302938 - DNA, 30 bp, Artificial Sequence
  Synthetic oligonucleotide
gtcgcctttaagcaagccagtagtgtagaa

SEQ ID NO: 302939 - DNA, 30 bp, Artificial Sequence
  Synthetic oligonucleotide
attaggcgtcactgattggaaggtgtagaa

SEQ ID NO: 302940 - DNA, 30 bp, Artificial Sequence
  Synthetic oligonucleotide
tcaaacgatgctacccgtgctggtgtagaa

SEQ ID NO: 302941 - DNA, 30 bp, Artificial Sequence
  Synthetic oligonucleotide
gatttgaagggatgagaatcgattgtagaa

SEQ ID NO: 302942 - DNA, 30 bp, Artificial Sequence
  Synthetic oligonucleotide
cgctcaaggggtaaggatgctgaattagaa

SEQ ID NO: 302943 - DNA, 30 bp, Artificial Sequence
  Synthetic oligonucleotide
ggtccaggtgggctcctaataatattagaa

SEQ ID NO: 302944 - DNA, 30 bp, Artificial Sequence
  Synthetic oligonucleotide
gtacatacattgagacgcgccggcttagaa

SEQ ID NO: 302945 - DNA, 30 bp, Artificial Sequence
  Synthetic oligonucleotide
ccattgataagcgtctagtgcaagttagaa

SEQ ID NO: 302946 - DNA, 30 bp, Artificial Sequence
  Synthetic oligonucleotide
gcatttggaagcagaggtagcgggttagaa

SEQ ID NO: 302947 - DNA, 30 bp, Artificial Sequence
  Synthetic oligonucleotide
tggatcagccagagataattctggttagaa

SEQ ID NO: 302948 - DNA, 30 bp, Artificial Sequence
  Synthetic oligonucleotide
ccgacgctcaggcattccacgtatttagaa

SEQ ID NO: 302949 - DNA, 30 bp, Artificial Sequence
  Synthetic oligonucleotide
gcataatcaaggaagacggaaattttagaa

SEQ ID NO: 302950 - DNA, 30 bp, Artificial Sequence
  Synthetic oligonucleotide
tctcgcgcactaatatcggaccttttagaa

SEQ ID NO: 302951 - DNA, 30 bp, Artificial Sequence
  Synthetic oligonucleotide
acccccaagaaatgggttctcaaaaacgaa

SEQ ID NO: 302952 - DNA, 30 bp, Artificial Sequence
  Synthetic oligonucleotide
tgtagatgtagaacccgattcgtaaacgaa

SEQ ID NO: 302953 - DNA, 30 bp, Artificial Sequence
  Synthetic oligonucleotide
ctaagccatctcggcacagccttaaacgaa

SEQ ID NO: 302954 - DNA, 30 bp, Artificial Sequence
  Synthetic oligonucleotide
tattcctagcacaacgaagtgggcaacgaa

SEQ ID NO: 302955 - DNA, 30 bp, Artificial Sequence
  Synthetic oligonucleotide
gcatgaagtatcagttctaattagaacgaa

SEQ ID NO: 302956 - DNA, 30 bp, Artificial Sequence
  Synthetic oligonucleotide
agccctataatggtgaacgttgggaacgaa

SEQ ID NO: 302957 - DNA, 30 bp, Artificial Sequence
  Synthetic oligonucleotide
gttttaatgggtgcacaaccgcataacgaa

SEQ ID NO: 302958 - DNA, 30 bp, Artificial Sequence
  Synthetic oligonucleotide
attctcatatagactctgtccgataacgaa

SEQ ID NO: 302959 - DNA, 30 bp, Artificial Sequence
  Synthetic oligonucleotide
gcatgatgctcttcccgcgacactaacgaa

SEQ ID NO: 302960 - DNA, 30 bp, Artificial Sequence
  Synthetic oligonucleotide
ttggatatactgtgtgctactacacacgaa

SEQ ID NO: 302961 - DNA, 30 bp, Artificial Sequence
  Synthetic oligonucleotide
cgacacggcggaatagtattaagacacgaa

SEQ ID NO: 302962 - DNA, 29 bp, Artificial Sequence
  Synthetic oligonucleotide
tttctgcttcgggaggggacagccacgaa

SEQ ID NO: 302963 - DNA, 30 bp, Artificial Sequence
  Synthetic oligonucleotide
tttacgtggtgggtagaaaaacagcacgaa

SEQ ID NO: 302964 - DNA, 30 bp, Artificial Sequence
  Synthetic oligonucleotide
ggacgtaaaaagtattagtccccgcacgaa

SEQ ID NO: 302965 - DNA, 30 bp, Artificial Sequence
  Synthetic oligonucleotide
ggaaaagcgactggcggcttatcgcacgaa

SEQ ID NO: 302966 - DNA, 30 bp, Artificial Sequence
  Synthetic oligonucleotide
gtgagcctgtattcaacagggcggcacgaa

SEQ ID NO: 302967 - DNA, 30 bp, Artificial Sequence
  Synthetic oligonucleotide
gtgttataccattagcgaacactgcacgaa

SEQ ID NO: 302968 - DNA, 30 bp, Artificial Sequence
  Synthetic oligonucleotide
ttgtgatacaatgggggttttgtgcacgaa

SEQ ID NO: 302969 - DNA, 30 bp, Artificial Sequence
  Synthetic oligonucleotide
tctcgctgttgtacccgccaacatcacgaa

SEQ ID NO: 302970 - DNA, 30 bp, Artificial Sequence
  Synthetic oligonucleotide
agccttacgtacaaacatgactatcacgaa

SEQ ID NO: 302971 - DNA, 30 bp, Artificial Sequence
  Synthetic oligonucleotide
cagggcactcatagacagacgcttcacgaa

SEQ ID NO: 302972 - DNA, 30 bp, Artificial Sequence
  Synthetic oligonucleotide
gaagtcgggaagccgcatgtgcttcacgaa

SEQ ID NO: 302973 - DNA, 31 bp, Artificial Sequence
  Synthetic oligonucleotide
gagtggaggacatcagttggcgcaagacgaa

SEQ ID NO: 302974 - DNA, 30 bp, Artificial Sequence
  Synthetic oligonucleotide
ggcttaatcgaatcatgtcgttgagacgaa

SEQ ID NO: 302975 - DNA, 30 bp, Artificial Sequence
  Synthetic oligonucleotide
acccatcaagtacgttcacgtttagacgaa

SEQ ID NO: 302976 - DNA, 30 bp, Artificial Sequence
  Synthetic oligonucleotide
cgcacatccaaccataaggactaggacgaa

SEQ ID NO: 302977 - DNA, 30 bp, Artificial Sequence
  Synthetic oligonucleotide
gtagcctctaagaatgttagaccggacgaa

SEQ ID NO: 302978 - DNA, 30 bp, Artificial Sequence
  Synthetic oligonucleotide
tgtaaatggcctcttattagaggtgacgaa

SEQ ID NO: 302979 - DNA, 30 bp, Artificial Sequence
  Synthetic oligonucleotide
gtaacagattcaggcctctaatttgacgaa

SEQ ID NO: 302980 - DNA, 30 bp, Artificial Sequence
  Synthetic oligonucleotide
taaagcccagggtccggtgaaggatacgaa

SEQ ID NO: 302981 - DNA, 30 bp, Artificial Sequence
  Synthetic oligonucleotide
tgctattcctcggaactgtccttatacgaa

SEQ ID NO: 302982 - DNA, 30 bp, Artificial Sequence
  Synthetic oligonucleotide
tccgcactaatgtaagtactcttatacgaa

SEQ ID NO: 302983 - DNA, 30 bp, Artificial Sequence
  Synthetic oligonucleotide
ttctggcgagttaacgtaagaaggtacgaa

SEQ ID NO: 302984 - DNA, 30 bp, Artificial Sequence
  Synthetic oligonucleotide
tgattcgcgtgacaataaatcgggtacgaa

SEQ ID NO: 302985 - DNA, 30 bp, Artificial Sequence
  Synthetic oligonucleotide
ttagataatcgtcaaccttttgtgtacgaa

SEQ ID NO: 302986 - DNA, 30 bp, Artificial Sequence
  Synthetic oligonucleotide
tacctctttgcgctctataacccttacgaa

SEQ ID NO: 302987 - DNA, 30 bp, Artificial Sequence
  Synthetic oligonucleotide
aagttgggatgccaatggtagggttacgaa

SEQ ID NO: 302988 - DNA, 30 bp, Artificial Sequence
  Synthetic oligonucleotide
gacatgatcccggaagtggaagaaaccgaa

SEQ ID NO: 302989 - DNA, 30 bp, Artificial Sequence
  Synthetic oligonucleotide
gctacgatcttcgccttaagggaaaccgaa

SEQ ID NO: 302990 - DNA, 30 bp, Artificial Sequence
  Synthetic oligonucleotide
ctggtgagcaagtgaggtcagccaaccgaa

SEQ ID NO: 302991 - DNA, 30 bp, Artificial Sequence
  Synthetic oligonucleotide
agcaaagtgccgtccgttgctataaccgaa

SEQ ID NO: 302992 - DNA, 30 bp, Artificial Sequence
  Synthetic oligonucleotide
gtgcggtgccaactgtccgaccctaccgaa

SEQ ID NO: 302993 - DNA, 30 bp, Artificial Sequence
  Synthetic oligonucleotide
gcggtcttgtggggcaatgtcaaacccgaa

SEQ ID NO: 302994 - DNA, 30 bp, Artificial Sequence
  Synthetic oligonucleotide
catcgcccatgacactgtcgaatacccgaa

SEQ ID NO: 302995 - DNA, 30 bp, Artificial Sequence
  Synthetic oligonucleotide
acgccatttaaattcagataaatccccgaa

SEQ ID NO: 302996 - DNA, 30 bp, Artificial Sequence
  Synthetic oligonucleotide
gatcacaagcggcgctcgcgcttccccgaa

SEQ ID NO: 302997 - DNA, 30 bp, Artificial Sequence
  Synthetic oligonucleotide
agaataagattacacggactattgcccgaa

SEQ ID NO: 302998 - DNA, 30 bp, Artificial Sequence
  Synthetic oligonucleotide
aaaaccgcgtgggagaatcaggatcccgaa

SEQ ID NO: 302999 - DNA, 30 bp, Artificial Sequence
  Synthetic oligonucleotide
agttcgatctaaagagtctggtgtcccgaa

SEQ ID NO: 303000 - DNA, 30 bp, Artificial Sequence
  Synthetic oligonucleotide
cgaagttttccatgcatttctcttcccgaa

SEQ ID NO: 303001 - DNA, 30 bp, Artificial Sequence
  Synthetic oligonucleotide
acgccgtaagtctcggcaggcgccgccgaa

SEQ ID NO: 303002 - DNA, 30 bp, Artificial Sequence
  Synthetic oligonucleotide
gctctagactattcgagtttatgcgccgaa

SEQ ID NO: 303003 - DNA, 31 bp, Artificial Sequence
  Synthetic oligonucleotide
tctgcggttactattgtaaacttgggccgaa

SEQ ID NO: 303004 - DNA, 30 bp, Artificial Sequence
  Synthetic oligonucleotide
gttaaggagttaggctaagaggctgccgaa

SEQ ID NO: 303005 - DNA, 30 bp, Artificial Sequence
  Synthetic oligonucleotide
ccgtattagttaatccacgcgtctgccgaa

SEQ ID NO: 303006 - DNA, 30 bp, Artificial Sequence
  Synthetic oligonucleotide
gaaacgcgaggtccgaatttcacatccgaa

SEQ ID NO: 303007 - DNA, 30 bp, Artificial Sequence
  Synthetic oligonucleotide
gctttggattgtttaattcaaatatccgaa

SEQ ID NO: 303008 - DNA, 30 bp, Artificial Sequence
  Synthetic oligonucleotide
tgtaacccttatatggaaggctagtccgaa

SEQ ID NO: 303009 - DNA, 30 bp, Artificial Sequence
  Synthetic oligonucleotide
tacacccagcaatccactctgaggtccgaa

SEQ ID NO: 303010 - DNA, 30 bp, Artificial Sequence
  Synthetic oligonucleotide
accgaagattaaacctggacgcggtccgaa

SEQ ID NO: 303011 - DNA, 30 bp, Artificial Sequence
  Synthetic oligonucleotide
cagatggtgaatgctaattggctgtccgaa

SEQ ID NO: 303012 - DNA, 30 bp, Artificial Sequence
  Synthetic oligonucleotide
aaaatctacccctctcccgcgttgtccgaa

SEQ ID NO: 303013 - DNA, 30 bp, Artificial Sequence
  Synthetic oligonucleotide
aggtgttgacgctatcgaactcgttccgaa

SEQ ID NO: 303014 - DNA, 30 bp, Artificial Sequence
  Synthetic oligonucleotide
gaagtccgaagtaacaatgagtgaagcgaa

SEQ ID NO: 303015 - DNA, 30 bp, Artificial Sequence
  Synthetic oligonucleotide
tataaggtcaggtggatcgggaccagcgaa

SEQ ID NO: 303016 - DNA, 30 bp, Artificial Sequence
  Synthetic oligonucleotide
tctgtagttctaattcgcgcggatagcgaa

SEQ ID NO: 303017 - DNA, 30 bp, Artificial Sequence
  Synthetic oligonucleotide
tagagctatcctgaaggtctatgccgcgaa

SEQ ID NO: 303018 - DNA, 30 bp, Artificial Sequence
  Synthetic oligonucleotide
agccgattgatgtagcaccgatagcgcgaa

SEQ ID NO: 303019 - DNA, 30 bp, Artificial Sequence
  Synthetic oligonucleotide
gcttgtaatgtactgatagatgtgcgcgaa

SEQ ID NO: 303020 - DNA, 30 bp, Artificial Sequence
  Synthetic oligonucleotide
tctataaaacccctcgggtggaatcgcgaa

SEQ ID NO: 303021 - DNA, 28 bp, Artificial Sequence
  Synthetic oligonucleotide
ttcgaagaatcgcaattaacttcgcgaa

SEQ ID NO: 303022 - DNA, 30 bp, Artificial Sequence
  Synthetic oligonucleotide
attgttcgaagccgacaatcaaaaggcgaa

SEQ ID NO: 303023 - DNA, 30 bp, Artificial Sequence
  Synthetic oligonucleotide
cgcagtctcggaacgatagtttcaggcgaa

SEQ ID NO: 303024 - DNA, 30 bp, Artificial Sequence
  Synthetic oligonucleotide
ggacttgtagtcaagttccccataggcgaa

SEQ ID NO: 303025 - DNA, 30 bp, Artificial Sequence
  Synthetic oligonucleotide
gaggccggggccttagtaccgttaggcgaa

SEQ ID NO: 303026 - DNA, 30 bp, Artificial Sequence
  Synthetic oligonucleotide
agtgtggaaacgtagcattcctagggcgaa

SEQ ID NO: 303027 - DNA, 31 bp, Artificial Sequence
  Synthetic oligonucleotide
tacccagaacgcggtttgcgggtcgggcgaa

SEQ ID NO: 303028 - DNA, 30 bp, Artificial Sequence
  Synthetic oligonucleotide
catttacccaaggatgtcaacttgggcgaa

SEQ ID NO: 303029 - DNA, 30 bp, Artificial Sequence
  Synthetic oligonucleotide
ggcagtgaggattcgcgtacggcatgcgaa

SEQ ID NO: 303030 - DNA, 30 bp, Artificial Sequence
  Synthetic oligonucleotide
ctttaggcgcgattgctactaggatgcgaa

SEQ ID NO: 303031 - DNA, 30 bp, Artificial Sequence
  Synthetic oligonucleotide
ggggtgctttacccgagttctggctgcgaa

SEQ ID NO: 303032 - DNA, 30 bp, Artificial Sequence
  Synthetic oligonucleotide
aacatgtatggctagcccggtacgtgcgaa

SEQ ID NO: 303033 - DNA, 30 bp, Artificial Sequence
  Synthetic oligonucleotide
gacagaactgctagcagtggtagttgcgaa

SEQ ID NO: 303034 - DNA, 30 bp, Artificial Sequence
  Synthetic oligonucleotide
ctcgacgattgcgagagcactgacatcgaa

SEQ ID NO: 303035 - DNA, 30 bp, Artificial Sequence
  Synthetic oligonucleotide
gcacattgattaccgtgggcaaccatcgaa

SEQ ID NO: 303036 - DNA, 30 bp, Artificial Sequence
  Synthetic oligonucleotide
gaatgctactcgttgatacagcggatcgaa

SEQ ID NO: 303037 - DNA, 30 bp, Artificial Sequence
  Synthetic oligonucleotide
tagcgcgtaggtgtaggcggtatgatcgaa

SEQ ID NO: 303038 - DNA, 30 bp, Artificial Sequence
  Synthetic oligonucleotide
gcgcacccaatgggctcgccttatatcgaa

SEQ ID NO: 303039 - DNA, 30 bp, Artificial Sequence
  Synthetic oligonucleotide
ggacgatctagaaccgccccgagtatcgaa

SEQ ID NO: 303040 - DNA, 30 bp, Artificial Sequence
  Synthetic oligonucleotide
gcaatcgattcgaagccaaatgttatcgaa

SEQ ID NO: 303041 - DNA, 30 bp, Artificial Sequence
  Synthetic oligonucleotide
gtaaaaaattaagttgtattagaactcgaa

SEQ ID NO: 303042 - DNA, 30 bp, Artificial Sequence
  Synthetic oligonucleotide
atttgattgaattgagccaaagagctcgaa

SEQ ID NO: 303043 - DNA, 30 bp, Artificial Sequence
  Synthetic oligonucleotide
tgggttcgactggaaatttccctggtcgaa

SEQ ID NO: 303044 - DNA, 30 bp, Artificial Sequence
  Synthetic oligonucleotide
tccagccctacaccagggagatatgtcgaa

SEQ ID NO: 303045 - DNA, 31 bp, Artificial Sequence
  Synthetic oligonucleotide
agaatcaactcgcgacttgtagcctgtcgaa

SEQ ID NO: 303046 - DNA, 30 bp, Artificial Sequence
  Synthetic oligonucleotide
aggcgggggaagcgggcatcaggattcgaa

SEQ ID NO: 303047 - DNA, 30 bp, Artificial Sequence
  Synthetic oligonucleotide
ggcacttagacgggagcttaacccttcgaa

SEQ ID NO: 303048 - DNA, 30 bp, Artificial Sequence
  Synthetic oligonucleotide
ggtgacggcatgcggggttaccagttcgaa

SEQ ID NO: 303049 - DNA, 30 bp, Artificial Sequence
  Synthetic oligonucleotide
cttaagacgtaggtgacgtgatctttcgaa

SEQ ID NO: 303050 - DNA, 30 bp, Artificial Sequence
  Synthetic oligonucleotide
ggcaagattccccagctttcagcaaaggaa

SEQ ID NO: 303051 - DNA, 30 bp, Artificial Sequence
  Synthetic oligonucleotide
ttatagctagctgaaatataaataaaggaa

SEQ ID NO: 303052 - DNA, 30 bp, Artificial Sequence
  Synthetic oligonucleotide
ctgtagctttggcatagtgtgtcgaaggaa

SEQ ID NO: 303053 - DNA, 30 bp, Artificial Sequence
  Synthetic oligonucleotide
aaccgtctatatgtcggtaaacggaaggaa

SEQ ID NO: 303054 - DNA, 30 bp, Artificial Sequence
  Synthetic oligonucleotide
aacactctcgtgtccggacttcggaaggaa

SEQ ID NO: 303055 - DNA, 30 bp, Artificial Sequence
  Synthetic oligonucleotide
gtgcgcagacccctggttcggcctaaggaa

SEQ ID NO: 303056 - DNA, 30 bp, Artificial Sequence
  Synthetic oligonucleotide
gcgtgaggtccttgtgagacaggtaaggaa

SEQ ID NO: 303057 - DNA, 30 bp, Artificial Sequence
  Synthetic oligonucleotide
cggtcgtagtccgtccgtcttgtacaggaa

SEQ ID NO: 303058 - DNA, 30 bp, Artificial Sequence
  Synthetic oligonucleotide
atcacgttaccgatggtcattcgccaggaa

SEQ ID NO: 303059 - DNA, 30 bp, Artificial Sequence
  Synthetic oligonucleotide
tcctgggagtatggaccactccatcaggaa

SEQ ID NO: 303060 - DNA, 30 bp, Artificial Sequence
  Synthetic oligonucleotide
gtgtaacaccgatcccgattagctcaggaa

SEQ ID NO: 303061 - DNA, 30 bp, Artificial Sequence
  Synthetic oligonucleotide
aggtgggtagtgtagaagtgtattcaggaa

SEQ ID NO: 303062 - DNA, 30 bp, Artificial Sequence
  Synthetic oligonucleotide
tgaccaaggtactgtctatcataagaggaa

SEQ ID NO: 303063 - DNA, 30 bp, Artificial Sequence
  Synthetic oligonucleotide
tgatgcgcactggaagcgcattaagaggaa

SEQ ID NO: 303064 - DNA, 30 bp, Artificial Sequence
  Synthetic oligonucleotide
gcatttatctatcgagaatcagcagaggaa

SEQ ID NO: 303065 - DNA, 30 bp, Artificial Sequence
  Synthetic oligonucleotide
ttttgctataatgaaagtaaggcagaggaa

SEQ ID NO: 303066 - DNA, 30 bp, Artificial Sequence
  Synthetic oligonucleotide
aaactacgaggcagtggaagggacgaggaa

SEQ ID NO: 303067 - DNA, 30 bp, Artificial Sequence
  Synthetic oligonucleotide
gtgagcccaaattacccgcgcatggaggaa

SEQ ID NO: 303068 - DNA, 30 bp, Artificial Sequence
  Synthetic oligonucleotide
accgacacggttatgaaacgtaaataggaa

SEQ ID NO: 303069 - DNA, 30 bp, Artificial Sequence
  Synthetic oligonucleotide
atcgggtataagcagcacgcacaataggaa

SEQ ID NO: 303070 - DNA, 30 bp, Artificial Sequence
  Synthetic oligonucleotide
gacgtaggtaactgttaacctcgataggaa

SEQ ID NO: 303071 - DNA, 30 bp, Artificial Sequence
  Synthetic oligonucleotide
acatgtctagagccgttacagcactaggaa

SEQ ID NO: 303072 - DNA, 30 bp, Artificial Sequence
  Synthetic oligonucleotide
ccaaatctaccttatctgttaaggtaggaa

SEQ ID NO: 303073 - DNA, 30 bp, Artificial Sequence
  Synthetic oligonucleotide
catgatgggatcaattgtatgatgtaggaa

SEQ ID NO: 303074 - DNA, 30 bp, Artificial Sequence
  Synthetic oligonucleotide
gtatgaccctgcagttcgccttgaacggaa

SEQ ID NO: 303075 - DNA, 30 bp, Artificial Sequence
  Synthetic oligonucleotide
taagatgttggcattatgtcgttaacggaa

SEQ ID NO: 303076 - DNA, 30 bp, Artificial Sequence
  Synthetic oligonucleotide
tctcagatagctaccggggcccgcacggaa

SEQ ID NO: 303077 - DNA, 30 bp, Artificial Sequence
  Synthetic oligonucleotide
tgtactgaagcaaggtttacggtgacggaa

SEQ ID NO: 303078 - DNA, 30 bp, Artificial Sequence
  Synthetic oligonucleotide
ttactagaaataacaatggtctatacggaa

SEQ ID NO: 303079 - DNA, 30 bp, Artificial Sequence
  Synthetic oligonucleotide
ggattgcggatatagggttactctacggaa

SEQ ID NO: 303080 - DNA, 30 bp, Artificial Sequence
  Synthetic oligonucleotide
attcggggtctgtatggagttagtacggaa

SEQ ID NO: 303081 - DNA, 30 bp, Artificial Sequence
  Synthetic oligonucleotide
tgtcagggcggcggtgttattcgcccggaa

SEQ ID NO: 303082 - DNA, 30 bp, Artificial Sequence
  Synthetic oligonucleotide
ttggctgtgcatccgctgagttcgccggaa

SEQ ID NO: 303083 - DNA, 30 bp, Artificial Sequence
  Synthetic oligonucleotide
ggctcgagcgatttgggatgaaggccggaa

SEQ ID NO: 303084 - DNA, 30 bp, Artificial Sequence
  Synthetic oligonucleotide
agtacagtgcttgcaatcagtaggccggaa

SEQ ID NO: 303085 - DNA, 30 bp, Artificial Sequence
  Synthetic oligonucleotide
gggacgccagaacttcttcgagggccggaa

SEQ ID NO: 303086 - DNA, 30 bp, Artificial Sequence
  Synthetic oligonucleotide
tgagattaattacttatgtggaatccggaa

SEQ ID NO: 303087 - DNA, 30 bp, Artificial Sequence
  Synthetic oligonucleotide
gcaccgtcgttcaatcctaacagtccggaa

SEQ ID NO: 303088 - DNA, 30 bp, Artificial Sequence
  Synthetic oligonucleotide
ttaatagtcgagtaacccgttagagcggaa

SEQ ID NO: 303089 - DNA, 30 bp, Artificial Sequence
  Synthetic oligonucleotide
caggggatgttcatttgaggtatagcggaa

SEQ ID NO: 303090 - DNA, 30 bp, Artificial Sequence
  Synthetic oligonucleotide
ccgataaacatacggggccacatcgcggaa

SEQ ID NO: 303091 - DNA, 30 bp, Artificial Sequence
  Synthetic oligonucleotide
ttttccaggcagtcatgggccccggcggaa

SEQ ID NO: 303092 - DNA, 30 bp, Artificial Sequence
  Synthetic oligonucleotide
gccacaatacattgaaggtttagggcggaa

SEQ ID NO: 303093 - DNA, 30 bp, Artificial Sequence
  Synthetic oligonucleotide
aagagaccgccatttcaggtcttggcggaa

SEQ ID NO: 303094 - DNA, 30 bp, Artificial Sequence
  Synthetic oligonucleotide
acaccaaacttgttgggctcgagtgcggaa

SEQ ID NO: 303095 - DNA, 30 bp, Artificial Sequence
  Synthetic oligonucleotide
gacgatagtgtcctctgcaattgtgcggaa

SEQ ID NO: 303096 - DNA, 30 bp, Artificial Sequence
  Synthetic oligonucleotide
gtctaacataccagacggtttccatcggaa

SEQ ID NO: 303097 - DNA, 30 bp, Artificial Sequence
  Synthetic oligonucleotide
tgattcgccccaagctctcgtagatcggaa

SEQ ID NO: 303098 - DNA, 30 bp, Artificial Sequence
  Synthetic oligonucleotide
tgcggggctccatacccgaagttatcggaa

SEQ ID NO: 303099 - DNA, 30 bp, Artificial Sequence
  Synthetic oligonucleotide
cgttgggcccgtcccctcgatgattcggaa

SEQ ID NO: 303100 - DNA, 30 bp, Artificial Sequence
  Synthetic oligonucleotide
tatacttcagactgggccacagtaagggaa

SEQ ID NO: 303101 - DNA, 30 bp, Artificial Sequence
  Synthetic oligonucleotide
agtattctatcgaaacccccattaagggaa

SEQ ID NO: 303102 - DNA, 30 bp, Artificial Sequence
  Synthetic oligonucleotide
cggttcggtctttaagcctcagtcagggaa

SEQ ID NO: 303103 - DNA, 30 bp, Artificial Sequence
  Synthetic oligonucleotide
tgaacctcctgcgcgtagaatagtagggaa

SEQ ID NO: 303104 - DNA, 30 bp, Artificial Sequence
  Synthetic oligonucleotide
ctcctgaggcgggtacgttgcattagggaa

SEQ ID NO: 303105 - DNA, 30 bp, Artificial Sequence
  Synthetic oligonucleotide
agttattggcgcgtgcgcggttttagggaa

SEQ ID NO: 303106 - DNA, 30 bp, Artificial Sequence
  Synthetic oligonucleotide
tagttatacttctgggccgtctcacgggaa

SEQ ID NO: 303107 - DNA, 30 bp, Artificial Sequence
  Synthetic oligonucleotide
gccctgctgggacaagcactaggacgggaa

SEQ ID NO: 303108 - DNA, 30 bp, Artificial Sequence
  Synthetic oligonucleotide
gggacccagggcttgggtggcttacgggaa

SEQ ID NO: 303109 - DNA, 30 bp, Artificial Sequence
  Synthetic oligonucleotide
tttacaactaaatgagtatcgccccgggaa

SEQ ID NO: 303110 - DNA, 30 bp, Artificial Sequence
  Synthetic oligonucleotide
cttggctgggtcagttgtaaaggccgggaa

SEQ ID NO: 303111 - DNA, 30 bp, Artificial Sequence
  Synthetic oligonucleotide
atctaaaggtagtctacaccttagcgggaa

SEQ ID NO: 303112 - DNA, 30 bp, Artificial Sequence
  Synthetic oligonucleotide
actgaagcgtatgggcagcaaacgcgggaa

SEQ ID NO: 303113 - DNA, 30 bp, Artificial Sequence
  Synthetic oligonucleotide
ggagaaaagctgatacttaagccgcgggaa

SEQ ID NO: 303114 - DNA, 30 bp, Artificial Sequence
  Synthetic oligonucleotide
ccaacagaagttttcccaagctctcgggaa

SEQ ID NO: 303115 - DNA, 30 bp, Artificial Sequence
  Synthetic oligonucleotide
cctctaacggagggtgaaggactaggggaa

SEQ ID NO: 303116 - DNA, 30 bp, Artificial Sequence
  Synthetic oligonucleotide
aaatagttgagctgcgtagattacggggaa

SEQ ID NO: 303117 - DNA, 30 bp, Artificial Sequence
  Synthetic oligonucleotide
acatatattgtgtaggcgtgagggggggaa

SEQ ID NO: 303118 - DNA, 30 bp, Artificial Sequence
  Synthetic oligonucleotide
tgaaatggtgagttcggaagccatggggaa

SEQ ID NO: 303119 - DNA, 30 bp, Artificial Sequence
  Synthetic oligonucleotide
agcagtttagtccttaacaatcatggggaa

SEQ ID NO: 303120 - DNA, 30 bp, Artificial Sequence
  Synthetic oligonucleotide
tcggtaggcgcttttccaggggatggggaa

SEQ ID NO: 303121 - DNA, 30 bp, Artificial Sequence
  Synthetic oligonucleotide
gcatcggaaaaatctacatcagttggggaa

SEQ ID NO: 303122 - DNA, 30 bp, Artificial Sequence
  Synthetic oligonucleotide
gggacgggtattcctgcaaacccatgggaa

SEQ ID NO: 303123 - DNA, 30 bp, Artificial Sequence
  Synthetic oligonucleotide
gtagaaaccttactatacatcaggtgggaa

SEQ ID NO: 303124 - DNA, 30 bp, Artificial Sequence
  Synthetic oligonucleotide
gatatttaacgtacactggctcggtgggaa

SEQ ID NO: 303125 - DNA, 30 bp, Artificial Sequence
  Synthetic oligonucleotide
ggcggttttgtacgagtggcatggtgggaa

SEQ ID NO: 303126 - DNA, 30 bp, Artificial Sequence
  Synthetic oligonucleotide
tgggaaacttgcgtccactatctgtgggaa

SEQ ID NO: 303127 - DNA, 30 bp, Artificial Sequence
  Synthetic oligonucleotide
gatacagaattgcagcgtgcgtattgggaa

SEQ ID NO: 303128 - DNA, 30 bp, Artificial Sequence
  Synthetic oligonucleotide
ctaaagaggccgttagtagagacaatggaa

SEQ ID NO: 303129 - DNA, 30 bp, Artificial Sequence
  Synthetic oligonucleotide
gacataagctctgctgtcgatagaatggaa

SEQ ID NO: 303130 - DNA, 30 bp, Artificial Sequence
  Synthetic oligonucleotide
actgttgtcaccaggtgcatactaatggaa

SEQ ID NO: 303131 - DNA, 30 bp, Artificial Sequence
  Synthetic oligonucleotide
gctcagttttataaaactctgcccatggaa

SEQ ID NO: 303132 - DNA, 30 bp, Artificial Sequence
  Synthetic oligonucleotide
ctccaggccaaacaatttagtcgcatggaa

SEQ ID NO: 303133 - DNA, 30 bp, Artificial Sequence
  Synthetic oligonucleotide
ccactatcgttactatgttattagatggaa

SEQ ID NO: 303134 - DNA, 30 bp, Artificial Sequence
  Synthetic oligonucleotide
ctgcgtcatggacactagtgcaatatggaa

SEQ ID NO: 303135 - DNA, 30 bp, Artificial Sequence
  Synthetic oligonucleotide
accagggagtttcgtgaggactatatggaa

SEQ ID NO: 303136 - DNA, 30 bp, Artificial Sequence
  Synthetic oligonucleotide
tgaggccggtgaattgccgatggtatggaa

SEQ ID NO: 303137 - DNA, 30 bp, Artificial Sequence
  Synthetic oligonucleotide
cacctcaggtgcataagtgtgtaactggaa

SEQ ID NO: 303138 - DNA, 30 bp, Artificial Sequence
  Synthetic oligonucleotide
ggtaagcggagcggaatcaaggcactggaa

SEQ ID NO: 303139 - DNA, 30 bp, Artificial Sequence
  Synthetic oligonucleotide
gccttcactggctcgtagaaagccctggaa

SEQ ID NO: 303140 - DNA, 30 bp, Artificial Sequence
  Synthetic oligonucleotide
tacgggagaaggcagacgggttagctggaa

SEQ ID NO: 303141 - DNA, 30 bp, Artificial Sequence
  Synthetic oligonucleotide
aacctcggtaacttccgctgagcgctggaa

SEQ ID NO: 303142 - DNA, 30 bp, Artificial Sequence
  Synthetic oligonucleotide
cagataaagacaaacctcctggcgctggaa

SEQ ID NO: 303143 - DNA, 30 bp, Artificial Sequence
  Synthetic oligonucleotide
attcaacggtcggcacacgtgatagtggaa

SEQ ID NO: 303144 - DNA, 30 bp, Artificial Sequence
  Synthetic oligonucleotide
ttcagataggttcatgtccctaaggtggaa

SEQ ID NO: 303145 - DNA, 30 bp, Artificial Sequence
  Synthetic oligonucleotide
cgatcttgggccgcggctagagaggtggaa

SEQ ID NO: 303146 - DNA, 30 bp, Artificial Sequence
  Synthetic oligonucleotide
tacatacaggtagccctaacatcggtggaa

SEQ ID NO: 303147 - DNA, 30 bp, Artificial Sequence
  Synthetic oligonucleotide
cccggtatttaattcttcacaagggtggaa

SEQ ID NO: 303148 - DNA, 30 bp, Artificial Sequence
  Synthetic oligonucleotide
ccactctagtagtactacttaatggtggaa

SEQ ID NO: 303149 - DNA, 30 bp, Artificial Sequence
  Synthetic oligonucleotide
cacagggataaaatcgggaagcctgtggaa

SEQ ID NO: 303150 - DNA, 30 bp, Artificial Sequence
  Synthetic oligonucleotide
gggtggggattgggcggtcattttgtggaa

SEQ ID NO: 303151 - DNA, 30 bp, Artificial Sequence
  Synthetic oligonucleotide
tctagcggctacttgctgcgccaattggaa

SEQ ID NO: 303152 - DNA, 30 bp, Artificial Sequence
  Synthetic oligonucleotide
aaaacgctgtcttgtgcctgacagttggaa

SEQ ID NO: 303153 - DNA, 30 bp, Artificial Sequence
  Synthetic oligonucleotide
ctatcctcgacacagtaaactgagttggaa

SEQ ID NO: 303154 - DNA, 30 bp, Artificial Sequence
  Synthetic oligonucleotide
tgtttaatgtcttgataaaaggggttggaa

SEQ ID NO: 303155 - DNA, 30 bp, Artificial Sequence
  Synthetic oligonucleotide
ttgaaaagcgcaagacacgtcattttggaa

SEQ ID NO: 303156 - DNA, 30 bp, Artificial Sequence
  Synthetic oligonucleotide
gtcatgagttagctatagatggtaaatgaa

SEQ ID NO: 303157 - DNA, 30 bp, Artificial Sequence
  Synthetic oligonucleotide
agaatgcaaacacaggctcgtgagaatgaa

SEQ ID NO: 303158 - DNA, 30 bp, Artificial Sequence
  Synthetic oligonucleotide
tagaatagcatttttcagttactgaatgaa

SEQ ID NO: 303159 - DNA, 30 bp, Artificial Sequence
  Synthetic oligonucleotide
tcgggaggtccattgggaccgcataatgaa

SEQ ID NO: 303160 - DNA, 30 bp, Artificial Sequence
  Synthetic oligonucleotide
cacctactttgtatcagttttactaatgaa

SEQ ID NO: 303161 - DNA, 30 bp, Artificial Sequence
  Synthetic oligonucleotide
ttactaaacttagattactccattaatgaa

SEQ ID NO: 303162 - DNA, 30 bp, Artificial Sequence
  Synthetic oligonucleotide
cagagaaattgagcatataatcttaatgaa

SEQ ID NO: 303163 - DNA, 30 bp, Artificial Sequence
  Synthetic oligonucleotide
taaaccatcagactcttgtgtctacatgaa

SEQ ID NO: 303164 - DNA, 30 bp, Artificial Sequence
  Synthetic oligonucleotide
tagctatggaaattgctacaatcgcatgaa

SEQ ID NO: 303165 - DNA, 30 bp, Artificial Sequence
  Synthetic oligonucleotide
ctttcatttaaaggttgaacttctcatgaa

SEQ ID NO: 303166 - DNA, 30 bp, Artificial Sequence
  Synthetic oligonucleotide
gcgtaggttgatttgcattagtttcatgaa

SEQ ID NO: 303167 - DNA, 30 bp, Artificial Sequence
  Synthetic oligonucleotide
tgtcacatatagttggtgtcattagatgaa

SEQ ID NO: 303168 - DNA, 30 bp, Artificial Sequence
  Synthetic oligonucleotide
ggtaacgacagtaatttatagaaggatgaa

SEQ ID NO: 303169 - DNA, 30 bp, Artificial Sequence
  Synthetic oligonucleotide
gatatcagcttttcttagatctcggatgaa

SEQ ID NO: 303170 - DNA, 30 bp, Artificial Sequence
  Synthetic oligonucleotide
gtaatccgacaatattcctacatggatgaa

SEQ ID NO: 303171 - DNA, 30 bp, Artificial Sequence
  Synthetic oligonucleotide
accaggaaccgaccgcaacacgtatatgaa

SEQ ID NO: 303172 - DNA, 30 bp, Artificial Sequence
  Synthetic oligonucleotide
taagcctaacaaaaggttcgcacctatgaa

SEQ ID NO: 303173 - DNA, 30 bp, Artificial Sequence
  Synthetic oligonucleotide
gaacgcccaatggcggacctgcgctatgaa

SEQ ID NO: 303174 - DNA, 30 bp, Artificial Sequence
  Synthetic oligonucleotide
taatttacgacaaccgacctcatctatgaa

SEQ ID NO: 303175 - DNA, 30 bp, Artificial Sequence
  Synthetic oligonucleotide
tcataagcgtaatactcgtaactctatgaa

SEQ ID NO: 303176 - DNA, 30 bp, Artificial Sequence
  Synthetic oligonucleotide
agaaatcggggaggtgattccaggtatgaa

SEQ ID NO: 303177 - DNA, 30 bp, Artificial Sequence
  Synthetic oligonucleotide
cgagcaatctcctttagaggcaaaactgaa

SEQ ID NO: 303178 - DNA, 30 bp, Artificial Sequence
  Synthetic oligonucleotide
ccgccacggaagctagcagctcaaactgaa

SEQ ID NO: 303179 - DNA, 30 bp, Artificial Sequence
  Synthetic oligonucleotide
gactgttaaagacagcaattacgaactgaa

SEQ ID NO: 303180 - DNA, 30 bp, Artificial Sequence
  Synthetic oligonucleotide
tgcatacctgactagccaagaaccactgaa

SEQ ID NO: 303181 - DNA, 30 bp, Artificial Sequence
  Synthetic oligonucleotide
aagatgggctataacatatgttccactgaa

SEQ ID NO: 303182 - DNA, 30 bp, Artificial Sequence
  Synthetic oligonucleotide
gatgctgactctgtgtattcgtagcctgaa

SEQ ID NO: 303183 - DNA, 30 bp, Artificial Sequence
  Synthetic oligonucleotide
cggaggcggttacgcaacatagcgcctgaa

SEQ ID NO: 303184 - DNA, 30 bp, Artificial Sequence
  Synthetic oligonucleotide
gaggtcttattaatgtgaatgcctcctgaa

SEQ ID NO: 303185 - DNA, 30 bp, Artificial Sequence
  Synthetic oligonucleotide
cgtatccggtgttatatggtacttcctgaa

SEQ ID NO: 303186 - DNA, 30 bp, Artificial Sequence
  Synthetic oligonucleotide
tgtctaattttctgagcttggcttcctgaa

SEQ ID NO: 303187 - DNA, 30 bp, Artificial Sequence
  Synthetic oligonucleotide
gtggcgctggtattactccggaaggctgaa

SEQ ID NO: 303188 - DNA, 30 bp, Artificial Sequence
  Synthetic oligonucleotide
gcaatatagctggtgccctcttgggctgaa

SEQ ID NO: 303189 - DNA, 30 bp, Artificial Sequence
  Synthetic oligonucleotide
tcactacccttcaaaaggccgttggctgaa

SEQ ID NO: 303190 - DNA, 30 bp, Artificial Sequence
  Synthetic oligonucleotide
gtggtatataagcactcgatccctgctgaa

SEQ ID NO: 303191 - DNA, 30 bp, Artificial Sequence
  Synthetic oligonucleotide
cccgaaactcgaattccgattatatctgaa

SEQ ID NO: 303192 - DNA, 30 bp, Artificial Sequence
  Synthetic oligonucleotide
agcggaacggaagtagctcctctatctgaa

SEQ ID NO: 303193 - DNA, 30 bp, Artificial Sequence
  Synthetic oligonucleotide
agccctccggggcaacttgcggtatctgaa

SEQ ID NO: 303194 - DNA, 30 bp, Artificial Sequence
  Synthetic oligonucleotide
actccccttagatataatttgggctctgaa

SEQ ID NO: 303195 - DNA, 30 bp, Artificial Sequence
  Synthetic oligonucleotide
tcgaatgtataaacagaaagtggctctgaa

SEQ ID NO: 303196 - DNA, 30 bp, Artificial Sequence
  Synthetic oligonucleotide
agtcggtcacaccggcttgggatctctgaa

SEQ ID NO: 303197 - DNA, 30 bp, Artificial Sequence
  Synthetic oligonucleotide
cgttgcaatttacccgtcacagattctgaa

SEQ ID NO: 303198 - DNA, 30 bp, Artificial Sequence
  Synthetic oligonucleotide
tgatggtatgactgggcaacaagttctgaa

SEQ ID NO: 303199 - DNA, 30 bp, Artificial Sequence
  Synthetic oligonucleotide
aaggggcacggttataccacgcccagtgaa

SEQ ID NO: 303200 - DNA, 30 bp, Artificial Sequence
  Synthetic oligonucleotide
aattcaccacgggatcgggtttccagtgaa

SEQ ID NO: 303201 - DNA, 30 bp, Artificial Sequence
  Synthetic oligonucleotide
ccgtgcggcagtttgtatcaccgcagtgaa

SEQ ID NO: 303202 - DNA, 30 bp, Artificial Sequence
  Synthetic oligonucleotide
gttattagattcatcattggtggcagtgaa

SEQ ID NO: 303203 - DNA, 30 bp, Artificial Sequence
  Synthetic oligonucleotide
tatataactatggaggatctttgcagtgaa

SEQ ID NO: 303204 - DNA, 30 bp, Artificial Sequence
  Synthetic oligonucleotide
ggccggttctatgcaaatcccgcgagtgaa

SEQ ID NO: 303205 - DNA, 30 bp, Artificial Sequence
  Synthetic oligonucleotide
ggggcaacttatggtgcgtcggagcgtgaa

SEQ ID NO: 303206 - DNA, 30 bp, Artificial Sequence
  Synthetic oligonucleotide
tggtcaataagaagccgctacaggcgtgaa

SEQ ID NO: 303207 - DNA, 30 bp, Artificial Sequence
  Synthetic oligonucleotide
acttattccctgttagatggcaatcgtgaa

SEQ ID NO: 303208 - DNA, 30 bp, Artificial Sequence
  Synthetic oligonucleotide
gctcacgttgttacgaataggtcaggtgaa

SEQ ID NO: 303209 - DNA, 30 bp, Artificial Sequence
  Synthetic oligonucleotide
atactccctttaatatgacgaagaggtgaa

SEQ ID NO: 303210 - DNA, 30 bp, Artificial Sequence
  Synthetic oligonucleotide
gtcccaggaagcctgcacttattaggtgaa

SEQ ID NO: 303211 - DNA, 30 bp, Artificial Sequence
  Synthetic oligonucleotide
ttagcttcgccaagcggtatgaacggtgaa

SEQ ID NO: 303212 - DNA, 30 bp, Artificial Sequence
  Synthetic oligonucleotide
tgttcactgtcagcatcggacgtcggtgaa

SEQ ID NO: 303213 - DNA, 30 bp, Artificial Sequence
  Synthetic oligonucleotide
agtacggctagcgcgcgaattcggggtgaa

SEQ ID NO: 303214 - DNA, 30 bp, Artificial Sequence
  Synthetic oligonucleotide
agttgcggcagggcggcaccttggggtgaa

SEQ ID NO: 303215 - DNA, 30 bp, Artificial Sequence
  Synthetic oligonucleotide
gcgatgtattatgcaagtatgcatggtgaa

SEQ ID NO: 303216 - DNA, 30 bp, Artificial Sequence
  Synthetic oligonucleotide
cgaatttatagcagaccgcgaagatgtgaa

SEQ ID NO: 303217 - DNA, 30 bp, Artificial Sequence
  Synthetic oligonucleotide
ctgggtacatggttgttcgaggtatgtgaa

SEQ ID NO: 303218 - DNA, 30 bp, Artificial Sequence
  Synthetic oligonucleotide
ttgtgacggatgtaatatttttactgtgaa

SEQ ID NO: 303219 - DNA, 30 bp, Artificial Sequence
  Synthetic oligonucleotide
gtggggatgagaggacggatttattgtgaa

SEQ ID NO: 303220 - DNA, 30 bp, Artificial Sequence
  Synthetic oligonucleotide
tataatagagtcgaacgagtttcttgtgaa

SEQ ID NO: 303221 - DNA, 30 bp, Artificial Sequence
  Synthetic oligonucleotide
taattatatgcaaatgtgtaaatttgtgaa

SEQ ID NO: 303222 - DNA, 30 bp, Artificial Sequence
  Synthetic oligonucleotide
tctgagcgcccaggcgcaggaggaattgaa

SEQ ID NO: 303223 - DNA, 30 bp, Artificial Sequence
  Synthetic oligonucleotide
caatagggacaagaatcctccataattgaa

SEQ ID NO: 303224 - DNA, 30 bp, Artificial Sequence
  Synthetic oligonucleotide
ccgctcaatcgctgccggaacaacattgaa

SEQ ID NO: 303225 - DNA, 30 bp, Artificial Sequence
  Synthetic oligonucleotide
agtccgtgcgtgaaccgcaactacattgaa

SEQ ID NO: 303226 - DNA, 30 bp, Artificial Sequence
  Synthetic oligonucleotide
agggcctagcccggtgaaggctacattgaa

SEQ ID NO: 303227 - DNA, 30 bp, Artificial Sequence
  Synthetic oligonucleotide
cacaggctatagtgcacctgtgccattgaa

SEQ ID NO: 303228 - DNA, 30 bp, Artificial Sequence
  Synthetic oligonucleotide
tacctgctgttaaagataggacagattgaa

SEQ ID NO: 303229 - DNA, 30 bp, Artificial Sequence
  Synthetic oligonucleotide
aaacggatgggtttgtatgaaatgattgaa

SEQ ID NO: 303230 - DNA, 30 bp, Artificial Sequence
  Synthetic oligonucleotide
gtaatcccgtcggggtgccccttgattgaa

SEQ ID NO: 303231 - DNA, 30 bp, Artificial Sequence
  Synthetic oligonucleotide
ggttgttgtgtaaagaaaaatcgtattgaa

SEQ ID NO: 303232 - DNA, 31 bp, Artificial Sequence
  Synthetic oligonucleotide
gatacagtgggtgccataccattttattgaa

SEQ ID NO: 303233 - DNA, 30 bp, Artificial Sequence
  Synthetic oligonucleotide
gccttggggaatggccccgtcaaacttgaa

SEQ ID NO: 303234 - DNA, 30 bp, Artificial Sequence
  Synthetic oligonucleotide
ttaccgcatttattggcagctagacttgaa

SEQ ID NO: 303235 - DNA, 30 bp, Artificial Sequence
  Synthetic oligonucleotide
ataacaccagacgcaacaaacgtacttgaa

SEQ ID NO: 303236 - DNA, 30 bp, Artificial Sequence
  Synthetic oligonucleotide
tcgatgtagcgttagcggcgccaccttgaa

SEQ ID NO: 303237 - DNA, 30 bp, Artificial Sequence
  Synthetic oligonucleotide
attgacgtggtcgcacccctcggccttgaa

SEQ ID NO: 303238 - DNA, 30 bp, Artificial Sequence
  Synthetic oligonucleotide
ggtagttagacgtccgccgagggccttgaa

SEQ ID NO: 303239 - DNA, 30 bp, Artificial Sequence
  Synthetic oligonucleotide
gtacgccctattgtgaagttgttccttgaa

SEQ ID NO: 303240 - DNA, 30 bp, Artificial Sequence
  Synthetic oligonucleotide
agttacaaaaaacgtacaacgtagcttgaa

SEQ ID NO: 303241 - DNA, 30 bp, Artificial Sequence
  Synthetic oligonucleotide
cttctaatctggagaacgggttcgcttgaa

SEQ ID NO: 303242 - DNA, 30 bp, Artificial Sequence
  Synthetic oligonucleotide
gaactgtttccaggcaaacctcatcttgaa

SEQ ID NO: 303243 - DNA, 30 bp, Artificial Sequence
  Synthetic oligonucleotide
tggttggcacggtctgccattcgagttgaa

SEQ ID NO: 303244 - DNA, 30 bp, Artificial Sequence
  Synthetic oligonucleotide
atcaaaatttaaggctgcatgtacgttgaa

SEQ ID NO: 303245 - DNA, 30 bp, Artificial Sequence
  Synthetic oligonucleotide
tgcgctgtttattcggcatacgaggttgaa

SEQ ID NO: 303246 - DNA, 30 bp, Artificial Sequence
  Synthetic oligonucleotide
aacaggcgaacgttataaccgccggttgaa

SEQ ID NO: 303247 - DNA, 30 bp, Artificial Sequence
  Synthetic oligonucleotide
cggcccttagggcacgccattgtggttgaa

SEQ ID NO: 303248 - DNA, 30 bp, Artificial Sequence
  Synthetic oligonucleotide
ggccgtcgttccacccaaatggttgttgaa

SEQ ID NO: 303249 - DNA, 30 bp, Artificial Sequence
  Synthetic oligonucleotide
cttgtcacagcaagtgtacaggtatttgaa

SEQ ID NO: 303250 - DNA, 30 bp, Artificial Sequence
  Synthetic oligonucleotide
aacgccgatattaggaaaaagggctttgaa

SEQ ID NO: 303251 - DNA, 30 bp, Artificial Sequence
  Synthetic oligonucleotide
gcgtctggcccgtatttgactcggtttgaa

SEQ ID NO: 303252 - DNA, 30 bp, Artificial Sequence
  Synthetic oligonucleotide
gaggtcatagtttacgggttcgtgtttgaa

SEQ ID NO: 303253 - DNA, 30 bp, Artificial Sequence
  Synthetic oligonucleotide
aacgggcttacaacacatgtattgtttgaa

SEQ ID NO: 303254 - DNA, 30 bp, Artificial Sequence
  Synthetic oligonucleotide
cgaatttcaagatgtatgaaggcttttgaa

SEQ ID NO: 303255 - DNA, 30 bp, Artificial Sequence
  Synthetic oligonucleotide
gaataacatggcgttaatcacaaaaaataa

SEQ ID NO: 303256 - DNA, 30 bp, Artificial Sequence
  Synthetic oligonucleotide
agccatggtatgctgactatgacaaaataa

SEQ ID NO: 303257 - DNA, 30 bp, Artificial Sequence
  Synthetic oligonucleotide
aaaagacaataaaacttggtctgaaaataa

SEQ ID NO: 303258 - DNA, 30 bp, Artificial Sequence
  Synthetic oligonucleotide
agggtattggattatatggtagacaaataa

SEQ ID NO: 303259 - DNA, 30 bp, Artificial Sequence
  Synthetic oligonucleotide
attgccgtgatggcatgcagtcagaaataa

SEQ ID NO: 303260 - DNA, 30 bp, Artificial Sequence
  Synthetic oligonucleotide
ccgatcgttctgcgcgtcgtgactaaataa

SEQ ID NO: 303261 - DNA, 30 bp, Artificial Sequence
  Synthetic oligonucleotide
catggaccatcttagtgcgcttctaaataa

SEQ ID NO: 303262 - DNA, 30 bp, Artificial Sequence
  Synthetic oligonucleotide
aaactaaaggtaaaattcctagaacaataa

SEQ ID NO: 303263 - DNA, 30 bp, Artificial Sequence
  Synthetic oligonucleotide
cgctttcaggggattgtgcctgaacaataa

SEQ ID NO: 303264 - DNA, 30 bp, Artificial Sequence
  Synthetic oligonucleotide
gccagttttccgcgatgatgaccacaataa

SEQ ID NO: 303265 - DNA, 30 bp, Artificial Sequence
  Synthetic oligonucleotide
tttggcctcgaatcataatcctcacaataa

SEQ ID NO: 303266 - DNA, 30 bp, Artificial Sequence
  Synthetic oligonucleotide
gaactgtctttgaaagagtgacgacaataa

SEQ ID NO: 303267 - DNA, 30 bp, Artificial Sequence
  Synthetic oligonucleotide
ccaaggtcatgttcaagtcgtgaccaataa

SEQ ID NO: 303268 - DNA, 30 bp, Artificial Sequence
  Synthetic oligonucleotide
aatcgccgccagtgacaataaagccaataa

SEQ ID NO: 303269 - DNA, 30 bp, Artificial Sequence
  Synthetic oligonucleotide
atacaattaactgaacagggtggccaataa

SEQ ID NO: 303270 - DNA, 30 bp, Artificial Sequence
  Synthetic oligonucleotide
ctgtaacatgggcactagagtttgcaataa

SEQ ID NO: 303271 - DNA, 30 bp, Artificial Sequence
  Synthetic oligonucleotide
agaactaaaccaccatgacggaatcaataa

SEQ ID NO: 303272 - DNA, 30 bp, Artificial Sequence
  Synthetic oligonucleotide
attattagtgctacagttactttagaataa

SEQ ID NO: 303273 - DNA, 30 bp, Artificial Sequence
  Synthetic oligonucleotide
aaactatgtttgtgcgcttaaggcgaataa

SEQ ID NO: 303274 - DNA, 30 bp, Artificial Sequence
  Synthetic oligonucleotide
caaatagggcgcctcctggataaggaataa

SEQ ID NO: 303275 - DNA, 30 bp, Artificial Sequence
  Synthetic oligonucleotide
cgcaggaatcgtgcgtccggttaggaataa

SEQ ID NO: 303276 - DNA, 30 bp, Artificial Sequence
  Synthetic oligonucleotide
taaatgtaccataattagatatcgtaataa

SEQ ID NO: 303277 - DNA, 30 bp, Artificial Sequence
  Synthetic oligonucleotide
tattggcatagtaatcacaatccttaataa

SEQ ID NO: 303278 - DNA, 30 bp, Artificial Sequence
  Synthetic oligonucleotide
ttccagtactggtagcttccgcacacataa

SEQ ID NO: 303279 - DNA, 30 bp, Artificial Sequence
  Synthetic oligonucleotide
ggcgtcaaagctggcagcattaagacataa

SEQ ID NO: 303280 - DNA, 30 bp, Artificial Sequence
  Synthetic oligonucleotide
gcctatggccgggcaattaactcgacataa

SEQ ID NO: 303281 - DNA, 30 bp, Artificial Sequence
  Synthetic oligonucleotide
gctccggtaacaccctctacagttacataa

SEQ ID NO: 303282 - DNA, 30 bp, Artificial Sequence
  Synthetic oligonucleotide
gtaggggcgtggtgctcctgtcaaccataa

SEQ ID NO: 303283 - DNA, 30 bp, Artificial Sequence
  Synthetic oligonucleotide
actaaccacggtccgaccaagagaccataa

SEQ ID NO: 303284 - DNA, 30 bp, Artificial Sequence
  Synthetic oligonucleotide
ggtaaactattatttaaggcgaacccataa

SEQ ID NO: 303285 - DNA, 30 bp, Artificial Sequence
  Synthetic oligonucleotide
ttcggcgtacggattttgttgaacccataa

SEQ ID NO: 303286 - DNA, 30 bp, Artificial Sequence
  Synthetic oligonucleotide
gcagtcatacaagctggttaatagccataa

SEQ ID NO: 303287 - DNA, 30 bp, Artificial Sequence
  Synthetic oligonucleotide
gggatgcacatcacattggagtagccataa

SEQ ID NO: 303288 - DNA, 30 bp, Artificial Sequence
  Synthetic oligonucleotide
ggttggcaaaagagctcgctcacgccataa

SEQ ID NO: 303289 - DNA, 30 bp, Artificial Sequence
  Synthetic oligonucleotide
atcaagcaccaatgggcttaatcgccataa

SEQ ID NO: 303290 - DNA, 30 bp, Artificial Sequence
  Synthetic oligonucleotide
agtcgattcataattaatcgatggccataa

SEQ ID NO: 303291 - DNA, 30 bp, Artificial Sequence
  Synthetic oligonucleotide
gttcgctgcacgcgtggtcaggtgccataa

SEQ ID NO: 303292 - DNA, 30 bp, Artificial Sequence
  Synthetic oligonucleotide
atcagtaatggtttgaactatcaagcataa

SEQ ID NO: 303293 - DNA, 30 bp, Artificial Sequence
  Synthetic oligonucleotide
cactcaaatgtcctaaagtccccagcataa

SEQ ID NO: 303294 - DNA, 30 bp, Artificial Sequence
  Synthetic oligonucleotide
gtattctgagctgaagcatgtttagcataa

SEQ ID NO: 303295 - DNA, 30 bp, Artificial Sequence
  Synthetic oligonucleotide
attacattactctaaggaatgtacgcataa

SEQ ID NO: 303296 - DNA, 30 bp, Artificial Sequence
  Synthetic oligonucleotide
taaagctaatgtggctgggggcgcgcataa

SEQ ID NO: 303297 - DNA, 30 bp, Artificial Sequence
  Synthetic oligonucleotide
tagtgatctcctaaggctattatcgcataa

SEQ ID NO: 303298 - DNA, 30 bp, Artificial Sequence
  Synthetic oligonucleotide
tcgtcggtgcttggtggtgtgtcggcataa

SEQ ID NO: 303299 - DNA, 30 bp, Artificial Sequence
  Synthetic oligonucleotide
caaataactgtcaatcgacacatggcataa

SEQ ID NO: 303300 - DNA, 30 bp, Artificial Sequence
  Synthetic oligonucleotide
ctgcaaccaaggctaagggcattggcataa

SEQ ID NO: 303301 - DNA, 30 bp, Artificial Sequence
  Synthetic oligonucleotide
agcagacgttgctagaaatacgctgcataa

SEQ ID NO: 303302 - DNA, 30 bp, Artificial Sequence
  Synthetic oligonucleotide
aggcctgacgttgccatagggtctgcataa

SEQ ID NO: 303303 - DNA, 30 bp, Artificial Sequence
  Synthetic oligonucleotide
cgcgcggagtaattcgtaccttggtcataa

SEQ ID NO: 303304 - DNA, 30 bp, Artificial Sequence
  Synthetic oligonucleotide
cctcgcagaggatgcccggacaattcataa

SEQ ID NO: 303305 - DNA, 30 bp, Artificial Sequence
  Synthetic oligonucleotide
tagctcaatggcgcagtgaagttttcataa

SEQ ID NO: 303306 - DNA, 30 bp, Artificial Sequence
  Synthetic oligonucleotide
gtacaagcgcgtcgatgaataataagataa

SEQ ID NO: 303307 - DNA, 30 bp, Artificial Sequence
  Synthetic oligonucleotide
agactcctgagttgcttgtaggtaagataa

SEQ ID NO: 303308 - DNA, 30 bp, Artificial Sequence
  Synthetic oligonucleotide
ttttgcgttgtccgaataaagtgcagataa

SEQ ID NO: 303309 - DNA, 30 bp, Artificial Sequence
  Synthetic oligonucleotide
ggggccttgcgtcggatcatgaagagataa

SEQ ID NO: 303310 - DNA, 30 bp, Artificial Sequence
  Synthetic oligonucleotide
caagcggtgtactgaagtctttggagataa

SEQ ID NO: 303311 - DNA, 30 bp, Artificial Sequence
  Synthetic oligonucleotide
tttcacggcatggtctagtagttgagataa

SEQ ID NO: 303312 - DNA, 30 bp, Artificial Sequence
  Synthetic oligonucleotide
tctaatgacctggtcaaggcagctagataa

SEQ ID NO: 303313 - DNA, 30 bp, Artificial Sequence
  Synthetic oligonucleotide
ggtcactatcacttatttgtcggtagataa

SEQ ID NO: 303314 - DNA, 30 bp, Artificial Sequence
  Synthetic oligonucleotide
atcgacatcgttcctcgtgggggtagataa

SEQ ID NO: 303315 - DNA, 30 bp, Artificial Sequence
  Synthetic oligonucleotide
agtggtaatcggggcaaatagtgtagataa

SEQ ID NO: 303316 - DNA, 30 bp, Artificial Sequence
  Synthetic oligonucleotide
gcgagtagttaggggggaaatcaacgataa

SEQ ID NO: 303317 - DNA, 30 bp, Artificial Sequence
  Synthetic oligonucleotide
tatacgagtgctataaggatcgcacgataa

SEQ ID NO: 303318 - DNA, 30 bp, Artificial Sequence
  Synthetic oligonucleotide
tccggcatcgcaggatccgagacccgataa

SEQ ID NO: 303319 - DNA, 30 bp, Artificial Sequence
  Synthetic oligonucleotide
tcctatgaagcgagtattatcctccgataa

SEQ ID NO: 303320 - DNA, 30 bp, Artificial Sequence
  Synthetic oligonucleotide
tcgaaggcaattcagcactttctgcgataa

SEQ ID NO: 303321 - DNA, 30 bp, Artificial Sequence
  Synthetic oligonucleotide
atatatgtaagcgaaccatgccatcgataa

SEQ ID NO: 303322 - DNA, 30 bp, Artificial Sequence
  Synthetic oligonucleotide
ttggctattttcctgtgacaggcaggataa

SEQ ID NO: 303323 - DNA, 30 bp, Artificial Sequence
  Synthetic oligonucleotide
atcccttacgtgagtctgcagagaggataa

SEQ ID NO: 303324 - DNA, 30 bp, Artificial Sequence
  Synthetic oligonucleotide
gccgaatactcaaccacgcgcgacggataa

SEQ ID NO: 303325 - DNA, 30 bp, Artificial Sequence
  Synthetic oligonucleotide
gaataatgatgttagcacatgtcgggataa

SEQ ID NO: 303326 - DNA, 30 bp, Artificial Sequence
  Synthetic oligonucleotide
taattctttgatcgaggttagcggggataa

SEQ ID NO: 303327 - DNA, 30 bp, Artificial Sequence
  Synthetic oligonucleotide
cctaaagctttcctggtaatggggggataa

SEQ ID NO: 303328 - DNA, 30 bp, Artificial Sequence
  Synthetic oligonucleotide
tggtttgaaggattggtgagtgggggataa

SEQ ID NO: 303329 - DNA, 30 bp, Artificial Sequence
  Synthetic oligonucleotide
tcttcaagtctaagttgacggactggataa

SEQ ID NO: 303330 - DNA, 30 bp, Artificial Sequence
  Synthetic oligonucleotide
ttaatcaaacactgaaccctatctggataa

SEQ ID NO: 303331 - DNA, 30 bp, Artificial Sequence
  Synthetic oligonucleotide
ctagttcaacgttcgtgaaattctggataa

SEQ ID NO: 303332 - DNA, 30 bp, Artificial Sequence
  Synthetic oligonucleotide
cctataatccggtaaagtaacggtggataa

SEQ ID NO: 303333 - DNA, 30 bp, Artificial Sequence
  Synthetic oligonucleotide
atggtccctgcgtttgtacggtcatgataa

SEQ ID NO: 303334 - DNA, 30 bp, Artificial Sequence
  Synthetic oligonucleotide
cggacgcctttgtgagaacatggatgataa

SEQ ID NO: 303335 - DNA, 30 bp, Artificial Sequence
  Synthetic oligonucleotide
cctttgtacgtcgtctggtaagtatgataa

SEQ ID NO: 303336 - DNA, 30 bp, Artificial Sequence
  Synthetic oligonucleotide
taccacgactctaaagtctcgggctgataa

SEQ ID NO: 303337 - DNA, 30 bp, Artificial Sequence
  Synthetic oligonucleotide
ttagcatgttgttctatgggcaagtgataa

SEQ ID NO: 303338 - DNA, 30 bp, Artificial Sequence
  Synthetic oligonucleotide
aagggcgacggccctcggaagtcgtgataa

SEQ ID NO: 303339 - DNA, 30 bp, Artificial Sequence
  Synthetic oligonucleotide
cgcctgatcgtatagggctaaatttgataa

SEQ ID NO: 303340 - DNA, 30 bp, Artificial Sequence
  Synthetic oligonucleotide
atcgagttccacgcgccgaaacaaatataa

SEQ ID NO: 303341 - DNA, 30 bp, Artificial Sequence
  Synthetic oligonucleotide
gccatgcgggactatatctcagaaatataa

SEQ ID NO: 303342 - DNA, 30 bp, Artificial Sequence
  Synthetic oligonucleotide
gaaggtattaatgtacttatataaatataa

SEQ ID NO: 303343 - DNA, 30 bp, Artificial Sequence
  Synthetic oligonucleotide
tattcccgtacaaagtctgatggaatataa

SEQ ID NO: 303344 - DNA, 30 bp, Artificial Sequence
  Synthetic oligonucleotide
agacttatttcgcgatgtctagacatataa

SEQ ID NO: 303345 - DNA, 30 bp, Artificial Sequence
  Synthetic oligonucleotide
aacaggcactcatgcactcaccagatataa

SEQ ID NO: 303346 - DNA, 30 bp, Artificial Sequence
  Synthetic oligonucleotide
caagctccaaggttcgtttcgtagatataa

SEQ ID NO: 303347 - DNA, 30 bp, Artificial Sequence
  Synthetic oligonucleotide
ggtaagcgttagcggtaaaatgtgatataa

SEQ ID NO: 303348 - DNA, 30 bp, Artificial Sequence
  Synthetic oligonucleotide
ccctatcaatgcgagaagatatgactataa

SEQ ID NO: 303349 - DNA, 30 bp, Artificial Sequence
  Synthetic oligonucleotide
actcgcccaacgctcttatcctgactataa

SEQ ID NO: 303350 - DNA, 30 bp, Artificial Sequence
  Synthetic oligonucleotide
tgtctgcgggaatagctcaacatactataa

SEQ ID NO: 303351 - DNA, 30 bp, Artificial Sequence
  Synthetic oligonucleotide
gaatgtggctaaagattttctgacctataa

SEQ ID NO: 303352 - DNA, 30 bp, Artificial Sequence
  Synthetic oligonucleotide
ctgtcagataaacttgtgaataagctataa

SEQ ID NO: 303353 - DNA, 30 bp, Artificial Sequence
  Synthetic oligonucleotide
gaatgaagggtactggcagatcagctataa

SEQ ID NO: 303354 - DNA, 30 bp, Artificial Sequence
  Synthetic oligonucleotide
aacccgtgtgttgtgggggaagatctataa

SEQ ID NO: 303355 - DNA, 30 bp, Artificial Sequence
  Synthetic oligonucleotide
acctcgtcaggatctcgttattttctataa

SEQ ID NO: 303356 - DNA, 30 bp, Artificial Sequence
  Synthetic oligonucleotide
aacccaaagggggtcgggtgggtagtataa

SEQ ID NO: 303357 - DNA, 30 bp, Artificial Sequence
  Synthetic oligonucleotide
cggtatcagtctcactgcttcaacgtataa

SEQ ID NO: 303358 - DNA, 30 bp, Artificial Sequence
  Synthetic oligonucleotide
actcaatcgtgtcatatagagtgcgtataa

SEQ ID NO: 303359 - DNA, 30 bp, Artificial Sequence
  Synthetic oligonucleotide
ggtaaatacgcattgcaagatttcgtataa

SEQ ID NO: 303360 - DNA, 30 bp, Artificial Sequence
  Synthetic oligonucleotide
tagaatatattgttggcgctaaaggtataa

SEQ ID NO: 303361 - DNA, 30 bp, Artificial Sequence
  Synthetic oligonucleotide
gtcgcggccggggtttccaatcaggtataa

SEQ ID NO: 303362 - DNA, 30 bp, Artificial Sequence
  Synthetic oligonucleotide
cgatttggagtggtgggagtggaggtataa

SEQ ID NO: 303363 - DNA, 30 bp, Artificial Sequence
  Synthetic oligonucleotide
aatgattcaggtggtctcgacttggtataa

SEQ ID NO: 303364 - DNA, 30 bp, Artificial Sequence
  Synthetic oligonucleotide
cggccgctcgggaagtgtcaaggtgtataa

SEQ ID NO: 303365 - DNA, 30 bp, Artificial Sequence
  Synthetic oligonucleotide
ctacccgggatggcatttaacgaattataa

SEQ ID NO: 303366 - DNA, 30 bp, Artificial Sequence
  Synthetic oligonucleotide
ccttgcatattgcagatgccttcattataa

SEQ ID NO: 303367 - DNA, 30 bp, Artificial Sequence
  Synthetic oligonucleotide
ttcttcaaacccaactttgcgaacttataa

SEQ ID NO: 303368 - DNA, 30 bp, Artificial Sequence
  Synthetic oligonucleotide
ccgagtctgaatcaggcatgtagcttataa

SEQ ID NO: 303369 - DNA, 30 bp, Artificial Sequence
  Synthetic oligonucleotide
tgcgtacaggtctctccaatccgcttataa

SEQ ID NO: 303370 - DNA, 29 bp, Artificial Sequence
  Synthetic oligonucleotide
gggccctggcaggcgcaacttggttataa

SEQ ID NO: 303371 - DNA, 30 bp, Artificial Sequence
  Synthetic oligonucleotide
agaagcatacccgcgtccatacatttataa

SEQ ID NO: 303372 - DNA, 30 bp, Artificial Sequence
  Synthetic oligonucleotide
tagggagattcgtggacagtagatttataa

SEQ ID NO: 303373 - DNA, 30 bp, Artificial Sequence
  Synthetic oligonucleotide
gaaaggtatcaacgggcaggtcgtttataa

SEQ ID NO: 303374 - DNA, 30 bp, Artificial Sequence
  Synthetic oligonucleotide
tgggcgtgtatcccgccaatgataaactaa

SEQ ID NO: 303375 - DNA, 30 bp, Artificial Sequence
  Synthetic oligonucleotide
atgctagtctcgtgtgtggcagacaactaa

SEQ ID NO: 303376 - DNA, 30 bp, Artificial Sequence
  Synthetic oligonucleotide
tccgcctattaaagcgaaggttccaactaa

SEQ ID NO: 303377 - DNA, 30 bp, Artificial Sequence
  Synthetic oligonucleotide
agacggagggatacttgccagcgcaactaa

SEQ ID NO: 303378 - DNA, 30 bp, Artificial Sequence
  Synthetic oligonucleotide
tatagtttgtggttaaaggtgaagaactaa

SEQ ID NO: 303379 - DNA, 30 bp, Artificial Sequence
  Synthetic oligonucleotide
cctgtccccgtgtataggccagcgaactaa

SEQ ID NO: 303380 - DNA, 30 bp, Artificial Sequence
  Synthetic oligonucleotide
tctatgtagctttcaaattataggaactaa

SEQ ID NO: 303381 - DNA, 30 bp, Artificial Sequence
  Synthetic oligonucleotide
ataatagggggcggccttacgatgaactaa

SEQ ID NO: 303382 - DNA, 30 bp, Artificial Sequence
  Synthetic oligonucleotide
atacgtaatgtcattggcattatgaactaa

SEQ ID NO: 303383 - DNA, 30 bp, Artificial Sequence
  Synthetic oligonucleotide
tggttaaaattaatttttagcgtgaactaa

SEQ ID NO: 303384 - DNA, 30 bp, Artificial Sequence
  Synthetic oligonucleotide
gcagcaacctttacatcagattctaactaa

SEQ ID NO: 303385 - DNA, 30 bp, Artificial Sequence
  Synthetic oligonucleotide
aggtagttgtatgtctgcaacacacactaa

SEQ ID NO: 303386 - DNA, 30 bp, Artificial Sequence
  Synthetic oligonucleotide
ttatttccattgacatcagagctacactaa

SEQ ID NO: 303387 - DNA, 30 bp, Artificial Sequence
  Synthetic oligonucleotide
ctagtctagcctatgcgataaccccactaa

SEQ ID NO: 303388 - DNA, 30 bp, Artificial Sequence
  Synthetic oligonucleotide
tgataggaggttgtggtgttatctcactaa

SEQ ID NO: 303389 - DNA, 30 bp, Artificial Sequence
  Synthetic oligonucleotide
atgtcggtcccgtagccatcgattcactaa

SEQ ID NO: 303390 - DNA, 30 bp, Artificial Sequence
  Synthetic oligonucleotide
ttgagctctagtgtcaccggacaagactaa

SEQ ID NO: 303391 - DNA, 30 bp, Artificial Sequence
  Synthetic oligonucleotide
cacccaagcgaacggtagacggaagactaa

SEQ ID NO: 303392 - DNA, 30 bp, Artificial Sequence
  Synthetic oligonucleotide
cgggtgtcgaaaccgactatgtgagactaa

SEQ ID NO: 303393 - DNA, 30 bp, Artificial Sequence
  Synthetic oligonucleotide
tagccagttcgcctgatgacgtccgactaa

SEQ ID NO: 303394 - DNA, 30 bp, Artificial Sequence
  Synthetic oligonucleotide
tgatcaccgcacatgcatcgagcggactaa

SEQ ID NO: 303395 - DNA, 30 bp, Artificial Sequence
  Synthetic oligonucleotide
agctaatactagtctcagaagtaatactaa

SEQ ID NO: 303396 - DNA, 30 bp, Artificial Sequence
  Synthetic oligonucleotide
cacaacaggattatagattaagcgtactaa

SEQ ID NO: 303397 - DNA, 30 bp, Artificial Sequence
  Synthetic oligonucleotide
gctgagtgagcccgtagtctgtattactaa

SEQ ID NO: 303398 - DNA, 30 bp, Artificial Sequence
  Synthetic oligonucleotide
cattatcgtggcttgaccaacgaaacctaa

SEQ ID NO: 303399 - DNA, 30 bp, Artificial Sequence
  Synthetic oligonucleotide
ccgctaaccgtattagtgtggtaaacctaa

SEQ ID NO: 303400 - DNA, 30 bp, Artificial Sequence
  Synthetic oligonucleotide
cacggcagctttctcgtattatacacctaa

SEQ ID NO: 303401 - DNA, 30 bp, Artificial Sequence
  Synthetic oligonucleotide
atcagccgtatctctctccactacacctaa

SEQ ID NO: 303402 - DNA, 30 bp, Artificial Sequence
  Synthetic oligonucleotide
tggctgtagaggctcaagatgaccacctaa

SEQ ID NO: 303403 - DNA, 30 bp, Artificial Sequence
  Synthetic oligonucleotide
acgtctacaggcatgtagactgggacctaa

SEQ ID NO: 303404 - DNA, 30 bp, Artificial Sequence
  Synthetic oligonucleotide
aaatgcttatgattatcaggctggacctaa

SEQ ID NO: 303405 - DNA, 30 bp, Artificial Sequence
  Synthetic oligonucleotide
tggtgaacatttcgctttacgactacctaa

SEQ ID NO: 303406 - DNA, 30 bp, Artificial Sequence
  Synthetic oligonucleotide
cctcctccttggaatggggcacctacctaa

SEQ ID NO: 303407 - DNA, 30 bp, Artificial Sequence
  Synthetic oligonucleotide
tgttggtccgaggggtagccagaaccctaa

SEQ ID NO: 303408 - DNA, 30 bp, Artificial Sequence
  Synthetic oligonucleotide
ctgccgtgtcccgtatgtttgctaccctaa

SEQ ID NO: 303409 - DNA, 30 bp, Artificial Sequence
  Synthetic oligonucleotide
tcgaagtacatctaactagtgtacccctaa

SEQ ID NO: 303410 - DNA, 30 bp, Artificial Sequence
  Synthetic oligonucleotide
gtcaagatcccgcttagataatgcccctaa

SEQ ID NO: 303411 - DNA, 30 bp, Artificial Sequence
  Synthetic oligonucleotide
tattaaactgacttatcaggcgagccctaa

SEQ ID NO: 303412 - DNA, 30 bp, Artificial Sequence
  Synthetic oligonucleotide
gtgacactgacgaggcgagattcgccctaa

SEQ ID NO: 303413 - DNA, 30 bp, Artificial Sequence
  Synthetic oligonucleotide
cactagatgaggaatgcgcctcttccctaa

SEQ ID NO: 303414 - DNA, 30 bp, Artificial Sequence
  Synthetic oligonucleotide
ggagataaattaatggctaccgttccctaa

SEQ ID NO: 303415 - DNA, 30 bp, Artificial Sequence
  Synthetic oligonucleotide
aatgtaggtagatgctggaacgcggcctaa

SEQ ID NO: 303416 - DNA, 30 bp, Artificial Sequence
  Synthetic oligonucleotide
gtgacatcatacttaaacagtcgggcctaa

SEQ ID NO: 303417 - DNA, 30 bp, Artificial Sequence
  Synthetic oligonucleotide
cgctacttctcgccgtcgccatttgcctaa

SEQ ID NO: 303418 - DNA, 30 bp, Artificial Sequence
  Synthetic oligonucleotide
ctaatattcattgcgaaatataactcctaa

SEQ ID NO: 303419 - DNA, 30 bp, Artificial Sequence
  Synthetic oligonucleotide
cgagaatgctccgggcgggactagtcctaa

SEQ ID NO: 303420 - DNA, 29 bp, Artificial Sequence
  Synthetic oligonucleotide
ggattttcaaggggaattgaccgtcctaa

SEQ ID NO: 303421 - DNA, 30 bp, Artificial Sequence
  Synthetic oligonucleotide
gtacctggactcggaaaaaaagtgtcctaa

SEQ ID NO: 303422 - DNA, 30 bp, Artificial Sequence
  Synthetic oligonucleotide
cacggcctgttttctatgtagcattcctaa

SEQ ID NO: 303423 - DNA, 30 bp, Artificial Sequence
  Synthetic oligonucleotide
cgcctgttaagtgaaatagggtattcctaa

SEQ ID NO: 303424 - DNA, 30 bp, Artificial Sequence
  Synthetic oligonucleotide
ggggaacctagtccgcttgaatagagctaa

SEQ ID NO: 303425 - DNA, 30 bp, Artificial Sequence
  Synthetic oligonucleotide
tcagcgttggtgtgcacttacctgagctaa

SEQ ID NO: 303426 - DNA, 30 bp, Artificial Sequence
  Synthetic oligonucleotide
taaactgtaggaccagaaacgaaccgctaa

SEQ ID NO: 303427 - DNA, 30 bp, Artificial Sequence
  Synthetic oligonucleotide
acgggacgtctttttacgcggggccgctaa

SEQ ID NO: 303428 - DNA, 30 bp, Artificial Sequence
  Synthetic oligonucleotide
tgtagacgtgcggggctgcctttccgctaa

SEQ ID NO: 303429 - DNA, 30 bp, Artificial Sequence
  Synthetic oligonucleotide
cctaattctggcgtcactagattgcgctaa

SEQ ID NO: 303430 - DNA, 30 bp, Artificial Sequence
  Synthetic oligonucleotide
aaacgttccgatagacacatatatcgctaa

SEQ ID NO: 303431 - DNA, 30 bp, Artificial Sequence
  Synthetic oligonucleotide
agcggcacgcggagaatgggttctcgctaa

SEQ ID NO: 303432 - DNA, 30 bp, Artificial Sequence
  Synthetic oligonucleotide
accagtccaacctgcgaccgagtaggctaa

SEQ ID NO: 303433 - DNA, 31 bp, Artificial Sequence
  Synthetic oligonucleotide
atctatggtctcaagtcagaccgtaggctaa

SEQ ID NO: 303434 - DNA, 30 bp, Artificial Sequence
  Synthetic oligonucleotide
agctaggcgattgtcctcgccttaggctaa

SEQ ID NO: 303435 - DNA, 30 bp, Artificial Sequence
  Synthetic oligonucleotide
ttacatatgtcggattggatgtccggctaa

SEQ ID NO: 303436 - DNA, 30 bp, Artificial Sequence
  Synthetic oligonucleotide
aaccccccagctcacaacctgcctggctaa

SEQ ID NO: 303437 - DNA, 30 bp, Artificial Sequence
  Synthetic oligonucleotide
tgagcatacgatacaactcttgctggctaa

SEQ ID NO: 303438 - DNA, 30 bp, Artificial Sequence
  Synthetic oligonucleotide
gcttttcctgaatcagtccggagtggctaa

SEQ ID NO: 303439 - DNA, 30 bp, Artificial Sequence
  Synthetic oligonucleotide
acattacgggtgtagggctgcagatgctaa

SEQ ID NO: 303440 - DNA, 30 bp, Artificial Sequence
  Synthetic oligonucleotide
ctgggacaagtattccgtaactcctgctaa

SEQ ID NO: 303441 - DNA, 30 bp, Artificial Sequence
  Synthetic oligonucleotide
gagtcgagcccgccttcatgcgtctgctaa

SEQ ID NO: 303442 - DNA, 30 bp, Artificial Sequence
  Synthetic oligonucleotide
tttgactaaatgaaccaacttacgtgctaa

SEQ ID NO: 303443 - DNA, 30 bp, Artificial Sequence
  Synthetic oligonucleotide
cccatggttaggtagttttataggtgctaa

SEQ ID NO: 303444 - DNA, 30 bp, Artificial Sequence
  Synthetic oligonucleotide
aattcgttactcgcggaatatcacatctaa

SEQ ID NO: 303445 - DNA, 30 bp, Artificial Sequence
  Synthetic oligonucleotide
ttttcaaaatacacttcgacttccatctaa

SEQ ID NO: 303446 - DNA, 30 bp, Artificial Sequence
  Synthetic oligonucleotide
aagttctataaggacaaaagtgtcatctaa

SEQ ID NO: 303447 - DNA, 30 bp, Artificial Sequence
  Synthetic oligonucleotide
atcatgtatcgcggcaacacccatatctaa

SEQ ID NO: 303448 - DNA, 30 bp, Artificial Sequence
  Synthetic oligonucleotide
aatgtcgagacatggaattgcaaactctaa

SEQ ID NO: 303449 - DNA, 30 bp, Artificial Sequence
  Synthetic oligonucleotide
cctacccttgcgcgcataacctaactctaa

SEQ ID NO: 303450 - DNA, 30 bp, Artificial Sequence
  Synthetic oligonucleotide
cacgtataggttataagactctgactctaa

SEQ ID NO: 303451 - DNA, 30 bp, Artificial Sequence
  Synthetic oligonucleotide
cttacgtagcacctggtcagactactctaa

SEQ ID NO: 303452 - DNA, 30 bp, Artificial Sequence
  Synthetic oligonucleotide
acaataacgtactagtattccatcctctaa

SEQ ID NO: 303453 - DNA, 30 bp, Artificial Sequence
  Synthetic oligonucleotide
aagagcctcagccgagctgacgagctctaa

SEQ ID NO: 303454 - DNA, 30 bp, Artificial Sequence
  Synthetic oligonucleotide
atgcctacttttggaacgaaccatctctaa

SEQ ID NO: 303455 - DNA, 30 bp, Artificial Sequence
  Synthetic oligonucleotide
gggagcggtagttcggtacgagatctctaa

SEQ ID NO: 303456 - DNA, 30 bp, Artificial Sequence
  Synthetic oligonucleotide
gatggagtccggcttccgccatctctctaa

SEQ ID NO: 303457 - DNA, 31 bp, Artificial Sequence
  Synthetic oligonucleotide
cccgatttttaacacgacaacgacagtctaa

SEQ ID NO: 303458 - DNA, 30 bp, Artificial Sequence
  Synthetic oligonucleotide
atcttccacaactggttccctgcagtctaa

SEQ ID NO: 303459 - DNA, 30 bp, Artificial Sequence
  Synthetic oligonucleotide
atctggacgggcagactgccgatagtctaa

SEQ ID NO: 303460 - DNA, 30 bp, Artificial Sequence
  Synthetic oligonucleotide
cgccagcgttggaattaactgcacgtctaa

SEQ ID NO: 303461 - DNA, 30 bp, Artificial Sequence
  Synthetic oligonucleotide
actagggtggggaaacattcttccgtctaa

SEQ ID NO: 303462 - DNA, 30 bp, Artificial Sequence
  Synthetic oligonucleotide
ttcgtacaatcgatcgcctagggcgtctaa

SEQ ID NO: 303463 - DNA, 30 bp, Artificial Sequence
  Synthetic oligonucleotide
acttgaacgtgacccaaacattgcgtctaa

SEQ ID NO: 303464 - DNA, 30 bp, Artificial Sequence
  Synthetic oligonucleotide
tgttatgcctcgacgagctaaccggtctaa

SEQ ID NO: 303465 - DNA, 30 bp, Artificial Sequence
  Synthetic oligonucleotide
actgttgtcgaggggactcagcgggtctaa

SEQ ID NO: 303466 - DNA, 30 bp, Artificial Sequence
  Synthetic oligonucleotide
gccatcgaataggccagcatggatgtctaa

SEQ ID NO: 303467 - DNA, 30 bp, Artificial Sequence
  Synthetic oligonucleotide
aacttacaagcggccgttcctcgtgtctaa

SEQ ID NO: 303468 - DNA, 30 bp, Artificial Sequence
  Synthetic oligonucleotide
cgattcggatttgtcgtctttcgattctaa

SEQ ID NO: 303469 - DNA, 30 bp, Artificial Sequence
  Synthetic oligonucleotide
gccagtactgcgtcaaatacggtcttctaa

SEQ ID NO: 303470 - DNA, 30 bp, Artificial Sequence
  Synthetic oligonucleotide
gggtggaccatacagtctaaccagttctaa

SEQ ID NO: 303471 - DNA, 30 bp, Artificial Sequence
  Synthetic oligonucleotide
acggctacgggatcgtcaacctatttctaa

SEQ ID NO: 303472 - DNA, 30 bp, Artificial Sequence
  Synthetic oligonucleotide
tacttcagaggttatgtgacctatttctaa

SEQ ID NO: 303473 - DNA, 30 bp, Artificial Sequence
  Synthetic oligonucleotide
gatcaagaatcagcgtgtagagctttctaa

SEQ ID NO: 303474 - DNA, 30 bp, Artificial Sequence
  Synthetic oligonucleotide
aggttataggacttgatacgcacaaagtaa

SEQ ID NO: 303475 - DNA, 30 bp, Artificial Sequence
  Synthetic oligonucleotide
gcatccctgcctccatgggagcgaaagtaa

SEQ ID NO: 303476 - DNA, 30 bp, Artificial Sequence
  Synthetic oligonucleotide
ggaagccaatttaagtgtaagaacaagtaa

SEQ ID NO: 303477 - DNA, 30 bp, Artificial Sequence
  Synthetic oligonucleotide
aacaccattagttagacatagacgaagtaa

SEQ ID NO: 303478 - DNA, 30 bp, Artificial Sequence
  Synthetic oligonucleotide
ctatataccttcagggggggcgggaagtaa

SEQ ID NO: 303479 - DNA, 30 bp, Artificial Sequence
  Synthetic oligonucleotide
gtgctagtggaagccaaccataataagtaa

SEQ ID NO: 303480 - DNA, 30 bp, Artificial Sequence
  Synthetic oligonucleotide
ttagtaaggatggtctggagccgtaagtaa

SEQ ID NO: 303481 - DNA, 30 bp, Artificial Sequence
  Synthetic oligonucleotide
gtcaaagtccagcaatcctcctgtaagtaa

SEQ ID NO: 303482 - DNA, 30 bp, Artificial Sequence
  Synthetic oligonucleotide
caaattggactgttcgcatttgttaagtaa

SEQ ID NO: 303483 - DNA, 30 bp, Artificial Sequence
  Synthetic oligonucleotide
ctgcgatgacagagatccatgatacagtaa

SEQ ID NO: 303484 - DNA, 30 bp, Artificial Sequence
  Synthetic oligonucleotide
gggatgttcggcttgcgtagatgccagtaa

SEQ ID NO: 303485 - DNA, 30 bp, Artificial Sequence
  Synthetic oligonucleotide
tccattgtaataaatttcgatgtccagtaa

SEQ ID NO: 303486 - DNA, 30 bp, Artificial Sequence
  Synthetic oligonucleotide
atagttggactggttatattcaatcagtaa

SEQ ID NO: 303487 - DNA, 30 bp, Artificial Sequence
  Synthetic oligonucleotide
caataaaagcggctacgaaatagtcagtaa

SEQ ID NO: 303488 - DNA, 30 bp, Artificial Sequence
  Synthetic oligonucleotide
tgggggtcgcaccttcgtttaatagagtaa

SEQ ID NO: 303489 - DNA, 30 bp, Artificial Sequence
  Synthetic oligonucleotide
gatccagtattcgcgatacagctagagtaa

SEQ ID NO: 303490 - DNA, 30 bp, Artificial Sequence
  Synthetic oligonucleotide
tcatcgaaaggccaattggtcgccgagtaa

SEQ ID NO: 303491 - DNA, 30 bp, Artificial Sequence
  Synthetic oligonucleotide
tgagcatcgaattaaccgcaatccgagtaa

SEQ ID NO: 303492 - DNA, 30 bp, Artificial Sequence
  Synthetic oligonucleotide
aaggcatagggcgcattaacgtccgagtaa

SEQ ID NO: 303493 - DNA, 30 bp, Artificial Sequence
  Synthetic oligonucleotide
catattccacggatcagtgattccgagtaa

SEQ ID NO: 303494 - DNA, 30 bp, Artificial Sequence
  Synthetic oligonucleotide
ggtgaatccctactgcaggaatgggagtaa

SEQ ID NO: 303495 - DNA, 30 bp, Artificial Sequence
  Synthetic oligonucleotide
cgcactgaggactaacgtccatgggagtaa

SEQ ID NO: 303496 - DNA, 30 bp, Artificial Sequence
  Synthetic oligonucleotide
ggactacatttaagaaatgctgatgagtaa

SEQ ID NO: 303497 - DNA, 30 bp, Artificial Sequence
  Synthetic oligonucleotide
agagcacagattcgtactgcgtgtgagtaa

SEQ ID NO: 303498 - DNA, 30 bp, Artificial Sequence
  Synthetic oligonucleotide
taatgcatcgaggaatgtaattgtgagtaa

SEQ ID NO: 303499 - DNA, 30 bp, Artificial Sequence
  Synthetic oligonucleotide
catcgaattgagcagggcagaacatagtaa

SEQ ID NO: 303500 - DNA, 30 bp, Artificial Sequence
  Synthetic oligonucleotide
gcgttgcagaggttgatctatacatagtaa

SEQ ID NO: 303501 - DNA, 30 bp, Artificial Sequence
  Synthetic oligonucleotide
gttaccgccaatttacccctcgcctagtaa

SEQ ID NO: 303502 - DNA, 30 bp, Artificial Sequence
  Synthetic oligonucleotide
actaagtactactcagactttgcctagtaa

SEQ ID NO: 303503 - DNA, 30 bp, Artificial Sequence
  Synthetic oligonucleotide
ccttgcggatggcactaattaaagtagtaa

SEQ ID NO: 303504 - DNA, 30 bp, Artificial Sequence
  Synthetic oligonucleotide
cacggagtcatgacgtcatacaagtagtaa

SEQ ID NO: 303505 - DNA, 30 bp, Artificial Sequence
  Synthetic oligonucleotide
tgtgcaggtctagtttacgtaaggtagtaa

SEQ ID NO: 303506 - DNA, 30 bp, Artificial Sequence
  Synthetic oligonucleotide
acagctttggggtcggtaaacaggtagtaa

SEQ ID NO: 303507 - DNA, 30 bp, Artificial Sequence
  Synthetic oligonucleotide
gtctaccaaagttggtgaatttcaacgtaa

SEQ ID NO: 303508 - DNA, 30 bp, Artificial Sequence
  Synthetic oligonucleotide
tcagtcgggtagcctgacctcctaacgtaa

SEQ ID NO: 303509 - DNA, 30 bp, Artificial Sequence
  Synthetic oligonucleotide
atagacgatgcactaggagcttacacgtaa

SEQ ID NO: 303510 - DNA, 30 bp, Artificial Sequence
  Synthetic oligonucleotide
tatagtgtgtgcgtttgtgcatccacgtaa

SEQ ID NO: 303511 - DNA, 30 bp, Artificial Sequence
  Synthetic oligonucleotide
tcttacggcgcaaatacgattcagacgtaa

SEQ ID NO: 303512 - DNA, 30 bp, Artificial Sequence
  Synthetic oligonucleotide
aagtccagttcctactacgcgcggacgtaa

SEQ ID NO: 303513 - DNA, 30 bp, Artificial Sequence
  Synthetic oligonucleotide
tggtataggatcagaacgaatttgacgtaa

SEQ ID NO: 303514 - DNA, 30 bp, Artificial Sequence
  Synthetic oligonucleotide
gataggtctgctttgtgtcccgatacgtaa

SEQ ID NO: 303515 - DNA, 30 bp, Artificial Sequence
  Synthetic oligonucleotide
gatccaaaccaaggggtgaatactacgtaa

SEQ ID NO: 303516 - DNA, 30 bp, Artificial Sequence
  Synthetic oligonucleotide
tagaaaggcgatttctgattatctacgtaa

SEQ ID NO: 303517 - DNA, 30 bp, Artificial Sequence
  Synthetic oligonucleotide
tgcactcaaaaccagggagctggtacgtaa

SEQ ID NO: 303518 - DNA, 30 bp, Artificial Sequence
  Synthetic oligonucleotide
tcgaggggtgctggcgatagcattacgtaa

SEQ ID NO: 303519 - DNA, 30 bp, Artificial Sequence
  Synthetic oligonucleotide
agacaggcggagcgaatcatataaccgtaa

SEQ ID NO: 303520 - DNA, 30 bp, Artificial Sequence
  Synthetic oligonucleotide
gtgtacgtgcagatttgtttagtaccgtaa

SEQ ID NO: 303521 - DNA, 30 bp, Artificial Sequence
  Synthetic oligonucleotide
tggccgtaggtcaccaattacaacccgtaa

SEQ ID NO: 303522 - DNA, 30 bp, Artificial Sequence
  Synthetic oligonucleotide
ttgatgaccttgttgcactgggtgccgtaa

SEQ ID NO: 303523 - DNA, 30 bp, Artificial Sequence
  Synthetic oligonucleotide
gcaaaccgcagaatcagacgtcctccgtaa

SEQ ID NO: 303524 - DNA, 30 bp, Artificial Sequence
  Synthetic oligonucleotide
aaacaacgtacagccgagcagcgtccgtaa

SEQ ID NO: 303525 - DNA, 30 bp, Artificial Sequence
  Synthetic oligonucleotide
cacaaaagtcggcagggtctccttccgtaa

SEQ ID NO: 303526 - DNA, 30 bp, Artificial Sequence
  Synthetic oligonucleotide
aatatagggatccgagtcttcgaagcgtaa

SEQ ID NO: 303527 - DNA, 30 bp, Artificial Sequence
  Synthetic oligonucleotide
ttagacgaggcaatagttagatcagcgtaa

SEQ ID NO: 303528 - DNA, 30 bp, Artificial Sequence
  Synthetic oligonucleotide
ttcgtataatgcttatctagggacgcgtaa

SEQ ID NO: 303529 - DNA, 30 bp, Artificial Sequence
  Synthetic oligonucleotide
gatttcgctgacacaaagttaggcgcgtaa

SEQ ID NO: 303530 - DNA, 30 bp, Artificial Sequence
  Synthetic oligonucleotide
gcaaaaatccttaggagaggtcgggcgtaa

SEQ ID NO: 303531 - DNA, 30 bp, Artificial Sequence
  Synthetic oligonucleotide
caaggcccgcagatcatagtcgtctcgtaa

SEQ ID NO: 303532 - DNA, 30 bp, Artificial Sequence
  Synthetic oligonucleotide
tcgtagccctgtcgatactgcgcaaggtaa

SEQ ID NO: 303533 - DNA, 30 bp, Artificial Sequence
  Synthetic oligonucleotide
aaccgactattgcacttagaccgaaggtaa

SEQ ID NO: 303534 - DNA, 30 bp, Artificial Sequence
  Synthetic oligonucleotide
tgccacgaatccgaggcttgtggaaggtaa

SEQ ID NO: 303535 - DNA, 30 bp, Artificial Sequence
  Synthetic oligonucleotide
atctctccagcgcgcgaggctttaaggtaa

SEQ ID NO: 303536 - DNA, 30 bp, Artificial Sequence
  Synthetic oligonucleotide
gttcggttggaaggtctattctagaggtaa

SEQ ID NO: 303537 - DNA, 30 bp, Artificial Sequence
  Synthetic oligonucleotide
agtattgttcataagctgagttagaggtaa

SEQ ID NO: 303538 - DNA, 30 bp, Artificial Sequence
  Synthetic oligonucleotide
ttacaatggctcgaatctaaaatgaggtaa

SEQ ID NO: 303539 - DNA, 30 bp, Artificial Sequence
  Synthetic oligonucleotide
cataaacatcggccccacaccgataggtaa

SEQ ID NO: 303540 - DNA, 30 bp, Artificial Sequence
  Synthetic oligonucleotide
tgggattagcctgcggggggacgtaggtaa

SEQ ID NO: 303541 - DNA, 30 bp, Artificial Sequence
  Synthetic oligonucleotide
gcacatgatgtagacctctggcgacggtaa

SEQ ID NO: 303542 - DNA, 30 bp, Artificial Sequence
  Synthetic oligonucleotide
gagtaaaaggattccgggtcaagccggtaa

SEQ ID NO: 303543 - DNA, 31 bp, Artificial Sequence
  Synthetic oligonucleotide
gtaagcgttcccgaaaacagcgtgccggtaa

SEQ ID NO: 303544 - DNA, 30 bp, Artificial Sequence
  Synthetic oligonucleotide
cagccacagatttgaaggcgggggcggtaa

SEQ ID NO: 303545 - DNA, 30 bp, Artificial Sequence
  Synthetic oligonucleotide
gatgtatgcggacccccggtacaagggtaa

SEQ ID NO: 303546 - DNA, 30 bp, Artificial Sequence
  Synthetic oligonucleotide
gtacctggatcaaatctaaaattagggtaa

SEQ ID NO: 303547 - DNA, 30 bp, Artificial Sequence
  Synthetic oligonucleotide
agtgtaggttaccactaaaattgcgggtaa

SEQ ID NO: 303548 - DNA, 30 bp, Artificial Sequence
  Synthetic oligonucleotide
gtggccgctggtcttgtgctagaggggtaa

SEQ ID NO: 303549 - DNA, 30 bp, Artificial Sequence
  Synthetic oligonucleotide
tgggaaattgtaagatggtacacggggtaa

SEQ ID NO: 303550 - DNA, 30 bp, Artificial Sequence
  Synthetic oligonucleotide
tgtcttgcacataagccacagtcggggtaa

SEQ ID NO: 303551 - DNA, 30 bp, Artificial Sequence
  Synthetic oligonucleotide
gatcaatataacagcgtacgacatgggtaa

SEQ ID NO: 303552 - DNA, 30 bp, Artificial Sequence
  Synthetic oligonucleotide
cgggtcgccgtattaagtcgggttgggtaa

SEQ ID NO: 303553 - DNA, 30 bp, Artificial Sequence
  Synthetic oligonucleotide
tctgtcatagagctctaatcaaaatggtaa

SEQ ID NO: 303554 - DNA, 30 bp, Artificial Sequence
  Synthetic oligonucleotide
tgacggatataatgtataaatttctggtaa

SEQ ID NO: 303555 - DNA, 30 bp, Artificial Sequence
  Synthetic oligonucleotide
ggttggttaatccaatcagtctcgtggtaa

SEQ ID NO: 303556 - DNA, 30 bp, Artificial Sequence
  Synthetic oligonucleotide
agtaagccaacgaataaactttattggtaa

SEQ ID NO: 303557 - DNA, 30 bp, Artificial Sequence
  Synthetic oligonucleotide
tcagtgtgtacaccctaaagcagttggtaa

SEQ ID NO: 303558 - DNA, 30 bp, Artificial Sequence
  Synthetic oligonucleotide
cttctaccgctcaagccttgctgttggtaa

SEQ ID NO: 303559 - DNA, 30 bp, Artificial Sequence
  Synthetic oligonucleotide
aagaaatgcggatgcttaactttttggtaa

SEQ ID NO: 303560 - DNA, 30 bp, Artificial Sequence
  Synthetic oligonucleotide
tttgcatacagaaatgggagtggaatgtaa

SEQ ID NO: 303561 - DNA, 30 bp, Artificial Sequence
  Synthetic oligonucleotide
ggcgtgtaaactcgtgttaattacatgtaa

SEQ ID NO: 303562 - DNA, 30 bp, Artificial Sequence
  Synthetic oligonucleotide
cagtttcaggcacccaagttggccatgtaa

SEQ ID NO: 303563 - DNA, 30 bp, Artificial Sequence
  Synthetic oligonucleotide
ttactccaatggtcagctcaacagatgtaa

SEQ ID NO: 303564 - DNA, 30 bp, Artificial Sequence
  Synthetic oligonucleotide
tggtagctcccttgcatattcgcgatgtaa

SEQ ID NO: 303565 - DNA, 30 bp, Artificial Sequence
  Synthetic oligonucleotide
tgctgcctgacattcgggccggctatgtaa

SEQ ID NO: 303566 - DNA, 30 bp, Artificial Sequence
  Synthetic oligonucleotide
gcccatagaataaatgcaaaatctatgtaa

SEQ ID NO: 303567 - DNA, 30 bp, Artificial Sequence
  Synthetic oligonucleotide
cgacccctgtgctactttccaagtatgtaa

SEQ ID NO: 303568 - DNA, 30 bp, Artificial Sequence
  Synthetic oligonucleotide
tgagcgttagaaatgttttcggcactgtaa

SEQ ID NO: 303569 - DNA, 30 bp, Artificial Sequence
  Synthetic oligonucleotide
gctgtccctaagtttaaggcaaacctgtaa

SEQ ID NO: 303570 - DNA, 30 bp, Artificial Sequence
  Synthetic oligonucleotide
ccgtttccaccgcctgcgaatcgcctgtaa

SEQ ID NO: 303571 - DNA, 30 bp, Artificial Sequence
  Synthetic oligonucleotide
ttgatgtaaagtaaacaacttcgcctgtaa

SEQ ID NO: 303572 - DNA, 30 bp, Artificial Sequence
  Synthetic oligonucleotide
ggtcaatatatggaaggggaccggctgtaa

SEQ ID NO: 303573 - DNA, 30 bp, Artificial Sequence
  Synthetic oligonucleotide
ccatcaagactgcatgtggttccagtgtaa

SEQ ID NO: 303574 - DNA, 30 bp, Artificial Sequence
  Synthetic oligonucleotide
gcactcaggatctgatcaccgagagtgtaa

SEQ ID NO: 303575 - DNA, 30 bp, Artificial Sequence
  Synthetic oligonucleotide
attggatgattgaaatatgccggcgtgtaa

SEQ ID NO: 303576 - DNA, 30 bp, Artificial Sequence
  Synthetic oligonucleotide
cgggttgtcttggcggattcctgggtgtaa

SEQ ID NO: 303577 - DNA, 30 bp, Artificial Sequence
  Synthetic oligonucleotide
attaactcgtaggtgctggggcatgtgtaa

SEQ ID NO: 303578 - DNA, 30 bp, Artificial Sequence
  Synthetic oligonucleotide
gctccgaatgactagagacccagtgtgtaa

SEQ ID NO: 303579 - DNA, 30 bp, Artificial Sequence
  Synthetic oligonucleotide
ctaacccgatgaatgaatgatcttgtgtaa

SEQ ID NO: 303580 - DNA, 30 bp, Artificial Sequence
  Synthetic oligonucleotide
aggtgaggcatattcgctatgtgattgtaa

SEQ ID NO: 303581 - DNA, 30 bp, Artificial Sequence
  Synthetic oligonucleotide
ggtatcgtctgactctaaaaacccttgtaa

SEQ ID NO: 303582 - DNA, 30 bp, Artificial Sequence
  Synthetic oligonucleotide
cccagattcatgaggaaaggaatgttgtaa

SEQ ID NO: 303583 - DNA, 30 bp, Artificial Sequence
  Synthetic oligonucleotide
ctaaatggactgtacagtttatatttgtaa

SEQ ID NO: 303584 - DNA, 30 bp, Artificial Sequence
  Synthetic oligonucleotide
agttattactttctactaagatagaattaa

SEQ ID NO: 303585 - DNA, 30 bp, Artificial Sequence
  Synthetic oligonucleotide
ctttatggcacgaccggatacacgaattaa

SEQ ID NO: 303586 - DNA, 30 bp, Artificial Sequence
  Synthetic oligonucleotide
aatgccccagaacagtagaaaccgaattaa

SEQ ID NO: 303587 - DNA, 30 bp, Artificial Sequence
  Synthetic oligonucleotide
gtttaagcatcacacggaggacggaattaa

SEQ ID NO: 303588 - DNA, 30 bp, Artificial Sequence
  Synthetic oligonucleotide
aaacatattggggcactatgggggaattaa

SEQ ID NO: 303589 - DNA, 30 bp, Artificial Sequence
  Synthetic oligonucleotide
cagcggcagctgcgcataagaatgaattaa

SEQ ID NO: 303590 - DNA, 30 bp, Artificial Sequence
  Synthetic oligonucleotide
tagatccggtagggagcaaggatgaattaa

SEQ ID NO: 303591 - DNA, 30 bp, Artificial Sequence
  Synthetic oligonucleotide
tgctcgtggacggtgttcataagtaattaa

SEQ ID NO: 303592 - DNA, 30 bp, Artificial Sequence
  Synthetic oligonucleotide
cgtacagacaccccttgagtgtcacattaa

SEQ ID NO: 303593 - DNA, 30 bp, Artificial Sequence
  Synthetic oligonucleotide
acgatgttagaacgattccgtagacattaa

SEQ ID NO: 303594 - DNA, 30 bp, Artificial Sequence
  Synthetic oligonucleotide
cgcacgaaccgtgataagccctaccattaa

SEQ ID NO: 303595 - DNA, 30 bp, Artificial Sequence
  Synthetic oligonucleotide
aaagccgactaagctgaaaatacccattaa

SEQ ID NO: 303596 - DNA, 30 bp, Artificial Sequence
  Synthetic oligonucleotide
ccgcccaaatgatgcgagactgagcattaa

SEQ ID NO: 303597 - DNA, 30 bp, Artificial Sequence
  Synthetic oligonucleotide
ggtgagctttcctcgatatttgcgcattaa

SEQ ID NO: 303598 - DNA, 30 bp, Artificial Sequence
  Synthetic oligonucleotide
aagcggccaaaattagttcactcgcattaa

SEQ ID NO: 303599 - DNA, 30 bp, Artificial Sequence
  Synthetic oligonucleotide
agagccgctgggtttagtattaggcattaa

SEQ ID NO: 303600 - DNA, 30 bp, Artificial Sequence
  Synthetic oligonucleotide
tttaaccacgccgagtccaagaatcattaa

SEQ ID NO: 303601 - DNA, 30 bp, Artificial Sequence
  Synthetic oligonucleotide
atatgtaaatctgtaagaatcaaagattaa

SEQ ID NO: 303602 - DNA, 31 bp, Artificial Sequence
  Synthetic oligonucleotide
aagtcgcgttccgtttaggcataaagattaa

SEQ ID NO: 303603 - DNA, 30 bp, Artificial Sequence
  Synthetic oligonucleotide
gcgccgactgtgggacttatactagattaa

SEQ ID NO: 303604 - DNA, 30 bp, Artificial Sequence
  Synthetic oligonucleotide
cgagcatctgagtgttattcgcacgattaa

SEQ ID NO: 303605 - DNA, 30 bp, Artificial Sequence
  Synthetic oligonucleotide
ggcttatcttgagagttcaacaccgattaa

SEQ ID NO: 303606 - DNA, 30 bp, Artificial Sequence
  Synthetic oligonucleotide
tggttactcgattttcactcatccgattaa

SEQ ID NO: 303607 - DNA, 30 bp, Artificial Sequence
  Synthetic oligonucleotide
tatgcagattagcggagcggtcgcgattaa

SEQ ID NO: 303608 - DNA, 30 bp, Artificial Sequence
  Synthetic oligonucleotide
gaccccatgttccaggtacgagaggattaa

SEQ ID NO: 303609 - DNA, 30 bp, Artificial Sequence
  Synthetic oligonucleotide
aacggaggtactgagctcagcaaatattaa

SEQ ID NO: 303610 - DNA, 30 bp, Artificial Sequence
  Synthetic oligonucleotide
agttatggggtgcgtaggaaagaatattaa

SEQ ID NO: 303611 - DNA, 30 bp, Artificial Sequence
  Synthetic oligonucleotide
tgaatatgccctaaccgccacgaatattaa

SEQ ID NO: 303612 - DNA, 30 bp, Artificial Sequence
  Synthetic oligonucleotide
caccacagcttatcgaagacttgatattaa

SEQ ID NO: 303613 - DNA, 30 bp, Artificial Sequence
  Synthetic oligonucleotide
ggggaatctgaacccctgaaagtctattaa

SEQ ID NO: 303614 - DNA, 30 bp, Artificial Sequence
  Synthetic oligonucleotide
acatatggagatcccggcgctgcgtattaa

SEQ ID NO: 303615 - DNA, 30 bp, Artificial Sequence
  Synthetic oligonucleotide
atgactatcttcagtcgagctaggtattaa

SEQ ID NO: 303616 - DNA, 30 bp, Artificial Sequence
  Synthetic oligonucleotide
atggtccatgatgttctagccgggtattaa

SEQ ID NO: 303617 - DNA, 30 bp, Artificial Sequence
  Synthetic oligonucleotide
gaggggaacgcgctatcgcagctgtattaa

SEQ ID NO: 303618 - DNA, 30 bp, Artificial Sequence
  Synthetic oligonucleotide
aggagagttcatctaaggatgaattattaa

SEQ ID NO: 303619 - DNA, 30 bp, Artificial Sequence
  Synthetic oligonucleotide
accgcggtgcaaattgctgattcaacttaa

SEQ ID NO: 303620 - DNA, 30 bp, Artificial Sequence
  Synthetic oligonucleotide
gggtctccttcgcaggatactttaacttaa

SEQ ID NO: 303621 - DNA, 30 bp, Artificial Sequence
  Synthetic oligonucleotide
ctatctcaagctaacatagtcgacacttaa

SEQ ID NO: 303622 - DNA, 31 bp, Artificial Sequence
  Synthetic oligonucleotide
ggcccattaggtggtatagtacaggacttaa

SEQ ID NO: 303623 - DNA, 30 bp, Artificial Sequence
  Synthetic oligonucleotide
atcgtcgggtatcttcggacgtatacttaa

SEQ ID NO: 303624 - DNA, 30 bp, Artificial Sequence
  Synthetic oligonucleotide
tttggaaaaatctctgtctatcctacttaa

SEQ ID NO: 303625 - DNA, 30 bp, Artificial Sequence
  Synthetic oligonucleotide
cggcgccaggtcttcagagaagctacttaa

SEQ ID NO: 303626 - DNA, 31 bp, Artificial Sequence
  Synthetic oligonucleotide
tactaaatcctgattttcctgtagaccttaa

SEQ ID NO: 303627 - DNA, 30 bp, Artificial Sequence
  Synthetic oligonucleotide
gcatgatgaatcagttacgcaaacccttaa

SEQ ID NO: 303628 - DNA, 30 bp, Artificial Sequence
  Synthetic oligonucleotide
atgctgttacggtgtgtcacgcgcccttaa

SEQ ID NO: 303629 - DNA, 30 bp, Artificial Sequence
  Synthetic oligonucleotide
atgtgctcccggtgcttcgataggccttaa

SEQ ID NO: 303630 - DNA, 30 bp, Artificial Sequence
  Synthetic oligonucleotide
gattaagtcttcttggccgacactccttaa

SEQ ID NO: 303631 - DNA, 30 bp, Artificial Sequence
  Synthetic oligonucleotide
tagggtaaactggcgacgtacgaagcttaa

SEQ ID NO: 303632 - DNA, 30 bp, Artificial Sequence
  Synthetic oligonucleotide
acataaaggtggaaattttcgcgagcttaa

SEQ ID NO: 303633 - DNA, 30 bp, Artificial Sequence
  Synthetic oligonucleotide
ctgcagcgacttcatcaactaatcgcttaa

SEQ ID NO: 303634 - DNA, 30 bp, Artificial Sequence
  Synthetic oligonucleotide
ggaggtgaccccgtgttctgggtcgcttaa

SEQ ID NO: 303635 - DNA, 30 bp, Artificial Sequence
  Synthetic oligonucleotide
acgctgactgaaaggatctctgtcgcttaa

SEQ ID NO: 303636 - DNA, 31 bp, Artificial Sequence
  Synthetic oligonucleotide
ggtaattgtgggtagtttctctgcggcttaa

SEQ ID NO: 303637 - DNA, 30 bp, Artificial Sequence
  Synthetic oligonucleotide
cttgtccgcaacccacaattgtcggcttaa

SEQ ID NO: 303638 - DNA, 30 bp, Artificial Sequence
  Synthetic oligonucleotide
ggtgccggcctggagtcgaagcgggcttaa

SEQ ID NO: 303639 - DNA, 30 bp, Artificial Sequence
  Synthetic oligonucleotide
caatttggtgaaatcgttggtcttgcttaa

SEQ ID NO: 303640 - DNA, 30 bp, Artificial Sequence
  Synthetic oligonucleotide
tttgtacgaacgtcgaacacgaaatcttaa

SEQ ID NO: 303641 - DNA, 30 bp, Artificial Sequence
  Synthetic oligonucleotide
tctacgcgccgtctgtgacgagtctcttaa

SEQ ID NO: 303642 - DNA, 30 bp, Artificial Sequence
  Synthetic oligonucleotide
cgtgaagtccaggatatctgaaagtcttaa

SEQ ID NO: 303643 - DNA, 30 bp, Artificial Sequence
  Synthetic oligonucleotide
gtaatggacaacactgccgtagagtcttaa

SEQ ID NO: 303644 - DNA, 30 bp, Artificial Sequence
  Synthetic oligonucleotide
gaaaaggacgaacagaaatagtagtcttaa

SEQ ID NO: 303645 - DNA, 30 bp, Artificial Sequence
  Synthetic oligonucleotide
gcgtaaccgtagcagggatacacgtcttaa

SEQ ID NO: 303646 - DNA, 30 bp, Artificial Sequence
  Synthetic oligonucleotide
ttccggcactcgtgttggtggaggtcttaa

SEQ ID NO: 303647 - DNA, 30 bp, Artificial Sequence
  Synthetic oligonucleotide
ctaagacctccggtacgactgatgtcttaa

SEQ ID NO: 303648 - DNA, 30 bp, Artificial Sequence
  Synthetic oligonucleotide
ttgaaacagctgtctttcactggaagttaa

SEQ ID NO: 303649 - DNA, 30 bp, Artificial Sequence
  Synthetic oligonucleotide
ttccggaatgtcgggtgttgggacagttaa

SEQ ID NO: 303650 - DNA, 30 bp, Artificial Sequence
  Synthetic oligonucleotide
catgcccagattaggttatctctcagttaa

SEQ ID NO: 303651 - DNA, 30 bp, Artificial Sequence
  Synthetic oligonucleotide
gtgcgacgccgaggtgctcgtctcagttaa

SEQ ID NO: 303652 - DNA, 30 bp, Artificial Sequence
  Synthetic oligonucleotide
tacgtcggggcgaatttgtctgtcagttaa

SEQ ID NO: 303653 - DNA, 30 bp, Artificial Sequence
  Synthetic oligonucleotide
ctaccgtggggtctgggtacgaatagttaa

SEQ ID NO: 303654 - DNA, 30 bp, Artificial Sequence
  Synthetic oligonucleotide
gccgaccatcggcctacgcggaatagttaa

SEQ ID NO: 303655 - DNA, 30 bp, Artificial Sequence
  Synthetic oligonucleotide
cggagaggtgtcatgtcgaatcctagttaa

SEQ ID NO: 303656 - DNA, 30 bp, Artificial Sequence
  Synthetic oligonucleotide
caaaggtatgctttgacattggctagttaa

SEQ ID NO: 303657 - DNA, 30 bp, Artificial Sequence
  Synthetic oligonucleotide
gctaccgggcgaagccaagtggtacgttaa

SEQ ID NO: 303658 - DNA, 30 bp, Artificial Sequence
  Synthetic oligonucleotide
tggcatagtgcgttaagggtagaccgttaa

SEQ ID NO: 303659 - DNA, 30 bp, Artificial Sequence
  Synthetic oligonucleotide
tcgaaattgccggcctgatatacccgttaa

SEQ ID NO: 303660 - DNA, 30 bp, Artificial Sequence
  Synthetic oligonucleotide
gcatacgtgcgtccgcgcccattccgttaa

SEQ ID NO: 303661 - DNA, 30 bp, Artificial Sequence
  Synthetic oligonucleotide
ggtagtcgcacttagtattccacgcgttaa

SEQ ID NO: 303662 - DNA, 30 bp, Artificial Sequence
  Synthetic oligonucleotide
cttaaggggtccaagagacgaagtcgttaa

SEQ ID NO: 303663 - DNA, 30 bp, Artificial Sequence
  Synthetic oligonucleotide
cttacaataggaggtaagttaattcgttaa

SEQ ID NO: 303664 - DNA, 30 bp, Artificial Sequence
  Synthetic oligonucleotide
cctctctggccgtatatgggactcggttaa

SEQ ID NO: 303665 - DNA, 30 bp, Artificial Sequence
  Synthetic oligonucleotide
cgtggttagtaatcactttaccggggttaa

SEQ ID NO: 303666 - DNA, 30 bp, Artificial Sequence
  Synthetic oligonucleotide
ctgcttcatgctgtgggtatacatggttaa

SEQ ID NO: 303667 - DNA, 30 bp, Artificial Sequence
  Synthetic oligonucleotide
gccatgatttccagcagtcttgctggttaa

SEQ ID NO: 303668 - DNA, 30 bp, Artificial Sequence
  Synthetic oligonucleotide
ccaagaattgcaagcgtaggggttggttaa

SEQ ID NO: 303669 - DNA, 30 bp, Artificial Sequence
  Synthetic oligonucleotide
gcgacagactcggctatcatacaatgttaa

SEQ ID NO: 303670 - DNA, 30 bp, Artificial Sequence
  Synthetic oligonucleotide
ccataataagcgcacggcgctacatgttaa

SEQ ID NO: 303671 - DNA, 30 bp, Artificial Sequence
  Synthetic oligonucleotide
ttacgacgaatcatcggagcgccatgttaa

SEQ ID NO: 303672 - DNA, 30 bp, Artificial Sequence
  Synthetic oligonucleotide
gccgagtcttgaagtgccgtcggatgttaa

SEQ ID NO: 303673 - DNA, 30 bp, Artificial Sequence
  Synthetic oligonucleotide
gggcctatcagtggatctgtgctatgttaa

SEQ ID NO: 303674 - DNA, 30 bp, Artificial Sequence
  Synthetic oligonucleotide
tcgctcagacgcgtctaacaagactgttaa

SEQ ID NO: 303675 - DNA, 30 bp, Artificial Sequence
  Synthetic oligonucleotide
gacgtgaaagtttgctttaagggctgttaa

SEQ ID NO: 303676 - DNA, 30 bp, Artificial Sequence
  Synthetic oligonucleotide
agaaagataggtgatattcggtggtgttaa

SEQ ID NO: 303677 - DNA, 30 bp, Artificial Sequence
  Synthetic oligonucleotide
aaacgaataattcgccatatgatgtgttaa

SEQ ID NO: 303678 - DNA, 30 bp, Artificial Sequence
  Synthetic oligonucleotide
tcagtacgcgacgcatttttggattgttaa

SEQ ID NO: 303679 - DNA, 30 bp, Artificial Sequence
  Synthetic oligonucleotide
gctgaaaatctccgcacaaggcgttgttaa

SEQ ID NO: 303680 - DNA, 30 bp, Artificial Sequence
  Synthetic oligonucleotide
cgcttcccaacacttagtgtataaatttaa

SEQ ID NO: 303681 - DNA, 30 bp, Artificial Sequence
  Synthetic oligonucleotide
tccattggacctcaaagtacatcaatttaa

SEQ ID NO: 303682 - DNA, 30 bp, Artificial Sequence
  Synthetic oligonucleotide
gtcaggatggttagatccgttcacatttaa

SEQ ID NO: 303683 - DNA, 30 bp, Artificial Sequence
  Synthetic oligonucleotide
aggtctccataattcctttaatacatttaa

SEQ ID NO: 303684 - DNA, 30 bp, Artificial Sequence
  Synthetic oligonucleotide
tgagtcctcagctggagggatcccatttaa

SEQ ID NO: 303685 - DNA, 30 bp, Artificial Sequence
  Synthetic oligonucleotide
agatgtcgcattcatctgtgacgcatttaa

SEQ ID NO: 303686 - DNA, 30 bp, Artificial Sequence
  Synthetic oligonucleotide
cgtatatctgtaggtcacatggagatttaa

SEQ ID NO: 303687 - DNA, 30 bp, Artificial Sequence
  Synthetic oligonucleotide
atatcgtgggtgatgggacagtagatttaa

SEQ ID NO: 303688 - DNA, 30 bp, Artificial Sequence
  Synthetic oligonucleotide
cttcatgaccaaagacatccttggatttaa

SEQ ID NO: 303689 - DNA, 30 bp, Artificial Sequence
  Synthetic oligonucleotide
tatacgagaaggggtacgttggatatttaa

SEQ ID NO: 303690 - DNA, 30 bp, Artificial Sequence
  Synthetic oligonucleotide
gatgcaacagcggtcatcgcttgtatttaa

SEQ ID NO: 303691 - DNA, 30 bp, Artificial Sequence
  Synthetic oligonucleotide
gttatataatagacaaattacgaactttaa

SEQ ID NO: 303692 - DNA, 30 bp, Artificial Sequence
  Synthetic oligonucleotide
cgccgttaattatggcacgggttactttaa

SEQ ID NO: 303693 - DNA, 30 bp, Artificial Sequence
  Synthetic oligonucleotide
cgtcgaatgggaaagctaacagggctttaa

SEQ ID NO: 303694 - DNA, 30 bp, Artificial Sequence
  Synthetic oligonucleotide
ggatccccatggttaaagttatctctttaa

SEQ ID NO: 303695 - DNA, 30 bp, Artificial Sequence
  Synthetic oligonucleotide
acggactttgtgtccagtataattctttaa

SEQ ID NO: 303696 - DNA, 30 bp, Artificial Sequence
  Synthetic oligonucleotide
ctgtgacttcggtctgaggaacaagtttaa

SEQ ID NO: 303697 - DNA, 30 bp, Artificial Sequence
  Synthetic oligonucleotide
cggttggtggttttttacaatggagtttaa

SEQ ID NO: 303698 - DNA, 30 bp, Artificial Sequence
  Synthetic oligonucleotide
gaggggtcatatactaatggtctagtttaa

SEQ ID NO: 303699 - DNA, 30 bp, Artificial Sequence
  Synthetic oligonucleotide
actgataagtggtctggttcagtagtttaa

SEQ ID NO: 303700 - DNA, 30 bp, Artificial Sequence
  Synthetic oligonucleotide
gtgtggcagggtataggaaaggtagtttaa

SEQ ID NO: 303701 - DNA, 30 bp, Artificial Sequence
  Synthetic oligonucleotide
agcgatcataactctgggacatcggtttaa

SEQ ID NO: 303702 - DNA, 30 bp, Artificial Sequence
  Synthetic oligonucleotide
tgtgaaaagtaattaggtttgtatgtttaa

SEQ ID NO: 303703 - DNA, 30 bp, Artificial Sequence
  Synthetic oligonucleotide
aataggcttgccagatgtacggctgtttaa

SEQ ID NO: 303704 - DNA, 30 bp, Artificial Sequence
  Synthetic oligonucleotide
ggtagaggagtgtacaaatggatattttaa

SEQ ID NO: 303705 - DNA, 30 bp, Artificial Sequence
  Synthetic oligonucleotide
ttgagcaggtacacacaggaacgcttttaa

SEQ ID NO: 303706 - DNA, 30 bp, Artificial Sequence
  Synthetic oligonucleotide
acaagagagggttgtggaggcacgttttaa

SEQ ID NO: 303707 - DNA, 30 bp, Artificial Sequence
  Synthetic oligonucleotide
cgtagtgctgcatctttgcaaggtttttaa

SEQ ID NO: 303708 - DNA, 30 bp, Artificial Sequence
  Synthetic oligonucleotide
cgatgagacacgcagctggcaaaacaaaca

SEQ ID NO: 303709 - DNA, 30 bp, Artificial Sequence
  Synthetic oligonucleotide
agaacaatcatgtcttgtcattaacaaaca

SEQ ID NO: 303710 - DNA, 30 bp, Artificial Sequence
  Synthetic oligonucleotide
tcccggcctggtttgacagagcgccaaaca

SEQ ID NO: 303711 - DNA, 30 bp, Artificial Sequence
  Synthetic oligonucleotide
actttcctaggactgcgcgtttgccaaaca

SEQ ID NO: 303712 - DNA, 30 bp, Artificial Sequence
  Synthetic oligonucleotide
ttctcgacgggttgctctccgatccaaaca

SEQ ID NO: 303713 - DNA, 30 bp, Artificial Sequence
  Synthetic oligonucleotide
ttatttaaggtgcagttggcgaaagaaaca

SEQ ID NO: 303714 - DNA, 30 bp, Artificial Sequence
  Synthetic oligonucleotide
gcgtcccttcaagtgcaactttgagaaaca

SEQ ID NO: 303715 - DNA, 30 bp, Artificial Sequence
  Synthetic oligonucleotide
aactacctaatactaacagcaagataaaca

SEQ ID NO: 303716 - DNA, 30 bp, Artificial Sequence
  Synthetic oligonucleotide
cctaagtaggtaaacacggagggataaaca

SEQ ID NO: 303717 - DNA, 30 bp, Artificial Sequence
  Synthetic oligonucleotide
gaattggtgatgtcactccggacttaaaca

SEQ ID NO: 303718 - DNA, 30 bp, Artificial Sequence
  Synthetic oligonucleotide
aattggaccgtacaatccaggggttaaaca

SEQ ID NO: 303719 - DNA, 30 bp, Artificial Sequence
  Synthetic oligonucleotide
cgtggctctggtttctttggataaacaaca

SEQ ID NO: 303720 - DNA, 30 bp, Artificial Sequence
  Synthetic oligonucleotide
gcatagggtatggggtgcaggcgaacaaca

SEQ ID NO: 303721 - DNA, 30 bp, Artificial Sequence
  Synthetic oligonucleotide
ttgtggggttaattccgcggcgatacaaca

SEQ ID NO: 303722 - DNA, 30 bp, Artificial Sequence
  Synthetic oligonucleotide
ggctccccgtagcgaaaggagtctacaaca

SEQ ID NO: 303723 - DNA, 30 bp, Artificial Sequence
  Synthetic oligonucleotide
gcggtgctagaaccactgtcgtcaccaaca

SEQ ID NO: 303724 - DNA, 30 bp, Artificial Sequence
  Synthetic oligonucleotide
gcatttaatttagtaaaagacagaccaaca

SEQ ID NO: 303725 - DNA, 30 bp, Artificial Sequence
  Synthetic oligonucleotide
aagtgctaatgcaattagggcggaccaaca

SEQ ID NO: 303726 - DNA, 31 bp, Artificial Sequence
  Synthetic oligonucleotide
cgccgatgaagtaacaccctggttaccaaca

SEQ ID NO: 303727 - DNA, 29 bp, Artificial Sequence
  Synthetic oligonucleotide
tcgagaaggattccgctattaccccaaca

SEQ ID NO: 303728 - DNA, 30 bp, Artificial Sequence
  Synthetic oligonucleotide
gaattccatgacattgcaacatccccaaca

SEQ ID NO: 303729 - DNA, 30 bp, Artificial Sequence
  Synthetic oligonucleotide
gccaaccccacaaaatgggggggcccaaca

SEQ ID NO: 303730 - DNA, 30 bp, Artificial Sequence
  Synthetic oligonucleotide
tggacctcaacaagtggcacgccagcaaca

SEQ ID NO: 303731 - DNA, 30 bp, Artificial Sequence
  Synthetic oligonucleotide
tttgtttgagaagacatcgtgaccgcaaca

SEQ ID NO: 303732 - DNA, 30 bp, Artificial Sequence
  Synthetic oligonucleotide
gtgaactgagtatacgttagaagcgcaaca

SEQ ID NO: 303733 - DNA, 30 bp, Artificial Sequence
  Synthetic oligonucleotide
tggaggattctagatcatgttcaggcaaca

SEQ ID NO: 303734 - DNA, 30 bp, Artificial Sequence
  Synthetic oligonucleotide
ccggtggggggtaggaacgggcttgcaaca

SEQ ID NO: 303735 - DNA, 30 bp, Artificial Sequence
  Synthetic oligonucleotide
atatattgtacctgagagctagttgcaaca

SEQ ID NO: 303736 - DNA, 30 bp, Artificial Sequence
  Synthetic oligonucleotide
ggctccttaccgacgggaattacatcaaca

SEQ ID NO: 303737 - DNA, 30 bp, Artificial Sequence
  Synthetic oligonucleotide
gctttcgcccgtgatagcaccgtatcaaca

SEQ ID NO: 303738 - DNA, 30 bp, Artificial Sequence
  Synthetic oligonucleotide
acaatctctagcgcaagcgcgccctcaaca

SEQ ID NO: 303739 - DNA, 30 bp, Artificial Sequence
  Synthetic oligonucleotide
ggcgaagtcctgtggatttggttctcaaca

SEQ ID NO: 303740 - DNA, 30 bp, Artificial Sequence
  Synthetic oligonucleotide
ccgccatcttaaagtaggactgcttcaaca

SEQ ID NO: 303741 - DNA, 30 bp, Artificial Sequence
  Synthetic oligonucleotide
ccgaaataattagacgttagatcttcaaca

SEQ ID NO: 303742 - DNA, 30 bp, Artificial Sequence
  Synthetic oligonucleotide
cactgacgcctactgacgtgagtttcaaca

SEQ ID NO: 303743 - DNA, 30 bp, Artificial Sequence
  Synthetic oligonucleotide
ccttatactggttgtacagcatcaagaaca

SEQ ID NO: 303744 - DNA, 30 bp, Artificial Sequence
  Synthetic oligonucleotide
ctcacctacgtttatcatccgaacagaaca

SEQ ID NO: 303745 - DNA, 30 bp, Artificial Sequence
  Synthetic oligonucleotide
atcatttatgaaagtgtctggttcagaaca

SEQ ID NO: 303746 - DNA, 30 bp, Artificial Sequence
  Synthetic oligonucleotide
ctaagaacgcatattctttcagcgagaaca

SEQ ID NO: 303747 - DNA, 30 bp, Artificial Sequence
  Synthetic oligonucleotide
acaaggggcggtgccgggtagcggagaaca

SEQ ID NO: 303748 - DNA, 30 bp, Artificial Sequence
  Synthetic oligonucleotide
gagatcataaggggagaccccctgagaaca

SEQ ID NO: 303749 - DNA, 30 bp, Artificial Sequence
  Synthetic oligonucleotide
cttgtgttcatatctcttgcatgacgaaca

SEQ ID NO: 303750 - DNA, 30 bp, Artificial Sequence
  Synthetic oligonucleotide
attcgaacgcggttgctcaacctccgaaca

SEQ ID NO: 303751 - DNA, 30 bp, Artificial Sequence
  Synthetic oligonucleotide
ggattattgcaagacggttaaacgcgaaca

SEQ ID NO: 303752 - DNA, 30 bp, Artificial Sequence
  Synthetic oligonucleotide
ttacctattacgctaaactgctggcgaaca

SEQ ID NO: 303753 - DNA, 30 bp, Artificial Sequence
  Synthetic oligonucleotide
acgcctcgggtgcacgagctttggcgaaca

SEQ ID NO: 303754 - DNA, 30 bp, Artificial Sequence
  Synthetic oligonucleotide
caggatctggttcgtgtcccccgtcgaaca

SEQ ID NO: 303755 - DNA, 30 bp, Artificial Sequence
  Synthetic oligonucleotide
aggcttaactttgactagcatcgtcgaaca

SEQ ID NO: 303756 - DNA, 30 bp, Artificial Sequence
  Synthetic oligonucleotide
taatgaatgcatttacgtaaagttcgaaca

SEQ ID NO: 303757 - DNA, 30 bp, Artificial Sequence
  Synthetic oligonucleotide
ggtcatattccacacgggatctcaggaaca

SEQ ID NO: 303758 - DNA, 30 bp, Artificial Sequence
  Synthetic oligonucleotide
tacatacgggcaactcgtgttcgaggaaca

SEQ ID NO: 303759 - DNA, 30 bp, Artificial Sequence
  Synthetic oligonucleotide
gtttgacaggttatctattggttaggaaca

SEQ ID NO: 303760 - DNA, 30 bp, Artificial Sequence
  Synthetic oligonucleotide
gatgagcattcagatttaccacacggaaca

SEQ ID NO: 303761 - DNA, 30 bp, Artificial Sequence
  Synthetic oligonucleotide
cgttcgaattaccctcatatacacggaaca

SEQ ID NO: 303762 - DNA, 30 bp, Artificial Sequence
  Synthetic oligonucleotide
tgtgtttcacaggcaacatcatctggaaca

SEQ ID NO: 303763 - DNA, 30 bp, Artificial Sequence
  Synthetic oligonucleotide
taccttagggaccagaggaattctggaaca

SEQ ID NO: 303764 - DNA, 30 bp, Artificial Sequence
  Synthetic oligonucleotide
tcaaactgcacccttcacgtgtaatgaaca

SEQ ID NO: 303765 - DNA, 30 bp, Artificial Sequence
  Synthetic oligonucleotide
aaccacatctaatccgtacaaggctgaaca

SEQ ID NO: 303766 - DNA, 30 bp, Artificial Sequence
  Synthetic oligonucleotide
aacgtctgattcgaaatattgttctgaaca

SEQ ID NO: 303767 - DNA, 30 bp, Artificial Sequence
  Synthetic oligonucleotide
gtcgttggtcaccgcggacgttggtgaaca

SEQ ID NO: 303768 - DNA, 30 bp, Artificial Sequence
  Synthetic oligonucleotide
caaaagctggcgacctgggggcgttgaaca

SEQ ID NO: 303769 - DNA, 30 bp, Artificial Sequence
  Synthetic oligonucleotide
aagcatgaatgacgtatggggggttgaaca

SEQ ID NO: 303770 - DNA, 30 bp, Artificial Sequence
  Synthetic oligonucleotide
cactcagggttcccagtgcaaaagataaca

SEQ ID NO: 303771 - DNA, 30 bp, Artificial Sequence
  Synthetic oligonucleotide
aatgtcgtgcgtgttgaacaggggataaca

SEQ ID NO: 303772 - DNA, 30 bp, Artificial Sequence
  Synthetic oligonucleotide
tccaaaccgtctttagattgaatgataaca

SEQ ID NO: 303773 - DNA, 30 bp, Artificial Sequence
  Synthetic oligonucleotide
aaggcaatcgccgtggaccggttgataaca

SEQ ID NO: 303774 - DNA, 30 bp, Artificial Sequence
  Synthetic oligonucleotide
tagcaggggtagttcatagggcaactaaca

SEQ ID NO: 303775 - DNA, 30 bp, Artificial Sequence
  Synthetic oligonucleotide
ggtggacatgacagttcggtagaactaaca

SEQ ID NO: 303776 - DNA, 30 bp, Artificial Sequence
  Synthetic oligonucleotide
tcctactcagcgataaatcgcgccctaaca

SEQ ID NO: 303777 - DNA, 30 bp, Artificial Sequence
  Synthetic oligonucleotide
gaaggcgcgaactttgggatccgcctaaca

SEQ ID NO: 303778 - DNA, 30 bp, Artificial Sequence
  Synthetic oligonucleotide
gcacaaccctgaagtcaacgctgcctaaca

SEQ ID NO: 303779 - DNA, 30 bp, Artificial Sequence
  Synthetic oligonucleotide
ttttaaagtcgaacaagacacgtcctaaca

SEQ ID NO: 303780 - DNA, 30 bp, Artificial Sequence
  Synthetic oligonucleotide
agaaggtatatagcaattaagtctctaaca

SEQ ID NO: 303781 - DNA, 30 bp, Artificial Sequence
  Synthetic oligonucleotide
atcggactgaatatcattgaaagtctaaca

SEQ ID NO: 303782 - DNA, 30 bp, Artificial Sequence
  Synthetic oligonucleotide
cataggacatttttggaaaatgttctaaca

SEQ ID NO: 303783 - DNA, 30 bp, Artificial Sequence
  Synthetic oligonucleotide
ggccttgtcggaacctgtactacagtaaca

SEQ ID NO: 303784 - DNA, 30 bp, Artificial Sequence
  Synthetic oligonucleotide
caatgcggtctcacggtcagatgggtaaca

SEQ ID NO: 303785 - DNA, 30 bp, Artificial Sequence
  Synthetic oligonucleotide
agttagggccggtttatctacactgtaaca

SEQ ID NO: 303786 - DNA, 30 bp, Artificial Sequence
  Synthetic oligonucleotide
ctctgtcgcaactaagccaatcgtgtaaca

SEQ ID NO: 303787 - DNA, 30 bp, Artificial Sequence
  Synthetic oligonucleotide
ggcacttgcgcatgtgttgggcttgtaaca

SEQ ID NO: 303788 - DNA, 30 bp, Artificial Sequence
  Synthetic oligonucleotide
tccttaaaagcgctccttagccaattaaca

SEQ ID NO: 303789 - DNA, 30 bp, Artificial Sequence
  Synthetic oligonucleotide
gattgccaggcaggtggcgtgccattaaca

SEQ ID NO: 303790 - DNA, 30 bp, Artificial Sequence
  Synthetic oligonucleotide
catgttgacggattcggaaaccccttaaca

SEQ ID NO: 303791 - DNA, 30 bp, Artificial Sequence
  Synthetic oligonucleotide
gcttgcatcaggttagtgagattcttaaca

SEQ ID NO: 303792 - DNA, 30 bp, Artificial Sequence
  Synthetic oligonucleotide
ggaattgttctatgatggacgacgttaaca

SEQ ID NO: 303793 - DNA, 30 bp, Artificial Sequence
  Synthetic oligonucleotide
accaaaattgtgaagggttgggcgttaaca

SEQ ID NO: 303794 - DNA, 30 bp, Artificial Sequence
  Synthetic oligonucleotide
atgataagatttattccggtcgggttaaca

SEQ ID NO: 303795 - DNA, 30 bp, Artificial Sequence
  Synthetic oligonucleotide
gctctgggctgaggtagctttagtttaaca

SEQ ID NO: 303796 - DNA, 30 bp, Artificial Sequence
  Synthetic oligonucleotide
caacacgtgatcggcaggactgttttaaca

SEQ ID NO: 303797 - DNA, 30 bp, Artificial Sequence
  Synthetic oligonucleotide
atatagtttagtcaaccagtaacaaacaca

SEQ ID NO: 303798 - DNA, 30 bp, Artificial Sequence
  Synthetic oligonucleotide
cgctccttttaaagttccgtacgaaacaca

SEQ ID NO: 303799 - DNA, 30 bp, Artificial Sequence
  Synthetic oligonucleotide
acggccgcctcttcacccggcctaaacaca

SEQ ID NO: 303800 - DNA, 30 bp, Artificial Sequence
  Synthetic oligonucleotide
tctaccaactacgggacttgctacaacaca

SEQ ID NO: 303801 - DNA, 30 bp, Artificial Sequence
  Synthetic oligonucleotide
ttagttttagtaacatagtctaccaacaca

SEQ ID NO: 303802 - DNA, 30 bp, Artificial Sequence
  Synthetic oligonucleotide
ccgcacatgtaggccagctaacggaacaca

SEQ ID NO: 303803 - DNA, 30 bp, Artificial Sequence
  Synthetic oligonucleotide
agaactcggcgcgagaaccttttgaacaca

SEQ ID NO: 303804 - DNA, 30 bp, Artificial Sequence
  Synthetic oligonucleotide
ttgattcagcaatcgcgcattggtaacaca

SEQ ID NO: 303805 - DNA, 30 bp, Artificial Sequence
  Synthetic oligonucleotide
gcgatatgctgtatacagtctaaacacaca

SEQ ID NO: 303806 - DNA, 30 bp, Artificial Sequence
  Synthetic oligonucleotide
ttgagatctagtttggctccgctccacaca

SEQ ID NO: 303807 - DNA, 30 bp, Artificial Sequence
  Synthetic oligonucleotide
gagtacccccctatggaattctagcacaca

SEQ ID NO: 303808 - DNA, 30 bp, Artificial Sequence
  Synthetic oligonucleotide
aggtacgggagacccggagcaaggcacaca

SEQ ID NO: 303809 - DNA, 30 bp, Artificial Sequence
  Synthetic oligonucleotide
ttacatggggccacgtgctggaatcacaca

SEQ ID NO: 303810 - DNA, 30 bp, Artificial Sequence
  Synthetic oligonucleotide
tcccggtaattttctacaccttctcacaca

SEQ ID NO: 303811 - DNA, 30 bp, Artificial Sequence
  Synthetic oligonucleotide
aaaaaataaagttcgccagggaaagacaca

SEQ ID NO: 303812 - DNA, 30 bp, Artificial Sequence
  Synthetic oligonucleotide
catgcatttcggaatccgccagaagacaca

SEQ ID NO: 303813 - DNA, 30 bp, Artificial Sequence
  Synthetic oligonucleotide
ccgtaaccgcgtgatgatgccacagacaca

SEQ ID NO: 303814 - DNA, 30 bp, Artificial Sequence
  Synthetic oligonucleotide
acacaaggaaagacgaaaaagcgagacaca

SEQ ID NO: 303815 - DNA, 30 bp, Artificial Sequence
  Synthetic oligonucleotide
aaagaagtttgcaatataatcgcggacaca

SEQ ID NO: 303816 - DNA, 30 bp, Artificial Sequence
  Synthetic oligonucleotide
accatcttggtggggctaagtagggacaca

SEQ ID NO: 303817 - DNA, 30 bp, Artificial Sequence
  Synthetic oligonucleotide
cctacggacaaaccaggtgtttgggacaca

SEQ ID NO: 303818 - DNA, 30 bp, Artificial Sequence
  Synthetic oligonucleotide
gcgtgacttagcaaccaaatgcctgacaca

SEQ ID NO: 303819 - DNA, 30 bp, Artificial Sequence
  Synthetic oligonucleotide
gcaacggccaagtaggtggtccttgacaca

SEQ ID NO: 303820 - DNA, 30 bp, Artificial Sequence
  Synthetic oligonucleotide
aattaaggtctgagcctctaaccatacaca

SEQ ID NO: 303821 - DNA, 30 bp, Artificial Sequence
  Synthetic oligonucleotide
agcgcttgtgctcgtttgcttgcatacaca

SEQ ID NO: 303822 - DNA, 30 bp, Artificial Sequence
  Synthetic oligonucleotide
gtcttagcagcacggggcagtctatacaca

SEQ ID NO: 303823 - DNA, 30 bp, Artificial Sequence
  Synthetic oligonucleotide
ggccatctggtagcaggacgattatacaca

SEQ ID NO: 303824 - DNA, 30 bp, Artificial Sequence
  Synthetic oligonucleotide
gggtataaactttcctggatgaagtacaca

SEQ ID NO: 303825 - DNA, 30 bp, Artificial Sequence
  Synthetic oligonucleotide
tgcagaatcagacgacccttctagtacaca

SEQ ID NO: 303826 - DNA, 30 bp, Artificial Sequence
  Synthetic oligonucleotide
cagtgattatgtgcgttgtacatgtacaca

SEQ ID NO: 303827 - DNA, 30 bp, Artificial Sequence
  Synthetic oligonucleotide
cttagagcatgaaaactggacgtgtacaca

SEQ ID NO: 303828 - DNA, 30 bp, Artificial Sequence
  Synthetic oligonucleotide
tgcggggtataagacacacccttgtacaca

SEQ ID NO: 303829 - DNA, 30 bp, Artificial Sequence
  Synthetic oligonucleotide
tcgcattaaaacgcaatcactcattacaca

SEQ ID NO: 303830 - DNA, 30 bp, Artificial Sequence
  Synthetic oligonucleotide
tcggcctatgccctccttttaccttacaca

SEQ ID NO: 303831 - DNA, 30 bp, Artificial Sequence
  Synthetic oligonucleotide
gagtacgaccggcaaggagatccttacaca

SEQ ID NO: 303832 - DNA, 30 bp, Artificial Sequence
  Synthetic oligonucleotide
gatcctagaaccatgtgagcctgttacaca

SEQ ID NO: 303833 - DNA, 30 bp, Artificial Sequence
  Synthetic oligonucleotide
ttatcgtgctcggctgggtacatttacaca

SEQ ID NO: 303834 - DNA, 30 bp, Artificial Sequence
  Synthetic oligonucleotide
cataacacacaattctgcagcctttacaca

SEQ ID NO: 303835 - DNA, 30 bp, Artificial Sequence
  Synthetic oligonucleotide
cccttggacacagcgggaaaataaaccaca

SEQ ID NO: 303836 - DNA, 30 bp, Artificial Sequence
  Synthetic oligonucleotide
gctgcaagggccacgaggtgggcaaccaca

SEQ ID NO: 303837 - DNA, 30 bp, Artificial Sequence
  Synthetic oligonucleotide
ctaagttgtcataccattggaaacaccaca

SEQ ID NO: 303838 - DNA, 30 bp, Artificial Sequence
  Synthetic oligonucleotide
ccagcgtatattataaggcggggcaccaca

SEQ ID NO: 303839 - DNA, 30 bp, Artificial Sequence
  Synthetic oligonucleotide
agccgggctataaagaggtctgataccaca

SEQ ID NO: 303840 - DNA, 30 bp, Artificial Sequence
  Synthetic oligonucleotide
cgttgaattgcagtaagcggaactaccaca

SEQ ID NO: 303841 - DNA, 30 bp, Artificial Sequence
  Synthetic oligonucleotide
gatccgttgtccgtgccctaaattaccaca

SEQ ID NO: 303842 - DNA, 30 bp, Artificial Sequence
  Synthetic oligonucleotide
agtctacggtgtaaactcaaggtccccaca

SEQ ID NO: 303843 - DNA, 30 bp, Artificial Sequence
  Synthetic oligonucleotide
gtgcccttccacaacgggaccaggcccaca

SEQ ID NO: 303844 - DNA, 30 bp, Artificial Sequence
  Synthetic oligonucleotide
agggagtggtccaccggtctgggtcccaca

SEQ ID NO: 303845 - DNA, 30 bp, Artificial Sequence
  Synthetic oligonucleotide
ggggggacgaaatgcgtagacggagccaca

SEQ ID NO: 303846 - DNA, 31 bp, Artificial Sequence
  Synthetic oligonucleotide
tcattcgtgtcaacaatagaatggagccaca

SEQ ID NO: 303847 - DNA, 30 bp, Artificial Sequence
  Synthetic oligonucleotide
tgagatcgctatccggcatagatcgccaca

SEQ ID NO: 303848 - DNA, 30 bp, Artificial Sequence
  Synthetic oligonucleotide
tcaacgcacaatctatgtggccaggccaca

SEQ ID NO: 303849 - DNA, 30 bp, Artificial Sequence
  Synthetic oligonucleotide
ggctcaagcgcccccacatgtgtggccaca

SEQ ID NO: 303850 - DNA, 30 bp, Artificial Sequence
  Synthetic oligonucleotide
ggatccggtgaatcttgggccattgccaca

SEQ ID NO: 303851 - DNA, 30 bp, Artificial Sequence
  Synthetic oligonucleotide
gactaggatcatcttcgaattcagtccaca

SEQ ID NO: 303852 - DNA, 30 bp, Artificial Sequence
  Synthetic oligonucleotide
gaaccgctttctgtagctggccggtccaca

SEQ ID NO: 303853 - DNA, 30 bp, Artificial Sequence
  Synthetic oligonucleotide
gctgggttaagaggaagttagctgtccaca

SEQ ID NO: 303854 - DNA, 30 bp, Artificial Sequence
  Synthetic oligonucleotide
ctgtaactgcttcagtggatagcttccaca

SEQ ID NO: 303855 - DNA, 30 bp, Artificial Sequence
  Synthetic oligonucleotide
accccagtctgattttcccctgcaagcaca

SEQ ID NO: 303856 - DNA, 30 bp, Artificial Sequence
  Synthetic oligonucleotide
aactcattaataaggttatagtcaagcaca

SEQ ID NO: 303857 - DNA, 30 bp, Artificial Sequence
  Synthetic oligonucleotide
ctaaagtcagtcgatatcgttagaagcaca

SEQ ID NO: 303858 - DNA, 30 bp, Artificial Sequence
  Synthetic oligonucleotide
tatatggggaaactccggcccgatagcaca

SEQ ID NO: 303859 - DNA, 30 bp, Artificial Sequence
  Synthetic oligonucleotide
cttcacaatcagcgaccagactatagcaca

SEQ ID NO: 303860 - DNA, 30 bp, Artificial Sequence
  Synthetic oligonucleotide
aaaggagagtttggttaatccaaacgcaca

SEQ ID NO: 303861 - DNA, 30 bp, Artificial Sequence
  Synthetic oligonucleotide
aaaggcagtggggctgttcgtatccgcaca

SEQ ID NO: 303862 - DNA, 30 bp, Artificial Sequence
  Synthetic oligonucleotide
aaccttagtcgtggcatccggaagcgcaca

SEQ ID NO: 303863 - DNA, 30 bp, Artificial Sequence
  Synthetic oligonucleotide
ccgtgttattgggctgtactacagcgcaca

SEQ ID NO: 303864 - DNA, 30 bp, Artificial Sequence
  Synthetic oligonucleotide
gaggttatttcggcttggcagtcgcgcaca

SEQ ID NO: 303865 - DNA, 30 bp, Artificial Sequence
  Synthetic oligonucleotide
gtttaaatgatgacctgagtcctgcgcaca

SEQ ID NO: 303866 - DNA, 30 bp, Artificial Sequence
  Synthetic oligonucleotide
gaggtgcgcatgaagcacggacgaggcaca

SEQ ID NO: 303867 - DNA, 30 bp, Artificial Sequence
  Synthetic oligonucleotide
ccggttagtgacccctgtaggaccggcaca

SEQ ID NO: 303868 - DNA, 30 bp, Artificial Sequence
  Synthetic oligonucleotide
gggtcacaaaagcgcacgatatccggcaca

SEQ ID NO: 303869 - DNA, 30 bp, Artificial Sequence
  Synthetic oligonucleotide
ctattatgccacagacttcactgcggcaca

SEQ ID NO: 303870 - DNA, 30 bp, Artificial Sequence
  Synthetic oligonucleotide
tcaatgcttaacggtgactgttggggcaca

SEQ ID NO: 303871 - DNA, 30 bp, Artificial Sequence
  Synthetic oligonucleotide
aataagtattcgaattctgattctggcaca

SEQ ID NO: 303872 - DNA, 30 bp, Artificial Sequence
  Synthetic oligonucleotide
gtttgcgcttactacacaccagttggcaca

SEQ ID NO: 303873 - DNA, 30 bp, Artificial Sequence
  Synthetic oligonucleotide
aactctgccgagtggtggctaaaatgcaca

SEQ ID NO: 303874 - DNA, 30 bp, Artificial Sequence
  Synthetic oligonucleotide
cttgtcagtttgggactaagaagatgcaca

SEQ ID NO: 303875 - DNA, 30 bp, Artificial Sequence
  Synthetic oligonucleotide
tagggctcaggttcattgaacatctgcaca

SEQ ID NO: 303876 - DNA, 30 bp, Artificial Sequence
  Synthetic oligonucleotide
atacccaaggatcgcaggtacccgtgcaca

SEQ ID NO: 303877 - DNA, 30 bp, Artificial Sequence
  Synthetic oligonucleotide
agttaaggcgtcaaaggttatgggtgcaca

SEQ ID NO: 303878 - DNA, 30 bp, Artificial Sequence
  Synthetic oligonucleotide
tgtgttgtaatataaggtggtagaatcaca

SEQ ID NO: 303879 - DNA, 30 bp, Artificial Sequence
  Synthetic oligonucleotide
aatggataacgtcgcgctttgttcatcaca

SEQ ID NO: 303880 - DNA, 30 bp, Artificial Sequence
  Synthetic oligonucleotide
tacaatataaatggcatggtttagatcaca

SEQ ID NO: 303881 - DNA, 30 bp, Artificial Sequence
  Synthetic oligonucleotide
gaaagagtcaatcaaagtattcggatcaca

SEQ ID NO: 303882 - DNA, 31 bp, Artificial Sequence
  Synthetic oligonucleotide
tggattttggggaaaagcgtaccctatcaca

SEQ ID NO: 303883 - DNA, 30 bp, Artificial Sequence
  Synthetic oligonucleotide
gctgcataacgagtttcggtgaggctcaca

SEQ ID NO: 303884 - DNA, 30 bp, Artificial Sequence
  Synthetic oligonucleotide
aggttttaggtttatcgcgcgatgctcaca

SEQ ID NO: 303885 - DNA, 30 bp, Artificial Sequence
  Synthetic oligonucleotide
agtttcaaacaggcccgatgaagagtcaca

SEQ ID NO: 303886 - DNA, 30 bp, Artificial Sequence
  Synthetic oligonucleotide
acgtactcggtggttttccgcaacgtcaca

SEQ ID NO: 303887 - DNA, 30 bp, Artificial Sequence
  Synthetic oligonucleotide
aacgacgtcggtgcgggtgctgacgtcaca

SEQ ID NO: 303888 - DNA, 30 bp, Artificial Sequence
  Synthetic oligonucleotide
cgcaacatcgttcggatcccacaggtcaca

SEQ ID NO: 303889 - DNA, 30 bp, Artificial Sequence
  Synthetic oligonucleotide
ggtggttggcctgcctttttgcaggtcaca

SEQ ID NO: 303890 - DNA, 30 bp, Artificial Sequence
  Synthetic oligonucleotide
agtgactgctgatagtactttgaggtcaca

SEQ ID NO: 303891 - DNA, 30 bp, Artificial Sequence
  Synthetic oligonucleotide
cgttcacgaccgatccacaggatggtcaca

SEQ ID NO: 303892 - DNA, 30 bp, Artificial Sequence
  Synthetic oligonucleotide
gaagacagagaaggcccgcactaattcaca

SEQ ID NO: 303893 - DNA, 30 bp, Artificial Sequence
  Synthetic oligonucleotide
gtgcagtgcttgctaaaaacaatcttcaca

SEQ ID NO: 303894 - DNA, 30 bp, Artificial Sequence
  Synthetic oligonucleotide
ttagtgatgacaagccccctagcgttcaca

SEQ ID NO: 303895 - DNA, 30 bp, Artificial Sequence
  Synthetic oligonucleotide
tgtatactgatgtgcactctactgttcaca

SEQ ID NO: 303896 - DNA, 30 bp, Artificial Sequence
  Synthetic oligonucleotide
aaaaaaaccaggagtcttcaccatttcaca

SEQ ID NO: 303897 - DNA, 30 bp, Artificial Sequence
  Synthetic oligonucleotide
ctagatacaatgttacccccgcctttcaca

SEQ ID NO: 303898 - DNA, 30 bp, Artificial Sequence
  Synthetic oligonucleotide
gtgcggacatattgaaataagtctttcaca

SEQ ID NO: 303899 - DNA, 30 bp, Artificial Sequence
  Synthetic oligonucleotide
taacactgaaatgtggttaatggtttcaca

SEQ ID NO: 303900 - DNA, 30 bp, Artificial Sequence
  Synthetic oligonucleotide
ttggctggataagggccagaccttttcaca

SEQ ID NO: 303901 - DNA, 30 bp, Artificial Sequence
  Synthetic oligonucleotide
atagggggcagatattatgtgtgaaagaca

SEQ ID NO: 303902 - DNA, 30 bp, Artificial Sequence
  Synthetic oligonucleotide
tgcactagtttgtatctcaccctaaagaca

SEQ ID NO: 303903 - DNA, 30 bp, Artificial Sequence
  Synthetic oligonucleotide
ggtcctatacagtcggaacgacacaagaca

SEQ ID NO: 303904 - DNA, 30 bp, Artificial Sequence
  Synthetic oligonucleotide
acattcgagcggacgtccaggatcaagaca

SEQ ID NO: 303905 - DNA, 30 bp, Artificial Sequence
  Synthetic oligonucleotide
tcagtctccgagtccttttcatagaagaca

SEQ ID NO: 303906 - DNA, 30 bp, Artificial Sequence
  Synthetic oligonucleotide
tgaaattgtctattaccggcagcgaagaca

SEQ ID NO: 303907 - DNA, 30 bp, Artificial Sequence
  Synthetic oligonucleotide
agggacgccttaagaaccgtgtttaagaca

SEQ ID NO: 303908 - DNA, 30 bp, Artificial Sequence
  Synthetic oligonucleotide
taactagcgcattgaggcgggatgcagaca

SEQ ID NO: 303909 - DNA, 30 bp, Artificial Sequence
  Synthetic oligonucleotide
atgagctgaattgtgcggagtcctcagaca

SEQ ID NO: 303910 - DNA, 30 bp, Artificial Sequence
  Synthetic oligonucleotide
ttggcaacaggcttctggcggtcagagaca

SEQ ID NO: 303911 - DNA, 30 bp, Artificial Sequence
  Synthetic oligonucleotide
gtgggcagtagcttacaggagatagagaca

SEQ ID NO: 303912 - DNA, 30 bp, Artificial Sequence
  Synthetic oligonucleotide
cagatataaactcaagattgtgacgagaca

SEQ ID NO: 303913 - DNA, 30 bp, Artificial Sequence
  Synthetic oligonucleotide
tatgcatgatttaagtgtgatcccgagaca

SEQ ID NO: 303914 - DNA, 30 bp, Artificial Sequence
  Synthetic oligonucleotide
gatactgtcctggtccctaaaagcgagaca

SEQ ID NO: 303915 - DNA, 29 bp, Artificial Sequence
  Synthetic oligonucleotide
gggggagggctagaactggctgcgagaca

SEQ ID NO: 303916 - DNA, 30 bp, Artificial Sequence
  Synthetic oligonucleotide
gtataaaaaaacacctatggggtggagaca

SEQ ID NO: 303917 - DNA, 30 bp, Artificial Sequence
  Synthetic oligonucleotide
gagaggtgttatccgccccgggatgagaca

SEQ ID NO: 303918 - DNA, 30 bp, Artificial Sequence
  Synthetic oligonucleotide
aattgtgggcgctacaggcgcggtgagaca

SEQ ID NO: 303919 - DNA, 30 bp, Artificial Sequence
  Synthetic oligonucleotide
tgcttcgtacaagtaaagatcttctagaca

SEQ ID NO: 303920 - DNA, 30 bp, Artificial Sequence
  Synthetic oligonucleotide
ggtcagaatatagactatagaccttagaca

SEQ ID NO: 303921 - DNA, 30 bp, Artificial Sequence
  Synthetic oligonucleotide
acgtccgtaccgcaagtcgagctttagaca

SEQ ID NO: 303922 - DNA, 30 bp, Artificial Sequence
  Synthetic oligonucleotide
cgtgcaacggagcacccacggggaacgaca

SEQ ID NO: 303923 - DNA, 30 bp, Artificial Sequence
  Synthetic oligonucleotide
tcagacgtttgacaatatgtagacacgaca

SEQ ID NO: 303924 - DNA, 30 bp, Artificial Sequence
  Synthetic oligonucleotide
gtatgacacacctagattgtagacacgaca

SEQ ID NO: 303925 - DNA, 30 bp, Artificial Sequence
  Synthetic oligonucleotide
ggggacccatgcatcgccaatgccacgaca

SEQ ID NO: 303926 - DNA, 30 bp, Artificial Sequence
  Synthetic oligonucleotide
cgattggctgaaacgtgaacgggcacgaca

SEQ ID NO: 303927 - DNA, 30 bp, Artificial Sequence
  Synthetic oligonucleotide
ttaacttgagtggtatccttaatcacgaca

SEQ ID NO: 303928 - DNA, 30 bp, Artificial Sequence
  Synthetic oligonucleotide
tcccttacgtcgctttggcagactacgaca

SEQ ID NO: 303929 - DNA, 30 bp, Artificial Sequence
  Synthetic oligonucleotide
aaagtcggcgcgccagcagctggaccgaca

SEQ ID NO: 303930 - DNA, 30 bp, Artificial Sequence
  Synthetic oligonucleotide
ctcagagagcataggcgactatgaccgaca

SEQ ID NO: 303931 - DNA, 30 bp, Artificial Sequence
  Synthetic oligonucleotide
ttgaaattacgacctaaaccgataccgaca

SEQ ID NO: 303932 - DNA, 30 bp, Artificial Sequence
  Synthetic oligonucleotide
ctttgagaaatagaagcactgataccgaca

SEQ ID NO: 303933 - DNA, 30 bp, Artificial Sequence
  Synthetic oligonucleotide
gatcttagtaagctgcggttttatccgaca

SEQ ID NO: 303934 - DNA, 30 bp, Artificial Sequence
  Synthetic oligonucleotide
ttatcccggccaacgggctgcattccgaca

SEQ ID NO: 303935 - DNA, 30 bp, Artificial Sequence
  Synthetic oligonucleotide
tatacgtcaggtataacgagagttccgaca

SEQ ID NO: 303936 - DNA, 30 bp, Artificial Sequence
  Synthetic oligonucleotide
ggcgcgcacccgaacggaagacccgcgaca

SEQ ID NO: 303937 - DNA, 30 bp, Artificial Sequence
  Synthetic oligonucleotide
ctttgacacccttggtgacagggcgcgaca

SEQ ID NO: 303938 - DNA, 30 bp, Artificial Sequence
  Synthetic oligonucleotide
tgtgaaaaatgtccaggggttccggcgaca

SEQ ID NO: 303939 - DNA, 30 bp, Artificial Sequence
  Synthetic oligonucleotide
tcactagtctgacatggtcccggggcgaca

SEQ ID NO: 303940 - DNA, 31 bp, Artificial Sequence
  Synthetic oligonucleotide
tggaaaaaatgcaccgatagacttggcgaca

SEQ ID NO: 303941 - DNA, 30 bp, Artificial Sequence
  Synthetic oligonucleotide
tggctggcgagtgcccgcttaggatcgaca

SEQ ID NO: 303942 - DNA, 29 bp, Artificial Sequence
  Synthetic oligonucleotide
gcggaaacggtaggtttccaaagtcgaca

SEQ ID NO: 303943 - DNA, 30 bp, Artificial Sequence
  Synthetic oligonucleotide
catcttagcgaaaaagataatacgtcgaca

SEQ ID NO: 303944 - DNA, 30 bp, Artificial Sequence
  Synthetic oligonucleotide
gtgcggtaagtagggggatcctaaaggaca

SEQ ID NO: 303945 - DNA, 30 bp, Artificial Sequence
  Synthetic oligonucleotide
gaccggtcctgacaaatcctggacaggaca

SEQ ID NO: 303946 - DNA, 30 bp, Artificial Sequence
  Synthetic oligonucleotide
ttacattctttatagttactccccaggaca

SEQ ID NO: 303947 - DNA, 30 bp, Artificial Sequence
  Synthetic oligonucleotide
gtctcaccgcaggattgctcgatgaggaca

SEQ ID NO: 303948 - DNA, 30 bp, Artificial Sequence
  Synthetic oligonucleotide
aggcccacaggcattcgggcctttaggaca

SEQ ID NO: 303949 - DNA, 30 bp, Artificial Sequence
  Synthetic oligonucleotide
tctctatggaaacgatatccagcacggaca

SEQ ID NO: 303950 - DNA, 30 bp, Artificial Sequence
  Synthetic oligonucleotide
gaagatgaacgaacatgaatagcccggaca

SEQ ID NO: 303951 - DNA, 30 bp, Artificial Sequence
  Synthetic oligonucleotide
gaactccccaaaaagcccgaatcgcggaca

SEQ ID NO: 303952 - DNA, 30 bp, Artificial Sequence
  Synthetic oligonucleotide
gtagaggatcacgggggcagacctcggaca

SEQ ID NO: 303953 - DNA, 30 bp, Artificial Sequence
  Synthetic oligonucleotide
ttgattctcttacattgtattagagggaca

SEQ ID NO: 303954 - DNA, 30 bp, Artificial Sequence
  Synthetic oligonucleotide
cggataaggcctagtaggtacttagggaca

SEQ ID NO: 303955 - DNA, 30 bp, Artificial Sequence
  Synthetic oligonucleotide
tgtgaactggttgtggaacagtacgggaca

SEQ ID NO: 303956 - DNA, 30 bp, Artificial Sequence
  Synthetic oligonucleotide
tcgatcttcggttcccaacggcgcgggaca

SEQ ID NO: 303957 - DNA, 30 bp, Artificial Sequence
  Synthetic oligonucleotide
gttacagcaaacaagcgctcgcaggggaca

SEQ ID NO: 303958 - DNA, 30 bp, Artificial Sequence
  Synthetic oligonucleotide
gggtcatgtgatccatccgggcaggggaca

SEQ ID NO: 303959 - DNA, 30 bp, Artificial Sequence
  Synthetic oligonucleotide
taccgaatcccacgcgaggcgacatggaca

SEQ ID NO: 303960 - DNA, 30 bp, Artificial Sequence
  Synthetic oligonucleotide
ggcaagtggaactgcaatcttccatggaca

SEQ ID NO: 303961 - DNA, 30 bp, Artificial Sequence
  Synthetic oligonucleotide
tcgcaccataaaagggtccttcactggaca

SEQ ID NO: 303962 - DNA, 30 bp, Artificial Sequence
  Synthetic oligonucleotide
gtagcttggaggagagcgtttagctggaca

SEQ ID NO: 303963 - DNA, 30 bp, Artificial Sequence
  Synthetic oligonucleotide
ggggtatctcttcttccgcagaggtggaca

SEQ ID NO: 303964 - DNA, 30 bp, Artificial Sequence
  Synthetic oligonucleotide
catgggccttcttaggaccatcggtggaca

SEQ ID NO: 303965 - DNA, 30 bp, Artificial Sequence
  Synthetic oligonucleotide
ttatcgtaacagaattcctgtagttggaca

SEQ ID NO: 303966 - DNA, 30 bp, Artificial Sequence
  Synthetic oligonucleotide
gataaatcggaatatgagtctaaaatgaca

SEQ ID NO: 303967 - DNA, 30 bp, Artificial Sequence
  Synthetic oligonucleotide
tctcactttaatgattaaggtcaaatgaca

SEQ ID NO: 303968 - DNA, 30 bp, Artificial Sequence
  Synthetic oligonucleotide
tgacgggggatgccggcaacgaacatgaca

SEQ ID NO: 303969 - DNA, 30 bp, Artificial Sequence
  Synthetic oligonucleotide
ggcatatccgcccaagcgaggccgatgaca

SEQ ID NO: 303970 - DNA, 30 bp, Artificial Sequence
  Synthetic oligonucleotide
gcgttcaaaagtatacggccgcgtatgaca

SEQ ID NO: 303971 - DNA, 30 bp, Artificial Sequence
  Synthetic oligonucleotide
tatgcgactgggttctaatgttgactgaca

SEQ ID NO: 303972 - DNA, 30 bp, Artificial Sequence
  Synthetic oligonucleotide
atttgattttgtggcgacggtctactgaca

SEQ ID NO: 303973 - DNA, 30 bp, Artificial Sequence
  Synthetic oligonucleotide
cagtttatcgttggactagttttactgaca

SEQ ID NO: 303974 - DNA, 30 bp, Artificial Sequence
  Synthetic oligonucleotide
tttcatcggacaaggtcgagggccctgaca

SEQ ID NO: 303975 - DNA, 30 bp, Artificial Sequence
  Synthetic oligonucleotide
ttgttagggaacttccgtagagttctgaca

SEQ ID NO: 303976 - DNA, 30 bp, Artificial Sequence
  Synthetic oligonucleotide
gcctcttaaactgcacctgactaagtgaca

SEQ ID NO: 303977 - DNA, 30 bp, Artificial Sequence
  Synthetic oligonucleotide
aacctgggatcaacacggtttaccgtgaca

SEQ ID NO: 303978 - DNA, 30 bp, Artificial Sequence
  Synthetic oligonucleotide
ttagggaggcgtaatcattagagcgtgaca

SEQ ID NO: 303979 - DNA, 30 bp, Artificial Sequence
  Synthetic oligonucleotide
gccattatgaggttgaggatcatcgtgaca

SEQ ID NO: 303980 - DNA, 30 bp, Artificial Sequence
  Synthetic oligonucleotide
cttatgtgaccattatagtgttctgtgaca

SEQ ID NO: 303981 - DNA, 30 bp, Artificial Sequence
  Synthetic oligonucleotide
gcgctaagtgtcgttgagggttgattgaca

SEQ ID NO: 303982 - DNA, 30 bp, Artificial Sequence
  Synthetic oligonucleotide
cagcactactcggtgtcgctgtgcttgaca

SEQ ID NO: 303983 - DNA, 30 bp, Artificial Sequence
  Synthetic oligonucleotide
acggtgaaattgacctgcaaaatcttgaca

SEQ ID NO: 303984 - DNA, 30 bp, Artificial Sequence
  Synthetic oligonucleotide
caatatgatgcaaggatgtacgtcttgaca

SEQ ID NO: 303985 - DNA, 30 bp, Artificial Sequence
  Synthetic oligonucleotide
tactcaaataaggggcgattgttcttgaca

SEQ ID NO: 303986 - DNA, 30 bp, Artificial Sequence
  Synthetic oligonucleotide
tagtagaaccatacgacgctggtgttgaca

SEQ ID NO: 303987 - DNA, 30 bp, Artificial Sequence
  Synthetic oligonucleotide
tacggcatggttgaagtcgataatttgaca

SEQ ID NO: 303988 - DNA, 30 bp, Artificial Sequence
  Synthetic oligonucleotide
attgggcattcgttttaaagatatttgaca

SEQ ID NO: 303989 - DNA, 30 bp, Artificial Sequence
  Synthetic oligonucleotide
gtgggctcactgtataccacctatttgaca

SEQ ID NO: 303990 - DNA, 30 bp, Artificial Sequence
  Synthetic oligonucleotide
cagtggtgatgaaattcactatgtttgaca

SEQ ID NO: 303991 - DNA, 30 bp, Artificial Sequence
  Synthetic oligonucleotide
agcctcaaccccagtcgcgcgctaaataca

SEQ ID NO: 303992 - DNA, 30 bp, Artificial Sequence
  Synthetic oligonucleotide
ctcattcgtagcataccatgagtaaataca

SEQ ID NO: 303993 - DNA, 30 bp, Artificial Sequence
  Synthetic oligonucleotide
gggacctcttgcggatcacgcgacaataca

SEQ ID NO: 303994 - DNA, 30 bp, Artificial Sequence
  Synthetic oligonucleotide
aactcagttaattctgtggtcaccaataca

SEQ ID NO: 303995 - DNA, 30 bp, Artificial Sequence
  Synthetic oligonucleotide
acatagtggagcgcaaacacccgcaataca

SEQ ID NO: 303996 - DNA, 30 bp, Artificial Sequence
  Synthetic oligonucleotide
attttctcctataaaacaaggggcaataca

SEQ ID NO: 303997 - DNA, 30 bp, Artificial Sequence
  Synthetic oligonucleotide
ctgatcgaatagctcaaagactcgaataca

SEQ ID NO: 303998 - DNA, 30 bp, Artificial Sequence
  Synthetic oligonucleotide
agcatgtatcaaggaatcgtaaggaataca

SEQ ID NO: 303999 - DNA, 30 bp, Artificial Sequence
  Synthetic oligonucleotide
cctgcagaagctttttgcgactctaataca

SEQ ID NO: 304000 - DNA, 30 bp, Artificial Sequence
  Synthetic oligonucleotide
tattggtgtgtttcactggacgaacataca

SEQ ID NO: 304001 - DNA, 30 bp, Artificial Sequence
  Synthetic oligonucleotide
ggcctatgtgttgtgtaaagtgaacataca

SEQ ID NO: 304002 - DNA, 30 bp, Artificial Sequence
  Synthetic oligonucleotide
ttctatcacttgtccgaacggtaccataca

SEQ ID NO: 304003 - DNA, 30 bp, Artificial Sequence
  Synthetic oligonucleotide
tgccctaagagcgttaagtacacgcataca

SEQ ID NO: 304004 - DNA, 29 bp, Artificial Sequence
  Synthetic oligonucleotide
accacatagtgtgagatggaactcataca

SEQ ID NO: 304005 - DNA, 30 bp, Artificial Sequence
  Synthetic oligonucleotide
ggggtaaccagacagtttctctaagataca

SEQ ID NO: 304006 - DNA, 30 bp, Artificial Sequence
  Synthetic oligonucleotide
ccgcctcaccaccaatttataggagataca

SEQ ID NO: 304007 - DNA, 30 bp, Artificial Sequence
  Synthetic oligonucleotide
tcagtagtgtatgcatcggtgttagataca

SEQ ID NO: 304008 - DNA, 30 bp, Artificial Sequence
  Synthetic oligonucleotide
cgtctaagttcggatgaatttaacgataca

SEQ ID NO: 304009 - DNA, 30 bp, Artificial Sequence
  Synthetic oligonucleotide
gttgtcagactccgacccgttttggataca

SEQ ID NO: 304010 - DNA, 30 bp, Artificial Sequence
  Synthetic oligonucleotide
acgggccccgcttgcccttcgggtgataca

SEQ ID NO: 304011 - DNA, 30 bp, Artificial Sequence
  Synthetic oligonucleotide
tcatgcgagaagtctacagtgtttgataca

SEQ ID NO: 304012 - DNA, 30 bp, Artificial Sequence
  Synthetic oligonucleotide
ggcaaatccccggattcacgctaatataca

SEQ ID NO: 304013 - DNA, 30 bp, Artificial Sequence
  Synthetic oligonucleotide
tggggtacgcattttactaaggcatataca

SEQ ID NO: 304014 - DNA, 30 bp, Artificial Sequence
  Synthetic oligonucleotide
taggcgatgcaacatcgaggagtatataca

SEQ ID NO: 304015 - DNA, 30 bp, Artificial Sequence
  Synthetic oligonucleotide
aaccgtcggacagacatcaaaccgtataca

SEQ ID NO: 304016 - DNA, 30 bp, Artificial Sequence
  Synthetic oligonucleotide
ccgggttaatctggaattcttgcgtataca

SEQ ID NO: 304017 - DNA, 30 bp, Artificial Sequence
  Synthetic oligonucleotide
cacgggctaagatctgtccgtaggtataca

SEQ ID NO: 304018 - DNA, 30 bp, Artificial Sequence
  Synthetic oligonucleotide
ctaactggtcttcgaatgattatttataca

SEQ ID NO: 304019 - DNA, 30 bp, Artificial Sequence
  Synthetic oligonucleotide
ctatttaattggaaggtggcttaaactaca

SEQ ID NO: 304020 - DNA, 30 bp, Artificial Sequence
  Synthetic oligonucleotide
gaaaatttttcgcatcataacggcactaca

SEQ ID NO: 304021 - DNA, 30 bp, Artificial Sequence
  Synthetic oligonucleotide
cggaggttatcggcgttagggctgactaca

SEQ ID NO: 304022 - DNA, 30 bp, Artificial Sequence
  Synthetic oligonucleotide
agaatgatgacacgccgccgccaacctaca

SEQ ID NO: 304023 - DNA, 31 bp, Artificial Sequence
  Synthetic oligonucleotide
ggtattctctgatggaatttgataccctaca

SEQ ID NO: 304024 - DNA, 30 bp, Artificial Sequence
  Synthetic oligonucleotide
atggatgctacgcacatttgggcgcctaca

SEQ ID NO: 304025 - DNA, 30 bp, Artificial Sequence
  Synthetic oligonucleotide
ttaaagatcggctccgttaatcctcctaca

SEQ ID NO: 304026 - DNA, 31 bp, Artificial Sequence
  Synthetic oligonucleotide
taagcatatctacttcgcctgctctcctaca

SEQ ID NO: 304027 - DNA, 30 bp, Artificial Sequence
  Synthetic oligonucleotide
tcgaccttgcagtctcgaaggtgtcctaca

SEQ ID NO: 304028 - DNA, 30 bp, Artificial Sequence
  Synthetic oligonucleotide
cttataagcttgccttggaacaacgctaca

SEQ ID NO: 304029 - DNA, 30 bp, Artificial Sequence
  Synthetic oligonucleotide
ggggaaagttcgtctaagcagaccgctaca

SEQ ID NO: 304030 - DNA, 30 bp, Artificial Sequence
  Synthetic oligonucleotide
catgaggtgttatgggtacgatccgctaca

SEQ ID NO: 304031 - DNA, 30 bp, Artificial Sequence
  Synthetic oligonucleotide
gttgagctgcatgaccgtacataggctaca

SEQ ID NO: 304032 - DNA, 30 bp, Artificial Sequence
  Synthetic oligonucleotide
tgctacgactatgcaaatcacatggctaca

SEQ ID NO: 304033 - DNA, 30 bp, Artificial Sequence
  Synthetic oligonucleotide
cttaagggtggacattcccgtgttgctaca

SEQ ID NO: 304034 - DNA, 30 bp, Artificial Sequence
  Synthetic oligonucleotide
attctcggggaagggcgcacagaatctaca

SEQ ID NO: 304035 - DNA, 30 bp, Artificial Sequence
  Synthetic oligonucleotide
tggcctattaaagagtaggggtcatctaca

SEQ ID NO: 304036 - DNA, 30 bp, Artificial Sequence
  Synthetic oligonucleotide
taatactgaaatgagcatatgtgatctaca

SEQ ID NO: 304037 - DNA, 30 bp, Artificial Sequence
  Synthetic oligonucleotide
gaaaagcgacggaattaaaaaacctctaca

SEQ ID NO: 304038 - DNA, 30 bp, Artificial Sequence
  Synthetic oligonucleotide
tggagactggcgctattcgtaccgtctaca

SEQ ID NO: 304039 - DNA, 30 bp, Artificial Sequence
  Synthetic oligonucleotide
gagcgtgactgggtaagcattttgtctaca

SEQ ID NO: 304040 - DNA, 30 bp, Artificial Sequence
  Synthetic oligonucleotide
gctttgaatagcacccattaaaaaagtaca

SEQ ID NO: 304041 - DNA, 30 bp, Artificial Sequence
  Synthetic oligonucleotide
tggtttaaaatgatacccgatagcagtaca

SEQ ID NO: 304042 - DNA, 30 bp, Artificial Sequence
  Synthetic oligonucleotide
ggaacgccaaatggcaccttagatagtaca

SEQ ID NO: 304043 - DNA, 30 bp, Artificial Sequence
  Synthetic oligonucleotide
tgctgtgcttaggcccaacaccctagtaca

SEQ ID NO: 304044 - DNA, 30 bp, Artificial Sequence
  Synthetic oligonucleotide
accttcgcataattctcttggagtagtaca

SEQ ID NO: 304045 - DNA, 30 bp, Artificial Sequence
  Synthetic oligonucleotide
gcgtcctacctatcggagtatagtagtaca

SEQ ID NO: 304046 - DNA, 30 bp, Artificial Sequence
  Synthetic oligonucleotide
gggcggtcgtcaggaacccctagtagtaca

SEQ ID NO: 304047 - DNA, 30 bp, Artificial Sequence
  Synthetic oligonucleotide
gtgcagttcgacagcgcggcgaaacgtaca

SEQ ID NO: 304048 - DNA, 30 bp, Artificial Sequence
  Synthetic oligonucleotide
gggtgacaagaccggcatagtcaacgtaca

SEQ ID NO: 304049 - DNA, 30 bp, Artificial Sequence
  Synthetic oligonucleotide
agcattactataacgctacaaatacgtaca

SEQ ID NO: 304050 - DNA, 30 bp, Artificial Sequence
  Synthetic oligonucleotide
gcataacacaggtttcagaaaacccgtaca

SEQ ID NO: 304051 - DNA, 30 bp, Artificial Sequence
  Synthetic oligonucleotide
ataggtaggctgaccttctatgtccgtaca

SEQ ID NO: 304052 - DNA, 30 bp, Artificial Sequence
  Synthetic oligonucleotide
gtttctggaaaaccagcagaatagcgtaca

SEQ ID NO: 304053 - DNA, 30 bp, Artificial Sequence
  Synthetic oligonucleotide
ggtaacattacagtgtcacgaaatcgtaca

SEQ ID NO: 304054 - DNA, 30 bp, Artificial Sequence
  Synthetic oligonucleotide
aacttgcacgctaccacccaggatcgtaca

SEQ ID NO: 304055 - DNA, 30 bp, Artificial Sequence
  Synthetic oligonucleotide
acgatcattaatgtgttaagctaaggtaca

SEQ ID NO: 304056 - DNA, 31 bp, Artificial Sequence
  Synthetic oligonucleotide
ttattgtgcagcgtattgctgaacaggtaca

SEQ ID NO: 304057 - DNA, 30 bp, Artificial Sequence
  Synthetic oligonucleotide
ctgtctttcatatctggatgttcaggtaca

SEQ ID NO: 304058 - DNA, 30 bp, Artificial Sequence
  Synthetic oligonucleotide
tagatcctccgtgtcgagtggataggtaca

SEQ ID NO: 304059 - DNA, 30 bp, Artificial Sequence
  Synthetic oligonucleotide
tataaagaaggtccaggtccaggcggtaca

SEQ ID NO: 304060 - DNA, 30 bp, Artificial Sequence
  Synthetic oligonucleotide
ggggctcttgaaatttattactgcggtaca

SEQ ID NO: 304061 - DNA, 30 bp, Artificial Sequence
  Synthetic oligonucleotide
ggtatggttcttgaactattcaagggtaca

SEQ ID NO: 304062 - DNA, 30 bp, Artificial Sequence
  Synthetic oligonucleotide
ggcggggagttagtatagagttcgggtaca

SEQ ID NO: 304063 - DNA, 30 bp, Artificial Sequence
  Synthetic oligonucleotide
tacttcgcgggtctagaaaaaaatggtaca

SEQ ID NO: 304064 - DNA, 30 bp, Artificial Sequence
  Synthetic oligonucleotide
gtaaaagatatgcgattacatgatggtaca

SEQ ID NO: 304065 - DNA, 30 bp, Artificial Sequence
  Synthetic oligonucleotide
taagaagcacacgaggcaaaatgtggtaca

SEQ ID NO: 304066 - DNA, 30 bp, Artificial Sequence
  Synthetic oligonucleotide
atggtccatgcgtggtagaaagaatgtaca

SEQ ID NO: 304067 - DNA, 30 bp, Artificial Sequence
  Synthetic oligonucleotide
gtagttttagattagacggactaatgtaca

SEQ ID NO: 304068 - DNA, 30 bp, Artificial Sequence
  Synthetic oligonucleotide
acctttcaccgtcagcggtccccctgtaca

SEQ ID NO: 304069 - DNA, 30 bp, Artificial Sequence
  Synthetic oligonucleotide
tgggacgcttcattgtctctcggctgtaca

SEQ ID NO: 304070 - DNA, 30 bp, Artificial Sequence
  Synthetic oligonucleotide
tgacggtataagtggttcattatctgtaca

SEQ ID NO: 304071 - DNA, 30 bp, Artificial Sequence
  Synthetic oligonucleotide
cattcacattgatgaccactagggtgtaca

SEQ ID NO: 304072 - DNA, 30 bp, Artificial Sequence
  Synthetic oligonucleotide
cacgaatctctcctccgcaacaattgtaca

SEQ ID NO: 304073 - DNA, 30 bp, Artificial Sequence
  Synthetic oligonucleotide
atcaaccgttatagggttcgttattgtaca

SEQ ID NO: 304074 - DNA, 30 bp, Artificial Sequence
  Synthetic oligonucleotide
tccatggcatataggtcgataccttgtaca

SEQ ID NO: 304075 - DNA, 30 bp, Artificial Sequence
  Synthetic oligonucleotide
gttaggataaccgtagtaagatgttgtaca

SEQ ID NO: 304076 - DNA, 30 bp, Artificial Sequence
  Synthetic oligonucleotide
ttcagattggcaacatttgtgaaaattaca

SEQ ID NO: 304077 - DNA, 30 bp, Artificial Sequence
  Synthetic oligonucleotide
ctccgcatatactccatccctaacattaca

SEQ ID NO: 304078 - DNA, 30 bp, Artificial Sequence
  Synthetic oligonucleotide
ggttcagttaggatctatcacgacattaca

SEQ ID NO: 304079 - DNA, 30 bp, Artificial Sequence
  Synthetic oligonucleotide
cagagtggggctgaaaggtaagtcattaca

SEQ ID NO: 304080 - DNA, 30 bp, Artificial Sequence
  Synthetic oligonucleotide
ggtcaacatgcattaccagtagagattaca

SEQ ID NO: 304081 - DNA, 30 bp, Artificial Sequence
  Synthetic oligonucleotide
acagggatgctgagggtatcttagattaca

SEQ ID NO: 304082 - DNA, 30 bp, Artificial Sequence
  Synthetic oligonucleotide
gtggaaggtgcgccgcaacccaatattaca

SEQ ID NO: 304083 - DNA, 30 bp, Artificial Sequence
  Synthetic oligonucleotide
tgcggtaatacatatcacatcactattaca

SEQ ID NO: 304084 - DNA, 30 bp, Artificial Sequence
  Synthetic oligonucleotide
aagccgtcgccacccatagtgaaacttaca

SEQ ID NO: 304085 - DNA, 30 bp, Artificial Sequence
  Synthetic oligonucleotide
gcgcggcataggcgaaacacgtcacttaca

SEQ ID NO: 304086 - DNA, 30 bp, Artificial Sequence
  Synthetic oligonucleotide
atcagccggcaagtttggtacaagcttaca

SEQ ID NO: 304087 - DNA, 30 bp, Artificial Sequence
  Synthetic oligonucleotide
tttcgtgcctggcggcctatcaggcttaca

SEQ ID NO: 304088 - DNA, 30 bp, Artificial Sequence
  Synthetic oligonucleotide
acatcttggttttgtgttatgaggcttaca

SEQ ID NO: 304089 - DNA, 30 bp, Artificial Sequence
  Synthetic oligonucleotide
ggagacatggatccagcatgacgtcttaca

SEQ ID NO: 304090 - DNA, 30 bp, Artificial Sequence
  Synthetic oligonucleotide
taagagaaagtcgagtcaatgtaggttaca

SEQ ID NO: 304091 - DNA, 30 bp, Artificial Sequence
  Synthetic oligonucleotide
ggcggcatatcaccggaagggatggttaca

SEQ ID NO: 304092 - DNA, 30 bp, Artificial Sequence
  Synthetic oligonucleotide
ggtaaactcacctccgtgcgcgtggttaca

SEQ ID NO: 304093 - DNA, 30 bp, Artificial Sequence
  Synthetic oligonucleotide
agggataactcgtttagtgaggtggttaca

SEQ ID NO: 304094 - DNA, 30 bp, Artificial Sequence
  Synthetic oligonucleotide
tagttctgatacagaccccgaacatttaca

SEQ ID NO: 304095 - DNA, 30 bp, Artificial Sequence
  Synthetic oligonucleotide
ttctcccctgtgcacgtggcatcatttaca

SEQ ID NO: 304096 - DNA, 30 bp, Artificial Sequence
  Synthetic oligonucleotide
acagataccgccagatatccgtactttaca

SEQ ID NO: 304097 - DNA, 30 bp, Artificial Sequence
  Synthetic oligonucleotide
gtggcacagtaagtctccagagagtttaca

SEQ ID NO: 304098 - DNA, 30 bp, Artificial Sequence
  Synthetic oligonucleotide
aaagttacactgaagtcccatccttttaca

SEQ ID NO: 304099 - DNA, 30 bp, Artificial Sequence
  Synthetic oligonucleotide
ctccacattggacataagttaaacaaacca

SEQ ID NO: 304100 - DNA, 30 bp, Artificial Sequence
  Synthetic oligonucleotide
tatccggagtagagtgtgtcaaccaaacca

SEQ ID NO: 304101 - DNA, 30 bp, Artificial Sequence
  Synthetic oligonucleotide
tttcgttccaggacccgagccacgaaacca

SEQ ID NO: 304102 - DNA, 30 bp, Artificial Sequence
  Synthetic oligonucleotide
tggttcgagcggaaatcccggttgaaacca

SEQ ID NO: 304103 - DNA, 30 bp, Artificial Sequence
  Synthetic oligonucleotide
actctgaatgaaatccgcatgcataaacca

SEQ ID NO: 304104 - DNA, 30 bp, Artificial Sequence
  Synthetic oligonucleotide
tgctgatacttgtagatccacgataaacca

SEQ ID NO: 304105 - DNA, 30 bp, Artificial Sequence
  Synthetic oligonucleotide
cgacacgggtaggggaagctccctaaacca

SEQ ID NO: 304106 - DNA, 30 bp, Artificial Sequence
  Synthetic oligonucleotide
ttactccgaaaaacattcgctgttaaacca

SEQ ID NO: 304107 - DNA, 30 bp, Artificial Sequence
  Synthetic oligonucleotide
cttatctgactgagatggctcccacaacca

SEQ ID NO: 304108 - DNA, 30 bp, Artificial Sequence
  Synthetic oligonucleotide
gacgaggggatatagtttagtcagcaacca

SEQ ID NO: 304109 - DNA, 30 bp, Artificial Sequence
  Synthetic oligonucleotide
atgggttcgattctgtcaagggatcaacca

SEQ ID NO: 304110 - DNA, 30 bp, Artificial Sequence
  Synthetic oligonucleotide
acgggttacatacggggtgtgcttcaacca

SEQ ID NO: 304111 - DNA, 30 bp, Artificial Sequence
  Synthetic oligonucleotide
taatctgaccgcctcaacttagacgaacca

SEQ ID NO: 304112 - DNA, 30 bp, Artificial Sequence
  Synthetic oligonucleotide
ggtgccaaatggtaaaagagtatcgaacca

SEQ ID NO: 304113 - DNA, 30 bp, Artificial Sequence
  Synthetic oligonucleotide
ttcgtcacatccacaggggaagtggaacca

SEQ ID NO: 304114 - DNA, 30 bp, Artificial Sequence
  Synthetic oligonucleotide
gcccttttgactgtgtggggagaataacca

SEQ ID NO: 304115 - DNA, 30 bp, Artificial Sequence
  Synthetic oligonucleotide
tatgatggaagtctctgcacgggctaacca

SEQ ID NO: 304116 - DNA, 30 bp, Artificial Sequence
  Synthetic oligonucleotide
aagcgccaatattaatgggcattctaacca

SEQ ID NO: 304117 - DNA, 30 bp, Artificial Sequence
  Synthetic oligonucleotide
accgtgaatgtcataatgtatacgtaacca

SEQ ID NO: 304118 - DNA, 30 bp, Artificial Sequence
  Synthetic oligonucleotide
tgagaggagctgcgagctgttcattaacca

SEQ ID NO: 304119 - DNA, 30 bp, Artificial Sequence
  Synthetic oligonucleotide
ttaccattgtttgtgagggaacgttaacca

SEQ ID NO: 304120 - DNA, 30 bp, Artificial Sequence
  Synthetic oligonucleotide
cttctgttcgcgagagcgacaggttaacca

SEQ ID NO: 304121 - DNA, 30 bp, Artificial Sequence
  Synthetic oligonucleotide
gttaactttgccaggcacagtataacacca

SEQ ID NO: 304122 - DNA, 30 bp, Artificial Sequence
  Synthetic oligonucleotide
tagccataggattgagcgtctttcacacca

SEQ ID NO: 304123 - DNA, 30 bp, Artificial Sequence
  Synthetic oligonucleotide
cccctcagagaatcggttcccccgacacca

SEQ ID NO: 304124 - DNA, 30 bp, Artificial Sequence
  Synthetic oligonucleotide
agtgccggtgcaatccagtccatgacacca

SEQ ID NO: 304125 - DNA, 30 bp, Artificial Sequence
  Synthetic oligonucleotide
cgtgaaaagatgtgagaggcacctacacca

SEQ ID NO: 304126 - DNA, 30 bp, Artificial Sequence
  Synthetic oligonucleotide
tctatttcggtggaggacctttctacacca

SEQ ID NO: 304127 - DNA, 30 bp, Artificial Sequence
  Synthetic oligonucleotide
gtggacgcgtagggaccgtcacacgcacca

SEQ ID NO: 304128 - DNA, 30 bp, Artificial Sequence
  Synthetic oligonucleotide
gtctcgtgccgatccacacataccgcacca

SEQ ID NO: 304129 - DNA, 30 bp, Artificial Sequence
  Synthetic oligonucleotide
aaatgcttttaaggacacgcaggcgcacca

SEQ ID NO: 304130 - DNA, 30 bp, Artificial Sequence
  Synthetic oligonucleotide
ccagattcaaaggaataagggctggcacca

SEQ ID NO: 304131 - DNA, 30 bp, Artificial Sequence
  Synthetic oligonucleotide
gaataggatcctacgccaagaatctcacca

SEQ ID NO: 304132 - DNA, 30 bp, Artificial Sequence
  Synthetic oligonucleotide
taaccttgtacaagatgtacctggtcacca

SEQ ID NO: 304133 - DNA, 30 bp, Artificial Sequence
  Synthetic oligonucleotide
tctaactagagaccacggaggttgtcacca

SEQ ID NO: 304134 - DNA, 30 bp, Artificial Sequence
  Synthetic oligonucleotide
cgattagtagaggattcatgattcagacca

SEQ ID NO: 304135 - DNA, 30 bp, Artificial Sequence
  Synthetic oligonucleotide
atggttgcgcgttccctaggcgggagacca

SEQ ID NO: 304136 - DNA, 30 bp, Artificial Sequence
  Synthetic oligonucleotide
aatgattgcatgcggcgtaggggtagacca

SEQ ID NO: 304137 - DNA, 30 bp, Artificial Sequence
  Synthetic oligonucleotide
ttcatcattgtaacaggacccgaacgacca

SEQ ID NO: 304138 - DNA, 30 bp, Artificial Sequence
  Synthetic oligonucleotide
tagccgatatgatcggaggctctacgacca

SEQ ID NO: 304139 - DNA, 30 bp, Artificial Sequence
  Synthetic oligonucleotide
gctagagggagggctgttattgcccgacca

SEQ ID NO: 304140 - DNA, 30 bp, Artificial Sequence
  Synthetic oligonucleotide
gtctcggtagcaggctatccgatgcgacca

SEQ ID NO: 304141 - DNA, 30 bp, Artificial Sequence
  Synthetic oligonucleotide
ccgtcctggctctacaagacgggtcgacca

SEQ ID NO: 304142 - DNA, 30 bp, Artificial Sequence
  Synthetic oligonucleotide
tactgaatgtagcttccgtgtataggacca

SEQ ID NO: 304143 - DNA, 30 bp, Artificial Sequence
  Synthetic oligonucleotide
gcgaggtcgcacggggtttttaacggacca

SEQ ID NO: 304144 - DNA, 30 bp, Artificial Sequence
  Synthetic oligonucleotide
cgttgggtggcgtctacttccgacggacca

SEQ ID NO: 304145 - DNA, 30 bp, Artificial Sequence
  Synthetic oligonucleotide
gtattcagtagtgaacagatgaccggacca

SEQ ID NO: 304146 - DNA, 30 bp, Artificial Sequence
  Synthetic oligonucleotide
ggaaatcaccggagataacggtccggacca

SEQ ID NO: 304147 - DNA, 30 bp, Artificial Sequence
  Synthetic oligonucleotide
aatactggaggtggtctctaggtcggacca

SEQ ID NO: 304148 - DNA, 30 bp, Artificial Sequence
  Synthetic oligonucleotide
cagcacttgacccacatccgacggggacca

SEQ ID NO: 304149 - DNA, 30 bp, Artificial Sequence
  Synthetic oligonucleotide
ttcagcgcaagccatatgtcggttggacca

SEQ ID NO: 304150 - DNA, 30 bp, Artificial Sequence
  Synthetic oligonucleotide
ctaattcagaggtggcgatgagtatgacca

SEQ ID NO: 304151 - DNA, 30 bp, Artificial Sequence
  Synthetic oligonucleotide
tccgtacagctgcgtatgtatgtatgacca

SEQ ID NO: 304152 - DNA, 30 bp, Artificial Sequence
  Synthetic oligonucleotide
agtatggaactacctctcggtttatgacca

SEQ ID NO: 304153 - DNA, 30 bp, Artificial Sequence
  Synthetic oligonucleotide
ttaggggtgtccttagtgcgggattgacca

SEQ ID NO: 304154 - DNA, 30 bp, Artificial Sequence
  Synthetic oligonucleotide
tccccagggcaagaggcccagggcatacca

SEQ ID NO: 304155 - DNA, 30 bp, Artificial Sequence
  Synthetic oligonucleotide
agagatttatcccttaccgtagtcatacca

SEQ ID NO: 304156 - DNA, 30 bp, Artificial Sequence
  Synthetic oligonucleotide
tgtacttcgaacaactacacggatatacca

SEQ ID NO: 304157 - DNA, 30 bp, Artificial Sequence
  Synthetic oligonucleotide
cctcacaccgtccggacccgggctatacca

SEQ ID NO: 304158 - DNA, 30 bp, Artificial Sequence
  Synthetic oligonucleotide
ttatcgatctaaaatgtctccatactacca

SEQ ID NO: 304159 - DNA, 30 bp, Artificial Sequence
  Synthetic oligonucleotide
caattatatcatgttggacccgacctacca

SEQ ID NO: 304160 - DNA, 30 bp, Artificial Sequence
  Synthetic oligonucleotide
cggaccgatcaaggcgtcggcaccctacca

SEQ ID NO: 304161 - DNA, 30 bp, Artificial Sequence
  Synthetic oligonucleotide
atggtagtttcagtggacggctccctacca

SEQ ID NO: 304162 - DNA, 30 bp, Artificial Sequence
  Synthetic oligonucleotide
aactgcaatttggaaaccttgcgcctacca

SEQ ID NO: 304163 - DNA, 30 bp, Artificial Sequence
  Synthetic oligonucleotide
cttttataagctctgtttggaaggctacca

SEQ ID NO: 304164 - DNA, 30 bp, Artificial Sequence
  Synthetic oligonucleotide
cggtccctctaagcagcatttcggctacca

SEQ ID NO: 304165 - DNA, 30 bp, Artificial Sequence
  Synthetic oligonucleotide
ccggacaatgtaaggctgcaatggctacca

SEQ ID NO: 304166 - DNA, 30 bp, Artificial Sequence
  Synthetic oligonucleotide
acagggattcgcagtacttaaaaagtacca

SEQ ID NO: 304167 - DNA, 30 bp, Artificial Sequence
  Synthetic oligonucleotide
ggcacgggctccctttattgaacagtacca

SEQ ID NO: 304168 - DNA, 30 bp, Artificial Sequence
  Synthetic oligonucleotide
cgcattcgcgtttgcaagggagtagtacca

SEQ ID NO: 304169 - DNA, 30 bp, Artificial Sequence
  Synthetic oligonucleotide
gcaatggcatagggaataaaagtcgtacca

SEQ ID NO: 304170 - DNA, 30 bp, Artificial Sequence
  Synthetic oligonucleotide
ggagcgcctccactgaagatttgggtacca

SEQ ID NO: 304171 - DNA, 30 bp, Artificial Sequence
  Synthetic oligonucleotide
tagaacattgtttagtgttccgtattacca

SEQ ID NO: 304172 - DNA, 30 bp, Artificial Sequence
  Synthetic oligonucleotide
taaagtcccctactggtccccaccttacca

SEQ ID NO: 304173 - DNA, 30 bp, Artificial Sequence
  Synthetic oligonucleotide
gtggtttacattgtataaagaaagttacca

SEQ ID NO: 304174 - DNA, 30 bp, Artificial Sequence
  Synthetic oligonucleotide
ttagagactagggttagagataagttacca

SEQ ID NO: 304175 - DNA, 30 bp, Artificial Sequence
  Synthetic oligonucleotide
cataaggaggcggagataaccaggttacca

SEQ ID NO: 304176 - DNA, 30 bp, Artificial Sequence
  Synthetic oligonucleotide
taaccggcctcctacaccctgagaaaccca

SEQ ID NO: 304177 - DNA, 30 bp, Artificial Sequence
  Synthetic oligonucleotide
cacctgtttaacgacaattatggaaaccca

SEQ ID NO: 304178 - DNA, 30 bp, Artificial Sequence
  Synthetic oligonucleotide
ctcctgaagtggagacatctaggcaaccca

SEQ ID NO: 304179 - DNA, 30 bp, Artificial Sequence
  Synthetic oligonucleotide
ccggcactcaagatccgtgagatcaaccca

SEQ ID NO: 304180 - DNA, 30 bp, Artificial Sequence
  Synthetic oligonucleotide
cgcaattgggtgccgtgagtccagaaccca

SEQ ID NO: 304181 - DNA, 30 bp, Artificial Sequence
  Synthetic oligonucleotide
acgtgccccgcaggcagcgtaattaaccca

SEQ ID NO: 304182 - DNA, 30 bp, Artificial Sequence
  Synthetic oligonucleotide
tacgacatgtcggtgcctcggtttaaccca

SEQ ID NO: 304183 - DNA, 30 bp, Artificial Sequence
  Synthetic oligonucleotide
ggggattgaatatggattcctctgcaccca

SEQ ID NO: 304184 - DNA, 30 bp, Artificial Sequence
  Synthetic oligonucleotide
gtacgcagggtatcgagggtagatcaccca

SEQ ID NO: 304185 - DNA, 30 bp, Artificial Sequence
  Synthetic oligonucleotide
tctcaataagctttccatgcgtgtcaccca

SEQ ID NO: 304186 - DNA, 30 bp, Artificial Sequence
  Synthetic oligonucleotide
tctcggtgtgtcttaagtcgagcagaccca

SEQ ID NO: 304187 - DNA, 30 bp, Artificial Sequence
  Synthetic oligonucleotide
gtagtcgcattgggaagtcatcacgaccca

SEQ ID NO: 304188 - DNA, 30 bp, Artificial Sequence
  Synthetic oligonucleotide
atttacggtacgacggaacaattcgaccca

SEQ ID NO: 304189 - DNA, 30 bp, Artificial Sequence
  Synthetic oligonucleotide
cgtctcatgccatgaatatcgctggaccca

SEQ ID NO: 304190 - DNA, 30 bp, Artificial Sequence
  Synthetic oligonucleotide
gactgaccgcgaccctggtgatgtgaccca

SEQ ID NO: 304191 - DNA, 30 bp, Artificial Sequence
  Synthetic oligonucleotide
gctgctaagggtcccggagtttgtgaccca

SEQ ID NO: 304192 - DNA, 30 bp, Artificial Sequence
  Synthetic oligonucleotide
tctggaagtaagtggaggcgcaaataccca

SEQ ID NO: 304193 - DNA, 30 bp, Artificial Sequence
  Synthetic oligonucleotide
catgcgaaatgtaatgatttttcataccca

SEQ ID NO: 304194 - DNA, 30 bp, Artificial Sequence
  Synthetic oligonucleotide
tatacgaagttttgctgctacatctaccca

SEQ ID NO: 304195 - DNA, 30 bp, Artificial Sequence
  Synthetic oligonucleotide
ccagcaacacgtggcacaagctattaccca

SEQ ID NO: 304196 - DNA, 30 bp, Artificial Sequence
  Synthetic oligonucleotide
gaagccattatagttacacgaggttaccca

SEQ ID NO: 304197 - DNA, 30 bp, Artificial Sequence
  Synthetic oligonucleotide
aaataaatctgaaacccgatgtgttaccca

SEQ ID NO: 304198 - DNA, 30 bp, Artificial Sequence
  Synthetic oligonucleotide
tcctccatcaagcgtaagcatgtttaccca

SEQ ID NO: 304199 - DNA, 30 bp, Artificial Sequence
  Synthetic oligonucleotide
gcatttgcgaggtgagagcaaagcacccca

SEQ ID NO: 304200 - DNA, 30 bp, Artificial Sequence
  Synthetic oligonucleotide
atttggttaaatccttatgtgggcacccca

SEQ ID NO: 304201 - DNA, 30 bp, Artificial Sequence
  Synthetic oligonucleotide
agcaacagctgggagtctatgcagacccca

SEQ ID NO: 304202 - DNA, 30 bp, Artificial Sequence
  Synthetic oligonucleotide
atatgataatgacacgggtaggcaccccca

SEQ ID NO: 304203 - DNA, 30 bp, Artificial Sequence
  Synthetic oligonucleotide
aacaacgcggggttgcatagagtcccccca

SEQ ID NO: 304204 - DNA, 30 bp, Artificial Sequence
  Synthetic oligonucleotide
tcaatagttctttgcgatcgatcgccccca

SEQ ID NO: 304205 - DNA, 30 bp, Artificial Sequence
  Synthetic oligonucleotide
tggctgtgttgatgagacgttcttccccca

SEQ ID NO: 304206 - DNA, 30 bp, Artificial Sequence
  Synthetic oligonucleotide
gtaactaaggcgtttatgctctaagcccca

SEQ ID NO: 304207 - DNA, 30 bp, Artificial Sequence
  Synthetic oligonucleotide
gatacacccggaccctcggcaagagcccca

SEQ ID NO: 304208 - DNA, 30 bp, Artificial Sequence
  Synthetic oligonucleotide
aatgggaccttaatgcaattagtagcccca

SEQ ID NO: 304209 - DNA, 30 bp, Artificial Sequence
  Synthetic oligonucleotide
cgcccagtctctaggagcacacacgcccca

SEQ ID NO: 304210 - DNA, 30 bp, Artificial Sequence
  Synthetic oligonucleotide
tacttgaatattatatactgtccggcccca

SEQ ID NO: 304211 - DNA, 30 bp, Artificial Sequence
  Synthetic oligonucleotide
ttagaattcacggacaacccgactgcccca

SEQ ID NO: 304212 - DNA, 30 bp, Artificial Sequence
  Synthetic oligonucleotide
taacggcaccaagggccgaagtggtcccca

SEQ ID NO: 304213 - DNA, 30 bp, Artificial Sequence
  Synthetic oligonucleotide
atcgcgacccacatccgacacaggagccca

SEQ ID NO: 304214 - DNA, 30 bp, Artificial Sequence
  Synthetic oligonucleotide
acggtgtgttcgtgctagcaggggagccca

SEQ ID NO: 304215 - DNA, 30 bp, Artificial Sequence
  Synthetic oligonucleotide
gcattgagtaggcgacgttatgggagccca

SEQ ID NO: 304216 - DNA, 30 bp, Artificial Sequence
  Synthetic oligonucleotide
agcagggcacttccgagagattgtagccca

SEQ ID NO: 304217 - DNA, 30 bp, Artificial Sequence
  Synthetic oligonucleotide
ccatcggtagtgcagtcgccctgacgccca

SEQ ID NO: 304218 - DNA, 30 bp, Artificial Sequence
  Synthetic oligonucleotide
ttgagagcggatcatgccaagtaccgccca

SEQ ID NO: 304219 - DNA, 30 bp, Artificial Sequence
  Synthetic oligonucleotide
gactttcgacatgtaatggcctcgcgccca

SEQ ID NO: 304220 - DNA, 30 bp, Artificial Sequence
  Synthetic oligonucleotide
tgctgcaccgccaacattgagtcaggccca

SEQ ID NO: 304221 - DNA, 30 bp, Artificial Sequence
  Synthetic oligonucleotide
aaacttttagataagggctgccgaggccca

SEQ ID NO: 304222 - DNA, 30 bp, Artificial Sequence
  Synthetic oligonucleotide
aatacccacctataccccagggtcggccca

SEQ ID NO: 304223 - DNA, 30 bp, Artificial Sequence
  Synthetic oligonucleotide
taacagcataggctctagcggttcggccca

SEQ ID NO: 304224 - DNA, 30 bp, Artificial Sequence
  Synthetic oligonucleotide
tctggggacgattttcagtattatggccca

SEQ ID NO: 304225 - DNA, 29 bp, Artificial Sequence
  Synthetic oligonucleotide
actctgtatacttgtccgaaccctgccca

SEQ ID NO: 304226 - DNA, 30 bp, Artificial Sequence
  Synthetic oligonucleotide
gactacagtaacgactgggacttctgccca

SEQ ID NO: 304227 - DNA, 30 bp, Artificial Sequence
  Synthetic oligonucleotide
cgttggtaatagtacacgcgcaattgccca

SEQ ID NO: 304228 - DNA, 30 bp, Artificial Sequence
  Synthetic oligonucleotide
agttgcatgtgggagtatgatcgaatccca

SEQ ID NO: 304229 - DNA, 30 bp, Artificial Sequence
  Synthetic oligonucleotide
cacgacagttcaacatcgcaagacatccca

SEQ ID NO: 304230 - DNA, 30 bp, Artificial Sequence
  Synthetic oligonucleotide
attctcagccaatctatacgatcgatccca

SEQ ID NO: 304231 - DNA, 30 bp, Artificial Sequence
  Synthetic oligonucleotide
gggtttaaggaccgtgtgagtaggatccca

SEQ ID NO: 304232 - DNA, 30 bp, Artificial Sequence
  Synthetic oligonucleotide
ctcaatccgtacggaatgaggtcactccca

SEQ ID NO: 304233 - DNA, 30 bp, Artificial Sequence
  Synthetic oligonucleotide
agaaccggaagccccatggagccagtccca

SEQ ID NO: 304234 - DNA, 30 bp, Artificial Sequence
  Synthetic oligonucleotide
aagccactggtcatctccatgcccgtccca

SEQ ID NO: 304235 - DNA, 30 bp, Artificial Sequence
  Synthetic oligonucleotide
ttatcgatatactcggtgactgaggtccca

SEQ ID NO: 304236 - DNA, 30 bp, Artificial Sequence
  Synthetic oligonucleotide
aatgggtaccttttgagttgggcggtccca

SEQ ID NO: 304237 - DNA, 30 bp, Artificial Sequence
  Synthetic oligonucleotide
tctcgcgtttagagggttgaccctgtccca

SEQ ID NO: 304238 - DNA, 30 bp, Artificial Sequence
  Synthetic oligonucleotide
ctgcttatacacgatttacatagtgtccca

SEQ ID NO: 304239 - DNA, 30 bp, Artificial Sequence
  Synthetic oligonucleotide
attatcagcgaaaagaatatatttgtccca

SEQ ID NO: 304240 - DNA, 30 bp, Artificial Sequence
  Synthetic oligonucleotide
gaagctgctcatcaaacgaatcaattccca

SEQ ID NO: 304241 - DNA, 30 bp, Artificial Sequence
  Synthetic oligonucleotide
atacatccgagtcttcgaagaaacttccca

SEQ ID NO: 304242 - DNA, 30 bp, Artificial Sequence
  Synthetic oligonucleotide
taacacctccgtgggaatacacccttccca

SEQ ID NO: 304243 - DNA, 30 bp, Artificial Sequence
  Synthetic oligonucleotide
aataacaccaccgccgttgggggcttccca

SEQ ID NO: 304244 - DNA, 30 bp, Artificial Sequence
  Synthetic oligonucleotide
gccgttatagctcaccacgtgatcttccca

SEQ ID NO: 304245 - DNA, 31 bp, Artificial Sequence
  Synthetic oligonucleotide
tgcccagccaccgcatatggccagaaagcca

SEQ ID NO: 304246 - DNA, 30 bp, Artificial Sequence
  Synthetic oligonucleotide
attgaagggtaatcggactaatgcaagcca

SEQ ID NO: 304247 - DNA, 30 bp, Artificial Sequence
  Synthetic oligonucleotide
tataggaaccatgcattcccagagaagcca

SEQ ID NO: 304248 - DNA, 30 bp, Artificial Sequence
  Synthetic oligonucleotide
ttctacgagtaacgcttcatgacagagcca

SEQ ID NO: 304249 - DNA, 28 bp, Artificial Sequence
  Synthetic oligonucleotide
cagttgactaagcaaacgtagagagcca

SEQ ID NO: 304250 - DNA, 30 bp, Artificial Sequence
  Synthetic oligonucleotide
tcagtgggcggcagcgcaattcgagagcca

SEQ ID NO: 304251 - DNA, 30 bp, Artificial Sequence
  Synthetic oligonucleotide
gggttggctgctggaccaggccgcgagcca

SEQ ID NO: 304252 - DNA, 31 bp, Artificial Sequence
  Synthetic oligonucleotide
ttacgtttaccgcgactgttagcgcgagcca

SEQ ID NO: 304253 - DNA, 30 bp, Artificial Sequence
  Synthetic oligonucleotide
cgatgcttcactgcactatcaggcgagcca

SEQ ID NO: 304254 - DNA, 30 bp, Artificial Sequence
  Synthetic oligonucleotide
cgctgtgggttctaggaccttatcgagcca

SEQ ID NO: 304255 - DNA, 30 bp, Artificial Sequence
  Synthetic oligonucleotide
gcggaccgccgtgagcccatacgggagcca

SEQ ID NO: 304256 - DNA, 30 bp, Artificial Sequence
  Synthetic oligonucleotide
cttctcggttaagataaggcaaaatagcca

SEQ ID NO: 304257 - DNA, 30 bp, Artificial Sequence
  Synthetic oligonucleotide
tactcaggaacgcgcccacggacatagcca

SEQ ID NO: 304258 - DNA, 30 bp, Artificial Sequence
  Synthetic oligonucleotide
catccgatttaccgtcgggcagtatagcca

SEQ ID NO: 304259 - DNA, 31 bp, Artificial Sequence
  Synthetic oligonucleotide
tacaggactacctgtgcaggagggctagcca

SEQ ID NO: 304260 - DNA, 30 bp, Artificial Sequence
  Synthetic oligonucleotide
aagctcggctatgctctgacctagtagcca

SEQ ID NO: 304261 - DNA, 30 bp, Artificial Sequence
  Synthetic oligonucleotide
ccgctaaatttaattccattacggtagcca

SEQ ID NO: 304262 - DNA, 30 bp, Artificial Sequence
  Synthetic oligonucleotide
attgctcacggcctgtctgtttggtagcca

SEQ ID NO: 304263 - DNA, 30 bp, Artificial Sequence
  Synthetic oligonucleotide
atgtagtgagtcggggcgtagttttagcca

SEQ ID NO: 304264 - DNA, 30 bp, Artificial Sequence
  Synthetic oligonucleotide
acagtagaatatgggcagcttacaacgcca

SEQ ID NO: 304265 - DNA, 30 bp, Artificial Sequence
  Synthetic oligonucleotide
gagtatccctaaggggaaaacgtaacgcca

SEQ ID NO: 304266 - DNA, 30 bp, Artificial Sequence
  Synthetic oligonucleotide
ttgctggtagtgctttatcagaacacgcca

SEQ ID NO: 304267 - DNA, 30 bp, Artificial Sequence
  Synthetic oligonucleotide
agtacactctgcctcaaggcgtagacgcca

SEQ ID NO: 304268 - DNA, 30 bp, Artificial Sequence
  Synthetic oligonucleotide
agtccgagaaacgttacgacatggacgcca

SEQ ID NO: 304269 - DNA, 30 bp, Artificial Sequence
  Synthetic oligonucleotide
ttatggttcggacctggccactccgcgcca

SEQ ID NO: 304270 - DNA, 30 bp, Artificial Sequence
  Synthetic oligonucleotide
gaagtatggctggcggtgcccgtgtcgcca

SEQ ID NO: 304271 - DNA, 30 bp, Artificial Sequence
  Synthetic oligonucleotide
gttagaggggaacagactagcttgtcgcca

SEQ ID NO: 304272 - DNA, 30 bp, Artificial Sequence
  Synthetic oligonucleotide
accaatgtgcagcagatatagaattcgcca

SEQ ID NO: 304273 - DNA, 30 bp, Artificial Sequence
  Synthetic oligonucleotide
caaactagttattgtgaacaagtaaggcca

SEQ ID NO: 304274 - DNA, 30 bp, Artificial Sequence
  Synthetic oligonucleotide
aataatcatgcaggccacttagtaaggcca

SEQ ID NO: 304275 - DNA, 30 bp, Artificial Sequence
  Synthetic oligonucleotide
ttgatttgctgtggtacgatcttaaggcca

SEQ ID NO: 304276 - DNA, 30 bp, Artificial Sequence
  Synthetic oligonucleotide
aggactcgtagggggaggtattccaggcca

SEQ ID NO: 304277 - DNA, 30 bp, Artificial Sequence
  Synthetic oligonucleotide
ggacgcggcaaagtgaatacatgcaggcca

SEQ ID NO: 304278 - DNA, 30 bp, Artificial Sequence
  Synthetic oligonucleotide
agcgcattacgggcttaaccatagaggcca

SEQ ID NO: 304279 - DNA, 30 bp, Artificial Sequence
  Synthetic oligonucleotide
ttcaaggtccttcctaagcaccggcggcca

SEQ ID NO: 304280 - DNA, 30 bp, Artificial Sequence
  Synthetic oligonucleotide
tctaagactaccacatgatatgctcggcca

SEQ ID NO: 304281 - DNA, 30 bp, Artificial Sequence
  Synthetic oligonucleotide
atgtattaattctaggcgcgaacagggcca

SEQ ID NO: 304282 - DNA, 30 bp, Artificial Sequence
  Synthetic oligonucleotide
gtcactacaaggatggccatgatagggcca

SEQ ID NO: 304283 - DNA, 30 bp, Artificial Sequence
  Synthetic oligonucleotide
tgtgggaacgcggtgtactcggtagggcca

SEQ ID NO: 304284 - DNA, 30 bp, Artificial Sequence
  Synthetic oligonucleotide
tgcgctacgcttcacatatacggcgggcca

SEQ ID NO: 304285 - DNA, 30 bp, Artificial Sequence
  Synthetic oligonucleotide
ggtccaggtgttaagagatggcgggggcca

SEQ ID NO: 304286 - DNA, 30 bp, Artificial Sequence
  Synthetic oligonucleotide
gagctgtaccgtctgtatacacttgggcca

SEQ ID NO: 304287 - DNA, 30 bp, Artificial Sequence
  Synthetic oligonucleotide
ctaggttacctacactaagacgttgggcca

SEQ ID NO: 304288 - DNA, 30 bp, Artificial Sequence
  Synthetic oligonucleotide
ccgggatattataggagacgatttgggcca

SEQ ID NO: 304289 - DNA, 30 bp, Artificial Sequence
  Synthetic oligonucleotide
gtacatgaattgccatatctcgagtggcca

SEQ ID NO: 304290 - DNA, 30 bp, Artificial Sequence
  Synthetic oligonucleotide
gtcatggtaccgaagcgatacagttggcca

SEQ ID NO: 304291 - DNA, 31 bp, Artificial Sequence
  Synthetic oligonucleotide
ttaacaacgggggaacccctacagaatgcca

SEQ ID NO: 304292 - DNA, 30 bp, Artificial Sequence
  Synthetic oligonucleotide
gcattagataatcggcagcccgatatgcca

SEQ ID NO: 304293 - DNA, 30 bp, Artificial Sequence
  Synthetic oligonucleotide
tagtcttaaaacagaggcgatacactgcca

SEQ ID NO: 304294 - DNA, 30 bp, Artificial Sequence
  Synthetic oligonucleotide
tgccctaaggtcactcacatgggactgcca

SEQ ID NO: 304295 - DNA, 30 bp, Artificial Sequence
  Synthetic oligonucleotide
gttgtgccgatcgctgatcagagcctgcca

SEQ ID NO: 304296 - DNA, 30 bp, Artificial Sequence
  Synthetic oligonucleotide
ctcgaccattcgcatctgttgatgctgcca

SEQ ID NO: 304297 - DNA, 30 bp, Artificial Sequence
  Synthetic oligonucleotide
gagggagtcatgtacgctgtgaatctgcca

SEQ ID NO: 304298 - DNA, 30 bp, Artificial Sequence
  Synthetic oligonucleotide
tgattctgtttagtcgctagcgacgtgcca

SEQ ID NO: 304299 - DNA, 30 bp, Artificial Sequence
  Synthetic oligonucleotide
aagaatacccagtggaggtgatgggtgcca

SEQ ID NO: 304300 - DNA, 30 bp, Artificial Sequence
  Synthetic oligonucleotide
actggcatccctggtgaaaagggtgtgcca

SEQ ID NO: 304301 - DNA, 30 bp, Artificial Sequence
  Synthetic oligonucleotide
gcctttaatgcgtccgcgttgagattgcca

SEQ ID NO: 304302 - DNA, 30 bp, Artificial Sequence
  Synthetic oligonucleotide
atgtttccggggtcaacggatagattgcca

SEQ ID NO: 304303 - DNA, 30 bp, Artificial Sequence
  Synthetic oligonucleotide
tccggcgctccgtagctaatgatattgcca

SEQ ID NO: 304304 - DNA, 30 bp, Artificial Sequence
  Synthetic oligonucleotide
aaatcacctacgagcggtgcgttattgcca

SEQ ID NO: 304305 - DNA, 30 bp, Artificial Sequence
  Synthetic oligonucleotide
ctcaggtccgtgtgcgggaccaagttgcca

SEQ ID NO: 304306 - DNA, 30 bp, Artificial Sequence
  Synthetic oligonucleotide
ggattaactgagccatattagctgttgcca

SEQ ID NO: 304307 - DNA, 30 bp, Artificial Sequence
  Synthetic oligonucleotide
ggggctaatatggatcaacttcatttgcca

SEQ ID NO: 304308 - DNA, 29 bp, Artificial Sequence
  Synthetic oligonucleotide
gcggagcctctcatgtagtttatttgcca

SEQ ID NO: 304309 - DNA, 30 bp, Artificial Sequence
  Synthetic oligonucleotide
tgcatgcggatgtggttaatggttttgcca

SEQ ID NO: 304310 - DNA, 30 bp, Artificial Sequence
  Synthetic oligonucleotide
ttagagagagccccgcatcgataaaatcca

SEQ ID NO: 304311 - DNA, 30 bp, Artificial Sequence
  Synthetic oligonucleotide
tcatccaactcaaaccgatttccaaatcca

SEQ ID NO: 304312 - DNA, 30 bp, Artificial Sequence
  Synthetic oligonucleotide
agtatgccaaggatgctcgcgggaaatcca

SEQ ID NO: 304313 - DNA, 30 bp, Artificial Sequence
  Synthetic oligonucleotide
gacccgtgctcagcacaattgcagaatcca

SEQ ID NO: 304314 - DNA, 30 bp, Artificial Sequence
  Synthetic oligonucleotide
gttttgtggactgtcaaggaatataatcca

SEQ ID NO: 304315 - DNA, 30 bp, Artificial Sequence
  Synthetic oligonucleotide
ataaccatattctaacaacaatctaatcca

SEQ ID NO: 304316 - DNA, 30 bp, Artificial Sequence
  Synthetic oligonucleotide
gccgtacggatcgaccgtggttgtaatcca

SEQ ID NO: 304317 - DNA, 30 bp, Artificial Sequence
  Synthetic oligonucleotide
atacctacaagtgttcgattcacgcatcca

SEQ ID NO: 304318 - DNA, 30 bp, Artificial Sequence
  Synthetic oligonucleotide
aattcaagagactcacctcgacgcgatcca

SEQ ID NO: 304319 - DNA, 30 bp, Artificial Sequence
  Synthetic oligonucleotide
aaaaatgctctacaggtgggcgcggatcca

SEQ ID NO: 304320 - DNA, 31 bp, Artificial Sequence
  Synthetic oligonucleotide
tagtttacaggcagtagggtcatatgatcca

SEQ ID NO: 304321 - DNA, 30 bp, Artificial Sequence
  Synthetic oligonucleotide
gtaatccccagcccgacctccgttgatcca

SEQ ID NO: 304322 - DNA, 30 bp, Artificial Sequence
  Synthetic oligonucleotide
accaagcagtgactaagtcccacatatcca

SEQ ID NO: 304323 - DNA, 30 bp, Artificial Sequence
  Synthetic oligonucleotide
caggattcaacaagctgttgattatatcca

SEQ ID NO: 304324 - DNA, 30 bp, Artificial Sequence
  Synthetic oligonucleotide
atctggaagcaatagcgcttaggctatcca

SEQ ID NO: 304325 - DNA, 30 bp, Artificial Sequence
  Synthetic oligonucleotide
ggctggcactcggtttctgtggtgtatcca

SEQ ID NO: 304326 - DNA, 30 bp, Artificial Sequence
  Synthetic oligonucleotide
atggtatcaaacaagctgagcgcttatcca

SEQ ID NO: 304327 - DNA, 30 bp, Artificial Sequence
  Synthetic oligonucleotide
ttgtaactgaaccttcatgtttgttatcca

SEQ ID NO: 304328 - DNA, 30 bp, Artificial Sequence
  Synthetic oligonucleotide
atcgtaggaccagacagattggacactcca

SEQ ID NO: 304329 - DNA, 30 bp, Artificial Sequence
  Synthetic oligonucleotide
gatgctactcaagggtgtgcctgcactcca

SEQ ID NO: 304330 - DNA, 30 bp, Artificial Sequence
  Synthetic oligonucleotide
cacataatgttcaaagatatgaaacctcca

SEQ ID NO: 304331 - DNA, 30 bp, Artificial Sequence
  Synthetic oligonucleotide
aaaaagggggaaaagacgaaagtccctcca

SEQ ID NO: 304332 - DNA, 30 bp, Artificial Sequence
  Synthetic oligonucleotide
agaccgttgtcagcccatttagagcctcca

SEQ ID NO: 304333 - DNA, 30 bp, Artificial Sequence
  Synthetic oligonucleotide
tagcacatccgtataggctacattcctcca

SEQ ID NO: 304334 - DNA, 30 bp, Artificial Sequence
  Synthetic oligonucleotide
ccatagacgtgggatggctaaggagctcca

SEQ ID NO: 304335 - DNA, 30 bp, Artificial Sequence
  Synthetic oligonucleotide
agatgtgtcggggaggtgtatcccgctcca

SEQ ID NO: 304336 - DNA, 30 bp, Artificial Sequence
  Synthetic oligonucleotide
cggcaggttttcttggcggaggtggctcca

SEQ ID NO: 304337 - DNA, 30 bp, Artificial Sequence
  Synthetic oligonucleotide
aatagttgaatgtcatcgctccgtgctcca

SEQ ID NO: 304338 - DNA, 30 bp, Artificial Sequence
  Synthetic oligonucleotide
aggataaaacttcctactttgcaatctcca

SEQ ID NO: 304339 - DNA, 30 bp, Artificial Sequence
  Synthetic oligonucleotide
cgtcccgacatcagtcaacttatctctcca

SEQ ID NO: 304340 - DNA, 30 bp, Artificial Sequence
  Synthetic oligonucleotide
cactaccttggacttaaatcgttgtctcca

SEQ ID NO: 304341 - DNA, 30 bp, Artificial Sequence
  Synthetic oligonucleotide
gatgggaattcttactctctatgaagtcca

SEQ ID NO: 304342 - DNA, 30 bp, Artificial Sequence
  Synthetic oligonucleotide
tagtggacgacgtcatgaagcaacagtcca

SEQ ID NO: 304343 - DNA, 30 bp, Artificial Sequence
  Synthetic oligonucleotide
gtgagtctctcaagacaacactcgagtcca

SEQ ID NO: 304344 - DNA, 30 bp, Artificial Sequence
  Synthetic oligonucleotide
tgagttgtggctcccacaaggtttagtcca

SEQ ID NO: 304345 - DNA, 30 bp, Artificial Sequence
  Synthetic oligonucleotide
gatagagaacatgcgagcaggtttagtcca

SEQ ID NO: 304346 - DNA, 30 bp, Artificial Sequence
  Synthetic oligonucleotide
cgaactcggtcccactggaatttccgtcca

SEQ ID NO: 304347 - DNA, 30 bp, Artificial Sequence
  Synthetic oligonucleotide
tctcattcgtcctctatacgtcatcgtcca

SEQ ID NO: 304348 - DNA, 30 bp, Artificial Sequence
  Synthetic oligonucleotide
gtcatgatttgggtcgcaaacactcgtcca

SEQ ID NO: 304349 - DNA, 30 bp, Artificial Sequence
  Synthetic oligonucleotide
acgttaccccaggtgggttttcttcgtcca

SEQ ID NO: 304350 - DNA, 30 bp, Artificial Sequence
  Synthetic oligonucleotide
catgtttgggacatcggaggataaggtcca

SEQ ID NO: 304351 - DNA, 30 bp, Artificial Sequence
  Synthetic oligonucleotide
catttgtgtggatgctagttaacaggtcca

SEQ ID NO: 304352 - DNA, 30 bp, Artificial Sequence
  Synthetic oligonucleotide
gagagaaaagaagttttagctagaggtcca

SEQ ID NO: 304353 - DNA, 30 bp, Artificial Sequence
  Synthetic oligonucleotide
gtgggtcttaaaatcaacccacgaggtcca

SEQ ID NO: 304354 - DNA, 30 bp, Artificial Sequence
  Synthetic oligonucleotide
cataccgagcggaacccgcacatcggtcca

SEQ ID NO: 304355 - DNA, 30 bp, Artificial Sequence
  Synthetic oligonucleotide
gtaattatacatataaagccatggggtcca

SEQ ID NO: 304356 - DNA, 30 bp, Artificial Sequence
  Synthetic oligonucleotide
tattccggaaatgcgatttggtatggtcca

SEQ ID NO: 304357 - DNA, 30 bp, Artificial Sequence
  Synthetic oligonucleotide
gggagctcgttaaagcccgacaaatgtcca

SEQ ID NO: 304358 - DNA, 30 bp, Artificial Sequence
  Synthetic oligonucleotide
catccgcccgaatcgcaattgcaatgtcca

SEQ ID NO: 304359 - DNA, 30 bp, Artificial Sequence
  Synthetic oligonucleotide
taagagggtatactgtgggagacatgtcca

SEQ ID NO: 304360 - DNA, 30 bp, Artificial Sequence
  Synthetic oligonucleotide
acactccaggcggtatatgatacctgtcca

SEQ ID NO: 304361 - DNA, 30 bp, Artificial Sequence
  Synthetic oligonucleotide
agcttggatccgtttaggtacccctgtcca

SEQ ID NO: 304362 - DNA, 31 bp, Artificial Sequence
  Synthetic oligonucleotide
ggctgagacggtaggaagaggattgtgtcca

SEQ ID NO: 304363 - DNA, 30 bp, Artificial Sequence
  Synthetic oligonucleotide
tcggctgcgaagaggcatgtcggttgtcca

SEQ ID NO: 304364 - DNA, 30 bp, Artificial Sequence
  Synthetic oligonucleotide
agtcatgagggggttaactaatgttgtcca

SEQ ID NO: 304365 - DNA, 30 bp, Artificial Sequence
  Synthetic oligonucleotide
tttatcttgataagaaagacgaaaattcca

SEQ ID NO: 304366 - DNA, 30 bp, Artificial Sequence
  Synthetic oligonucleotide
agccggttacagtctttatgactaattcca

SEQ ID NO: 304367 - DNA, 30 bp, Artificial Sequence
  Synthetic oligonucleotide
cgacaatatgtcaacagtccattaattcca

SEQ ID NO: 304368 - DNA, 30 bp, Artificial Sequence
  Synthetic oligonucleotide
caggccggtaattgcaatcgcaacattcca

SEQ ID NO: 304369 - DNA, 30 bp, Artificial Sequence
  Synthetic oligonucleotide
aagaggaattcgataccgcatgtcattcca

SEQ ID NO: 304370 - DNA, 30 bp, Artificial Sequence
  Synthetic oligonucleotide
gtaagcggcagcagagtggctgtcattcca

SEQ ID NO: 304371 - DNA, 30 bp, Artificial Sequence
  Synthetic oligonucleotide
ggggtcaagggatgacatgagatgattcca

SEQ ID NO: 304372 - DNA, 30 bp, Artificial Sequence
  Synthetic oligonucleotide
cccgtggtttgtcattgctacgaacttcca

SEQ ID NO: 304373 - DNA, 30 bp, Artificial Sequence
  Synthetic oligonucleotide
taagatagaatagcgtacatataacttcca

SEQ ID NO: 304374 - DNA, 30 bp, Artificial Sequence
  Synthetic oligonucleotide
catacagccgttggattggcgccacttcca

SEQ ID NO: 304375 - DNA, 30 bp, Artificial Sequence
  Synthetic oligonucleotide
gttctgaggaaccgtgttccagcacttcca

SEQ ID NO: 304376 - DNA, 30 bp, Artificial Sequence
  Synthetic oligonucleotide
acggacgccgagggtaggcagacccttcca

SEQ ID NO: 304377 - DNA, 30 bp, Artificial Sequence
  Synthetic oligonucleotide
agcgatgtcaatgctttactagcgcttcca

SEQ ID NO: 304378 - DNA, 30 bp, Artificial Sequence
  Synthetic oligonucleotide
gttcagcgaaccacgtgttcgtctcttcca

SEQ ID NO: 304379 - DNA, 30 bp, Artificial Sequence
  Synthetic oligonucleotide
aataggaaagtaatatgtaaaagtcttcca

SEQ ID NO: 304380 - DNA, 30 bp, Artificial Sequence
  Synthetic oligonucleotide
gaccaatcttacgacttgatcaaagttcca

SEQ ID NO: 304381 - DNA, 30 bp, Artificial Sequence
  Synthetic oligonucleotide
tttcatcggcaggctggtcgtttagttcca

SEQ ID NO: 304382 - DNA, 30 bp, Artificial Sequence
  Synthetic oligonucleotide
tggcgctattacgtaataagttcggttcca

SEQ ID NO: 304383 - DNA, 26 bp, Artificial Sequence
  Synthetic oligonucleotide
ttgctaagtacccgacgcgtgttcca

SEQ ID NO: 304384 - DNA, 30 bp, Artificial Sequence
  Synthetic oligonucleotide
taatagccttacgtttacccggttgttcca

SEQ ID NO: 304385 - DNA, 30 bp, Artificial Sequence
  Synthetic oligonucleotide
aatcacaacgcgagtagcaatgttgttcca

SEQ ID NO: 304386 - DNA, 30 bp, Artificial Sequence
  Synthetic oligonucleotide
tgaagcataatcataaattgccaatttcca

SEQ ID NO: 304387 - DNA, 30 bp, Artificial Sequence
  Synthetic oligonucleotide
ttaaactgaggcgcggtcacttaatttcca

SEQ ID NO: 304388 - DNA, 30 bp, Artificial Sequence
  Synthetic oligonucleotide
tgaacctaggagggttacccttgatttcca

SEQ ID NO: 304389 - DNA, 30 bp, Artificial Sequence
  Synthetic oligonucleotide
tacgcggtatactgctgaatcgtctttcca

SEQ ID NO: 304390 - DNA, 30 bp, Artificial Sequence
  Synthetic oligonucleotide
tgtgtgcggattgtgggtagctagtttcca

SEQ ID NO: 304391 - DNA, 30 bp, Artificial Sequence
  Synthetic oligonucleotide
taacttctcggaaagtttaggacaaaagca

SEQ ID NO: 304392 - DNA, 30 bp, Artificial Sequence
  Synthetic oligonucleotide
cagaccggatataaagtcttgccaaaagca

SEQ ID NO: 304393 - DNA, 30 bp, Artificial Sequence
  Synthetic oligonucleotide
gagtccgatacctaaatgttaattaaagca

SEQ ID NO: 304394 - DNA, 30 bp, Artificial Sequence
  Synthetic oligonucleotide
ggaatgctgatacaggccatgggccaagca

SEQ ID NO: 304395 - DNA, 30 bp, Artificial Sequence
  Synthetic oligonucleotide
ttgtgggtacgagttgccactctgcaagca

SEQ ID NO: 304396 - DNA, 30 bp, Artificial Sequence
  Synthetic oligonucleotide
atctaatgagtgacttgctaaagtcaagca

SEQ ID NO: 304397 - DNA, 30 bp, Artificial Sequence
  Synthetic oligonucleotide
gaatagtttgctatataagtacgagaagca

SEQ ID NO: 304398 - DNA, 30 bp, Artificial Sequence
  Synthetic oligonucleotide
agtagtttccatggcccgtatccggaagca

SEQ ID NO: 304399 - DNA, 30 bp, Artificial Sequence
  Synthetic oligonucleotide
catcttcggggtttaattcttgtggaagca

SEQ ID NO: 304400 - DNA, 30 bp, Artificial Sequence
  Synthetic oligonucleotide
tagcccccagggagggtggtacctgaagca

SEQ ID NO: 304401 - DNA, 30 bp, Artificial Sequence
  Synthetic oligonucleotide
gtgaatgtaaagttcccatgtcctgaagca

SEQ ID NO: 304402 - DNA, 30 bp, Artificial Sequence
  Synthetic oligonucleotide
gcctaaaggccgcgagtcggacgtgaagca

SEQ ID NO: 304403 - DNA, 30 bp, Artificial Sequence
  Synthetic oligonucleotide
gcgggtcaggtagcatcattgggtgaagca

SEQ ID NO: 304404 - DNA, 30 bp, Artificial Sequence
  Synthetic oligonucleotide
aacgaacgggcctaaagtcatattgaagca

SEQ ID NO: 304405 - DNA, 30 bp, Artificial Sequence
  Synthetic oligonucleotide
gtcgataaagcgggaacttaattataagca

SEQ ID NO: 304406 - DNA, 30 bp, Artificial Sequence
  Synthetic oligonucleotide
atacggtgccgtaccttagcatcgtaagca

SEQ ID NO: 304407 - DNA, 30 bp, Artificial Sequence
  Synthetic oligonucleotide
ccgcggtagatataggttcgaaagacagca

SEQ ID NO: 304408 - DNA, 30 bp, Artificial Sequence
  Synthetic oligonucleotide
cctgcgattacgtttaggtaatatacagca

SEQ ID NO: 304409 - DNA, 30 bp, Artificial Sequence
  Synthetic oligonucleotide
gttcgagtgccaataaaaggtgcgccagca

SEQ ID NO: 304410 - DNA, 30 bp, Artificial Sequence
  Synthetic oligonucleotide
gttatcaaacacggtatgtacggtccagca

SEQ ID NO: 304411 - DNA, 30 bp, Artificial Sequence
  Synthetic oligonucleotide
tttagccgtattgaacaaccttgtccagca

SEQ ID NO: 304412 - DNA, 30 bp, Artificial Sequence
  Synthetic oligonucleotide
agtcgggaatacctcaaacgcgcagcagca

SEQ ID NO: 304413 - DNA, 30 bp, Artificial Sequence
  Synthetic oligonucleotide
tactgaaggctgtgtcataggaccgcagca

SEQ ID NO: 304414 - DNA, 30 bp, Artificial Sequence
  Synthetic oligonucleotide
tcgcgtgcccgtctgtgaagtagcgcagca

SEQ ID NO: 304415 - DNA, 30 bp, Artificial Sequence
  Synthetic oligonucleotide
agctcaagcatgacccgctcagatgcagca

SEQ ID NO: 304416 - DNA, 30 bp, Artificial Sequence
  Synthetic oligonucleotide
actcttaaatctgttagctatagatcagca

SEQ ID NO: 304417 - DNA, 30 bp, Artificial Sequence
  Synthetic oligonucleotide
gagcccgccgcgattaacaagacttcagca

SEQ ID NO: 304418 - DNA, 30 bp, Artificial Sequence
  Synthetic oligonucleotide
ggttccaagtgaggcgggggtggttcagca

SEQ ID NO: 304419 - DNA, 30 bp, Artificial Sequence
  Synthetic oligonucleotide
gctgcaacataagtagtgccacggagagca

SEQ ID NO: 304420 - DNA, 30 bp, Artificial Sequence
  Synthetic oligonucleotide
caccactccagtgtaagctttatgagagca

SEQ ID NO: 304421 - DNA, 30 bp, Artificial Sequence
  Synthetic oligonucleotide
ggttcatcgttggtgcgtttctatagagca

SEQ ID NO: 304422 - DNA, 30 bp, Artificial Sequence
  Synthetic oligonucleotide
gtgccgcagtgtgttggcgggggacgagca

SEQ ID NO: 304423 - DNA, 30 bp, Artificial Sequence
  Synthetic oligonucleotide
aaaaaactgaatgttaaccatgaccgagca

SEQ ID NO: 304424 - DNA, 30 bp, Artificial Sequence
  Synthetic oligonucleotide
ttcacatccatatacagatatcgcggagca

SEQ ID NO: 304425 - DNA, 30 bp, Artificial Sequence
  Synthetic oligonucleotide
gtgttctagaggtggatagctttcggagca

SEQ ID NO: 304426 - DNA, 30 bp, Artificial Sequence
  Synthetic oligonucleotide
aatccgcaattataggtcgaactgggagca

SEQ ID NO: 304427 - DNA, 30 bp, Artificial Sequence
  Synthetic oligonucleotide
atgcgaatatttaatgatgccgctggagca

SEQ ID NO: 304428 - DNA, 30 bp, Artificial Sequence
  Synthetic oligonucleotide
ccctctaacgtacaatccttgtaatgagca

SEQ ID NO: 304429 - DNA, 30 bp, Artificial Sequence
  Synthetic oligonucleotide
gactcaggacatcacgctatcgtatgagca

SEQ ID NO: 304430 - DNA, 30 bp, Artificial Sequence
  Synthetic oligonucleotide
aacctcctgtacagagctaatgactgagca

SEQ ID NO: 304431 - DNA, 30 bp, Artificial Sequence
  Synthetic oligonucleotide
tgatattgcatggtctctgtaaattgagca

SEQ ID NO: 304432 - DNA, 30 bp, Artificial Sequence
  Synthetic oligonucleotide
gtaatgggtactttcttatgacattgagca

SEQ ID NO: 304433 - DNA, 30 bp, Artificial Sequence
  Synthetic oligonucleotide
tagcaccggttctgtaaactggtttgagca

SEQ ID NO: 304434 - DNA, 30 bp, Artificial Sequence
  Synthetic oligonucleotide
ctcgactaatgggactgataaagaatagca

SEQ ID NO: 304435 - DNA, 30 bp, Artificial Sequence
  Synthetic oligonucleotide
gtctgccccccaagtactccgcccatagca

SEQ ID NO: 304436 - DNA, 30 bp, Artificial Sequence
  Synthetic oligonucleotide
ttatttaacggtggtgatgtgaagatagca

SEQ ID NO: 304437 - DNA, 30 bp, Artificial Sequence
  Synthetic oligonucleotide
tgggttcctatattttgggcatggatagca

SEQ ID NO: 304438 - DNA, 30 bp, Artificial Sequence
  Synthetic oligonucleotide
tcctttccacacaccacgttattgatagca

SEQ ID NO: 304439 - DNA, 30 bp, Artificial Sequence
  Synthetic oligonucleotide
agtagatatggagacgtggtcttgatagca

SEQ ID NO: 304440 - DNA, 30 bp, Artificial Sequence
  Synthetic oligonucleotide
gacatgataggggagtgctaacgactagca

SEQ ID NO: 304441 - DNA, 30 bp, Artificial Sequence
  Synthetic oligonucleotide
gtcgcctcgcaaaccccttttgtactagca

SEQ ID NO: 304442 - DNA, 30 bp, Artificial Sequence
  Synthetic oligonucleotide
catcggtacaggcggtcaagcgctctagca

SEQ ID NO: 304443 - DNA, 30 bp, Artificial Sequence
  Synthetic oligonucleotide
tgataaccaatctttaatacatgcgtagca

SEQ ID NO: 304444 - DNA, 30 bp, Artificial Sequence
  Synthetic oligonucleotide
cggaaagtgtgcttctggcctttcgtagca

SEQ ID NO: 304445 - DNA, 30 bp, Artificial Sequence
  Synthetic oligonucleotide
tatgccagctgctgaaatcctttggtagca

SEQ ID NO: 304446 - DNA, 30 bp, Artificial Sequence
  Synthetic oligonucleotide
ggaccattgctaggacaagagatattagca

SEQ ID NO: 304447 - DNA, 30 bp, Artificial Sequence
  Synthetic oligonucleotide
ttcgttactctggacgcacaggacttagca

SEQ ID NO: 304448 - DNA, 30 bp, Artificial Sequence
  Synthetic oligonucleotide
tgtcctaatgagccgcgagtagtcttagca

SEQ ID NO: 304449 - DNA, 30 bp, Artificial Sequence
  Synthetic oligonucleotide
gagcttggacgagtaatcacatagttagca

SEQ ID NO: 304450 - DNA, 30 bp, Artificial Sequence
  Synthetic oligonucleotide
tgccgttagagataggtggctgatttagca

SEQ ID NO: 304451 - DNA, 30 bp, Artificial Sequence
  Synthetic oligonucleotide
cctgaaaccgttagtacatgctatttagca

SEQ ID NO: 304452 - DNA, 30 bp, Artificial Sequence
  Synthetic oligonucleotide
tataggttgctaccggaatcattaaacgca

SEQ ID NO: 304453 - DNA, 30 bp, Artificial Sequence
  Synthetic oligonucleotide
tcaagcgctctgtccgtaatatagaacgca

SEQ ID NO: 304454 - DNA, 30 bp, Artificial Sequence
  Synthetic oligonucleotide
tcaatcaacgagtcactcattggtaacgca

SEQ ID NO: 304455 - DNA, 30 bp, Artificial Sequence
  Synthetic oligonucleotide
ccgcctagatttgtagaggaaattaacgca

SEQ ID NO: 304456 - DNA, 30 bp, Artificial Sequence
  Synthetic oligonucleotide
gtgataatgtcacaacccaatcttaacgca

SEQ ID NO: 304457 - DNA, 30 bp, Artificial Sequence
  Synthetic oligonucleotide
tttacggacacttgaatattggaacacgca

SEQ ID NO: 304458 - DNA, 30 bp, Artificial Sequence
  Synthetic oligonucleotide
tgaggggtcctagcgcactagccacacgca

SEQ ID NO: 304459 - DNA, 30 bp, Artificial Sequence
  Synthetic oligonucleotide
tagagtgcagtggtggggagaggacacgca

SEQ ID NO: 304460 - DNA, 30 bp, Artificial Sequence
  Synthetic oligonucleotide
tgcaagatactagttccgcggatacacgca

SEQ ID NO: 304461 - DNA, 30 bp, Artificial Sequence
  Synthetic oligonucleotide
gcggaggccatagctagcttcgtacacgca

SEQ ID NO: 304462 - DNA, 30 bp, Artificial Sequence
  Synthetic oligonucleotide
tccgacagtatgcgggattgtgtacacgca

SEQ ID NO: 304463 - DNA, 30 bp, Artificial Sequence
  Synthetic oligonucleotide
cggtctggtcgggccctcaacaggcacgca

SEQ ID NO: 304464 - DNA, 30 bp, Artificial Sequence
  Synthetic oligonucleotide
gttagttgaggtttagactgggatcacgca

SEQ ID NO: 304465 - DNA, 30 bp, Artificial Sequence
  Synthetic oligonucleotide
gtacttcatgattgaagaaaaactcacgca

SEQ ID NO: 304466 - DNA, 30 bp, Artificial Sequence
  Synthetic oligonucleotide
aaggatatagtgaagagcaatactcacgca

SEQ ID NO: 304467 - DNA, 30 bp, Artificial Sequence
  Synthetic oligonucleotide
tatcgaacatgtaattcgtgcccggacgca

SEQ ID NO: 304468 - DNA, 30 bp, Artificial Sequence
  Synthetic oligonucleotide
ggcaccaatattcgagctcactcggacgca

SEQ ID NO: 304469 - DNA, 30 bp, Artificial Sequence
  Synthetic oligonucleotide
aactattgtaggggcatggagatggacgca

SEQ ID NO: 304470 - DNA, 30 bp, Artificial Sequence
  Synthetic oligonucleotide
agcgccgcaaataattacgcgcttgacgca

SEQ ID NO: 304471 - DNA, 30 bp, Artificial Sequence
  Synthetic oligonucleotide
tgagcgagtgggatatgtttaaaatacgca

SEQ ID NO: 304472 - DNA, 30 bp, Artificial Sequence
  Synthetic oligonucleotide
ggccaggaacggacactcaggccatacgca

SEQ ID NO: 304473 - DNA, 30 bp, Artificial Sequence
  Synthetic oligonucleotide
gtaaactcccactaacgcttacgatacgca

SEQ ID NO: 304474 - DNA, 30 bp, Artificial Sequence
  Synthetic oligonucleotide
taacattgatagggggcacgtcgatacgca

SEQ ID NO: 304475 - DNA, 30 bp, Artificial Sequence
  Synthetic oligonucleotide
gatgggctagaggaattgtttttctacgca

SEQ ID NO: 304476 - DNA, 30 bp, Artificial Sequence
  Synthetic oligonucleotide
aatacgagaacaaatgattaaacgtacgca

SEQ ID NO: 304477 - DNA, 30 bp, Artificial Sequence
  Synthetic oligonucleotide
tgggacccattcgcgctactcacgtacgca

SEQ ID NO: 304478 - DNA, 30 bp, Artificial Sequence
  Synthetic oligonucleotide
aacgtcagtaccttgaatcatgggtacgca

SEQ ID NO: 304479 - DNA, 30 bp, Artificial Sequence
  Synthetic oligonucleotide
gatcaaagtaggttaaaggacgattacgca

SEQ ID NO: 304480 - DNA, 30 bp, Artificial Sequence
  Synthetic oligonucleotide
gctgcacaaaggtaaccttgtacaaccgca

SEQ ID NO: 304481 - DNA, 30 bp, Artificial Sequence
  Synthetic oligonucleotide
gataggcgtctcagtcagggtgcaaccgca

SEQ ID NO: 304482 - DNA, 30 bp, Artificial Sequence
  Synthetic oligonucleotide
atagggcaccgcagccttagtagcaccgca

SEQ ID NO: 304483 - DNA, 30 bp, Artificial Sequence
  Synthetic oligonucleotide
cgggtggattcgtaattattgcagaccgca

SEQ ID NO: 304484 - DNA, 30 bp, Artificial Sequence
  Synthetic oligonucleotide
ggcgcctgatgtggcaaacatatgaccgca

SEQ ID NO: 304485 - DNA, 30 bp, Artificial Sequence
  Synthetic oligonucleotide
tatttaaaaacacgggtgcgatcacccgca

SEQ ID NO: 304486 - DNA, 30 bp, Artificial Sequence
  Synthetic oligonucleotide
tatgcgtgacccgaagttgatctacccgca

SEQ ID NO: 304487 - DNA, 30 bp, Artificial Sequence
  Synthetic oligonucleotide
gctgttcagaacgaaagctctgggcccgca

SEQ ID NO: 304488 - DNA, 30 bp, Artificial Sequence
  Synthetic oligonucleotide
ctatgtcttatttcccgtcaaggtcccgca

SEQ ID NO: 304489 - DNA, 30 bp, Artificial Sequence
  Synthetic oligonucleotide
ccaaatcataccacggtttaatcagccgca

SEQ ID NO: 304490 - DNA, 30 bp, Artificial Sequence
  Synthetic oligonucleotide
aaaaacacgggaagtagaatgggagccgca

SEQ ID NO: 304491 - DNA, 30 bp, Artificial Sequence
  Synthetic oligonucleotide
cagcatagctgcaatcggcatcgcgccgca

SEQ ID NO: 304492 - DNA, 30 bp, Artificial Sequence
  Synthetic oligonucleotide
tacaaatcgcattcgaccgggttcgccgca

SEQ ID NO: 304493 - DNA, 30 bp, Artificial Sequence
  Synthetic oligonucleotide
tgttcccgggcacattcatggttcgccgca

SEQ ID NO: 304494 - DNA, 30 bp, Artificial Sequence
  Synthetic oligonucleotide
gctgtctccgcgtgcaaatatcaggccgca

SEQ ID NO: 304495 - DNA, 30 bp, Artificial Sequence
  Synthetic oligonucleotide
actagatgttggaccgaaggagctgccgca

SEQ ID NO: 304496 - DNA, 30 bp, Artificial Sequence
  Synthetic oligonucleotide
agatatgacaagatgatcttatctgccgca

SEQ ID NO: 304497 - DNA, 30 bp, Artificial Sequence
  Synthetic oligonucleotide
gtaggtagtttcatacaggcttagtccgca

SEQ ID NO: 304498 - DNA, 30 bp, Artificial Sequence
  Synthetic oligonucleotide
atggacccgtgaggtatgatgggttccgca

SEQ ID NO: 304499 - DNA, 30 bp, Artificial Sequence
  Synthetic oligonucleotide
ctcctggtccccagcggaaggtcaagcgca

SEQ ID NO: 304500 - DNA, 30 bp, Artificial Sequence
  Synthetic oligonucleotide
ggctgtgcttcgatggatttaggaagcgca

SEQ ID NO: 304501 - DNA, 30 bp, Artificial Sequence
  Synthetic oligonucleotide
gatcggccagggggtgtccgggacagcgca

SEQ ID NO: 304502 - DNA, 30 bp, Artificial Sequence
  Synthetic oligonucleotide
cattcaacgtgactagcacgtgcgagcgca

SEQ ID NO: 304503 - DNA, 30 bp, Artificial Sequence
  Synthetic oligonucleotide
agttaatacgcagaatctaaggggagcgca

SEQ ID NO: 304504 - DNA, 30 bp, Artificial Sequence
  Synthetic oligonucleotide
cgatatagcacctcctcagaggatagcgca

SEQ ID NO: 304505 - DNA, 30 bp, Artificial Sequence
  Synthetic oligonucleotide
gaaatctaatagtgggtaccatatagcgca

SEQ ID NO: 304506 - DNA, 30 bp, Artificial Sequence
  Synthetic oligonucleotide
actgttggttaccttaaagtgtctagcgca

SEQ ID NO: 304507 - DNA, 30 bp, Artificial Sequence
  Synthetic oligonucleotide
taaatgacttaatatacctcgcaccgcgca

SEQ ID NO: 304508 - DNA, 30 bp, Artificial Sequence
  Synthetic oligonucleotide
gatcctccctgcaggagccggttccgcgca

SEQ ID NO: 304509 - DNA, 30 bp, Artificial Sequence
  Synthetic oligonucleotide
gcgctgtaccctcgcctcatcgatcgcgca

SEQ ID NO: 304510 - DNA, 30 bp, Artificial Sequence
  Synthetic oligonucleotide
gccctgcccgcgcttagtatcagtcgcgca

SEQ ID NO: 304511 - DNA, 30 bp, Artificial Sequence
  Synthetic oligonucleotide
taatatgccaacccaggtttgtcaggcgca

SEQ ID NO: 304512 - DNA, 30 bp, Artificial Sequence
  Synthetic oligonucleotide
cgcgacccccagataaccattcgaggcgca

SEQ ID NO: 304513 - DNA, 30 bp, Artificial Sequence
  Synthetic oligonucleotide
gccgctcatcaggcgattgaaaacggcgca

SEQ ID NO: 304514 - DNA, 30 bp, Artificial Sequence
  Synthetic oligonucleotide
cgaattcaacgggagaccacaggtggcgca

SEQ ID NO: 304515 - DNA, 30 bp, Artificial Sequence
  Synthetic oligonucleotide
ggtgggaaagatggttttattcaatgcgca

SEQ ID NO: 304516 - DNA, 30 bp, Artificial Sequence
  Synthetic oligonucleotide
caccaatataaggggcagccatcctgcgca

SEQ ID NO: 304517 - DNA, 30 bp, Artificial Sequence
  Synthetic oligonucleotide
aataaaatggttacacaggttgcgtgcgca

SEQ ID NO: 304518 - DNA, 30 bp, Artificial Sequence
  Synthetic oligonucleotide
attggttgcttttcgtgctttccaatcgca

SEQ ID NO: 304519 - DNA, 30 bp, Artificial Sequence
  Synthetic oligonucleotide
ggcacatggcatgtgctgtagtacatcgca

SEQ ID NO: 304520 - DNA, 30 bp, Artificial Sequence
  Synthetic oligonucleotide
gatataaacgaaagcatggttggcatcgca

SEQ ID NO: 304521 - DNA, 30 bp, Artificial Sequence
  Synthetic oligonucleotide
agtgtaaaacgattcgaatataggatcgca

SEQ ID NO: 304522 - DNA, 30 bp, Artificial Sequence
  Synthetic oligonucleotide
gcccacttttgtgtcaacggcaatatcgca

SEQ ID NO: 304523 - DNA, 30 bp, Artificial Sequence
  Synthetic oligonucleotide
ggccaatctaggactccccgttatatcgca

SEQ ID NO: 304524 - DNA, 31 bp, Artificial Sequence
  Synthetic oligonucleotide
ttaatcgacatcttgatagggggttatcgca

SEQ ID NO: 304525 - DNA, 30 bp, Artificial Sequence
  Synthetic oligonucleotide
gggtgagagtcaagtactatacaactcgca

SEQ ID NO: 304526 - DNA, 30 bp, Artificial Sequence
  Synthetic oligonucleotide
cctcgatataggatttctctgtccctcgca

SEQ ID NO: 304527 - DNA, 30 bp, Artificial Sequence
  Synthetic oligonucleotide
tcctcgcacaatggagcaaggcagctcgca

SEQ ID NO: 304528 - DNA, 30 bp, Artificial Sequence
  Synthetic oligonucleotide
ttgtttaaacgggcgtgggtttctctcgca

SEQ ID NO: 304529 - DNA, 30 bp, Artificial Sequence
  Synthetic oligonucleotide
gcccatcaggtgtaatgacgtattctcgca

SEQ ID NO: 304530 - DNA, 30 bp, Artificial Sequence
  Synthetic oligonucleotide
ggacgtgtgttcgaccgttagcttctcgca

SEQ ID NO: 304531 - DNA, 30 bp, Artificial Sequence
  Synthetic oligonucleotide
aaggtgctaacctcgtaggttagagtcgca

SEQ ID NO: 304532 - DNA, 30 bp, Artificial Sequence
  Synthetic oligonucleotide
tatgtcaaacggcgccatttttccgtcgca

SEQ ID NO: 304533 - DNA, 30 bp, Artificial Sequence
  Synthetic oligonucleotide
ctaactcagttgcaccttgcgccggtcgca

SEQ ID NO: 304534 - DNA, 29 bp, Artificial Sequence
  Synthetic oligonucleotide
gtcatggcatagcttacaattctgtcgca

SEQ ID NO: 304535 - DNA, 30 bp, Artificial Sequence
  Synthetic oligonucleotide
ccagtgatacttggattagcggtgttcgca

SEQ ID NO: 304536 - DNA, 30 bp, Artificial Sequence
  Synthetic oligonucleotide
tctcagcaactgtcgattctgattttcgca

SEQ ID NO: 304537 - DNA, 30 bp, Artificial Sequence
  Synthetic oligonucleotide
caatcatggtttatgagggcctcaaaggca

SEQ ID NO: 304538 - DNA, 30 bp, Artificial Sequence
  Synthetic oligonucleotide
gggagtagagtcgtacatccttgaaaggca

SEQ ID NO: 304539 - DNA, 30 bp, Artificial Sequence
  Synthetic oligonucleotide
aagcataccacacggcgctcggagaaggca

SEQ ID NO: 304540 - DNA, 30 bp, Artificial Sequence
  Synthetic oligonucleotide
atcccttgaatgccggtcgatgagaaggca

SEQ ID NO: 304541 - DNA, 30 bp, Artificial Sequence
  Synthetic oligonucleotide
ccagtatctgcctgatatacttcgaaggca

SEQ ID NO: 304542 - DNA, 30 bp, Artificial Sequence
  Synthetic oligonucleotide
acaagtgatgcctattgacgatggaaggca

SEQ ID NO: 304543 - DNA, 30 bp, Artificial Sequence
  Synthetic oligonucleotide
taaaggttgctccctttaccatataaggca

SEQ ID NO: 304544 - DNA, 30 bp, Artificial Sequence
  Synthetic oligonucleotide
aaccggatcatacacgccatcgcacaggca

SEQ ID NO: 304545 - DNA, 30 bp, Artificial Sequence
  Synthetic oligonucleotide
agacacagccgcaagcgccgtatacaggca

SEQ ID NO: 304546 - DNA, 30 bp, Artificial Sequence
  Synthetic oligonucleotide
cacatgcagtcaaggtttcaaaaccaggca

SEQ ID NO: 304547 - DNA, 30 bp, Artificial Sequence
  Synthetic oligonucleotide
taccccaaggggaacgcatcaacccaggca

SEQ ID NO: 304548 - DNA, 30 bp, Artificial Sequence
  Synthetic oligonucleotide
tagcctctatgtgttgggagcagccaggca

SEQ ID NO: 304549 - DNA, 30 bp, Artificial Sequence
  Synthetic oligonucleotide
caccgacctccagaaatttctggccaggca

SEQ ID NO: 304550 - DNA, 30 bp, Artificial Sequence
  Synthetic oligonucleotide
atctgccggtcgacatttgccttccaggca

SEQ ID NO: 304551 - DNA, 30 bp, Artificial Sequence
  Synthetic oligonucleotide
actccgagtaatcccttataaacgcaggca

SEQ ID NO: 304552 - DNA, 30 bp, Artificial Sequence
  Synthetic oligonucleotide
gctgtagacccgtgctaatcgaggcaggca

SEQ ID NO: 304553 - DNA, 30 bp, Artificial Sequence
  Synthetic oligonucleotide
ttgcaccggactggacgcctgcggcaggca

SEQ ID NO: 304554 - DNA, 30 bp, Artificial Sequence
  Synthetic oligonucleotide
agagcctgaatgcctcaaatagtgcaggca

SEQ ID NO: 304555 - DNA, 30 bp, Artificial Sequence
  Synthetic oligonucleotide
tgatctgggcaagtgacggttcctcaggca

SEQ ID NO: 304556 - DNA, 30 bp, Artificial Sequence
  Synthetic oligonucleotide
cggtgttctgtgacagacatgtctcaggca

SEQ ID NO: 304557 - DNA, 30 bp, Artificial Sequence
  Synthetic oligonucleotide
tgataattattggaggtgaaggtagaggca

SEQ ID NO: 304558 - DNA, 30 bp, Artificial Sequence
  Synthetic oligonucleotide
aattactcaccaataatgggcaaggaggca

SEQ ID NO: 304559 - DNA, 30 bp, Artificial Sequence
  Synthetic oligonucleotide
ttgccgcacaaacacatttgcccggaggca

SEQ ID NO: 304560 - DNA, 30 bp, Artificial Sequence
  Synthetic oligonucleotide
gtaacgcatgcgacgctactcagggaggca

SEQ ID NO: 304561 - DNA, 30 bp, Artificial Sequence
  Synthetic oligonucleotide
cagatcaactggggagcgctgggtgaggca

SEQ ID NO: 304562 - DNA, 30 bp, Artificial Sequence
  Synthetic oligonucleotide
gtgaatgtttatggagcagagtaataggca

SEQ ID NO: 304563 - DNA, 30 bp, Artificial Sequence
  Synthetic oligonucleotide
attcgcatacaagctgtcgatacataggca

SEQ ID NO: 304564 - DNA, 30 bp, Artificial Sequence
  Synthetic oligonucleotide
gaacctgccgacaaatccatattataggca

SEQ ID NO: 304565 - DNA, 30 bp, Artificial Sequence
  Synthetic oligonucleotide
gccgatatggatgctgcggtatactaggca

SEQ ID NO: 304566 - DNA, 30 bp, Artificial Sequence
  Synthetic oligonucleotide
gtcgagtttcgcgggttgttatactaggca

SEQ ID NO: 304567 - DNA, 30 bp, Artificial Sequence
  Synthetic oligonucleotide
aacacgaccgcgttgggagtccggtaggca

SEQ ID NO: 304568 - DNA, 30 bp, Artificial Sequence
  Synthetic oligonucleotide
aagaaacccgaccgagttgcattaacggca

SEQ ID NO: 304569 - DNA, 30 bp, Artificial Sequence
  Synthetic oligonucleotide
acaggcgtcataatgttttccttaacggca

SEQ ID NO: 304570 - DNA, 30 bp, Artificial Sequence
  Synthetic oligonucleotide
ggatatgcggtgttatctccagtgacggca

SEQ ID NO: 304571 - DNA, 30 bp, Artificial Sequence
  Synthetic oligonucleotide
tattgactacgcagaggtgacttgacggca

SEQ ID NO: 304572 - DNA, 30 bp, Artificial Sequence
  Synthetic oligonucleotide
catgcgttaatttttggtgttgatacggca

SEQ ID NO: 304573 - DNA, 30 bp, Artificial Sequence
  Synthetic oligonucleotide
ttgcctgcagcacacaaaggtcctacggca

SEQ ID NO: 304574 - DNA, 30 bp, Artificial Sequence
  Synthetic oligonucleotide
actccagatgctaataattgcgttacggca

SEQ ID NO: 304575 - DNA, 30 bp, Artificial Sequence
  Synthetic oligonucleotide
cagctagccaggagttacgacaccccggca

SEQ ID NO: 304576 - DNA, 30 bp, Artificial Sequence
  Synthetic oligonucleotide
agttagataaaggtttgcctcgagccggca

SEQ ID NO: 304577 - DNA, 30 bp, Artificial Sequence
  Synthetic oligonucleotide
ttgggtaaaaatgtcactaaaatgccggca

SEQ ID NO: 304578 - DNA, 30 bp, Artificial Sequence
  Synthetic oligonucleotide
ctaaaggtgcgtgggcatggctcagcggca

SEQ ID NO: 304579 - DNA, 30 bp, Artificial Sequence
  Synthetic oligonucleotide
ggagcgatgtccagaataatgggagcggca

SEQ ID NO: 304580 - DNA, 31 bp, Artificial Sequence
  Synthetic oligonucleotide
acgtacgtatacaatgagcgctttagcggca

SEQ ID NO: 304581 - DNA, 30 bp, Artificial Sequence
  Synthetic oligonucleotide
aaccaatagtgggtctacagttacgcggca

SEQ ID NO: 304582 - DNA, 30 bp, Artificial Sequence
  Synthetic oligonucleotide
tgctgaaatccctttcagcccggcgcggca

SEQ ID NO: 304583 - DNA, 30 bp, Artificial Sequence
  Synthetic oligonucleotide
cgaagtggtcggttggtcctattcgcggca

SEQ ID NO: 304584 - DNA, 30 bp, Artificial Sequence
  Synthetic oligonucleotide
caggggccatccttgcgttggtttgcggca

SEQ ID NO: 304585 - DNA, 30 bp, Artificial Sequence
  Synthetic oligonucleotide
tatgaataaatctcccaacacaaatcggca

SEQ ID NO: 304586 - DNA, 30 bp, Artificial Sequence
  Synthetic oligonucleotide
cattatatgaattcattgcgatcaagggca

SEQ ID NO: 304587 - DNA, 30 bp, Artificial Sequence
  Synthetic oligonucleotide
tagacgcgtttgagcccgtaatgaagggca

SEQ ID NO: 304588 - DNA, 30 bp, Artificial Sequence
  Synthetic oligonucleotide
tgggtgtttatagtagggaggcacagggca

SEQ ID NO: 304589 - DNA, 30 bp, Artificial Sequence
  Synthetic oligonucleotide
ttcgtattgggcgacttgatactcagggca

SEQ ID NO: 304590 - DNA, 30 bp, Artificial Sequence
  Synthetic oligonucleotide
caacagaagaaaaaacggatagaacgggca

SEQ ID NO: 304591 - DNA, 30 bp, Artificial Sequence
  Synthetic oligonucleotide
gaggatgaggcccgcaagtgataacgggca

SEQ ID NO: 304592 - DNA, 30 bp, Artificial Sequence
  Synthetic oligonucleotide
aatttattggctgaaaccagatcacgggca

SEQ ID NO: 304593 - DNA, 30 bp, Artificial Sequence
  Synthetic oligonucleotide
ttgtaccgatttttggttccgcgacgggca

SEQ ID NO: 304594 - DNA, 30 bp, Artificial Sequence
  Synthetic oligonucleotide
tggtatattacgcgaagagctctacgggca

SEQ ID NO: 304595 - DNA, 30 bp, Artificial Sequence
  Synthetic oligonucleotide
ttcgggctcgatatggaatttaaccgggca

SEQ ID NO: 304596 - DNA, 30 bp, Artificial Sequence
  Synthetic oligonucleotide
tactatcataaagcgtcacctttccgggca

SEQ ID NO: 304597 - DNA, 30 bp, Artificial Sequence
  Synthetic oligonucleotide
agattagcttgcataatgactaagcgggca

SEQ ID NO: 304598 - DNA, 30 bp, Artificial Sequence
  Synthetic oligonucleotide
gggttacatttgtgttgcctacagcgggca

SEQ ID NO: 304599 - DNA, 30 bp, Artificial Sequence
  Synthetic oligonucleotide
ggcgttagccatggtgctggggggcgggca

SEQ ID NO: 304600 - DNA, 31 bp, Artificial Sequence
  Synthetic oligonucleotide
ggtatcaggctgcccatgggaaattcgggca

SEQ ID NO: 304601 - DNA, 30 bp, Artificial Sequence
  Synthetic oligonucleotide
ggataccgcgttagtctataacttcgggca

SEQ ID NO: 304602 - DNA, 30 bp, Artificial Sequence
  Synthetic oligonucleotide
acgaaggcgcaaaaggtgcggaaaggggca

SEQ ID NO: 304603 - DNA, 30 bp, Artificial Sequence
  Synthetic oligonucleotide
cacagctttagcatgccgtaaacaggggca

SEQ ID NO: 304604 - DNA, 30 bp, Artificial Sequence
  Synthetic oligonucleotide
aacttaattacgggaaacaacgcaggggca

SEQ ID NO: 304605 - DNA, 30 bp, Artificial Sequence
  Synthetic oligonucleotide
tacgtcttagtggtaagcttatcaggggca

SEQ ID NO: 304606 - DNA, 30 bp, Artificial Sequence
  Synthetic oligonucleotide
gatgctcactgggtcgtatcggacggggca

SEQ ID NO: 304607 - DNA, 30 bp, Artificial Sequence
  Synthetic oligonucleotide
actgtggatggataatggggtaccggggca

SEQ ID NO: 304608 - DNA, 30 bp, Artificial Sequence
  Synthetic oligonucleotide
taacgctggatatataatctctccggggca

SEQ ID NO: 304609 - DNA, 30 bp, Artificial Sequence
  Synthetic oligonucleotide
acaggagtatccaggaggccgcagggggca

SEQ ID NO: 304610 - DNA, 30 bp, Artificial Sequence
  Synthetic oligonucleotide
aatcgagagctaaatattttcgagggggca

SEQ ID NO: 304611 - DNA, 30 bp, Artificial Sequence
  Synthetic oligonucleotide
acggttgcaggaatttggacgttgggggca

SEQ ID NO: 304612 - DNA, 30 bp, Artificial Sequence
  Synthetic oligonucleotide
aggagtggtgctaatatagtgtatggggca

SEQ ID NO: 304613 - DNA, 30 bp, Artificial Sequence
  Synthetic oligonucleotide
gttctgcctacgccgactactattggggca

SEQ ID NO: 304614 - DNA, 30 bp, Artificial Sequence
  Synthetic oligonucleotide
gaatgtcagccctcattaaatacatgggca

SEQ ID NO: 304615 - DNA, 30 bp, Artificial Sequence
  Synthetic oligonucleotide
gaacattgtggtagtaggcggctatgggca

SEQ ID NO: 304616 - DNA, 30 bp, Artificial Sequence
  Synthetic oligonucleotide
cttggctggtaatggaactccagctgggca

SEQ ID NO: 304617 - DNA, 30 bp, Artificial Sequence
  Synthetic oligonucleotide
tacgatgcgctaggatccacaaagtgggca

SEQ ID NO: 304618 - DNA, 30 bp, Artificial Sequence
  Synthetic oligonucleotide
ggttcttcgagcgtggtgatccagtgggca

SEQ ID NO: 304619 - DNA, 30 bp, Artificial Sequence
  Synthetic oligonucleotide
tgggagggtgtgtttagtgtcggttgggca

SEQ ID NO: 304620 - DNA, 30 bp, Artificial Sequence
  Synthetic oligonucleotide
atgttgagcggggaccagttaaaaatggca

SEQ ID NO: 304621 - DNA, 30 bp, Artificial Sequence
  Synthetic oligonucleotide
tcggcactggccttaatctttctaatggca

SEQ ID NO: 304622 - DNA, 31 bp, Artificial Sequence
  Synthetic oligonucleotide
gccatggcatgcagctagttgcgtaatggca

SEQ ID NO: 304623 - DNA, 30 bp, Artificial Sequence
  Synthetic oligonucleotide
ggggaatcagcgatatgccatcgcatggca

SEQ ID NO: 304624 - DNA, 30 bp, Artificial Sequence
  Synthetic oligonucleotide
gctaagtcataagtaattggtttcatggca

SEQ ID NO: 304625 - DNA, 30 bp, Artificial Sequence
  Synthetic oligonucleotide
aagacgttgacaccaggccggaggatggca

SEQ ID NO: 304626 - DNA, 31 bp, Artificial Sequence
  Synthetic oligonucleotide
acgatgaggtccaactgctagttttatggca

SEQ ID NO: 304627 - DNA, 30 bp, Artificial Sequence
  Synthetic oligonucleotide
tacttgtttgcgtgaagcgtaatactggca

SEQ ID NO: 304628 - DNA, 30 bp, Artificial Sequence
  Synthetic oligonucleotide
tggccctcggcaatggattccccgctggca

SEQ ID NO: 304629 - DNA, 30 bp, Artificial Sequence
  Synthetic oligonucleotide
ctacaaccgtcatggaatcgtcggctggca

SEQ ID NO: 304630 - DNA, 30 bp, Artificial Sequence
  Synthetic oligonucleotide
tggcggggtaattctcactaggggctggca

SEQ ID NO: 304631 - DNA, 30 bp, Artificial Sequence
  Synthetic oligonucleotide
agagagtgttgatggtgcaccccagtggca

SEQ ID NO: 304632 - DNA, 30 bp, Artificial Sequence
  Synthetic oligonucleotide
aaagagacggactggcagctaagagtggca

SEQ ID NO: 304633 - DNA, 30 bp, Artificial Sequence
  Synthetic oligonucleotide
ctgtccctaggtgaagggtaagcggtggca

SEQ ID NO: 304634 - DNA, 30 bp, Artificial Sequence
  Synthetic oligonucleotide
caagcacaggcgggcaatccccgggtggca

SEQ ID NO: 304635 - DNA, 30 bp, Artificial Sequence
  Synthetic oligonucleotide
taatagaaagattgccagtgggtggtggca

SEQ ID NO: 304636 - DNA, 30 bp, Artificial Sequence
  Synthetic oligonucleotide
gtttatctcgccactatcgttcgattggca

SEQ ID NO: 304637 - DNA, 30 bp, Artificial Sequence
  Synthetic oligonucleotide
atacaatggccactggtctatggattggca

SEQ ID NO: 304638 - DNA, 30 bp, Artificial Sequence
  Synthetic oligonucleotide
taaatcggtcccgagactttcgacttggca

SEQ ID NO: 304639 - DNA, 30 bp, Artificial Sequence
  Synthetic oligonucleotide
cgtgaggaagcggggtcccgaaccttggca

SEQ ID NO: 304640 - DNA, 30 bp, Artificial Sequence
  Synthetic oligonucleotide
agcctacgtaagagtgattcttccttggca

SEQ ID NO: 304641 - DNA, 30 bp, Artificial Sequence
  Synthetic oligonucleotide
aagtgccaacgccctcatcctggcttggca

SEQ ID NO: 304642 - DNA, 30 bp, Artificial Sequence
  Synthetic oligonucleotide
tcaattctgggtccccgttgatggttggca

SEQ ID NO: 304643 - DNA, 30 bp, Artificial Sequence
  Synthetic oligonucleotide
aaccgtttgaaaccgtaaaccgtgttggca

SEQ ID NO: 304644 - DNA, 30 bp, Artificial Sequence
  Synthetic oligonucleotide
acacagaatctcgtcgtgagatatttggca

SEQ ID NO: 304645 - DNA, 30 bp, Artificial Sequence
  Synthetic oligonucleotide
aacaggtttagatgtccaagctgaaatgca

SEQ ID NO: 304646 - DNA, 30 bp, Artificial Sequence
  Synthetic oligonucleotide
taggataccaattaggtacctctaaatgca

SEQ ID NO: 304647 - DNA, 30 bp, Artificial Sequence
  Synthetic oligonucleotide
ccctgatgcgtacccgaaggggtaaatgca

SEQ ID NO: 304648 - DNA, 30 bp, Artificial Sequence
  Synthetic oligonucleotide
taggtttaacagtgaggttggggcaatgca

SEQ ID NO: 304649 - DNA, 30 bp, Artificial Sequence
  Synthetic oligonucleotide
gatttgggcggaccggtcagagttaatgca

SEQ ID NO: 304650 - DNA, 30 bp, Artificial Sequence
  Synthetic oligonucleotide
ctggcaacataaagacgccctatacatgca

SEQ ID NO: 304651 - DNA, 30 bp, Artificial Sequence
  Synthetic oligonucleotide
agtgcaaattaatcggttgcttcccatgca

SEQ ID NO: 304652 - DNA, 30 bp, Artificial Sequence
  Synthetic oligonucleotide
atcatagcgtaggatgtaaagaatcatgca

SEQ ID NO: 304653 - DNA, 30 bp, Artificial Sequence
  Synthetic oligonucleotide
cacataagccaggtccgttacctagatgca

SEQ ID NO: 304654 - DNA, 30 bp, Artificial Sequence
  Synthetic oligonucleotide
cataaacccagagaaggctacttagatgca

SEQ ID NO: 304655 - DNA, 30 bp, Artificial Sequence
  Synthetic oligonucleotide
actgtattgggagaccaaccgttggatgca

SEQ ID NO: 304656 - DNA, 30 bp, Artificial Sequence
  Synthetic oligonucleotide
tgggcttcggccaagatcaccagtgatgca

SEQ ID NO: 304657 - DNA, 30 bp, Artificial Sequence
  Synthetic oligonucleotide
tggtgcccctccaagactcggacgtatgca

SEQ ID NO: 304658 - DNA, 30 bp, Artificial Sequence
  Synthetic oligonucleotide
aatattaaatacggctagggaacttatgca

SEQ ID NO: 304659 - DNA, 30 bp, Artificial Sequence
  Synthetic oligonucleotide
tccgggcaaccggtttcttacgcaactgca

SEQ ID NO: 304660 - DNA, 30 bp, Artificial Sequence
  Synthetic oligonucleotide
cgtggcatcgtagtaggttcatcaactgca

SEQ ID NO: 304661 - DNA, 30 bp, Artificial Sequence
  Synthetic oligonucleotide
aaataagccgtaggggagtcacgaactgca

SEQ ID NO: 304662 - DNA, 30 bp, Artificial Sequence
  Synthetic oligonucleotide
tattcaaaatgattacttagggccactgca

SEQ ID NO: 304663 - DNA, 30 bp, Artificial Sequence
  Synthetic oligonucleotide
tattagccaacgattagaaggggcactgca

SEQ ID NO: 304664 - DNA, 30 bp, Artificial Sequence
  Synthetic oligonucleotide
gagataacatcaaattgtaccctcactgca

SEQ ID NO: 304665 - DNA, 30 bp, Artificial Sequence
  Synthetic oligonucleotide
gattaactattcaagataatccttactgca

SEQ ID NO: 304666 - DNA, 30 bp, Artificial Sequence
  Synthetic oligonucleotide
acgactcattctcgatgtatctttactgca

SEQ ID NO: 304667 - DNA, 30 bp, Artificial Sequence
  Synthetic oligonucleotide
agaagttcaacaagtgatccggcacctgca

SEQ ID NO: 304668 - DNA, 30 bp, Artificial Sequence
  Synthetic oligonucleotide
tatacaagttaaggtacagctccgcctgca

SEQ ID NO: 304669 - DNA, 30 bp, Artificial Sequence
  Synthetic oligonucleotide
tccggtataacggtaaagtggctgcctgca

SEQ ID NO: 304670 - DNA, 30 bp, Artificial Sequence
  Synthetic oligonucleotide
tactaattcatgggtgacagtgaggctgca

SEQ ID NO: 304671 - DNA, 30 bp, Artificial Sequence
  Synthetic oligonucleotide
aatgttctagtgccgaatacttggtctgca

SEQ ID NO: 304672 - DNA, 30 bp, Artificial Sequence
  Synthetic oligonucleotide
cactgtctaaccattggctgtcaaagtgca

SEQ ID NO: 304673 - DNA, 30 bp, Artificial Sequence
  Synthetic oligonucleotide
gttcttaattgaggtacaattcaaagtgca

SEQ ID NO: 304674 - DNA, 30 bp, Artificial Sequence
  Synthetic oligonucleotide
cagatataggatatgcctcgtacaagtgca

SEQ ID NO: 304675 - DNA, 30 bp, Artificial Sequence
  Synthetic oligonucleotide
ttcggtggtctaacatcacgttcaagtgca

SEQ ID NO: 304676 - DNA, 30 bp, Artificial Sequence
  Synthetic oligonucleotide
catccaaccccgcgcctaagcagtagtgca

SEQ ID NO: 304677 - DNA, 30 bp, Artificial Sequence
  Synthetic oligonucleotide
cgtaggtccagcccttctgttaaacgtgca

SEQ ID NO: 304678 - DNA, 30 bp, Artificial Sequence
  Synthetic oligonucleotide
cgtcaagctcgcatattctttgaacgtgca

SEQ ID NO: 304679 - DNA, 30 bp, Artificial Sequence
  Synthetic oligonucleotide
cgggagtgctcagccgcttgggtacgtgca

SEQ ID NO: 304680 - DNA, 30 bp, Artificial Sequence
  Synthetic oligonucleotide
gtttgtattgtgacgtcagatcgccgtgca

SEQ ID NO: 304681 - DNA, 30 bp, Artificial Sequence
  Synthetic oligonucleotide
ggccaagtagatgtcacagattgccgtgca

SEQ ID NO: 304682 - DNA, 30 bp, Artificial Sequence
  Synthetic oligonucleotide
cattaccttcttgttgaagagattcgtgca

SEQ ID NO: 304683 - DNA, 30 bp, Artificial Sequence
  Synthetic oligonucleotide
tcagtagtcgtagaacagtatgttcgtgca

SEQ ID NO: 304684 - DNA, 30 bp, Artificial Sequence
  Synthetic oligonucleotide
tatgggacgcatttgtactccggaggtgca

SEQ ID NO: 304685 - DNA, 30 bp, Artificial Sequence
  Synthetic oligonucleotide
cattaaaggcctctacggggccacggtgca

SEQ ID NO: 304686 - DNA, 30 bp, Artificial Sequence
  Synthetic oligonucleotide
cgcccttaacgataaatatataccggtgca

SEQ ID NO: 304687 - DNA, 30 bp, Artificial Sequence
  Synthetic oligonucleotide
gtggggcaatgggcgctccagccgggtgca

SEQ ID NO: 304688 - DNA, 30 bp, Artificial Sequence
  Synthetic oligonucleotide
ataacggtggacgctgaccgttcgggtgca

SEQ ID NO: 304689 - DNA, 30 bp, Artificial Sequence
  Synthetic oligonucleotide
cagatttattggcagttcccaaggggtgca

SEQ ID NO: 304690 - DNA, 30 bp, Artificial Sequence
  Synthetic oligonucleotide
tcttcatgtgtagtgatacaggggggtgca

SEQ ID NO: 304691 - DNA, 30 bp, Artificial Sequence
  Synthetic oligonucleotide
tataccaggccagactatggttggggtgca

SEQ ID NO: 304692 - DNA, 30 bp, Artificial Sequence
  Synthetic oligonucleotide
tgctccgcgcgatagatcctccgtggtgca

SEQ ID NO: 304693 - DNA, 30 bp, Artificial Sequence
  Synthetic oligonucleotide
catatgtgcggggttggctcgtaatgtgca

SEQ ID NO: 304694 - DNA, 30 bp, Artificial Sequence
  Synthetic oligonucleotide
ggctgcgaataagactttggaccgtgtgca

SEQ ID NO: 304695 - DNA, 30 bp, Artificial Sequence
  Synthetic oligonucleotide
ttagtccggtgttcaaaaggggcgtgtgca

SEQ ID NO: 304696 - DNA, 30 bp, Artificial Sequence
  Synthetic oligonucleotide
agcacctggcacacttcatgatattgtgca

SEQ ID NO: 304697 - DNA, 30 bp, Artificial Sequence
  Synthetic oligonucleotide
cacacgacgtcgtagtgctcctcttgtgca

SEQ ID NO: 304698 - DNA, 30 bp, Artificial Sequence
  Synthetic oligonucleotide
agactcaagtatgttgaaaatgtaattgca

SEQ ID NO: 304699 - DNA, 30 bp, Artificial Sequence
  Synthetic oligonucleotide
ggcatcctctgttattccgttaagattgca

SEQ ID NO: 304700 - DNA, 30 bp, Artificial Sequence
  Synthetic oligonucleotide
ggttgggggtgaaaggtctaagctattgca

SEQ ID NO: 304701 - DNA, 30 bp, Artificial Sequence
  Synthetic oligonucleotide
tagctgtcaatgaaaccatgttgtattgca

SEQ ID NO: 304702 - DNA, 30 bp, Artificial Sequence
  Synthetic oligonucleotide
caaggacgcctttcgtttgagtgacttgca

SEQ ID NO: 304703 - DNA, 30 bp, Artificial Sequence
  Synthetic oligonucleotide
tctcgttacacgtcttctatacgccttgca

SEQ ID NO: 304704 - DNA, 30 bp, Artificial Sequence
  Synthetic oligonucleotide
tgacctctcatggtggggttaactcttgca

SEQ ID NO: 304705 - DNA, 30 bp, Artificial Sequence
  Synthetic oligonucleotide
aatataaaaatgagggaactcatagttgca

SEQ ID NO: 304706 - DNA, 30 bp, Artificial Sequence
  Synthetic oligonucleotide
tagcgtttattcatggtaggatccgttgca

SEQ ID NO: 304707 - DNA, 30 bp, Artificial Sequence
  Synthetic oligonucleotide
aatcacggggagcgcttataagcggttgca

SEQ ID NO: 304708 - DNA, 30 bp, Artificial Sequence
  Synthetic oligonucleotide
aggccttctaccgtataggatgcatttgca

SEQ ID NO: 304709 - DNA, 30 bp, Artificial Sequence
  Synthetic oligonucleotide
gctttagggtgctagtttaagttatttgca

SEQ ID NO: 304710 - DNA, 30 bp, Artificial Sequence
  Synthetic oligonucleotide
ggcttgttgcagccggttgagccgtttgca

SEQ ID NO: 304711 - DNA, 30 bp, Artificial Sequence
  Synthetic oligonucleotide
gatatcgtggcgctctagtggaggtttgca

SEQ ID NO: 304712 - DNA, 30 bp, Artificial Sequence
  Synthetic oligonucleotide
actcccggccccgaaacaatcttgtttgca

SEQ ID NO: 304713 - DNA, 30 bp, Artificial Sequence
  Synthetic oligonucleotide
tctggagggaacatccacccggattttgca

SEQ ID NO: 304714 - DNA, 30 bp, Artificial Sequence
  Synthetic oligonucleotide
aaaccgtgtgggcactaggatccttttgca

SEQ ID NO: 304715 - DNA, 30 bp, Artificial Sequence
  Synthetic oligonucleotide
catggtactggtaaatgatgaataaaatca

SEQ ID NO: 304716 - DNA, 30 bp, Artificial Sequence
  Synthetic oligonucleotide
tggcagttttaaaatgacccgataaaatca

SEQ ID NO: 304717 - DNA, 30 bp, Artificial Sequence
  Synthetic oligonucleotide
gtcacgtaggggatcccaaagttaaaatca

SEQ ID NO: 304718 - DNA, 30 bp, Artificial Sequence
  Synthetic oligonucleotide
gacattaggtacacacgcaataagaaatca

SEQ ID NO: 304719 - DNA, 30 bp, Artificial Sequence
  Synthetic oligonucleotide
ttaacaaacgcaaggatgacccaccaatca

SEQ ID NO: 304720 - DNA, 30 bp, Artificial Sequence
  Synthetic oligonucleotide
acgaggccccttgcgtttggggtccaatca

SEQ ID NO: 304721 - DNA, 30 bp, Artificial Sequence
  Synthetic oligonucleotide
tttcccgcagccggtgcgaccttccaatca

SEQ ID NO: 304722 - DNA, 30 bp, Artificial Sequence
  Synthetic oligonucleotide
atgtcttaattcgaagacgtgactcaatca

SEQ ID NO: 304723 - DNA, 30 bp, Artificial Sequence
  Synthetic oligonucleotide
ccggagcacgagctaattgtgtgtcaatca

SEQ ID NO: 304724 - DNA, 30 bp, Artificial Sequence
  Synthetic oligonucleotide
cgtagggtccccatttgattgcaagaatca

SEQ ID NO: 304725 - DNA, 30 bp, Artificial Sequence
  Synthetic oligonucleotide
tggacagtattgcggtctgtcgaagaatca

SEQ ID NO: 304726 - DNA, 30 bp, Artificial Sequence
  Synthetic oligonucleotide
tccatggcagaaacatccgcgccagaatca

SEQ ID NO: 304727 - DNA, 30 bp, Artificial Sequence
  Synthetic oligonucleotide
tcgtaaatggtgtctacgaagttagaatca

SEQ ID NO: 304728 - DNA, 30 bp, Artificial Sequence
  Synthetic oligonucleotide
acgtttttagatatataggagttcgaatca

SEQ ID NO: 304729 - DNA, 30 bp, Artificial Sequence
  Synthetic oligonucleotide
ttcaatacctcgaaatggcggagggaatca

SEQ ID NO: 304730 - DNA, 30 bp, Artificial Sequence
  Synthetic oligonucleotide
ggggagcggttgttcgcagtgcctgaatca

SEQ ID NO: 304731 - DNA, 30 bp, Artificial Sequence
  Synthetic oligonucleotide
tacttaccggcgtggggaaggccataatca

SEQ ID NO: 304732 - DNA, 30 bp, Artificial Sequence
  Synthetic oligonucleotide
aagatcctcagtgctctgttctcataatca

SEQ ID NO: 304733 - DNA, 30 bp, Artificial Sequence
  Synthetic oligonucleotide
gagcgcttcttgttccatttggtataatca

SEQ ID NO: 304734 - DNA, 30 bp, Artificial Sequence
  Synthetic oligonucleotide
ttgcgaattatacgtaggcgcgactaatca

SEQ ID NO: 304735 - DNA, 30 bp, Artificial Sequence
  Synthetic oligonucleotide
aagggcgaacctcggatgatggactaatca

SEQ ID NO: 304736 - DNA, 30 bp, Artificial Sequence
  Synthetic oligonucleotide
gggccgaggacagaccggctagtctaatca

SEQ ID NO: 304737 - DNA, 30 bp, Artificial Sequence
  Synthetic oligonucleotide
atctatggtatattttctgatatgtaatca

SEQ ID NO: 304738 - DNA, 30 bp, Artificial Sequence
  Synthetic oligonucleotide
gggtggtggcaagataccgttcattaatca

SEQ ID NO: 304739 - DNA, 30 bp, Artificial Sequence
  Synthetic oligonucleotide
tggcatataaccttaccagccatttaatca

SEQ ID NO: 304740 - DNA, 30 bp, Artificial Sequence
  Synthetic oligonucleotide
cctcatattaggggcctggcagtaacatca

SEQ ID NO: 304741 - DNA, 30 bp, Artificial Sequence
  Synthetic oligonucleotide
caaatactacgaaggggctatcacacatca

SEQ ID NO: 304742 - DNA, 30 bp, Artificial Sequence
  Synthetic oligonucleotide
cattaaaccagttcacaacagcttacatca

SEQ ID NO: 304743 - DNA, 30 bp, Artificial Sequence
  Synthetic oligonucleotide
gtccaccaccgtgcagcgatccaaccatca

SEQ ID NO: 304744 - DNA, 30 bp, Artificial Sequence
  Synthetic oligonucleotide
aggtggggttggtattggccgtgaccatca

SEQ ID NO: 304745 - DNA, 30 bp, Artificial Sequence
  Synthetic oligonucleotide
gaacctataaattgatctgatatgccatca

SEQ ID NO: 304746 - DNA, 30 bp, Artificial Sequence
  Synthetic oligonucleotide
gaataaatgagggaggcaacagatccatca

SEQ ID NO: 304747 - DNA, 30 bp, Artificial Sequence
  Synthetic oligonucleotide
gaagctgacactttactggaaacagcatca

SEQ ID NO: 304748 - DNA, 30 bp, Artificial Sequence
  Synthetic oligonucleotide
taggagttgattccactctcgacagcatca

SEQ ID NO: 304749 - DNA, 30 bp, Artificial Sequence
  Synthetic oligonucleotide
taactcttggcaggtgatttaatagcatca

SEQ ID NO: 304750 - DNA, 30 bp, Artificial Sequence
  Synthetic oligonucleotide
tagaaggcagctgagtacggtaacgcatca

SEQ ID NO: 304751 - DNA, 30 bp, Artificial Sequence
  Synthetic oligonucleotide
aaccacggcggatgggagtatggcgcatca

SEQ ID NO: 304752 - DNA, 30 bp, Artificial Sequence
  Synthetic oligonucleotide
tacagtgcgccatagactatagaggcatca

SEQ ID NO: 304753 - DNA, 30 bp, Artificial Sequence
  Synthetic oligonucleotide
ctcgcatacttactatcccattttgcatca

SEQ ID NO: 304754 - DNA, 30 bp, Artificial Sequence
  Synthetic oligonucleotide
atgaattcttacaagtgtcttagatcatca

SEQ ID NO: 304755 - DNA, 30 bp, Artificial Sequence
  Synthetic oligonucleotide
tactacccgccgtgaagagcaacctcatca

SEQ ID NO: 304756 - DNA, 30 bp, Artificial Sequence
  Synthetic oligonucleotide
acttaggtagcgtcaagagggaattcatca

SEQ ID NO: 304757 - DNA, 30 bp, Artificial Sequence
  Synthetic oligonucleotide
acgctgagcattataaattctcgttcatca

SEQ ID NO: 304758 - DNA, 30 bp, Artificial Sequence
  Synthetic oligonucleotide
cgtctcgggggaccatagggactttcatca

SEQ ID NO: 304759 - DNA, 30 bp, Artificial Sequence
  Synthetic oligonucleotide
aggcgggcacagcacatgacacgaagatca

SEQ ID NO: 304760 - DNA, 30 bp, Artificial Sequence
  Synthetic oligonucleotide
gctacatgaatctgagggaggcccagatca

SEQ ID NO: 304761 - DNA, 31 bp, Artificial Sequence
  Synthetic oligonucleotide
ctcggcattatgacaggaggcaggcagatca

SEQ ID NO: 304762 - DNA, 30 bp, Artificial Sequence
  Synthetic oligonucleotide
gcggaactcaactatttaggtgagagatca

SEQ ID NO: 304763 - DNA, 30 bp, Artificial Sequence
  Synthetic oligonucleotide
cgcgggtgtcacgggtttcggcggagatca

SEQ ID NO: 304764 - DNA, 30 bp, Artificial Sequence
  Synthetic oligonucleotide
gggttgacacattgcattcactggagatca

SEQ ID NO: 304765 - DNA, 30 bp, Artificial Sequence
  Synthetic oligonucleotide
ctaattctaaggcaggagataatgagatca

SEQ ID NO: 304766 - DNA, 30 bp, Artificial Sequence
  Synthetic oligonucleotide
ttattgtcagcctgcacgtaaaatagatca

SEQ ID NO: 304767 - DNA, 30 bp, Artificial Sequence
  Synthetic oligonucleotide
tggacctatgcccgtgtagaagatagatca

SEQ ID NO: 304768 - DNA, 30 bp, Artificial Sequence
  Synthetic oligonucleotide
ctgatgtaatctaggtattctgatagatca

SEQ ID NO: 304769 - DNA, 30 bp, Artificial Sequence
  Synthetic oligonucleotide
ccgtagaacaaggtagcaaatcctagatca

SEQ ID NO: 304770 - DNA, 30 bp, Artificial Sequence
  Synthetic oligonucleotide
taccctgtagtgttgtgaccacgtagatca

SEQ ID NO: 304771 - DNA, 30 bp, Artificial Sequence
  Synthetic oligonucleotide
gattggtattttagaaccgcgtgtagatca

SEQ ID NO: 304772 - DNA, 29 bp, Artificial Sequence
  Synthetic oligonucleotide
atcctgttcggtggtaggaagttagatca

SEQ ID NO: 304773 - DNA, 30 bp, Artificial Sequence
  Synthetic oligonucleotide
catattcacaattttaggggagaacgatca

SEQ ID NO: 304774 - DNA, 30 bp, Artificial Sequence
  Synthetic oligonucleotide
ccaggtacgaatgcacactggacacgatca

SEQ ID NO: 304775 - DNA, 30 bp, Artificial Sequence
  Synthetic oligonucleotide
tgcacgccaagtcctcccctcagacgatca

SEQ ID NO: 304776 - DNA, 30 bp, Artificial Sequence
  Synthetic oligonucleotide
tggttaggcatttctcgatcgagccgatca

SEQ ID NO: 304777 - DNA, 30 bp, Artificial Sequence
  Synthetic oligonucleotide
attattcgcacacagggaacagttcgatca

SEQ ID NO: 304778 - DNA, 30 bp, Artificial Sequence
  Synthetic oligonucleotide
tcccctgacgcgacataagacagaggatca

SEQ ID NO: 304779 - DNA, 30 bp, Artificial Sequence
  Synthetic oligonucleotide
atgggggttatccaataggtgtccggatca

SEQ ID NO: 304780 - DNA, 30 bp, Artificial Sequence
  Synthetic oligonucleotide
tagtcttcgaccttaggattgggcggatca

SEQ ID NO: 304781 - DNA, 30 bp, Artificial Sequence
  Synthetic oligonucleotide
ttgggtctgtgggttgtttcgttcggatca

SEQ ID NO: 304782 - DNA, 30 bp, Artificial Sequence
  Synthetic oligonucleotide
cttactgatatagctattgcgtgtggatca

SEQ ID NO: 304783 - DNA, 30 bp, Artificial Sequence
  Synthetic oligonucleotide
gctcaaagcgggcgattggtttgtggatca

SEQ ID NO: 304784 - DNA, 30 bp, Artificial Sequence
  Synthetic oligonucleotide
ggtcagtgatggcatttaacgtaatgatca

SEQ ID NO: 304785 - DNA, 30 bp, Artificial Sequence
  Synthetic oligonucleotide
ttccggacaatcctattgcacacatgatca

SEQ ID NO: 304786 - DNA, 30 bp, Artificial Sequence
  Synthetic oligonucleotide
ctttagtaggtaatagattttgcatgatca

SEQ ID NO: 304787 - DNA, 30 bp, Artificial Sequence
  Synthetic oligonucleotide
gcaggaagtttcaagggccttgagtgatca

SEQ ID NO: 304788 - DNA, 30 bp, Artificial Sequence
  Synthetic oligonucleotide
aattgaagcccagaagcgtggccgtgatca

SEQ ID NO: 304789 - DNA, 30 bp, Artificial Sequence
  Synthetic oligonucleotide
gcaggtcttagccgacaaaatgtgtgatca

SEQ ID NO: 304790 - DNA, 30 bp, Artificial Sequence
  Synthetic oligonucleotide
ggggattctgagctgcttcagaattgatca

SEQ ID NO: 304791 - DNA, 30 bp, Artificial Sequence
  Synthetic oligonucleotide
taaaactgcaacttcacaaagtgttgatca

SEQ ID NO: 304792 - DNA, 30 bp, Artificial Sequence
  Synthetic oligonucleotide
tgcgttactaagtgtggtatccaaatatca

SEQ ID NO: 304793 - DNA, 30 bp, Artificial Sequence
  Synthetic oligonucleotide
aaacacgacggggttaggatcctaatatca

SEQ ID NO: 304794 - DNA, 30 bp, Artificial Sequence
  Synthetic oligonucleotide
actccaaatcaggccaggtctttaatatca

SEQ ID NO: 304795 - DNA, 30 bp, Artificial Sequence
  Synthetic oligonucleotide
atataaggttgtattcactgtggcatatca

SEQ ID NO: 304796 - DNA, 30 bp, Artificial Sequence
  Synthetic oligonucleotide
tataagtatagaactatacgagcgatatca

SEQ ID NO: 304797 - DNA, 30 bp, Artificial Sequence
  Synthetic oligonucleotide
taaaccagcaatctacggtacaggatatca

SEQ ID NO: 304798 - DNA, 30 bp, Artificial Sequence
  Synthetic oligonucleotide
ctgtccctgactgcggctgtgtggatatca

SEQ ID NO: 304799 - DNA, 30 bp, Artificial Sequence
  Synthetic oligonucleotide
tagactatggtaggtggcgcttggatatca

SEQ ID NO: 304800 - DNA, 30 bp, Artificial Sequence
  Synthetic oligonucleotide
tgcctgcgacgagtacttcctcctatatca

SEQ ID NO: 304801 - DNA, 30 bp, Artificial Sequence
  Synthetic oligonucleotide
ctccggttaagagatgttagagttatatca

SEQ ID NO: 304802 - DNA, 30 bp, Artificial Sequence
  Synthetic oligonucleotide
atacaagaccgtcttcgataggttatatca

SEQ ID NO: 304803 - DNA, 30 bp, Artificial Sequence
  Synthetic oligonucleotide
tatttcgggccctgaaaagtgccactatca

SEQ ID NO: 304804 - DNA, 30 bp, Artificial Sequence
  Synthetic oligonucleotide
gtcgttagagagcacggttggtctctatca

SEQ ID NO: 304805 - DNA, 30 bp, Artificial Sequence
  Synthetic oligonucleotide
acaacctccaagtaaccggtctaagtatca

SEQ ID NO: 304806 - DNA, 30 bp, Artificial Sequence
  Synthetic oligonucleotide
cgttaacattcgttatatatcggcgtatca

SEQ ID NO: 304807 - DNA, 30 bp, Artificial Sequence
  Synthetic oligonucleotide
tagctgacctctgaatcggaataggtatca

SEQ ID NO: 304808 - DNA, 30 bp, Artificial Sequence
  Synthetic oligonucleotide
aagtagtcgtcataaagtagaagattatca

SEQ ID NO: 304809 - DNA, 30 bp, Artificial Sequence
  Synthetic oligonucleotide
ggtatagctgcgaagtttgcagtattatca

SEQ ID NO: 304810 - DNA, 30 bp, Artificial Sequence
  Synthetic oligonucleotide
ctggagtaattgctgcgcgatacgttatca

SEQ ID NO: 304811 - DNA, 30 bp, Artificial Sequence
  Synthetic oligonucleotide
tatgggaaattcgaagcatcagtgttatca

SEQ ID NO: 304812 - DNA, 30 bp, Artificial Sequence
  Synthetic oligonucleotide
tctaaccggacggtagtatcatggaactca

SEQ ID NO: 304813 - DNA, 30 bp, Artificial Sequence
  Synthetic oligonucleotide
ttttcgtgagaagggatcgataaacactca

SEQ ID NO: 304814 - DNA, 30 bp, Artificial Sequence
  Synthetic oligonucleotide
agagccatgtaggtcgacttggcacactca

SEQ ID NO: 304815 - DNA, 30 bp, Artificial Sequence
  Synthetic oligonucleotide
ggataaaagtgtcttttagtctgacactca

SEQ ID NO: 304816 - DNA, 30 bp, Artificial Sequence
  Synthetic oligonucleotide
agcgtgtatcgctacattacgctacactca

SEQ ID NO: 304817 - DNA, 30 bp, Artificial Sequence
  Synthetic oligonucleotide
ccaaccctgtacatggtagttttccactca

SEQ ID NO: 304818 - DNA, 30 bp, Artificial Sequence
  Synthetic oligonucleotide
cattacgtatccaaggtgcgtacgcactca

SEQ ID NO: 304819 - DNA, 30 bp, Artificial Sequence
  Synthetic oligonucleotide
ccgccaagggacctcaatcaccgtcactca

SEQ ID NO: 304820 - DNA, 30 bp, Artificial Sequence
  Synthetic oligonucleotide
gcagagttgctctctcaatactacgactca

SEQ ID NO: 304821 - DNA, 30 bp, Artificial Sequence
  Synthetic oligonucleotide
ccgacatccagtaagagtcagtgcgactca

SEQ ID NO: 304822 - DNA, 30 bp, Artificial Sequence
  Synthetic oligonucleotide
ctatcgggcctgttggaatttagggactca

SEQ ID NO: 304823 - DNA, 30 bp, Artificial Sequence
  Synthetic oligonucleotide
gatatgcagtgtcagggcccgtaatactca

SEQ ID NO: 304824 - DNA, 30 bp, Artificial Sequence
  Synthetic oligonucleotide
gcaaaggccttcccccttggtctctactca

SEQ ID NO: 304825 - DNA, 30 bp, Artificial Sequence
  Synthetic oligonucleotide
tccgactacaccgttctggccatttactca

SEQ ID NO: 304826 - DNA, 30 bp, Artificial Sequence
  Synthetic oligonucleotide
gtatttatagtcgtaatcccgatttactca

SEQ ID NO: 304827 - DNA, 30 bp, Artificial Sequence
  Synthetic oligonucleotide
acaaaagagaggtgaagtgaactaacctca

SEQ ID NO: 304828 - DNA, 30 bp, Artificial Sequence
  Synthetic oligonucleotide
ttggggtcgctcactatccggggcacctca

SEQ ID NO: 304829 - DNA, 30 bp, Artificial Sequence
  Synthetic oligonucleotide
catttaaagtgttatcagcagcagacctca

SEQ ID NO: 304830 - DNA, 30 bp, Artificial Sequence
  Synthetic oligonucleotide
ttatagcagcagcaggattggcctacctca

SEQ ID NO: 304831 - DNA, 30 bp, Artificial Sequence
  Synthetic oligonucleotide
agtcagaattcttccagagattgtacctca

SEQ ID NO: 304832 - DNA, 30 bp, Artificial Sequence
  Synthetic oligonucleotide
atgtcacaatgacacggagccaaaccctca

SEQ ID NO: 304833 - DNA, 30 bp, Artificial Sequence
  Synthetic oligonucleotide
ccggcattgcgtgagcgcgatagaccctca

SEQ ID NO: 304834 - DNA, 30 bp, Artificial Sequence
  Synthetic oligonucleotide
ttacggcactagcagaggaggaggccctca

SEQ ID NO: 304835 - DNA, 30 bp, Artificial Sequence
  Synthetic oligonucleotide
tttatgtaatccagcaaaccaactccctca

SEQ ID NO: 304836 - DNA, 30 bp, Artificial Sequence
  Synthetic oligonucleotide
cttggcgacgacataaaaattggtccctca

SEQ ID NO: 304837 - DNA, 30 bp, Artificial Sequence
  Synthetic oligonucleotide
aacaccctagcatcgaccggctttccctca

SEQ ID NO: 304838 - DNA, 30 bp, Artificial Sequence
  Synthetic oligonucleotide
ttcgcgtcggtacatgcacgcgcggcctca

SEQ ID NO: 304839 - DNA, 30 bp, Artificial Sequence
  Synthetic oligonucleotide
atgtacatttgtaatccgtccaatgcctca

SEQ ID NO: 304840 - DNA, 30 bp, Artificial Sequence
  Synthetic oligonucleotide
ccaccatcaggattcgataattatgcctca

SEQ ID NO: 304841 - DNA, 30 bp, Artificial Sequence
  Synthetic oligonucleotide
ttactgatatccgactgagcgtgatcctca

SEQ ID NO: 304842 - DNA, 30 bp, Artificial Sequence
  Synthetic oligonucleotide
taaaggctagccggggtgtgcgtatcctca

SEQ ID NO: 304843 - DNA, 30 bp, Artificial Sequence
  Synthetic oligonucleotide
tatggcatattatctaggtgatggtcctca

SEQ ID NO: 304844 - DNA, 30 bp, Artificial Sequence
  Synthetic oligonucleotide
acaatgacagatagcgtgcttctgtcctca

SEQ ID NO: 304845 - DNA, 30 bp, Artificial Sequence
  Synthetic oligonucleotide
ttatcagttgcattagtggaaggaagctca

SEQ ID NO: 304846 - DNA, 30 bp, Artificial Sequence
  Synthetic oligonucleotide
ttacggtatctgtagttttccggaagctca

SEQ ID NO: 304847 - DNA, 30 bp, Artificial Sequence
  Synthetic oligonucleotide
gttagaccagttaggacttaggggagctca

SEQ ID NO: 304848 - DNA, 30 bp, Artificial Sequence
  Synthetic oligonucleotide
ttaggagacatgacgtatatgtatagctca

SEQ ID NO: 304849 - DNA, 30 bp, Artificial Sequence
  Synthetic oligonucleotide
gacatctagacgcgcccggagattagctca

SEQ ID NO: 304850 - DNA, 30 bp, Artificial Sequence
  Synthetic oligonucleotide
ggactggcacaagaacagttcaaccgctca

SEQ ID NO: 304851 - DNA, 30 bp, Artificial Sequence
  Synthetic oligonucleotide
ataggttagtctcaataagggcgccgctca

SEQ ID NO: 304852 - DNA, 30 bp, Artificial Sequence
  Synthetic oligonucleotide
actttgtcaacccacgtacgaggccgctca

SEQ ID NO: 304853 - DNA, 30 bp, Artificial Sequence
  Synthetic oligonucleotide
tggttgtcatcacaatgggccttgcgctca

SEQ ID NO: 304854 - DNA, 30 bp, Artificial Sequence
  Synthetic oligonucleotide
gcagaaaggaagctctcgtatagaggctca

SEQ ID NO: 304855 - DNA, 30 bp, Artificial Sequence
  Synthetic oligonucleotide
agttccatttgctggcacgaacgaggctca

SEQ ID NO: 304856 - DNA, 30 bp, Artificial Sequence
  Synthetic oligonucleotide
ctacgcacagcatagacagtgggcggctca

SEQ ID NO: 304857 - DNA, 30 bp, Artificial Sequence
  Synthetic oligonucleotide
tacgaaacgcccatctgttgttttggctca

SEQ ID NO: 304858 - DNA, 30 bp, Artificial Sequence
  Synthetic oligonucleotide
acggctccgcgcccctcaacgtagtgctca

SEQ ID NO: 304859 - DNA, 30 bp, Artificial Sequence
  Synthetic oligonucleotide
atggttggccttgttcgtgagatgtgctca

SEQ ID NO: 304860 - DNA, 30 bp, Artificial Sequence
  Synthetic oligonucleotide
ggtgttgaatcgcaattagccaaaatctca

SEQ ID NO: 304861 - DNA, 30 bp, Artificial Sequence
  Synthetic oligonucleotide
cggatctcgggactccgtctctcaatctca

SEQ ID NO: 304862 - DNA, 30 bp, Artificial Sequence
  Synthetic oligonucleotide
accaccagcaagggggctacccagatctca

SEQ ID NO: 304863 - DNA, 30 bp, Artificial Sequence
  Synthetic oligonucleotide
gattatcatggggcgtaggtatagatctca

SEQ ID NO: 304864 - DNA, 30 bp, Artificial Sequence
  Synthetic oligonucleotide
cgcggggggttacacgcaagcgcgatctca

SEQ ID NO: 304865 - DNA, 30 bp, Artificial Sequence
  Synthetic oligonucleotide
gtatgtgcaaggccgcttgctgtgatctca

SEQ ID NO: 304866 - DNA, 30 bp, Artificial Sequence
  Synthetic oligonucleotide
ctgccggtgtggctcagtcctgcgctctca

SEQ ID NO: 304867 - DNA, 30 bp, Artificial Sequence
  Synthetic oligonucleotide
agacatacataaaattgggtccgagtctca

SEQ ID NO: 304868 - DNA, 31 bp, Artificial Sequence
  Synthetic oligonucleotide
gcagaaacatgtgtgagcacccaccgtctca

SEQ ID NO: 304869 - DNA, 30 bp, Artificial Sequence
  Synthetic oligonucleotide
aggggttctgtgcgactatgctctgtctca

SEQ ID NO: 304870 - DNA, 30 bp, Artificial Sequence
  Synthetic oligonucleotide
acaatatgtccagtgcgagaaattgtctca

SEQ ID NO: 304871 - DNA, 30 bp, Artificial Sequence
  Synthetic oligonucleotide
gttgttgacgcgacaacagcggcattctca

SEQ ID NO: 304872 - DNA, 30 bp, Artificial Sequence
  Synthetic oligonucleotide
agaatcgcgaatgggcgaagcggattctca

SEQ ID NO: 304873 - DNA, 30 bp, Artificial Sequence
  Synthetic oligonucleotide
cgctggaatgatgaggcgcaagtattctca

SEQ ID NO: 304874 - DNA, 30 bp, Artificial Sequence
  Synthetic oligonucleotide
ggtggttactataggtaaggtattttctca

SEQ ID NO: 304875 - DNA, 30 bp, Artificial Sequence
  Synthetic oligonucleotide
tactatcagaactagcatatacttttctca

SEQ ID NO: 304876 - DNA, 30 bp, Artificial Sequence
  Synthetic oligonucleotide
gtcttaacgcttacctacataaaaaagtca

SEQ ID NO: 304877 - DNA, 30 bp, Artificial Sequence
  Synthetic oligonucleotide
ttataaggattatggttcgtgacaaagtca

SEQ ID NO: 304878 - DNA, 30 bp, Artificial Sequence
  Synthetic oligonucleotide
agcggcacgactaattgaatctcaaagtca

SEQ ID NO: 304879 - DNA, 30 bp, Artificial Sequence
  Synthetic oligonucleotide
ctatccactataatgacgtcaagaaagtca

SEQ ID NO: 304880 - DNA, 29 bp, Artificial Sequence
  Synthetic oligonucleotide
atgaagtgacgcgaagagctagcaagtca

SEQ ID NO: 304881 - DNA, 30 bp, Artificial Sequence
  Synthetic oligonucleotide
tgaggtagttgtcgctaaatgcctaagtca

SEQ ID NO: 304882 - DNA, 30 bp, Artificial Sequence
  Synthetic oligonucleotide
agatcaaatcccgggcgcgccggtcagtca

SEQ ID NO: 304883 - DNA, 30 bp, Artificial Sequence
  Synthetic oligonucleotide
aggttctcaccaatcgtcccatcagagtca

SEQ ID NO: 304884 - DNA, 30 bp, Artificial Sequence
  Synthetic oligonucleotide
gctagtgccgtacagctaagggacgagtca

SEQ ID NO: 304885 - DNA, 30 bp, Artificial Sequence
  Synthetic oligonucleotide
tagcgagggaagctcagcccacgcgagtca

SEQ ID NO: 304886 - DNA, 30 bp, Artificial Sequence
  Synthetic oligonucleotide
taggcaacacagcttgctataaaggagtca

SEQ ID NO: 304887 - DNA, 30 bp, Artificial Sequence
  Synthetic oligonucleotide
ggttccaacccggatttccgaagatagtca

SEQ ID NO: 304888 - DNA, 30 bp, Artificial Sequence
  Synthetic oligonucleotide
ccgcgtctcatgccggacatagtatagtca

SEQ ID NO: 304889 - DNA, 30 bp, Artificial Sequence
  Synthetic oligonucleotide
aataatcgcagggagttgtagtcctagtca

SEQ ID NO: 304890 - DNA, 30 bp, Artificial Sequence
  Synthetic oligonucleotide
gagggagaggtgtctcccctagtctagtca

SEQ ID NO: 304891 - DNA, 30 bp, Artificial Sequence
  Synthetic oligonucleotide
caagtcttttccctcttcagtgagtagtca

SEQ ID NO: 304892 - DNA, 30 bp, Artificial Sequence
  Synthetic oligonucleotide
taacaagtaaggagagtacgcttgtagtca

SEQ ID NO: 304893 - DNA, 30 bp, Artificial Sequence
  Synthetic oligonucleotide
atagccacatcgatggggcgcctttagtca

SEQ ID NO: 304894 - DNA, 30 bp, Artificial Sequence
  Synthetic oligonucleotide
tactcccgctggcccgatacggcaacgtca

SEQ ID NO: 304895 - DNA, 30 bp, Artificial Sequence
  Synthetic oligonucleotide
cggttgctccagattttgaacataacgtca

SEQ ID NO: 304896 - DNA, 30 bp, Artificial Sequence
  Synthetic oligonucleotide
atgacgcgagtcggtgttgatgtaacgtca

SEQ ID NO: 304897 - DNA, 30 bp, Artificial Sequence
  Synthetic oligonucleotide
aaccgacgggctcatttgggcaacacgtca

SEQ ID NO: 304898 - DNA, 30 bp, Artificial Sequence
  Synthetic oligonucleotide
cggtggaaaacgaagcccatctacacgtca

SEQ ID NO: 304899 - DNA, 30 bp, Artificial Sequence
  Synthetic oligonucleotide
agtggatgtaaatattgatggatcacgtca

SEQ ID NO: 304900 - DNA, 30 bp, Artificial Sequence
  Synthetic oligonucleotide
tacgtagaatgaggtatacatggtacgtca

SEQ ID NO: 304901 - DNA, 30 bp, Artificial Sequence
  Synthetic oligonucleotide
agttcccgtttaggaacaatgacagcgtca

SEQ ID NO: 304902 - DNA, 30 bp, Artificial Sequence
  Synthetic oligonucleotide
ggtgtcaatcccacatattcgttggcgtca

SEQ ID NO: 304903 - DNA, 30 bp, Artificial Sequence
  Synthetic oligonucleotide
ttatgtcgcgtcaacgtccaatatgcgtca

SEQ ID NO: 304904 - DNA, 30 bp, Artificial Sequence
  Synthetic oligonucleotide
ggttggagccgttagcctattcttgcgtca

SEQ ID NO: 304905 - DNA, 30 bp, Artificial Sequence
  Synthetic oligonucleotide
ctagttatgaaccatgacttcgcatcgtca

SEQ ID NO: 304906 - DNA, 30 bp, Artificial Sequence
  Synthetic oligonucleotide
ttggtttacaagatcgttgcgtcatcgtca

SEQ ID NO: 304907 - DNA, 30 bp, Artificial Sequence
  Synthetic oligonucleotide
catgacttttgatgtagtatgagatcgtca

SEQ ID NO: 304908 - DNA, 30 bp, Artificial Sequence
  Synthetic oligonucleotide
gagtaatgaacgatgcagaaatgctcgtca

SEQ ID NO: 304909 - DNA, 30 bp, Artificial Sequence
  Synthetic oligonucleotide
aaagaagagacgactatggctgagtcgtca

SEQ ID NO: 304910 - DNA, 30 bp, Artificial Sequence
  Synthetic oligonucleotide
tacccagctagcctaaatatatcttcgtca

SEQ ID NO: 304911 - DNA, 30 bp, Artificial Sequence
  Synthetic oligonucleotide
gtcctgagcaacggctgtgatgtttcgtca

SEQ ID NO: 304912 - DNA, 30 bp, Artificial Sequence
  Synthetic oligonucleotide
cgattgggaattatcatcgattaaaggtca

SEQ ID NO: 304913 - DNA, 30 bp, Artificial Sequence
  Synthetic oligonucleotide
tttggtagtcacggagtggcttaaaggtca

SEQ ID NO: 304914 - DNA, 30 bp, Artificial Sequence
  Synthetic oligonucleotide
cgttcaatggttgtttagcctgcaaggtca

SEQ ID NO: 304915 - DNA, 30 bp, Artificial Sequence
  Synthetic oligonucleotide
cgattataggcaccgccgagattaaggtca

SEQ ID NO: 304916 - DNA, 30 bp, Artificial Sequence
  Synthetic oligonucleotide
tcgggggcgtaggagcttggatccaggtca

SEQ ID NO: 304917 - DNA, 30 bp, Artificial Sequence
  Synthetic oligonucleotide
tcgattactgaatttctcacctgcaggtca

SEQ ID NO: 304918 - DNA, 30 bp, Artificial Sequence
  Synthetic oligonucleotide
tatataaaaggggatagaaacaggaggtca

SEQ ID NO: 304919 - DNA, 30 bp, Artificial Sequence
  Synthetic oligonucleotide
tacgacgtgaaacccaatcttcctaggtca

SEQ ID NO: 304920 - DNA, 29 bp, Artificial Sequence
  Synthetic oligonucleotide
tctgccgtgggtattttttgattaggtca

SEQ ID NO: 304921 - DNA, 30 bp, Artificial Sequence
  Synthetic oligonucleotide
acgctctagatgactttcccgtcacggtca

SEQ ID NO: 304922 - DNA, 30 bp, Artificial Sequence
  Synthetic oligonucleotide
gttgataaagggactccttaaatacggtca

SEQ ID NO: 304923 - DNA, 30 bp, Artificial Sequence
  Synthetic oligonucleotide
gagtcgaggcgtaccaaactggtacggtca

SEQ ID NO: 304924 - DNA, 30 bp, Artificial Sequence
  Synthetic oligonucleotide
taagtaatgctgggactgggcgaccggtca

SEQ ID NO: 304925 - DNA, 30 bp, Artificial Sequence
  Synthetic oligonucleotide
gaagcggcctacgctagcactggccggtca

SEQ ID NO: 304926 - DNA, 30 bp, Artificial Sequence
  Synthetic oligonucleotide
cgatttcagcatgcctagacgaggcggtca

SEQ ID NO: 304927 - DNA, 30 bp, Artificial Sequence
  Synthetic oligonucleotide
agtgaagttataccaagggtaactcggtca

SEQ ID NO: 304928 - DNA, 30 bp, Artificial Sequence
  Synthetic oligonucleotide
tccgaactgggttaatttcacagtcggtca

SEQ ID NO: 304929 - DNA, 30 bp, Artificial Sequence
  Synthetic oligonucleotide
cctaataataatattcctgagcacgggtca

SEQ ID NO: 304930 - DNA, 30 bp, Artificial Sequence
  Synthetic oligonucleotide
actccagtcatcatacttggggacgggtca

SEQ ID NO: 304931 - DNA, 31 bp, Artificial Sequence
  Synthetic oligonucleotide
tggcaacaccggcgatgttattctcgggtca

SEQ ID NO: 304932 - DNA, 30 bp, Artificial Sequence
  Synthetic oligonucleotide
cccgcacaaatggtccaattacaggggtca

SEQ ID NO: 304933 - DNA, 30 bp, Artificial Sequence
  Synthetic oligonucleotide
gtctggcaactaatgctaagtacggggtca

SEQ ID NO: 304934 - DNA, 30 bp, Artificial Sequence
  Synthetic oligonucleotide
ttaacgcagatgcaaaaattgaatgggtca

SEQ ID NO: 304935 - DNA, 30 bp, Artificial Sequence
  Synthetic oligonucleotide
tgtgtggaagactggaggtttcttgggtca

SEQ ID NO: 304936 - DNA, 30 bp, Artificial Sequence
  Synthetic oligonucleotide
gtgcatgttaacttaccaatcatatggtca

SEQ ID NO: 304937 - DNA, 30 bp, Artificial Sequence
  Synthetic oligonucleotide
atcgatgaaggaacaaggattctatggtca

SEQ ID NO: 304938 - DNA, 30 bp, Artificial Sequence
  Synthetic oligonucleotide
tacaagcactgcatgttggatttatggtca

SEQ ID NO: 304939 - DNA, 30 bp, Artificial Sequence
  Synthetic oligonucleotide
cgtatcctaaagtatatgtggtaaatgtca

SEQ ID NO: 304940 - DNA, 30 bp, Artificial Sequence
  Synthetic oligonucleotide
gatgacgcaatctcttcgatgacaatgtca

SEQ ID NO: 304941 - DNA, 30 bp, Artificial Sequence
  Synthetic oligonucleotide
atatctctcaacctctgacaggcaatgtca

SEQ ID NO: 304942 - DNA, 30 bp, Artificial Sequence
  Synthetic oligonucleotide
gaaggatccaggatcatttgaggaatgtca

SEQ ID NO: 304943 - DNA, 30 bp, Artificial Sequence
  Synthetic oligonucleotide
taccgcccgacggaaacaatggtaatgtca

SEQ ID NO: 304944 - DNA, 30 bp, Artificial Sequence
  Synthetic oligonucleotide
gccgtatgtctaggacgatccggcatgtca

SEQ ID NO: 304945 - DNA, 30 bp, Artificial Sequence
  Synthetic oligonucleotide
cgttactccgcatccgccgggttgatgtca

SEQ ID NO: 304946 - DNA, 30 bp, Artificial Sequence
  Synthetic oligonucleotide
gttattgtgcctatcgaacatacactgtca

SEQ ID NO: 304947 - DNA, 30 bp, Artificial Sequence
  Synthetic oligonucleotide
ttttcaggggttgttgccaagccactgtca

SEQ ID NO: 304948 - DNA, 30 bp, Artificial Sequence
  Synthetic oligonucleotide
gcactctcgggactcggctaagtactgtca

SEQ ID NO: 304949 - DNA, 30 bp, Artificial Sequence
  Synthetic oligonucleotide
gtcgtgttaatctttggtttagccctgtca

SEQ ID NO: 304950 - DNA, 30 bp, Artificial Sequence
  Synthetic oligonucleotide
gggttagccttaacaccgtaagatctgtca

SEQ ID NO: 304951 - DNA, 30 bp, Artificial Sequence
  Synthetic oligonucleotide
ctggtgctgaagtccaaggatgctctgtca

SEQ ID NO: 304952 - DNA, 30 bp, Artificial Sequence
  Synthetic oligonucleotide
tgataactagccagcctccgaagtctgtca

SEQ ID NO: 304953 - DNA, 30 bp, Artificial Sequence
  Synthetic oligonucleotide
ggttaggcgacattttactctggtctgtca

SEQ ID NO: 304954 - DNA, 30 bp, Artificial Sequence
  Synthetic oligonucleotide
gagccttgggagcgccctcagattctgtca

SEQ ID NO: 304955 - DNA, 30 bp, Artificial Sequence
  Synthetic oligonucleotide
cttcagactaacgcggtccttccagtgtca

SEQ ID NO: 304956 - DNA, 30 bp, Artificial Sequence
  Synthetic oligonucleotide
ttgagctgaccgctcccataagtcgtgtca

SEQ ID NO: 304957 - DNA, 30 bp, Artificial Sequence
  Synthetic oligonucleotide
agttgagcaagttatgtatctgaggtgtca

SEQ ID NO: 304958 - DNA, 30 bp, Artificial Sequence
  Synthetic oligonucleotide
ttttcaaggaacaggacgggtctggtgtca

SEQ ID NO: 304959 - DNA, 30 bp, Artificial Sequence
  Synthetic oligonucleotide
ccctcggagttggaccgaataggtgtgtca

SEQ ID NO: 304960 - DNA, 30 bp, Artificial Sequence
  Synthetic oligonucleotide
acctgaagccgtgtcgaaggctcattgtca

SEQ ID NO: 304961 - DNA, 30 bp, Artificial Sequence
  Synthetic oligonucleotide
ttgctctatgtcggacccaccttattgtca

SEQ ID NO: 304962 - DNA, 30 bp, Artificial Sequence
  Synthetic oligonucleotide
aaggggtcgccaacaatggcttccttgtca

SEQ ID NO: 304963 - DNA, 30 bp, Artificial Sequence
  Synthetic oligonucleotide
gaactattctagtttcgtattgtcttgtca

SEQ ID NO: 304964 - DNA, 30 bp, Artificial Sequence
  Synthetic oligonucleotide
gtttgagggacgtcaagcgttgcgttgtca

SEQ ID NO: 304965 - DNA, 30 bp, Artificial Sequence
  Synthetic oligonucleotide
tcgtggtttcactaaccatggggtttgtca

SEQ ID NO: 304966 - DNA, 30 bp, Artificial Sequence
  Synthetic oligonucleotide
ctcggagtatacaggggttacaagaattca

SEQ ID NO: 304967 - DNA, 30 bp, Artificial Sequence
  Synthetic oligonucleotide
aaagtgtgcggaccattaaaccagaattca

SEQ ID NO: 304968 - DNA, 30 bp, Artificial Sequence
  Synthetic oligonucleotide
ccttcgctgcttgagtcgaattggaattca

SEQ ID NO: 304969 - DNA, 30 bp, Artificial Sequence
  Synthetic oligonucleotide
tgtcaagcctgatcttcgcgtcaccattca

SEQ ID NO: 304970 - DNA, 30 bp, Artificial Sequence
  Synthetic oligonucleotide
agtgtaattttagtgcaagtccgccattca

SEQ ID NO: 304971 - DNA, 30 bp, Artificial Sequence
  Synthetic oligonucleotide
attaggtgccttgtcagacacggccattca

SEQ ID NO: 304972 - DNA, 30 bp, Artificial Sequence
  Synthetic oligonucleotide
ggtagcgagcgctggaggttaatccattca

SEQ ID NO: 304973 - DNA, 30 bp, Artificial Sequence
  Synthetic oligonucleotide
gtacttaaatgtatttgtatccagcattca

SEQ ID NO: 304974 - DNA, 31 bp, Artificial Sequence
  Synthetic oligonucleotide
ttatccagcgtgtatacacaaggagcattca

SEQ ID NO: 304975 - DNA, 30 bp, Artificial Sequence
  Synthetic oligonucleotide
ggggtctttttgaacttcctggtgcattca

SEQ ID NO: 304976 - DNA, 30 bp, Artificial Sequence
  Synthetic oligonucleotide
gtatcggagcaatacagctatgatcattca

SEQ ID NO: 304977 - DNA, 30 bp, Artificial Sequence
  Synthetic oligonucleotide
gttgttcccgggatgcatacttctcattca

SEQ ID NO: 304978 - DNA, 30 bp, Artificial Sequence
  Synthetic oligonucleotide
acttcagtagcaggaggcataagtcattca

SEQ ID NO: 304979 - DNA, 30 bp, Artificial Sequence
  Synthetic oligonucleotide
cgcggagcacaggatcactcctgtcattca

SEQ ID NO: 304980 - DNA, 30 bp, Artificial Sequence
  Synthetic oligonucleotide
tgactgttttgtcccttaagcgttcattca

SEQ ID NO: 304981 - DNA, 30 bp, Artificial Sequence
  Synthetic oligonucleotide
aagaacatagagtttcttgtcgacgattca

SEQ ID NO: 304982 - DNA, 30 bp, Artificial Sequence
  Synthetic oligonucleotide
gaattgcaatcaggcgctaaatcggattca

SEQ ID NO: 304983 - DNA, 30 bp, Artificial Sequence
  Synthetic oligonucleotide
tcaccggttatcaccagtcacagggattca

SEQ ID NO: 304984 - DNA, 30 bp, Artificial Sequence
  Synthetic oligonucleotide
aaatccggaatttaggtgcggactgattca

SEQ ID NO: 304985 - DNA, 30 bp, Artificial Sequence
  Synthetic oligonucleotide
aatcagttgagggcggcgttatgtgattca

SEQ ID NO: 304986 - DNA, 30 bp, Artificial Sequence
  Synthetic oligonucleotide
agtcgttgcttaccgaattgcgttgattca

SEQ ID NO: 304987 - DNA, 30 bp, Artificial Sequence
  Synthetic oligonucleotide
caatcaatatcagaaccgccataatattca

SEQ ID NO: 304988 - DNA, 30 bp, Artificial Sequence
  Synthetic oligonucleotide
cgcatgagggcctatacttaaccatattca

SEQ ID NO: 304989 - DNA, 30 bp, Artificial Sequence
  Synthetic oligonucleotide
atacgtagggcgtagggtttttcatattca

SEQ ID NO: 304990 - DNA, 30 bp, Artificial Sequence
  Synthetic oligonucleotide
gtttctaggtctattagcaacggatattca

SEQ ID NO: 304991 - DNA, 30 bp, Artificial Sequence
  Synthetic oligonucleotide
gaataatagaagggtttatcagcctattca

SEQ ID NO: 304992 - DNA, 30 bp, Artificial Sequence
  Synthetic oligonucleotide
tggaattatgtagcgcatctgtcctattca

SEQ ID NO: 304993 - DNA, 30 bp, Artificial Sequence
  Synthetic oligonucleotide
ttggtcattaagagggacgtgaggtattca

SEQ ID NO: 304994 - DNA, 30 bp, Artificial Sequence
  Synthetic oligonucleotide
gtcaaccccgtggctattcggcggtattca

SEQ ID NO: 304995 - DNA, 30 bp, Artificial Sequence
  Synthetic oligonucleotide
tttggaggcgtgactagcgtggggtattca

SEQ ID NO: 304996 - DNA, 30 bp, Artificial Sequence
  Synthetic oligonucleotide
gcgcgcacgtctttgagccagtattattca

SEQ ID NO: 304997 - DNA, 30 bp, Artificial Sequence
  Synthetic oligonucleotide
tataggtcgggcggaatcctctcttattca

SEQ ID NO: 304998 - DNA, 30 bp, Artificial Sequence
  Synthetic oligonucleotide
tttaccatacagctgcaatttggttattca

SEQ ID NO: 304999 - DNA, 30 bp, Artificial Sequence
  Synthetic oligonucleotide
tggacaataagcaaatatgaacgcacttca

SEQ ID NO: 305000 - DNA, 30 bp, Artificial Sequence
  Synthetic oligonucleotide
cgactctggtgctctgggcagaatacttca

SEQ ID NO: 305001 - DNA, 30 bp, Artificial Sequence
  Synthetic oligonucleotide
cccagggggttttctgtttgcgatacttca

SEQ ID NO: 305002 - DNA, 30 bp, Artificial Sequence
  Synthetic oligonucleotide
tgctctgacgaccgggaggtgtaaccttca

SEQ ID NO: 305003 - DNA, 30 bp, Artificial Sequence
  Synthetic oligonucleotide
caacgacagcctggtcatgcggggccttca

SEQ ID NO: 305004 - DNA, 30 bp, Artificial Sequence
  Synthetic oligonucleotide
ctattccaaatgagaactacagttccttca

SEQ ID NO: 305005 - DNA, 30 bp, Artificial Sequence
  Synthetic oligonucleotide
gtgtatgaataagccttactattagcttca

SEQ ID NO: 305006 - DNA, 30 bp, Artificial Sequence
  Synthetic oligonucleotide
gatcttacgcgacacaggcaattcgcttca

SEQ ID NO: 305007 - DNA, 30 bp, Artificial Sequence
  Synthetic oligonucleotide
caagaggtcctatacccggcgtcggcttca

SEQ ID NO: 305008 - DNA, 30 bp, Artificial Sequence
  Synthetic oligonucleotide
gaaaggctcgcgtctagcggtagggcttca

SEQ ID NO: 305009 - DNA, 30 bp, Artificial Sequence
  Synthetic oligonucleotide
ttaagagcagacagccgtagccgtgcttca

SEQ ID NO: 305010 - DNA, 30 bp, Artificial Sequence
  Synthetic oligonucleotide
tctaagttcagatgtcattacgtatcttca

SEQ ID NO: 305011 - DNA, 30 bp, Artificial Sequence
  Synthetic oligonucleotide
ttcttacctgctcagtttcaacactcttca

SEQ ID NO: 305012 - DNA, 30 bp, Artificial Sequence
  Synthetic oligonucleotide
gacggttacggtaagccgtcaggctcttca

SEQ ID NO: 305013 - DNA, 30 bp, Artificial Sequence
  Synthetic oligonucleotide
agaaaaactatgggtccccgcaagtcttca

SEQ ID NO: 305014 - DNA, 30 bp, Artificial Sequence
  Synthetic oligonucleotide
tcggaggttcgcatctgctgtccgtcttca

SEQ ID NO: 305015 - DNA, 30 bp, Artificial Sequence
  Synthetic oligonucleotide
aatctatgctctacaaaacgtgtaagttca

SEQ ID NO: 305016 - DNA, 30 bp, Artificial Sequence
  Synthetic oligonucleotide
gaccgggactagacggtcatgtacagttca

SEQ ID NO: 305017 - DNA, 30 bp, Artificial Sequence
  Synthetic oligonucleotide
gcaccgcaatatggtcggtggttcagttca

SEQ ID NO: 305018 - DNA, 30 bp, Artificial Sequence
  Synthetic oligonucleotide
ccgccttaagtcagctctatggcgagttca

SEQ ID NO: 305019 - DNA, 30 bp, Artificial Sequence
  Synthetic oligonucleotide
gttgttaagaatcagggagagctgagttca

SEQ ID NO: 305020 - DNA, 30 bp, Artificial Sequence
  Synthetic oligonucleotide
ttagagaaatctattgtgtggctgagttca

SEQ ID NO: 305021 - DNA, 30 bp, Artificial Sequence
  Synthetic oligonucleotide
gctggaagtgtgctcggtggatctagttca

SEQ ID NO: 305022 - DNA, 30 bp, Artificial Sequence
  Synthetic oligonucleotide
gcgaataagactcatgaaaagtctagttca

SEQ ID NO: 305023 - DNA, 30 bp, Artificial Sequence
  Synthetic oligonucleotide
atgctcactaaacctggagactttagttca

SEQ ID NO: 305024 - DNA, 30 bp, Artificial Sequence
  Synthetic oligonucleotide
gcggacaacttcacgtttgaaaaacgttca

SEQ ID NO: 305025 - DNA, 30 bp, Artificial Sequence
  Synthetic oligonucleotide
gccgctgctccgagatcgactttccgttca

SEQ ID NO: 305026 - DNA, 30 bp, Artificial Sequence
  Synthetic oligonucleotide
aagccgtccctagagaccaaggcgcgttca

SEQ ID NO: 305027 - DNA, 30 bp, Artificial Sequence
  Synthetic oligonucleotide
ctgaacaacctatattaaataatgcgttca

SEQ ID NO: 305028 - DNA, 30 bp, Artificial Sequence
  Synthetic oligonucleotide
gtctaagggctggcgaacttagatcgttca

SEQ ID NO: 305029 - DNA, 30 bp, Artificial Sequence
  Synthetic oligonucleotide
aggtttccttcatacggtcaacatggttca

SEQ ID NO: 305030 - DNA, 30 bp, Artificial Sequence
  Synthetic oligonucleotide
tgcatgatatcctaaataatgtaatgttca

SEQ ID NO: 305031 - DNA, 30 bp, Artificial Sequence
  Synthetic oligonucleotide
acctgatttatatcttccgtgtaatgttca

SEQ ID NO: 305032 - DNA, 30 bp, Artificial Sequence
  Synthetic oligonucleotide
caggaagggctggtgccggtgcggtgttca

SEQ ID NO: 305033 - DNA, 30 bp, Artificial Sequence
  Synthetic oligonucleotide
ttctcagtattcgccgagccatccatttca

SEQ ID NO: 305034 - DNA, 30 bp, Artificial Sequence
  Synthetic oligonucleotide
gatgatcagcgccggcataatgtcatttca

SEQ ID NO: 305035 - DNA, 30 bp, Artificial Sequence
  Synthetic oligonucleotide
tttatgagggcgaaacagtagtagatttca

SEQ ID NO: 305036 - DNA, 30 bp, Artificial Sequence
  Synthetic oligonucleotide
tgcgatcgactcaggggggcaacgatttca

SEQ ID NO: 305037 - DNA, 30 bp, Artificial Sequence
  Synthetic oligonucleotide
tcccggaccggcgtcactcgatcgatttca

SEQ ID NO: 305038 - DNA, 30 bp, Artificial Sequence
  Synthetic oligonucleotide
acaagtgaaatgagtcgtcctcggatttca

SEQ ID NO: 305039 - DNA, 30 bp, Artificial Sequence
  Synthetic oligonucleotide
caaatacaaggccataacgcctatatttca

SEQ ID NO: 305040 - DNA, 30 bp, Artificial Sequence
  Synthetic oligonucleotide
atgacgaaaggaattccactcggcctttca

SEQ ID NO: 305041 - DNA, 30 bp, Artificial Sequence
  Synthetic oligonucleotide
cagaagatgcaatgtgccgctccgctttca

SEQ ID NO: 305042 - DNA, 30 bp, Artificial Sequence
  Synthetic oligonucleotide
tcaacgtgccagacgcgaatagcgctttca

SEQ ID NO: 305043 - DNA, 30 bp, Artificial Sequence
  Synthetic oligonucleotide
ccaaccgcgacgttagcgtttcgtctttca

SEQ ID NO: 305044 - DNA, 30 bp, Artificial Sequence
  Synthetic oligonucleotide
acgagcgtcgatcactgttaggtcgtttca

SEQ ID NO: 305045 - DNA, 30 bp, Artificial Sequence
  Synthetic oligonucleotide
caaactttgcatccgttccaaccggtttca

SEQ ID NO: 305046 - DNA, 30 bp, Artificial Sequence
  Synthetic oligonucleotide
cataaggcttcaaacgacagaaaattttca

SEQ ID NO: 305047 - DNA, 30 bp, Artificial Sequence
  Synthetic oligonucleotide
caatacttaccggcatagaggccattttca

SEQ ID NO: 305048 - DNA, 30 bp, Artificial Sequence
  Synthetic oligonucleotide
cacttgggcatttggtaactggcattttca

SEQ ID NO: 305049 - DNA, 30 bp, Artificial Sequence
  Synthetic oligonucleotide
tcgcggtttcacagggatggtgcattttca

SEQ ID NO: 305050 - DNA, 30 bp, Artificial Sequence
  Synthetic oligonucleotide
tatggggcataggaaggcaatcgcttttca

SEQ ID NO: 305051 - DNA, 30 bp, Artificial Sequence
  Synthetic oligonucleotide
taaccgcaatagacagtggcaaagttttca

SEQ ID NO: 305052 - DNA, 30 bp, Artificial Sequence
  Synthetic oligonucleotide
ccttagaagtaaggatagggaaagttttca

SEQ ID NO: 305053 - DNA, 30 bp, Artificial Sequence
  Synthetic oligonucleotide
attggacacagatcgtgtccgtagttttca

SEQ ID NO: 305054 - DNA, 30 bp, Artificial Sequence
  Synthetic oligonucleotide
aaccaacgttttgcgcttgtcaggttttca

SEQ ID NO: 305055 - DNA, 30 bp, Artificial Sequence
  Synthetic oligonucleotide
caaggggggtccagggcaagggctttttca

SEQ ID NO: 305056 - DNA, 30 bp, Artificial Sequence
  Synthetic oligonucleotide
cgctgcgctattcggacgggaaaaaaaaga

SEQ ID NO: 305057 - DNA, 30 bp, Artificial Sequence
  Synthetic oligonucleotide
ctcagtctgtatagggtgactacaaaaaga

SEQ ID NO: 305058 - DNA, 30 bp, Artificial Sequence
  Synthetic oligonucleotide
tccctctagggaactaagacagtaaaaaga

SEQ ID NO: 305059 - DNA, 30 bp, Artificial Sequence
  Synthetic oligonucleotide
cggtgtcgtaatgtctcacatcacaaaaga

SEQ ID NO: 305060 - DNA, 30 bp, Artificial Sequence
  Synthetic oligonucleotide
gaaagagcgaggatacagttatccaaaaga

SEQ ID NO: 305061 - DNA, 30 bp, Artificial Sequence
  Synthetic oligonucleotide
gtacttcctcgtcccgaaggccgcaaaaga

SEQ ID NO: 305062 - DNA, 30 bp, Artificial Sequence
  Synthetic oligonucleotide
cccaaaagtttcggggataaatgcaaaaga

SEQ ID NO: 305063 - DNA, 30 bp, Artificial Sequence
  Synthetic oligonucleotide
cataggttaaagaatatgggttggaaaaga

SEQ ID NO: 305064 - DNA, 30 bp, Artificial Sequence
  Synthetic oligonucleotide
cctagggcacgctcggcttatctgaaaaga

SEQ ID NO: 305065 - DNA, 30 bp, Artificial Sequence
  Synthetic oligonucleotide
gctctagtcccacgtgaaacattgaaaaga

SEQ ID NO: 305066 - DNA, 30 bp, Artificial Sequence
  Synthetic oligonucleotide
cgtttatggcctcaggcgcggaaacaaaga

SEQ ID NO: 305067 - DNA, 30 bp, Artificial Sequence
  Synthetic oligonucleotide
acatttttaagttgcttagggccacaaaga

SEQ ID NO: 305068 - DNA, 30 bp, Artificial Sequence
  Synthetic oligonucleotide
gaaacttgcgaacccctagtacgacaaaga

SEQ ID NO: 305069 - DNA, 30 bp, Artificial Sequence
  Synthetic oligonucleotide
gtccctggactggatgtagaccagcaaaga

SEQ ID NO: 305070 - DNA, 30 bp, Artificial Sequence
  Synthetic oligonucleotide
aaaaagatcatgtgaatatacgagcaaaga

SEQ ID NO: 305071 - DNA, 30 bp, Artificial Sequence
  Synthetic oligonucleotide
cggtatcgctaatctgatggttagcaaaga

SEQ ID NO: 305072 - DNA, 30 bp, Artificial Sequence
  Synthetic oligonucleotide
cacggtgtaacggtagaccactggcaaaga

SEQ ID NO: 305073 - DNA, 30 bp, Artificial Sequence
  Synthetic oligonucleotide
cttctatgtcgatttcggagttggcaaaga

SEQ ID NO: 305074 - DNA, 30 bp, Artificial Sequence
  Synthetic oligonucleotide
cttggcgtgatttaaatataatcagaaaga

SEQ ID NO: 305075 - DNA, 30 bp, Artificial Sequence
  Synthetic oligonucleotide
gcagcagtgaactcgcaggtagaggaaaga

SEQ ID NO: 305076 - DNA, 30 bp, Artificial Sequence
  Synthetic oligonucleotide
ctacactttcaaccattctcccgggaaaga

SEQ ID NO: 305077 - DNA, 30 bp, Artificial Sequence
  Synthetic oligonucleotide
ccagtttgctgctcaggtgcaatggaaaga

SEQ ID NO: 305078 - DNA, 30 bp, Artificial Sequence
  Synthetic oligonucleotide
gccatttagaccgctgggtaggatgaaaga

SEQ ID NO: 305079 - DNA, 30 bp, Artificial Sequence
  Synthetic oligonucleotide
aaagcccgtgtgggtgatccgggtgaaaga

SEQ ID NO: 305080 - DNA, 30 bp, Artificial Sequence
  Synthetic oligonucleotide
ctctgcgcatcaagggcttcaacataaaga

SEQ ID NO: 305081 - DNA, 30 bp, Artificial Sequence
  Synthetic oligonucleotide
caagcattagtctgccaaggtagctaaaga

SEQ ID NO: 305082 - DNA, 30 bp, Artificial Sequence
  Synthetic oligonucleotide
cggagaatcatgggcctcttggagtaaaga

SEQ ID NO: 305083 - DNA, 30 bp, Artificial Sequence
  Synthetic oligonucleotide
attcaggtaattaaattgcttgtgtaaaga

SEQ ID NO: 305084 - DNA, 30 bp, Artificial Sequence
  Synthetic oligonucleotide
cagatcccgtgacaaggttgtaattaaaga

SEQ ID NO: 305085 - DNA, 30 bp, Artificial Sequence
  Synthetic oligonucleotide
gtgcattttatcttcgggagatattaaaga

SEQ ID NO: 305086 - DNA, 30 bp, Artificial Sequence
  Synthetic oligonucleotide
gcttctactgtaaatcacgaaacttaaaga

SEQ ID NO: 305087 - DNA, 30 bp, Artificial Sequence
  Synthetic oligonucleotide
ttttaaaaggatctcgggggtatttaaaga

SEQ ID NO: 305088 - DNA, 30 bp, Artificial Sequence
  Synthetic oligonucleotide
ccgacgtggggttgttcagttgaaacaaga

SEQ ID NO: 305089 - DNA, 30 bp, Artificial Sequence
  Synthetic oligonucleotide
atgttactcaatacatttagcatgacaaga

SEQ ID NO: 305090 - DNA, 30 bp, Artificial Sequence
  Synthetic oligonucleotide
caaccatgcatgctatactgtcatacaaga

SEQ ID NO: 305091 - DNA, 30 bp, Artificial Sequence
  Synthetic oligonucleotide
tacggataacctccctcgtgaagtacaaga

SEQ ID NO: 305092 - DNA, 30 bp, Artificial Sequence
  Synthetic oligonucleotide
gctgccgtttactggcctcgggtaccaaga

SEQ ID NO: 305093 - DNA, 30 bp, Artificial Sequence
  Synthetic oligonucleotide
gggtctaggccaaaggggacgctcccaaga

SEQ ID NO: 305094 - DNA, 30 bp, Artificial Sequence
  Synthetic oligonucleotide
tgccatgtagtaagtttcgtcatgccaaga

SEQ ID NO: 305095 - DNA, 30 bp, Artificial Sequence
  Synthetic oligonucleotide
tcacccgtggtcggacggactaacgcaaga

SEQ ID NO: 305096 - DNA, 30 bp, Artificial Sequence
  Synthetic oligonucleotide
gtgcttcatatccgcgcttgtccggcaaga

SEQ ID NO: 305097 - DNA, 30 bp, Artificial Sequence
  Synthetic oligonucleotide
ggccactaaactaattgtggcgttgcaaga

SEQ ID NO: 305098 - DNA, 30 bp, Artificial Sequence
  Synthetic oligonucleotide
agcttccggtgtagaaccaatttatcaaga

SEQ ID NO: 305099 - DNA, 30 bp, Artificial Sequence
  Synthetic oligonucleotide
gacaccgggttcttagctgactagtcaaga

SEQ ID NO: 305100 - DNA, 30 bp, Artificial Sequence
  Synthetic oligonucleotide
tttcttcatacgcattgccgtgggtcaaga

SEQ ID NO: 305101 - DNA, 30 bp, Artificial Sequence
  Synthetic oligonucleotide
gtttcgattaccaacgaacatgattcaaga

SEQ ID NO: 305102 - DNA, 30 bp, Artificial Sequence
  Synthetic oligonucleotide
ttaccatggcactcggcaatgccttcaaga

SEQ ID NO: 305103 - DNA, 30 bp, Artificial Sequence
  Synthetic oligonucleotide
ttcccctaaaacttgagtttatgttcaaga

SEQ ID NO: 305104 - DNA, 30 bp, Artificial Sequence
  Synthetic oligonucleotide
ttaagacctgctgtctggtagtcaagaaga

SEQ ID NO: 305105 - DNA, 30 bp, Artificial Sequence
  Synthetic oligonucleotide
ccgggaaggagcacgagatggataagaaga

SEQ ID NO: 305106 - DNA, 30 bp, Artificial Sequence
  Synthetic oligonucleotide
aggcccttgacggcatcgtcagtaagaaga

SEQ ID NO: 305107 - DNA, 30 bp, Artificial Sequence
  Synthetic oligonucleotide
accattataatgatgagctcgtccagaaga

SEQ ID NO: 305108 - DNA, 30 bp, Artificial Sequence
  Synthetic oligonucleotide
gctgttgggaaccgcaacaaatgcagaaga

SEQ ID NO: 305109 - DNA, 30 bp, Artificial Sequence
  Synthetic oligonucleotide
gccgaagcaaggttcgttgcattcagaaga

SEQ ID NO: 305110 - DNA, 30 bp, Artificial Sequence
  Synthetic oligonucleotide
ccaccggcgacttgtcgtaggttcagaaga

SEQ ID NO: 305111 - DNA, 30 bp, Artificial Sequence
  Synthetic oligonucleotide
gagaaacacgcgagaccgctcaggagaaga

SEQ ID NO: 305112 - DNA, 30 bp, Artificial Sequence
  Synthetic oligonucleotide
ctctaacggtatatattgactgggagaaga

SEQ ID NO: 305113 - DNA, 30 bp, Artificial Sequence
  Synthetic oligonucleotide
gatgttgtgcgataaggtactcctagaaga

SEQ ID NO: 305114 - DNA, 30 bp, Artificial Sequence
  Synthetic oligonucleotide
tagtttgcaaggggaaatgtatgtagaaga

SEQ ID NO: 305115 - DNA, 30 bp, Artificial Sequence
  Synthetic oligonucleotide
ttgtcctcgccggtcggtataacacgaaga

SEQ ID NO: 305116 - DNA, 30 bp, Artificial Sequence
  Synthetic oligonucleotide
tgctcctcgaaataagtaacataccgaaga

SEQ ID NO: 305117 - DNA, 30 bp, Artificial Sequence
  Synthetic oligonucleotide
cctgtcctttgtttacaaacatcgcgaaga

SEQ ID NO: 305118 - DNA, 30 bp, Artificial Sequence
  Synthetic oligonucleotide
taccgagcggcattttaatacagtcgaaga

SEQ ID NO: 305119 - DNA, 30 bp, Artificial Sequence
  Synthetic oligonucleotide
gaacaaagttaatgaccaatgcggggaaga

SEQ ID NO: 305120 - DNA, 30 bp, Artificial Sequence
  Synthetic oligonucleotide
gtgcactttaaaattgtatatgctggaaga

SEQ ID NO: 305121 - DNA, 30 bp, Artificial Sequence
  Synthetic oligonucleotide
aattgttatcattattcaaggggtggaaga

SEQ ID NO: 305122 - DNA, 30 bp, Artificial Sequence
  Synthetic oligonucleotide
gtgtagatgcagtaggattaatgtggaaga

SEQ ID NO: 305123 - DNA, 30 bp, Artificial Sequence
  Synthetic oligonucleotide
gtgcttttgagttcggctctccttggaaga

SEQ ID NO: 305124 - DNA, 30 bp, Artificial Sequence
  Synthetic oligonucleotide
gtttactgttaaagtgtgccatcatgaaga

SEQ ID NO: 305125 - DNA, 30 bp, Artificial Sequence
  Synthetic oligonucleotide
tgctgtccgactgtctaagcgtgatgaaga

SEQ ID NO: 305126 - DNA, 30 bp, Artificial Sequence
  Synthetic oligonucleotide
aacaaagagaggcggtctaccaagtgaaga

SEQ ID NO: 305127 - DNA, 30 bp, Artificial Sequence
  Synthetic oligonucleotide
gaccctactggacctaggaataagtgaaga

SEQ ID NO: 305128 - DNA, 30 bp, Artificial Sequence
  Synthetic oligonucleotide
cacaatctcagtgtttctgtttcttgaaga

SEQ ID NO: 305129 - DNA, 30 bp, Artificial Sequence
  Synthetic oligonucleotide
gacgacggcagacggaggcctcaaataaga

SEQ ID NO: 305130 - DNA, 30 bp, Artificial Sequence
  Synthetic oligonucleotide
gggaatggtggtctgattttctgaataaga

SEQ ID NO: 305131 - DNA, 30 bp, Artificial Sequence
  Synthetic oligonucleotide
attcttggccagaaaattttgctaataaga

SEQ ID NO: 305132 - DNA, 30 bp, Artificial Sequence
  Synthetic oligonucleotide
cctccaaacgtgtcagtattccccataaga

SEQ ID NO: 305133 - DNA, 30 bp, Artificial Sequence
  Synthetic oligonucleotide
tgacatcctacctgttataggtgtataaga

SEQ ID NO: 305134 - DNA, 31 bp, Artificial Sequence
  Synthetic oligonucleotide
cggggtcccatcttatcgtgactcactaaga

SEQ ID NO: 305135 - DNA, 30 bp, Artificial Sequence
  Synthetic oligonucleotide
aatgatcgaaggggtaataaactactaaga

SEQ ID NO: 305136 - DNA, 30 bp, Artificial Sequence
  Synthetic oligonucleotide
agcgcttgatccaacagggtacacctaaga

SEQ ID NO: 305137 - DNA, 30 bp, Artificial Sequence
  Synthetic oligonucleotide
aaacagagccgtgacgttgaatccctaaga

SEQ ID NO: 305138 - DNA, 30 bp, Artificial Sequence
  Synthetic oligonucleotide
ggtggggctctgatacgggcttaggtaaga

SEQ ID NO: 305139 - DNA, 30 bp, Artificial Sequence
  Synthetic oligonucleotide
acagctttatggttggatagctcggtaaga

SEQ ID NO: 305140 - DNA, 30 bp, Artificial Sequence
  Synthetic oligonucleotide
gtaaccttgtcacacacaataactgtaaga

SEQ ID NO: 305141 - DNA, 31 bp, Artificial Sequence
  Synthetic oligonucleotide
gaacggggtttaagttagtgctagtgtaaga

SEQ ID NO: 305142 - DNA, 30 bp, Artificial Sequence
  Synthetic oligonucleotide
aagacacatttatacatacgtagattaaga

SEQ ID NO: 305143 - DNA, 30 bp, Artificial Sequence
  Synthetic oligonucleotide
tagaaggcccggaagtttggtctgttaaga

SEQ ID NO: 305144 - DNA, 30 bp, Artificial Sequence
  Synthetic oligonucleotide
cgctagggtttagatataaacccaaacaga

SEQ ID NO: 305145 - DNA, 30 bp, Artificial Sequence
  Synthetic oligonucleotide
gatattatttaattgcgattgagcaacaga

SEQ ID NO: 305146 - DNA, 30 bp, Artificial Sequence
  Synthetic oligonucleotide
aaggagatcaacgagctcccgtgcaacaga

SEQ ID NO: 305147 - DNA, 30 bp, Artificial Sequence
  Synthetic oligonucleotide
agcaacctctatcgcttaactgggaacaga

SEQ ID NO: 305148 - DNA, 30 bp, Artificial Sequence
  Synthetic oligonucleotide
gaccgaagtaagcctatggagccacacaga

SEQ ID NO: 305149 - DNA, 30 bp, Artificial Sequence
  Synthetic oligonucleotide
ctatccggagcttgtaaaagtggacacaga

SEQ ID NO: 305150 - DNA, 30 bp, Artificial Sequence
  Synthetic oligonucleotide
tactacttttgtctcggtagattacacaga

SEQ ID NO: 305151 - DNA, 30 bp, Artificial Sequence
  Synthetic oligonucleotide
tctcacgacagtctgtgtcaataccacaga

SEQ ID NO: 305152 - DNA, 30 bp, Artificial Sequence
  Synthetic oligonucleotide
agtctaaaaactttcacggagaatcacaga

SEQ ID NO: 305153 - DNA, 30 bp, Artificial Sequence
  Synthetic oligonucleotide
agcatcctaaaggacgtggcctcagacaga

SEQ ID NO: 305154 - DNA, 30 bp, Artificial Sequence
  Synthetic oligonucleotide
aatttgagacggttttttaatcacgacaga

SEQ ID NO: 305155 - DNA, 30 bp, Artificial Sequence
  Synthetic oligonucleotide
ttttggaccaaagcttttgagatcgacaga

SEQ ID NO: 305156 - DNA, 30 bp, Artificial Sequence
  Synthetic oligonucleotide
tagtggtgaaccactctgcaccgggacaga

SEQ ID NO: 305157 - DNA, 30 bp, Artificial Sequence
  Synthetic oligonucleotide
gaggttaaagttataaatctagtggacaga

SEQ ID NO: 305158 - DNA, 30 bp, Artificial Sequence
  Synthetic oligonucleotide
gtgctagggccgcccatcacattggacaga

SEQ ID NO: 305159 - DNA, 30 bp, Artificial Sequence
  Synthetic oligonucleotide
tgatatattttggctaggcaaactgacaga

SEQ ID NO: 305160 - DNA, 30 bp, Artificial Sequence
  Synthetic oligonucleotide
gactttgtgtagagttctgccactgacaga

SEQ ID NO: 305161 - DNA, 30 bp, Artificial Sequence
  Synthetic oligonucleotide
cgttgatgcccagagcgtaggatctacaga

SEQ ID NO: 305162 - DNA, 30 bp, Artificial Sequence
  Synthetic oligonucleotide
gtgcaaagtcccttgacgatgcagtacaga

SEQ ID NO: 305163 - DNA, 30 bp, Artificial Sequence
  Synthetic oligonucleotide
tggtgctagtgggcatctgggacgtacaga

SEQ ID NO: 305164 - DNA, 30 bp, Artificial Sequence
  Synthetic oligonucleotide
atgtacggctctgttgagaaattgtacaga

SEQ ID NO: 305165 - DNA, 30 bp, Artificial Sequence
  Synthetic oligonucleotide
agtgttgttcgcctatgtactacttacaga

SEQ ID NO: 305166 - DNA, 30 bp, Artificial Sequence
  Synthetic oligonucleotide
caaagcctacgttgaacgtcgtcttacaga

SEQ ID NO: 305167 - DNA, 30 bp, Artificial Sequence
  Synthetic oligonucleotide
attagtaaaacggaatatagaggcaccaga

SEQ ID NO: 305168 - DNA, 30 bp, Artificial Sequence
  Synthetic oligonucleotide
atatgactgtttttctgtagggcgaccaga

SEQ ID NO: 305169 - DNA, 30 bp, Artificial Sequence
  Synthetic oligonucleotide
aaacatatataaaaggatgtacggaccaga

SEQ ID NO: 305170 - DNA, 30 bp, Artificial Sequence
  Synthetic oligonucleotide
taaagactattagctcttcattgacccaga

SEQ ID NO: 305171 - DNA, 30 bp, Artificial Sequence
  Synthetic oligonucleotide
agttacggctctccctaaagttcagccaga

SEQ ID NO: 305172 - DNA, 30 bp, Artificial Sequence
  Synthetic oligonucleotide
tttgtagcccagtttgaacatctttccaga

SEQ ID NO: 305173 - DNA, 30 bp, Artificial Sequence
  Synthetic oligonucleotide
acctcaatggcccgccgctcctaaagcaga

SEQ ID NO: 305174 - DNA, 30 bp, Artificial Sequence
  Synthetic oligonucleotide
tattcgtgttcgacatctaattaaagcaga

SEQ ID NO: 305175 - DNA, 30 bp, Artificial Sequence
  Synthetic oligonucleotide
gattaataaaggtggggtctaatcagcaga

SEQ ID NO: 305176 - DNA, 31 bp, Artificial Sequence
  Synthetic oligonucleotide
agatatgacccgatcaaatgcattgcgcaga

SEQ ID NO: 305177 - DNA, 30 bp, Artificial Sequence
  Synthetic oligonucleotide
gctaccagctggtctcttacgcaaggcaga

SEQ ID NO: 305178 - DNA, 30 bp, Artificial Sequence
  Synthetic oligonucleotide
aagacagtgaagacggagtactccggcaga

SEQ ID NO: 305179 - DNA, 30 bp, Artificial Sequence
  Synthetic oligonucleotide
aagaaacctaagatttgtggtacgggcaga

SEQ ID NO: 305180 - DNA, 30 bp, Artificial Sequence
  Synthetic oligonucleotide
aacaggcgactttcgataaagtcgggcaga

SEQ ID NO: 305181 - DNA, 30 bp, Artificial Sequence
  Synthetic oligonucleotide
ttcgcatgcacgccatgatttcggggcaga

SEQ ID NO: 305182 - DNA, 30 bp, Artificial Sequence
  Synthetic oligonucleotide
tttcgcacgaatacttatacaatgggcaga

SEQ ID NO: 305183 - DNA, 30 bp, Artificial Sequence
  Synthetic oligonucleotide
ttcttacatcctggcaaaggtcctggcaga

SEQ ID NO: 305184 - DNA, 30 bp, Artificial Sequence
  Synthetic oligonucleotide
gccagatgtagaaaagataaggcatgcaga

SEQ ID NO: 305185 - DNA, 30 bp, Artificial Sequence
  Synthetic oligonucleotide
ggtgatgcgatgcacatcggatcctgcaga

SEQ ID NO: 305186 - DNA, 30 bp, Artificial Sequence
  Synthetic oligonucleotide
atctccaaaaatttaaggtttgtctgcaga

SEQ ID NO: 305187 - DNA, 30 bp, Artificial Sequence
  Synthetic oligonucleotide
gatgaatctctacgaggcgcgaggtgcaga

SEQ ID NO: 305188 - DNA, 30 bp, Artificial Sequence
  Synthetic oligonucleotide
gggatgcaggtcacggatcggaggtgcaga

SEQ ID NO: 305189 - DNA, 30 bp, Artificial Sequence
  Synthetic oligonucleotide
tttcgaattgagatctgtaatgtgtgcaga

SEQ ID NO: 305190 - DNA, 30 bp, Artificial Sequence
  Synthetic oligonucleotide
cgccggcgctagtaccaaaacgcttgcaga

SEQ ID NO: 305191 - DNA, 30 bp, Artificial Sequence
  Synthetic oligonucleotide
tccggctatatggaaggtcaggaaatcaga

SEQ ID NO: 305192 - DNA, 30 bp, Artificial Sequence
  Synthetic oligonucleotide
gaatctgcagtgagcctttgggaaatcaga

SEQ ID NO: 305193 - DNA, 30 bp, Artificial Sequence
  Synthetic oligonucleotide
cccctactagtttaaaagtggcgaatcaga

SEQ ID NO: 305194 - DNA, 30 bp, Artificial Sequence
  Synthetic oligonucleotide
tgattataaaggtcacccagatgcatcaga

SEQ ID NO: 305195 - DNA, 30 bp, Artificial Sequence
  Synthetic oligonucleotide
tatacccaaggggtactatagtgcatcaga

SEQ ID NO: 305196 - DNA, 30 bp, Artificial Sequence
  Synthetic oligonucleotide
cacgaatctcgtttctggcgctcgatcaga

SEQ ID NO: 305197 - DNA, 30 bp, Artificial Sequence
  Synthetic oligonucleotide
tttaggtgtacgcatacagcgtcgatcaga

SEQ ID NO: 305198 - DNA, 30 bp, Artificial Sequence
  Synthetic oligonucleotide
ttctctaaccatagtggtttagaactcaga

SEQ ID NO: 305199 - DNA, 30 bp, Artificial Sequence
  Synthetic oligonucleotide
gattgggatgggtcgagtttataactcaga

SEQ ID NO: 305200 - DNA, 30 bp, Artificial Sequence
  Synthetic oligonucleotide
tgtagggggttaatttgaatacgactcaga

SEQ ID NO: 305201 - DNA, 30 bp, Artificial Sequence
  Synthetic oligonucleotide
gacatagcattaaaagtcaatcccctcaga

SEQ ID NO: 305202 - DNA, 30 bp, Artificial Sequence
  Synthetic oligonucleotide
cgtcgttacgcgtgtgctgaatccctcaga

SEQ ID NO: 305203 - DNA, 30 bp, Artificial Sequence
  Synthetic oligonucleotide
gtcataattaactgtggtctacggctcaga

SEQ ID NO: 305204 - DNA, 30 bp, Artificial Sequence
  Synthetic oligonucleotide
cgctcgtagtagcacgtcagcggagtcaga

SEQ ID NO: 305205 - DNA, 30 bp, Artificial Sequence
  Synthetic oligonucleotide
gaatccaaagtgtgggattgatacgtcaga

SEQ ID NO: 305206 - DNA, 30 bp, Artificial Sequence
  Synthetic oligonucleotide
taacgggcagtccgctcactgtgcgtcaga

SEQ ID NO: 305207 - DNA, 30 bp, Artificial Sequence
  Synthetic oligonucleotide
tgtggttgtcggctagggaacatcgtcaga

SEQ ID NO: 305208 - DNA, 30 bp, Artificial Sequence
  Synthetic oligonucleotide
tcccggcggcgagcacagttgcaggtcaga

SEQ ID NO: 305209 - DNA, 30 bp, Artificial Sequence
  Synthetic oligonucleotide
ctttttgtaaagtaccggggaacggtcaga

SEQ ID NO: 305210 - DNA, 30 bp, Artificial Sequence
  Synthetic oligonucleotide
ttaaaagaatacatggttcaggtggtcaga

SEQ ID NO: 305211 - DNA, 30 bp, Artificial Sequence
  Synthetic oligonucleotide
gattttacacccgaaacgtgtaatgtcaga

SEQ ID NO: 305212 - DNA, 30 bp, Artificial Sequence
  Synthetic oligonucleotide
atacggcaggtggtagctgtctgcttcaga

SEQ ID NO: 305213 - DNA, 30 bp, Artificial Sequence
  Synthetic oligonucleotide
tttgataccgcttactacccacagttcaga

SEQ ID NO: 305214 - DNA, 30 bp, Artificial Sequence
  Synthetic oligonucleotide
agataggcctgcctcggtcattagttcaga

SEQ ID NO: 305215 - DNA, 30 bp, Artificial Sequence
  Synthetic oligonucleotide
cgttcgtcgtatagctgggcggggttcaga

SEQ ID NO: 305216 - DNA, 30 bp, Artificial Sequence
  Synthetic oligonucleotide
acaacttacaaatcaagtgtcagtttcaga

SEQ ID NO: 305217 - DNA, 30 bp, Artificial Sequence
  Synthetic oligonucleotide
aagaacgtttcgtacttatacggtttcaga

SEQ ID NO: 305218 - DNA, 30 bp, Artificial Sequence
  Synthetic oligonucleotide
gttctactaagggttgggcggattttcaga

SEQ ID NO: 305219 - DNA, 30 bp, Artificial Sequence
  Synthetic oligonucleotide
atatttccgttcacgaatatgggaaagaga

SEQ ID NO: 305220 - DNA, 30 bp, Artificial Sequence
  Synthetic oligonucleotide
ctgtttcgatcacattcctttatcaagaga

SEQ ID NO: 305221 - DNA, 30 bp, Artificial Sequence
  Synthetic oligonucleotide
caacgcagccatatgggcccagtcaagaga

SEQ ID NO: 305222 - DNA, 30 bp, Artificial Sequence
  Synthetic oligonucleotide
aaatattgtgccgcagtgcgggtcaagaga

SEQ ID NO: 305223 - DNA, 30 bp, Artificial Sequence
  Synthetic oligonucleotide
ctggtctgtctattagatctaaagaagaga

SEQ ID NO: 305224 - DNA, 30 bp, Artificial Sequence
  Synthetic oligonucleotide
ggtacttcttgcggtaacatgaagaagaga

SEQ ID NO: 305225 - DNA, 30 bp, Artificial Sequence
  Synthetic oligonucleotide
accacaatattgagcagtacagataagaga

SEQ ID NO: 305226 - DNA, 30 bp, Artificial Sequence
  Synthetic oligonucleotide
gatctcagcataattgagggcggtaagaga

SEQ ID NO: 305227 - DNA, 30 bp, Artificial Sequence
  Synthetic oligonucleotide
tcgacctgaaaccctctcatgtgtaagaga

SEQ ID NO: 305228 - DNA, 30 bp, Artificial Sequence
  Synthetic oligonucleotide
aatgcacgctaggactcataaccacagaga

SEQ ID NO: 305229 - DNA, 30 bp, Artificial Sequence
  Synthetic oligonucleotide
cacatgcacccaggcatccctgtgcagaga

SEQ ID NO: 305230 - DNA, 30 bp, Artificial Sequence
  Synthetic oligonucleotide
gctgagccgcagaagtgagattttcagaga

SEQ ID NO: 305231 - DNA, 30 bp, Artificial Sequence
  Synthetic oligonucleotide
cttttcaaaccgattagagatggagagaga

SEQ ID NO: 305232 - DNA, 30 bp, Artificial Sequence
  Synthetic oligonucleotide
ccttataagtgttcgtgtattgaggagaga

SEQ ID NO: 305233 - DNA, 30 bp, Artificial Sequence
  Synthetic oligonucleotide
ttaataagacgatataacttaacggagaga

SEQ ID NO: 305234 - DNA, 30 bp, Artificial Sequence
  Synthetic oligonucleotide
gttgattagacttgccctaaatgggagaga

SEQ ID NO: 305235 - DNA, 30 bp, Artificial Sequence
  Synthetic oligonucleotide
acaagggcgttttttactcaatgtgagaga

SEQ ID NO: 305236 - DNA, 30 bp, Artificial Sequence
  Synthetic oligonucleotide
tatcaaatgctgagtatgacttgtgagaga

SEQ ID NO: 305237 - DNA, 30 bp, Artificial Sequence
  Synthetic oligonucleotide
ttgacttgaagccggagtagtatctagaga

SEQ ID NO: 305238 - DNA, 30 bp, Artificial Sequence
  Synthetic oligonucleotide
gagttagactatggactctaggtctagaga

SEQ ID NO: 305239 - DNA, 30 bp, Artificial Sequence
  Synthetic oligonucleotide
gctggccgacgacaccgtctaacttagaga

SEQ ID NO: 305240 - DNA, 30 bp, Artificial Sequence
  Synthetic oligonucleotide
acgtttaacgacgtcaaagtcgaaacgaga

SEQ ID NO: 305241 - DNA, 30 bp, Artificial Sequence
  Synthetic oligonucleotide
ctagctcggatggcgtaagataagacgaga

SEQ ID NO: 305242 - DNA, 30 bp, Artificial Sequence
  Synthetic oligonucleotide
gactctgaagtgcattcttcatctacgaga

SEQ ID NO: 305243 - DNA, 30 bp, Artificial Sequence
  Synthetic oligonucleotide
aaacgtatccgctagcgggctattacgaga

SEQ ID NO: 305244 - DNA, 30 bp, Artificial Sequence
  Synthetic oligonucleotide
taaagctgctatgtaaaattccttacgaga

SEQ ID NO: 305245 - DNA, 30 bp, Artificial Sequence
  Synthetic oligonucleotide
gtcttcaaggcatacacgtatacaccgaga

SEQ ID NO: 305246 - DNA, 30 bp, Artificial Sequence
  Synthetic oligonucleotide
gttaagacgtgtgcgtatggcagaccgaga

SEQ ID NO: 305247 - DNA, 30 bp, Artificial Sequence
  Synthetic oligonucleotide
tgcatgtagctgccatctttcagtccgaga

SEQ ID NO: 305248 - DNA, 30 bp, Artificial Sequence
  Synthetic oligonucleotide
tcacagattacgcagattcgttgtccgaga

SEQ ID NO: 305249 - DNA, 30 bp, Artificial Sequence
  Synthetic oligonucleotide
aagccatattccggcactagctcagcgaga

SEQ ID NO: 305250 - DNA, 30 bp, Artificial Sequence
  Synthetic oligonucleotide
ggaaaaaattacgcgttattgaacgcgaga

SEQ ID NO: 305251 - DNA, 30 bp, Artificial Sequence
  Synthetic oligonucleotide
cactacgccaacgacttgccgcccgcgaga

SEQ ID NO: 305252 - DNA, 30 bp, Artificial Sequence
  Synthetic oligonucleotide
ccgaacatggagatcttcgccaaggcgaga

SEQ ID NO: 305253 - DNA, 30 bp, Artificial Sequence
  Synthetic oligonucleotide
gcccgaaaagtattaacgatcaaggcgaga

SEQ ID NO: 305254 - DNA, 30 bp, Artificial Sequence
  Synthetic oligonucleotide
aacattatagatttatctggcgatgcgaga

SEQ ID NO: 305255 - DNA, 30 bp, Artificial Sequence
  Synthetic oligonucleotide
ctcaaatggccgaagccaatttttgcgaga

SEQ ID NO: 305256 - DNA, 30 bp, Artificial Sequence
  Synthetic oligonucleotide
agccggttgtaattaccgacagcatcgaga

SEQ ID NO: 305257 - DNA, 30 bp, Artificial Sequence
  Synthetic oligonucleotide
aactagatctaggtcctcgtcgcatcgaga

SEQ ID NO: 305258 - DNA, 30 bp, Artificial Sequence
  Synthetic oligonucleotide
cagcttaattaaaagcgcaggagctcgaga

SEQ ID NO: 305259 - DNA, 30 bp, Artificial Sequence
  Synthetic oligonucleotide
tccaagtcaagaatacctcggctgtcgaga

SEQ ID NO: 305260 - DNA, 30 bp, Artificial Sequence
  Synthetic oligonucleotide
cccgtacagggaaggggtttcaattcgaga

SEQ ID NO: 305261 - DNA, 30 bp, Artificial Sequence
  Synthetic oligonucleotide
agacacgacgcgagcggctcaagttcgaga

SEQ ID NO: 305262 - DNA, 30 bp, Artificial Sequence
  Synthetic oligonucleotide
ttacgagatggttctaatatgcgttcgaga

SEQ ID NO: 305263 - DNA, 30 bp, Artificial Sequence
  Synthetic oligonucleotide
cgtacgtagttgcgcgacccttgaaggaga

SEQ ID NO: 305264 - DNA, 30 bp, Artificial Sequence
  Synthetic oligonucleotide
tggatgagtgatactgattcactaaggaga

SEQ ID NO: 305265 - DNA, 30 bp, Artificial Sequence
  Synthetic oligonucleotide
atatcttctaatccagatgaatccaggaga

SEQ ID NO: 305266 - DNA, 30 bp, Artificial Sequence
  Synthetic oligonucleotide
gtgcagaagcgttcccggagaccgaggaga

SEQ ID NO: 305267 - DNA, 30 bp, Artificial Sequence
  Synthetic oligonucleotide
tgcgcccaagccgtatattagtgtaggaga

SEQ ID NO: 305268 - DNA, 30 bp, Artificial Sequence
  Synthetic oligonucleotide
ggatctacccatgtgcgatggattaggaga

SEQ ID NO: 305269 - DNA, 30 bp, Artificial Sequence
  Synthetic oligonucleotide
cgcccggaagcacatagtctcgtacggaga

SEQ ID NO: 305270 - DNA, 30 bp, Artificial Sequence
  Synthetic oligonucleotide
ttgttgtggttacaccatatattacggaga

SEQ ID NO: 305271 - DNA, 30 bp, Artificial Sequence
  Synthetic oligonucleotide
cattacaataaatcatagttttcccggaga

SEQ ID NO: 305272 - DNA, 40 bp, Artificial Sequence
  Synthetic oligonucleotide
ccctgtggtgtgggttcggagtatcaatggaatccggaga

SEQ ID NO: 305273 - DNA, 30 bp, Artificial Sequence
  Synthetic oligonucleotide
ttgtttcatgtccataaatgttagcggaga

SEQ ID NO: 305274 - DNA, 30 bp, Artificial Sequence
  Synthetic oligonucleotide
gacccgatactggtaatgtgcctgcggaga

SEQ ID NO: 305275 - DNA, 30 bp, Artificial Sequence
  Synthetic oligonucleotide
ccgcacatcccacttgcagagttgcggaga

SEQ ID NO: 305276 - DNA, 30 bp, Artificial Sequence
  Synthetic oligonucleotide
ttcagtctagggtcctagctgaatcggaga

SEQ ID NO: 305277 - DNA, 30 bp, Artificial Sequence
  Synthetic oligonucleotide
tatggcgagagctgtttggcacatcggaga

SEQ ID NO: 305278 - DNA, 30 bp, Artificial Sequence
  Synthetic oligonucleotide
aatctaacgtcacgtgcggatgatcggaga

SEQ ID NO: 305279 - DNA, 30 bp, Artificial Sequence
  Synthetic oligonucleotide
ttcaaacgtgagcgtaccaagtctcggaga

SEQ ID NO: 305280 - DNA, 30 bp, Artificial Sequence
  Synthetic oligonucleotide
taatttatgctcgacaccgttgttcggaga

SEQ ID NO: 305281 - DNA, 30 bp, Artificial Sequence
  Synthetic oligonucleotide
tttcgttatagcgtatgagaacaagggaga

SEQ ID NO: 305282 - DNA, 30 bp, Artificial Sequence
  Synthetic oligonucleotide
catgcggtagccacggtttaccgagggaga

SEQ ID NO: 305283 - DNA, 30 bp, Artificial Sequence
  Synthetic oligonucleotide
aacaaaacagtgtgagtttgacgcgggaga

SEQ ID NO: 305284 - DNA, 31 bp, Artificial Sequence
  Synthetic oligonucleotide
cccagtaattacgtctagttcatctgggaga

SEQ ID NO: 305285 - DNA, 30 bp, Artificial Sequence
  Synthetic oligonucleotide
acaggattgcttccaggcagaattgggaga

SEQ ID NO: 305286 - DNA, 30 bp, Artificial Sequence
  Synthetic oligonucleotide
gctctgtataacgccgtgagatttgggaga

SEQ ID NO: 305287 - DNA, 30 bp, Artificial Sequence
  Synthetic oligonucleotide
aagctcaatgtgtgatcaaagccatggaga

SEQ ID NO: 305288 - DNA, 30 bp, Artificial Sequence
  Synthetic oligonucleotide
tcactagcgtaaaacagatatttatggaga

SEQ ID NO: 305289 - DNA, 30 bp, Artificial Sequence
  Synthetic oligonucleotide
acggccgttagcgcttcagcgaggtggaga

SEQ ID NO: 305290 - DNA, 30 bp, Artificial Sequence
  Synthetic oligonucleotide
ttcagactctgctatctgaaaacaatgaga

SEQ ID NO: 305291 - DNA, 30 bp, Artificial Sequence
  Synthetic oligonucleotide
tcatttcaacttgtgaatattgtcatgaga

SEQ ID NO: 305292 - DNA, 30 bp, Artificial Sequence
  Synthetic oligonucleotide
ggcattcgtctaccacaaggcttcatgaga

SEQ ID NO: 305293 - DNA, 30 bp, Artificial Sequence
  Synthetic oligonucleotide
ataaccatcactggtgtgatatggatgaga

SEQ ID NO: 305294 - DNA, 30 bp, Artificial Sequence
  Synthetic oligonucleotide
gcggacctctatcgcgtcattagtatgaga

SEQ ID NO: 305295 - DNA, 30 bp, Artificial Sequence
  Synthetic oligonucleotide
aaggtcattctggagtgtctttttatgaga

SEQ ID NO: 305296 - DNA, 30 bp, Artificial Sequence
  Synthetic oligonucleotide
ttttcgggcgggtgtacacgcttactgaga

SEQ ID NO: 305297 - DNA, 30 bp, Artificial Sequence
  Synthetic oligonucleotide
cgcatctaatcaggtacatgtcccctgaga

SEQ ID NO: 305298 - DNA, 30 bp, Artificial Sequence
  Synthetic oligonucleotide
tagggagttttatccgtggagaagctgaga

SEQ ID NO: 305299 - DNA, 30 bp, Artificial Sequence
  Synthetic oligonucleotide
cctaggtgagtttccagctcgaagctgaga

SEQ ID NO: 305300 - DNA, 30 bp, Artificial Sequence
  Synthetic oligonucleotide
tcatagatttgagagcacgtacttctgaga

SEQ ID NO: 305301 - DNA, 30 bp, Artificial Sequence
  Synthetic oligonucleotide
tcgtcggcgatcggttctcctaaagtgaga

SEQ ID NO: 305302 - DNA, 30 bp, Artificial Sequence
  Synthetic oligonucleotide
cgcgattagacatttcgttcacaggtgaga

SEQ ID NO: 305303 - DNA, 30 bp, Artificial Sequence
  Synthetic oligonucleotide
accaagcccacatggttgtcctcattgaga

SEQ ID NO: 305304 - DNA, 30 bp, Artificial Sequence
  Synthetic oligonucleotide
tcgttttacttgggggagagcagattgaga

SEQ ID NO: 305305 - DNA, 30 bp, Artificial Sequence
  Synthetic oligonucleotide
acttggactcgcaagacccgcttattgaga

SEQ ID NO: 305306 - DNA, 30 bp, Artificial Sequence
  Synthetic oligonucleotide
gtcggtgtgggctttagcgggttcttgaga

SEQ ID NO: 305307 - DNA, 30 bp, Artificial Sequence
  Synthetic oligonucleotide
actcagtcagaattacaagaccagttgaga

SEQ ID NO: 305308 - DNA, 30 bp, Artificial Sequence
  Synthetic oligonucleotide
ttaaaaaaaacccatagacccataaataga

SEQ ID NO: 305309 - DNA, 30 bp, Artificial Sequence
  Synthetic oligonucleotide
ggaggccgctatgtctcgtcagtaaataga

SEQ ID NO: 305310 - DNA, 31 bp, Artificial Sequence
  Synthetic oligonucleotide
tttccgtcgagaggatcagccaagcaataga

SEQ ID NO: 305311 - DNA, 29 bp, Artificial Sequence
  Synthetic oligonucleotide
gcgtataaacaatctcttgccgcaataga

SEQ ID NO: 305312 - DNA, 30 bp, Artificial Sequence
  Synthetic oligonucleotide
gaaagacacgtgtacaggtattgcaataga

SEQ ID NO: 305313 - DNA, 30 bp, Artificial Sequence
  Synthetic oligonucleotide
tcacttggccggccgaccggcatcaataga

SEQ ID NO: 305314 - DNA, 30 bp, Artificial Sequence
  Synthetic oligonucleotide
ttcagtggatgattaaattatcggaataga

SEQ ID NO: 305315 - DNA, 30 bp, Artificial Sequence
  Synthetic oligonucleotide
ggcacttccggcacacgcgggcttaataga

SEQ ID NO: 305316 - DNA, 30 bp, Artificial Sequence
  Synthetic oligonucleotide
aagatcatgaataggagggctgtacataga

SEQ ID NO: 305317 - DNA, 30 bp, Artificial Sequence
  Synthetic oligonucleotide
tatcaacgattagataggtttacgcataga

SEQ ID NO: 305318 - DNA, 30 bp, Artificial Sequence
  Synthetic oligonucleotide
ggagaatcgtcaaaggggatagcgcataga

SEQ ID NO: 305319 - DNA, 30 bp, Artificial Sequence
  Synthetic oligonucleotide
gggtattggccgcagagcgctcatcataga

SEQ ID NO: 305320 - DNA, 31 bp, Artificial Sequence
  Synthetic oligonucleotide
ctataaaggttcggctacagcagatcataga

SEQ ID NO: 305321 - DNA, 30 bp, Artificial Sequence
  Synthetic oligonucleotide
gacgccacgggttaaagtggcattcataga

SEQ ID NO: 305322 - DNA, 30 bp, Artificial Sequence
  Synthetic oligonucleotide
gcaaatttggtcgctagccaacacgataga

SEQ ID NO: 305323 - DNA, 30 bp, Artificial Sequence
  Synthetic oligonucleotide
agttgacctttgccattcctttgggataga

SEQ ID NO: 305324 - DNA, 30 bp, Artificial Sequence
  Synthetic oligonucleotide
ctgtatggttacatctgaagctatgataga

SEQ ID NO: 305325 - DNA, 30 bp, Artificial Sequence
  Synthetic oligonucleotide
gtgcttagcttttagctgcgaagatataga

SEQ ID NO: 305326 - DNA, 30 bp, Artificial Sequence
  Synthetic oligonucleotide
caagaggtaatcacctgactcaagtataga

SEQ ID NO: 305327 - DNA, 30 bp, Artificial Sequence
  Synthetic oligonucleotide
ggagtgtacaaattcaagccgcagtataga

SEQ ID NO: 305328 - DNA, 30 bp, Artificial Sequence
  Synthetic oligonucleotide
ggcagtcagtcgttctgaattgggtataga

SEQ ID NO: 305329 - DNA, 30 bp, Artificial Sequence
  Synthetic oligonucleotide
ctccgacactaggggggaggaggttataga

SEQ ID NO: 305330 - DNA, 30 bp, Artificial Sequence
  Synthetic oligonucleotide
tcactctgcaactcacgatgacgaactaga

SEQ ID NO: 305331 - DNA, 30 bp, Artificial Sequence
  Synthetic oligonucleotide
gctagggcgcaaatgattccctagactaga

SEQ ID NO: 305332 - DNA, 30 bp, Artificial Sequence
  Synthetic oligonucleotide
ggtgccatgctgacgcaaactcggactaga

SEQ ID NO: 305333 - DNA, 30 bp, Artificial Sequence
  Synthetic oligonucleotide
ttccgttcgggtcatggtttagatactaga

SEQ ID NO: 305334 - DNA, 30 bp, Artificial Sequence
  Synthetic oligonucleotide
gcaacagttcccaaggctgcgtttactaga

SEQ ID NO: 305335 - DNA, 30 bp, Artificial Sequence
  Synthetic oligonucleotide
gccaacggcggcattggtaattcacctaga

SEQ ID NO: 305336 - DNA, 30 bp, Artificial Sequence
  Synthetic oligonucleotide
tgtgtttcaggcaaaagtcgttgacctaga

SEQ ID NO: 305337 - DNA, 30 bp, Artificial Sequence
  Synthetic oligonucleotide
tcccaattcgaagcgagcgtgcaccctaga

SEQ ID NO: 305338 - DNA, 30 bp, Artificial Sequence
  Synthetic oligonucleotide
acaagcaactacggggtacctagccctaga

SEQ ID NO: 305339 - DNA, 30 bp, Artificial Sequence
  Synthetic oligonucleotide
agatgttagaatctcgatggttggcctaga

SEQ ID NO: 305340 - DNA, 30 bp, Artificial Sequence
  Synthetic oligonucleotide
tttccctgcttagcgcctacctaagctaga

SEQ ID NO: 305341 - DNA, 30 bp, Artificial Sequence
  Synthetic oligonucleotide
tgtacgaactccgcgacgccgggagctaga

SEQ ID NO: 305342 - DNA, 30 bp, Artificial Sequence
  Synthetic oligonucleotide
acgcaggtgaactctatgcttcatgctaga

SEQ ID NO: 305343 - DNA, 30 bp, Artificial Sequence
  Synthetic oligonucleotide
tgttttgttaagtggaactatcctgctaga

SEQ ID NO: 305344 - DNA, 30 bp, Artificial Sequence
  Synthetic oligonucleotide
gtcagttagctcatgcgatcgcgatctaga

SEQ ID NO: 305345 - DNA, 30 bp, Artificial Sequence
  Synthetic oligonucleotide
ttgccataaagctcgcttcgagagtctaga

SEQ ID NO: 305346 - DNA, 30 bp, Artificial Sequence
  Synthetic oligonucleotide
ctaatccgtctgtaagaccgtgtttctaga

SEQ ID NO: 305347 - DNA, 30 bp, Artificial Sequence
  Synthetic oligonucleotide
aaagttgatcagtagactcatcacagtaga

SEQ ID NO: 305348 - DNA, 30 bp, Artificial Sequence
  Synthetic oligonucleotide
ggagttcccgttgagggggggtccagtaga

SEQ ID NO: 305349 - DNA, 30 bp, Artificial Sequence
  Synthetic oligonucleotide
gcatcggtgcagctagataatcggagtaga

SEQ ID NO: 305350 - DNA, 30 bp, Artificial Sequence
  Synthetic oligonucleotide
atagtggttctatatgataacgctagtaga

SEQ ID NO: 305351 - DNA, 30 bp, Artificial Sequence
  Synthetic oligonucleotide
gaattggactcatgggcgaagctccgtaga

SEQ ID NO: 305352 - DNA, 30 bp, Artificial Sequence
  Synthetic oligonucleotide
catcaccatggatttttcgttgatcgtaga

SEQ ID NO: 305353 - DNA, 30 bp, Artificial Sequence
  Synthetic oligonucleotide
tctagccgtttattcaagagttaaggtaga

SEQ ID NO: 305354 - DNA, 30 bp, Artificial Sequence
  Synthetic oligonucleotide
agagactgagttatactgcagggcggtaga

SEQ ID NO: 305355 - DNA, 30 bp, Artificial Sequence
  Synthetic oligonucleotide
tctgcagagtctatatgaattttcggtaga

SEQ ID NO: 305356 - DNA, 30 bp, Artificial Sequence
  Synthetic oligonucleotide
accagagtcgggaagagggtctagggtaga

SEQ ID NO: 305357 - DNA, 30 bp, Artificial Sequence
  Synthetic oligonucleotide
cataacgacacgttatgttattcgggtaga

SEQ ID NO: 305358 - DNA, 30 bp, Artificial Sequence
  Synthetic oligonucleotide
tacgtcaaacataaattggtagatggtaga

SEQ ID NO: 305359 - DNA, 30 bp, Artificial Sequence
  Synthetic oligonucleotide
atctctattgtcagaactggttatggtaga

SEQ ID NO: 305360 - DNA, 30 bp, Artificial Sequence
  Synthetic oligonucleotide
aaagtggtagtcggtcataagtttggtaga

SEQ ID NO: 305361 - DNA, 30 bp, Artificial Sequence
  Synthetic oligonucleotide
taaaaagcatacttgtggcatgaatgtaga

SEQ ID NO: 305362 - DNA, 30 bp, Artificial Sequence
  Synthetic oligonucleotide
cgcaacgaggaataggcctcgatatgtaga

SEQ ID NO: 305363 - DNA, 30 bp, Artificial Sequence
  Synthetic oligonucleotide
agtacacgcctgatgcttaagttctgtaga

SEQ ID NO: 305364 - DNA, 30 bp, Artificial Sequence
  Synthetic oligonucleotide
ctatccccagagtgagttggcccgtgtaga

SEQ ID NO: 305365 - DNA, 29 bp, Artificial Sequence
  Synthetic oligonucleotide
agccaagtgtcaactacagcctgtgtaga

SEQ ID NO: 305366 - DNA, 30 bp, Artificial Sequence
  Synthetic oligonucleotide
tggggttgaaagcggagcgccatttgtaga

SEQ ID NO: 305367 - DNA, 30 bp, Artificial Sequence
  Synthetic oligonucleotide
ttataagaaagtggtatgcttagaattaga

SEQ ID NO: 305368 - DNA, 30 bp, Artificial Sequence
  Synthetic oligonucleotide
ctatcctacttaaccgtaatacgaattaga

SEQ ID NO: 305369 - DNA, 30 bp, Artificial Sequence
  Synthetic oligonucleotide
tctgggacattcggaaagggatccattaga

SEQ ID NO: 305370 - DNA, 30 bp, Artificial Sequence
  Synthetic oligonucleotide
tatggtatgcggtgacgaagaagcattaga

SEQ ID NO: 305371 - DNA, 30 bp, Artificial Sequence
  Synthetic oligonucleotide
cgtcgtggctaacgctatatgtgcattaga

SEQ ID NO: 305372 - DNA, 30 bp, Artificial Sequence
  Synthetic oligonucleotide
cttataagggggtgttaacctcatattaga

SEQ ID NO: 305373 - DNA, 30 bp, Artificial Sequence
  Synthetic oligonucleotide
atgccatggaggggacctcaaagtattaga

SEQ ID NO: 305374 - DNA, 30 bp, Artificial Sequence
  Synthetic oligonucleotide
atttggaacagtctgttagttatacttaga

SEQ ID NO: 305375 - DNA, 30 bp, Artificial Sequence
  Synthetic oligonucleotide
gattattgtcagtcccccacccagcttaga

SEQ ID NO: 305376 - DNA, 30 bp, Artificial Sequence
  Synthetic oligonucleotide
agtttgtcacacatacatgcctggcttaga

SEQ ID NO: 305377 - DNA, 30 bp, Artificial Sequence
  Synthetic oligonucleotide
catttccgaattaatcatgggctgcttaga

SEQ ID NO: 305378 - DNA, 30 bp, Artificial Sequence
  Synthetic oligonucleotide
ccacggaataagatagagagcatcgttaga

SEQ ID NO: 305379 - DNA, 30 bp, Artificial Sequence
  Synthetic oligonucleotide
gtgaccatgtgcgtaaaatagcatgttaga

SEQ ID NO: 305380 - DNA, 30 bp, Artificial Sequence
  Synthetic oligonucleotide
tcgtcattaaagtttccttgctctgttaga

SEQ ID NO: 305381 - DNA, 30 bp, Artificial Sequence
  Synthetic oligonucleotide
aatggaggatgttgcagacggagtgttaga

SEQ ID NO: 305382 - DNA, 30 bp, Artificial Sequence
  Synthetic oligonucleotide
aacatcatggggcaccaagattaatttaga

SEQ ID NO: 305383 - DNA, 30 bp, Artificial Sequence
  Synthetic oligonucleotide
ctgagacgtttatagagtaaatgatttaga

SEQ ID NO: 305384 - DNA, 30 bp, Artificial Sequence
  Synthetic oligonucleotide
agatctaatttcacaacgagctgctttaga

SEQ ID NO: 305385 - DNA, 30 bp, Artificial Sequence
  Synthetic oligonucleotide
actatgtggtgtaagtgtaatcggtttaga

SEQ ID NO: 305386 - DNA, 30 bp, Artificial Sequence
  Synthetic oligonucleotide
ccgttttatgataagccccgcttgtttaga

SEQ ID NO: 305387 - DNA, 30 bp, Artificial Sequence
  Synthetic oligonucleotide
catacagtacctcgatcctctttgtttaga

SEQ ID NO: 305388 - DNA, 30 bp, Artificial Sequence
  Synthetic oligonucleotide
atcgtttatcgagcagataagaattttaga

SEQ ID NO: 305389 - DNA, 31 bp, Artificial Sequence
  Synthetic oligonucleotide
tgtcaagaacactgatcgtatatgttttaga

SEQ ID NO: 305390 - DNA, 30 bp, Artificial Sequence
  Synthetic oligonucleotide
tacaagcgcgggcagcccctggaaaaacga

SEQ ID NO: 305391 - DNA, 30 bp, Artificial Sequence
  Synthetic oligonucleotide
actctcggctccgaagaccaggtaaaacga

SEQ ID NO: 305392 - DNA, 30 bp, Artificial Sequence
  Synthetic oligonucleotide
ctcacctggcgcttctggagattcaaacga

SEQ ID NO: 305393 - DNA, 30 bp, Artificial Sequence
  Synthetic oligonucleotide
ctcgacctaatgtcatacatgaagaaacga

SEQ ID NO: 305394 - DNA, 30 bp, Artificial Sequence
  Synthetic oligonucleotide
atgttccgggggttcgcgacgccgaaacga

SEQ ID NO: 305395 - DNA, 30 bp, Artificial Sequence
  Synthetic oligonucleotide
tttattgaatctattcaattgtcgaaacga

SEQ ID NO: 305396 - DNA, 30 bp, Artificial Sequence
  Synthetic oligonucleotide
ggagataggtgatgaatagaccgtaaacga

SEQ ID NO: 305397 - DNA, 30 bp, Artificial Sequence
  Synthetic oligonucleotide
tcactagtattgtgtgtattcgtccaacga

SEQ ID NO: 305398 - DNA, 30 bp, Artificial Sequence
  Synthetic oligonucleotide
gactgatcctaacaagcctttaagcaacga

SEQ ID NO: 305399 - DNA, 30 bp, Artificial Sequence
  Synthetic oligonucleotide
tggggccgtcacacagaatcggggcaacga

SEQ ID NO: 305400 - DNA, 30 bp, Artificial Sequence
  Synthetic oligonucleotide
gttgctgacgaagaacatgccgttcaacga

SEQ ID NO: 305401 - DNA, 30 bp, Artificial Sequence
  Synthetic oligonucleotide
gacctccaccgttgcaattcgaacgaacga

SEQ ID NO: 305402 - DNA, 30 bp, Artificial Sequence
  Synthetic oligonucleotide
ggtctatccactgacgactgtacggaacga

SEQ ID NO: 305403 - DNA, 30 bp, Artificial Sequence
  Synthetic oligonucleotide
cagtcaagatggaaatgatggggggaacga

SEQ ID NO: 305404 - DNA, 30 bp, Artificial Sequence
  Synthetic oligonucleotide
gtgacgttggtcaatgcctttcgtgaacga

SEQ ID NO: 305405 - DNA, 30 bp, Artificial Sequence
  Synthetic oligonucleotide
gcgcgaggttcatgactcccgtgtgaacga

SEQ ID NO: 305406 - DNA, 30 bp, Artificial Sequence
  Synthetic oligonucleotide
gtgtcccaaatttaataaccaccataacga

SEQ ID NO: 305407 - DNA, 30 bp, Artificial Sequence
  Synthetic oligonucleotide
atcactagtcagtcccgggagtactaacga

SEQ ID NO: 305408 - DNA, 30 bp, Artificial Sequence
  Synthetic oligonucleotide
ctggaaatcgcatgttcaaaagggtaacga

SEQ ID NO: 305409 - DNA, 30 bp, Artificial Sequence
  Synthetic oligonucleotide
tactgggataagataggcggcgtgtaacga

SEQ ID NO: 305410 - DNA, 30 bp, Artificial Sequence
  Synthetic oligonucleotide
tctgaagtctgacgctcgcgtagttaacga

SEQ ID NO: 305411 - DNA, 30 bp, Artificial Sequence
  Synthetic oligonucleotide
cattataagattccaacatcgagaacacga

SEQ ID NO: 305412 - DNA, 30 bp, Artificial Sequence
  Synthetic oligonucleotide
ggagtcgctctgatacttagggacacacga

SEQ ID NO: 305413 - DNA, 30 bp, Artificial Sequence
  Synthetic oligonucleotide
ctgatggcagtcgccatagcgaccacacga

SEQ ID NO: 305414 - DNA, 30 bp, Artificial Sequence
  Synthetic oligonucleotide
cgaatcatgtggtaagactgctgcacacga

SEQ ID NO: 305415 - DNA, 30 bp, Artificial Sequence
  Synthetic oligonucleotide
ataagcaaatctgtgcctattatgacacga

SEQ ID NO: 305416 - DNA, 30 bp, Artificial Sequence
  Synthetic oligonucleotide
gaggtagtgatcgcgtgtgtttgtacacga

SEQ ID NO: 305417 - DNA, 30 bp, Artificial Sequence
  Synthetic oligonucleotide
tgtctctctcaatcgagtcggtttacacga

SEQ ID NO: 305418 - DNA, 30 bp, Artificial Sequence
  Synthetic oligonucleotide
tttcagataagtcgctttctactcccacga

SEQ ID NO: 305419 - DNA, 30 bp, Artificial Sequence
  Synthetic oligonucleotide
tcggagactgttagtcggaacagtccacga

SEQ ID NO: 305420 - DNA, 30 bp, Artificial Sequence
  Synthetic oligonucleotide
tcgggccgtgctggcagcgggtgagcacga

SEQ ID NO: 305421 - DNA, 30 bp, Artificial Sequence
  Synthetic oligonucleotide
taagaaggtagtgccggccccggcgcacga

SEQ ID NO: 305422 - DNA, 30 bp, Artificial Sequence
  Synthetic oligonucleotide
cagtctacaacagcagacggggtggcacga

SEQ ID NO: 305423 - DNA, 30 bp, Artificial Sequence
  Synthetic oligonucleotide
gttgaatcggtaccttgtattgattcacga

SEQ ID NO: 305424 - DNA, 30 bp, Artificial Sequence
  Synthetic oligonucleotide
aggcattaatccactaaatcgtcaagacga

SEQ ID NO: 305425 - DNA, 30 bp, Artificial Sequence
  Synthetic oligonucleotide
attgtctttttaggcacggtccgaagacga

SEQ ID NO: 305426 - DNA, 30 bp, Artificial Sequence
  Synthetic oligonucleotide
aacttaaacggttattgcaaccccagacga

SEQ ID NO: 305427 - DNA, 30 bp, Artificial Sequence
  Synthetic oligonucleotide
tcagtgcttaagtcatacgtatgcagacga

SEQ ID NO: 305428 - DNA, 30 bp, Artificial Sequence
  Synthetic oligonucleotide
gagaattgacgtgtcgtacgtaatagacga

SEQ ID NO: 305429 - DNA, 30 bp, Artificial Sequence
  Synthetic oligonucleotide
caatgtgaccttggccatcgtaatagacga

SEQ ID NO: 305430 - DNA, 30 bp, Artificial Sequence
  Synthetic oligonucleotide
tagcgagatatgggtgggtagtgtagacga

SEQ ID NO: 305431 - DNA, 30 bp, Artificial Sequence
  Synthetic oligonucleotide
gccaagacgaattaccgtcacaaacgacga

SEQ ID NO: 305432 - DNA, 30 bp, Artificial Sequence
  Synthetic oligonucleotide
gactttattgaactattaagactacgacga

SEQ ID NO: 305433 - DNA, 30 bp, Artificial Sequence
  Synthetic oligonucleotide
ctattatagttatgcaatgcgaggcgacga

SEQ ID NO: 305434 - DNA, 30 bp, Artificial Sequence
  Synthetic oligonucleotide
accgtgatattagatggggtaatgcgacga

SEQ ID NO: 305435 - DNA, 30 bp, Artificial Sequence
  Synthetic oligonucleotide
gtaaaacattgttcggcttatattcgacga

SEQ ID NO: 305436 - DNA, 30 bp, Artificial Sequence
  Synthetic oligonucleotide
tcatgttggcctgacagaggcaaaggacga

SEQ ID NO: 305437 - DNA, 31 bp, Artificial Sequence
  Synthetic oligonucleotide
gacctgaatcgcggtggttactcaaggacga

SEQ ID NO: 305438 - DNA, 30 bp, Artificial Sequence
  Synthetic oligonucleotide
tatggctgacttggctttgcaacaggacga

SEQ ID NO: 305439 - DNA, 30 bp, Artificial Sequence
  Synthetic oligonucleotide
gcttttgttcgatgctcagtgctaggacga

SEQ ID NO: 305440 - DNA, 30 bp, Artificial Sequence
  Synthetic oligonucleotide
caaacttaatgaagcaaatttcccggacga

SEQ ID NO: 305441 - DNA, 30 bp, Artificial Sequence
  Synthetic oligonucleotide
cactaattttcgcagtcataatgcggacga

SEQ ID NO: 305442 - DNA, 30 bp, Artificial Sequence
  Synthetic oligonucleotide
ctaccacttagaaaggtaaatgggggacga

SEQ ID NO: 305443 - DNA, 30 bp, Artificial Sequence
  Synthetic oligonucleotide
actcaggtctgagtaccttgctggggacga

SEQ ID NO: 305444 - DNA, 30 bp, Artificial Sequence
  Synthetic oligonucleotide
accggttcccgccgtgctatgaatggacga

SEQ ID NO: 305445 - DNA, 30 bp, Artificial Sequence
  Synthetic oligonucleotide
aaccggcctagtacgcgatgggaatgacga

SEQ ID NO: 305446 - DNA, 30 bp, Artificial Sequence
  Synthetic oligonucleotide
gttccacaggcagcaagcggagcatgacga

SEQ ID NO: 305447 - DNA, 30 bp, Artificial Sequence
  Synthetic oligonucleotide
accctcacgtgtcggaccctagtctgacga

SEQ ID NO: 305448 - DNA, 30 bp, Artificial Sequence
  Synthetic oligonucleotide
ggaaacaatgtcgcttcaggtttctgacga

SEQ ID NO: 305449 - DNA, 30 bp, Artificial Sequence
  Synthetic oligonucleotide
ccagcatgctcaagtaaagggcagtgacga

SEQ ID NO: 305450 - DNA, 30 bp, Artificial Sequence
  Synthetic oligonucleotide
cacgtgtcatcgaagaaagccgagtgacga

SEQ ID NO: 305451 - DNA, 30 bp, Artificial Sequence
  Synthetic oligonucleotide
ggtggtctcaacaaacagttatagtgacga

SEQ ID NO: 305452 - DNA, 30 bp, Artificial Sequence
  Synthetic oligonucleotide
ttatgccgatcttggccattaaccatacga

SEQ ID NO: 305453 - DNA, 30 bp, Artificial Sequence
  Synthetic oligonucleotide
ttgttcgcgcgcaaaccaacgcgcatacga

SEQ ID NO: 305454 - DNA, 30 bp, Artificial Sequence
  Synthetic oligonucleotide
agtagtctgtttactctccggaagatacga

SEQ ID NO: 305455 - DNA, 30 bp, Artificial Sequence
  Synthetic oligonucleotide
actcgattctgtcacgccccgacgatacga

SEQ ID NO: 305456 - DNA, 30 bp, Artificial Sequence
  Synthetic oligonucleotide
aatttcgaggttggctgtgttcatatacga

SEQ ID NO: 305457 - DNA, 30 bp, Artificial Sequence
  Synthetic oligonucleotide
gtcagtcaactttgggagttatctatacga

SEQ ID NO: 305458 - DNA, 30 bp, Artificial Sequence
  Synthetic oligonucleotide
gagctgtgtcttttctggtaatttatacga

SEQ ID NO: 305459 - DNA, 30 bp, Artificial Sequence
  Synthetic oligonucleotide
agtgaaactcgcttaaccccgtttatacga

SEQ ID NO: 305460 - DNA, 30 bp, Artificial Sequence
  Synthetic oligonucleotide
atagttgtaaagacataaacacaactacga

SEQ ID NO: 305461 - DNA, 31 bp, Artificial Sequence
  Synthetic oligonucleotide
gatctgttcgttgaaatccaccccactacga

SEQ ID NO: 305462 - DNA, 30 bp, Artificial Sequence
  Synthetic oligonucleotide
cctggcgttaacctacgccacgtactacga

SEQ ID NO: 305463 - DNA, 30 bp, Artificial Sequence
  Synthetic oligonucleotide
aactccgcacgtcatactacagagctacga

SEQ ID NO: 305464 - DNA, 30 bp, Artificial Sequence
  Synthetic oligonucleotide
aaattatcgttgatgacgggtcggctacga

SEQ ID NO: 305465 - DNA, 30 bp, Artificial Sequence
  Synthetic oligonucleotide
gcatacggggtgacacacatcggagtacga

SEQ ID NO: 305466 - DNA, 30 bp, Artificial Sequence
  Synthetic oligonucleotide
gcaaacgaacgggagtcccgtctagtacga

SEQ ID NO: 305467 - DNA, 28 bp, Artificial Sequence
  Synthetic oligonucleotide
aatctgggagttgggaaacttagtacga

SEQ ID NO: 305468 - DNA, 30 bp, Artificial Sequence
  Synthetic oligonucleotide
gcagatatggcactgactagacacgtacga

SEQ ID NO: 305469 - DNA, 30 bp, Artificial Sequence
  Synthetic oligonucleotide
atggggcgctaaagatctgattgattacga

SEQ ID NO: 305470 - DNA, 30 bp, Artificial Sequence
  Synthetic oligonucleotide
tgcagaagaggccatcaccacaggttacga

SEQ ID NO: 305471 - DNA, 30 bp, Artificial Sequence
  Synthetic oligonucleotide
gccattactacgatttccatgcaaaaccga

SEQ ID NO: 305472 - DNA, 30 bp, Artificial Sequence
  Synthetic oligonucleotide
cgtcgactctcactgggctcttcaaaccga

SEQ ID NO: 305473 - DNA, 30 bp, Artificial Sequence
  Synthetic oligonucleotide
gctgactagtcctatcacacgggaaaccga

SEQ ID NO: 305474 - DNA, 30 bp, Artificial Sequence
  Synthetic oligonucleotide
ttgaacccattattgagccatcacaaccga

SEQ ID NO: 305475 - DNA, 30 bp, Artificial Sequence
  Synthetic oligonucleotide
cctgcgcgagaaacgtagcagatcaaccga

SEQ ID NO: 305476 - DNA, 30 bp, Artificial Sequence
  Synthetic oligonucleotide
atgttcgactagattgcgtaacggaaccga

SEQ ID NO: 305477 - DNA, 30 bp, Artificial Sequence
  Synthetic oligonucleotide
aactatttccagcgaaccgtagaacaccga

SEQ ID NO: 305478 - DNA, 30 bp, Artificial Sequence
  Synthetic oligonucleotide
gagtaagttatgttttattcgacacaccga

SEQ ID NO: 305479 - DNA, 30 bp, Artificial Sequence
  Synthetic oligonucleotide
ttatggcacaacggccggccacaccaccga

SEQ ID NO: 305480 - DNA, 30 bp, Artificial Sequence
  Synthetic oligonucleotide
gcatgtatcacgcgtttgaaaattcaccga

SEQ ID NO: 305481 - DNA, 30 bp, Artificial Sequence
  Synthetic oligonucleotide
agatgtatcaggagtgttagataagaccga

SEQ ID NO: 305482 - DNA, 30 bp, Artificial Sequence
  Synthetic oligonucleotide
gcaaccaatgcacgacgaatttaggaccga

SEQ ID NO: 305483 - DNA, 30 bp, Artificial Sequence
  Synthetic oligonucleotide
tagttacaggaatcggttgccggggaccga

SEQ ID NO: 305484 - DNA, 30 bp, Artificial Sequence
  Synthetic oligonucleotide
ccactcctaacaaattattaaattgaccga

SEQ ID NO: 305485 - DNA, 30 bp, Artificial Sequence
  Synthetic oligonucleotide
tgcgtaatggtccggtgtcctaaataccga

SEQ ID NO: 305486 - DNA, 30 bp, Artificial Sequence
  Synthetic oligonucleotide
ccgcgtaaagttcgacaacacccataccga

SEQ ID NO: 305487 - DNA, 30 bp, Artificial Sequence
  Synthetic oligonucleotide
ttcagagctaaggtgcagtgaatctaccga

SEQ ID NO: 305488 - DNA, 30 bp, Artificial Sequence
  Synthetic oligonucleotide
ctatttctcgagaaccaactattgtaccga

SEQ ID NO: 305489 - DNA, 30 bp, Artificial Sequence
  Synthetic oligonucleotide
ttcatagcgactgatcaactgcattaccga

SEQ ID NO: 305490 - DNA, 30 bp, Artificial Sequence
  Synthetic oligonucleotide
agagacgcaatacgcctacgcgaaacccga

SEQ ID NO: 305491 - DNA, 30 bp, Artificial Sequence
  Synthetic oligonucleotide
cgccttcagaacgtaaggttggagacccga

SEQ ID NO: 305492 - DNA, 30 bp, Artificial Sequence
  Synthetic oligonucleotide
gataacctcgcacgatgtgcgaatacccga

SEQ ID NO: 305493 - DNA, 30 bp, Artificial Sequence
  Synthetic oligonucleotide
ttggggatcagtagtgatgcccatacccga

SEQ ID NO: 305494 - DNA, 30 bp, Artificial Sequence
  Synthetic oligonucleotide
tttatttactagcaaataggtttcccccga

SEQ ID NO: 305495 - DNA, 30 bp, Artificial Sequence
  Synthetic oligonucleotide
cctttcgaagattagaatagaatgccccga

SEQ ID NO: 305496 - DNA, 30 bp, Artificial Sequence
  Synthetic oligonucleotide
tcaattggtcaagacctgcagactccccga

SEQ ID NO: 305497 - DNA, 30 bp, Artificial Sequence
  Synthetic oligonucleotide
acaccggtttcaaagatatcggtcgcccga

SEQ ID NO: 305498 - DNA, 30 bp, Artificial Sequence
  Synthetic oligonucleotide
tcacgcgataatagcagcgtcaaggcccga

SEQ ID NO: 305499 - DNA, 30 bp, Artificial Sequence
  Synthetic oligonucleotide
tatgcgtaggtagacaataattgggcccga

SEQ ID NO: 305500 - DNA, 30 bp, Artificial Sequence
  Synthetic oligonucleotide
atagatggttgacgacggttattggcccga

SEQ ID NO: 305501 - DNA, 30 bp, Artificial Sequence
  Synthetic oligonucleotide
caaagtaaaagtgtcctcaaaaatgcccga

SEQ ID NO: 305502 - DNA, 30 bp, Artificial Sequence
  Synthetic oligonucleotide
cgatttaactccgggcaagtgagtgcccga

SEQ ID NO: 305503 - DNA, 30 bp, Artificial Sequence
  Synthetic oligonucleotide
accctcgattacttcacaacgtgatcccga

SEQ ID NO: 305504 - DNA, 30 bp, Artificial Sequence
  Synthetic oligonucleotide
cacctgacatgagtcagggggtgatcccga

SEQ ID NO: 305505 - DNA, 30 bp, Artificial Sequence
  Synthetic oligonucleotide
aaatgttaatcaggtcggacgcattcccga

SEQ ID NO: 305506 - DNA, 30 bp, Artificial Sequence
  Synthetic oligonucleotide
ggatgtgattatcaacacgaatattcccga

SEQ ID NO: 305507 - DNA, 30 bp, Artificial Sequence
  Synthetic oligonucleotide
gctctgttaggcccgaaagagaaaagccga

SEQ ID NO: 305508 - DNA, 30 bp, Artificial Sequence
  Synthetic oligonucleotide
attaagcaggaaagcatgacgtacagccga

SEQ ID NO: 305509 - DNA, 30 bp, Artificial Sequence
  Synthetic oligonucleotide
gctggtggcgaatatttgtattcgagccga

SEQ ID NO: 305510 - DNA, 30 bp, Artificial Sequence
  Synthetic oligonucleotide
actatacgatattcccagctcactagccga

SEQ ID NO: 305511 - DNA, 30 bp, Artificial Sequence
  Synthetic oligonucleotide
ctggctattgcagcttaccgggaacgccga

SEQ ID NO: 305512 - DNA, 30 bp, Artificial Sequence
  Synthetic oligonucleotide
ctaatatcggctgttctgcagcgccgccga

SEQ ID NO: 305513 - DNA, 30 bp, Artificial Sequence
  Synthetic oligonucleotide
accctattatacggagctaaagctcgccga

SEQ ID NO: 305514 - DNA, 30 bp, Artificial Sequence
  Synthetic oligonucleotide
ctcaggatggagcgagcgcgcattcgccga

SEQ ID NO: 305515 - DNA, 30 bp, Artificial Sequence
  Synthetic oligonucleotide
taaatgaacggtataattagcgacggccga

SEQ ID NO: 305516 - DNA, 30 bp, Artificial Sequence
  Synthetic oligonucleotide
cgctaagggtagatgggaatctacggccga

SEQ ID NO: 305517 - DNA, 30 bp, Artificial Sequence
  Synthetic oligonucleotide
cctatgcacctatgaggctaggagggccga

SEQ ID NO: 305518 - DNA, 30 bp, Artificial Sequence
  Synthetic oligonucleotide
attctacactctgtcttcaagtcgggccga

SEQ ID NO: 305519 - DNA, 30 bp, Artificial Sequence
  Synthetic oligonucleotide
tcatgttgatttttttctcgtgatggccga

SEQ ID NO: 305520 - DNA, 30 bp, Artificial Sequence
  Synthetic oligonucleotide
actaaagggtgggccttagttgatggccga

SEQ ID NO: 305521 - DNA, 30 bp, Artificial Sequence
  Synthetic oligonucleotide
aagtaatgttaaggaatcattagtggccga

SEQ ID NO: 305522 - DNA, 30 bp, Artificial Sequence
  Synthetic oligonucleotide
gctgcacacatcgcacagaacacatgccga

SEQ ID NO: 305523 - DNA, 30 bp, Artificial Sequence
  Synthetic oligonucleotide
gagttcttgcacgtgtagacgctatgccga

SEQ ID NO: 305524 - DNA, 30 bp, Artificial Sequence
  Synthetic oligonucleotide
tgatgtataacttcgaggcgcatgtgccga

SEQ ID NO: 305525 - DNA, 30 bp, Artificial Sequence
  Synthetic oligonucleotide
tcattcggggatgagttttaatattgccga

SEQ ID NO: 305526 - DNA, 30 bp, Artificial Sequence
  Synthetic oligonucleotide
tgttggtgtaccacatttcgcctttgccga

SEQ ID NO: 305527 - DNA, 30 bp, Artificial Sequence
  Synthetic oligonucleotide
tgctatgagactcgctatttgaaaatccga

SEQ ID NO: 305528 - DNA, 30 bp, Artificial Sequence
  Synthetic oligonucleotide
gcaggtatggttaagtaggcggaaatccga

SEQ ID NO: 305529 - DNA, 30 bp, Artificial Sequence
  Synthetic oligonucleotide
ctctagcactacctctcaaattcaatccga

SEQ ID NO: 305530 - DNA, 30 bp, Artificial Sequence
  Synthetic oligonucleotide
cataacctggttcattgggagcacatccga

SEQ ID NO: 305531 - DNA, 30 bp, Artificial Sequence
  Synthetic oligonucleotide
ggagtctaaacgatccccgactacatccga

SEQ ID NO: 305532 - DNA, 30 bp, Artificial Sequence
  Synthetic oligonucleotide
gcaggaactgatcaacgccgctacatccga

SEQ ID NO: 305533 - DNA, 30 bp, Artificial Sequence
  Synthetic oligonucleotide
tagcaatatgcgagtttgggatgcatccga

SEQ ID NO: 305534 - DNA, 30 bp, Artificial Sequence
  Synthetic oligonucleotide
cgatcaccgctgtatttctacgctatccga

SEQ ID NO: 305535 - DNA, 30 bp, Artificial Sequence
  Synthetic oligonucleotide
tcggcatgaatacctactgcctttatccga

SEQ ID NO: 305536 - DNA, 30 bp, Artificial Sequence
  Synthetic oligonucleotide
gggctcctagataattgcataaaactccga

SEQ ID NO: 305537 - DNA, 30 bp, Artificial Sequence
  Synthetic oligonucleotide
tctgccagtttcgctagagaatcactccga

SEQ ID NO: 305538 - DNA, 30 bp, Artificial Sequence
  Synthetic oligonucleotide
atgaggttggcaggaaagagacacctccga

SEQ ID NO: 305539 - DNA, 30 bp, Artificial Sequence
  Synthetic oligonucleotide
tggaaggagaactctaataaaatcctccga

SEQ ID NO: 305540 - DNA, 30 bp, Artificial Sequence
  Synthetic oligonucleotide
gccctatacgtactgtcgcgtagtctccga

SEQ ID NO: 305541 - DNA, 30 bp, Artificial Sequence
  Synthetic oligonucleotide
aaactcgtgatgattgcccagtaagtccga

SEQ ID NO: 305542 - DNA, 30 bp, Artificial Sequence
  Synthetic oligonucleotide
tttagtgagcctacgtaataagacgtccga

SEQ ID NO: 305543 - DNA, 30 bp, Artificial Sequence
  Synthetic oligonucleotide
ccgtcggaggcgcatgctcactgcgtccga

SEQ ID NO: 305544 - DNA, 29 bp, Artificial Sequence
  Synthetic oligonucleotide
gtctggacggcctccattaggtcgtccga

SEQ ID NO: 305545 - DNA, 30 bp, Artificial Sequence
  Synthetic oligonucleotide
cattttcgggatctagacgagccggtccga

SEQ ID NO: 305546 - DNA, 30 bp, Artificial Sequence
  Synthetic oligonucleotide
aatctccctgggaggagagactgggtccga

SEQ ID NO: 305547 - DNA, 30 bp, Artificial Sequence
  Synthetic oligonucleotide
tagtatcttgtagcggtgagctctgtccga

SEQ ID NO: 305548 - DNA, 30 bp, Artificial Sequence
  Synthetic oligonucleotide
ttagctcatcgtctcgtgtagtttgtccga

SEQ ID NO: 305549 - DNA, 30 bp, Artificial Sequence
  Synthetic oligonucleotide
ctctagacttctctacaaaggcaattccga

SEQ ID NO: 305550 - DNA, 30 bp, Artificial Sequence
  Synthetic oligonucleotide
tattgcagtcccggtgcccgcccattccga

SEQ ID NO: 305551 - DNA, 30 bp, Artificial Sequence
  Synthetic oligonucleotide
gctgcggcttaatgtgagctgatattccga

SEQ ID NO: 305552 - DNA, 30 bp, Artificial Sequence
  Synthetic oligonucleotide
gattcagccgcgccatggaaagacttccga

SEQ ID NO: 305553 - DNA, 30 bp, Artificial Sequence
  Synthetic oligonucleotide
ggaagggttttctgaacaatcagcttccga

SEQ ID NO: 305554 - DNA, 30 bp, Artificial Sequence
  Synthetic oligonucleotide
agtgccgtttattatttggtcggtttccga

SEQ ID NO: 305555 - DNA, 30 bp, Artificial Sequence
  Synthetic oligonucleotide
atggtcattgggtttcctacatttttccga

SEQ ID NO: 305556 - DNA, 30 bp, Artificial Sequence
  Synthetic oligonucleotide
gcacgtgcggggtatccacgtagaaagcga

SEQ ID NO: 305557 - DNA, 30 bp, Artificial Sequence
  Synthetic oligonucleotide
ctcaatacgtaatttagagcaataaagcga

SEQ ID NO: 305558 - DNA, 30 bp, Artificial Sequence
  Synthetic oligonucleotide
gggcccacatctgcgccttcacagaagcga

SEQ ID NO: 305559 - DNA, 30 bp, Artificial Sequence
  Synthetic oligonucleotide
aaacgtgagtgacaattgacagcacagcga

SEQ ID NO: 305560 - DNA, 30 bp, Artificial Sequence
  Synthetic oligonucleotide
atcccggtggagccagtcaaagaccagcga

SEQ ID NO: 305561 - DNA, 30 bp, Artificial Sequence
  Synthetic oligonucleotide
tatgacttccccagtataaaagcgcagcga

SEQ ID NO: 305562 - DNA, 30 bp, Artificial Sequence
  Synthetic oligonucleotide
cacacacgtactgacctccacgtgcagcga

SEQ ID NO: 305563 - DNA, 30 bp, Artificial Sequence
  Synthetic oligonucleotide
atggggcacgtctccggtgtcgctcagcga

SEQ ID NO: 305564 - DNA, 30 bp, Artificial Sequence
  Synthetic oligonucleotide
acgtgataaccgacggccttcgccgagcga

SEQ ID NO: 305565 - DNA, 30 bp, Artificial Sequence
  Synthetic oligonucleotide
gaccactaaggagctgttttcgatgagcga

SEQ ID NO: 305566 - DNA, 30 bp, Artificial Sequence
  Synthetic oligonucleotide
aaggtctggtatggcatttgttatgagcga

SEQ ID NO: 305567 - DNA, 30 bp, Artificial Sequence
  Synthetic oligonucleotide
gggcgctgctaatccatgcaaaaatagcga

SEQ ID NO: 305568 - DNA, 30 bp, Artificial Sequence
  Synthetic oligonucleotide
gacaaagttcgaaggtagcaactatagcga

SEQ ID NO: 305569 - DNA, 30 bp, Artificial Sequence
  Synthetic oligonucleotide
ttgggaggcatctactcaggatactagcga

SEQ ID NO: 305570 - DNA, 30 bp, Artificial Sequence
  Synthetic oligonucleotide
tagtttgattggacccgtccgtgctagcga

SEQ ID NO: 305571 - DNA, 30 bp, Artificial Sequence
  Synthetic oligonucleotide
ggtgccttgggttggatatcaaagtagcga

SEQ ID NO: 305572 - DNA, 30 bp, Artificial Sequence
  Synthetic oligonucleotide
gtatcgtcacgaagcgcgagtcggtagcga

SEQ ID NO: 305573 - DNA, 30 bp, Artificial Sequence
  Synthetic oligonucleotide
cgcggttaattgtattacttaaattagcga

SEQ ID NO: 305574 - DNA, 30 bp, Artificial Sequence
  Synthetic oligonucleotide
aatcgtctatcgtccgctcgtccttagcga

SEQ ID NO: 305575 - DNA, 30 bp, Artificial Sequence
  Synthetic oligonucleotide
tggttccagtatgttctctggggttagcga

SEQ ID NO: 305576 - DNA, 30 bp, Artificial Sequence
  Synthetic oligonucleotide
cgattcgctgggctgtcgtagctttagcga

SEQ ID NO: 305577 - DNA, 30 bp, Artificial Sequence
  Synthetic oligonucleotide
ggcattcctatgatatgtgccttttagcga

SEQ ID NO: 305578 - DNA, 30 bp, Artificial Sequence
  Synthetic oligonucleotide
cagtcgtacccggtgtggttcacaacgcga

SEQ ID NO: 305579 - DNA, 30 bp, Artificial Sequence
  Synthetic oligonucleotide
gtagcaagagcgtgcagaacatcaacgcga

SEQ ID NO: 305580 - DNA, 30 bp, Artificial Sequence
  Synthetic oligonucleotide
taacaggatagaacatttatgctaacgcga

SEQ ID NO: 305581 - DNA, 30 bp, Artificial Sequence
  Synthetic oligonucleotide
acctgcacacagccagagccgttaacgcga

SEQ ID NO: 305582 - DNA, 30 bp, Artificial Sequence
  Synthetic oligonucleotide
attgaatggccggcgagtcaacagacgcga

SEQ ID NO: 305583 - DNA, 30 bp, Artificial Sequence
  Synthetic oligonucleotide
attttaaatagcgagcacgaacggacgcga

SEQ ID NO: 305584 - DNA, 30 bp, Artificial Sequence
  Synthetic oligonucleotide
tgctcgaaaagagcttgagcgctgacgcga

SEQ ID NO: 305585 - DNA, 30 bp, Artificial Sequence
  Synthetic oligonucleotide
aagaagccctgcagatgaatatgtacgcga

SEQ ID NO: 305586 - DNA, 30 bp, Artificial Sequence
  Synthetic oligonucleotide
actcgacgtgctgctatttctagcccgcga

SEQ ID NO: 305587 - DNA, 30 bp, Artificial Sequence
  Synthetic oligonucleotide
cgggcgacaagcccgttggcgtcgccgcga

SEQ ID NO: 305588 - DNA, 30 bp, Artificial Sequence
  Synthetic oligonucleotide
tggtctgaccacagcccattgggtccgcga

SEQ ID NO: 305589 - DNA, 30 bp, Artificial Sequence
  Synthetic oligonucleotide
tttccgcactaggggaagcagattccgcga

SEQ ID NO: 305590 - DNA, 30 bp, Artificial Sequence
  Synthetic oligonucleotide
atttctaatgtcggaactcagaaagcgcga

SEQ ID NO: 305591 - DNA, 30 bp, Artificial Sequence
  Synthetic oligonucleotide
tgtccttctagaaacgaagcgaaagcgcga

SEQ ID NO: 305592 - DNA, 30 bp, Artificial Sequence
  Synthetic oligonucleotide
aaattcccacggtgctgggtgcgggcgcga

SEQ ID NO: 305593 - DNA, 30 bp, Artificial Sequence
  Synthetic oligonucleotide
ttcatgtcttgagccttgaccgcatcgcga

SEQ ID NO: 305594 - DNA, 30 bp, Artificial Sequence
  Synthetic oligonucleotide
atatctatcagacgagttggcaactcgcga

SEQ ID NO: 305595 - DNA, 30 bp, Artificial Sequence
  Synthetic oligonucleotide
cccttaaggtgaattgaagccctctcgcga

SEQ ID NO: 305596 - DNA, 30 bp, Artificial Sequence
  Synthetic oligonucleotide
ctgttaggattgatatgtgctcggtcgcga

SEQ ID NO: 305597 - DNA, 30 bp, Artificial Sequence
  Synthetic oligonucleotide
atggcttgtggaacgtaacgacgttcgcga

SEQ ID NO: 305598 - DNA, 30 bp, Artificial Sequence
  Synthetic oligonucleotide
aacttgcaagtatgtcggtgccgttcgcga

SEQ ID NO: 305599 - DNA, 30 bp, Artificial Sequence
  Synthetic oligonucleotide
gtaaaagctcacacgacgtcgtgcaggcga

SEQ ID NO: 305600 - DNA, 30 bp, Artificial Sequence
  Synthetic oligonucleotide
taacctgcggcggcggctcgtaggaggcga

SEQ ID NO: 305601 - DNA, 30 bp, Artificial Sequence
  Synthetic oligonucleotide
aatgcgcgagtattagaattgaataggcga

SEQ ID NO: 305602 - DNA, 30 bp, Artificial Sequence
  Synthetic oligonucleotide
cgtcatcggccgagcggataccgtaggcga

SEQ ID NO: 305603 - DNA, 30 bp, Artificial Sequence
  Synthetic oligonucleotide
cccgtcccccggtaccaaaggcgtaggcga

SEQ ID NO: 305604 - DNA, 30 bp, Artificial Sequence
  Synthetic oligonucleotide
gtcaatcaaggtcctggataatcccggcga

SEQ ID NO: 305605 - DNA, 30 bp, Artificial Sequence
  Synthetic oligonucleotide
gaggtgggttactctggactctgccggcga

SEQ ID NO: 305606 - DNA, 30 bp, Artificial Sequence
  Synthetic oligonucleotide
agactacgcattgtaggaactttccggcga

SEQ ID NO: 305607 - DNA, 30 bp, Artificial Sequence
  Synthetic oligonucleotide
tggccatcagtgaaccgcgaaaagcggcga

SEQ ID NO: 305608 - DNA, 30 bp, Artificial Sequence
  Synthetic oligonucleotide
tgggtaacccgtcaggcagctagtcggcga

SEQ ID NO: 305609 - DNA, 30 bp, Artificial Sequence
  Synthetic oligonucleotide
aaaacatcgttcctaaaatttccagggcga

SEQ ID NO: 305610 - DNA, 30 bp, Artificial Sequence
  Synthetic oligonucleotide
tttacattccaaacgtctcgaatagggcga

SEQ ID NO: 305611 - DNA, 30 bp, Artificial Sequence
  Synthetic oligonucleotide
gagtgttagattatatactgactagggcga

SEQ ID NO: 305612 - DNA, 30 bp, Artificial Sequence
  Synthetic oligonucleotide
agaggtaggtcacagagatgggaggggcga

SEQ ID NO: 305613 - DNA, 40 bp, Artificial Sequence
  Synthetic oligonucleotide
aagataatacattcatggtatggtcggggatcgggggcga

SEQ ID NO: 305614 - DNA, 30 bp, Artificial Sequence
  Synthetic oligonucleotide
tgtccaccacggcattcgtcaaaatggcga

SEQ ID NO: 305615 - DNA, 30 bp, Artificial Sequence
  Synthetic oligonucleotide
gcaattcttccttggtggggtcaatggcga

SEQ ID NO: 305616 - DNA, 30 bp, Artificial Sequence
  Synthetic oligonucleotide
tcaaaccccaggagctaggcccagtggcga

SEQ ID NO: 305617 - DNA, 30 bp, Artificial Sequence
  Synthetic oligonucleotide
agtgctggtgtgcacgatcagacttggcga

SEQ ID NO: 305618 - DNA, 30 bp, Artificial Sequence
  Synthetic oligonucleotide
tcacgacatgtatgtagtacaacaatgcga

SEQ ID NO: 305619 - DNA, 30 bp, Artificial Sequence
  Synthetic oligonucleotide
ctacgtgaaaactgtcggcagcgaatgcga

SEQ ID NO: 305620 - DNA, 30 bp, Artificial Sequence
  Synthetic oligonucleotide
ttaaatgttcaaatgttgttagcgatgcga

SEQ ID NO: 305621 - DNA, 30 bp, Artificial Sequence
  Synthetic oligonucleotide
ttcggcgtgataattgctcatgcgatgcga

SEQ ID NO: 305622 - DNA, 30 bp, Artificial Sequence
  Synthetic oligonucleotide
taggtcttcaggccccctctaatgatgcga

SEQ ID NO: 305623 - DNA, 30 bp, Artificial Sequence
  Synthetic oligonucleotide
tctggtccgactagaaggctttatatgcga

SEQ ID NO: 305624 - DNA, 30 bp, Artificial Sequence
  Synthetic oligonucleotide
acggtttaatccagcactgagttactgcga

SEQ ID NO: 305625 - DNA, 30 bp, Artificial Sequence
  Synthetic oligonucleotide
taaaattggagcaacttacgtaaagtgcga

SEQ ID NO: 305626 - DNA, 30 bp, Artificial Sequence
  Synthetic oligonucleotide
gcctggttgagcacagggagctaggtgcga

SEQ ID NO: 305627 - DNA, 30 bp, Artificial Sequence
  Synthetic oligonucleotide
taagactaccctagttgtgctcttgtgcga

SEQ ID NO: 305628 - DNA, 30 bp, Artificial Sequence
  Synthetic oligonucleotide
gaggtcctggtactcatgtacggattgcga

SEQ ID NO: 305629 - DNA, 30 bp, Artificial Sequence
  Synthetic oligonucleotide
tccgcaagtgggtacggcgagcacttgcga

SEQ ID NO: 305630 - DNA, 30 bp, Artificial Sequence
  Synthetic oligonucleotide
tatcaaccgtgggaggagttatacttgcga

SEQ ID NO: 305631 - DNA, 30 bp, Artificial Sequence
  Synthetic oligonucleotide
acccgtgatgtgataggggatttcttgcga

SEQ ID NO: 305632 - DNA, 30 bp, Artificial Sequence
  Synthetic oligonucleotide
atcgcacatatgcgttacggaaagttgcga

SEQ ID NO: 305633 - DNA, 30 bp, Artificial Sequence
  Synthetic oligonucleotide
ggtattcatatgctgctattcgagttgcga

SEQ ID NO: 305634 - DNA, 30 bp, Artificial Sequence
  Synthetic oligonucleotide
agatagccaggcaaagcactggagttgcga

SEQ ID NO: 305635 - DNA, 30 bp, Artificial Sequence
  Synthetic oligonucleotide
aatcaacttggtcatggtatgtagttgcga

SEQ ID NO: 305636 - DNA, 30 bp, Artificial Sequence
  Synthetic oligonucleotide
atgtcatttctaacatcatcttggttgcga

SEQ ID NO: 305637 - DNA, 30 bp, Artificial Sequence
  Synthetic oligonucleotide
aggactgtttaatgaggcagacgaaatcga

SEQ ID NO: 305638 - DNA, 30 bp, Artificial Sequence
  Synthetic oligonucleotide
caatttagctcgactagtcccggaaatcga

SEQ ID NO: 305639 - DNA, 30 bp, Artificial Sequence
  Synthetic oligonucleotide
cgttggaggcagaaacgagctaacaatcga

SEQ ID NO: 305640 - DNA, 30 bp, Artificial Sequence
  Synthetic oligonucleotide
ggtacgaccggcggtccaatggggaatcga

SEQ ID NO: 305641 - DNA, 30 bp, Artificial Sequence
  Synthetic oligonucleotide
ctaatatgctaataccgggatgtgaatcga

SEQ ID NO: 305642 - DNA, 30 bp, Artificial Sequence
  Synthetic oligonucleotide
aggttttgcttgaaagcactgttgaatcga

SEQ ID NO: 305643 - DNA, 30 bp, Artificial Sequence
  Synthetic oligonucleotide
cggtgagtcctatttgttatacataatcga

SEQ ID NO: 305644 - DNA, 30 bp, Artificial Sequence
  Synthetic oligonucleotide
actgtgtgtcgctccgtatttactaatcga

SEQ ID NO: 305645 - DNA, 30 bp, Artificial Sequence
  Synthetic oligonucleotide
aaccgttaatgcgcacctgctgaacatcga

SEQ ID NO: 305646 - DNA, 30 bp, Artificial Sequence
  Synthetic oligonucleotide
cataccctacctgacgaaattgaacatcga

SEQ ID NO: 305647 - DNA, 30 bp, Artificial Sequence
  Synthetic oligonucleotide
cattctatgcatcacctccggctacatcga

SEQ ID NO: 305648 - DNA, 30 bp, Artificial Sequence
  Synthetic oligonucleotide
atctcggtatgaggggcatgatgccatcga

SEQ ID NO: 305649 - DNA, 30 bp, Artificial Sequence
  Synthetic oligonucleotide
aacctctaagtagaaagttccttgcatcga

SEQ ID NO: 305650 - DNA, 30 bp, Artificial Sequence
  Synthetic oligonucleotide
gagagaggcgtcaggcgttggaatcatcga

SEQ ID NO: 305651 - DNA, 30 bp, Artificial Sequence
  Synthetic oligonucleotide
atccattcggaaattccggacattcatcga

SEQ ID NO: 305652 - DNA, 30 bp, Artificial Sequence
  Synthetic oligonucleotide
cagggttccctaactgattaacgcgatcga

SEQ ID NO: 305653 - DNA, 30 bp, Artificial Sequence
  Synthetic oligonucleotide
taactcccggaggtttatagttcggatcga

SEQ ID NO: 305654 - DNA, 30 bp, Artificial Sequence
  Synthetic oligonucleotide
actacgtcaggacaggcatgcgtggatcga

SEQ ID NO: 305655 - DNA, 30 bp, Artificial Sequence
  Synthetic oligonucleotide
cgataacgccagctttcgtccaatgatcga

SEQ ID NO: 305656 - DNA, 30 bp, Artificial Sequence
  Synthetic oligonucleotide
ttccatacgggtcaccgcacttctgatcga

SEQ ID NO: 305657 - DNA, 30 bp, Artificial Sequence
  Synthetic oligonucleotide
tggaaccccgtgcttgctacatgatatcga

SEQ ID NO: 305658 - DNA, 29 bp, Artificial Sequence
  Synthetic oligonucleotide
gacaaagaggttaagagtctatctatcga

SEQ ID NO: 305659 - DNA, 30 bp, Artificial Sequence
  Synthetic oligonucleotide
gtggtatgtgacgcgatgttgtagtatcga

SEQ ID NO: 305660 - DNA, 30 bp, Artificial Sequence
  Synthetic oligonucleotide
gcgggcttaaccagcgcgattccgtatcga

SEQ ID NO: 305661 - DNA, 30 bp, Artificial Sequence
  Synthetic oligonucleotide
gatgggtacgaattaatgggtgattatcga

SEQ ID NO: 305662 - DNA, 30 bp, Artificial Sequence
  Synthetic oligonucleotide
gtagttgccccgtgttctctatattatcga

SEQ ID NO: 305663 - DNA, 30 bp, Artificial Sequence
  Synthetic oligonucleotide
atcaatgggactgagtcattaaaaactcga

SEQ ID NO: 305664 - DNA, 30 bp, Artificial Sequence
  Synthetic oligonucleotide
cactcatacttgcaaagtagccaaactcga

SEQ ID NO: 305665 - DNA, 30 bp, Artificial Sequence
  Synthetic oligonucleotide
ctctgtacagacctatcagcgacaactcga

SEQ ID NO: 305666 - DNA, 30 bp, Artificial Sequence
  Synthetic oligonucleotide
aaatgttattgacggtgaagagcaactcga

SEQ ID NO: 305667 - DNA, 30 bp, Artificial Sequence
  Synthetic oligonucleotide
ttgtccgagcagcgcacctcgtcaactcga

SEQ ID NO: 305668 - DNA, 30 bp, Artificial Sequence
  Synthetic oligonucleotide
actcgtcattctagatagtgtacgactcga

SEQ ID NO: 305669 - DNA, 30 bp, Artificial Sequence
  Synthetic oligonucleotide
catgctcccgctatgcgctacagtactcga

SEQ ID NO: 305670 - DNA, 30 bp, Artificial Sequence
  Synthetic oligonucleotide
tagaaatgcgaggcgtcaggtattactcga

SEQ ID NO: 305671 - DNA, 30 bp, Artificial Sequence
  Synthetic oligonucleotide
cgcctggaggtagtgctctaagttactcga

SEQ ID NO: 305672 - DNA, 30 bp, Artificial Sequence
  Synthetic oligonucleotide
ttagaatccaaatagaagacatgacctcga

SEQ ID NO: 305673 - DNA, 30 bp, Artificial Sequence
  Synthetic oligonucleotide
gatggatataggtgctgacattgacctcga

SEQ ID NO: 305674 - DNA, 30 bp, Artificial Sequence
  Synthetic oligonucleotide
ttgcggcgccttaatggcaacagccctcga

SEQ ID NO: 305675 - DNA, 30 bp, Artificial Sequence
  Synthetic oligonucleotide
ttcagtagatggacccggacactccctcga

SEQ ID NO: 305676 - DNA, 30 bp, Artificial Sequence
  Synthetic oligonucleotide
gggttaccaatgggcacgcatcggcctcga

SEQ ID NO: 305677 - DNA, 30 bp, Artificial Sequence
  Synthetic oligonucleotide
tgtaagcagttatttaatagtagagctcga

SEQ ID NO: 305678 - DNA, 30 bp, Artificial Sequence
  Synthetic oligonucleotide
cgtagatgttgcatttgtgagatagctcga

SEQ ID NO: 305679 - DNA, 30 bp, Artificial Sequence
  Synthetic oligonucleotide
tctaatgccggcgctaattattcggctcga

SEQ ID NO: 305680 - DNA, 30 bp, Artificial Sequence
  Synthetic oligonucleotide
gctttcccattgtcgtacggatactctcga

SEQ ID NO: 305681 - DNA, 30 bp, Artificial Sequence
  Synthetic oligonucleotide
ccatgtcgtatgggttagacgcagtctcga

SEQ ID NO: 305682 - DNA, 30 bp, Artificial Sequence
  Synthetic oligonucleotide
gataggcgcaaagaccaacttgagtctcga

SEQ ID NO: 305683 - DNA, 30 bp, Artificial Sequence
  Synthetic oligonucleotide
tccacggaacccaccctacgtcaaagtcga

SEQ ID NO: 305684 - DNA, 30 bp, Artificial Sequence
  Synthetic oligonucleotide
ggtggtaacgcataatcgaaagtaagtcga

SEQ ID NO: 305685 - DNA, 30 bp, Artificial Sequence
  Synthetic oligonucleotide
cctccatgtttatgttctgctcgcagtcga

SEQ ID NO: 305686 - DNA, 30 bp, Artificial Sequence
  Synthetic oligonucleotide
gggtctgaaagcactcacaggttcagtcga

SEQ ID NO: 305687 - DNA, 30 bp, Artificial Sequence
  Synthetic oligonucleotide
gaactgcctacaaggaaccaaaggagtcga

SEQ ID NO: 305688 - DNA, 30 bp, Artificial Sequence
  Synthetic oligonucleotide
atgttccaggtcggctcctagattagtcga

SEQ ID NO: 305689 - DNA, 30 bp, Artificial Sequence
  Synthetic oligonucleotide
cctgtgggccaacctaggttctaccgtcga

SEQ ID NO: 305690 - DNA, 30 bp, Artificial Sequence
  Synthetic oligonucleotide
tgcggatttaagctaggtgggacgcgtcga

SEQ ID NO: 305691 - DNA, 30 bp, Artificial Sequence
  Synthetic oligonucleotide
tatagtggtaaaatacccgggtatcgtcga

SEQ ID NO: 305692 - DNA, 30 bp, Artificial Sequence
  Synthetic oligonucleotide
gtactggggcttggaattgggtacggtcga

SEQ ID NO: 305693 - DNA, 30 bp, Artificial Sequence
  Synthetic oligonucleotide
gccgcgcgtatctccaaccgagccggtcga

SEQ ID NO: 305694 - DNA, 30 bp, Artificial Sequence
  Synthetic oligonucleotide
gaatgttaatgaccttatatccagggtcga

SEQ ID NO: 305695 - DNA, 30 bp, Artificial Sequence
  Synthetic oligonucleotide
cccgaagccagcctcattacgccgggtcga

SEQ ID NO: 305696 - DNA, 30 bp, Artificial Sequence
  Synthetic oligonucleotide
aataccgctcacaaacgtcagagtggtcga

SEQ ID NO: 305697 - DNA, 30 bp, Artificial Sequence
  Synthetic oligonucleotide
cgtgatcctggtggcctatcatgtggtcga

SEQ ID NO: 305698 - DNA, 30 bp, Artificial Sequence
  Synthetic oligonucleotide
tggaacacaaaagtgcaaaactttggtcga

SEQ ID NO: 305699 - DNA, 30 bp, Artificial Sequence
  Synthetic oligonucleotide
actctccggtgactcatccttcaatgtcga

SEQ ID NO: 305700 - DNA, 30 bp, Artificial Sequence
  Synthetic oligonucleotide
tatagtgggggggtctcgtctttatgtcga

SEQ ID NO: 305701 - DNA, 30 bp, Artificial Sequence
  Synthetic oligonucleotide
ttcctacaaggctgaggtattcagtgtcga

SEQ ID NO: 305702 - DNA, 30 bp, Artificial Sequence
  Synthetic oligonucleotide
gccacaaatgctatgtagttgtgaattcga

SEQ ID NO: 305703 - DNA, 30 bp, Artificial Sequence
  Synthetic oligonucleotide
aacgacgtctaagcagcgctattaattcga

SEQ ID NO: 305704 - DNA, 30 bp, Artificial Sequence
  Synthetic oligonucleotide
agctggagacgcggggctcaaactattcga

SEQ ID NO: 305705 - DNA, 30 bp, Artificial Sequence
  Synthetic oligonucleotide
tcaatctgaatggttctgcgcagtattcga

SEQ ID NO: 305706 - DNA, 30 bp, Artificial Sequence
  Synthetic oligonucleotide
gacaacttagttacatcctacacacttcga

SEQ ID NO: 305707 - DNA, 30 bp, Artificial Sequence
  Synthetic oligonucleotide
gataggtcggagagtgtatcgatacttcga

SEQ ID NO: 305708 - DNA, 30 bp, Artificial Sequence
  Synthetic oligonucleotide
cataagggttgataaaaattttctcttcga

SEQ ID NO: 305709 - DNA, 30 bp, Artificial Sequence
  Synthetic oligonucleotide
agcaggtgtgcaatgttgtagagtcttcga

SEQ ID NO: 305710 - DNA, 30 bp, Artificial Sequence
  Synthetic oligonucleotide
ttttcctaaactcctagaaagcttcttcga

SEQ ID NO: 305711 - DNA, 30 bp, Artificial Sequence
  Synthetic oligonucleotide
cgaactcactaaattaggaggggagttcga

SEQ ID NO: 305712 - DNA, 30 bp, Artificial Sequence
  Synthetic oligonucleotide
ccgattcgtgtgttggcagagtatgttcga

SEQ ID NO: 305713 - DNA, 30 bp, Artificial Sequence
  Synthetic oligonucleotide
taataaccgcggttattttgtgtatttcga

SEQ ID NO: 305714 - DNA, 30 bp, Artificial Sequence
  Synthetic oligonucleotide
tcttctggtacagcaggactcacttttcga

SEQ ID NO: 305715 - DNA, 30 bp, Artificial Sequence
  Synthetic oligonucleotide
aaggtagaattcgttagcacaccaaaagga

SEQ ID NO: 305716 - DNA, 30 bp, Artificial Sequence
  Synthetic oligonucleotide
tgtttaaggagtcagtgctggagaaaagga

SEQ ID NO: 305717 - DNA, 30 bp, Artificial Sequence
  Synthetic oligonucleotide
gcagagttgacttataggagtcacaaagga

SEQ ID NO: 305718 - DNA, 30 bp, Artificial Sequence
  Synthetic oligonucleotide
ttacatagaattacgcgaatcatcaaagga

SEQ ID NO: 305719 - DNA, 30 bp, Artificial Sequence
  Synthetic oligonucleotide
tcgttatggggggatacttggttgaaagga

SEQ ID NO: 305720 - DNA, 30 bp, Artificial Sequence
  Synthetic oligonucleotide
tttccaatgattggtcaccaatataaagga

SEQ ID NO: 305721 - DNA, 30 bp, Artificial Sequence
  Synthetic oligonucleotide
atatgcttatctggcttatgtgctaaagga

SEQ ID NO: 305722 - DNA, 30 bp, Artificial Sequence
  Synthetic oligonucleotide
tgctgcagtgtcgcgttcagtcaacaagga

SEQ ID NO: 305723 - DNA, 30 bp, Artificial Sequence
  Synthetic oligonucleotide
agggacccagaccagcagcctcgacaagga

SEQ ID NO: 305724 - DNA, 30 bp, Artificial Sequence
  Synthetic oligonucleotide
agaactgacggtacataagtagtacaagga

SEQ ID NO: 305725 - DNA, 30 bp, Artificial Sequence
  Synthetic oligonucleotide
gctatagggggggatcaacgtgtacaagga

SEQ ID NO: 305726 - DNA, 30 bp, Artificial Sequence
  Synthetic oligonucleotide
tatgccagaggatgaaatgacgaagaagga

SEQ ID NO: 305727 - DNA, 30 bp, Artificial Sequence
  Synthetic oligonucleotide
gttgtctcccggagtacacttagagaagga

SEQ ID NO: 305728 - DNA, 30 bp, Artificial Sequence
  Synthetic oligonucleotide
agtgtgtgcatatcttgttaaacggaagga

SEQ ID NO: 305729 - DNA, 30 bp, Artificial Sequence
  Synthetic oligonucleotide
atcgtttcgtcgctcgtacttgcggaagga

SEQ ID NO: 305730 - DNA, 30 bp, Artificial Sequence
  Synthetic oligonucleotide
aaccgcggctactagtctctagatgaagga

SEQ ID NO: 305731 - DNA, 30 bp, Artificial Sequence
  Synthetic oligonucleotide
agtcagtttgtgtgtgctcgtactgaagga

SEQ ID NO: 305732 - DNA, 30 bp, Artificial Sequence
  Synthetic oligonucleotide
taacacccctcctttgatgttggtgaagga

SEQ ID NO: 305733 - DNA, 30 bp, Artificial Sequence
  Synthetic oligonucleotide
gggattaggagaactcaattgggataagga

SEQ ID NO: 305734 - DNA, 30 bp, Artificial Sequence
  Synthetic oligonucleotide
ctcgtagaggcgccgccagctcgctaagga

SEQ ID NO: 305735 - DNA, 30 bp, Artificial Sequence
  Synthetic oligonucleotide
ggagctagcaaaaatgtgctctgctaagga

SEQ ID NO: 305736 - DNA, 30 bp, Artificial Sequence
  Synthetic oligonucleotide
ggcgtttatgaagggcggtcaagttaagga

SEQ ID NO: 305737 - DNA, 30 bp, Artificial Sequence
  Synthetic oligonucleotide
cgcatgcaaggtacaacccaaggttaagga

SEQ ID NO: 305738 - DNA, 30 bp, Artificial Sequence
  Synthetic oligonucleotide
tcccactgcggtatgaatgtgaaaacagga

SEQ ID NO: 305739 - DNA, 30 bp, Artificial Sequence
  Synthetic oligonucleotide
acacactccggtgatcacaggcaaacagga

SEQ ID NO: 305740 - DNA, 30 bp, Artificial Sequence
  Synthetic oligonucleotide
aagcaggacgtgagctaccagcacacagga

SEQ ID NO: 305741 - DNA, 30 bp, Artificial Sequence
  Synthetic oligonucleotide
ggttcaaaggttggtgtctgcgacacagga

SEQ ID NO: 305742 - DNA, 30 bp, Artificial Sequence
  Synthetic oligonucleotide
ttactccatgagaccggtagcttgacagga

SEQ ID NO: 305743 - DNA, 30 bp, Artificial Sequence
  Synthetic oligonucleotide
gctccggtctgtcaggttaggtaaccagga

SEQ ID NO: 305744 - DNA, 29 bp, Artificial Sequence
  Synthetic oligonucleotide
ggtcagtggtcaagtcctggagaccagga

SEQ ID NO: 305745 - DNA, 30 bp, Artificial Sequence
  Synthetic oligonucleotide
ccctaccctctgccgcgcaagataccagga

SEQ ID NO: 305746 - DNA, 30 bp, Artificial Sequence
  Synthetic oligonucleotide
ggatcaacagtcgtggaaagaaccccagga

SEQ ID NO: 305747 - DNA, 30 bp, Artificial Sequence
  Synthetic oligonucleotide
aaagcttccgggatgactcgtcagccagga

SEQ ID NO: 305748 - DNA, 30 bp, Artificial Sequence
  Synthetic oligonucleotide
cagcaatagcttggaagacgtccgccagga

SEQ ID NO: 305749 - DNA, 30 bp, Artificial Sequence
  Synthetic oligonucleotide
gttactgccacatataatgtaagtccagga

SEQ ID NO: 305750 - DNA, 30 bp, Artificial Sequence
  Synthetic oligonucleotide
ccggctatacttcacggtccaggagcagga

SEQ ID NO: 305751 - DNA, 30 bp, Artificial Sequence
  Synthetic oligonucleotide
ttggcaggccagaaccatgtccacgcagga

SEQ ID NO: 305752 - DNA, 30 bp, Artificial Sequence
  Synthetic oligonucleotide
gaatggtaaacacagctggctgaggcagga

SEQ ID NO: 305753 - DNA, 30 bp, Artificial Sequence
  Synthetic oligonucleotide
acctacaagaggctcggtccctgggcagga

SEQ ID NO: 305754 - DNA, 30 bp, Artificial Sequence
  Synthetic oligonucleotide
gaggaccgggcggtccttctttatgcagga

SEQ ID NO: 305755 - DNA, 30 bp, Artificial Sequence
  Synthetic oligonucleotide
aaccaatgaacgaggaacgcagctgcagga

SEQ ID NO: 305756 - DNA, 30 bp, Artificial Sequence
  Synthetic oligonucleotide
ggctgaagacccgtgcgagcccaatcagga

SEQ ID NO: 305757 - DNA, 30 bp, Artificial Sequence
  Synthetic oligonucleotide
cccgcgcgataactcaggcctcaatcagga

SEQ ID NO: 305758 - DNA, 30 bp, Artificial Sequence
  Synthetic oligonucleotide
acgtcgcacgcaggatgctcaagatcagga

SEQ ID NO: 305759 - DNA, 30 bp, Artificial Sequence
  Synthetic oligonucleotide
aaaagaccgtattgtttaggttgatcagga

SEQ ID NO: 305760 - DNA, 30 bp, Artificial Sequence
  Synthetic oligonucleotide
ccaaccctacgtggtaaacgaccctcagga

SEQ ID NO: 305761 - DNA, 30 bp, Artificial Sequence
  Synthetic oligonucleotide
gtgaaattcctttgaccattaaggtcagga

SEQ ID NO: 305762 - DNA, 30 bp, Artificial Sequence
  Synthetic oligonucleotide
cctttacccacgaaggactcgaggtcagga

SEQ ID NO: 305763 - DNA, 30 bp, Artificial Sequence
  Synthetic oligonucleotide
caggcttgcaaaatccaggcgcattcagga

SEQ ID NO: 305764 - DNA, 30 bp, Artificial Sequence
  Synthetic oligonucleotide
ctaaatctggaatcatactacttttcagga

SEQ ID NO: 305765 - DNA, 30 bp, Artificial Sequence
  Synthetic oligonucleotide
gcatcactgtgacttacagtctaaagagga

SEQ ID NO: 305766 - DNA, 30 bp, Artificial Sequence
  Synthetic oligonucleotide
acagtcttgagataggactgctgcagagga

SEQ ID NO: 305767 - DNA, 30 bp, Artificial Sequence
  Synthetic oligonucleotide
tcgtgatcagcaaaggtccagaagagagga

SEQ ID NO: 305768 - DNA, 30 bp, Artificial Sequence
  Synthetic oligonucleotide
tatatatgcttgcccaatttggggagagga

SEQ ID NO: 305769 - DNA, 30 bp, Artificial Sequence
  Synthetic oligonucleotide
ataaagagatggaccccctgtgtgagagga

SEQ ID NO: 305770 - DNA, 30 bp, Artificial Sequence
  Synthetic oligonucleotide
ctcggctttaaacgacggacggctagagga

SEQ ID NO: 305771 - DNA, 30 bp, Artificial Sequence
  Synthetic oligonucleotide
ataaccgtgttctgattgatgtgtagagga

SEQ ID NO: 305772 - DNA, 30 bp, Artificial Sequence
  Synthetic oligonucleotide
ccccaaccgacacaggatgaggcccgagga

SEQ ID NO: 305773 - DNA, 30 bp, Artificial Sequence
  Synthetic oligonucleotide
acgcgcgccgacattggattggcgcgagga

SEQ ID NO: 305774 - DNA, 30 bp, Artificial Sequence
  Synthetic oligonucleotide
attccgaccacgaggctctttaccggagga

SEQ ID NO: 305775 - DNA, 30 bp, Artificial Sequence
  Synthetic oligonucleotide
gccaatcttatagacctcagattgggagga

SEQ ID NO: 305776 - DNA, 30 bp, Artificial Sequence
  Synthetic oligonucleotide
tagatcacatcgtcccctagcttgggagga

SEQ ID NO: 305777 - DNA, 30 bp, Artificial Sequence
  Synthetic oligonucleotide
ttgaatgtcacattcggaatctatggagga

SEQ ID NO: 305778 - DNA, 30 bp, Artificial Sequence
  Synthetic oligonucleotide
ttatgataaaaccgtcggcaggtatgagga

SEQ ID NO: 305779 - DNA, 30 bp, Artificial Sequence
  Synthetic oligonucleotide
gaattgtaaccgaacttaaaggtctgagga

SEQ ID NO: 305780 - DNA, 30 bp, Artificial Sequence
  Synthetic oligonucleotide
gaacagttatggcgtcgttgctcttgagga

SEQ ID NO: 305781 - DNA, 30 bp, Artificial Sequence
  Synthetic oligonucleotide
atacatcgcggtgggggcgggtcttgagga

SEQ ID NO: 305782 - DNA, 30 bp, Artificial Sequence
  Synthetic oligonucleotide
accgtcaagagtgtactcccggaaatagga

SEQ ID NO: 305783 - DNA, 30 bp, Artificial Sequence
  Synthetic oligonucleotide
gtttggcatcgacagtgcacttaaatagga

SEQ ID NO: 305784 - DNA, 30 bp, Artificial Sequence
  Synthetic oligonucleotide
ccatactgtattacaactgtgtcaatagga

SEQ ID NO: 305785 - DNA, 30 bp, Artificial Sequence
  Synthetic oligonucleotide
aatacgggtgagtggagcccggtaatagga

SEQ ID NO: 305786 - DNA, 30 bp, Artificial Sequence
  Synthetic oligonucleotide
ttgatggatagacacatgccctagatagga

SEQ ID NO: 305787 - DNA, 30 bp, Artificial Sequence
  Synthetic oligonucleotide
ggctacttacgacctacaaggtggatagga

SEQ ID NO: 305788 - DNA, 30 bp, Artificial Sequence
  Synthetic oligonucleotide
tggccaccccttagacatttcatgatagga

SEQ ID NO: 305789 - DNA, 30 bp, Artificial Sequence
  Synthetic oligonucleotide
ggtcgaaatgactatgtgtctcctatagga

SEQ ID NO: 305790 - DNA, 30 bp, Artificial Sequence
  Synthetic oligonucleotide
tccttcgcgtaagcccgcgacctactagga

SEQ ID NO: 305791 - DNA, 30 bp, Artificial Sequence
  Synthetic oligonucleotide
gcgcgctcaaaataccgcagtgacgtagga

SEQ ID NO: 305792 - DNA, 30 bp, Artificial Sequence
  Synthetic oligonucleotide
gtggcctgggcaggcttgggcaaggtagga

SEQ ID NO: 305793 - DNA, 30 bp, Artificial Sequence
  Synthetic oligonucleotide
gggcgtgagtcctccctctacgaggtagga

SEQ ID NO: 305794 - DNA, 30 bp, Artificial Sequence
  Synthetic oligonucleotide
agattctggtagaaagtacggcgggtagga

SEQ ID NO: 305795 - DNA, 30 bp, Artificial Sequence
  Synthetic oligonucleotide
aaagaatgacaatcgctcagtcaattagga

SEQ ID NO: 305796 - DNA, 30 bp, Artificial Sequence
  Synthetic oligonucleotide
tgcaggcggatatttgtgggtcaattagga

SEQ ID NO: 305797 - DNA, 30 bp, Artificial Sequence
  Synthetic oligonucleotide
aggttccatgccaaatatccttgattagga

SEQ ID NO: 305798 - DNA, 30 bp, Artificial Sequence
  Synthetic oligonucleotide
gtccgcagagacgtatgtcatcacttagga

SEQ ID NO: 305799 - DNA, 30 bp, Artificial Sequence
  Synthetic oligonucleotide
tagcctttttatgtttgactcaatttagga

SEQ ID NO: 305800 - DNA, 30 bp, Artificial Sequence
  Synthetic oligonucleotide
atgtaagactagagcagttcctgtttagga

SEQ ID NO: 305801 - DNA, 30 bp, Artificial Sequence
  Synthetic oligonucleotide
gcgcccccgggggggggaagataaaacgga

SEQ ID NO: 305802 - DNA, 30 bp, Artificial Sequence
  Synthetic oligonucleotide
ggcgggtaaggtgtaacttatttaaacgga

SEQ ID NO: 305803 - DNA, 30 bp, Artificial Sequence
  Synthetic oligonucleotide
gtcagtgcttagacactccacaacaacgga

SEQ ID NO: 305804 - DNA, 30 bp, Artificial Sequence
  Synthetic oligonucleotide
tcaatccccgatcttgggtagcctaacgga

SEQ ID NO: 305805 - DNA, 30 bp, Artificial Sequence
  Synthetic oligonucleotide
tgcatcctaccacaaaccaaggttaacgga

SEQ ID NO: 305806 - DNA, 30 bp, Artificial Sequence
  Synthetic oligonucleotide
ttggtacccggttatcgggttgttaacgga

SEQ ID NO: 305807 - DNA, 30 bp, Artificial Sequence
  Synthetic oligonucleotide
atgcaggtttagcggagggcgtttaacgga

SEQ ID NO: 305808 - DNA, 30 bp, Artificial Sequence
  Synthetic oligonucleotide
cgtatgtcacacttagagataatacacgga

SEQ ID NO: 305809 - DNA, 30 bp, Artificial Sequence
  Synthetic oligonucleotide
atgtacatcaaggggccatcatagcacgga

SEQ ID NO: 305810 - DNA, 30 bp, Artificial Sequence
  Synthetic oligonucleotide
aggcgtgtgtcaacagcggcttctcacgga

SEQ ID NO: 305811 - DNA, 30 bp, Artificial Sequence
  Synthetic oligonucleotide
agcacataagcgggcagacgcagtcacgga

SEQ ID NO: 305812 - DNA, 30 bp, Artificial Sequence
  Synthetic oligonucleotide
gcgatagtttatcaggaggatcgtcacgga

SEQ ID NO: 305813 - DNA, 30 bp, Artificial Sequence
  Synthetic oligonucleotide
ttttgcatgtgtttcggcgtgcgagacgga

SEQ ID NO: 305814 - DNA, 30 bp, Artificial Sequence
  Synthetic oligonucleotide
tgcattgcctaaaacgcgaggtccgacgga

SEQ ID NO: 305815 - DNA, 30 bp, Artificial Sequence
  Synthetic oligonucleotide
cgcaaacggcaaaaaaaattttgcgacgga

SEQ ID NO: 305816 - DNA, 30 bp, Artificial Sequence
  Synthetic oligonucleotide
aaccaggcgttgtgatgacagtaggacgga

SEQ ID NO: 305817 - DNA, 30 bp, Artificial Sequence
  Synthetic oligonucleotide
cgaggttacggaattgggcagtaggacgga

SEQ ID NO: 305818 - DNA, 30 bp, Artificial Sequence
  Synthetic oligonucleotide
cagtcctatctaagccgtactggggacgga

SEQ ID NO: 305819 - DNA, 30 bp, Artificial Sequence
  Synthetic oligonucleotide
atgttctatgcaagtggatagggtgacgga

SEQ ID NO: 305820 - DNA, 30 bp, Artificial Sequence
  Synthetic oligonucleotide
tgcaatacgggggattctgcaacatacgga

SEQ ID NO: 305821 - DNA, 30 bp, Artificial Sequence
  Synthetic oligonucleotide
gtataagtgttggatgtaggagcatacgga

SEQ ID NO: 305822 - DNA, 30 bp, Artificial Sequence
  Synthetic oligonucleotide
aggccaaggcaggacgggcatcgatacgga

SEQ ID NO: 305823 - DNA, 30 bp, Artificial Sequence
  Synthetic oligonucleotide
agcaacaccgcgttcctggcaagctacgga

SEQ ID NO: 305824 - DNA, 30 bp, Artificial Sequence
  Synthetic oligonucleotide
tatggacctatctactactcagggtacgga

SEQ ID NO: 305825 - DNA, 30 bp, Artificial Sequence
  Synthetic oligonucleotide
gtacggtttgagacgaccgtacgaaccgga

SEQ ID NO: 305826 - DNA, 30 bp, Artificial Sequence
  Synthetic oligonucleotide
tgggacacaccatatatgtgtgtaaccgga

SEQ ID NO: 305827 - DNA, 30 bp, Artificial Sequence
  Synthetic oligonucleotide
tccgctattacacgggtagtgcccaccgga

SEQ ID NO: 305828 - DNA, 30 bp, Artificial Sequence
  Synthetic oligonucleotide
tgggacgctttcataatcaactggaccgga

SEQ ID NO: 305829 - DNA, 30 bp, Artificial Sequence
  Synthetic oligonucleotide
ggtgtaggacgacttcatcttactaccgga

SEQ ID NO: 305830 - DNA, 30 bp, Artificial Sequence
  Synthetic oligonucleotide
ctgtagctctgtcagctaagggaacccgga

SEQ ID NO: 305831 - DNA, 30 bp, Artificial Sequence
  Synthetic oligonucleotide
tcacacagtgctggttcgcctttacccgga

SEQ ID NO: 305832 - DNA, 30 bp, Artificial Sequence
  Synthetic oligonucleotide
tttcgtgaacacggacaagaaagccccgga

SEQ ID NO: 305833 - DNA, 30 bp, Artificial Sequence
  Synthetic oligonucleotide
ttggtccgataaagtgggggctgccccgga

SEQ ID NO: 305834 - DNA, 30 bp, Artificial Sequence
  Synthetic oligonucleotide
tgacttgaggggccagaattatgtcccgga

SEQ ID NO: 305835 - DNA, 30 bp, Artificial Sequence
  Synthetic oligonucleotide
acttataaaaacgaagaaggacgagccgga

SEQ ID NO: 305836 - DNA, 30 bp, Artificial Sequence
  Synthetic oligonucleotide
ttgtcatccgtaaagactccacaggccgga

SEQ ID NO: 305837 - DNA, 30 bp, Artificial Sequence
  Synthetic oligonucleotide
attggccgacaataacgcccttatgccgga

SEQ ID NO: 305838 - DNA, 30 bp, Artificial Sequence
  Synthetic oligonucleotide
aagttaacccaagtttagtaccaatccgga

SEQ ID NO: 305839 - DNA, 30 bp, Artificial Sequence
  Synthetic oligonucleotide
gttatgaccgggtgcacacctaggtccgga

SEQ ID NO: 305840 - DNA, 30 bp, Artificial Sequence
  Synthetic oligonucleotide
gatgaaatgctttcgtttgtatggtccgga

SEQ ID NO: 305841 - DNA, 30 bp, Artificial Sequence
  Synthetic oligonucleotide
ctgtacgtctctcagagtttatggtccgga

SEQ ID NO: 305842 - DNA, 30 bp, Artificial Sequence
  Synthetic oligonucleotide
tccctacccgggatcgatcatgattccgga

SEQ ID NO: 305843 - DNA, 30 bp, Artificial Sequence
  Synthetic oligonucleotide
ctctagggtaataacggtgattaaagcgga

SEQ ID NO: 305844 - DNA, 30 bp, Artificial Sequence
  Synthetic oligonucleotide
cagcagtcagacagttctgtggcaagcgga

SEQ ID NO: 305845 - DNA, 30 bp, Artificial Sequence
  Synthetic oligonucleotide
agaagggtagggaattgaaacttaagcgga

SEQ ID NO: 305846 - DNA, 30 bp, Artificial Sequence
  Synthetic oligonucleotide
atcttcagcgaggcggtaagggccagcgga

SEQ ID NO: 305847 - DNA, 30 bp, Artificial Sequence
  Synthetic oligonucleotide
gctcaacggccctgtccacgagcgagcgga

SEQ ID NO: 305848 - DNA, 30 bp, Artificial Sequence
  Synthetic oligonucleotide
agtctattgtgcggaataggggcgagcgga

SEQ ID NO: 305849 - DNA, 30 bp, Artificial Sequence
  Synthetic oligonucleotide
gataatttcggagaatcggtggcgagcgga

SEQ ID NO: 305850 - DNA, 30 bp, Artificial Sequence
  Synthetic oligonucleotide
atagacaaaatgaacggctgtgtgagcgga

SEQ ID NO: 305851 - DNA, 30 bp, Artificial Sequence
  Synthetic oligonucleotide
cgctaaggattagtgtatgttactagcgga

SEQ ID NO: 305852 - DNA, 30 bp, Artificial Sequence
  Synthetic oligonucleotide
atggggctaggattcctcggttgtagcgga

SEQ ID NO: 305853 - DNA, 30 bp, Artificial Sequence
  Synthetic oligonucleotide
gattctacttagaaatcgggcaaacgcgga

SEQ ID NO: 305854 - DNA, 30 bp, Artificial Sequence
  Synthetic oligonucleotide
ctccctgaagacgggcgcgaccaacgcgga

SEQ ID NO: 305855 - DNA, 30 bp, Artificial Sequence
  Synthetic oligonucleotide
gcgcgctgacccatgtttcgaatacgcgga

SEQ ID NO: 305856 - DNA, 30 bp, Artificial Sequence
  Synthetic oligonucleotide
ttgagaggggatggaatgggaaaccgcgga

SEQ ID NO: 305857 - DNA, 30 bp, Artificial Sequence
  Synthetic oligonucleotide
ttagaagagttacaacaccccatgcgcgga

SEQ ID NO: 305858 - DNA, 30 bp, Artificial Sequence
  Synthetic oligonucleotide
gcacgcacgagcaaggcgaaccgtcgcgga

SEQ ID NO: 305859 - DNA, 30 bp, Artificial Sequence
  Synthetic oligonucleotide
ttacgaaagcagccgcaatagtaaggcgga

SEQ ID NO: 305860 - DNA, 30 bp, Artificial Sequence
  Synthetic oligonucleotide
tgttgggtcttcaagggtgtaaagggcgga

SEQ ID NO: 305861 - DNA, 30 bp, Artificial Sequence
  Synthetic oligonucleotide
gtcacattgctgaacctacccaagggcgga

SEQ ID NO: 305862 - DNA, 30 bp, Artificial Sequence
  Synthetic oligonucleotide
ttggcgcggctgactacgcgcctgggcgga

SEQ ID NO: 305863 - DNA, 30 bp, Artificial Sequence
  Synthetic oligonucleotide
gccaatcacatatcctagcacgcatgcgga

SEQ ID NO: 305864 - DNA, 30 bp, Artificial Sequence
  Synthetic oligonucleotide
agtatcgaggatcggcatactggctgcgga

SEQ ID NO: 305865 - DNA, 30 bp, Artificial Sequence
  Synthetic oligonucleotide
tatagttttctggctatgggagagtgcgga

SEQ ID NO: 305866 - DNA, 30 bp, Artificial Sequence
  Synthetic oligonucleotide
gataaaccgaacgcgccagaaccgtgcgga

SEQ ID NO: 305867 - DNA, 30 bp, Artificial Sequence
  Synthetic oligonucleotide
acaaccgtcaggactgtctggatttgcgga

SEQ ID NO: 305868 - DNA, 30 bp, Artificial Sequence
  Synthetic oligonucleotide
ggaggaccattataccctgcacggatcgga

SEQ ID NO: 305869 - DNA, 30 bp, Artificial Sequence
  Synthetic oligonucleotide
ggcttaagtgggtggagcatttttatcgga

SEQ ID NO: 305870 - DNA, 30 bp, Artificial Sequence
  Synthetic oligonucleotide
tatgagtagcgctgcagggagctgctcgga

SEQ ID NO: 305871 - DNA, 30 bp, Artificial Sequence
  Synthetic oligonucleotide
cgggatgggagtttatagaggcacgtcgga

SEQ ID NO: 305872 - DNA, 30 bp, Artificial Sequence
  Synthetic oligonucleotide
cgccccgaagggcctgcgggaggcgtcgga

SEQ ID NO: 305873 - DNA, 30 bp, Artificial Sequence
  Synthetic oligonucleotide
ttggatgctgtcgcaagcatgcaggtcgga

SEQ ID NO: 305874 - DNA, 30 bp, Artificial Sequence
  Synthetic oligonucleotide
tacatgccaccccctaaggcaatattcgga

SEQ ID NO: 305875 - DNA, 30 bp, Artificial Sequence
  Synthetic oligonucleotide
ccagaaaaaggcggacgtttgctattcgga

SEQ ID NO: 305876 - DNA, 30 bp, Artificial Sequence
  Synthetic oligonucleotide
acaaaagcatgatctttctatgcgttcgga

SEQ ID NO: 305877 - DNA, 30 bp, Artificial Sequence
  Synthetic oligonucleotide
ataccattacgctaagactgtgcgttcgga

SEQ ID NO: 305878 - DNA, 30 bp, Artificial Sequence
  Synthetic oligonucleotide
tgccatctgtccccaggcgccataaaggga

SEQ ID NO: 305879 - DNA, 30 bp, Artificial Sequence
  Synthetic oligonucleotide
gaccacctacgtatgtttggagacaaggga

SEQ ID NO: 305880 - DNA, 30 bp, Artificial Sequence
  Synthetic oligonucleotide
gcttgggggcggggacctacgtcgaaggga

SEQ ID NO: 305881 - DNA, 30 bp, Artificial Sequence
  Synthetic oligonucleotide
cgaacagtatagttggctgttcgtaaggga

SEQ ID NO: 305882 - DNA, 30 bp, Artificial Sequence
  Synthetic oligonucleotide
actggcaatctgtataatagatttaaggga

SEQ ID NO: 305883 - DNA, 30 bp, Artificial Sequence
  Synthetic oligonucleotide
aactccgtatatacaaggtgagcacaggga

SEQ ID NO: 305884 - DNA, 30 bp, Artificial Sequence
  Synthetic oligonucleotide
gccgacagctcgggcatcctgttacaggga

SEQ ID NO: 305885 - DNA, 30 bp, Artificial Sequence
  Synthetic oligonucleotide
gtcgcggggtagaaaccttaattccaggga

SEQ ID NO: 305886 - DNA, 30 bp, Artificial Sequence
  Synthetic oligonucleotide
gttaataattaagcactaaacacgcaggga

SEQ ID NO: 305887 - DNA, 30 bp, Artificial Sequence
  Synthetic oligonucleotide
atcggtttagtgatgtgtgccaggcaggga

SEQ ID NO: 305888 - DNA, 30 bp, Artificial Sequence
  Synthetic oligonucleotide
ggcctggcaatcgccctttcatggcaggga

SEQ ID NO: 305889 - DNA, 30 bp, Artificial Sequence
  Synthetic oligonucleotide
attaaggagctccgttattagcctcaggga

SEQ ID NO: 305890 - DNA, 30 bp, Artificial Sequence
  Synthetic oligonucleotide
cgcctcctacactaggaaccatctcaggga

SEQ ID NO: 305891 - DNA, 30 bp, Artificial Sequence
  Synthetic oligonucleotide
gaagaaaagccggtccgtctacgtcaggga

SEQ ID NO: 305892 - DNA, 30 bp, Artificial Sequence
  Synthetic oligonucleotide
tggatcagccggcctcttcactaagaggga

SEQ ID NO: 305893 - DNA, 30 bp, Artificial Sequence
  Synthetic oligonucleotide
gcatcgcaggccgttcaaagtatcgaggga

SEQ ID NO: 305894 - DNA, 30 bp, Artificial Sequence
  Synthetic oligonucleotide
tgagacatgccttccgcttgaccggaggga

SEQ ID NO: 305895 - DNA, 30 bp, Artificial Sequence
  Synthetic oligonucleotide
ccctgacgctcgaatccgactttggaggga

SEQ ID NO: 305896 - DNA, 30 bp, Artificial Sequence
  Synthetic oligonucleotide
ggtgtccttgcgcttgtcacaaatgaggga

SEQ ID NO: 305897 - DNA, 30 bp, Artificial Sequence
  Synthetic oligonucleotide
agctgttgcagattttatatgggataggga

SEQ ID NO: 305898 - DNA, 30 bp, Artificial Sequence
  Synthetic oligonucleotide
tgtcgatcttatcgcgataaagactaggga

SEQ ID NO: 305899 - DNA, 30 bp, Artificial Sequence
  Synthetic oligonucleotide
gagttgctgcggcagcttgaatcctaggga

SEQ ID NO: 305900 - DNA, 30 bp, Artificial Sequence
  Synthetic oligonucleotide
ccgggtctcaaaagtcacggaggctaggga

SEQ ID NO: 305901 - DNA, 30 bp, Artificial Sequence
  Synthetic oligonucleotide
aagttcttacgactacagtccggctaggga

SEQ ID NO: 305902 - DNA, 30 bp, Artificial Sequence
  Synthetic oligonucleotide
aaccctacgcggacacaggttgtctaggga

SEQ ID NO: 305903 - DNA, 30 bp, Artificial Sequence
  Synthetic oligonucleotide
taaaacaaagacgtagcttgcaagtaggga

SEQ ID NO: 305904 - DNA, 30 bp, Artificial Sequence
  Synthetic oligonucleotide
gaaacgagatcggactttgcgcagtaggga

SEQ ID NO: 305905 - DNA, 30 bp, Artificial Sequence
  Synthetic oligonucleotide
ttacagtcactgtcagtctgcatttaggga

SEQ ID NO: 305906 - DNA, 30 bp, Artificial Sequence
  Synthetic oligonucleotide
gagaacgggtttgacagtcacacaacggga

SEQ ID NO: 305907 - DNA, 30 bp, Artificial Sequence
  Synthetic oligonucleotide
gacatccacgggtgctaaaatacaacggga

SEQ ID NO: 305908 - DNA, 30 bp, Artificial Sequence
  Synthetic oligonucleotide
accctaatgaccttggatcatgtaacggga

SEQ ID NO: 305909 - DNA, 30 bp, Artificial Sequence
  Synthetic oligonucleotide
tggggttagttacgcgggagttccacggga

SEQ ID NO: 305910 - DNA, 30 bp, Artificial Sequence
  Synthetic oligonucleotide
tgcatgacttccatttaacggcgcacggga

SEQ ID NO: 305911 - DNA, 30 bp, Artificial Sequence
  Synthetic oligonucleotide
aacggttactaggagcatcaacggacggga

SEQ ID NO: 305912 - DNA, 30 bp, Artificial Sequence
  Synthetic oligonucleotide
ttcactctgatgatggtcaagtctacggga

SEQ ID NO: 305913 - DNA, 30 bp, Artificial Sequence
  Synthetic oligonucleotide
ggaatagaccatggtgcactggaaccggga

SEQ ID NO: 305914 - DNA, 30 bp, Artificial Sequence
  Synthetic oligonucleotide
aatgcgtagcttattagcaaccagccggga

SEQ ID NO: 305915 - DNA, 30 bp, Artificial Sequence
  Synthetic oligonucleotide
ctagggagggttctgttagctatgccggga

SEQ ID NO: 305916 - DNA, 30 bp, Artificial Sequence
  Synthetic oligonucleotide
tctaatgtacattccctcacggtgccggga

SEQ ID NO: 305917 - DNA, 30 bp, Artificial Sequence
  Synthetic oligonucleotide
atcagcattgcatgaaagactttgccggga

SEQ ID NO: 305918 - DNA, 30 bp, Artificial Sequence
  Synthetic oligonucleotide
gaagatgatcctgtcctcctggttccggga

SEQ ID NO: 305919 - DNA, 30 bp, Artificial Sequence
  Synthetic oligonucleotide
tgggggaggtacacctgccacaaagcggga

SEQ ID NO: 305920 - DNA, 30 bp, Artificial Sequence
  Synthetic oligonucleotide
gcctcatccctacatgtaaaccaagcggga

SEQ ID NO: 305921 - DNA, 30 bp, Artificial Sequence
  Synthetic oligonucleotide
aatggattaccgcgtaaatcctaagcggga

SEQ ID NO: 305922 - DNA, 30 bp, Artificial Sequence
  Synthetic oligonucleotide
aagcgtatgcataagaggctccccgcggga

SEQ ID NO: 305923 - DNA, 30 bp, Artificial Sequence
  Synthetic oligonucleotide
tagggcggattcgatgacagtggcgcggga

SEQ ID NO: 305924 - DNA, 30 bp, Artificial Sequence
  Synthetic oligonucleotide
tcatggcagagtcgctgctttgcggcggga

SEQ ID NO: 305925 - DNA, 30 bp, Artificial Sequence
  Synthetic oligonucleotide
cactatattatgttgggacaaaatgcggga

SEQ ID NO: 305926 - DNA, 30 bp, Artificial Sequence
  Synthetic oligonucleotide
ttccataaaagctgacatgaaactgcggga

SEQ ID NO: 305927 - DNA, 30 bp, Artificial Sequence
  Synthetic oligonucleotide
attgttaaatgttttggcgctgctgcggga

SEQ ID NO: 305928 - DNA, 30 bp, Artificial Sequence
  Synthetic oligonucleotide
cgtagacggagcgcacaatgtcttgcggga

SEQ ID NO: 305929 - DNA, 30 bp, Artificial Sequence
  Synthetic oligonucleotide
gctgtaccaatcacccgtctttactcggga

SEQ ID NO: 305930 - DNA, 30 bp, Artificial Sequence
  Synthetic oligonucleotide
ccaagagcacagagaaaatctcggtcggga

SEQ ID NO: 305931 - DNA, 30 bp, Artificial Sequence
  Synthetic oligonucleotide
gactgcgcgcatgtatatatactttcggga

SEQ ID NO: 305932 - DNA, 30 bp, Artificial Sequence
  Synthetic oligonucleotide
actatacgaggaagaatcaggagaagggga

SEQ ID NO: 305933 - DNA, 30 bp, Artificial Sequence
  Synthetic oligonucleotide
ttggtctcgcagatagtcgatagaagggga

SEQ ID NO: 305934 - DNA, 30 bp, Artificial Sequence
  Synthetic oligonucleotide
ctccactacatcccgtcagggaacagggga

SEQ ID NO: 305935 - DNA, 30 bp, Artificial Sequence
  Synthetic oligonucleotide
acgggaagaaccggagggcggtgcagggga

SEQ ID NO: 305936 - DNA, 30 bp, Artificial Sequence
  Synthetic oligonucleotide
cgtctagtgatgctagaacgcgtcagggga

SEQ ID NO: 305937 - DNA, 28 bp, Artificial Sequence
  Synthetic oligonucleotide
attaatagctattcgaggtgcgagggga

SEQ ID NO: 305938 - DNA, 30 bp, Artificial Sequence
  Synthetic oligonucleotide
atggtaagccttcgggctcggctacgggga

SEQ ID NO: 305939 - DNA, 30 bp, Artificial Sequence
  Synthetic oligonucleotide
caatatttatctaatgcgacactgcgggga

SEQ ID NO: 305940 - DNA, 30 bp, Artificial Sequence
  Synthetic oligonucleotide
aagggattcgcagacgtatttaatcgggga

SEQ ID NO: 305941 - DNA, 30 bp, Artificial Sequence
  Synthetic oligonucleotide
tcacgccgtaactaagccgtatctcgggga

SEQ ID NO: 305942 - DNA, 30 bp, Artificial Sequence
  Synthetic oligonucleotide
tggaaactttcatacgctacttacggggga

SEQ ID NO: 305943 - DNA, 30 bp, Artificial Sequence
  Synthetic oligonucleotide
ggttatagccattggatcttcttcggggga

SEQ ID NO: 305944 - DNA, 30 bp, Artificial Sequence
  Synthetic oligonucleotide
ggcgcgtcgcacttggtgcatgcgggggga

SEQ ID NO: 305945 - DNA, 30 bp, Artificial Sequence
  Synthetic oligonucleotide
gacgtggagtttacgtgataacggggggga

SEQ ID NO: 305946 - DNA, 40 bp, Artificial Sequence
  Synthetic oligonucleotide
aagataatacattcatggtatggacggggatcggggggga

SEQ ID NO: 305947 - DNA, 40 bp, Artificial Sequence
  Synthetic oligonucleotide
aagataatacattcatggtaaggtcggggatcggggggga

SEQ ID NO: 305948 - DNA, 40 bp, Artificial Sequence
  Synthetic oligonucleotide
aagataatacatccatggtatggtcggggatcggggggga

SEQ ID NO: 305949 - DNA, 30 bp, Artificial Sequence
  Synthetic oligonucleotide
tcagtgcactgtctgaacaggctgggggga

SEQ ID NO: 305950 - DNA, 30 bp, Artificial Sequence
  Synthetic oligonucleotide
acgttggataacaaaggctccgctggggga

SEQ ID NO: 305951 - DNA, 30 bp, Artificial Sequence
  Synthetic oligonucleotide
gatgtgaccccccactatcctggtggggga

SEQ ID NO: 305952 - DNA, 30 bp, Artificial Sequence
  Synthetic oligonucleotide
aaagccacgagagtaactggctgtggggga

SEQ ID NO: 305953 - DNA, 30 bp, Artificial Sequence
  Synthetic oligonucleotide
attgttgtagtgcaacgggcctaatgggga

SEQ ID NO: 305954 - DNA, 30 bp, Artificial Sequence
  Synthetic oligonucleotide
tacatctaggatcaccccgtgccatgggga

SEQ ID NO: 305955 - DNA, 27 bp, Artificial Sequence
  Synthetic oligonucleotide
aaggaaactatatgatatacctgggga

SEQ ID NO: 305956 - DNA, 30 bp, Artificial Sequence
  Synthetic oligonucleotide
ttgtgcgcattttgacccagctcctgggga

SEQ ID NO: 305957 - DNA, 30 bp, Artificial Sequence
  Synthetic oligonucleotide
gcgaaccataacttaagtctccgctgggga

SEQ ID NO: 305958 - DNA, 30 bp, Artificial Sequence
  Synthetic oligonucleotide
atcattaaaaaacgtggtaatgtctgggga

SEQ ID NO: 305959 - DNA, 30 bp, Artificial Sequence
  Synthetic oligonucleotide
gtgcttatcataagtcacgttcattgggga

SEQ ID NO: 305960 - DNA, 30 bp, Artificial Sequence
  Synthetic oligonucleotide
tacccaactcggtgaacgtctatttgggga

SEQ ID NO: 305961 - DNA, 30 bp, Artificial Sequence
  Synthetic oligonucleotide
gatcggtcaaagcggactagcgtttgggga

SEQ ID NO: 305962 - DNA, 30 bp, Artificial Sequence
  Synthetic oligonucleotide
ccaatctccggccatggatttaaaatggga

SEQ ID NO: 305963 - DNA, 30 bp, Artificial Sequence
  Synthetic oligonucleotide
gcgcggcataatatttcttgggaaatggga

SEQ ID NO: 305964 - DNA, 30 bp, Artificial Sequence
  Synthetic oligonucleotide
gaccaagtttacagatggcgcccaatggga

SEQ ID NO: 305965 - DNA, 30 bp, Artificial Sequence
  Synthetic oligonucleotide
ccggttgctaggaaattcccatcgatggga

SEQ ID NO: 305966 - DNA, 30 bp, Artificial Sequence
  Synthetic oligonucleotide
gaagattgtacaacctggaaagggatggga

SEQ ID NO: 305967 - DNA, 30 bp, Artificial Sequence
  Synthetic oligonucleotide
gctgattcagacatccaacttcctatggga

SEQ ID NO: 305968 - DNA, 30 bp, Artificial Sequence
  Synthetic oligonucleotide
ggtaggctttagattgcgtatgttatggga

SEQ ID NO: 305969 - DNA, 30 bp, Artificial Sequence
  Synthetic oligonucleotide
taccatactagcccacagattgcactggga

SEQ ID NO: 305970 - DNA, 30 bp, Artificial Sequence
  Synthetic oligonucleotide
tacggacctaacgtcagctaccgactggga

SEQ ID NO: 305971 - DNA, 30 bp, Artificial Sequence
  Synthetic oligonucleotide
gaggactcgctacaggcgcgtcgactggga

SEQ ID NO: 305972 - DNA, 30 bp, Artificial Sequence
  Synthetic oligonucleotide
tttggctaacggccctcaagcagcctggga

SEQ ID NO: 305973 - DNA, 30 bp, Artificial Sequence
  Synthetic oligonucleotide
atgtggtccattgagcaatagttcctggga

SEQ ID NO: 305974 - DNA, 30 bp, Artificial Sequence
  Synthetic oligonucleotide
tgcattgtcattggtggggcccgtctggga

SEQ ID NO: 305975 - DNA, 30 bp, Artificial Sequence
  Synthetic oligonucleotide
accgaatcgttaaccctcacgattctggga

SEQ ID NO: 305976 - DNA, 30 bp, Artificial Sequence
  Synthetic oligonucleotide
gcaaaacattgttattatgctggagtggga

SEQ ID NO: 305977 - DNA, 30 bp, Artificial Sequence
  Synthetic oligonucleotide
gattatcgcgcaccctgttagggcgtggga

SEQ ID NO: 305978 - DNA, 30 bp, Artificial Sequence
  Synthetic oligonucleotide
agttaattccaacgtctcattggcgtggga

SEQ ID NO: 305979 - DNA, 30 bp, Artificial Sequence
  Synthetic oligonucleotide
cagcagacaggttctatagaactcgtggga

SEQ ID NO: 305980 - DNA, 30 bp, Artificial Sequence
  Synthetic oligonucleotide
tgaaccgatcctgttttgggattggtggga

SEQ ID NO: 305981 - DNA, 30 bp, Artificial Sequence
  Synthetic oligonucleotide
aaggtgatgtaagaagcactctatgtggga

SEQ ID NO: 305982 - DNA, 30 bp, Artificial Sequence
  Synthetic oligonucleotide
agaaaagctattggaggtaaacaattggga

SEQ ID NO: 305983 - DNA, 30 bp, Artificial Sequence
  Synthetic oligonucleotide
ctaagcccataggtgcaactctcattggga

SEQ ID NO: 305984 - DNA, 30 bp, Artificial Sequence
  Synthetic oligonucleotide
ttaactcggtcgattacccacagattggga

SEQ ID NO: 305985 - DNA, 30 bp, Artificial Sequence
  Synthetic oligonucleotide
aatcacgacccaagcgaccagtgattggga

SEQ ID NO: 305986 - DNA, 30 bp, Artificial Sequence
  Synthetic oligonucleotide
cactaatcgtcgtgctgaggaatcttggga

SEQ ID NO: 305987 - DNA, 30 bp, Artificial Sequence
  Synthetic oligonucleotide
caacggccatgagaagacggacatttggga

SEQ ID NO: 305988 - DNA, 30 bp, Artificial Sequence
  Synthetic oligonucleotide
gacttaagtggtgaaaaaggagttttggga

SEQ ID NO: 305989 - DNA, 30 bp, Artificial Sequence
  Synthetic oligonucleotide
gcgcggttaaatgcaattgagggaaatgga

SEQ ID NO: 305990 - DNA, 30 bp, Artificial Sequence
  Synthetic oligonucleotide
cgtggggtcgcttcagactatataaatgga

SEQ ID NO: 305991 - DNA, 30 bp, Artificial Sequence
  Synthetic oligonucleotide
tacatgctgcgggtagttaaggtaaatgga

SEQ ID NO: 305992 - DNA, 30 bp, Artificial Sequence
  Synthetic oligonucleotide
ggttccgcaagggggcgactgcggaatgga

SEQ ID NO: 305993 - DNA, 30 bp, Artificial Sequence
  Synthetic oligonucleotide
ttgatcagattgatctactaactgaatgga

SEQ ID NO: 305994 - DNA, 30 bp, Artificial Sequence
  Synthetic oligonucleotide
tgtatcgcaccgcgtatgtaacaacatgga

SEQ ID NO: 305995 - DNA, 30 bp, Artificial Sequence
  Synthetic oligonucleotide
cagcctaacaggtcgtcctcttaacatgga

SEQ ID NO: 305996 - DNA, 30 bp, Artificial Sequence
  Synthetic oligonucleotide
ctagctgttagactacaggctacacatgga

SEQ ID NO: 305997 - DNA, 30 bp, Artificial Sequence
  Synthetic oligonucleotide
tccgagccacgcatagtgccgtcacatgga

SEQ ID NO: 305998 - DNA, 30 bp, Artificial Sequence
  Synthetic oligonucleotide
gtggtactaagtaggtcggttagccatgga

SEQ ID NO: 305999 - DNA, 30 bp, Artificial Sequence
  Synthetic oligonucleotide
caagcacccggtggtaccatgggccatgga

SEQ ID NO: 306000 - DNA, 30 bp, Artificial Sequence
  Synthetic oligonucleotide
gggtttctctgaaacggtataatgcatgga

SEQ ID NO: 306001 - DNA, 30 bp, Artificial Sequence
  Synthetic oligonucleotide
cggaattgttagaatacggtgtgagatgga

SEQ ID NO: 306002 - DNA, 30 bp, Artificial Sequence
  Synthetic oligonucleotide
agataaaggttggtgagtcagctagatgga

SEQ ID NO: 306003 - DNA, 30 bp, Artificial Sequence
  Synthetic oligonucleotide
cgtgtcagcccgtaagcactagtagatgga

SEQ ID NO: 306004 - DNA, 30 bp, Artificial Sequence
  Synthetic oligonucleotide
cgcccatgggtaataatagagttcgatgga

SEQ ID NO: 306005 - DNA, 30 bp, Artificial Sequence
  Synthetic oligonucleotide
gcatactgggttagctgacaacatgatgga

SEQ ID NO: 306006 - DNA, 30 bp, Artificial Sequence
  Synthetic oligonucleotide
gcttgcatggaagaccctgtacgtgatgga

SEQ ID NO: 306007 - DNA, 30 bp, Artificial Sequence
  Synthetic oligonucleotide
ggcggttccgagtgatgttctcaatatgga

SEQ ID NO: 306008 - DNA, 30 bp, Artificial Sequence
  Synthetic oligonucleotide
taggtaagagatggaagcaatccatatgga

SEQ ID NO: 306009 - DNA, 30 bp, Artificial Sequence
  Synthetic oligonucleotide
tataagatgcctcggaagcaaatatatgga

SEQ ID NO: 306010 - DNA, 30 bp, Artificial Sequence
  Synthetic oligonucleotide
ttacgcttcgtgttttgtaatatgtatgga

SEQ ID NO: 306011 - DNA, 30 bp, Artificial Sequence
  Synthetic oligonucleotide
aggtatatttaaagggaagcttgttatgga

SEQ ID NO: 306012 - DNA, 30 bp, Artificial Sequence
  Synthetic oligonucleotide
atgcgcccgcgccctttcttaacaactgga

SEQ ID NO: 306013 - DNA, 30 bp, Artificial Sequence
  Synthetic oligonucleotide
gacaggccactgtttcgacctttaactgga

SEQ ID NO: 306014 - DNA, 30 bp, Artificial Sequence
  Synthetic oligonucleotide
gaggcggcatagggatgcgaacggactgga

SEQ ID NO: 306015 - DNA, 30 bp, Artificial Sequence
  Synthetic oligonucleotide
agtcgcgagcaggaatacaattaacctgga

SEQ ID NO: 306016 - DNA, 30 bp, Artificial Sequence
  Synthetic oligonucleotide
ggattccctgtgtaatcttgagtacctgga

SEQ ID NO: 306017 - DNA, 30 bp, Artificial Sequence
  Synthetic oligonucleotide
ggtctttcgctacagatgaaagtgcctgga

SEQ ID NO: 306018 - DNA, 30 bp, Artificial Sequence
  Synthetic oligonucleotide
gtcaatcccaaagaccgcggagaagctgga

SEQ ID NO: 306019 - DNA, 30 bp, Artificial Sequence
  Synthetic oligonucleotide
tttacacgtaagcgtatggcgacagctgga

SEQ ID NO: 306020 - DNA, 30 bp, Artificial Sequence
  Synthetic oligonucleotide
gtcaggcatcgaataggcgcctgcgctgga

SEQ ID NO: 306021 - DNA, 30 bp, Artificial Sequence
  Synthetic oligonucleotide
gcccagtttactgtgaggaaaaaggctgga

SEQ ID NO: 306022 - DNA, 30 bp, Artificial Sequence
  Synthetic oligonucleotide
ttgatagccttctaagcagttaaggctgga

SEQ ID NO: 306023 - DNA, 30 bp, Artificial Sequence
  Synthetic oligonucleotide
ggcaaatgaggattaagtcgggtggctgga

SEQ ID NO: 306024 - DNA, 30 bp, Artificial Sequence
  Synthetic oligonucleotide
gacacatttttttacgctttgaatgctgga

SEQ ID NO: 306025 - DNA, 30 bp, Artificial Sequence
  Synthetic oligonucleotide
tccggttacggtgatcactattgtgctgga

SEQ ID NO: 306026 - DNA, 30 bp, Artificial Sequence
  Synthetic oligonucleotide
atattggcagtggagctgaaagttgctgga

SEQ ID NO: 306027 - DNA, 30 bp, Artificial Sequence
  Synthetic oligonucleotide
gtcagattcaccattactatctttgctgga

SEQ ID NO: 306028 - DNA, 30 bp, Artificial Sequence
  Synthetic oligonucleotide
tcccttaatacgacgatgatcaactctgga

SEQ ID NO: 306029 - DNA, 30 bp, Artificial Sequence
  Synthetic oligonucleotide
gtttcgtagagtcgttcggagacctctgga

SEQ ID NO: 306030 - DNA, 30 bp, Artificial Sequence
  Synthetic oligonucleotide
gttcgatcacaagacatcgatcgctctgga

SEQ ID NO: 306031 - DNA, 30 bp, Artificial Sequence
  Synthetic oligonucleotide
cggaggtttcccgacaatggtcgctctgga

SEQ ID NO: 306032 - DNA, 30 bp, Artificial Sequence
  Synthetic oligonucleotide
acaaactgtccttattaagttgagtctgga

SEQ ID NO: 306033 - DNA, 30 bp, Artificial Sequence
  Synthetic oligonucleotide
gtcgggcccgctcagtcgggttcgtctgga

SEQ ID NO: 306034 - DNA, 30 bp, Artificial Sequence
  Synthetic oligonucleotide
agcgcaccttgaatcgctactccaagtgga

SEQ ID NO: 306035 - DNA, 30 bp, Artificial Sequence
  Synthetic oligonucleotide
ctgcggagacttgggtgttcgtccagtgga

SEQ ID NO: 306036 - DNA, 30 bp, Artificial Sequence
  Synthetic oligonucleotide
atgtcagattacattgcctgattcagtgga

SEQ ID NO: 306037 - DNA, 30 bp, Artificial Sequence
  Synthetic oligonucleotide
gattcaagtttggtttactccgagagtgga

SEQ ID NO: 306038 - DNA, 30 bp, Artificial Sequence
  Synthetic oligonucleotide
tcgcagtcaggtgaccgatctctgagtgga

SEQ ID NO: 306039 - DNA, 30 bp, Artificial Sequence
  Synthetic oligonucleotide
atggcatgcgcaacggctcgatgtagtgga

SEQ ID NO: 306040 - DNA, 30 bp, Artificial Sequence
  Synthetic oligonucleotide
cccgtattaatgaggtgttagcgccgtgga

SEQ ID NO: 306041 - DNA, 30 bp, Artificial Sequence
  Synthetic oligonucleotide
cactgatctcattgaaagagattgcgtgga

SEQ ID NO: 306042 - DNA, 30 bp, Artificial Sequence
  Synthetic oligonucleotide
tagtgctttcaactctaatacagtcgtgga

SEQ ID NO: 306043 - DNA, 30 bp, Artificial Sequence
  Synthetic oligonucleotide
ccggatgggccgtgtctgcctggtcgtgga

SEQ ID NO: 306044 - DNA, 30 bp, Artificial Sequence
  Synthetic oligonucleotide
agaggggttataccacaacagtcaggtgga

SEQ ID NO: 306045 - DNA, 30 bp, Artificial Sequence
  Synthetic oligonucleotide
tgactatgatggagcatggtctgcggtgga

SEQ ID NO: 306046 - DNA, 30 bp, Artificial Sequence
  Synthetic oligonucleotide
gaccgtttgtatcaaatctgcatcggtgga

SEQ ID NO: 306047 - DNA, 30 bp, Artificial Sequence
  Synthetic oligonucleotide
aactaggacgaagcccatcagcagggtgga

SEQ ID NO: 306048 - DNA, 30 bp, Artificial Sequence
  Synthetic oligonucleotide
atccacacgggacttccggtgtcgggtgga

SEQ ID NO: 306049 - DNA, 30 bp, Artificial Sequence
  Synthetic oligonucleotide
ttaacagaattagtggggcgtgatggtgga

SEQ ID NO: 306050 - DNA, 30 bp, Artificial Sequence
  Synthetic oligonucleotide
ctctgtagaggtatatgcctcaaatgtgga

SEQ ID NO: 306051 - DNA, 30 bp, Artificial Sequence
  Synthetic oligonucleotide
atcagcgtttttttcccttgcagatgtgga

SEQ ID NO: 306052 - DNA, 30 bp, Artificial Sequence
  Synthetic oligonucleotide
gcctcgggccccttggttagggtatgtgga

SEQ ID NO: 306053 - DNA, 30 bp, Artificial Sequence
  Synthetic oligonucleotide
tgaatttgaatacagtcatagttatgtgga

SEQ ID NO: 306054 - DNA, 30 bp, Artificial Sequence
  Synthetic oligonucleotide
tagtctcgtgatgactcgaactagtgtgga

SEQ ID NO: 306055 - DNA, 30 bp, Artificial Sequence
  Synthetic oligonucleotide
caacagatgcgaattcaccgaccttgtgga

SEQ ID NO: 306056 - DNA, 30 bp, Artificial Sequence
  Synthetic oligonucleotide
atttgaaagcgttatacatgagtaattgga

SEQ ID NO: 306057 - DNA, 30 bp, Artificial Sequence
  Synthetic oligonucleotide
tagtgacttttcaaagattacagcattgga

SEQ ID NO: 306058 - DNA, 30 bp, Artificial Sequence
  Synthetic oligonucleotide
taggcattcccgaaatggtaaaagattgga

SEQ ID NO: 306059 - DNA, 30 bp, Artificial Sequence
  Synthetic oligonucleotide
aagttgccgtcggggcccgattagattgga

SEQ ID NO: 306060 - DNA, 30 bp, Artificial Sequence
  Synthetic oligonucleotide
aagctacgttcccatgttgctaggattgga

SEQ ID NO: 306061 - DNA, 30 bp, Artificial Sequence
  Synthetic oligonucleotide
tgtctcatcctagataagggaatgattgga

SEQ ID NO: 306062 - DNA, 30 bp, Artificial Sequence
  Synthetic oligonucleotide
gtggtaccagctctgcagatagctattgga

SEQ ID NO: 306063 - DNA, 30 bp, Artificial Sequence
  Synthetic oligonucleotide
ttttggcctgatcgttagtgtattattgga

SEQ ID NO: 306064 - DNA, 30 bp, Artificial Sequence
  Synthetic oligonucleotide
atcaattggtgctgggcaaaaagacttgga

SEQ ID NO: 306065 - DNA, 30 bp, Artificial Sequence
  Synthetic oligonucleotide
cgacacttcgtttctctacacgaccttgga

SEQ ID NO: 306066 - DNA, 30 bp, Artificial Sequence
  Synthetic oligonucleotide
tcgcgcgtgtcaatggcaaaagcgcttgga

SEQ ID NO: 306067 - DNA, 30 bp, Artificial Sequence
  Synthetic oligonucleotide
tgtgcgcaggtctcagtctacaggcttgga

SEQ ID NO: 306068 - DNA, 30 bp, Artificial Sequence
  Synthetic oligonucleotide
cacaccaaatctgctagcagcgggcttgga

SEQ ID NO: 306069 - DNA, 30 bp, Artificial Sequence
  Synthetic oligonucleotide
tcgcatcggctggtgggtaagttgcttgga

SEQ ID NO: 306070 - DNA, 30 bp, Artificial Sequence
  Synthetic oligonucleotide
acgggtcgtagttgaatttcactagttgga

SEQ ID NO: 306071 - DNA, 30 bp, Artificial Sequence
  Synthetic oligonucleotide
gcctcaaaccctttgaagggagtagttgga

SEQ ID NO: 306072 - DNA, 30 bp, Artificial Sequence
  Synthetic oligonucleotide
aacagttcacgccgttaatctttagttgga

SEQ ID NO: 306073 - DNA, 30 bp, Artificial Sequence
  Synthetic oligonucleotide
tgtaatgatagataatacatatccgttgga

SEQ ID NO: 306074 - DNA, 30 bp, Artificial Sequence
  Synthetic oligonucleotide
acaggtcactcagtaccccacaaggttgga

SEQ ID NO: 306075 - DNA, 30 bp, Artificial Sequence
  Synthetic oligonucleotide
ggtattcaaggaaaggcccgacgggttgga

SEQ ID NO: 306076 - DNA, 30 bp, Artificial Sequence
  Synthetic oligonucleotide
taccggcgcaatgaacatgtggatgttgga

SEQ ID NO: 306077 - DNA, 30 bp, Artificial Sequence
  Synthetic oligonucleotide
cggcacgcaattccatggtagtctgttgga

SEQ ID NO: 306078 - DNA, 30 bp, Artificial Sequence
  Synthetic oligonucleotide
actggctaaattaattcttcaacatttgga

SEQ ID NO: 306079 - DNA, 30 bp, Artificial Sequence
  Synthetic oligonucleotide
ggagaagctgcgtgggtttccggatttgga

SEQ ID NO: 306080 - DNA, 30 bp, Artificial Sequence
  Synthetic oligonucleotide
aatctagtgagtaccgtttatatatttgga

SEQ ID NO: 306081 - DNA, 30 bp, Artificial Sequence
  Synthetic oligonucleotide
atgccgatggcctcgttcaagtgctttgga

SEQ ID NO: 306082 - DNA, 30 bp, Artificial Sequence
  Synthetic oligonucleotide
acgcgtccataaaaaatcggttgctttgga

SEQ ID NO: 306083 - DNA, 30 bp, Artificial Sequence
  Synthetic oligonucleotide
cccgggaagggaaccaaaggaacgtttgga

SEQ ID NO: 306084 - DNA, 30 bp, Artificial Sequence
  Synthetic oligonucleotide
atgtattcgttatatatagtatcttttgga

SEQ ID NO: 306085 - DNA, 30 bp, Artificial Sequence
  Synthetic oligonucleotide
gtgtccgaggttactaacatacgttttgga

SEQ ID NO: 306086 - DNA, 30 bp, Artificial Sequence
  Synthetic oligonucleotide
cctagcaggaaagttcttaagctttttgga

SEQ ID NO: 306087 - DNA, 30 bp, Artificial Sequence
  Synthetic oligonucleotide
aggatgttacagttatataagaaaaaatga

SEQ ID NO: 306088 - DNA, 30 bp, Artificial Sequence
  Synthetic oligonucleotide
tgatgataccccaacctctttcaaaaatga

SEQ ID NO: 306089 - DNA, 30 bp, Artificial Sequence
  Synthetic oligonucleotide
ttatggaggtgttgagatctaacaaaatga

SEQ ID NO: 306090 - DNA, 30 bp, Artificial Sequence
  Synthetic oligonucleotide
acggaactttactccttcgtttgaaaatga

SEQ ID NO: 306091 - DNA, 30 bp, Artificial Sequence
  Synthetic oligonucleotide
ccttgacccatcgcttgcattggcaaatga

SEQ ID NO: 306092 - DNA, 30 bp, Artificial Sequence
  Synthetic oligonucleotide
gcaagtcgggtgtagatagtatgcaaatga

SEQ ID NO: 306093 - DNA, 30 bp, Artificial Sequence
  Synthetic oligonucleotide
ggggtcgtgaccctcggccactcgaaatga

SEQ ID NO: 306094 - DNA, 30 bp, Artificial Sequence
  Synthetic oligonucleotide
gttttgcagttaccgtcagactggaaatga

SEQ ID NO: 306095 - DNA, 30 bp, Artificial Sequence
  Synthetic oligonucleotide
agataggaagacgcaatatcctggaaatga

SEQ ID NO: 306096 - DNA, 30 bp, Artificial Sequence
  Synthetic oligonucleotide
cgatccgagttcaaaaacgacgctaaatga

SEQ ID NO: 306097 - DNA, 30 bp, Artificial Sequence
  Synthetic oligonucleotide
gaagtggttcgatgataatagagtaaatga

SEQ ID NO: 306098 - DNA, 30 bp, Artificial Sequence
  Synthetic oligonucleotide
attctcaggtcagagaatccacgacaatga

SEQ ID NO: 306099 - DNA, 30 bp, Artificial Sequence
  Synthetic oligonucleotide
tttcggagattctagggacgaatccaatga

SEQ ID NO: 306100 - DNA, 30 bp, Artificial Sequence
  Synthetic oligonucleotide
tacaggttaagagttccagtgcctcaatga

SEQ ID NO: 306101 - DNA, 30 bp, Artificial Sequence
  Synthetic oligonucleotide
agtatacgagggctcttaacaggtcaatga

SEQ ID NO: 306102 - DNA, 30 bp, Artificial Sequence
  Synthetic oligonucleotide
cttgtcggatctggtatttggatagaatga

SEQ ID NO: 306103 - DNA, 30 bp, Artificial Sequence
  Synthetic oligonucleotide
agtgtcgttactattgcacggcacgaatga

SEQ ID NO: 306104 - DNA, 30 bp, Artificial Sequence
  Synthetic oligonucleotide
agcgattcttgcgcgtcccatatggaatga

SEQ ID NO: 306105 - DNA, 30 bp, Artificial Sequence
  Synthetic oligonucleotide
cccggcgagaaagtcatcgaaacataatga

SEQ ID NO: 306106 - DNA, 30 bp, Artificial Sequence
  Synthetic oligonucleotide
agaaaactgcacgcactaccgtcataatga

SEQ ID NO: 306107 - DNA, 30 bp, Artificial Sequence
  Synthetic oligonucleotide
ttgaaatcacaccgtaccccgggataatga

SEQ ID NO: 306108 - DNA, 30 bp, Artificial Sequence
  Synthetic oligonucleotide
ggtcgaatacaagatgtaccgccgtaatga

SEQ ID NO: 306109 - DNA, 30 bp, Artificial Sequence
  Synthetic oligonucleotide
tgcatccgaccaccacgcatacggtaatga

SEQ ID NO: 306110 - DNA, 30 bp, Artificial Sequence
  Synthetic oligonucleotide
cagcgactttcacagcgaatattgtaatga

SEQ ID NO: 306111 - DNA, 30 bp, Artificial Sequence
  Synthetic oligonucleotide
gtttgcatgaggactggcacggattaatga

SEQ ID NO: 306112 - DNA, 30 bp, Artificial Sequence
  Synthetic oligonucleotide
ctcggggcatctacggttcatttttaatga

SEQ ID NO: 306113 - DNA, 30 bp, Artificial Sequence
  Synthetic oligonucleotide
aaagagtgtacatatgtgaattcaacatga

SEQ ID NO: 306114 - DNA, 30 bp, Artificial Sequence
  Synthetic oligonucleotide
ggctggcgtatcacgtacgggttaacatga

SEQ ID NO: 306115 - DNA, 30 bp, Artificial Sequence
  Synthetic oligonucleotide
gacgtgccggactgtacagtgatgacatga

SEQ ID NO: 306116 - DNA, 30 bp, Artificial Sequence
  Synthetic oligonucleotide
aaaagtgccacagaaaacgaagtgacatga

SEQ ID NO: 306117 - DNA, 30 bp, Artificial Sequence
  Synthetic oligonucleotide
tggaaattacggacagtcgtccgcccatga

SEQ ID NO: 306118 - DNA, 30 bp, Artificial Sequence
  Synthetic oligonucleotide
cttcaaaggagaagtgcaaaaatcccatga

SEQ ID NO: 306119 - DNA, 30 bp, Artificial Sequence
  Synthetic oligonucleotide
aaacctaacttcgtcggcccgttcccatga

SEQ ID NO: 306120 - DNA, 30 bp, Artificial Sequence
  Synthetic oligonucleotide
gctcctgagaattggcgaacatagccatga

SEQ ID NO: 306121 - DNA, 30 bp, Artificial Sequence
  Synthetic oligonucleotide
agctcgatttagcctgctccatagccatga

SEQ ID NO: 306122 - DNA, 30 bp, Artificial Sequence
  Synthetic oligonucleotide
ttccactatctggtgcgctaactgccatga

SEQ ID NO: 306123 - DNA, 30 bp, Artificial Sequence
  Synthetic oligonucleotide
ctgccgttacgggtaaagctcagtccatga

SEQ ID NO: 306124 - DNA, 30 bp, Artificial Sequence
  Synthetic oligonucleotide
gtcagtattctgctgatggccggtccatga

SEQ ID NO: 306125 - DNA, 30 bp, Artificial Sequence
  Synthetic oligonucleotide
attcacgacaggacgcactccggcgcatga

SEQ ID NO: 306126 - DNA, 30 bp, Artificial Sequence
  Synthetic oligonucleotide
atcttttatacgaatcctcggcaggcatga

SEQ ID NO: 306127 - DNA, 30 bp, Artificial Sequence
  Synthetic oligonucleotide
cttacgacacgggcgcccgttacggcatga

SEQ ID NO: 306128 - DNA, 30 bp, Artificial Sequence
  Synthetic oligonucleotide
gttatcgtgattgctgacccgcaatcatga

SEQ ID NO: 306129 - DNA, 30 bp, Artificial Sequence
  Synthetic oligonucleotide
ggagagattagtcaccggaggtaatcatga

SEQ ID NO: 306130 - DNA, 30 bp, Artificial Sequence
  Synthetic oligonucleotide
actaatgcgggccatcaacagggatcatga

SEQ ID NO: 306131 - DNA, 30 bp, Artificial Sequence
  Synthetic oligonucleotide
gacgagtgagctcaatttatcagctcatga

SEQ ID NO: 306132 - DNA, 30 bp, Artificial Sequence
  Synthetic oligonucleotide
ttacgagtatcgggattaggctgttcatga

SEQ ID NO: 306133 - DNA, 30 bp, Artificial Sequence
  Synthetic oligonucleotide
attgtgactgccggtcgtgggttttcatga

SEQ ID NO: 306134 - DNA, 30 bp, Artificial Sequence
  Synthetic oligonucleotide
atcagtccccatttcgctagagcaagatga

SEQ ID NO: 306135 - DNA, 30 bp, Artificial Sequence
  Synthetic oligonucleotide
tcgttaatggtaacaacgggctgcagatga

SEQ ID NO: 306136 - DNA, 30 bp, Artificial Sequence
  Synthetic oligonucleotide
gaaggataggcaccacgctcttagagatga

SEQ ID NO: 306137 - DNA, 30 bp, Artificial Sequence
  Synthetic oligonucleotide
accctttgccaacggccaagagcgagatga

SEQ ID NO: 306138 - DNA, 30 bp, Artificial Sequence
  Synthetic oligonucleotide
gtcataacagtcccgatcacctggagatga

SEQ ID NO: 306139 - DNA, 30 bp, Artificial Sequence
  Synthetic oligonucleotide
tataggccgaatacagtataatatagatga

SEQ ID NO: 306140 - DNA, 30 bp, Artificial Sequence
  Synthetic oligonucleotide
cttgatatacgagatagattcgtacgatga

SEQ ID NO: 306141 - DNA, 30 bp, Artificial Sequence
  Synthetic oligonucleotide
tactctggcacagtgtagaagtaccgatga

SEQ ID NO: 306142 - DNA, 30 bp, Artificial Sequence
  Synthetic oligonucleotide
gagggactaaacacaggtctttcccgatga

SEQ ID NO: 306143 - DNA, 30 bp, Artificial Sequence
  Synthetic oligonucleotide
aaatccacggaggaaagtcaccggcgatga

SEQ ID NO: 306144 - DNA, 30 bp, Artificial Sequence
  Synthetic oligonucleotide
atatagacaatgagtgtatcttatcgatga

SEQ ID NO: 306145 - DNA, 30 bp, Artificial Sequence
  Synthetic oligonucleotide
tcagacgacgggcagcagatttatcgatga

SEQ ID NO: 306146 - DNA, 30 bp, Artificial Sequence
  Synthetic oligonucleotide
gtacgtggatgtcaaggtcagtgaggatga

SEQ ID NO: 306147 - DNA, 30 bp, Artificial Sequence
  Synthetic oligonucleotide
cactagaaacgtggtggcgctcccggatga

SEQ ID NO: 306148 - DNA, 30 bp, Artificial Sequence
  Synthetic oligonucleotide
ggtatgttagtcgctgtaaccgtgggatga

SEQ ID NO: 306149 - DNA, 30 bp, Artificial Sequence
  Synthetic oligonucleotide
agtcctttatttgcaagaatgcgtggatga

SEQ ID NO: 306150 - DNA, 30 bp, Artificial Sequence
  Synthetic oligonucleotide
gagggtaatttagtttaacgtaaatgatga

SEQ ID NO: 306151 - DNA, 30 bp, Artificial Sequence
  Synthetic oligonucleotide
caagaagtcagtcatcgaaagcgatgatga

SEQ ID NO: 306152 - DNA, 30 bp, Artificial Sequence
  Synthetic oligonucleotide
tgaaagtacacggtagattggtgatgatga

SEQ ID NO: 306153 - DNA, 30 bp, Artificial Sequence
  Synthetic oligonucleotide
gacctgtagatcaagttttgggattgatga

SEQ ID NO: 306154 - DNA, 30 bp, Artificial Sequence
  Synthetic oligonucleotide
ccagggagtgcgcttctctcttattgatga

SEQ ID NO: 306155 - DNA, 30 bp, Artificial Sequence
  Synthetic oligonucleotide
actgtcctccctcccggggccacttgatga

SEQ ID NO: 306156 - DNA, 30 bp, Artificial Sequence
  Synthetic oligonucleotide
tggccacaaaactcctatgggggttgatga

SEQ ID NO: 306157 - DNA, 30 bp, Artificial Sequence
  Synthetic oligonucleotide
acgcggtgttgggtgggtgttctttgatga

SEQ ID NO: 306158 - DNA, 30 bp, Artificial Sequence
  Synthetic oligonucleotide
tgtgtgagtgtattttatcagtacatatga

SEQ ID NO: 306159 - DNA, 30 bp, Artificial Sequence
  Synthetic oligonucleotide
gtaatatgcagtaaaccatttctcatatga

SEQ ID NO: 306160 - DNA, 30 bp, Artificial Sequence
  Synthetic oligonucleotide
actaattctcaccggggattcgagatatga

SEQ ID NO: 306161 - DNA, 30 bp, Artificial Sequence
  Synthetic oligonucleotide
atgtgactcgggactcattgcaggatatga

SEQ ID NO: 306162 - DNA, 30 bp, Artificial Sequence
  Synthetic oligonucleotide
agaggagcccgtgtcccggtagatatatga

SEQ ID NO: 306163 - DNA, 30 bp, Artificial Sequence
  Synthetic oligonucleotide
acatacatgtaatagctgaagggtatatga

SEQ ID NO: 306164 - DNA, 30 bp, Artificial Sequence
  Synthetic oligonucleotide
aaaggtctcaatcatcatcggagactatga

SEQ ID NO: 306165 - DNA, 30 bp, Artificial Sequence
  Synthetic oligonucleotide
tcagccgagacagcagggttaaccctatga

SEQ ID NO: 306166 - DNA, 30 bp, Artificial Sequence
  Synthetic oligonucleotide
aagagcaaatttctgcatgggcccctatga

SEQ ID NO: 306167 - DNA, 30 bp, Artificial Sequence
  Synthetic oligonucleotide
tggcacgaaatagtaggcccacgcctatga

SEQ ID NO: 306168 - DNA, 30 bp, Artificial Sequence
  Synthetic oligonucleotide
tagtacttcgtaccgggtgcaggcctatga

SEQ ID NO: 306169 - DNA, 30 bp, Artificial Sequence
  Synthetic oligonucleotide
catggtatatcgcccgtataaggtctatga

SEQ ID NO: 306170 - DNA, 30 bp, Artificial Sequence
  Synthetic oligonucleotide
gagaggtagcttgtaatcaactgtctatga

SEQ ID NO: 306171 - DNA, 29 bp, Artificial Sequence
  Synthetic oligonucleotide
cgggttccttagtatcggatcgagtatga

SEQ ID NO: 306172 - DNA, 30 bp, Artificial Sequence
  Synthetic oligonucleotide
tgaccgagaagctatataaaccccgtatga

SEQ ID NO: 306173 - DNA, 30 bp, Artificial Sequence
  Synthetic oligonucleotide
ttaaaagtgcgacataaaagttccgtatga

SEQ ID NO: 306174 - DNA, 31 bp, Artificial Sequence
  Synthetic oligonucleotide
tgttacagaccggccgatgaggaaggtatga

SEQ ID NO: 306175 - DNA, 30 bp, Artificial Sequence
  Synthetic oligonucleotide
ttctacattcagaaaacccccaatgtatga

SEQ ID NO: 306176 - DNA, 30 bp, Artificial Sequence
  Synthetic oligonucleotide
tgtttgacgaacgggtaatagcatgtatga

SEQ ID NO: 306177 - DNA, 30 bp, Artificial Sequence
  Synthetic oligonucleotide
tcggtttttaatagtgattagcatgtatga

SEQ ID NO: 306178 - DNA, 30 bp, Artificial Sequence
  Synthetic oligonucleotide
caacgaatactttgctaaatacaattatga

SEQ ID NO: 306179 - DNA, 30 bp, Artificial Sequence
  Synthetic oligonucleotide
aaatgttgataagctatgcgttaattatga

SEQ ID NO: 306180 - DNA, 30 bp, Artificial Sequence
  Synthetic oligonucleotide
tggaacttgatagcttcgaccagcttatga

SEQ ID NO: 306181 - DNA, 30 bp, Artificial Sequence
  Synthetic oligonucleotide
cagggagagtagctggccgcattcttatga

SEQ ID NO: 306182 - DNA, 30 bp, Artificial Sequence
  Synthetic oligonucleotide
caacccattagagcgaattgcctgttatga

SEQ ID NO: 306183 - DNA, 30 bp, Artificial Sequence
  Synthetic oligonucleotide
acgtgatagtcctgaccgtatataaactga

SEQ ID NO: 306184 - DNA, 30 bp, Artificial Sequence
  Synthetic oligonucleotide
cgcgaagacttccgttagtataacaactga

SEQ ID NO: 306185 - DNA, 30 bp, Artificial Sequence
  Synthetic oligonucleotide
actccaattcagttgtgcgtaagcaactga

SEQ ID NO: 306186 - DNA, 30 bp, Artificial Sequence
  Synthetic oligonucleotide
ctgaatcaagcgcggcgttccggcaactga

SEQ ID NO: 306187 - DNA, 30 bp, Artificial Sequence
  Synthetic oligonucleotide
aaggaggttactttgtaattctagaactga

SEQ ID NO: 306188 - DNA, 30 bp, Artificial Sequence
  Synthetic oligonucleotide
ttcaacctgcccgatgttagaggtaactga

SEQ ID NO: 306189 - DNA, 30 bp, Artificial Sequence
  Synthetic oligonucleotide
atctagtggtattgaactcccttacactga

SEQ ID NO: 306190 - DNA, 30 bp, Artificial Sequence
  Synthetic oligonucleotide
tctgcgctggggtagctttaataccactga

SEQ ID NO: 306191 - DNA, 30 bp, Artificial Sequence
  Synthetic oligonucleotide
ggcacagtgacaaaaatatttattcactga

SEQ ID NO: 306192 - DNA, 30 bp, Artificial Sequence
  Synthetic oligonucleotide
gtcgcgcaacgtatggccgattctgactga

SEQ ID NO: 306193 - DNA, 30 bp, Artificial Sequence
  Synthetic oligonucleotide
tttacttgttaggtgcacgtcattgactga

SEQ ID NO: 306194 - DNA, 30 bp, Artificial Sequence
  Synthetic oligonucleotide
gccggactgttatccagtgctggctactga

SEQ ID NO: 306195 - DNA, 30 bp, Artificial Sequence
  Synthetic oligonucleotide
agctcttcggggcagtggggaaagtactga

SEQ ID NO: 306196 - DNA, 30 bp, Artificial Sequence
  Synthetic oligonucleotide
gggggaaccccgatgaactttgtgtactga

SEQ ID NO: 306197 - DNA, 30 bp, Artificial Sequence
  Synthetic oligonucleotide
gtgtatcatacgtgggagtaccattactga

SEQ ID NO: 306198 - DNA, 30 bp, Artificial Sequence
  Synthetic oligonucleotide
cgtacatgtataacgttgctgcgaacctga

SEQ ID NO: 306199 - DNA, 30 bp, Artificial Sequence
  Synthetic oligonucleotide
gttacaggtaatagaccgtccggcacctga

SEQ ID NO: 306200 - DNA, 30 bp, Artificial Sequence
  Synthetic oligonucleotide
agtgactatctcgtggggtcattcacctga

SEQ ID NO: 306201 - DNA, 30 bp, Artificial Sequence
  Synthetic oligonucleotide
ttcaatgccggcgccccttcaaatacctga

SEQ ID NO: 306202 - DNA, 30 bp, Artificial Sequence
  Synthetic oligonucleotide
attaccattgcaccgaaaggcttaccctga

SEQ ID NO: 306203 - DNA, 30 bp, Artificial Sequence
  Synthetic oligonucleotide
cgggttcttacgacccaagctagcccctga

SEQ ID NO: 306204 - DNA, 30 bp, Artificial Sequence
  Synthetic oligonucleotide
gggcgtattaaacggtcccctgagccctga

SEQ ID NO: 306205 - DNA, 30 bp, Artificial Sequence
  Synthetic oligonucleotide
aacgcctagattgaacacaagaggccctga

SEQ ID NO: 306206 - DNA, 30 bp, Artificial Sequence
  Synthetic oligonucleotide
aaccgctgagatagcaacgggaggccctga

SEQ ID NO: 306207 - DNA, 30 bp, Artificial Sequence
  Synthetic oligonucleotide
acttagccaacaagagattgaaatccctga

SEQ ID NO: 306208 - DNA, 30 bp, Artificial Sequence
  Synthetic oligonucleotide
tgagatcattcagcggtaaccagcgcctga

SEQ ID NO: 306209 - DNA, 30 bp, Artificial Sequence
  Synthetic oligonucleotide
gcaccatctctgggataaaacacggcctga

SEQ ID NO: 306210 - DNA, 30 bp, Artificial Sequence
  Synthetic oligonucleotide
gtaactctatgccttgcggtaagggcctga

SEQ ID NO: 306211 - DNA, 30 bp, Artificial Sequence
  Synthetic oligonucleotide
caaccccgtcttctactctagggtgcctga

SEQ ID NO: 306212 - DNA, 30 bp, Artificial Sequence
  Synthetic oligonucleotide
gcacggcatgtgctcatggatcaatcctga

SEQ ID NO: 306213 - DNA, 30 bp, Artificial Sequence
  Synthetic oligonucleotide
tacacaagtaccgtacctgggtaatcctga

SEQ ID NO: 306214 - DNA, 30 bp, Artificial Sequence
  Synthetic oligonucleotide
acaccggagatacttgactcggcatcctga

SEQ ID NO: 306215 - DNA, 30 bp, Artificial Sequence
  Synthetic oligonucleotide
actcgggtcggtcggtacgatctatcctga

SEQ ID NO: 306216 - DNA, 30 bp, Artificial Sequence
  Synthetic oligonucleotide
ttaaacagcgtttaagaacgtaagtcctga

SEQ ID NO: 306217 - DNA, 30 bp, Artificial Sequence
  Synthetic oligonucleotide
gcgcgtcacgacatgaaaaaactttcctga

SEQ ID NO: 306218 - DNA, 30 bp, Artificial Sequence
  Synthetic oligonucleotide
atttgtgagtactggatcgaatcaagctga

SEQ ID NO: 306219 - DNA, 30 bp, Artificial Sequence
  Synthetic oligonucleotide
aactataattaggaacaatataccagctga

SEQ ID NO: 306220 - DNA, 30 bp, Artificial Sequence
  Synthetic oligonucleotide
agtaatggttacaaatttcaaggtagctga

SEQ ID NO: 306221 - DNA, 30 bp, Artificial Sequence
  Synthetic oligonucleotide
taaagagaggacaaacgctttagacgctga

SEQ ID NO: 306222 - DNA, 30 bp, Artificial Sequence
  Synthetic oligonucleotide
attggagatagaaaaattgatcgacgctga

SEQ ID NO: 306223 - DNA, 30 bp, Artificial Sequence
  Synthetic oligonucleotide
agccgtttagcacccgtccactcccgctga

SEQ ID NO: 306224 - DNA, 30 bp, Artificial Sequence
  Synthetic oligonucleotide
ctgtcgcttcaacggtggggtgcgcgctga

SEQ ID NO: 306225 - DNA, 30 bp, Artificial Sequence
  Synthetic oligonucleotide
gtaatcccagagcgatttcttacaggctga

SEQ ID NO: 306226 - DNA, 30 bp, Artificial Sequence
  Synthetic oligonucleotide
gtaaaacgcctatccctggatcagggctga

SEQ ID NO: 306227 - DNA, 30 bp, Artificial Sequence
  Synthetic oligonucleotide
catataacatatgataaggtgtactgctga

SEQ ID NO: 306228 - DNA, 30 bp, Artificial Sequence
  Synthetic oligonucleotide
catcagaattagtgtttttatgaaatctga

SEQ ID NO: 306229 - DNA, 30 bp, Artificial Sequence
  Synthetic oligonucleotide
gtacctaggctgatgtcatcatgaatctga

SEQ ID NO: 306230 - DNA, 30 bp, Artificial Sequence
  Synthetic oligonucleotide
ttgtttgaacatcgagaaatacggatctga

SEQ ID NO: 306231 - DNA, 30 bp, Artificial Sequence
  Synthetic oligonucleotide
gagacggggggccaagttcttgggatctga

SEQ ID NO: 306232 - DNA, 30 bp, Artificial Sequence
  Synthetic oligonucleotide
catgtgtttggagcgtaagtttggatctga

SEQ ID NO: 306233 - DNA, 30 bp, Artificial Sequence
  Synthetic oligonucleotide
taccggggttcgtggcgtccgaatatctga

SEQ ID NO: 306234 - DNA, 30 bp, Artificial Sequence
  Synthetic oligonucleotide
tgtacacgcgccggagggacttttatctga

SEQ ID NO: 306235 - DNA, 30 bp, Artificial Sequence
  Synthetic oligonucleotide
ccgtctagcatagtcatcctgagcctctga

SEQ ID NO: 306236 - DNA, 30 bp, Artificial Sequence
  Synthetic oligonucleotide
tttttgtcgaccgggagtaatgtcctctga

SEQ ID NO: 306237 - DNA, 30 bp, Artificial Sequence
  Synthetic oligonucleotide
cggtctgcacgtggcagagtggagctctga

SEQ ID NO: 306238 - DNA, 30 bp, Artificial Sequence
  Synthetic oligonucleotide
ggtagatctggtatatgcacgaggctctga

SEQ ID NO: 306239 - DNA, 30 bp, Artificial Sequence
  Synthetic oligonucleotide
agtagagcggttattcttattcatctctga

SEQ ID NO: 306240 - DNA, 30 bp, Artificial Sequence
  Synthetic oligonucleotide
agcgcatcatccgtttggatacgtctctga

SEQ ID NO: 306241 - DNA, 30 bp, Artificial Sequence
  Synthetic oligonucleotide
gccctcgattgcttaattatcggtctctga

SEQ ID NO: 306242 - DNA, 30 bp, Artificial Sequence
  Synthetic oligonucleotide
ctcgtgggagaacgctataggccagtctga

SEQ ID NO: 306243 - DNA, 30 bp, Artificial Sequence
  Synthetic oligonucleotide
acccctacagagatctctaacgcagtctga

SEQ ID NO: 306244 - DNA, 30 bp, Artificial Sequence
  Synthetic oligonucleotide
aggctgccgggtgcaattgtcttcgtctga

SEQ ID NO: 306245 - DNA, 30 bp, Artificial Sequence
  Synthetic oligonucleotide
gggtgtgtctgaatgcgtcctagggtctga

SEQ ID NO: 306246 - DNA, 30 bp, Artificial Sequence
  Synthetic oligonucleotide
attagcattttcggtagaatctatgtctga

SEQ ID NO: 306247 - DNA, 30 bp, Artificial Sequence
  Synthetic oligonucleotide
gtatctgtacaataataagccaaattctga

SEQ ID NO: 306248 - DNA, 30 bp, Artificial Sequence
  Synthetic oligonucleotide
cttaatcctgcatcacggatttaattctga

SEQ ID NO: 306249 - DNA, 30 bp, Artificial Sequence
  Synthetic oligonucleotide
tcacgaagcaccccaacagtaaatttctga

SEQ ID NO: 306250 - DNA, 30 bp, Artificial Sequence
  Synthetic oligonucleotide
acgaagtttacgtaaccatggggaaagtga

SEQ ID NO: 306251 - DNA, 30 bp, Artificial Sequence
  Synthetic oligonucleotide
ggaacaatatgtgtagccgtagtaaagtga

SEQ ID NO: 306252 - DNA, 30 bp, Artificial Sequence
  Synthetic oligonucleotide
cgggagtggacagttgcatatcggaagtga

SEQ ID NO: 306253 - DNA, 30 bp, Artificial Sequence
  Synthetic oligonucleotide
gcaatcatgcatttcaagtgggggaagtga

SEQ ID NO: 306254 - DNA, 30 bp, Artificial Sequence
  Synthetic oligonucleotide
actgtccggtctcagggatacatgaagtga

SEQ ID NO: 306255 - DNA, 30 bp, Artificial Sequence
  Synthetic oligonucleotide
acccgggtactaacacgggcgcataagtga

SEQ ID NO: 306256 - DNA, 30 bp, Artificial Sequence
  Synthetic oligonucleotide
acgcacattaactcaccatgaactaagtga

SEQ ID NO: 306257 - DNA, 30 bp, Artificial Sequence
  Synthetic oligonucleotide
ggtaattaaaagaggccgtcgcaacagtga

SEQ ID NO: 306258 - DNA, 30 bp, Artificial Sequence
  Synthetic oligonucleotide
aggcgggtggctgaccgcaggagacagtga

SEQ ID NO: 306259 - DNA, 30 bp, Artificial Sequence
  Synthetic oligonucleotide
tgcagtactgaaccatgttctagacagtga

SEQ ID NO: 306260 - DNA, 30 bp, Artificial Sequence
  Synthetic oligonucleotide
gtaagctgggtttttggggttggacagtga

SEQ ID NO: 306261 - DNA, 30 bp, Artificial Sequence
  Synthetic oligonucleotide
tccgaagacgatggcggcatctgacagtga

SEQ ID NO: 306262 - DNA, 30 bp, Artificial Sequence
  Synthetic oligonucleotide
aagcttaagtcgagtactaattggcagtga

SEQ ID NO: 306263 - DNA, 30 bp, Artificial Sequence
  Synthetic oligonucleotide
cgggggggttggtacccttcctgtcagtga

SEQ ID NO: 306264 - DNA, 30 bp, Artificial Sequence
  Synthetic oligonucleotide
tattaccttgcatttcggaccatagagtga

SEQ ID NO: 306265 - DNA, 30 bp, Artificial Sequence
  Synthetic oligonucleotide
gaccaccgtccaaggagtggactcgagtga

SEQ ID NO: 306266 - DNA, 30 bp, Artificial Sequence
  Synthetic oligonucleotide
cccggttccgtctgtaagaggtaggagtga

SEQ ID NO: 306267 - DNA, 30 bp, Artificial Sequence
  Synthetic oligonucleotide
atccgactagctcgtggattaactgagtga

SEQ ID NO: 306268 - DNA, 30 bp, Artificial Sequence
  Synthetic oligonucleotide
aacaggtgaactagaagatttagtgagtga

SEQ ID NO: 306269 - DNA, 30 bp, Artificial Sequence
  Synthetic oligonucleotide
gatgaatatctttagccaccgctctagtga

SEQ ID NO: 306270 - DNA, 30 bp, Artificial Sequence
  Synthetic oligonucleotide
aaatctcgggacgggagtctagtgtagtga

SEQ ID NO: 306271 - DNA, 30 bp, Artificial Sequence
  Synthetic oligonucleotide
tggggtaggcgcggaggggagttgtagtga

SEQ ID NO: 306272 - DNA, 30 bp, Artificial Sequence
  Synthetic oligonucleotide
agatcgtagtctcgtggtagtaaaacgtga

SEQ ID NO: 306273 - DNA, 30 bp, Artificial Sequence
  Synthetic oligonucleotide
ttacacccacatgtgctattgcccacgtga

SEQ ID NO: 306274 - DNA, 30 bp, Artificial Sequence
  Synthetic oligonucleotide
agaagtcagtacgtggtccactgcacgtga

SEQ ID NO: 306275 - DNA, 30 bp, Artificial Sequence
  Synthetic oligonucleotide
cacattcatcaaggtcgtgacaggacgtga

SEQ ID NO: 306276 - DNA, 30 bp, Artificial Sequence
  Synthetic oligonucleotide
tgtggtgaataaggaatcaacgggacgtga

SEQ ID NO: 306277 - DNA, 30 bp, Artificial Sequence
  Synthetic oligonucleotide
acacagggtggtacctgtctcgctacgtga

SEQ ID NO: 306278 - DNA, 30 bp, Artificial Sequence
  Synthetic oligonucleotide
ttggtataagttttttgaattgctacgtga

SEQ ID NO: 306279 - DNA, 30 bp, Artificial Sequence
  Synthetic oligonucleotide
attttggtggtcttaagaggaggtacgtga

SEQ ID NO: 306280 - DNA, 30 bp, Artificial Sequence
  Synthetic oligonucleotide
cctcattaaaactatccgctccaaccgtga

SEQ ID NO: 306281 - DNA, 30 bp, Artificial Sequence
  Synthetic oligonucleotide
gaagccacctgacacaatgctgcaccgtga

SEQ ID NO: 306282 - DNA, 30 bp, Artificial Sequence
  Synthetic oligonucleotide
ttgtgtcatctatgacatgaacgaccgtga

SEQ ID NO: 306283 - DNA, 30 bp, Artificial Sequence
  Synthetic oligonucleotide
gaaataatgatagacgtgcaatgaccgtga

SEQ ID NO: 306284 - DNA, 30 bp, Artificial Sequence
  Synthetic oligonucleotide
tcctgcgactggtgccaacaacccccgtga

SEQ ID NO: 306285 - DNA, 30 bp, Artificial Sequence
  Synthetic oligonucleotide
ctgtttaccttccgataaggcagtccgtga

SEQ ID NO: 306286 - DNA, 30 bp, Artificial Sequence
  Synthetic oligonucleotide
taggagcttcacttgctctttattccgtga

SEQ ID NO: 306287 - DNA, 30 bp, Artificial Sequence
  Synthetic oligonucleotide
ccgcagcttagcgcaagaccgggagcgtga

SEQ ID NO: 306288 - DNA, 30 bp, Artificial Sequence
  Synthetic oligonucleotide
cgagtacgcgtatccgtattaatggcgtga

SEQ ID NO: 306289 - DNA, 30 bp, Artificial Sequence
  Synthetic oligonucleotide
gtctaggaattaagtgagatactggcgtga

SEQ ID NO: 306290 - DNA, 30 bp, Artificial Sequence
  Synthetic oligonucleotide
ttattggatcaatctgttgattatgcgtga

SEQ ID NO: 306291 - DNA, 30 bp, Artificial Sequence
  Synthetic oligonucleotide
catacgggattgttaagttcgatatcgtga

SEQ ID NO: 306292 - DNA, 30 bp, Artificial Sequence
  Synthetic oligonucleotide
gctacgctgactgcgacctagccgtcgtga

SEQ ID NO: 306293 - DNA, 30 bp, Artificial Sequence
  Synthetic oligonucleotide
gatatcacatgccctggccgggtgtcgtga

SEQ ID NO: 306294 - DNA, 30 bp, Artificial Sequence
  Synthetic oligonucleotide
ggcgtcaaggggagcaaatgggtaaggtga

SEQ ID NO: 306295 - DNA, 30 bp, Artificial Sequence
  Synthetic oligonucleotide
tggatggcccactgggcaagtatcaggtga

SEQ ID NO: 306296 - DNA, 30 bp, Artificial Sequence
  Synthetic oligonucleotide
taaaaatatgtggcaaagactctcaggtga

SEQ ID NO: 306297 - DNA, 30 bp, Artificial Sequence
  Synthetic oligonucleotide
gccgccaagcgttgagatgtccggaggtga

SEQ ID NO: 306298 - DNA, 30 bp, Artificial Sequence
  Synthetic oligonucleotide
atatggggggcttaacacggcgggaggtga

SEQ ID NO: 306299 - DNA, 30 bp, Artificial Sequence
  Synthetic oligonucleotide
ccgagtatatggatcgaggggggacggtga

SEQ ID NO: 306300 - DNA, 30 bp, Artificial Sequence
  Synthetic oligonucleotide
gagacagcttccggcacccttccccggtga

SEQ ID NO: 306301 - DNA, 30 bp, Artificial Sequence
  Synthetic oligonucleotide
ttacacgtttatgattcgcgggagcggtga

SEQ ID NO: 306302 - DNA, 30 bp, Artificial Sequence
  Synthetic oligonucleotide
acgtttaacatattggataacaggcggtga

SEQ ID NO: 306303 - DNA, 30 bp, Artificial Sequence
  Synthetic oligonucleotide
atgtcaatctaggggattccgtgtcggtga

SEQ ID NO: 306304 - DNA, 30 bp, Artificial Sequence
  Synthetic oligonucleotide
taccaactctgcagtcttggctttcggtga

SEQ ID NO: 306305 - DNA, 30 bp, Artificial Sequence
  Synthetic oligonucleotide
agaaccatcatcccctcctgctcagggtga

SEQ ID NO: 306306 - DNA, 30 bp, Artificial Sequence
  Synthetic oligonucleotide
tagttacacgtatcacactactgagggtga

SEQ ID NO: 306307 - DNA, 30 bp, Artificial Sequence
  Synthetic oligonucleotide
ataaaatcgatggctgcgtataccgggtga

SEQ ID NO: 306308 - DNA, 30 bp, Artificial Sequence
  Synthetic oligonucleotide
cgtgcattcgccggcgaagtgggcgggtga

SEQ ID NO: 306309 - DNA, 30 bp, Artificial Sequence
  Synthetic oligonucleotide
tcagattgaggtgcctggtcacctgggtga

SEQ ID NO: 306310 - DNA, 30 bp, Artificial Sequence
  Synthetic oligonucleotide
gtatatctttatggcgcgggctgtgggtga

SEQ ID NO: 306311 - DNA, 30 bp, Artificial Sequence
  Synthetic oligonucleotide
agcagcagcaatcgcaccacatttgggtga

SEQ ID NO: 306312 - DNA, 29 bp, Artificial Sequence
  Synthetic oligonucleotide
cctcacagagttgtttcctaatatggtga

SEQ ID NO: 306313 - DNA, 30 bp, Artificial Sequence
  Synthetic oligonucleotide
atttgcgcacgataacttggtttatggtga

SEQ ID NO: 306314 - DNA, 30 bp, Artificial Sequence
  Synthetic oligonucleotide
gttcgatgattcatgtaaatttcgtggtga

SEQ ID NO: 306315 - DNA, 30 bp, Artificial Sequence
  Synthetic oligonucleotide
tgcccctggatcttacgtgaaaggtggtga

SEQ ID NO: 306316 - DNA, 30 bp, Artificial Sequence
  Synthetic oligonucleotide
tcggtatggtcatggtgtatcctgtggtga

SEQ ID NO: 306317 - DNA, 30 bp, Artificial Sequence
  Synthetic oligonucleotide
gtttcctcaaggcacaagggcgattggtga

SEQ ID NO: 306318 - DNA, 30 bp, Artificial Sequence
  Synthetic oligonucleotide
catctcgaagaagagtttcatacttggtga

SEQ ID NO: 306319 - DNA, 30 bp, Artificial Sequence
  Synthetic oligonucleotide
ctagggcaatatcagttccgtacttggtga

SEQ ID NO: 306320 - DNA, 30 bp, Artificial Sequence
  Synthetic oligonucleotide
gaaaggccctgacattacgttacttggtga

SEQ ID NO: 306321 - DNA, 30 bp, Artificial Sequence
  Synthetic oligonucleotide
ccgattaatgtattaaaggtttcttggtga

SEQ ID NO: 306322 - DNA, 30 bp, Artificial Sequence
  Synthetic oligonucleotide
aggaccatgtcgttttaaaaggaaatgtga

SEQ ID NO: 306323 - DNA, 30 bp, Artificial Sequence
  Synthetic oligonucleotide
cgtcgtacattactgttctaaacaatgtga

SEQ ID NO: 306324 - DNA, 30 bp, Artificial Sequence
  Synthetic oligonucleotide
agcaccgtcttgagaacggatgcaatgtga

SEQ ID NO: 306325 - DNA, 30 bp, Artificial Sequence
  Synthetic oligonucleotide
aacggagggctctgttttagagacatgtga

SEQ ID NO: 306326 - DNA, 30 bp, Artificial Sequence
  Synthetic oligonucleotide
tacgacgttttgtctgttcagcccatgtga

SEQ ID NO: 306327 - DNA, 30 bp, Artificial Sequence
  Synthetic oligonucleotide
aacgggagaattaccttttatgccatgtga

SEQ ID NO: 306328 - DNA, 30 bp, Artificial Sequence
  Synthetic oligonucleotide
gcattctgaacagtgattttttatatgtga

SEQ ID NO: 306329 - DNA, 30 bp, Artificial Sequence
  Synthetic oligonucleotide
agacgcatcgctgcaaccttgtaactgtga

SEQ ID NO: 306330 - DNA, 30 bp, Artificial Sequence
  Synthetic oligonucleotide
taaggtctgcatgggatgaagcgactgtga

SEQ ID NO: 306331 - DNA, 30 bp, Artificial Sequence
  Synthetic oligonucleotide
gggcattaacggcgacacgatgtactgtga

SEQ ID NO: 306332 - DNA, 30 bp, Artificial Sequence
  Synthetic oligonucleotide
agcattgaatggctgttggggttactgtga

SEQ ID NO: 306333 - DNA, 30 bp, Artificial Sequence
  Synthetic oligonucleotide
acagaacgccgtgacgtgtttagcctgtga

SEQ ID NO: 306334 - DNA, 30 bp, Artificial Sequence
  Synthetic oligonucleotide
gcagaaataagtggcattaagccgctgtga

SEQ ID NO: 306335 - DNA, 30 bp, Artificial Sequence
  Synthetic oligonucleotide
gcttacgtcattcattgttatacagtgtga

SEQ ID NO: 306336 - DNA, 30 bp, Artificial Sequence
  Synthetic oligonucleotide
agcttcacgcgccatctgactaccgtgtga

SEQ ID NO: 306337 - DNA, 30 bp, Artificial Sequence
  Synthetic oligonucleotide
gagatcagctgatatgtatgccgcgtgtga

SEQ ID NO: 306338 - DNA, 30 bp, Artificial Sequence
  Synthetic oligonucleotide
cagaacggcgttgtgtagctcctggtgtga

SEQ ID NO: 306339 - DNA, 30 bp, Artificial Sequence
  Synthetic oligonucleotide
aaatcaccttcagggagacaagaattgtga

SEQ ID NO: 306340 - DNA, 30 bp, Artificial Sequence
  Synthetic oligonucleotide
cattatctgccgcggttctcatccttgtga

SEQ ID NO: 306341 - DNA, 30 bp, Artificial Sequence
  Synthetic oligonucleotide
agttaatgaccggtgcctaacatcttgtga

SEQ ID NO: 306342 - DNA, 30 bp, Artificial Sequence
  Synthetic oligonucleotide
gcgtggtcacacatgcggagtgcgttgtga

SEQ ID NO: 306343 - DNA, 30 bp, Artificial Sequence
  Synthetic oligonucleotide
taggagggtgttatcacgtttctgttgtga

SEQ ID NO: 306344 - DNA, 30 bp, Artificial Sequence
  Synthetic oligonucleotide
gaccatcgctttaaagcaacaaatttgtga

SEQ ID NO: 306345 - DNA, 30 bp, Artificial Sequence
  Synthetic oligonucleotide
acgatctgatcccaagcatcttaaaattga

SEQ ID NO: 306346 - DNA, 30 bp, Artificial Sequence
  Synthetic oligonucleotide
ggcggcaaggtggatttaggcccaaattga

SEQ ID NO: 306347 - DNA, 30 bp, Artificial Sequence
  Synthetic oligonucleotide
cctgtcacacacctcacaatttcaaattga

SEQ ID NO: 306348 - DNA, 30 bp, Artificial Sequence
  Synthetic oligonucleotide
tcccggaggatagtattattaataaattga

SEQ ID NO: 306349 - DNA, 30 bp, Artificial Sequence
  Synthetic oligonucleotide
cgggataagaagacctttatttccaattga

SEQ ID NO: 306350 - DNA, 30 bp, Artificial Sequence
  Synthetic oligonucleotide
caggtatcaaagtcaatcgccatcaattga

SEQ ID NO: 306351 - DNA, 30 bp, Artificial Sequence
  Synthetic oligonucleotide
atcaacgctcctaactgtacaaggaattga

SEQ ID NO: 306352 - DNA, 31 bp, Artificial Sequence
  Synthetic oligonucleotide
agtcctcggtaaagctctgttttataattga

SEQ ID NO: 306353 - DNA, 30 bp, Artificial Sequence
  Synthetic oligonucleotide
aaataaagaggccttggcgtgcttaattga

SEQ ID NO: 306354 - DNA, 30 bp, Artificial Sequence
  Synthetic oligonucleotide
gcgccaaatgccccgagcaggaagcattga

SEQ ID NO: 306355 - DNA, 30 bp, Artificial Sequence
  Synthetic oligonucleotide
caccacacccacgatgaatttaagcattga

SEQ ID NO: 306356 - DNA, 30 bp, Artificial Sequence
  Synthetic oligonucleotide
tcgcatgtttcccgtgctccggatcattga

SEQ ID NO: 306357 - DNA, 30 bp, Artificial Sequence
  Synthetic oligonucleotide
gttgattgaggatcgtgagcttatcattga

SEQ ID NO: 306358 - DNA, 30 bp, Artificial Sequence
  Synthetic oligonucleotide
tccgtggccgcagagagtactactcattga

SEQ ID NO: 306359 - DNA, 30 bp, Artificial Sequence
  Synthetic oligonucleotide
aacaggttgcgaggctaccaacgtcattga

SEQ ID NO: 306360 - DNA, 30 bp, Artificial Sequence
  Synthetic oligonucleotide
tatgcgaggcgcccacccgattgtcattga

SEQ ID NO: 306361 - DNA, 30 bp, Artificial Sequence
  Synthetic oligonucleotide
tgtatgaaaatactaagagagaaagattga

SEQ ID NO: 306362 - DNA, 30 bp, Artificial Sequence
  Synthetic oligonucleotide
ctataaataatcatcgtttttcaggattga

SEQ ID NO: 306363 - DNA, 30 bp, Artificial Sequence
  Synthetic oligonucleotide
cagaggcaacctaatcgctgtggggattga

SEQ ID NO: 306364 - DNA, 30 bp, Artificial Sequence
  Synthetic oligonucleotide
tgaccgcccgaattgccaccttctgattga

SEQ ID NO: 306365 - DNA, 30 bp, Artificial Sequence
  Synthetic oligonucleotide
attgtgacaagtgcgagcaatgttgattga

SEQ ID NO: 306366 - DNA, 30 bp, Artificial Sequence
  Synthetic oligonucleotide
gcgatacagctatcataggaccgatattga

SEQ ID NO: 306367 - DNA, 30 bp, Artificial Sequence
  Synthetic oligonucleotide
gatactcgtcgagcttcggaattatattga

SEQ ID NO: 306368 - DNA, 30 bp, Artificial Sequence
  Synthetic oligonucleotide
gccaatgctctgggaacccagttgtattga

SEQ ID NO: 306369 - DNA, 30 bp, Artificial Sequence
  Synthetic oligonucleotide
gcggactcccaaagataggccgtttattga

SEQ ID NO: 306370 - DNA, 30 bp, Artificial Sequence
  Synthetic oligonucleotide
acggtctgatcccaaggtcttaaaacttga

SEQ ID NO: 306371 - DNA, 30 bp, Artificial Sequence
  Synthetic oligonucleotide
attgtgatcgtactggcttagagaacttga

SEQ ID NO: 306372 - DNA, 30 bp, Artificial Sequence
  Synthetic oligonucleotide
gaagtttgctcgaaagcaaatggaacttga

SEQ ID NO: 306373 - DNA, 30 bp, Artificial Sequence
  Synthetic oligonucleotide
tgtggatttaggggtcgcacccccacttga

SEQ ID NO: 306374 - DNA, 30 bp, Artificial Sequence
  Synthetic oligonucleotide
taatcacgggtgccgtggttcggcacttga

SEQ ID NO: 306375 - DNA, 30 bp, Artificial Sequence
  Synthetic oligonucleotide
aattgtgaattaaatgaaaacgtcacttga

SEQ ID NO: 306376 - DNA, 30 bp, Artificial Sequence
  Synthetic oligonucleotide
gtcggcacgattttcagagctataccttga

SEQ ID NO: 306377 - DNA, 30 bp, Artificial Sequence
  Synthetic oligonucleotide
gggatcggcctcggtgagaccttcccttga

SEQ ID NO: 306378 - DNA, 30 bp, Artificial Sequence
  Synthetic oligonucleotide
acgccttacgtttcttcttgagatccttga

SEQ ID NO: 306379 - DNA, 30 bp, Artificial Sequence
  Synthetic oligonucleotide
cataggattctagcgatgttggtagcttga

SEQ ID NO: 306380 - DNA, 30 bp, Artificial Sequence
  Synthetic oligonucleotide
acgcttcagttgatggaacacctcgcttga

SEQ ID NO: 306381 - DNA, 30 bp, Artificial Sequence
  Synthetic oligonucleotide
gaaagtatttagcagaacaactcggcttga

SEQ ID NO: 306382 - DNA, 30 bp, Artificial Sequence
  Synthetic oligonucleotide
cacctgccagtacagccggggatatcttga

SEQ ID NO: 306383 - DNA, 30 bp, Artificial Sequence
  Synthetic oligonucleotide
tagatcgaggtaggcctaatgaactcttga

SEQ ID NO: 306384 - DNA, 30 bp, Artificial Sequence
  Synthetic oligonucleotide
tggcgggccgagtgcgacacagactcttga

SEQ ID NO: 306385 - DNA, 30 bp, Artificial Sequence
  Synthetic oligonucleotide
cgtatcgctttacctgcaaaatactcttga

SEQ ID NO: 306386 - DNA, 30 bp, Artificial Sequence
  Synthetic oligonucleotide
tggacttggctatctgtctgccgctcttga

SEQ ID NO: 306387 - DNA, 30 bp, Artificial Sequence
  Synthetic oligonucleotide
ggaattgttatgcgacgagagggctcttga

SEQ ID NO: 306388 - DNA, 30 bp, Artificial Sequence
  Synthetic oligonucleotide
gggggttctaaagcttgaggaaagtcttga

SEQ ID NO: 306389 - DNA, 30 bp, Artificial Sequence
  Synthetic oligonucleotide
aaattaccaggaaagataaatgtgtcttga

SEQ ID NO: 306390 - DNA, 30 bp, Artificial Sequence
  Synthetic oligonucleotide
cccctgcttcgtgcgtcgggtttgtcttga

SEQ ID NO: 306391 - DNA, 30 bp, Artificial Sequence
  Synthetic oligonucleotide
tgacggccagacgatacagactattcttga

SEQ ID NO: 306392 - DNA, 30 bp, Artificial Sequence
  Synthetic oligonucleotide
tcggagagtagggcccaacaagtttcttga

SEQ ID NO: 306393 - DNA, 30 bp, Artificial Sequence
  Synthetic oligonucleotide
gagcgtacctgctcgttgtatacaagttga

SEQ ID NO: 306394 - DNA, 30 bp, Artificial Sequence
  Synthetic oligonucleotide
atgatagtggcggtactgcgagctagttga

SEQ ID NO: 306395 - DNA, 30 bp, Artificial Sequence
  Synthetic oligonucleotide
ctacctctgaatcactcattgggtagttga

SEQ ID NO: 306396 - DNA, 30 bp, Artificial Sequence
  Synthetic oligonucleotide
gttaacagaaatctctgcgatgttagttga

SEQ ID NO: 306397 - DNA, 30 bp, Artificial Sequence
  Synthetic oligonucleotide
tgtcgggtttttctcataggcccacgttga

SEQ ID NO: 306398 - DNA, 30 bp, Artificial Sequence
  Synthetic oligonucleotide
actcgctcggtcaaatatacgagacgttga

SEQ ID NO: 306399 - DNA, 30 bp, Artificial Sequence
  Synthetic oligonucleotide
ataaagttccaaggatacccacaccgttga

SEQ ID NO: 306400 - DNA, 30 bp, Artificial Sequence
  Synthetic oligonucleotide
gcgggatggacccattgtcgcccccgttga

SEQ ID NO: 306401 - DNA, 30 bp, Artificial Sequence
  Synthetic oligonucleotide
ctgtggttaaaccctggcacgtcccgttga

SEQ ID NO: 306402 - DNA, 30 bp, Artificial Sequence
  Synthetic oligonucleotide
cgaatatcatctgagcgataacgccgttga

SEQ ID NO: 306403 - DNA, 30 bp, Artificial Sequence
  Synthetic oligonucleotide
aaccgaatatgggtccgccaattccgttga

SEQ ID NO: 306404 - DNA, 30 bp, Artificial Sequence
  Synthetic oligonucleotide
attgccctgtatctcgggagtacgcgttga

SEQ ID NO: 306405 - DNA, 30 bp, Artificial Sequence
  Synthetic oligonucleotide
ttacaaggatatgtagattcgctgcgttga

SEQ ID NO: 306406 - DNA, 30 bp, Artificial Sequence
  Synthetic oligonucleotide
atggttaggctgacacagcgagttcgttga

SEQ ID NO: 306407 - DNA, 30 bp, Artificial Sequence
  Synthetic oligonucleotide
cacttcctagtcctcattaaatttcgttga

SEQ ID NO: 306408 - DNA, 30 bp, Artificial Sequence
  Synthetic oligonucleotide
agagttatccgacgccccctgttaggttga

SEQ ID NO: 306409 - DNA, 30 bp, Artificial Sequence
  Synthetic oligonucleotide
ttgtatgacatgttcaatcttgacggttga

SEQ ID NO: 306410 - DNA, 30 bp, Artificial Sequence
  Synthetic oligonucleotide
gccgccattaacacttagagagtcggttga

SEQ ID NO: 306411 - DNA, 30 bp, Artificial Sequence
  Synthetic oligonucleotide
ggtaacccttctcctaatgagttcggttga

SEQ ID NO: 306412 - DNA, 30 bp, Artificial Sequence
  Synthetic oligonucleotide
gtcgcggcagggcggcggatagcgggttga

SEQ ID NO: 306413 - DNA, 30 bp, Artificial Sequence
  Synthetic oligonucleotide
taaacgtaaatggccagttacgggggttga

SEQ ID NO: 306414 - DNA, 30 bp, Artificial Sequence
  Synthetic oligonucleotide
tccgctggtagcgtcatgttaatgggttga

SEQ ID NO: 306415 - DNA, 30 bp, Artificial Sequence
  Synthetic oligonucleotide
attcgtcatatcggagggcggactggttga

SEQ ID NO: 306416 - DNA, 30 bp, Artificial Sequence
  Synthetic oligonucleotide
tcatgttcccctatattctcgaaatgttga

SEQ ID NO: 306417 - DNA, 30 bp, Artificial Sequence
  Synthetic oligonucleotide
ttacttccgtgaacttagacctattgttga

SEQ ID NO: 306418 - DNA, 30 bp, Artificial Sequence
  Synthetic oligonucleotide
ctacagatatcttatgctaacggttgttga

SEQ ID NO: 306419 - DNA, 30 bp, Artificial Sequence
  Synthetic oligonucleotide
acataaaggtgtaggtacacgccaatttga

SEQ ID NO: 306420 - DNA, 30 bp, Artificial Sequence
  Synthetic oligonucleotide
caccattatagggagcagggcaccatttga

SEQ ID NO: 306421 - DNA, 30 bp, Artificial Sequence
  Synthetic oligonucleotide
ctcatctaacgtgcgtgcgctaccatttga

SEQ ID NO: 306422 - DNA, 30 bp, Artificial Sequence
  Synthetic oligonucleotide
ttatgggcatcaattagtgagcgcatttga

SEQ ID NO: 306423 - DNA, 30 bp, Artificial Sequence
  Synthetic oligonucleotide
acaagatttatcatggaacgctctatttga

SEQ ID NO: 306424 - DNA, 30 bp, Artificial Sequence
  Synthetic oligonucleotide
tcgagaacttggggttcctgaatcctttga

SEQ ID NO: 306425 - DNA, 30 bp, Artificial Sequence
  Synthetic oligonucleotide
gctgccatacataagcagaggactctttga

SEQ ID NO: 306426 - DNA, 30 bp, Artificial Sequence
  Synthetic oligonucleotide
aatcaggttctttcgctgcagaacgtttga

SEQ ID NO: 306427 - DNA, 30 bp, Artificial Sequence
  Synthetic oligonucleotide
gatttaggtccatagacaactcacgtttga

SEQ ID NO: 306428 - DNA, 30 bp, Artificial Sequence
  Synthetic oligonucleotide
tggcagttggctaagtatacgtccgtttga

SEQ ID NO: 306429 - DNA, 30 bp, Artificial Sequence
  Synthetic oligonucleotide
gcgtataatttcggggtttgtgttgtttga

SEQ ID NO: 306430 - DNA, 30 bp, Artificial Sequence
  Synthetic oligonucleotide
gggttttcgaggcatgagattgttgtttga

SEQ ID NO: 306431 - DNA, 30 bp, Artificial Sequence
  Synthetic oligonucleotide
cttaatcgtcccttagttccataattttga

SEQ ID NO: 306432 - DNA, 30 bp, Artificial Sequence
  Synthetic oligonucleotide
agtgagtaagttttctctttgcgattttga

SEQ ID NO: 306433 - DNA, 30 bp, Artificial Sequence
  Synthetic oligonucleotide
atccttgattggtcaacggtcgagttttga

SEQ ID NO: 306434 - DNA, 30 bp, Artificial Sequence
  Synthetic oligonucleotide
tcggggtgcaatactgataggaacaaaata

SEQ ID NO: 306435 - DNA, 30 bp, Artificial Sequence
  Synthetic oligonucleotide
atggtgtctgtatctcaggcatacaaaata

SEQ ID NO: 306436 - DNA, 29 bp, Artificial Sequence
  Synthetic oligonucleotide
acaactcgtcgggcaacgcaagcaaaata

SEQ ID NO: 306437 - DNA, 30 bp, Artificial Sequence
  Synthetic oligonucleotide
taggactctggattttgttcacagaaaata

SEQ ID NO: 306438 - DNA, 30 bp, Artificial Sequence
  Synthetic oligonucleotide
gaaagcaactctaggcttgctacgaaaata

SEQ ID NO: 306439 - DNA, 30 bp, Artificial Sequence
  Synthetic oligonucleotide
aaaaatgagcatgcggtagttgcgaaaata

SEQ ID NO: 306440 - DNA, 30 bp, Artificial Sequence
  Synthetic oligonucleotide
aaggacgcagtaggtcgatgaaataaaata

SEQ ID NO: 306441 - DNA, 30 bp, Artificial Sequence
  Synthetic oligonucleotide
ggttcagcttacaggattgttgctaaaata

SEQ ID NO: 306442 - DNA, 30 bp, Artificial Sequence
  Synthetic oligonucleotide
gtagagtctgacctttatatggttaaaata

SEQ ID NO: 306443 - DNA, 30 bp, Artificial Sequence
  Synthetic oligonucleotide
taggttatataatatcaaagacaacaaata

SEQ ID NO: 306444 - DNA, 29 bp, Artificial Sequence
  Synthetic oligonucleotide
gtaggttcacaatgcctgcgctacaaata

SEQ ID NO: 306445 - DNA, 30 bp, Artificial Sequence
  Synthetic oligonucleotide
aagtattgctttttgcgggcacaccaaata

SEQ ID NO: 306446 - DNA, 30 bp, Artificial Sequence
  Synthetic oligonucleotide
cagtatctttactgtccgtcccgccaaata

SEQ ID NO: 306447 - DNA, 30 bp, Artificial Sequence
  Synthetic oligonucleotide
ggcataataaagaagctatacgtccaaata

SEQ ID NO: 306448 - DNA, 30 bp, Artificial Sequence
  Synthetic oligonucleotide
tttcgtaatgcctgcgacggattccaaata

SEQ ID NO: 306449 - DNA, 30 bp, Artificial Sequence
  Synthetic oligonucleotide
ataagacgtgggatgaagccggcgcaaata

SEQ ID NO: 306450 - DNA, 30 bp, Artificial Sequence
  Synthetic oligonucleotide
acgtgaatgtgcgggcatggttcgcaaata

SEQ ID NO: 306451 - DNA, 30 bp, Artificial Sequence
  Synthetic oligonucleotide
gtaaatcgtattatgtggacgtggcaaata

SEQ ID NO: 306452 - DNA, 30 bp, Artificial Sequence
  Synthetic oligonucleotide
gattcggtaacaaacgtcacactgcaaata

SEQ ID NO: 306453 - DNA, 30 bp, Artificial Sequence
  Synthetic oligonucleotide
gaagtctttggaacccaggagcatcaaata

SEQ ID NO: 306454 - DNA, 30 bp, Artificial Sequence
  Synthetic oligonucleotide
cgacgttgcatagtaaattggcatcaaata

SEQ ID NO: 306455 - DNA, 30 bp, Artificial Sequence
  Synthetic oligonucleotide
tccccaaggacgtttagtaaggatcaaata

SEQ ID NO: 306456 - DNA, 30 bp, Artificial Sequence
  Synthetic oligonucleotide
ccttcgcttaaatgtcggtaacgtcaaata

SEQ ID NO: 306457 - DNA, 30 bp, Artificial Sequence
  Synthetic oligonucleotide
gttgaaacccagtgttctagatgtcaaata

SEQ ID NO: 306458 - DNA, 30 bp, Artificial Sequence
  Synthetic oligonucleotide
gcaaagatgaatatcgtgaggtaagaaata

SEQ ID NO: 306459 - DNA, 30 bp, Artificial Sequence
  Synthetic oligonucleotide
gggactttaggctacagcacgtgagaaata

SEQ ID NO: 306460 - DNA, 30 bp, Artificial Sequence
  Synthetic oligonucleotide
cattacaggcaaaagaccgcggtagaaata

SEQ ID NO: 306461 - DNA, 30 bp, Artificial Sequence
  Synthetic oligonucleotide
attagagaatgcagaagattggtagaaata

SEQ ID NO: 306462 - DNA, 30 bp, Artificial Sequence
  Synthetic oligonucleotide
ctgaatgtctggtctggatagaacgaaata

SEQ ID NO: 306463 - DNA, 30 bp, Artificial Sequence
  Synthetic oligonucleotide
ggctagggaagttatatttaagccgaaata

SEQ ID NO: 306464 - DNA, 30 bp, Artificial Sequence
  Synthetic oligonucleotide
acttaactacgactgcggatttgcgaaata
